United States Patent Application Publication US 2026/0191920 A1 - sequence listing, part 16

SEQ ID NO: 72225 - protein, 234 aa, unidentified
  source 1..234: note = Sphingobium baderi
  REGION 1..234: note = tr|T0HMZ5|T0HMZ5_9SPHN S-adenosylmethionine:tRNA ribosyltransferase-isomerase (Fragment) OS=Sphingobium baderi LL03 OX=1114964 GN=L485_15280 PE=3 SV=1
MRVDLFDFDLPPERIALRPAAPRDSARLMLVDGNAPIEDRIVRDLPGLLRAGDVLVFNDTRVIPAQLEGMRGQAKIGATLHKRLGLRQWQAFLRNARRVRDGDRIDFGAGVTAIAGPRDGEGGVTLRFEGEEPVEVLLERAGRMPLPPYIASKRPTDERDRADYQTMFARKDGAVAAPTAALHFTPDLMAGLAAAGVATETLTLHVGAGTFLPVKAEDTDDHRMHAEWGRIDAA

SEQ ID NO: 72226 - protein, 344 aa, unidentified
  source 1..344: note = Sphingobium baderi
  REGION 1..344: note = tr|A0A0S3EY66|A0A0S3EY66_9SPHN S-adenosylmethionine:tRNA ribosyltransferase-isomerase; OS = Sphingobium baderi OX=1332080 GN=queA PE=3 SV=1
MRVDLFDFDLPPERIALRPASPRDSARLMLVAGDAPIADGVVRDLPALLRKGDVLVFNDTRVIPAQLEGIRGQAKVGATLHKRLGLRQWQAFLRNAKRVRDGDRIDFGAGVTAIAGPRDEDGGVTLSFEGDEPVELLLERAGRMPLPPYIASKRPTDERDRADYQTMFAQKDGAVAAPTAALHFTPELMEGLAKAGVATETLTLHVGAGTFLPVKADDTDDHRMHAEWGRIDAATADRLNAARAGGGRLIAVGTTSLRLLESAAGEDGVIRPFEDETRIFITPGYRFRAVDGLMTNFHLPKSTLFMLVSALMGRDRMQAAYAHAISQGYRFYSYGDSSLLLPQG

SEQ ID NO: 72227 - protein, 344 aa, unidentified
  source 1..344: note = Sphingobium barthaii
  REGION 1..344: note = tr|A0A4R6FN65|A0A4R6FN65_9SPHN S-adenosylmethionine:tRNA ribosyltransferase-isomerase; OS = Sphingobium barthaii OX=1054037 GN=queA PE=3 SV=1
MRVDLFDFDLPPDRIALRPASPRDSARLLLVSGDAPFQDRIVRDLPDLLRAGDVLVFNDTKVIPAQLEGERGQAKIGATLHKRLGLRQWQAFLRNAKRVRDGDRIDFGNGVSAVAGPRDEEGGVTLRFEGEEPVELLLERAGRMPLPPYIASKRPTDERDRSDYQTMFAREDGAVAAPTAALHFTTELMAVVEKAGIMTETLTLHVGAGTFLPVKAEDTDDHRMHAEWGRIDQATADRLNAARAAGGRLIAVGTTSLRLLESATGEDGIIRPFADETRIFITPGYRFRAVDGLMTNFHLPKSTLFMLVSALMGTEKMQSVYRHAIDGGYRFYSYGDSSLLLPKR

SEQ ID NO: 72228 - protein, 344 aa, Sphingobium chinhatense
  REGION 1..344: note = tr|W1L073|W1L073_9SPHN S-adenosylmethionine:tRNA ribosyltransferase-isomerase OS=Sphingobium chinhatense IP26 OX=1346790 GN=queA PE=3 SV=1
MRVDLFDFDLPPESIALRPASPRHSARLLLAAGDAPFQDRIVRDLPGLLRPGDVLVFNDTKVIPAQLEGMRGQAKIGATLHKRLGLRQWQAFLRNAKRVRDGDRIDFGNGVTAVAGPRDEEGGVMLRFEGEEPVELLLERAGRMPLPPYIASKRPTDERDRSDYQTMFAREDGAVAAPTAALHFTPELMTAIEKAGIGTETLTLHVGAGTFLPVKAEDTDDHHMHAEWGRIDQATAGRLNAARAAGGRLIAVGTTSLRLLESATGEDGIIRPFEDETRIFITPGYRFRAIDGLMTNFHLPKSTLFMLVSALMGTEKMQSVYRHAIDGGYRFYSYGDSSLLLPNP

SEQ ID NO: 72229 - protein, 37 aa, Sphingobium chlorophenolicum
  REGION 1..37: note = tr|A0A081RJF3|A0A081RJF3_SPHCR S-adenosylmethionine:tRNA ribosyltransferase-isomerase; OS = Sphingobium chlorophenolicum OX=46429 GN=queA_2 PE=3; SV = 1
MLVSALMGRERMQAAYDHAIAQGYRFYSYGDSSLLLP

SEQ ID NO: 72230 - protein, 344 aa, Sphingobium chlorophenolicum
  REGION 1..344: note = tr|A0A081RJE1|A0A081RJE1_SPHCR S-adenosylmethionine:tRNA ribosyltransferase-isomerase; OS = Sphingobium chlorophenolicum OX=46429 GN=queA_1 PE=3; SV = 1
MRVDLFDFDLPPENIALRPASPRDSARLLLVSGDAPFEDRIVRDLPGLLGPGDVLVFNDTKVIPAQLEGMRGEARIGATLHKRLSLRQWQAFLRNAKRVRDGDRIDFGAGVTAIAGPRDEDGGVTLSFEGEEPVEVLLERAGRMPLPPYIASKRPTDERDRSDYQTMFAREDGAVAAPTAALHFTPELTAELAKAGVGTETLTLHVGAGTFLPVKAEDTDDHRMHAEWGRIDQPTADRLNAARQAGGRLIAVGTTSLRLLESATDEHGVIHPFADETRIFITPGYRFRAVDGLMTNFHLPKSTLFMLVSALMGTEKMQSAYRHAIKEGYRFYSYGDSSLLLPEG

SEQ ID NO: 72231 - protein, 342 aa, Sphingobium chungbukense
  REGION 1..342: note = tr|A0A0M3ALT9|A0A0M3ALT9_9SPHN S-adenosylmethionine:tRNA ribosyltransferase-isomerase; OS = Sphingobium chungbukense OX=56193 GN=queA PE=3 SV=1
MRVDLFDFNLPPESIALRPASPRDSARLLLVAGEAPFGDRIVRDLPGLLRAGDVLVFNDTRVIPAQLEGMRGQAKIGATLHKRLGLRQWQAFLRNAKRVRDGDRIDFGAGVAALAGPRDEDGGVTLSFEGEEPVEVLLERAGRMPLPPYIASKRPTDERDRSDYQTMFAREDGAVAAPTAALHFTPELMVALEAAGVKTETLTLHVGAGTFLPVKADDTDDHRMHAEWGRIDQATADRLNAARKAGGRLIAVGTTSLRLLESAVGEDGIVRPFADETRIFITPGYRFRAVDGLMTNFHLPRSTLFMLVSALMGWERMQAVYAHAIAEGYRFYSYGDSSLLLP

SEQ ID NO: 72232 - protein, 344 aa, Sphingobium cloacae
  REGION 1..344: note = tr|A0A1E1F138|A0A1E1F138_9SPHN S-adenosylmethionine:tRNA ribosyltransferase-isomerase; OS = Sphingobium cloacae OX=120107 GN=queA PE=3 SV=1
MRVDLFDFDLPAERIALRPASPRDSARLMLVAGNAPIEDRIVRDLPGLLRAGDVLVFNDTRVIPAQLEGMRGAAKIGATLHKRLGLRQWQAFLRNAKRVRDGDRIDFGAGVTAIAGPRDEDGGVTLHFEGEEPVELLLERAGRMPLPPYIASKRSTDERDKSDYQTIFAREDGAVAAPTAALHFTPDLMAGLASAGIVTETLTLHVGAGTFLPVKADDTDDHRMHAEWGRIDAAAADRLNAARAAGGRLIAVGTTSLRLLESASGEDGVIRPFEDETRIFITPGYRFRAVDGLMTNFHLPRSTLFMLVSALMGRDRMQAAYAHAIAQGYRFYSYGDSSLLLPGE

SEQ ID NO: 72233 - protein, 346 aa, unidentified
  source 1..346: note = Sphingobium cupriresistens
  REGION 1..346: note = tr|A0A4V1WCC2|A0A4V1WCC2_9SPHN S-adenosylmethionine:tRNA ribosyltransferase-isomerase; OS = Sphingobium cupriresistens OX=1132417 GN=queA PE=3 SV=1
MRVELFDFDLPPENIALRPASPRDSARLLLAPGNGAMEDHVVRDLPGLLRAGDVLVFNDTKVIPAQLEGMRGEARIGATLHKRQGLRQWQAFLRNAKRVRAGDRIDFGAGVTAIAGPRDEDGGVTLDFEGDEPVEILLERAGRMPLPPYIASKRPTDERDRSDYQTMFARKDGAVAAPTAALHFTPDLMAALDQAGITTETLTLHVGAGTFLPVKADDTDDHRMHAEWGRIDAATVDRLNAARAAGGRLIAVGTTSLRLLESAVDKDGLIRPFADETRIFITPGYRFKAVDGLMTNFHLPKSTLFMLVSALMGTDRMRAVYGHAIETGYRFYSYGDSSLLLPQRSV

SEQ ID NO: 72234 - protein, 346 aa, unidentified
  source 1..346: note = Sphingobium czechense
  REGION 1..346: note = tr|A0A0J7XV86|A0A0J7XV86_9SPHN S-adenosylmethionine:tRNA ribosyltransferase-isomerase; OS = Sphingobium czechense LL01 OX=1420583 GN=queA PE=3 SV=1
MRVELFDFDLPPENIALRPASPRDSARLLLAPGNGAMEDHVVRDLPGLLRAGDVLVFNDTKVIPAQLEGMRGEARIGATLHKRQGLRQWQAFLRNAKRVRAGDRIDFGAGVTAIAGPRDEDGGVTLDFEGDEPVEILLERAGRMPLPPYIASKRPTDERDRSDYQTMFARKDGAVAAPTAALHFTPDLMAALDQAGITTETLTLHVGAGTFLPVKADDTDDHRMHAEWGRIDAATVDRLNAARAAGGRLIAVGTTSLRLLESAVDKDGLIRPFADETRIFITPGYRFKAIDGLMTNFHLPKSTLFMLVSALMGTDRMRAVYGHAIETGYRFYSYGDSSLLLPQRSV

SEQ ID NO: 72235 - protein, 356 aa, Sphingobium faniae
  REGION 1..356: note = tr|A0A1G4R6C9|A0A1G4R6C9_9SPHN S-adenosylmethionine:tRNA ribosyltransferase-isomerase; OS = Sphingobium faniae OX=570446 GN=queA PE=3 SV=1
MRVDLFDFDLPPERIALRPASPRDSARLMLVKGGAPIEDRIVRDLPDLLRAGDVLVFNDTRVIPAQLEGLRGQAKVGATLHKRLGLRQWQAFLRNARRVRDGDRIDFGAGVTAIAGPRDEDGGVTLNFEGDEPVELLLERAGRMPLPPYIASKRPTDERDRADYQTMFAQKDGAVAAPTAALHFTPDLMAALKAAGIGTETLTLHVGAGTFLPVKADDTDHHRMHAEWGRIDAAAADRLNAARAAGGRLIAVGTTSLRLLESATGEDGVIRPFADETRIFITPGYRFRAVDGLMTNFHLPRSTLFMLVSALMGRDRMQAAYAHAIVEGYRFYSYGDSSLLLPGGQDGKSASGPALG

SEQ ID NO: 72236 - protein, 344 aa, Sphingobium francense
  REGION 1..344: note = tr|A0A4Q4J9N2|A0A4Q4J9N2_9SPHN S-adenosylmethionine:tRNA ribosyltransferase-isomerase; OS = Sphingobium francense OX=332057 GN=queA PE=3 SV=1
MRVDLFDFDLPPESIALRPASPRHSARLLLAAGDAPFQDRIVRDLPGLLRPGDVLVFNDTKVIPAQLEGIRGQAKIGATLHKRLGLRQWQAFLRNAKRVRDGDRIDFGNGVTAVAGPRDEEGGVMLRFEGEEPVELLLERAGRMPLPPYIASKRPTDERDRSDYQTMFAREDGAVAAPTAALHFTPELMTAIEKAGIGTETLTLHVGAGTFLPVKVEDTDDHHMHAEWGRIDQATADRLNAARAAGGRLIAVGTTSLRLLESATGEDGIIRPFEDETRIFITPGYRFRAVDGLMTNFHLPKSTLFMLVSALMGTEKMQSVYRHAIDGGYRFYSYGDSSLLLPNP

SEQ ID NO: 72237 - protein, 344 aa, Sphingobium fuliginis
  REGION 1..344: note = tr|A0A4Q4J5K2|A0A4Q4J5K2_SPHSA S-adenosylmethionine:tRNA ribosyltransferase-isomerase; OS = Sphingobium fuliginis (strain ATCC 27551) OX=336203; GN = queA PE=3 SV=1
MRVDLFDFDLPPESIALRPASPRDAARLLLVPGDAPFQDRIVRDLPDLLRAGDVLVFNDTRVIPAQLEGMRGQARVGATLHKRLGLRQWQAFLRNAKRVRDGDWIDFGNGVTAVAGPRDEDGGVTLRFEGEEPVELLLERAGRMPLPPYIASKRPTDERDRSDYQTMFAREDGAVAAPTAALHFTPELMAAVEKAGVRTETLTLHVGAGTFLPVKADDTDDHRMHAEWGRIDQATADRLNAARAAGGRLIAVGTTSLRLLESATGEDGIIRPFADETRIFITPGYRFRAVDGLMTNFHLPKSTLFMLVSALMGTEKMLSVYRHAIDRGYRFYSYGDSSLLLPQP

SEQ ID NO: 72238 - protein, 344 aa, Sphingobium fuliginis
  REGION 1..344: note = tr|A0A5B8CGA2|A0A5B8CGA2_SPHSA S-adenosylmethionine:tRNA ribosyltransferase-isomerase; OS = Sphingobium fuliginis ATCC 27551 OX=1208342 GN=queA; PE = 3 SV=1
MRVDLFDFDLPPESIALRPASPRDAARLLLVPGDAPFQDRIVRDLPDLLRAGDVLVFNDTRVIPAQLEGMRGQAKVGATLHKRLGLRQWQAFLRNAKRVRDGDRIDFGNGVTAVAGPRDEDGGVTLCFEGEEPVELLLERAGRMPLPPYIASKRPTDERDRSDYQTMFAREDGAVAAPTAALHFTPELMAAVEKAGVRTETLTLHVGAGTFLPVKADDTDDHRMHAEWGRIDQATADRLNAARAAGGRLIAVGTTSLRLLESATGEDGIIRPFADETRIFITPGYRFRAVDGLMTNFHLPKSTLFMLVSALMGTEKMLSVYRHAIDRGYRFYSYGDSSLLLPQP

SEQ ID NO: 72239 - protein, 342 aa, Sphingobium herbicidovorans
  REGION 1..342: note = tr|A0A086PF89|A0A086PF89_SPHHM S-adenosylmethionine:tRNA ribosyltransferase-isomerase; OS = Sphingobium herbicidovorans (strain ATCC 700291 / DSM 11019 / NBRC 16415 / M H) OX=1219045 GN=queA PE=3 SV=1
MRVDLFDFDLPPENIALRPASPRDSARLLLVSGDASLRDHCVRDLPSLLRAGDVLVFNDTKVIPAQLEGMRGQAKVGATLHKRLGLRQWQAFLRNAKRVREGDRIDFGGGVTAIAGPRDDEGGVTLTFEGEEPVELLLERAGRMPLPPYIASKRPTDARDRSDYQTMFAREDGAVAAPTAALHFTPELMAALADAGVASETLTLHVGAGTFLPVKADDTDDHRMHAEWGRIDQATADRLNAARQKGCRLIAVGTTSLRLLESACDADGLVRPFADETRIFITPGYRFRAIDGLMTNFHLPRSTLFMLVSALMGRDRMQAAYAHAIATGYRFYSYGDSSLLLP

SEQ ID NO: 72240 - protein, 342 aa, unidentified
  source 1..342: note = Sphingobium hydrophobicum
  REGION 1..342: note = tr|A0A249MPF8|A0A249MPF8_9SPHN S-adenosylmethionine:tRNA ribosyltransferase-isomerase; OS = Sphingobium hydrophobicum OX=1673076 GN=queA PE=3 SV=1
MRVDLFDFDLPPENIALRPASPRDSARLLLVPGEGDFANLSVRDLPSLLRAGDVLVFNDTRVIPAQLEGMRGNARIGATLHKRLGLRQWQAFLRNAKRVRDGDRIDFGAGVTAIAGPRDDDGGVTLSFEGEEPVEILLERAGRMPLPPYIASKRPTDERDRADYQTMFAREDGAVAAPTAALHFTPELMAALAERGIVTETLTLHVGAGTFLPVKADDTDDHRMHAEWGRIEAATAERLNAARAAGGRLIAVGTTSLRLLESAAGEDGIIRAFADETRIFITPGYRFRAVDGLMTNFHLPKSTLFMLVSALMGTERMRAAYAHAIGAGYRFYSYGDSSLLLP

SEQ ID NO: 72241 - protein, 344 aa, Sphingobium indicum; identical to SEQ ID NO: 72236
  REGION 1..344: note = tr|A0A1L5BRL6|A0A1L5BRL6_SPHIB S-adenosylmethionine:tRNA ribosyltransferase-isomerase; OS = Sphingobium indicum (strain DSM 16412 / CCM 7286 / MTCC 6364 / B90A) OX=8611 09 GN=queA PE=3 SV=1

SEQ ID NO: 72242 - protein, 344 aa, Sphingobium japonicum
  REGION 1..344: note = tr|D4Z6E2|D4Z6E2_SPHJU S-adenosylmethionine:tRNA ribosyltransferase-isomerase OS=Sphingobium japonicum (strain DSM 16413 / CCM 7287 / MTCC 6362 / UT26 / NBRC 101211/ UT26S) OX=452662 GN=queA PE=3 SV=1
MRVDLFDFDLPPESIALRPASPRHSARLLLAAGDAPFQDRIVRDLPGLLRPGDVLVFNDTKVIPAQLEGMRGQAKIGATLHKRLGLRQWQAFLRNAKRVRDGDRIDFGNGVTAVAGPRDEEGGVMLRFEGEEPVELLLERAGRMPLPPYIASKRPTDERDRSDYQTMFAREDGAVAAPTAALHFTPELMTAIEKAGIGTETLTLHVGAGTFLPVKAEDTDDHHMHAEWGRIDQATAGRLNAARAAGGRLIAVGTTSLRLLESATGEDGIIRPFEDETRIFITPGYRFRAVDGLMTNFHLPKSTLFMLVSALMGTEKMQSVYRHAIDGGYRFYSYGDSSLLLPNP

SEQ ID NO: 72243 - protein, 342 aa, Sphingobium japonicum
  REGION 1..342: note = tr|N1MLJ2|N1MLJ2_9SPHN S-adenosylmethionine:tRNA ribosyltransferase-isomerase OS=Sphingobium japonicum BiD32 OX=1301087 GN=queA PE=3 SV=1
MRVDLFDFDLPPENIALRPASPRDSARLLLVPGEGDFADLSVRDLPSLLRAGDVLVFNDTRVIPAQLEGMRGQARIGATLHKRLGLRQWQAFLRNAKRVRDGERIDFGAGVTAIAGPRDDDGGVTLSFEGEEPVEVLLERAGRMPLPPYIASKRATDERDRTDYQTMFAREDGAVAAPTAALHFTPELMAALAERGITTETLTLHVGAGTFLPVKADDTDDHRMHAEWGRIEAATADRLNAARAAGGRLIAVGTTSLRLLESAAGEDGMIRAFADETRIFITPGYRFRAVDGLMTNFHLPKSTLFMLVSALMGTERMRAAYDHAIGSGYRFYSYGDSSLLLP

SEQ ID NO: 72244 - protein, 344 aa, Sphingobium lactosutens
  REGION 1..344: note = tr|T0HWA7|T0HWA7_9SPHN S-adenosylmethionine:tRNA ribosyltransferase-isomerase OS=Sphingobium lactosutens DS20 OX=1331060 GN=queA PE=3 SV=1
MRVDLFDFDLPPENIALRPASPRDSARLLVAAGASGVDDRIVRDLPSLLRAGDMLVFNDTRVIPAQLEGRRGEARIGATLHKRLGLRHWQAFLRNAKRVRDGDRIDFGAGVTAIAGARDAEGGVTLDFEGEEPVEILLERAGTMPLPPYIASKRPTDEQDRSDYQTMFAREDGAVAAPTAALHFTPELMDAIAAAGVLTQTLTLHVGAGTFLPVKAEDTQDHRMHAEWGRIDAEAADRMNAARAAGGRVIAVGTTSLRLLESAAGEDGVIRPFADETRIFITPGYRFRAVDGLMTNFHLPKSTLFMLVSALMGRERMQGIYAHAIAQGYRFYSYGDSSLLLPHE

SEQ ID NO: 72245 - protein, 346 aa, unidentified
  source 1..346: note = Sphingobium limneticum
  REGION 1..346: note = tr|A0A5J5H142|A0A5J5H142_9SPHN tRNA preQ1(34) S-adenosylmethionine ribosyltransferase-isomerase QueA; OS = Sphingobium limneticum OX=1007511 GN=queA PE=4 SV=1
MRVDLFDFDLPPENIALRPASPRDSARMLLVPGDGAMQDRIVRDLPSMLRAGDVLVFNDTKVIPAQLEGMRGEARIGATLHKRQGLRQWQAFLRNAKRVRAGDRIDFGAGVTAIAGPRDDDGGVTLDFEGDEPVEVLLERAGRMPLPPYIASKRPTDERDRSDYQTMFAREDGAVAAPTAALHFTPELMAAIADAGIATETLTLHVGAGTFLPVKADDTDDHRMHAEWGRIDAATADRLNAARAAGGRLIAVGTTSLRLLESAAGEDDVIRPFADETRIFITPGYRFKAVDGLMTNFHLPKSTLFMLVSALMGTERMQAVYGHAIGTGYRFYSYGDSSLLLPDRSV

SEQ ID NO: 72246 - protein, 344 aa, Sphingobium lucknowense; identical to SEQ ID NO: 72228
  REGION 1..344: note = tr|A0A081T0V9|A0A081T0V9_9SPHN S-adenosylmethionine:tRNA ribosyltransferase-isomerase; OS = Sphingobium lucknowense F2 OX=1450518 GN=queA PE=3 SV=1

SEQ ID NO: 72247 - protein, 342 aa, unidentified; identical to SEQ ID NO: 72222
  source 1..342: note = Sphingobium paulinellae
  REGION 1..342: note = tr|A0A5J5I186|A0A5J5I186_9SPHN tRNA preQ1(34) S-adenosylmethionine ribosyltransferase-isomerase QueA; OS = Sphingobium paulinellae OX=2048545 GN=queA PE=4 SV=1

SEQ ID NO: 72248 - protein, 342 aa, Sphingobium quisquiliarum
  REGION 1..342: note = tr|T0H887|T0H887_9SPHN S-adenosylmethionine:tRNA ribosyltransferase-isomerase OS=Sphingobium quisquiliarum P25 OX=1329909 GN=queA PE=3 SV=1
MRVDLFDFDLPPESIALRPASPRDSARLLRVAGDAPFEDRIVRDLPSMLRPGDVLVFNDTKVIPAQLEGMRGEARVGATLHKRLGLRQWQAFLRNAKRVRDGDRIDFGAGVTAIAGPRDEDGGVTLRFEGEEPVELLLERAGRMPLPPYIASKRPTDARDRSDYQTMFAREDGAVAAPTAALHFTPELMAALGKAGVQAETLTLHVGAGTFLPVKADDTDDHRMHAEWGRIEQDTADRLNAARARGGRLIAVGTTSLRLLESAADEEGRIHPFADETRIFITPGYRFRAVDGLMTNFHLPKSTLFMLVSALMGCERMQAAYAHAIAQGYRFYSYGDSSLLLP

SEQ ID NO: 72249 - protein, 344 aa, Sphingobium sp.
  REGION 1..344: note = tr|A0A2A3MWM0|A0A2A3MWM0_9SPHN S-adenosylmethionine:tRNA ribosyltransferase-isomerase; OS = Sphingobium sp. D43FB OX=2017595 GN=queA PE=3 SV=1
MRVDLFDFDLPPENIALRPASPRDAARLLLVPGAGDFADLTVRDLPGLLRAGDVLVFNDTRVIPAQLEGTRGEARIGATLHKRLGLRQWQAFLRNAKRVRDGDRIDFGAGVTAIAGPRDEDGGVTLDFEGTEAVEVLLERAGRMPLPPYIASKRPTDERDVSDYQTMFAREDGAVAAPTAALHFTPDLMAALAQTGVLTETLTLHVGAGTFLPVKADDTDDHRMHAEWGRIEPATADRLNAARAAGGRLIAVGTTSLRLLESAASEDGIIHPFADETRIFITPGYRFRAIDGLMTNFHLPKSTLFMLVSALMGRDRMQAAYAHAIGSGYRFYSYGDSSLLLPAG

SEQ ID NO: 72250 - protein, 342 aa, Sphingobium sp.
  REGION 1..342: note = tr|A0A013XPA9|A0A013XPA9_9SPHN S-adenosylmethionine:tRNA ribosyltransferase-isomerase; OS = Sphingobium sp. Ant17 OX=1461752 GN=queA PE=3 SV=1
MRVDLFDFDLPPENIALRPASPRDAARLLLVPGAGDFTDATVRDLPGLLRAGDMLVFNDTRVIPAQLEGMRGEARIGATLHKRLGLRQWQAFLRNAKRVRDGDRIDFGAGVTAIAGPRDEDGGVTLDFEGTEPVEVLLERAGRMPLPPYIASKRPTDERDVSDYQTMFAREDGAVAAPTAALHFTPDLMAMLAQAGVLTETLTLHVGAGTFLPVKADDTDDHRMHAEWGRIDPATADRLNAARAAGGRLIAVGTTSLRLLESAASEDGIIHPFADETRIFITPGYRFRAIDGLMTNFHLPKSTLFMLVSALMGTDRMKAAYGHAIENGYRFYSYGDSSLLLP

SEQ ID NO: 72251 - protein, 342 aa, Sphingobium ummariense
  REGION 1..342: note = tr|T0K5W8|T0K5W8_9SPHN S-adenosylmethionine:tRNA ribosyltransferase-isomerase OS=Sphingobium ummariense RL-3 OX=1346791 GN=queA PE=3 SV=1
MRIDLFDFDLPPDRIALRPASPRDSARMLLVDGDRPFQDRTVRDLPSLLRRGDVLVFNDTRVIPAQLEGMRGEARIGATLHKRLGLRQWQAFLRNAKRVREGDRIDFGADVTAIAGPRDEDGCVTLDFEGDEPVELLLERAGRMPLPPYIASKRPTDERDRSDYQTMFAREDGAVAAPTAALHFTPELMARLVAAGIGSETLTLHVGAGTFLPVKADDTDDHRMHAEWGRIDAATADRLNAVRASGGRLIAVGTTSLRLLESAADESGIIRPFADETRIFITPGYRFRAVDGLMTNFHLPKSTLFMLVSALMGLERMHAAYAHAIAQGYRFYSYGDSSLLLP

SEQ ID NO: 72252 - protein, 344 aa, Sphingobium wenxiniae
  REGION 1..344: note = tr|A0A562KI44|A0A562KI44_SPHWJ S-adenosylmethionine:tRNA ribosyltransferase-isomerase; OS = Sphingobium wenxiniae (strain DSM 21828 / JZ-1); OX = 595605 GN=queA PE=3 SV=1
MRVDLFDFDLPPERIALRPAAPRDSARLMLVDGNAPIEDRIVRDLPGLLRAGDVLVFNDTRVIPAQLEGMRGQAKIGATLHKRLGLRQWQAFLRNARRVRDGDRIDFGAGVTAIAGPRDGEGGVTLRFEGEEPVEVLLERAGRMPLPPYIASKRPTDERDRADYQTMFARKDGAVAAPTAALHFTPDLMAGLAAAGVATETLTLHVGAGTFLPVKAEDTDDHRMHAEWGRIDAAAAARLNAARAAGGRLIAVGTTSLRLLESAAGEDGLVRPFEDETRIFITPGYRFRAVDGLMTNFHLPRSTLFMLVSALMGRDRMQAAYAHAIAAGYRFYSYGDSSLLLPEG

SEQ ID NO: 72253 - protein, 342 aa, Sphingobium xenophagum
  REGION 1..342: note = tr|A0A401J0S9|A0A401J0S9_SPHXE S-adenosylmethionine:tRNA ribosyltransferase-isomerase; OS = Sphingobium xenophagum OX=121428 GN=queA PE=3 SV=1
MRVDLFDFDLPPENIALRPASPRDSARLLLVPGEGDFADLSVRDLPSLLRAGDVLVFNDTRVIPAQLEGMRGNARIGATLHKRLGLRQWQAFLRNAKRVRDGDRIDFGAGVTAIAGPRDDDGGVTLSFEGEEPVEILLERAGRMPLPPYIASKRPTDERDRADYQTMFAREDGAVAAPTAALHFTPELMAALAERGVATETLTLHVGAGTFLPVKADDTDDHRMHAEWGRIEAATAERLNAARAAGGRLIAVGTTSLRLLESAAGEDGIIRAFADETRIFITPGYRFRAVDGLMTNFHLPKSTLFMLVSALMGTERMRAAYAHAIGAGYRFYSYGDSSLLLP

SEQ ID NO: 72254 - protein, 344 aa, Sphingobium yanoikuyae
  REGION 1..344: note = tr|A0A085K351|A0A085K351_SPHYA S-adenosylmethionine:tRNA ribosyltransferase-isomerase; OS = Sphingobium yanoikuyae OX=13690 GN=queA PE=3 SV=1
MRVDLFDFDLPAENIALRPASPRDSARLLLVPGGGAMEDRIVRDLPSLLRAGDVLVFNDTRVIPAQLEGMRGEARIGATLHKRLGLRQWQAFLRNAKRVRDGDRIDFGAGVTAIAGPRDEDGGVTLDFEGEEPVEILLERAGRMPLPPYIASKRATDERDRSDYQTMFAREDGAVAAPTAALHFTPDLTAALAQAGVLTETLTLHVGAGTFLPVKADDTDDHRMHAEWGRIDQDTADRLNAARAADGRIIAVGTTSLRLLESATGEDGVIRPFADETRIFITPGYRFRAIDGLMTNFHLPKSTLFMLVSALMGTEKMQSVYKHAIEEGYRFYSYGDSSLLLPER

SEQ ID NO: 72255 - protein, 342 aa, Sphingobium yanoikuyae
  REGION 1..342: note = tr|A0A0J9D0W4|A0A0J9D0W4_SPHYA S-adenosylmethionine:tRNA ribosyltransferase-isomerase; OS = Sphingobium yanoikuyae OX=13690 GN=queA PE=3 SV=1
MRVDLFDFDLPAENIALRPASPRDSARLLLVPGDGAMEDRIVRDLPSLLRAGDVLVFNDTRVIPAQLEGMRGEARIGATLHKRLGLRQWQAFLRNAKRVRDGDRIDFGAGVTAIAGPRDEDGGVTLDFEGEEPVEILLERAGRMPLPPYIASKRATDERDRSDYQTMFAREDGAVAAPTAALHFTPDLTAALAQAGVLTETLTLHVGAGTFLPVKADDTDDHRMHAEWGRIDQDTADRLNAARAAGGRIIAVGTTSLRLLESATGEDGVIRPFADETRIFITPGYRFRAIDGLMTNFHLPKSTLFMLVSALMGRDRMQQVYAHAIATGYRFYSYGDSSLLLP

SEQ ID NO: 72256 - protein, 346 aa, unidentified
  source 1..346: note = Sphingomonadaceae bacterium
  REGION 1..346: note = tr|A0A257DKS9|A0A257DKS9_9SPHN S-adenosylmethionine:tRNA ribosyltransferase-isomerase; OS = Sphingomonadaceae bacterium PASS1 OX=2015579 GN=queA; PE = 3 SV=1
MRVDLFDFELPPERIALRPVSPRDSARMLCVGGESGLVDAYVSDLPQKLRKGDCLIFNDTRVIPAQLTARRGDATIGATLHKRIDLRRWQAFIRNAKRLHIGDCIDFGQGVLAKAEERHDDGSFTLFFEGDEPVEVLLHRAGTMPLPPYIAGKRPTDARDAEDYQTMFAQKDGAVAAPTASLHFTPELMQAVHDAGIETATLTLHVGAGTFLPVKVDDTASHRMHSEWGSIDAETAYRLNSIRENGGRLIAVGTTSLRLVESAADQNGMVHPFEGDTDIFITPGYRFKAINGLMTNFHLPKSTLFMLVSALMGRETMQAAYVHAIAEEYRFYSYGDSSLLLPQHSA

SEQ ID NO: 72257 - protein, 344 aa, unidentified
  source 1..344: note = Sphingomonadaceae bacterium
  REGION 1..344: note = tr|A0A2D8FG86|A0A2D8FG86_9SPHN S-adenosylmethionine:tRNA ribosyltransferase-isomerase; OS = Sphingomonadaceae bacterium OX=1930536 GN=queA PE=3 SV=1
MKVDLFDFELPPERIALRPARPRDAARMLVVRSAGPFEDRGVRDLPEMLRAGDVLVFNDTRVIPAQLEGRRGEARIGATLHKRIDLRRWQAFVRNAKRLRIGDVVEFGGGVAATAEDRLEDGSFVLAFAGEEPVEILLERAGRMPLPPYIAGKRATDAQDREDYQTMFAAEDGAVAAPTAALHFTPELIGALDAAGIGRETLTLHVGAGTFLPVKADDTSDHAMHSEWGRIEPEAAARLNAVRAAGGRVIAVGTTSLRLLESATGEDGIIGAFAGDTDIFITPGYRFRAVDGLMTNFHLPKSTLMMLVSALMGRERMMDAYAHAIDSEYRFYSYGDSSLLLPHD

SEQ ID NO: 72258 - protein, 349 aa, unidentified
  source 1..349: note = Sphingomonadales bacterium
  REGION 1..349: note = tr|A0A258J738|A0A258J738_9SPHN S-adenosylmethionine:tRNA ribosyltransferase-isomerase; OS = Sphingomonadales bacterium 32-65-25 OX=1970594 GN=queA; PE = 3 SV=1
MLVDDFDFHLPEDRIALRPVIPRDSARLLTVRGRDVGVLDDLHFSDLPGQLRPGDVLVVNDTRVIPAQLFAKVGEAAIGVTLHKRETGNRWWSFVKNARRLKPGTRVDFSQGGSAMLIGEVIEKADEGGVLWQFETAGQPLESALHSVGEMPLPPYIARRRDIDAQDFSDYQTLHAAKDGAVAAPTAGLHFTPRLWSALHAAGISRETVTLHVGAGTFLPVKADRIEDHQMHAEWGSIDDQTALRLNAARATGGRIIAVGTTSLRLLESAADKGGAIRAFSGDTSIFITPGYRWKAIDGLITNFHLPRSTLFMLVSALMGLDVMRKAYAHAIENEYRFYSYGDGSLLLP

SEQ ID NO: 72259 - protein, 341 aa, unidentified
  source 1..341: note = Sphingomonadales bacterium
  REGION 1..341: note = tr|A0A4Q2ZD29|A0A4Q2ZD29_9SPHN S-adenosylmethionine:tRNA ribosyltransferase-isomerase; OS = Sphingomonadales bacterium OX=1978525 GN=queA PE=3 SV=1
MNVDLFDFELPAERIALRPASPRDSARMLVVERGAMREAVVGDLPAMLRAGDCLVFNDTRVIPAQLEGVRGAAKIGATLHKREGPRRWRAFIRGAKKLREGDAIDFGQGVSAIASDRGEDGSFALDFAGDEPVEVLLHRCGRMPLPPYIASKRPTDARDADDYQTMFANEPGAVAAPTAALHFTPSLMTALESAGIGHATLTLHVGAGTFLPVKAEDTAEHRMHAEWGRIDAATADRLNAVRKNGGRVIAVGTTSLRLIESATGEDGVIQRFEGDTAIFITPGYRFKGVDGLITNFHLPRSTLFMLVSALMGLETMQAAYAHAIENDYRFYSYGDASLLLP

SEQ ID NO: 72260 - protein, 341 aa, Sphingomonas adhaesiva
  REGION 1..341: note = tr|A0A2A4I7C7|A0A2A4I7C7_9SPHN S-adenosylmethionine:tRNA ribosyltransferase-isomerase; OS = Sphingomonas adhaesiva OX=28212 GN=queA PE=3 SV=1
MLVDLFDFALPPERIALRPAAPRDTARMLVVTPDALADRIVRDLPSQLRRGDLLVFNDTRVIPAQLEGTRGDARIGATLHKREGPRRWRAFVRNARRLRDGDLIDFGAGVAAAARDRADDGSWALEFAGDEPVELLLERAGRMPLPPYIAGKRATDARDADDYQTMFANEPGAVAAPTAALHFTPDLLAALAAAGVDHATLTLHVGAGTFLPVKADDTADHRMHAEWGRIDAATAERLNTVRAAGGRVIAVGTTSLRLIESAAGDDGVIRPFEGDTAIFITPGYRFRGIDGLMTNFHLPRSTLFMLVSALMGLERMQAAYAHAITRDYRFYSYGDASLLLP

SEQ ID NO: 72261 - protein, 351 aa, Sphingomonas aerolata
  REGION 1..351: note = tr|A0A2T4YQJ1|A0A2T4YQJ1_9SPHN S-adenosylmethionine:tRNA ribosyltransferase-isomerase; OS = Sphingomonas aerolata OX=185951 GN=queA PE=3 SV=1
MNVDLFDFDLPTDRIALRPETPRDAARLLVLDGDATRDLRVTDLAGQLRRGDLLVFNDTRVIPAQLEGRRAGIEQDGQLSSGAKIGATLHKREGPRRWRAFIRNARRLRDGDPIDFGNGVVARTVDRAEDGSYALEFAGDEPIELLLDRAGRMPLPPYIAAKRPTDARDAEDYQTMFAAEPGAVAAPTAALHFTPSVMAALEAAGIAKATLTLHVGAGTFLPMKVDDTDDHQMHAEWGRIDATTADQLNAVRAAGGRVIAVGTTSLRLIESATGNDGVIRPFEGDTAIFITPGYRFKGIDGLMTNFHLPRSTLFMLVSALMGRERMQAAYVHAIAAKYRFYSYGDASLLLP

SEQ ID NO: 72262 - protein, 344 aa, Sphingomonas aquatilis
  REGION 1..344: note = tr|A0A511Q7K8|A0A511Q7K8_9SPHN S-adenosylmethionine:tRNA ribosyltransferase-isomerase; OS = Sphingomonas aquatilis NBRC 16722 OX=1219039 GN=queA; PE = 3 SV=1
MKVELFDFELPAERIALRPASPRDSARLLVLDGDATRDRIVRDLPAELRAGDCLVFNDTRVIPAQLEGRRGEAKIGATLHKREGPRRWRAFVRNARRLRDGDSIDFGSGVTAIATDRGEDGSLALYFAGDEPVELLLERAGRMPLPPYIAAKRPTDARDADDYQTMFAAEPGAVAAPTAALHFTPDLIAALDAAGIGHETLTLHVGAGTFLPVKADDTDDHRMHAEWGRIDAATADRLNAVRARGGRVIAVGTTSLRLIESASGEDQVIRPFEGDTAIFITPGYTFRGIDGLLTNFHLPKSTLFMLVSALMGRERMQAAYAHAIAEGYRFYSYGDASLLLPARL

SEQ ID NO: 72263 - protein, 341 aa, Sphingomonas aurantiaca
  REGION 1..341: note = tr|A0A2T5GM85|A0A2T5GM85_9SPHN S-adenosylmethionine:tRNA ribosyltransferase-isomerase; OS = Sphingomonas aurantiaca OX=185949 GN=queA PE=3 SV=1
MNVDLFDFDLPPANIALRPAAPRDAARMLVLEGDATRDAGVADLPSSLRRGDILVFNDTRVIPAQLDGRRGDAKIGATLHKREGPRRWRAFIRNARRLRDGDVIDFGNGVSAAAVDREDDGSYALVFAGDEPVELLLERAGHMPLPPYIAGKRPTDERDADDYQTMFAAEPGAVAAPTAALHFTPALMAALEAAGIGHATLTLHVGAGTFLPVKATDTTEHRMHAEWGRIDAATADRLNAVRAGGGRVIAVGTTSLRLIESATGEDDVILPFDGDTAIFITPGYRFRGIDGLMTNFHLPRSTLFMLVSALMGRERMQAAYAHAIAGGYRFYSYGDASLLLP

SEQ ID NO: 72264 - protein, 345 aa, unidentified
  source 1..345: note = Sphingomonas carotinifaciens
  REGION 1..345: note = tr|A0A1G7L2K5|A0A1G7L2K5_9SPHN S-adenosylmethionine:tRNA ribosyltransferase-isomerase; OS = Sphingomonas carotinifaciens OX=1166323 GN=queA PE=3; SV = 1
MNVDLFDFALPNDRIALHPAAPRDAARMLVLDGEATRDAEVRDLPGCLRAGDLLVFNDTRVIPAQLEGRRGEARIGATLHKREGPRRWRAFIRNAKRLRDGDVIDFGAGVAATAGERGEDGSFVLDFAGDEPVELLLERAGRMPLPPYIAQKRGIEARDADDYQTMFANEPGAVAAPTAALHFTPGLIAALEAAGIGHATLTLHVGAGTFLPVKADDTADHRMHAEWGRIDQATADRLNATRAAGGRIIAVGTTSLRLIESASGEDRIVRPFEGDTAIFITPGYRFRGIDGLMTNFHLPRSTLFMLVSALMGLERMQAAYAHAIAAGYRFYSYGDASLLLPGDDA

SEQ ID NO: 72265 - protein, 341 aa, Sphingomonas changbaiensis
  REGION 1..341: note = tr|A0A0E9MSE7|A0A0E9MSE7_9SPHN S-adenosylmethionine:tRNA ribosyltransferase-isomerase; OS = Sphingomonas changbaiensis NBRC 104936 OX=1219043; GN = queA PE=3 SV=1
MKVDLFDFDLPPDRIALRPAEPRDSAKLLLLDGDRTADHIVRDLPTLLRPGDCLVFNDTRVIPAQLEGQRGDARIGATLHKRADLRRWHAFVRNAKRLRIGDTIDFPAQVQAVVEARNADGSILLRFLGDEPVELLLERAGRMPLPPYIASKREADERDRADYQTMFAREEGAVAAPTAALHFTPALMAALADAGVGHETLTLHVGAGTFLPVKAEDTADHQMHAEWGRIDVATADRLNAVRARGGRVIAVGTTSLRLLESAATEDGCIQPFEGDTAIFITPGYRFRAIDGLMTNFHLPKSTLFMLVSALMGRERMLAAYEHAIAGGYRFYSYGDASLLLP

SEQ ID NO: 72266 - protein, 345 aa, Sphingomonas desiccabilis
  REGION 1..345: note = tr|A0A4Q2IZR3|A0A4Q2IZR3_9SPHN S-adenosylmethionine:tRNA ribosyltransferase-isomerase; OS = Sphingomonas desiccabilis OX=429134 GN=queA PE=3 SV=1
MNVDDFDFELPAERIALRPAAPRDAARMLVLDGATTRDAVVTDLPDALRPGDLLVFNDTRVIPAQLEGRRGEARIGATLHKREGPRAWRAFVRNARRLRDGDVIDFGAGVTAAAGERGDDGSVLLEFAGDEPVELLLERAGRMPLPPYIASKRSTDARDAEDYQTLFAREAGAVAAPTAALHFTPGLMAALEARGIGHATLTLHVGAGTFLPVKASDTDEHRMHAEWGRLDAETAERLNQVRRDGGRVIAVGTTSLRLIESASGEDGIIRPFEGDTAIFITPGYRFRGIDGLMTNFHLPRSTLFMLVSALMGLERMQAAYAHAIASGYRFYSYGDASLLLPARPA

SEQ ID NO: 72267 - protein, 341 aa, Sphingomonas dokdonensis
  REGION 1..341: note = tr|A0A245ZNG6|A0A245ZNG6_9SPHN S-adenosylmethionine:tRNA ribosyltransferase-isomerase; OS = Sphingomonas dokdonensis OX=344880 GN=queA PE=3 SV=1
MNVDQFDFDLPPARIALRPAAPRDAARLLVLDSDGTRDRTVADLPDALRPGDLLVFNDTRVIPAQLEGTRGAAKIGATLHKREGPRRWRAFIRNAKRLRDGDPIDFGAGVMAIASDRAEDGSFALDFAGDEPVELLLERAGRMPLPPYIAAKRPLDARDAQDYQTMFAREAGAVAAPTAALHFTPALMAALDAAGIGHATLTLHVGAGTFLPVKAADTDDHQMHAEWGRIDQATADRLNAVRRDGGRIIAVGTTSLRLIESAAGEDRVVRPFEGDTSIFITPGYRFRGIDGLLTNFHLPRSTLFMLVSALMGLDRMQAAYAHAVQSEYRFYSYGDASLLLP

SEQ ID NO: 72268 - protein, 342 aa, unidentified
  source 1..342: note = Sphingomonas edaphi
  REGION 1..342: note = tr|A0A418Q1F1|A0A418Q1F1_9SPHN S-adenosylmethionine:tRNA ribosyltransferase-isomerase; OS = Sphingomonas edaphi OX=2315689 GN=queA PE=3 SV=1
MRVDLFDFDLPPDRIALRPARPRDAARLLLVTGEVMSDRTVLDLPGLLQPGDVLVFNDTRVIPAQLEGKRGDATVGATLHKREDLRSWWAFVRNARRVRDGDLIDFGNDVRASAVCRDEQGAILLHFHGDEPVELLLERAGEMPLPPYIASKRGIDDSDRADYQTMFARKEGAVAAPTAALHFTERLLAAIEERGIKCETLTLHVGAGTFLPVKADDTTAHRMHSEWGQIDRATADRLNAARSAGGRLVAVGTTSLRLLESAAGEDGIINAFEGDTAIFITPGYKFRAVDGLMTNFHLPKSTLFMLVSALMGLDVMKRAYAHAIEHDYRFYSYGDSSLLLPA

SEQ ID NO: 72269 - protein, 343 aa, unidentified
  source 1..343: note = Sphingomonas elodea
  REGION 1..343: note = tr|A0A495F0T1|A0A495F0T1_SPHEL S-adenosylmethionine:tRNA ribosyltransferase-isomerase; OS = Sphingomonas elodea OX=179878 GN=queA PE=3 SV=1
MNVDLFDFELPNERIALRPAAPRDSARLLVLDGAETRDAIVRDLAAQLRPGDCLVFNDTRVIPAQLEGTRGEARIGATLHKREGPRRWRAFIRNAKRLREGDAIDFGPDAIAIASDRAEDGSFALDFQGDEPVELLLERCGRMPLPPYIASKRPTDARDANDYQTMFAAEPGAVAAPTAALHFTPELMASLEAAGIGHTTLTLHVGAGTFLPVKAEDTADHKMHAEWGRITPEVAERLNAVRAAGNRIIAVGTTSLRLLESAADEDRVIQPFEGDTAIFITPGYRFKGVDGLVTNFHLPRSTLFMLVSALMGLDRMQAAYAHAIETGYRFYSYGDSSLLLPAR

SEQ ID NO: 72270 - protein, 341 aa, unidentified
  source 1..341: note = Sphingomonas endophytica
  REGION 1..341: note = tr|A0A147I6H5|A0A147I6H5_9SPHN S-adenosylmethionine:tRNA ribosyltransferase-isomerase; OS = Sphingomonas endophytica OX=869719 GN=queA PE=3 SV=1
MNVDLFDFALPPERIALRPAVPRDAARMLVVTPEGLADRIVSDLPSQLRPGDLLVFNDTRVIPAQLEGTRGHARIGATLHKREGPRRWRAFVRNARRLRDGDAIDFGQGVTATAHDRAEDGSWALDFAGDEPVELLLERAGRMPLPPYIAGKRDTDARDADDYQTMFAAEPGAVAAPTAALHFTPALLAALDAAGIGHATLTLHVGAGTFLPVKAEDTADHRMHAEWGRIDAATADRLNATRAGGGRVIAVGTTSLRLIESATDAQGVIRPFDGDTSIFITPGYRFRGIDGLMTNFHLPRSTLFMLVSALMGLDRMQAAYAHAIGNDYRFYSYGDASLLLP

SEQ ID NO: 72271 - protein, 341 aa, Sphingomonas faeni
  REGION 1..341: note = tr|A0A2T5UBS8|A0A2T5UBS8_9SPHN S-adenosylmethionine:tRNA ribosyltransferase-isomerase; OS = Sphingomonas faeni OX=185950 GN=queA PE=3 SV=1
MNVDLFDFDLPTDNIALRPAAPRDAARMLVLEGDATQDAGVSDLPSLLRRGDMLVFNDTRVIPAQLDGRRGDAKIGATLHKREGPRRWRAFIRNARRLRDGDVIEFGNGVSAAAVDREDDGSYALVFAGDEPVELLLERAGHMPLPPYIAGKRPTDERDADDYQTMFASEPGAVAAPTAALHFTPKLMAALEAAGIGHATLTLHVGAGTFLPVKAADTTEHKMHAEWGRIDAATADRLNAVRANGGRVIAVGTTSLRLIESATGEDDVIRPFDGDTAIFITPGYRFRGIDGLMTNFHLPRSTLFMLVSALMGRERMQAAYAHAIAGKYRFYSYGDASLLLP

SEQ ID NO: 72272 - protein, 341 aa, Sphingomonas fennica
  REGION 1..341: note = tr|A0A2T4HPU0|A0A2T4HPU0_9SPHN S-adenosylmethionine:tRNA ribosyltransferase-isomerase; OS = Sphingomonas fennica OX=114404 GN=queA PE=3 SV=1
MRVDLFDFDLPAERIALRPASPRDSARMLVVDAAGMADRIVRDLGDILRPGDILVFNDTRVIPAQLEGRRGEARIGATLHKREGPRAWRAFVRNAKRLRDGDRVEFGAGVAAIAASRGDDGSILLEFEGDEPVELLLERAGRMPLPPYIAGKRPADERDRDDYQTMFAAEPGAVAAPTAALHFTPGLIASLAARGVDHVTLTLHVGAGTFLPVKAEDTDDHRMHAEYGRIDAATADRLNAARAAGGRVIAVGTTSLRLIESAAGEDGIIRPFDGDTAIFITPGYRFRGIDGLMTNFHLPKSTLFMLVSALMGRERMQAAYAHAIAEGYRFYSYGDASLLIP

SEQ ID NO: 72273 - protein, 345 aa, unidentified
  source 1..345: note = Sphingomonas gei
  REGION 1..345: note = tr|A0A4S1XFR6|A0A4S1XFR6_9SPHN S-adenosylmethionine:tRNA ribosyltransferase-isomerase; OS = Sphingomonas gei OX=1395960 GN=queA PE=3 SV=1
MNVDLFDFELPAERIALRPASPRDSARLLVLDGADTRDASVRDLPSCLRAGDLLVFNDTRVIPAQLEGLRGEARVGATLHKREGPRRWRAFIRNAKRLRQGDSVDFGQGVTAIASDRAEDGSFALDFAGDEPVELLLTRCGRMPLPPYIASKRPTDSRDADDYQTMFASEPGAVAAPTAALHFTPELLAALDAAGIGHATLTLHVGAGTFLPVKAEDTDAHRMHAEWGRIDAATADRLNAVRAVGGRVVAVGTTSLRLIESAAGNDGVIHPFEGDTAIFITPGYRFKGIDGLVTNFHLPRSTLFMLVSALMGLDRMQAAYAHAIASGYRFYSYGDASLLLPLKGR

SEQ ID NO: 72274 - protein, 341 aa, Sphingomonas ginsenosidimutans
  REGION 1..341: note = tr|A0A2A4I0X9|A0A2A4I0X9_9SPHN S-adenosylmethionine:tRNA ribosyltransferase-isomerase; OS = Sphingomonas ginsenosidimutans OX=862134 GN=queA PE=3; SV = 1
MLVDLFDFALPPERIALRPAAPRDAARMLVVTPVALGDRIVRDLPAQLRRGDLLVFNDTRVIPAQLEGTRGEARIGATLHKREGPRRWRAFVRNARRLRDGDVIDFGAGVAAAARDRADDGSWALEFAGDEPVELLLERAGRMPLPPYIAGKRATDARDADDYQTMFASEPGAVAAPTAALHFTPELMAALAAAGIEHATLTLHVGAGTFLPVKADDTADHRMHAEWGRIDPATADRLNAVRAAGGRVIAVGTTSLRLIESAAGKDGVIRPFEGDTAIFITPGYRFRGIDGLMTNFHLPRSTLFMLVSALMGLETMQAAYAHAIAQGYRFYSYGDASLLLP

SEQ ID NO: 72275 - protein, 341 aa, unidentified
  source 1..341: note = Sphingomonas ginsenosidivorax
  REGION 1..341: note = tr|A0A5C6UI81|A0A5C6UI81_9SPHN S-adenosylmethionine:tRNA ribosyltransferase-isomerase; OS = Sphingomonas ginsenosidivorax OX=862135 GN=queA PE=3; SV = 1
MNVDLFDFDLPTDRIALRPAAPRDAARMLVLDGDATRDAGVADLPGLLRRGDLLVFNDTRVIPAQLDGRRGDAKIGATLHKREGPRRWRAFVRNARRLRDGDVIDFGNGVSAAAVDREEDGSYALDFAGDEPVELLLERAGHMPLPPYIAGKRPTDERDAADYQTMFAAEPGAVAAPTAALHFTPALMAALAAAGIGHATLTLHVGAGTFLPVKATDTADHRMHAEWGRIDAATADRLNAVRTAGGRVIAVGTTSLRLIESATDADGVIRPFDGDTSIFITPGYRFRGIDGLMSNFHLPRSTLFMLVSALMGRERMQAAYAHAIAKGYRFYSYGDASLLLP

SEQ ID NO: 72276 - protein, 347 aa, Sphingomonas glacialis
  REGION 1..347: note = tr|A0A502G3Z4|A0A502G3Z4_9SPHN S-adenosylmethionine:tRNA ribosyltransferase-isomerase; OS = Sphingomonas glacialis OX=658225 GN=queA PE=3 SV=1
MNVDLFDFVLPPERIALRPATPRDSARLLVVEGAALHDRSVGDLPGALRAGDLLVFNDTRVIPAQLEGTRGDSRIGATLHKREGPRRWRAFIRNARRLRDGDAIDFGSGVTATAHDRGEDGSFALEFQGDEPVELLLDRAGRMPLPPYIAARRPADAQDADDYQTMFAAEKGAVAAPTAALHFTPELMARFAAAGIEHATLTLHVGAGTFLPVKATDTADHKMHAEWGRIDAATADRLNAVRAAGGRVIAVGTTSLRLIESATGEDGVIRPFEGDTAIFITPGYRFRGIDGLVTNFHLPRSTLFMLVSALMGTDTMQAAYAHAIADGYRFYSYGDASLLLPDRGVRA

SEQ ID NO: 72277 - protein, 347 aa, unidentified
  source 1..347: note = Sphingomonas guangdongensis
  REGION 1..347: note = tr|A0A285R383|A0A285R383_9SPHN S-adenosylmethionine:tRNA ribosyltransferase-isomerase; OS = Sphingomonas guangdongensis OX=1141890 GN=queA PE=3 SV=1
MNVDLFDFELPPERIALRPAEPRDAARLLVLDGPETRDCVVADLPAQLRRGDLLVFNDTRVIPAQLDGRRGEARIGATLHKREGPRRWRAFVRNARRLRDGDVIDFGEGVSAAASGKAADGSIALDFAGDEPVELLLARAGRMPLPPYIAARRAPDARDADDYQTMFATEPGAVAAPTAALHFTPDLLAGLAAAGVEHATLTLHVGAGTFLPVKAADTNEHRMHAEWGRIDAATADRLNAVRARGNRVIAVGTTSLRLLESAANADGRIRPFEGDTAIFITPGFRFRAVDGLLTNFHLPRSTLFMLVSALMGLERMQSAYAHAIANGYRFYSYGDGSLLLPEQPNSR

SEQ ID NO: 72278 - protein, 341 aa, Sphingomonas haloaromaticamans; identical to SEQ ID NO: 72272
  REGION 1..341: note = tr|A0A1S1H8T9|A0A1S1H8T9_9SPHN S-adenosylmethionine:tRNA ribosyltransferase-isomerase; OS = Sphingomonas haloaromaticamans OX=653954 GN=queA PE=3; SV = 1

SEQ ID NO: 72279 - protein, 343 aa, unidentified
  source 1..343: note = Sphingomonas hengshuiensis
  REGION 1..343: note = tr|A0A2W4Z8K2|A0A2W4Z8K2_9SPHN S-adenosylmethionine:tRNA ribosyltransferase-isomerase; OS = Sphingomonas hengshuiensis OX=1609977 GN=queA PE=3 SV=1
MHVDLFDFELPNDHIALRPASPRDAARMLVLDGAATLDRGVADLPGCLRAGDLLVFNDTRVIPAQLEGRRGDATVGATLHKREGPRRWRAFVRNARRLRDGDSIDFGAGVTAIAGDKGEDGSVALDFQGDDPVELLLERAGRMPLPPYIASKRGGADARDAEDYQTLFAREAGAVAAPTAALHFTPGLMAALDAAGIGHATLTLHVGAGTFLPVKAQDTDDHRMHAEWGRIDRDTADRLNAVRAAGGRVIAVGTTSLRLIESACDADGRVQPFEGDTAIFITPGYRFRGIDGLMTNFHLPRSTLFMLVSALMGRERMQAAYAHAIAEGYRFYSYGDASLLLPA

SEQ ID NO: 72280 - protein, 344 aa, Sphingomonas histidinilytica
  REGION 1..344: note = tr|A0A1T4ZWZ2|A0A1T4ZWZ2_9SPHN S-adenosylmethionine:tRNA ribosyltransferase-isomerase; OS = Sphingomonas histidinilytica OX=439228 GN=queA PE=3 SV=1
MRVDLFDFDLPPENIALRPASPRDSARMLLVEGREGALADRQVSDLPGLLRAGDCLVFNDTRVIPAQLEGRRGEARIGATLHKREGLRQWRAFVRNAKRVRTGDRIDFGAGVSAIAAERGEDGSILLDFEGDEPVELLLERAGTMPLPPYIAGKRATDDRDRDDYQTMFAREKGAVAAPTAALHFTPRLVEALAAAGIASETLTLHVGAGTFLPVKADDTDDHRMHAEWGRIDAATADRLNAVRAAGGRVIAVGTTSLRLLESATGEDGVIRPFDGDTAIFITPGYRFRAIDGLMTNFHLPKSTLFMLVSALMGRERMQAAYAHAIAEGYRFYSYGDSSLLLPG

SEQ ID NO: 72281 - protein, 343 aa, unidentified
  source 1..343: note = Sphingomonas indica
  REGION 1..343: note = tr|A0A1X7GFZ5|A0A1X7GFZ5_9SPHN S-adenosylmethionine:tRNA ribosyltransferase-isomerase; OS = Sphingomonas indica OX=941907 GN=queA PE=3 SV=1
MRVDLFDFDLPPERIALRPASPRDSARMLVVRPEGFEDRGVADLPAMLRAGDMLVFNDTRVIPAQLEGTRGEARIGATLHKREGPRDWRAFVRNAKRVRAGDRIDFGAGVTALAGDKGEDGSILLRFEGDEPVELLLERAGRMPLPPYIAGKREADARDAIDYQTMFAREKGAVAAPTAALHFTPVLMNALEAAGIGHATLTLHVGAGTFLPVKAEDTDAHRMHSEWGRIDAATADRLNAVRAEGGRVIAVGTTALRLLESAAGEDGLIRPFEGDTAIFITPGYRFRAIDGLVTNFHLPRSTLFMLVGALMGRETMQAAYAHAIAEGYRFYSYGDASLLLPER

SEQ ID NO: 72282 - protein, 341 aa, unidentified
  source 1..341: note = Sphingomonas jatrophae
  REGION 1..341: note = tr|A0A1I6K119|A0A1I6K119_9SPHN S-adenosylmethionine:tRNA ribosyltransferase-isomerase; OS = Sphingomonas jatrophae OX=1166337 GN=queA PE=3 SV=1
MRVDLFDFELPPERIALRPADPRDAARLLLLDGARTEDRTVRDLPALLRQGDCLVFNDTRVIPAQLEGRRGEARIGATLHKREGPRAWRAFVRNAKRLRDGDRIDFGEGVEAQAGERGADGSWQLTFAGDEPVELLLERAGRMPLPPYIAARRAADAADAADYQTMFAREAGAVAAPTAALHFTPALMAALAEAGIGHETLTLHVGAGTFLPVKAEDTADHAMHAEWGRIDAATAERLNQVRARGGRVIAVGTTSLRTIESAAGADGRIAAWEGDTAIFITPGYTFRGIDGLLTNFHLPRSTLFMLVSALMRLDRMKAAYAYAIENGYRFYSYGDASLLLP

SEQ ID NO: 72283 - protein, 345 aa, unidentified
  source 1..345: note = Sphingomonas jeddahensis
  REGION 1..345: note = tr|A0A1V2EX89|A0A1V2EX89_9SPHN S-adenosylmethionine:tRNA ribosyltransferase-isomerase; OS = Sphingomonas jeddahensis OX=1915074 GN=queA PE=3 SV=1
MNVDLFDFDLPNERIALRPASPRDSARLLVLDGAAPRDRIVTDLPAELRAGDLLVFNDTRVIPAQLEGMRGAAKIGATLHKREGPRRWRAFIRNAKRLRDGDTIDFGSGVSAIAGDRADDGSFALDFAGDEPVELLLERAGRMPLPPYIAAKRPTDARDADDYQTMFAREAGAVAAPTAALHFTPGLMAALDAAGIGHTTLTLHVGAGTFLPVKAEDTADHRMHAEWGRIDAATADRLNAVRASGGRVIAVGTTSLRLIESAAGEDGMVRPFEGDTSIFITPGYRFRGIDGLVTNFHLPRSTLFMLVSALMGLERMQAAYAHAIAADYRFYSYGDASLLIPDRAG

SEQ ID NO: 72284 - protein, 355 aa, Sphingomonas koreensis
  REGION 1..355: note = tr|A0A430FXH2|A0A430FXH2_9SPHN S-adenosylmethionine:tRNA ribosyltransferase-isomerase; OS = Sphingomonas koreensis OX=93064 GN=queA PE=3 SV=1
MNVDLFDFELPPERIALRPASPRDSARLLLLDGALTGDRSVGDLPALLAPGDLLVFNDTRVIPAQLEGMRGEAKIGATLHKREGPRHWVAFIRNAKRLRTGETIDFGNAVTAVAEARHDDGSFILFFPGDEPVELLLERAGRMPLPPYIAAKRPTDARDADDYQTMFANEPGAVAAPTAALHFTPGLMSALEAAGIGHTTLTLHVGAGTFLPVKAEDTDDHRMHAEWGRIDPATADRLNAVRAAGGRVIAVGTTSLRLIESAAGDDGVIRPFEGDTAIFITPGYRFRGIDGLVTNFHLPRSTLFMLVSALMGLDRMQAAYAHAIAAGYRFYSYGDASLLLPETPHASGRHGHSAK

SEQ ID NO: 72285 - protein, 345 aa, Sphingomonas koreensis
  REGION 1..345: note = tr|A0A1L6J9Q8|A0A1L6J9Q8_9SPHN S-adenosylmethionine:tRNA ribosyltransferase-isomerase; OS = Sphingomonas koreensis OX=93064 GN=queA PE=3 SV=1
MNVDLFDFELPPERIALRPASPRDSARLLLLDGALTGDRSVGDLPALLAPGDLLVFNDTRVIPAQLEGMRGEAKIGATLHKREGPRHWIAFIRNAKRLRTGETIDFGNAVTAVAEARHDDGSFTLFFPGDEPVELLLERAGRMPLPPYIAAKRPTDARDADDYQTMFANEPGAVAAPTAALHFTPGLMSALEAAGIGHTTLTLHVGAGTFLPVKAEDTDDHRMHAEWGRIDPATADRLNAVRAAGGRVIAVGTTSLRLIESATGDDGVIRPFEGDTAIFITPGYRFRGIDGLVTNFHLPRSTLFMLVSALMGLERMQAAYAHAIAAGYRFYSYGDASLLLPGKPA

SEQ ID NO: 72286 - protein, 341 aa, unidentified
  source 1..341: note = Sphingomonas laterariae
  REGION 1..341: note = tr|A0A239CPJ0|A0A239CPJ0_9SPHN S-adenosylmethionine:tRNA ribosyltransferase-isomerase; OS = Sphingomonas laterariae OX=861865 GN=queA PE=3 SV=1
MRVDLFDFDLPAERIALRPASPRDSARMLVVDQDGMADRIIRDLPDILRPDDLLVFNDTRVIPAQLEGRRGEARIGATLHKREGPRAWRAFVRNAKRVRDGDRIEFGAGVTALAASRGDDGSILLEFDGDEPVELLLERAGRMPLPPYIAGKRAADERDADDYQTMFAAEPGAVAAPTAALHFTPDLMAALDARGIGHVTLTLHVGAGTFLPVKAEDTDDHRMHAEYGRIDAATADRLNAVRRAGGRVIAVGTTSLRLIESAAGEDGIIRPFDGDTAIFITPGYRFRGIDGLMTNFHLPKSTLFMLVSALMGRERMQAAYAHAIADGYRFYSYGDGSLLLP

SEQ ID NO: 72287 - protein, 344 aa, Sphingomonas melonis
  REGION 1..344: note = tr|A0A175Y087|A0A175Y087_9SPHN S-adenosylmethionine:tRNA ribosyltransferase-isomerase; OS = Sphingomonas melonis TY OX=621456 GN=queA PE=3 SV=1
MRVELFDFELPAERIALRPASPRDSARLLVLDGDATRDRIVRDLPAELRAGDCLVFNDTRVIPAQLEGRRGEAKIGATLHKREGPRRWRAFVRNARRLRDGDSIDFGSGVTAIATDRGEDGSLALDFAGDEPVELLLERAGRMPLPPYIAAKRPTDARDADDYQTMFAAEPGAVAAPTAALHFTPDLIAALDAAGIGHETLTLHVGAGTFLPVKADDTDDHRMHAEWGRIDAATADRLNAVRARGGRVIAVGTTSLRLIESASGEDQVIRPFEGDTAIFITPGYTFRGIDGLLTNFHLPKSTLFMLVSALMGRERMQAAYAHAIAEGYRFYSYGDASLLLPTRG

SEQ ID NO: 72288 - protein, 344 aa, Sphingomonas melonis
  REGION 1..344: note = tr|A0A0D1M2J3|A0A0D1M2J3_9SPHN S-adenosylmethionine:tRNA ribosyltransferase-isomerase; OS = Sphingomonas melonis OX=152682 GN=queA PE=3 SV=1
MKVELFDFELPAERIALRPAAPRDSARLLVLDGDATRDRIVRDLPAELRAGDCLVFNDTRVIPAQLEGRRGEAKIGATLHKREGPRRWRAFVRNARRLRDGDSIDFGSGVTAIATDRGEDGSLALDFAGDEPVELLLERAGRMPLPPYIAAKRPTDARDADDYQTMFAAEPGAVAAPTAALHFTPDLIAALDAAGIGHETLTLHVGAGTFLPVKADDTDDHRMHAEWGRIDAATVDRLNAVRARGGRVIAVGTTSLRLIESASSEDKMIRPFEGDTAIFITPGYTFRGIDGLLTNFHLPKSTLFMLVSALMGRERMQAAYAHAIAEGYRFYSYGDASLLLPTRG

SEQ ID NO: 72289 - protein, 341 aa, Sphingomonas mucosissima
  REGION 1..341: note = tr|A0A245ZM03|A0A245ZM03_9SPHN S-adenosylmethionine:tRNA ribosyltransferase-isomerase; OS = Sphingomonas mucosissima OX=370959 GN=queA PE=3 SV=1
MNVDHFDFDLPQERIALRPAAPRDSARLLVLDGGSTHDRIVSDLPSELRAGDLLVFNDTRVIPAQLEGTRGAARIGATLHKREGPRRWRAFIRNAKRLRDGDPIDFGNGVTATASDRAQDGSFALDFAGEEPVELLLERAGRMPLPPYIAAKRPTDERDADDYQTMFARETGAVAAPTAALHFTPGLMTALKAAGIGHATLTLHVGAGTFLPVKASDTDDHQMHAEWGRIDQATADRLNAVRAGGGRVIAVGTTSLRLIESAAGTDGLVRPFEGDTSIFITPGYRFRGIDGLLTNFHLPRSTLFMLVSALMGLERMQAAYAHAIENGYRFYSYGDASLLLP

SEQ ID NO: 72290 - protein, 352 aa, unidentified
  source 1..352: note = Sphingomonas naasensis
  REGION 1..352: note = tr|A0A4V3QW81|A0A4V3QW81_9SPHN S-adenosylmethionine:tRNA ribosyltransferase-isomerase; OS = Sphingomonas naasensis OX=1344951 GN=queA PE=3 SV=1
MKVELFDFELPNERIALRPASPRDSARLLVLEGAAETRDACVGDLPSFLRKGDLLVFNDTRVIPAQLEGRRAARDDDAAGGSGASIGATLHKREGPRRWRAFIRNAKRLREGDSIDFGADVTALASDRAEDGSFALDFAGDEPVELLLERCGHMPLPPYIASKRPTDARDADDYQTMFASEPGAVAAPTAALHFTPALLASLDAAGIGHTTLTLHVGAGTFLPVKADDTDAHRMHAEWGRIDSATAERLNAVRAAGGRVIAVGTTSLRLIESAADADGSIAPFEGDTAIFITPGYRFKGIDGLVTNFHLPRSTLFMLVSALMGLERMQAAYAHAIASGYRFYSYGDASLLLP

SEQ ID NO: 72291 - protein, 341 aa, unidentified
  source 1..341: note = Sphingomonas olei
  REGION 1..341: note = tr|A0A4S4GF06|A0A4S4GF06_9SPHN S-adenosylmethionine:tRNA ribosyltransferase-isomerase; OS = Sphingomonas olei OX=1886787 GN=queA PE=3 SV=1
MNVDLFDFDLPPERIALRPAAPRDSARLLVLDGAATRDRIVADLPGELRANDILVFNDTRVIPAQLEGTRGEARIGATLHKREGPRRWRAFIRNAKRLRPGDTIDFGAGVSATASDRAQDGSFALDFAGDEPVELLLERAGRMPLPPYIAAKRPTDARDADDYQTMFAREAGAVAAPTAALHFTPDLIAALDAAKIAHTTLTLHVGAGTFLPVKAQDTADHQMHAEWGRIDAPTADRLNAVRASGGRVIAVGTTSLRLIESATDADGTIRPFEGDTSIFITPGYRFRGIDGLLTNFHLPRSTLFMLVSALMGLDRMQAAYAHAVANDYRFYSYGDASLLLP

SEQ ID NO: 72292 - protein, 341 aa, unidentified
  source 1..341: note = Sphingomonas oleivorans
  REGION 1..341: note = tr|A0A2T5G072|A0A2T5G072_9SPHN S-adenosylmethionine:tRNA ribosyltransferase-isomerase; OS = Sphingomonas oleivorans OX=1735121 GN=queA PE=3 SV=1
MRVDLFDFDLPPERIALRPAEPRDAARLLLLEGDQIEDARVRDLPDLLRAGDILVFNDTRVIPAQLEGRRGEARIGATLHKREGPRRWIAFVRNAKRVRDGDRIEFGAGVSAIASARLADGSIILDFEGEEPVELLLERAGRMPLPPYIAGKRAADARDAEDYQTMFAREEGAVAAPTAALHFTPGLMAALEARGIGHATLTLHVGAGTFLPVKAEDTEDHRMHAEWGRIDPATANRLNAARAAGGRLIAVGTTSLRLLESATGEDGIIRPFEGDTAIFITPGYRFRAIDGLMTNFHLPRSTLFMLVSALMGRERMQAAYAHAIQAGYRFYSYGDASLLLP

SEQ ID NO: 72293 - protein, 352 aa, Sphingomonas oligophenolica
  REGION 1..352: note = tr|A0A502CRF3|A0A502CRF3_9SPHN S-adenosylmethionine:tRNA ribosyltransferase-isomerase; OS = Sphingomonas oligophenolica OX=301154 GN=queA PE=3 SV=1
MNVDLFDFDLPTDRIALRPAVPRDAARMLVLDDDRQRDLSVADLPSQLRRGDLLVFNDTRVIPARLEGKRAPRAEDAGNGVAGANIGATLHKREGPRRWRAFIRNARRLLDGDRIDFGHDVVAIAGDRAEDGSFALDFLGDEPVELLLERAGRMPLPPYIAARRPTDARDADDYQTMFATDPGAVAAPTAALHFTPGLIAALDAAGIEHATLTLHVGAGTFLPVKADDTDDHRMHAEWGRIDAATADRLNAVRASGGRVIAVGTTSLRLIESASGDDGIIEPFDGDTSIFITPGYRFRGIDGLMTNFHLPRSTLFMLVSALMGTGRMQNAYAHAIASGYRFYSYGDASLLLP

SEQ ID NO: 72294 - protein, 341 aa, unidentified
  source 1..341: note = Sphingomonas panacis
  REGION 1..341: note = tr|A0A1B3Z9B6|A0A1B3Z9B6_9SPHN S-adenosylmethionine:tRNA ribosyltransferase-isomerase; OS = Sphingomonas panacis OX=1560345 GN=queA PE=3 SV=1
MKVDLFDFELPPERIALRPASPRDSARLLVLERDATRDLAVTDLPGQLRAGDMLVFNDTRVIPAQLEGIRGDAKIGATLHKREGPHRWRAFIRNARRIRDGEAIDFGGGVSAVASERQEDGSFALTFAGDEPVELLLERAGRMPLPPYIASKRAADARDLDDYQTMFAAEKGAVAAPTAALHFTPELMAALDAAGIGHATLTLHVGAGTFLPVKAEDTAAHRMHTEWGRIDPATAARLNAVRAAGGRVIAVGTTSLRLIESAADRDGIIRPFEGDTAIFITPGYRFKGVDGLMTNFHLPRSTLFMLVSALMGLDRMQAAYAHAIANGYRFYSYGDASLLLP

SEQ ID NO: 72295 - protein, 345 aa, Sphingomonas parapaucimobilis
  REGION 1..345: note = tr|A0A0A1WBZ5|A0A0A1WBZ5_9SPHN S-adenosylmethionine:tRNA ribosyltransferase-isomerase; OS = Sphingomonas parapaucimobilis NBRC 15100 OX=1219049; GN = queA PE=3 SV=1
MNVDLFDFALPPERIALYPASPRDSARMLVLDGDATRDQRVSDLPAALRAGDLLVFNDTRVIPAQLEGVRGEARIGATLHKREGTRRWRAFIRNAKRLRDGDVIDFGAGVSATARDRAEDGSFALDFAGDEPVELLLERAGTMPLPPYIAQKRGVTEKDADDYQTMFAQEPGAVAAPTAALHFTPGLLDSLAAAGIEHATLTLHVGAGTFLPVKAEDTVDHKMHAEWGRIDAATADRLNAVKARGGRVIAVGTTSLRLIESAAGEDGVIRPFEGDTAIFITPGYRFRGIHGLMTNFHLPRSTLFMLVSALMGLDRMQAAYAHAIANAYRFYSYGDASLLLPERPA

SEQ ID NO: 72296 - protein, 342 aa, Sphingomonas paucimobilis
  REGION 1..342: note = tr|A0A031JIE7|A0A031JIE7_SPHPI S-adenosylmethionine:tRNA ribosyltransferase-isomerase; OS = Sphingomonas paucimobilis OX=13689 GN=queA PE=3 SV=1
MRVDLFDFDLPPESIALRPASPRDSARLLLVAGDAPFEDRIVRDLPSMLRPGDVLVFNDTKVIPAQLEGMRGEARVGATLHKRLGLRQWQAFLRNAKRVRDGDRIDFGAGVTAIAGPRDEDGGVTLRFEGEEPVELLLERAGRMPLPPYIASKRPTDARDRSDYQTMFAREDGAVAAPTAALHFTLELMAALGKAGVQAETLTLHVGAGTFLPVKADDTDDHRMHAEWGRIEQDTADRLNAARARGGRLIAVGTTSLRLLESAADEEGRIHPFADETRIFITPGYRFRAVDGLMTNFHLPKSTLFMLVSALMGRERMQAAYAHAIAQGYRFYSYGDSSLLLP

SEQ ID NO: 72297 - protein, 345 aa, Sphingomonas paucimobilis
  REGION 1..345: note = tr|A0A411LIK1|A0A411LIK1_SPHPI S-adenosylmethionine:tRNA ribosyltransferase-isomerase; OS = Sphingomonas paucimobilis OX=13689 GN=queA PE=3 SV=1
MNVDLFDFALPPERIALYPASPRDSARMLVLDGDATRDERVSDLPQALRAGDLLVFNDTRVIPAQLQGTRGDAKIGATLHKREGVRRWRAFIRNAKRLREGDVIDFGAGVSATANDRAEDGSFALDFAGDEPVELLLERAGTMPLPPYIAQKRGVTEKDAEDYQTMFAQEPGAVAAPTAALHFTPGLLESLAAAGIEHATLTLHVGAGTFLPVKADDTVDHKMHAEWGRIDAATAHRLNAVKARGGRVIAVGTTSLRLIESAAGEDGVIRPFEGDTAIFITPGYRFRGIDGLMTNFHLPRSTLFMLVSALMGLDRMQAAYAHAIAQGYRFYSYGDASLLLPGPAA

SEQ ID NO: 72298 - protein, 343 aa, unidentified
  source 1..343: note = Sphingomonas pokkalii
  REGION 1..343: note = tr|A0A2U0SEM1|A0A2U0SEM1_9SPHN S-adenosylmethionine:tRNA ribosyltransferase-isomerase; OS = Sphingomonas pokkalii OX=2175090 GN=queA PE=3 SV=1
MNVDLFDFELPTDRIALRPASPRDSARLLVLDGAETRDAIIRDLAQQLRPGDCLVFNDTRVIPAQLEGTRGEARIGATLHKREGPRRWRAFIRNAKRLRDGDAIDFGPNAVAIASDRADDGSFALDFQGDEPVELLLERCGRMPLPPYIASKRPTDERDAEDYQTMFAAEPGAVAAPTAALHFTPELMASLEAAGIGHTTLTLHVGAGTFLPVKAEDTEDHKMHAEWGRITPEVADRLNAVRAAGNRIVAVGTTSLRLLESAANADRVIEPFEGDTAIFITPGYRFKGVDGLVTNFHLPRSTLFMLVSALMGLDRMQAAYAHAIETGYRFYSYGDSSLLLPAR

SEQ ID NO: 72299 - protein, 345 aa, Sphingomonas rubra
  REGION 1..345: note = tr|A0A1I5QI66|A0A1I5QI66_9SPHN S-adenosylmethionine:tRNA ribosyltransferase-isomerase; OS = Sphingomonas rubra OX=634430 GN=queA PE=3 SV=1
MNVDLFDFDLPPERIALHPAAPRDAARMLVLDGQATRDAGVADLPAALRPGDCLVFNDTRVIPAQLDGHRGEARIGATLHKREGPRRWRAFVKGAKRLRDGDLIDFGHGVGATSTARGEDGSWALDFAGDEPVELLLERAGRMPLPPYIAARRGIRPSDADDYQTMFADEPGAVAAPTAALHFTPMLMAALGEAGIGHETLTLHVGAGTFLPVKAADTDDHRMHAEWGRIDAATAARLNAVRARGGRVIAVGTTSLRLLESAADVDGTIRPFEGDTAIFITPGVALRAVDGLLTNFHLPRSTLFMLVSALMGTDRMQAAYAHAIAQGYRFYSYGDASLLLPGTRP

SEQ ID NO: 72300 - protein, 78 aa, Sphingomonas sanguinis
  REGION 1..78: note = tr|A0A147IJB2|A0A147IJB2_9SPHN S-adenosylmethionine:tRNA ribosyltransferase-isomerase; OS = Sphingomonas sanguinis OX=33051 GN=SB4_18495 PE=3 SV=1
MIRPFEGDTAIFITPGYRFRGIDGLMTNFHLPRSTLFMLVSALMGLERMQAAYAHAIATDYRFYSYGDGSLLLPERAA

SEQ ID NO: 72301 - protein, 210 aa, Sphingomonas sanguinis
  REGION 1..210: note = tr|A0A147J554|A0A147J554_9SPHN S-adenosylmethionine:tRNA ribosyltransferase-isomerase (Fragment) OS=Sphingomonas sanguinis OX=33051; GN = NS258_15475 PE=3 SV=1
LLERAGTMPLPPYIAQKRGVTEKDADDYQTMFANEPGAVAAPTAALHFTPELLASLDAAGIEHATLTLHVGAGTFLPVKADDTVDHKMHAEWGRIDAATADRLNAVRQRGGRVIAVGTTSLRLIESAAGEDGVIRPFEGDTAIFITPGYRFRGIDGLMTNFHLPRSTLFMLVSALMGLERMQAAYAHAIATDYRFYSYGDGSLLLPERAA

SEQ ID NO: 72302 - protein, 341 aa, Sphingomonas sanxanigenens
  REGION 1..341: note = tr|W0AHV4|W0AHV4_9SPHN S-adenosylmethionine:tRNA ribosyltransferase-isomerase OS=Sphingomonas sanxanigenens DSM 19645 = NX02 OX=1123269 GN=queA PE=3 SV=1
MRVDLFDFELPPERIALRPANPRDSARLLLLNGSETADHMVRELPSLLQPGDCLVFNDTRVIPAQLDGHRGEAGIGATLHKREGPRRWRAFLRNARRVREGDRIDFAHGVAATASEKGADGSMALTFLGDEPVELLLERAGRMPLPPYIAARRTPDAADAEDYQTMFAREAGAVAAPTAALHFTPQLMAAFAAQGVEHATLTLHVGAGTFQPVKVEDTVDHQMHAEWGRIDAATADRLSAVRARGNRLIAVGTTSLRLLESAAGEDDVIRPFEGDTAIFITPGYRFRAIDGLVTNFHLPRSTLFMLVSALMGRDRMQAAYAHAIASGYRFYSYGDASLLLP

SEQ ID NO: 72303 - protein, 346 aa, Sphingomonas sanxanigenens
  REGION 1..346: note = tr|A0A2W5AA33|A0A2W5AA33_9SPHN S-adenosylmethionine:tRNA ribosyltransferase-isomerase; OS = Sphingomonas sanxanigenens OX=397260 GN=queA PE=3 SV=1
MRIDLFDFALPPESIALRPAAPRDSARLLLIDGDARQDRIVSDLPSLLRAGDCLVFNDTRVIPAQLEGRRGDARIGATLHKREGPRDWRAFVRNARRVRDGDRIDFAAGVSAIAGARGEDGSLLLSFEGDEPVELLLERAGTMPLPPYIAGKRATDARDAEDYQTMFAREAGAVAAPTAALHFTPALMEALAGAGVGRETLTLHVGAGTFLPVKVEDTDDHRMHSEWGRIDAAAADRLNAVRAAGGRLIAVGTTSLRLLESAAGEDGVIRPFEGDTDIFITPGYRFRAIDGLMTNFHLPRSTLFVLVSALMGRETMLDAYAHAIATGYRFYSYGDASLLLPAPETR

SEQ ID NO: 72304 - protein, 345 aa, Sphingomonas sp.
  REGION 1..345: note = tr|A0A514WFZ5|A0A514WFZ5_9SPHN S-adenosylmethionine:tRNA ribosyltransferase-isomerase; OS = Sphingomonas sp. IC081 OX=304378 GN=queA PE=3 SV=1
MRVDLFDFDLPPENIALRPARPRDSARMLLVEGAESGSLVDRHVHDLPGILRPGDVLVFNDTRVIPAQLEGRRGEAKIGATLHKRIDLRRWQAFVRNAKRLRPSDRIEFPAGVTALAEQRLDDGSWVLFFEGEEPVEVLLERAGRMPLPPYIAGKRETDEADRSDYQTMFAEKDGAVAAPTASLHFTPELMARLEAAGVKRETLTLHVGAGTFLPVKADDTQDHRMHAEWGSIDAATADRLNAARAAGNRVIAVGTTSLRLLESATGDDNVIRPFEGDTAIFITPGYRFKAIDGLMTNFHLPKSTLFMLVSALMGLERMQAVYRHAISTGYRFYSYGDSSLLIRE

SEQ ID NO: 72305 - protein, 351 aa, Sphingomonas sp.
  REGION 1..351: note = tr|A0A0Q8XFJ1|A0A0Q8XFJ1_9SPHN S-adenosylmethionine:tRNA ribosyltransferase-isomerase; OS = Sphingomonas sp. Root241 OX=1736501 GN=queA PE=3 SV=1
MNVDLFDFELPSERIALRPASPRDSARLLVLEGAETRDATVRELPRFLRRGDLLVFNDTRVIPAQLEGLRGERNDGAQSAPGARIGATLHKREGPRRWRAFIRNAKRLREGDSVDFGHGVTALASDRAEDGSFALDFGGDEPVELLLTRCGRMPLPPYIASKRPTDARDAEDYQTMFASEPGAVAAPTAALHFTPELLAALEAAGIGHATLTLHVGAGTFLPVKAEDTDAHKMHAEWGRIDAATADRLNAVRAAGGRVIAVGTTSLRLIESAASADGAIRPFEGDTAIFITPGYRFKGIDGLVTNFHLPRSTLFMLVSALMGLDRMQAAYAHAIDKDYRFYSYGDASLLLP

SEQ ID NO: 72306 - protein, 341 aa, unidentified
  source 1..341: note = Sphingomonas spermidinifaciens
  REGION 1..341: note = tr|A0A2A4B769|A0A2A4B769_9SPHN S-adenosylmethionine:tRNA ribosyltransferase-isomerase; OS = Sphingomonas spermidinifaciens OX=1141889 GN=queA PE=3; SV = 1
MQVDLFDFELPSERIALRPAAPRDAARMLVVEGSGLRDAIVRDLPQCLRPGDCLVFNDTRVIPAQLEGTRGEARIGATLHKREGPRRWRAFIRNAKRLREGDAIDFGADVSATASDRAADGSFALDFAGDEPVELLLERAGRMPLPPYIAAKRPTDERDADDYQTMFAREAGAVAAPTAALHFTPDLLASLDAAGIGHATLTLHVGAGTFLPVKAEDTDDHAMHAEWGRIDAATADRLNAVHAAGGRVIAVGTTSLRLIESAAGEDGVIRPFEGDTAIFITPGYRFRGIDGLMTNFHLPRSTLFMLVSALMGLETMQAAYAHAIAGGYRFYSYGDASLLLP

SEQ ID NO: 72307 - protein, 344 aa, unidentified
  source 1..344: note = Sphingomonas taxi
  REGION 1..344: note = tr|A0A097EJB6|A0A097EJB6_9SPHN S-adenosylmethionine:tRNA ribosyltransferase-isomerase; OS = Sphingomonas taxi OX=1549858 GN=queA PE=3 SV=1
MRVDLFDFDLPAERIALRPAVPRDAARLLVLDGEATRDLTVGALPGQLRAGDCLVFNDTRVIPAQLEGRRGDATIGATLHKREGPRRWRAFIRNAKRLRDGDTIDFGAGVGARASDRGEDGSFALDFAGDEPVELLLERAGRMPLPPYIAAKRPTDAQDATDYQTMFAAEPGAVAAPTAALHFTPALIDALAAAGIAHETLTLHVGAGTFLPVKAEDTADHRMHAEWGRIDAATADRLNAVRVNGGRVIAVGTTSLRLIESAARADGVIAPFEGDTAIFITPGYAFRGIDGLVTNFHLPKSTLFMLVSALMGRERMQAAYAHAIAAGYRFYSYGDASLLLPARS

SEQ ID NO: 72308 - protein, 341 aa, unidentified
  source 1..341: note = Sphingomonas taxi
  REGION 1..341: note = tr|A0A2W5RHN6|A0A2W5RHN6_9SPHN S-adenosylmethionine:tRNA ribosyltransferase-isomerase; OS = Sphingomonas taxi OX=1549858 GN=queA PE=3 SV=1
MNVDLFDFALPPERIALRPAVPRDAARMLVVTPDGLADRVVAALPAQLRAGDLLVFNDTRVIPAQLEGTRGAARIGATLHKREGPRRWRAFVRNARRLRDCDAIDFGRDVTATARDRQADGSWALDFAGDEPVELLLERAGRMPLPPYIAGKRDTDARDARDYQTMFATEPGAVAAPTAALHFTPALMAALEAAGIAHATLTLHVGAGTFLPVKAEDTADHRMHAEWGRIDAALAARLNAVRAAGGRVIAVGTTSLRLIESATDADGQVRAFEGDTAIFITPGYRFRGIDGLMTNFHLPRSTLFMLVSALMGLDRMQAAYAYAIENDYRFYSYGDASLLLP

SEQ ID NO: 72309 - protein, 343 aa, Sphingomonas trueperi
  REGION 1..343: note = tr|A0A543LRB5|A0A543LRB5_9SPHN S-adenosylmethionine:tRNA ribosyltransferase-isomerase; OS = Sphingomonas trueperi OX=53317 GN=queA PE=3 SV=1
MNVDLFDFELPNERIALRPAAPRDSARLLVLDGPETRDAIVRDLAAQLRPGDCLVFNDTRVIPAQLEGTRGEARIGATLHKREGPRRWRAFIRNAKRLRDGDAIDFGPDAIAIASDRAEDGSFALDFQGDEPVELLLQRCGRMPLPPYIASKRPTDARDADDYQTMFAAEPGAVAAPTAALHFTPDLMASLEAAGIGHTTLTLHVGAGTFLPVKAEDTADHKMHAEWGRITPEVADRLNAVRAAGNRIIAVGTTSLRLLESAADEHRVIQPFEGDTAIFITPGYRFKGVDGLVTNFHLPRSTLFMLVSALMGLDRMQAAYAHAIETGYRFYSYGDSSLLLPAR

SEQ ID NO: 72310 - protein, 351 aa, unidentified
  source 1..351: note = Sphingomonas turrisvirgatae
  REGION 1..351: note = tr|A0A1E3LXZ1|A0A1E3LXZ1_9SPHN S-adenosylmethionine:tRNA ribosyltransferase-isomerase; OS = Sphingomonas turrisvirgatae OX=1888892 GN=queA PE=3 SV=1
MNVDLFDFELPPERIALRPASPRDAARLLLLDGERTEDRIVRDLPTLLRAGDLLVFNDTRVIPAQLEGRRGAREGSEDAGSGAKIGATLHKREGPRDWIAFIRNAKRLRVSDVIDFGNDVRAVAEARHADGSFTLHFPGDEPVELLLQRAGHMPLPPYIAAKRPTDARDADDYQTMFANEPGAVAAPTAALHFTPELIAALDAAGIGHTTLTLHVGAGTFLPVKAEDTDDHRMHAEWGRIDADTADRLNAVRAGGGRVIAVGTTSLRLIESAAGEDGLVRPFEGDTSIFITPGYRFRGIDGLISNFHLPRSTLFMLVSALMGLERMQAAYAHAIASDYRFYSYGDASLLLP

SEQ ID NO: 72311 - protein, 344 aa, Sphingomonas wittichii
  REGION 1..344: note = sp|A5V282|QUEA_SPHWW S-adenosylmethionine:tRNA ribosyltransferase-isomerase OS=Sphingomonas wittichii (strain RW1 / DSM 6014 / JCM 10273) OX=392499 GN=queA PE=3; SV = 1
MRVDLFDFDLPPENIALRPASPRDSARMLLVEGSEGALADRHVSDLPGLLRVGDCLVFNDTRVIPAQLEGRRGEARIGATLHKREGLRQWRAFVRNAKRVRTGDRIDFGAGVSAIAAERGEDGSILLDFEGDEPVELLLERAGTMPLPPYIAGKRPTDDRDRDDYQTMFAREKGAVAAPTAALHFTPRLMEALAAAGIASETLTLHVGAGTFLPVKADDTDDHRMHAEWGRIDAATADHLNAIRAAGGRVIAVGTTSLRLLESATGEDGVIRPFDGDTAIFITPGYRFRAIDGLMTNFHLPKSTLFMLVSALMGRDRMQAAYAHAIAEGYRFYSYGDSSLLLPG

SEQ ID NO: 72312 - protein, 344 aa, Sphingomonas wittichii
  REGION 1..344: note = tr|A0A1X9UND4|A0A1X9UND4_SPHSD S-adenosylmethionine:tRNA ribosyltransferase-isomerase; OS = Sphingomonas wittichii (strain DC-6 / KACC 16600); OX = 1283312 GN=queA PE=3 SV =1
MRVDLFDFDLPPENIALRPASPRDSARMLLVEGSEGALADRHVSDLPGLLRVGDCLVFNDTRVIPAQLEGRRGEARIGATLHKREGLRQWRAFVRNAKRVRTSDRIDFGAGVSAVAAERGEDGSILLDFEGDEPVELLLERAGTMPLPPYIAGKRPTDDRDRDDYQTMFAREKGAVAAPTAALHFTPRLVEALAAAGIASETLTLHVGAGTFLPVKADDTDDHRMHAEWGRIDAATADRLNAIRAAGGRVIAVGTTSLRLLESATGEDGVIRPFDGDTAIFITPGYRFRAIDGLMTNFHLPKSTLFMLVSALMGRDRMQAAYAHAIAEGYRFYSYGDSSLLLPG

SEQ ID NO: 72313 - protein, 345 aa, Sphingomonas yabuuchiae
  REGION 1..345: note = tr|A0A147IM33|A0A147IM33_9SPHN S-adenosylmethionine:tRNA ribosyltransferase-isomerase; OS = Sphingomonas yabuuchiae OX=172044 GN=queA PE=3 SV=1
MNVDLFDFALPPERIALYPASPRDSARMLLLDGEATRDQRVSDLPAALRAGDLLVFNDTRVIPAQLEGVRGEARIGATLHKREGTRRWRAFIRNAKRLRDGDVIDFGAGVSATARDRAEDGSFALDFAGDEPVELLLERAGTMPLPPYIAQKRGVTEKDADDYQTMFANEPGAVAAPTAALHFTPELLASLAAAGIEHATLTLHVGAGTFLPVKAEDTVDHKMHAEWGRIDAATADRLNAVKARGGRVIAVGTTSLRLIESAAGEDGVIRPFEGDTAIFITPGYRFRGIDGLMTNFHLPRSTLFMLVSALMGLDRMQAAYAHAVANDYRFYSYGDASLLLPERCA

SEQ ID NO: 72314 - protein, 351 aa, Sphingopyxis alaskensis
  REGION 1..351: note = sp|Q1GR22|QUEA_SPHAL S-adenosylmethionine:tRNA ribosyltransferase-isomerase OS=Sphingopyxis alaskensis (strain DSM 13593 / LMG 18877 / RB2256) OX=317655 GN=queA; PE = 3SV=1
MRVDAFDFDLPSERIALRPARPRDAARMLVVDAGNIVDAGVRDLPQWLRPGDCLVFNDTRVIPAQLEGLRGEAKIGATLHKRIDLRRWQAFVRNAKRLRVGETVDFGSGVAALAEERLADGSFVLAFAGDEPVELLLERAGTMPLPPYIAGKRGADEADRDDYQTMFAREDGAVAAPTAALHFTPELLAALAAAGIATETLTLHVGAGTFLPVKADDTDDHVMHAEWGRIEADTAARLNAVRASGGRVIAVGTTSLRLLESAARDDGTITPFAGDTSIFITPGYRFKAIDGLMTNFHLPRSTLFMLVSALMGLETMQAAYAHAIAREYRFYSYGDASLLLPRQSGRSRTLS

SEQ ID NO: 72315 - protein, 345 aa, Sphingopyxis bauzanensis
  REGION 1..345: note = tr|A0A246K2C6|A0A246K2C6_9SPHN S-adenosylmethionine:tRNA ribosyltransferase-isomerase; OS = Sphingopyxis bauzanensis OX=651663 GN=queA PE=3 SV=1
MRVDAFDFDLPNERIALRPARPRDAARMLVVDGDRIVDAGVGDLPAWLHPGDCLVFNDTRVIPAQLEGRRGDAKIGATLHKRIDLRRWQAFVRNAKRLRVGETVDFGSEVSALAEERLPDGSFILAFAGDEPVEVLLERAGTMPLPPYIAGKRATDEEDRSDYQTMFAAKDGAVAAPTAALHFTPGLLAALAAMGIATETLTLHVGAGTFLPVKADDTEDHVMHAEWGRIEADTAARLNAVRAAGGRIIAVGTTSLRLLESAAQDDGTIAAFVDDTAIFITPGYRFKAIDGLMTNFHLPRSTLFMLVSALMGLETMQAAYAHAIANDYRFYSYGDASLLLPVRAV

SEQ ID NO: 72316 - protein, 348 aa, unidentified
  source 1..348: note = Sphingopyxis flava
  REGION 1..348: note = tr|A0A1T5DG55|A0A1T5DG55_9SPHN S-adenosylmethionine:tRNA ribosyltransferase-isomerase; OS = Sphingopyxis flava OX=1507287 GN=queA PE=3 SV=1
MRVDAFDFELPPERIALRPVRPRDAARMLVVERGGIRDATVSDLPGELRAGDCLVFNDTRVIPAQLEGRRGDAKIGATLHKRIDLRRWQAFVRNAKRLRVGESVDFGSGVTAAAEERLSDGSFILAFAGDEPVELLLERAGTMPLPPYIAGKRATDEADRRDYQTMFAREDGAVAAPTAALHFTPTLLDALAAAGIACETLTLHVGAGTFLPVKADNTEDHVMHAEWGRIDAATADRLNAVRAAGGRIIAVGTTSLRLLESAALGTGLIEPFEGDTAIFITPGYRFKAIDGLMTNFHLPRSTLFMLVSALMGLETMQAAYAHAIANGYRFYSYGDASLLLPQRPDRSA

SEQ ID NO: 72317 - protein, 344 aa, unidentified
  source 1..344: note = Sphingopyxis fribergensis
  REGION 1..344: note = tr|A0A0A7PI84|A0A0A7PI84_9SPHN S-adenosylmethionine:tRNA ribosyltransferase-isomerase; OS = Sphingopyxis fribergensis OX=1515612 GN=queA PE=3 SV=1
MRVDAFDFDLPNERIALRPARPRDAARMLVVDDGKIVDAGVRDLPQWLRPGDCLVFNDTRVIPAQLEGRRGDAKIGATLHKRIDLRRWQAFVRNAKRLRVGETVDFGAGVEALAEERLADGSFILTFAGDEPVELLLERAGTMPLPPYIAGKRATDEDDRSDYQTMFAREDGAVAAPTAALHFTPKLLDALAAADIATETLTLHVGAGTFLPVKADDTEDHVMHAEWGRIEADTAARLNAVRAAGGRVIAVGTTSLRLLESAAQDDGIIAPFAGDTAIFITPGYRFRAIDGLMTNFHLPRSTLFMLVSALMGLETMQAAYAHAIAQSYRFYSYGDASLLLPRAK

SEQ ID NO: 72318 - protein, 351 aa, Sphingopyxis granuli
  REGION 1..351: note = tr|A0A0X8R176|A0A0X8R176_9SPHN S-adenosylmethionine:tRNA ribosyltransferase-isomerase; OS = Sphingopyxis granuli OX=267128 GN=queA PE=3 SV=1
MRVDAFDFELPPDRIALRPARPRDAARMLVVAGSGLHDAGVRDLPAWLRRGDCLVFNDTRVIPARLEGVRGGRDGDGAAGAKIGATLHKRVDLRRWQAFVRNAKRLHVGETVDFGAGVIAVAEQRLPDGSFVLAFQGDEPVELLLDRAGTMPLPPYIAGKRATDEADRADYQTMFARADGAVAAPTAALHFTPALLAALGEAGIASETLTLHVGAGTFLPVKADDTADHVMHAEWGCIDADAAARLNAVRAAGGRVIAVGTTSLRLLESAARADGTIEPFTGDTSIFITPGYRFRAIDGLMTNFHLPRSTLFMLVSALMGLDVMRAAYDHAIAEGYRFYSYGDSSLLLPDG

SEQ ID NO: 72319 - protein, 353 aa, unidentified
  source 1..353: note = Sphingopyxis indica
  REGION 1..353: note = tr|A0A239H3G9|A0A239H3G9_9SPHN S-adenosylmethionine:tRNA ribosyltransferase-isomerase; OS = Sphingopyxis indica OX=436663 GN=queA PE=3 SV=1
MRVDDFDFDLPPERIALRPARPRDAARMLVVEGRAMRDAGVRDLPALLRAGDCLVFNDTRVIPAQLEGQRGVRRDGAASAPGAKIGATLHKRVDLRRWQAFVRNAKRLRVGETVDFGSGVEAVAEERLADGSFILAFAGDEPVELLLERAGTMPLPPYIAGKRGADDADRADYQTMFAREDGAVAAPTAALHFTPGLLDAIAAAGIATETLTLHVGAGTFLPVKADDTDDHVMHAEWGRIEPETAARLNAVRAAGGRIIAVGTTSLRLLESAARTDGTIAPFAGDTSIFITPGYRFRAVGGLMTNFHLPRSTLFMLVSALMGLDVMHAAYSHAIAEGYRFYSYGDSSLLLPER

SEQ ID NO: 72320 - protein, 346 aa, unidentified
  source 1..346: note = Sphingopyxis lindanitolerans
  REGION 1..346: note = tr|A0A2S8B716|A0A2S8B716_9SPHN S-adenosylmethionine:tRNA ribosyltransferase-isomerase; OS = Sphingopyxis lindanitolerans OX=2054227 GN=queA PE=3; SV = 1
MRVDAFDFDLPSERIALRPARPRDAARMLVVEGGSISDAKMSDRGVRDLPALLRAGDCLVFNDTRVIPAQLEGKRGDAKIGATLHKRVDLRRWQAFVRNAKRLRVGETVDFGSGVAALAEQRLADGSFILAFGGDEPVEILLERAGTMPLPPYIAGKRATDDEDRADYQTMFADKDGAVAAPTAALHFTPDLLAALTAAGVATEMLTLHVGAGTFLPVKSDDTADHVMHAEWGRIDAATAGRLNAVRARGGRVIAVGTTSLRLLESAAREDGRIAPFEGDTAIFITPGYRFRAIDGLMTNFHLPRSTLFMLVSALMGLETMQSAYGHAIGEGYRFYSYGDASLLLP

SEQ ID NO: 72321 - protein, 347 aa, Sphingopyxis macrogoltabida
  REGION 1..347: note = tr|A0A2W5L3M9|A0A2W5L3M9_SPHMC S-adenosylmethionine:tRNA ribosyltransferase-isomerase; OS = Sphingopyxis macrogoltabida OX=33050 GN=queA PE=3 SV=1
MRVDAFDFDLPPGNIALRPARPRDAARMLVVEGGAIRDAGVRDLPACLRAGDCLVFNDTRVIPAQLEGTRGAAKIGATLHKRVDLRRWQAFVRNAKRLRVGESVDFGMGVTALAEERLADGSFILAFAGDEPVELLLERAGTMPLPPYIAGKRATDADDRSDYQTMFAREDGAVAAPTAALHFTPALLAALAEAGVSTETLTLHVGAGTFLPVKADDTDDHAMHAEWGRIDAETAARLNAVRAAGGRVIAVGTTSLRLLESATGEDGVIAPFAGDTAIFITPGYRFRAIDGLMTNFHLPRSTLFMLVSALMGLETMQAAYAHAIAGGYRFYSYGDASLLLPGPAIPK

SEQ ID NO: 72322 - protein, 345 aa, Sphingopyxis macrogoltabida
  REGION 1..345: note = tr|A0A0P0DIL0|A0A0P0DIL0_SPHMC S-adenosylmethionine:tRNA ribosyltransferase-isomerase; OS = Sphingopyxis macrogoltabida OX=33050 GN=queA PE=3 SV=1
MRVDAFDFELPGERIALRPARPRDAARMLVVAGNDMADAGVAELPKWLRPGDCLVFNDTRVIPAQLEGRRGEAKIGATLHKRIDLRRWQAFVRNAKRLRVGETIDFGAGVAAIAEDRLPDGSFILAFGGDKPVEVLLERAGTMPLPPYIAGKRATDEEDRADYQTMFAREDGAVAAPTAALHFTPRLLDALAAAGVASETLTLHVGAGTFLPVKADDTEDHVMHAEWGRIEADTAERLNAVRAAGGRVIAVGTTSLRLLESAASADGTIEPFAGDTSIFITPGYRFRAIDGLMTNFHLPRSTLFMLVSALMGLETMQAAYAHAIAGGYRFYSYGDASLLLPERSA

SEQ ID NO: 72323 - protein, 341 aa, Sphingopyxis sp.
  REGION 1..341: note = tr|A0A270B5Z9|A0A270B5Z9_9SPHN S-adenosylmethionine:tRNA ribosyltransferase-isomerase; OS = Sphingopyxis sp. GW247-27LB OX=2012632 GN=queA PE=3 SV=1
MRVDAFDFDLPPERIALRPARPRDAARMLVVEGGAIGDAVVRDLPNRLRAGDCLVFNDTRVIPAQLEGRRGEAKIGATLHKRIGLRRWQAFVRNAKRLRVGETVDFGAGVAALAEERLPDGSFVLAFAGDEPVEILLERAGTMPLPPYIAGKRATDEADRSDYQTMFARQDGAVAAPTAALHFTLSLLDTLTAAGIGSETLTLHVGAGTFLPVKADDTEDHVMHAEWGRIDAATADRLNAVRAAGGRVIAVGTTSLRLLESAAREDGVIAPFEGDTAIFITPGYRFKAIDGLMTNFHLPRSTLFMLVSALMGLETMQAAYAHAIAQDYRFYSYGDASLLLP

SEQ ID NO: 72324 - protein, 348 aa, Sphingopyxis sp.
  REGION 1..348: note = tr|A0A0Q8S0Q4|A0A0Q8S0Q4_9SPHN S-adenosylmethionine:tRNA ribosyltransferase-isomerase; OS = Sphingopyxis sp. Root214 OX=1736491 GN=queA PE=3 SV=1
MRVDAFDFDLPNERIALRPARPRDAARMLVVDGDEIADAGVGDLPAWLRPGDCLVFNDTRVIPAQLEGRRGDARIGATLHKRIDLRRWQAFIRNAKRLRVGETVDFGAGAAALADERLPDGSFILAFAGDEPVEVLLERAGTMPLPPYIAGKRPTDDADRADYQTMFAREDGAVAAPTAALHFTPKLLEALAAAGVLTETLTLHVGAGTFLPVKADDTEDHVMHAEWGRIDADTAARLNAVRAAGGRVIAVGTTSLRLLESAAQDDGVIAPFAGDTAIFITPGYRFKAIDGLMTNFHLPRSTLFMLVSALMELETMQAAYAHAIESEYRFYSYGDASLLLPRQSDRSA

SEQ ID NO: 72325 - protein, 341 aa, Sphingopyxis terrae
  REGION 1..341: note = tr|A0A142VUZ2|A0A142VUZ2_9SPHN S-adenosylmethionine:tRNA ribosyltransferase-isomerase; OS = Sphingopyxis terrae subsp. terrae NBRC 15098 OX=1219058; GN = queA PE=3 SV=1
MRVDAFDFDLPPERIALRPARPRDAARMLVVAGGAMTDAGVRDLPLWLRPGDCLVFNDTRVIPAQLEGRRGDARIGATLHKRIDLRRWQAFVRNAKRLRIGETVDFGAGVGALAEDRLADGSFILFFPGEEPVELLLERAGTMPLPPYIAGKRATDDADRSDYQTMFAQKDGAVAAPTAALHFTPDLLAALGAAGIESETLTLHVGAGTFLPVKADDTEDHVMHAEWGVIDSATAERLNAVRARGNRVIAVGTTSLRLLESAAGEEGVIRPFEGDTAIFITPGYRFRAIDGLMTNFHLPRSTLFMLVSALMGLETMQAAYAHAIAGGYRFYSYGDSSLLLP

SEQ ID NO: 72326 - protein, 343 aa, Sphingopyxis terrae
  REGION 1..343: note = tr|A0A1Y6FVI7|A0A1Y6FVI7_9SPHN S-adenosylmethionine:tRNA ribosyltransferase-isomerase; OS = Sphingopyxis terrae subsp. ummariensis OX=429001; GN = queA PE=3 SV=1
MRVDAFDFDLPPERIALRPARPRDAARMLVVAGSAMTDAGVRDLPQWLRPGDCLVFNDTRVIPAQLEGRRGDARIGATLHKRTDLRRWQAFVRNAKRLRIGETVDFGAGVSALAEDRLADGSFILFFPGDEPVELLLERAGTMPLPPYIAGKRATDDADRSDYQTMFAQKDGAVAAPTAALHFTPDLLAALGAAGIESETLTLHVGAGTFLPVKADDTEDHVMHAEWGVIDAATADRLNAVRARGNRVIAVGTTSLRLLESAAGEDGVIRPFEGDTAIFITPGYRFRAIDGLMTNFHLPRSTLFMLVSALMGLETMQAAYAHAIAGGYRFYSYGDSSLLLPQR

SEQ ID NO: 72327 - protein, 343 aa, Sphingopyxis witflariensis
  REGION 1..343: note = tr|A0A246JXN3|A0A246JXN3_9SPHN S-adenosylmethionine:tRNA ribosyltransferase-isomerase; OS = Sphingopyxis witflariensis OX=173675 GN=queA PE=3 SV=1
MRVDAFDFDLPPERIALRPARPRDAARMLVVDGGSMTDAGVGDLPSWLRPGDCLVFNDTRVIPAQLEGKRGDARIGATLHKRIDLRRWQAFIRNAKRLRVGETVDFGSGVSAVAEDRLADGSFILAFAGDEPVEVLLERAGTMPLPPYIAGKRATDADDRSDYQTMFAREDGAVAAPTAALHFTPGLLDALAKAGIATETLTLHVGAGTFLPVKADNTEDHVMHAEWGRIDADTAARLNAVRAKGGRVIAVGTTSLRLLESAAGEDNIIAPFAGDTAIFITPGYRFRAIDGLMTNFHLPKSTLFMLVSALMGLDVMQATYAHAIASEYRFYSYGDASLLLPPR

SEQ ID NO: 72328 - protein, 343 aa, unidentified
  source 1..343: note = Sphingorhabdus contaminans
  REGION 1..343: note = tr|A0A553WC89|A0A553WC89_9SPHN S-adenosylmethionine:tRNA ribosyltransferase-isomerase; OS = Sphingorhabdus contaminans OX=1343899 GN=queA PE=3 SV=1
MRVDLFDFVLPADRIALRPVSPRDSARMLHVCGKEGLSDHSVRDLPNLLRKGDCLIFNDTRVIPAQLEGTRGDAKVGATLHKRVDLRRWQAFVRNAKRLRVGETVDFGRGVLAVAEERHEDGSFTLYFEGNERVEILLERAGTMPLPPYIAGKRPPDERDAQDYQTMFADKDGAVAAPTASLHFTPELMAGIEAAGIETATLTLHVGAGTFLPVKVDDTTEHRMHHEWGQIDSNTAYRLNSVRENGGRLIAVGTTSLRLIESAADEEGTIRPFSGDTDIFITPGYRFKAIQGLMTNFHLPKSTLFMLVSALMGRETMQAAYAHAIANDYRFYSYGDSSLLIPA

SEQ ID NO: 72329 - protein, 341 aa, unidentified
  source 1..341: note = Sphingorhabdus marina
  REGION 1..341: note = tr|A0A1N6CM31|A0A1N6CM31_9SPHN S-adenosylmethionine:tRNA ribosyltransferase-isomerase; OS = Sphingorhabdus marina DSM 22363 OX=1123272 GN=queA PE=3; SV = 1
MRVDLFDFALPPENIALRPAVPRDSARLLLAQNGHITDHIVRDLADLLTPNDVLVFNDTRVIPAQLTGRRGNATIGATLHKRVDLRRWQAFVKNAKRLKPGDRIDFGADVFATAEQKNPDGSFTLRFLGDEPVEILLDRAGTMPLPPYIASKREIDERDAEDYQTMFAREDGAVAAPTAALHFTDELMASLAAAGIGTQTLTLHVGAGTFLPVKADETDDHQMHSEWGRIEADVADRLNDIRASGGRVIAVGTTSLRLLESAAGDDDIIRPFAGDTDIFITPGYRFKAIDGLMTNFHLPRSTLFMLVSALMGLERMQAIYAHAIAQDYRFYSYGDSSLLIP

SEQ ID NO: 72330 - protein, 343 aa, unidentified
  source 1..343: note = Sphingorhabdus sp.
  REGION 1..343: note = tr|A0A220W769|A0A220W769_9SPHN S-adenosylmethionine:tRNA ribosyltransferase-isomerase; OS = Sphingorhabdus sp. SMR4y OX=2584094 GN=queA PE=3 SV=1
MRVDLFDFALPQELIALRPAVPRDSARMLQVEGDRISDHIVSDLPQLLGPNDILVFNDTKVIPAQLQGRRGEAKIGATLHKRVDLRRWQAFIRNAKRLRVGEVVDFGSDVTAEAEAKLDDGSFILHFLGNEPVELMLERAGTMPLPPYIASKRAIDARDADDYQTMFAREKGAVAAPTAALHFTDGLLAGLAAAGVGSETLTLHVGAGTFLPVKVDETDDHQMHSEWGRIDAATADRLNAAREAGGRVIAVGTTSLRLLESATGEDGIIRPFEGDTDIFITPGYRFRAIDGLMTNFHLPKSTLFMLVSALMGLETMQEVYAHAVAEGYRFYSYGDSSLLLPKR

SEQ ID NO: 72331 - protein, 346 aa, unidentified
  source 1..346: note = Sphingorhabdus sp.
  REGION 1..346: note = tr|A0A5C6U921|A0A5C6U921_9SPHN S-adenosylmethionine:tRNA ribosyltransferase-isomerase; OS = Sphingorhabdus sp. D-2Q-5-6 OX=2601267 GN=queA PE=3 SV=1
MRVDLFDFDLPPERIALRPAAPRDQARMLCVTPDSLSDHRVADLPQLLRAGDCLVFNDTRVIPARLEGVRLRDGNAAQIGATLHKRLALREWQAFVRNAKRVRDGERIDFGQGVTAIASAKADDGSMTLSFEGDEPVETLLARAGTMPLPPYIAGKRPTDARDAEDYQTMFADKDGAVAAPTAALHFTPDLMTALADAGIAHETLTLHVGAGTFLPVKADDTDDHAMHAEWGLIDQATAGRLNAVRARGGRVIAVGTTSLRLLESAANAAGMIEAFEGDTAIFITPGYAFRGIDGLMTNFHLPRSTLFMLVSALMGRETMQAAYGYAIDHDYRFYSYGDASLLLPG

SEQ ID NO: 72332 - protein, 342 aa, unidentified
  source 1..342: note = Sphingorhabdus wooponensis
  REGION 1..342: note = tr|A0A3R8RSA0|A0A3R8RSA0_9SPHN S-adenosylmethionine:tRNA ribosyltransferase-isomerase; OS = Sphingorhabdus wooponensis OX=940136 GN=queA PE=3 SV=1
MRVDLFDFELPPERIALRPVSPRDSARMLCVSGDAAMVDRSVRDLPQMLRKGDCLIFNDTRVIPAQLQGMRGDASIGATLHKRIDLRRWQAFIRNAKRLHPGDVIDFGQGVTAISEERHDDGSFTLFFEGEEPVEILLHRAGTMPLPPYIAGKRPTDERDAQDYQTMFAQKDGAVAAPTASLHFTPELMEAVHAAGIETATLTLHVGAGTFLPVKADDTTEHRMHSEWGSIDAATAQRLNSICEAGGRLIAVGTTSLRLVESAADENGVVHPFEGDTDIFITPGYRFKAIGGLMTNFHLPKSTLFMLVSALMGRETMQAAYAHAIAHEYRFYSYGDSSLLLP

SEQ ID NO: 72333 - protein, 341 aa, unidentified
  source 1..341: note = Sphingosinicella ginsenosidimutans
  REGION 1..341: note = tr|A0A5C6TQQ4|A0A5C6TQQ4_9SPHN S-adenosylmethionine:tRNA ribosyltransferase-isomerase; OS = Sphingosinicella ginsenosidimutans OX=1176539 GN=queA; PE = 3 SV=1
MRVDLFDFDLPPDRIALRPARPRDSARLLQVTPGGLADHLVTDLPRLLRRGDVLVFNDTRVIPAQLEGMRGSARIGATLHKREGVREWRAFIRNAKRLKPGDRIDFGAGVQAIASDRGDDGSFLLAFEGDEPVELMLTRAGRMPLPPYIAGKRAVDARDAEDYQTMFAREDGAVAAPTAALHFTPRLMAALAEAGIGHETLTLHVGAGTFLPVKAEDTDAHAMHAEWGRIDAATAARLNAARAAGGRIVAVGTTSLRLIESAAGDDGAIQPFQGDTAIFITPGYRFRGIDGLVTNFHLPKSTLFMLVSALMGLERMQAAYAHAIAAGYRFYSYGDASLLLP

SEQ ID NO: 72334 - protein, 341 aa, Sphingosinicella microcystinivorans
  REGION 1..341: note = tr|A0A495RP34|A0A495RP34_SPHMI S-adenosylmethionine:tRNA ribosyltransferase-isomerase; OS = Sphingosinicella microcystinivorans OX=335406 GN=queA; PE = 3 SV=1
MRVDDFDFELPQDLIALRPASPRDAARMLVVRPGGLDDRVVRDLPGLLAPGDVLVFNDTRVIPAQLFGQKGDAKIGVTLHKREGPYEWRAFVRNAKRLKAGDRVDFGAGLEGVVTEKSADGSILWRFECEGALEAALHAAGTMPLPPYIAGKRPADARDAEDYQTMFAAREGAVAAPTAALHFSPDLIAALDARGVGRETLTLHVGAGTFLPVKVDDTRDHKMHAEWGEVSAGAAARLNAARAAGGRIIAVGTTSLRLLESAAREDGQIAAFSGDTDIFITPGYRFRAVQGLMTNFHLPRSTLFMLVSALVGLQTMRGAYAHAIENGYRFYSYGDSSLLLP

SEQ ID NO: 72335 - protein, 341 aa, Sphingosinicella sp.
  REGION 1..341: note = tr|A0A4P6FIH0|A0A4P6FIH0_9SPHN S-adenosylmethionine:tRNA ribosyltransferase-isomerase; OS = Sphingosinicella sp. BN140058 OX=1892855 GN=queA PE=3; SV = 1
MRVDLFDFELPPERIALRPAEPRDSARLLLVRPDGLADHSVADLPQLLRPGDVLVFNDTRVIPAQLEGRRGDARIGATLHKREGLRDWRAFVRNAKRVRDGDRIDFGAGVTALAGEKAEDGSILLSFDGEEPVELLLERAGRMPLPPYIAARREADARDVEDYQTMFAREKGAVAAPTAALHFTPALIDALGRRGIAHETLTLHVGAGTFLPVKADDTDDHRMHSEWGRIDAAAAERLNAARAEGGRIIAVGTTSLRLLESATGEDGIVRPFEGDTAIFITPGYRFRAIGGLLTNFHLPRSTLFMLVSALMGRETMQAAYAHAIKGGYRFYSYGDASLLLP

SEQ ID NO: 72336 - protein, 343 aa, Sphingosinicella sp.
  REGION 1..343: note = tr|A0A2U2IZS1|A0A2U2IZS1_9SPHN S-adenosylmethionine:tRNA ribosyltransferase-isomerase; OS = Sphingosinicella sp. QZX222 OX=2068657 GN=queA PE=3 SV=1
MRVDLFDFELPPERIALRPASPRDSARMLVVRPDGLGDRVVTDLPGQLRAGDMLVFNDTRVIPAQLEGRRGEARIGATLHKREGPREWRAFIRNAKRVREGDRIDFGEGVSAIAGDRASDGSMALVFEGEEPVELLLERAGRMPLPPYIAGKREADERDASDYQTMFAKEKGAVAAPTAALHFTPALMESLGAAGILHETLTLHVGAGTFLPVKAEDTDSHVMHSEWGRIEAATAERLNAARAEGGRIIPVGTTSLRLLESAADETGRLHPFEGDTAIFITPGYRFRVTDGLITNFHLPRSTLFMLVSALMGRERMQAAYAHAIGTGYRFYSYGDASLLLPRG

SEQ ID NO: 72337 - protein, 347 aa, unidentified
  source 1..347: note = Spiribacter aquaticus
  REGION 1..347: note = tr|A0A557RK00|A0A557RK00_9GAMM S-adenosylmethionine:tRNA ribosyltransferase-isomerase; OS = Spiribacter aquaticus OX=1935996 GN=queA PE=3 SV=1
MQVSDFNYELPTHLIASEPLPNRTDSRLLVLDPATGGITDRRFPAIRDYLQPGDLLVVNDTRVLPARLYGRKASGGQVEILLERLTGEGEALAQLRANKTPAIPSTLTLEGDLSVEVVAREGDFFRLRFAGDEPLPVLLERHGHMPLPPYIKRADRPDDRQRYQTVFAERPGAVAAPTAGLHFDEPLLEALRSDGIETATLTLHVGAGTFQPIRTDSLEDHRMHAEWLSVPASVCEAVARTRARGGRVVAVGTTVVRALESAAQTGELQPFEGETEIFIYPGFPFQVIDGLITNFHLPGSTLVMLVSALAGRESILAAYRHAVEAEYRFFSYGDAMLIMAGTAEVPS

SEQ ID NO: 72338 - protein, 347 aa, unidentified
  source 1..347: note = Spiribacter curvatus
  REGION 1..347: note = tr|U5T2Y5|U5T2Y5_9GAMM S-adenosylmethionine:tRNA ribosyltransferase-isomerase OS=Spiribacter curvatus; OX = 1335757 GN=queA PE=3 SV=1
MQVSDFNYELPEALIASEPLPNRTDSRLLVLDPDTGGVTDRQFPAIREYLRPGDLLVVNDTRVLPARLYGRKDTGGAIELLLERLTGGNEALAQIRASKTPPIPSRITLEGNLVVEVTGREGEFFRLRFPGDEPLPTLLERHGHMPLPPYIKREDTPADRERYQTVFADRPGAVAAPTAGLHFDASLLAALRDDGVETATLTLHVGAGTFQPIRTETLEDHRMHAEWLSVPASVCAAVARTRARGGRVIAVGTTVVRALESAAQTGALQPFEGETEIFIYPGFEFRVIDGLVTNFHLPGSTLVMLVSALAGRDAILNAYGHAVRERYRFFSYGDAMLILSAAGGERP

SEQ ID NO: 72339 - protein, 180 aa, unidentified
  source 1..180: note = Spiribacter salinus
  REGION 1..180: note = tr|A0A540VRH0|A0A540VRH0_9GAMM S-adenosylmethionine:tRNA ribosyltransferase-isomerase (Fragment) OS=Spiribacter salinus OX=1335746; GN = FKY71_08940 PE=3 SV=1
MKVSDFHYDLPESLIASEPLPRRTDSRLLVLDPATGAITDDRFPGIRQWLQPGDLLVLNDTRVLPARLYGHKDTGGAIEILLERLTGGTEALAQIRASKTPRAGTQLKLEGGIEAEVTGRAGEFFRLRFSDQRPLPELLERHGHMPLPPYIRREDTAADRARYQTVFAAKPGAVAAPTAG

SEQ ID NO: 72340 - protein, 182 aa, unidentified
  source 1..182: note = Spiribacter salinus
  REGION 1..182: note = tr|A0A540VN72|A0A540VN72_9GAMM S-adenosylmethionine:tRNA ribosyltransferase-isomerase (Fragment) OS=Spiribacter salinus OX=1335746 GN=queA PE=3; SV = 1
YQTVFAAKPGAVAAPTAGLHFDEPLLDDLRSAGIETATLTLHVGAGTFQPVRSETVSGHQMHAEWLSVSESVCEAVAATRARGGRVIAVGTTVVRSLEAAAQAGQLAPYEGETEIFIYPGFEFQVVDGLITNFHLPGSTLVMLVSALAGREHILAAYRHAVAKEYRFFSYGDAMLILPQVST

SEQ ID NO: 72341 - protein, 347 aa, unidentified
  source 1..347: note = Spiribacter sp.
  REGION 1..347: note = tr|A0A2U2N4Y1|A0A2U2N4Y1_9GAMM S-adenosylmethionine:tRNA ribosyltransferase-isomerase; OS = Spiribacter sp. E85 OX=2182432 GN=queA PE=3 SV=1
MRVSDFHYELPERLIAAEPPARRTDSRLLVLDGETGAVADRRFTDLRELLCPGDLLVLNDTRVLPARLLGHKDSGGAVEVLLERLLGGSEALAQLRVSKKPRAGSELVLEGGLAVTVVAREGDFFRLRFPDDAPLPVLLERHGHMPLPPYIRRPDTETDRERYQTVYARTPGAVAAPTAGLHFDRPLLEALRADGVRTESLTLHVGAGTFQPVRSETVEGHHMHAEWLSVPAAVCEAAADTRARGGRVIAVGTTVVRALETAARGGELAPFEGETDIFLYPGHRFRAIDGLITNFHLPESTLLMLVSAFGGRENVLAAYRHAVAAKYRFFSYGDAMFLCPPAPEARP

SEQ ID NO: 72342 - protein, 390 aa, unidentified
  source 1..390: note = Spirobacillus cienkowskii
  REGION 1..390: note = tr|A0A369KTZ5|A0A369KTZ5_9PROT S-adenosylmethionine:tRNA ribosyltransferase-isomerase; OS = Spirobacillus cienkowskii OX=495820 GN=queA PE=3 SV=1
MKKELFNYDLPEELIAQTPLANRDESRLLVCNAKNKSIADCMFKNLDEVLNYEFQLQKNNAKLLLIANNSRVYPARVRIKRSSGGRGEVFFLERGEKTHYSCLLRPQSKLKIGEILYADLKEDIALFEISHLNPPKVSIIANMSLDKILDLYGEMPLPPYIQRDPKKIINYSKLDKERYQTVYSNINHVGSSASPTAGLHFSPSILKKCEENRIELSYVTLHVGLGTFLPVKSEDIESHEMHQEYYFISQETIKKISEYLSNGWPIVFVGTTSLRAVESYFQLLNLELGKNFILNNKNINQLENNLNKFSDKWHTTNIFIHPKNENSIFVPTIGNAIITNFHQPESTLAMLIAALMGMKFWKQFYSYAITNKYRFFSYGDSSLLIFGEQN

SEQ ID NO: 72343 - protein, 370 aa, Spirochaeta africana
  REGION 1..370: note = tr|H9UJB6|H9UJB6_SPIAZ S-adenosylmethionine:tRNA ribosyltransferase-isomerase OS=Spirochaeta africana (strain ATCC 700263 / DSM 8902 / Z-7692) OX=889378 GN=queA; PE = 3SV=1
MLTKDFSFELPEELIAQLPTEERGASRMMVLDAPESGAETAASTASGANRYHRMVADIVDLLPANTVMVVNNSRVRRARLEATTRNGGTVEVLLLRHIHETGKGGCDGAWEVMLSKAKRRRPGEILGLPGDRQLEIRERQDSDSWLVTIQPGIDDDYLQQYGRVPLPPYIRRMHQDIDLDRYQTVYAETTGSVAAPTAGLHFTPEILSRIREKGIQLCSITLHVGLGTFLPVRAERITDHAMHREEYTISKETARAVEQARAAGRPVLAVGTTSVRALESSWQDDNTLATGAQSTDIFIYPGYRFRAVDMLFTNFHTPESTLLMLVSAFAGKERILAAYQEAVQLRYRFFSYGDAMLINRWSRPLLQNQP

SEQ ID NO: 72344 - protein, 347 aa, unidentified
  source 1..347: note = Spirochaeta lutea
  REGION 1..347: note = tr|A0A098R1K6|A0A098R1K6_9SPIO S-adenosylmethionine:tRNA ribosyltransferase-isomerase; OS = Spirochaeta lutea OX=1480694 GN=queA PE=3 SV=1
MKTNNFSFNLPEHLIAQYPSDKRGTSRLLVANITPGSAPRMTHTRVEEISQHLPSGSLLIFNDSRVRKARIFGTNQKTGSRVEFLLVEETNDPTTWKAMANKSKKQREGTVYRFPQGVQGTIIGNDANLKLLQFSQPISDTYLDKNGHIPLPPYIDRTDEPLDETRYQTVYARADHTGSVAAPTAGLHFTPEILEALTAEGHTIAYVTLHVGLGTFLPVRTEDIEQHRMHTEHYSIPEKTAQLVNKAKEEGRPIIAVGTTSIRTLESAWDPRTQQLKSGMSKTGIFIYPGYSFQVINGIFTNFHTPESTLLMLVSAFAGLDAIKQIYATAVQLEYRFFSYGDAMLLL

SEQ ID NO: 72345 - protein, 340 aa, Spirochaeta perfilievii
  REGION 1..340: note = tr|A0A5C1QAV1|A0A5C1QAV1_9SPIO S-adenosylmethionine:tRNA ribosyltransferase-isomerase; OS = Spirochaeta perfilievii OX=252967 GN=queA PE=3 SV=1
MKISDYSFDLPKEQIAQYPPEERGTANLMVIDRLDGSIEHKNMQNFTDYIDDNTVVVFNNSRVRKARLFATTDDSGGKVEFFMLSKTEKNQWEVMVSKAKKQVVGRSYTFEGGAKGRITRIISTNHRIVEFDTDINDDYLDQYAHIPLPPYIKRGDDNADSERYQTVFSKEIGSCAAPTASLHFTQDILDKIKEKGADIAFVTLHVGLGTFAPVRTEYLDDHDMHYEDFYISDESATIIENAKKAGKKILAVGTTSVRTLESSWVDGKLLRGTRSTNLFIKPGYEFKVVDRMFTNFHTPESTLLVLVSTFATKTLIDKAYKEAVDSDYMFFSYGDAMLIM

SEQ ID NO: 72346 - protein, 340 aa, Spirochaeta sp.
  REGION 1..340: note = tr|A0A1W9N7J2|A0A1W9N7J2_9SPIO S-adenosylmethionine:tRNA ribosyltransferase-isomerase; OS = Spirochaeta sp. LUC14_002_19_P3 OX=1940821 GN=queA PE=3; SV = 1
MRTSLFSFDLPAHLIASHPPSERGSSRLMVLDRHTGAVCHDAVQSLPALLKPGTLMVFNDTRVRKARLFATNAANGAKGEFLFLQPSADGGWDCLVDRAKRKRTGQEWLFPSGICGVITGAPAPDRRTLRLVPMPDEGWFERNGHIPLPPYMRRKDEPEDSEHYQTVYAKNTGSAAAPTAGLHFTPALLEALKAAGMELAWLTLTVGLGTFAPMRAEDISTHTMHTEHYDIPEETARAVNAAKAEGRPVLAVGTTAVRALESAWKGARLIPGPGSANLFISPGYSFSVVDVLFTNFHTPRSTLLVLVSAFARREWILGAYGRAIEEGYRFFSYGDAMLIR

SEQ ID NO: 72347 - protein, 346 aa, Spirochaeta sp.
  REGION 1..346: note = tr|A0A3C0T2C4|A0A3C0T2C4_9SPIO S-adenosylmethionine:tRNA ribosyltransferase-isomerase; OS = Spirochaeta sp. OX=28185 GN=queA PE=3 SV=1
MKTSHFSFDLPDELIAQYPSNRRGESRLMSLNRKTESITHHSITELPELLPEGSLMVFNNSRVRKARIYGESSTGGKVEFLLIKPLTEEETDGRRWLAMVSKAKKQKPGKRYSFAVGMEGEILRIEGSHRVIEFSNPIDDSWLDKHGRMPLPPYIKREDEFSDADRYQTVYSENTGSIAAPTAGLHFTEETMSALAEHKIETAFISLHVGLGTFLPVRTDDIRDHKMHSEDYEISDSAAAAINRAVSEKRDIIAVGTTSVRTLESEAQRIGTPAVDPGRRSTDIFIYPGRSFKLVNHMLTNFHTPESSLLMLVSAFAGKENIDKAYKKAIENKYRFYSYGDAMLII

SEQ ID NO: 72348 - protein, 351 aa, Spirochaeta thermophila
  REGION 1..351: note = tr|E0RST7|E0RST7_SPITD S-adenosylmethionine:tRNA ribosyltransferase-isomerase OS=Spirochaeta thermophila (strain ATCC 49972 / DSM 6192 / RI 19.B1) OX=665571; GN = queAPE=3 SV=1
MTISTSSPEEKTATMKLKDFYFDLPEELIAQHPAQRREDARLMVVHRETGRIEHAHVRELPWILPPSCLVFNDTRVRKSRLLATRRDSGGKVEILLLEEVEPSLWKAVVSRARRQRPGVVYELPGGREAEIVGMEEGLRLVRISPPIDEVYLDRHGHVPLPPYIKRSDLPEDEERYQTVFARHPGSAAAPTAGLHFTPALMDELKSRHTVTFLTLHVGLGTFQPVRTENVEEHRMHKERFYIPEETARVIEGAKSQHIPVCAVGTTTTRALESAWEHGRLKRGWQETSLYIYPGYTFRVIDRLFTNFHTPGSSLVLLVSAFLGKDLLLEAYRKAIEHRYRFFSYGDAMLII

SEQ ID NO: 72349 - protein, 337 aa, Spirochaeta thermophila
  REGION 1..337: note = tr|G0GE78|G0GE78_SPITZ S-adenosylmethionine:tRNA ribosyltransferase-isomerase OS=Spirochaeta thermophila (strain ATCC 700085 / DSM 6578 / Z-1203) OX=869211 GN=queA P E=3 SV=1
MKLKDFYFDLPEDLIAQHPSQRREDARLMVVHRETGRIEHSYVRELPLILPPSCLVFNDTRVRKSRILATRRDSGGKVEILLLEEVEPSLWKALVSRTRRQRAGVVYDLPGGREAEIVGMEDGLRLVRISPPIDEAYLDRHGHVPLPPYIKRADLPEDEERYQTVFARHPGSAAAPTAGLHFTPALMDELKSRHTVTFLTLHVGLGTFQPVRTENVEEHRMHTERFHISEETARVIESAKSRHIPVCAVGTTSTRALESAWEHGRLKRGWQETSLYIYPGYTFKVIDHLFTNFHTPGSSLILLVSAFLGKDLLLEAYRKAIEHRYRFFSYGDAMLII

SEQ ID NO: 72350 - protein, 267 aa, unidentified
  source 1..267: note = Spirochaetaceae bacterium
  REGION 1..267: note = tr|A0A3D3SBR9|A0A3D3SBR9_9SPIO S-adenosylmethionine:tRNA ribosyltransferase-isomerase (Fragment) OS=Spirochaetaceae bacterium OX=1898206; GN = DIT55_09245 PE=3 SV=1
MKTDDFNFDLPETSIAQYPPERRGDSRLLVLDRAGSAAAQPDRIHQTHSMVKDLLRFLEPGTLMVFNDSKVRKARIYGTALETGAVVEFLLLEPLTRQTGPSAVSASWRAMTSKAKKQKIGKSYIFPDGLKGTIVGEEDDEKIIEFDEALGDQYLEANGHMPLPPYIKREDEVSDSERYQTVYAKVTGSAACPTAGLHFTQPLLDSLSSAGIDIEWVTLHVGLGTFLPVRVDEVERHRMHEEWYTVSEKTAAAVNAAKKEGRKVLAV

SEQ ID NO: 72351 - protein, 346 aa, unidentified
  source 1..346: note = Spirochaetaceae bacterium
  REGION 1..346: note = tr|A0A3C0WXU5|A0A3C0WXU5_9SPIO S-adenosylmethionine:tRNA ribosyltransferase-isomerase; OS = Spirochaetaceae bacterium OX=1898206 GN=queA PE=3 SV=1
METKDLYFDLPDELIAQYPADRRGNDRLLAVNRRTGKYEDMRFCDFPSLLEPGCLLVLNESKVRKARVFASTENGGKVELLFLSPESGGAWRVTSNRLKKRKAGETLVAGKVAFKLLRINDDGTFCLMPVSGTDSPEGIREDFFLENGHVPLPPYIKREDEFSDENRYQTVYAKNLGSVASPTAGLHYTKEILDNIRARGVEIAFVTLHVGMGTFLPIRSQTLEDHRMHSEDYEITPDNAALINSAIAAKTPIIASGTTSLRCLESACDASSGIVRSGLSSTSIFITPGYEFKVANRLLTNFHTPYSTLMALVAAFSSLDIVKSAYEHAVKEKYRFFSYGDATYWY

SEQ ID NO: 72352 - protein, 344 aa, unidentified
  source 1..344: note = Spirochaetae bacterium
  REGION 1..344: note = tr|A0A2N1T7J6|A0A2N1T7J6_9SPIR S-adenosylmethionine:tRNA ribosyltransferase-isomerase; OS = Spirochaetae bacterium HGW-Spirochaetae-1 OX=2013832; GN = queA PE=3 SV=1
MNPHYTLEDFNFHLPEELIAQYPREKRDESRLFVMDRKSSDFRHSVFSDLPAELHEGDILVFNDARVIPGRIFCRRKTGGKIEVILTRRINDTEWLVICNRTKRMNPGELLQVDKDHAIELKVMDRVDDYLRVECNCSLDDDVLNEIGEIPLPPYIKREHEGDDAERYQTVYARESGAVAAPTAGLHFTNDLMDIIAKKGIEQHFLTLHVSWGTFQPVRENDLARHKMHNERYILPEKTAQSLARAKRENRRIIAVGTTSLRVLESCYDNGNYKAGYGETEIFIYPPYKIKSIDALITNFHTPYSTLLMLVSAFAGYDKIKQAYQEAVRERYNFFSYGDAMIIT

SEQ ID NO: 72353 - protein, 344 aa, unidentified; identical to SEQ ID NO: 72186
  source 1..344: note = Spirochaetae bacterium
  REGION 1..344: note = tr|A0A2N1QQP6|A0A2N1QQP6_9SPIR S-adenosylmethionine:tRNA ribosyltransferase-isomerase; OS = Spirochaetae bacterium HGW-Spirochaetae-9 OX=2013841; GN = queA PE=3 SV=1

SEQ ID NO: 72354 - protein, 244 aa, unidentified
  source 1..244: note = Spirochaetales bacterium
  REGION 1..244: note = tr|A0A524M2C4|A0A524M2C4_9SPIR S-adenosylmethionine:tRNA ribosyltransferase-isomerase (Fragment) OS=Spirochaetales bacterium OX=2026792 GN=queA; PE = 3 SV=1
RAKKLKVGTRILLPDGTPAEVVGHDEIHVHLTVEPSLSEEFFRTHGHVPLPPYIRREDAPEDEERYQTVYARTIGSIAAPTAGLHFTRDLLGQLESRGIQMEWVSLHVGLGTFLPVRCDDIENHEMHSEECEVSADTASRINTAIARGRPVIAVGTTSVRTLESAFDPTIGALREFRSATRLFSRPGYEFKVVSGIFTNFHTPESTLLMLVSAMGGQESVLAAYKEAVSRGYRFFSYGDAMLII

SEQ ID NO: 72355 - protein, 354 aa, unidentified
  source 1..354: note = Spirochaetales bacterium
  REGION 1..354: note = tr|A0A524IPS4|A0A524IPS4_9SPIR S-adenosylmethionine:tRNA ribosyltransferase-isomerase; OS = Spirochaetales bacterium OX=2026792 GN=queA PE=3 SV=1
MKTRTFSFNLPEELIAQSPAAERGASRLLVLDRASGTVRHDWFSSLPDLLSPETLIVFNDTSVVKARIYGRSADGLSAAREMEVLLVERVSALRWKILARGKRKSLSGKYVVFPEGLAGTIDAGEPEGTGGGAFSAGDEYLYIDFDKPLSEDYLERNGHVPLPPYIRRPDNEEDLKRYETVYASVKGSVAAPTAGLHFSEAMLGELTKRGIEYCFVTLHVGLGTFRPIRAENIEDHVMHEEEYFVSDETAAAVTAAHRAGRHVCAVGTTVVRTLESAWKGTLLQAGRGRTGLFITPGYSFGIVKQLVTNFHTPESSLLVLVSAFAGVDSIRQAYEEAVREKYRFFSYGDAMFIQ

SEQ ID NO: 72356 - protein, 338 aa, unidentified
  source 1..338: note = Spirochaetes bacterium
  REGION 1..338: note = tr|A0A496QWR7|A0A496QWR7_9SPIR S-adenosylmethionine:tRNA ribosyltransferase-isomerase; OS = Spirochaetes bacterium OX=2202144 GN=queA PE=3 SV=1
MKTRDLFFNIPDHLIAQHPPKERCKSRLLVLNRGDGSLKHSTMESFPEFIRPGTVAVFNDTRVRKCRIYGYSSSGGNVEFLLLKEQRKNLWEALVRRIAKQKEGKEYNFPGGIKGKIEKRESSTVLVRFDSDIDDDYLERYGHIPLPPYIKREDTPEDELRYQTVYSKKTGSVAAPTAGLHFNEKIIEELKVRGIEILFVTLHVGLGTFTPIRTEEVENHRMHREEYEIDEQTANSINKARREGRKILAVGTTTLRAIESAYDEEMVRAKRDETDLYIYPGYRFKVVDQLLTNFHAPESSLLALVMAFSGKESIQRAYREAALKEYRFFSYGDAMLIL

SEQ ID NO: 72357 - protein, 370 aa, unidentified
  source 1..370: note = Spirochaetes bacterium
  REGION 1..370: note = tr|A0A1V5T6Z9|A0A1V5T6Z9_9SPIR S-adenosylmethionine:tRNA ribosyltransferase-isomerase; OS = Spirochaetes bacterium ADurb.Bin269 OX=1852911 GN=queA; PE = 3 SV=1
MQTKDFYFDLPEDLIAQEPSAVRGRDRLLQLDRNTGAWADHEFADLVSLIDPGTLMVFNDSRVRKARIYATADSSGNRTEFLLISRIHDLPGAASVVPAGTQHGAQAIPSAPCVWKAMVRNAKRHKSGRTYTFADGTRAEIIADPQGLLDGTEFRYLQFDRLVDDAWLDAQGHLPLPPYIRRDDSAADQDRYQTVYARTVGSVAAPTAGLHFTPEILASLDERGIERRSVTLHVGLGTFLPVRSERLEDHTMHSESFSVSGETARAVTQAKREGRPVLAVGTTSIRTLESAWNREERVLEPGERDTSIFIYPGYEFGVVDQVFTNFHTPESTLLMLVSAFAGKERIFAAYRHAVESRYRFFSYGDSMYIR

SEQ ID NO: 72358 - protein, 341 aa, unidentified
  source 1..341: note = Spirochaetia bacterium
  REGION 1..341: note = tr|A0A352VFW2|A0A352VFW2_9SPIR S-adenosylmethionine:tRNA ribosyltransferase-isomerase; OS = Spirochaetia bacterium OX=2053615 GN=queA PE=3 SV=1
MKTDNFDFELPDELIAQKPADIRSDARLLVYYRNTGEIVDSKVLNITDFIDDTYHLVFNNSKVIPCRMKIKKVDSNREGELLVLKIVDNTTIHSLTDSNKKYKIGQRIVLPDGTMAIFKANIDDISKVIVSDKPVFDVDYFNTYGSIPLPPYIKKIPDSYDNERYQTTFSKKYGSAAAPTAGLHFDEKIFTILNDKKIDVSFVSLHVGLGTFQPIYSDDIENHQIHEEEYEIDREQSDALNQAIFNKKKIIPIGTTSLRTIESAYTSDGIFPGVAKTKLYITPGYQLKVASGLFTNFHTPKSSLAVLVASIIGYDNFIRIYKHAIENKYRFFSYGDAMLIL

SEQ ID NO: 72359 - protein, 343 aa, unidentified
  source 1..343: note = Spirochaetia bacterium
  REGION 1..343: note = tr|A0A3D3AJH1|A0A3D3AJH1_9SPIR S-adenosylmethionine:tRNA ribosyltransferase-isomerase; OS = Spirochaetia bacterium OX=2053615 GN=queA PE=3 SV=1
MKKEEFDFYLPEELIALKPAQKREDCRLLVIDKENKKYQDDIFKNILNYLNENDLLVFNNTKVDKARLFAEKKSGGKHEILLIEPLNPEKTLWKTIASKTKKLKPETILFFPHNIHAVVSESKGNGILYLQFNLSMEDDVLEKIGELPLPPYIRNKRNYSLEDEIDYQTVYACVPGSKAAPTAGLHFSDEILKELKKRKIQTADIQLFVSLGTFEPIRTETIHEHVMHEEEFFISKETADLLNAHLSSGKRIIAVGTTVVRTLESAFDGEKILHGKQKTTIFIKPGYQFKTVRGLITNFHTPLSTLLVLVSSFMGKKFTMDVYNHAVEKKYRFFSYGDSMLIL

SEQ ID NO: 72360 - protein, 346 aa, unidentified
  source 1..346: note = Unknown
  REGION 1..346: note = tr|A0A421KA18|A0A421KA18_9SPIR S-adenosylmethionine:tRNA ribosyltransferase-isomerase; OS = spirochete symbiont of Stewartia floridana OX=1968597; GN = queA PE=3 SV=1
MKTSLFSFDLPERLIAQTPLKERGCSRLMVLERNGSARLAAHRKVRDLPVLLKPGTLVVFNDTRVRKARLFATNQTTGGKGEFLFLRRIANGDWECMADKMKRKRYGQRWLFPDGAEGRIIGFSGDNTVILTLKPPPSEDWFERFGHMPLPPYIRRADAPIDCENYQTVYAREVGSVAAPTAGLHFTPEILKALEDREIQFAWVTLKVGSGTFLPVRCESIEDHLMHRESFHVPEETAQAVETAKREGRPILAVGTTTVRTLESAWNGTHLRAGHGVTDLFIYPGYEFGLVDELFTNFHTPKSSLIMMVSAFAGHERLLEAYRLAAEEEYRFYSYGDAMLITRGAA

SEQ ID NO: 72361 - protein, 404 aa, unidentified
  source 1..404: note = Spirosoma endophyticum
  REGION 1..404: note = tr|A0A1I1WHV6|A0A1I1WHV6_9BACT S-adenosylmethionine:tRNA ribosyltransferase-isomerase; OS = Spirosoma endophyticum OX=662367 GN=SAMN05216167_108282; PE = 3 SV=1
MSETDDLLLSEFQYDLPDERIARFPLPRRDASKLLVYRNGRISHERFSSLADLLPEASFLVFNNTKVIPARLYFTKPTGAIIELFLLNPFPNNLPISQAMETTGSAIWQGMIGNRKRWKQDESLQTTFPTSTGDVTLTAAWQNYETSVVRLSWQPIELTFAQLIQLAGEIPLPPYLKRDATDTDRDTYQTVYSTQEGAVAAPTAGLHFTPAIFDTLAEHGLEHDYLTLHVGAGTFQPIKTDNVRQHHMHTEQVVYTQQNLLNLLGHLGHIIAVGTTSMRALESLYWMGVKLLRNEPDPFSLDQQYAYQLPTDQQPKVDEALTAVLRYLTSTNKESVVAHTGIYITPGYRVRMCTGIITNFHQPGSTLILLIATLIGDEWKHIYKEALQNDYRFLSYGDSSLLLP

SEQ ID NO: 72362 - protein, 347 aa, unidentified
  source 1..347: note = Spirosoma endophyticum
  REGION 1..347: note = tr|A0A1I1LMZ1|A0A1I1LMZ1_9BACT S-adenosylmethionine:tRNA ribosyltransferase-isomerase; OS = Spirosoma endophyticum OX=662367 GN=queA PE=3 SV=1
MKLSEFKFDLPESLIAKYPVERGESRLMVVDRKAKTIEHKQFSDMLSYFGDGDVMVINNTKVFPARLYGNKEKTGAKIEVFLLRELNREMKLWDVLVDPARKIRVGNKLYFGDSDLVAEVIDNTTSRGRTIRFLFDGNHEEFMKAVDELGETPIPREMNREAESADRDDYQTVFAQHVGAVAAPTAGLHFTRAMMKRMEIKGIHFAPVTLHVGLGTFRQVDVEDLTKHKSDSENYRIPEESAQIVNTALDAGKRVCAIGTTSLKAIESSVSANSRLKPVEGWTDKFIFPPYDFKIANSLLTNLHLPESILIMMTSAFGGHELIKEAYQIAIKEKYRFFSYGDAMLII

SEQ ID NO: 72363 - protein, 347 aa, unidentified
  source 1..347: note = Spirosoma fluviale
  REGION 1..347: note = tr|A0A286GT45|A0A286GT45_9BACT S-adenosylmethionine:tRNA ribosyltransferase-isomerase; OS = Spirosoma fluviale OX=1597977 GN=queA PE=3 SV=1
MKLSEFKFDLPESLIAKYPVERGESRLMVVDRKAKTIEHKQFSDMLSYFGDGDVMVINNTKVFPARLYGNKEKTGAKIEVFLLRELNREMKLWDVLVDPARKIRVGNKLYFGDSDLVAEVIDNTTSRGRTIRFLFDGNHEEFMKAVDELGETPIPREMNREAEDADRDAYQTVFAQHVGAVAAPTAGLHFTRAMMKRMEIKGIDFAPVTLHVGLGTFRQVDVEDLTKHKTDSENYRIPEESAQIVNKALDAGKRVCAVGTTSLKAIESSVSANSRLKPVEGWTDRFIFPPYDFKIANSLLTSLHLPESILIMMTSAFGGHELIKEAYQVAIKEKYRFFSYGDAMLII

SEQ ID NO: 72364 - protein, 410 aa, unidentified
  source 1..410: note = Spirosoma fluviale
  REGION 1..410: note = tr|A0A286GNZ3|A0A286GNZ3_9BACT S-adenosylmethionine:tRNA ribosyltransferase-isomerase; OS = Spirosoma fluviale OX=1597977 GN=SAMN06269250_5694 PE=3; SV = 1
MMTNSNELLLSEFQYDLPDSRIARFPLPQRDASKLLLYKGGKVSHNRFTDLPDLLPPNSFLVFNDTKVIPARLHFAKPTGAVIELFLLSPFPTEPGGEPAPISLAMEATGTTIWQGMIGNRKRWKQDELLVTSFPTPEGEVILTASWYDYEQSAVRLSWQPAKLTFAQLVQYIGEIPLPPYLKREATATDRETYQTVYSKQEGAVAAPTAGLHFTPAVFEALTNKNISHDYLTLHVGAGTFQPIKTDDVRQHHMHTEQVVYTQANLTNLLNHLDTIIAVGTTSMRALESLYWMGTKLVRKESNPFQLDQHYAYQLPPDKQPIVADALKAVLDYLIAMNKESVVAHTGIYITPGYRIRLCKGLVTNFHQPGSTLILLIATLIGDNWKTVYKEALENEYRFLSYGDSSLLLP

SEQ ID NO: 72365 - protein, 347 aa, Spirosoma linguale
  REGION 1..347: note = tr|D2QKY7|D2QKY7_SPILD S-adenosylmethionine:tRNA ribosyltransferase-isomerase OS=Spirosoma linguale (strain ATCC 33905 / DSM 74 / LMG 10896) OX=504472 GN=queA PE=3 S; V = 1
MKLSEFKFDLPESLIAKYPVERGESRLMVVDRKAKTIEHKQFSDMLSYFGDGDVMVINNTKVFPARLYGNKEKTGAKIEVFLLRELNREMKLWDVLVDPARKIRVGNKLYFGDSDLVAEVIDNTTSRGRTIRFLFDGNHEEFMKAVDELGETPIPREMNREAEDADRDAYQTVFAQHVGAVAAPTAGLHFTRAMMKRMEIKGINFAPVTLHVGLGTFRQVDVEDLTKHKTDSENYRIPEDSAQIVNKALDAGKRVCAVGTTSLKAIESSVSANSRLKPVEGWTDRFIFPPYDFKIANSLLTSLHLPESILIMMTSAFGGHELIKEAYQVAIKEKYRFFSYGDAMLII

SEQ ID NO: 72366 - protein, 409 aa, Spirosoma linguale
  REGION 1..409: note = tr|D2QK30|D2QK30_SPILD S-adenosylmethionine:tRNA ribosyltransferase-isomerase OS=Spirosoma linguale (strain ATCC 33905 / DSM 74 / LMG 10896) OX=504472 GN=Slin_1101 P; E = 3 SV=1
MTNTNELLLSEFQYDLPDDRIARFPLPQRDASKLLLYKGGVVSHNRFTDLPSLLLPNSFLVFNDTKVIPARLHFTKPTGALIELFLLNPFPIEPGGEPAPISLAMEETGTAIWQGMIGNRKRWKQDEPLVTTFPTPEGEVILTASWHDYDQSAVRLSWQPAELTFAQLVQYIGEIPLPPYLKREATATDRETYQTVYSKQEGAVAAPTAGLHFTAAVFEALANNNINHDYLTLHVGAGTFQPIKTDDVRQHHMHTEQVVYTQANVRNLLAHLDTVVAVGTTSMRALESLYWIGTKLVRKEPNPFQLDQQYAYQLPDDQQPSVADALNAVLDYLVTANKESVVAHTGIYITPGYRIRLCKGLVTNFHQPGSTLILLIATLIGDSWKNVYKEALENDYRFLSYGDSSLLIP

SEQ ID NO: 72367 - protein, 347 aa, unidentified
  source 1..347: note = Spirosoma montaniterrae
  REGION 1..347: note = tr|A0A1P9WRU4|A0A1P9WRU4_9BACT S-adenosylmethionine:tRNA ribosyltransferase-isomerase; OS = Spirosoma montaniterrae OX=1178516 GN=queA PE=3 SV=1
MKLSEFKFDLPESLIAKYPVERGEGRLMVVHRKTKTIEHKKFSDILSYFDDGDVMVINNTKVFQARLYGNKEKTGAKIEVFLLRELNREMKLWDVLVDPARKIRVGNKLYFGDSDLVAEVIDNTTSRGRTIRFLFDGNHEEFMKAVDELGETPIPREIQRDVENADRDHYQTVFAQHVGAVAAPTAGLHFTKAMMKRMEIKGVHFAPITLHVGLGTFRQVDVEDLTKHKTDSENYRIGPEAADIVNTALDAGRRVCAVGTTSLKAIESSVSANSRLKPVEGWTDKFIFPPYEFKIANSLLTSLHLPESILIMMTSAFGGHELIKHAYEVAIKEKYRFFSYGDAMLIL

SEQ ID NO: 72368 - protein, 411 aa, unidentified
  source 1..411: note = Spirosoma montaniterrae
  REGION 1..411: note = tr|A0A1P9WXS2|A0A1P9WXS2_9BACT S-adenosylmethionine:tRNA ribosyltransferase-isomerase; OS = Spirosoma montaniterrae OX=1178516 GN=AWR27_13170 PE=3; SV = 1
MTDTQILSLQQFQYDLPDDRIARFPLTRRDASKLLVYRAGEISHAHFYDLPDQLPSDSFLFFNNTKVIPARLHFTRATGAIIELFLLNPFPAEQPITQAMEATGSAIWQGMIGNRKRWKPDETLETVIPTPTGDVVLTVAWHDSEQSVVRLSWQPTNLTFAQLIQYAGEIPLPPYLKRDPIDADRDTYQTVYSEKEGAVAAPTAGLHFTEAVFDNLNRRGIGHDYLTLHVGAGTFQPIKTDDVRQHLMHTEQVVYSQQNVRNIVANLGRIIPIGTTSMRALESLYWMGVKLLRDEANPFLLDQEYAYWLPAEYQPTPEEAVQAVLQHLINTRQETIIAHTGIYITPGYAMKLCKGIITNFHQPGSTLILLISALIGNNWRAVYDEALRTNYRFLSYGDSSLLIPKSERAKE

SEQ ID NO: 72369 - protein, 347 aa, unidentified
  source 1..347: note = Spirosoma oryzae
  REGION 1..347: note = tr|A0A2T0SU92|A0A2T0SU92_9BACT S-adenosylmethionine:tRNA ribosyltransferase-isomerase; OS = Spirosoma oryzae OX=1469603 GN=queA PE=3 SV=1
MKLSEFKFDLPDSLIAKYPVERGESRLMVVDRKAKTIEHKQFSDILSYFDDGDVMVINDTKVFPARLYGNKEKTGAKIEVFLLRELNREMKLWDVLVDPARKIRVGNKLYFGDSDLVAEVIDNTTSRGRTIRFLFDGNHDEFMKAVDELGEMPIPREINRDVEEADRDYYQTVFAKHVGAVAAPTAGLHFTRAMMKRMEIKGIHFAPVTLHVGLGTFRQVDVEDLTKHKTDSENYRIGDEAAQIVNTGLDAGKRVCAIGTTALKAIESSVSANSRLKPVEGWTDRFIFPPYDFKIANSLLTNLHLPESILVMMTSAFGGHELIKEAYQQAIKEKYRFFTYGDAMLIL

SEQ ID NO: 72370 - protein, 408 aa, unidentified
  source 1..408: note = Spirosoma oryzae
  REGION 1..408: note = tr|A0A2T0S1R8|A0A2T0S1R8_9BACT S-adenosylmethionine:tRNA ribosyltransferase-isomerase; OS = Spirosoma oryzae OX=1469603 GN=queA PE=3 SV=1
MNELPEIRLDQIQYDLPDDRIARFPLPQRDASKLLVYKGGQIDHGAFTDLPRQLPPDSYLVFNNTRVIPARLYFTRATGALIELFLLNPIDPDTGAVPPISQAMEATGAVVWQAMIGNRKRWKPGETLETRIPMPSGEVTLRADWFDTAQSLIRLSWQPAELPFAQLIEQAGQVPLPPYLNREATTDDRETYQTVYSEKEGAVAAPTAGLHFTPAVFEELAQQGVAYDYLTLHVGAGTFQPIKTDDIRQHFMHTEQVVYTVTNLQNLLPRIGHIIPVGTTSMRALESLYWMGVKVMRQEPEPFTLDQHYAYQLSADQLPSPAQAVQAVLDYMTTRNLDTVTAHTSIYITPGYSLRLCNGIVTNFHQPGSTLILLIAALIGDDWKRVYREALDKGYRFLSYGDSSLLIP

SEQ ID NO: 72371 - protein, 347 aa, unidentified
  source 1..347: note = Spirosoma pollinicola
  REGION 1..347: note = tr|A0A2K8Z4K5|A0A2K8Z4K5_9BACT S-adenosylmethionine:tRNA ribosyltransferase-isomerase; OS = Spirosoma pollinicola OX=2057025 GN=queA PE=3 SV=1
MKLSEFKFDLPESLIAKYPVERGESRLMVIDRKAKTIEHKQFSDMLSYFSDGDVMVINNTKVFPARLYGNKEKTGAKIEVFLLRELNREMKLWDVLVDPARKIRVGNKLYFGDSDLVAEVIDNTTSRGRTIRFLFDGNHEEFMKAVDELGETPIPREMNREAEEADRDAYQTVFAQHVGAVAAPTAGLHFTKAMMKRMEIKGIHFAPVTLHVGLGTFRQVDVEDLTKHKTDSENYRIPEESSKIVNTALDAGRRVCAVGTTSLKALESSVSANSRLKPVEGWTDKFIFPPYDFKIANSLLTSLHLPESILIMMTSAFGGHELIKEAYQVAIKEKYRFFSYGDAMLII

SEQ ID NO: 72372 - protein, 409 aa, unidentified
  source 1..409: note = Spirosoma pollinicola
  REGION 1..409: note = tr|A0A2K8Z719|A0A2K8Z719_9BACT S-adenosylmethionine:tRNA ribosyltransferase-isomerase; OS = Spirosoma pollinicola OX=2057025 GN=CWM47_29820 PE=3; SV = 1
MTEMNELLLSQFQYELPDDRIARFPLAQRDASKLLVYQHGQISHLQFSDLPGLLPQNSFLVFNNTKVIPARLYFTKTTGAIIELFLLNPYPDKESGELPPITSAMEATGSAIWQGMIGNRKRWKLGETLITTFPTPSGDVTLMASWHDYEQSAVRLSWQPAELTFAQLIQYAGEIPLPPYLKRDVTDSDRDTYQTVYSKAEGAVAAPTAGLHFTPAIFDGLTERHIEFDYLTLHVGAGTFQPIKAQDVRQHLMHTEQVVYTRENLHHLLSHSDAIIAVGTTSMRALESLYWIGTKLLRNEADPFQLDQHYAYQLPTDQQPSIADSLRAVLDYLIMADKDSVVAHTGIYITPGYRIRMCKGIVTNFHQPGSTLILLIATLIGDNWKRIYKEALDKDYRFLSYGDSSLLLP

SEQ ID NO: 72373 - protein, 347 aa, unidentified
  source 1..347: note = Spirosoma radiotolerans
  REGION 1..347: note = tr|A0A0E3V6P9|A0A0E3V6P9_9BACT S-adenosylmethionine:tRNA ribosyltransferase-isomerase; OS = Spirosoma radiotolerans OX=1379870 GN=queA PE=3 SV=1
MKLSEFKFDLPESLIAKYPVERGESRLMVVDRKAKTIEHKQFSDMLGYFSDGDVMVINNTKVFPARLYGNKEKTGAKIEVFLLRELNREMKLWDVLVDPARKIRVGNKLYFGDSDLVAEVIDNTTSRGRTIRFLFDGNHEEFMKAVDELGETPIPREMNREAEEADRDAYQTVFAQHVGAVAAPTAGLHFTRAMMKRMEIKGIHFAPVTLHVGLGTFRQVDVEDLTKHKTDSENYRIPEDSAKVVNTALDAGKRVCAVGTTSLKAIESSVSANSRLKPVEGWTDKFIFPPYDFKIANSLLTSLHLPESILIMMTSAFGGHELIKEAYQVAIKEKYRFFSYGDAMLII

SEQ ID NO: 72374 - protein, 404 aa, unidentified
  source 1..404: note = Spirosoma radiotolerans
  REGION 1..404: note = tr|A0A0E3V869|A0A0E3V869_9BACT S-adenosylmethionine:tRNA ribosyltransferase-isomerase; OS = Spirosoma radiotolerans OX=1379870 GN=SD10_17880 PE=3; SV = 1
MTEMNELSLSQFQYDLPDDRIARFPLAQRDASKLLVYQGGQISHQQFSDLPALLPENSFLVFNNTKVIPARLHFTKPTGAIIELFLLSPFPTEQPISLAMEATGSAVWQGMIGNRKRWRPNETLETTFSTPAGDVTLTVTWYNYEQSAVQLSWQPAEFTFAQIVQYAGEIPLPPYLKRDATDADRDTYQTIYSKQEGAVAAPTAGLHFTPAIFEAISKRAIGYDYLTLHVGAGTFQPIKTDDVRQHHMHTEQVVYTEQIIRHLLEHRDAIIAVGTTSMRALESLYWMGTKLLRNEPDPFRLDQQYAYQLPADQQPSVADSLNAVLTYFRDTDKASIVAQTGIYITPGYPVKLCRGIITNFHQPGSTLILLIATLIGDNWKRVYNDALENQYRFLSYGDSSLLLP

SEQ ID NO: 72375 - protein, 404 aa, Spirosoma sp.
  REGION 1..404: note = tr|A0A327NGC4|A0A327NGC4_9BACT S-adenosylmethionine:tRNA ribosyltransferase-isomerase; OS = Spirosoma sp. HMF3257 OX=2183553 GN=queA PE=3 SV=1
MSETKELLLSQFQYDLPDERIARFPLPQRDASKLLVYKNGEIHHEQFMQLPDLLPANSFLVFNNTKVIPARLHFTKPTGAVIELFLLNPFPNSQPISLAMEATGSVVWQGMIGNRKRWKPDETLKTTLTTPDGEVILMVSWFDYEQSTVQLSWQPETLTFAQLIQYAGEIPLPPYLKREATDIDRETYQTVYSKQEGAVAAPTAGLHFTPSVFQALAHRGIDHDYLTLHVGAGTFQPIKTEDVRQHHMHTEEVVYTQENLRNLLDHMDNLIAVGTTSMRALESLYWMGVKLINNEPKPFQLDQHYAYQLAIHQQPKPEESLQAVLDYIIEAKQESIVAYTGIYITPGYQFKLCKGIVTNFHQPGSTLILLIAALIGENWKHIYKEALENDYRFLSYGDSSLLLP

SEQ ID NO: 72376 - protein, 414 aa, Spirosoma sp.
  REGION 1..414: note = tr|A0A514ZZ74|A0A514ZZ74_9BACT S-adenosylmethionine:tRNA ribosyltransferase-isomerase; OS = Spirosoma sp. KCTC 42546 OX=2520506 GN=queA PE=3 SV=1
MTKKNELLLSQFQYDLPDERIARFPLPERDASKLLVYKNGQIRHEHFTQLPELLPANSFLVFNNTKVIPARLHFTKPTGAVIELFLLNPVSTSPDLDKSDIESQPISLAMEATGASVWQGMIGNRKRWKPDETLKTTLFTPVGEVILTVSWFDYDQSLVQLSWEPATLSFAQLIQFAGQIPLPPYLKREATDIDRETYQTVYSKREGAVAAPTAGLHFTPAVFEALAQRGLDHDYLTLHVGAGTFQPIKTEDVRQHHMHTEQVVYTQENVRNLLAHIDSIIAVGTTSMRALESLYWIGAKLLHKESNPFRLDQHFAYQLLPPQHPGIEESLNAVLDYLISTNQESIVAHTGIYITPGYQFKLCKGIVTNFHQPGSTLILLIAALIGDDWKRIYKEALENEYRFLSYGDSSLLLP

SEQ ID NO: 72377 - protein, 353 aa, Spongiibacter sp.
  REGION 1..353: note = tr|A0A2E9SL86|A0A2E9SL86_9GAMM S-adenosylmethionine:tRNA ribosyltransferase-isomerase; OS = Spongiibacter sp. OX=2024860 GN=queA PE=3 SV=1
  VARIANT 199: note = Xaa can be any naturally occurring amino acid
  VARIANT 279: note = Xaa can be any naturally occurring amino acid
MQRRDFHFDLPDELIARYPAQQRDGSRLLVLEGDGAVHHRHFPDLLSYLRKGDLLVFNNTRVIPARLFGAKESGGRVEILIERMVDERHALAHVRASKSPKAGSRLFLASDAEAEVSDAGVMVQGRQGALFELEFDASLLSRLEEFGHMPLPPYIDREDEASDQERYQTVYASRDGAVAAPTAGLHFTEAFLAACREKXVEQAFVTLHVGAGTFQPVRADDIRDHEMHAEYIEVSEQVAEQVRATRARGGRVIAVGTTSVRSLESASQGGEIAAFSGDXRIFIYPGYQFKSVDALFTNFHLPESTLIMLVSALAGRDAVMAAYREAVAERYRFFSYGDAMLVFPSQQERDSDD

SEQ ID NO: 72378 - protein, 353 aa, Spongiibacter sp.
  REGION 1..353: note = tr|A0A2E2KBT5|A0A2E2KBT5_9GAMM S-adenosylmethionine:tRNA ribosyltransferase-isomerase; OS = Spongiibacter sp. OX=2024860 GN=queA PE=3 SV=1
MQRRDFHFDLPDELIARYPAQQRDGSRLLVLEGDGAVHHRHFPDLLSYLRKGDLLVFNNTRVIPARLFGAKESGGRVEILIERMVDERHALAHVRASKSPKAGSRLFLASDAEAEVSDAGVMVQGRQGALFELEFDASLLSRLEEFGHMPLPPYIDREDEASDQERYQTVYASRDGAVAAPTAGLHFTEAFLAACREKGVERAFVTLHVGAGTFQPVRADDIRDHEMHAEYIEVTEQVAEQVRATRARGGRVITVGTTSVRSLESASQGGEIAAFSGDSRIFIYPGYQFKSVDALFTNFHLPESTLIMLVSALAGRDAVMAAYREAVAERYRFFSYGDAMLVFPSQQERDSDD

SEQ ID NO: 72379 - protein, 352 aa, unidentified
  source 1..352: note = Spongiibacteraceae bacterium
  REGION 1..352: note = tr|A0A2E2JZZ7|A0A2E2JZZ7_9GAMM S-adenosylmethionine:tRNA ribosyltransferase-isomerase; OS = Spongiibacteraceae bacterium OX=2026793 GN=queA PE=3; SV = 1
MKTRDFHYELPDELIARYPAAQRDQSRLLVLTGDGSVQHRQFPDILDFLDPGDLLVFNNTRVIPGRLYGNKESGGKLEFLIERVTAEFTALSHVRASKSPKSGARLSVTREHGAAEHSRCTVLGRRGELFELEFDQPVLTVLQAIGHMPLPPYIDRADESLDEERYQTVYAQKPGAVAAPTAGLHFTDDILARAQAKAVETAFVTLHVGAGTFQPVRVENIQDHHMHAEYLEVDQAVCDAVNATRARGGRVVAVGTTSVRSLETASQSGAIEPYTGESDIFIYPGYRFHSVDLLLTNFHLPESTLIMLVSALAGRERLLAAYAEAVEQRYRFFSYGDAMLVFPGDSAIGSGE

SEQ ID NO: 72380 - protein, 349 aa, unidentified
  source 1..349: note = Spongiibacteraceae bacterium
  REGION 1..349: note = tr|A0A2E7IJV1|A0A2E7IJV1_9GAMM S-adenosylmethionine:tRNA ribosyltransferase-isomerase; OS = Spongiibacteraceae bacterium OX=2026793 GN=queA PE=3; SV = 1
MKTSDFHFDLPEELIARYPAEQRDQSRLLVLNGQSGALEHKGFKDLVSFVESGDLLVFNNTRVIPGRLYGRKESGGKLELLIERVTGERTALAHIRASKSPKAGSRLHLLRAPGDEPRASCTMRVRQGELFELDFEEPLLPLLAAIGHMPLPPYIDRADEALDEERYQTVYADKPGAVAAPTAGLHFTPEILQKLADKGVNTAYVTLHVGAGTFQPVRVADIREHHMHSEYLEVEESVCDAIKQTRERGGRVIAVGTTSVRSLETASRSGQIEPYAGESDIFIYPGYRFRSVDILLTNFHLPESTLIMLVSAFAGRDNVLKAYAQAIAERYRFFSYGDAMLVFPHNQES

SEQ ID NO: 72381 - protein, 341 aa, Sporanaerobacter acetigenes
  REGION 1..341: note = tr|A0A1M5XTY0|A0A1M5XTY0_9FIRM S-adenosylmethionine:tRNA ribosyltransferase-isomerase; OS = Sporanaerobacter acetigenes DSM 13106 OX=1123281; GN = queA PE=3 SV=1
MRKEDFYYDLPEELIAQHPILNREDSRLMVLDKATGSVEHRYFRDIIDYLNEGDCLVLNDTRVIPARLFGSRKGKDESIEFLLLKKIDKNRWETLVKPGKKARPGAKVIFGDGELEGNVLSTGEDGTRIVEFEYEGIFEEILDKLGEMPLPPYIKEKLEDKERYQTVYSKKEGSAAAPTAGLHFTKELLQKIENKGIKIVYLTLHVGLGTFRPVKEENIEDHHMHSEYFELSKEAAEIINNTKKSGGRVIAVGTTSTRTLESIWAQENLVVPKSGWTDIFIYPGYKFKVVDCLITNFHLPESTLIMLVSALAGREKILNSYDIAVKEKYRFFSFGDAMFIK

SEQ ID NO: 72382 - protein, 341 aa, Sporanaerobacter sp.
  REGION 1..341: note = tr|A0A410QBP2|A0A410QBP2_9FIRM S-adenosylmethionine:tRNA ribosyltransferase-isomerase; OS = Sporanaerobacter sp. JN28 OX=2507161 GN=queA PE=3 SV=1
MKRKDFDYYLPEELIAQTPLEDREESRLMVLDRKSGSIEHRHFKDIVDYLNEGDSLVLNDTRVIPARLFGNREGKEEIIEILLLRRVKGNVWETLVRPGKKVKPDVKLVFGGGMLKGNVISIGEEGIRLIEFEYEGIFEEILNSLGEMPLPPYIKKKLKDKERYQTVYSKNLGSAAAPTAGLHFTKELLKRIRDKGVNTVFITLHVGLGTFRPVKEDEIEEHHMHSEYFQVSEDAARIINKTKDEGKRIISVGTTSTRTLESIGDSSGRVSPASGWTDIFIYPGYKFKVIDGLITNFHLPESTLIMLVSAFYSREKILEAYKTAVDEKYRFFSFGDAMFIK

SEQ ID NO: 72383 - protein, 341 aa, Sporanaerobacter sp.; identical to SEQ ID NO: 72382
  REGION 1..341: note = tr|A0A1G4FP37|A0A1G4FP37_9FIRM S-adenosylmethionine:tRNA ribosyltransferase-isomerase; OS = Sporanaerobacter sp. PP17-6a OX=1891289 GN=queA PE=3; SV = 1

SEQ ID NO: 72384 - protein, 340 aa, Sporobacter termitidis
  REGION 1..340: note = tr|A0A1M5TF09|A0A1M5TF09_9FIRM S-adenosylmethionine:tRNA ribosyltransferase-isomerase; OS = Sporobacter termitidis DSM 10068 OX=1123282 GN=queA; PE = 3 SV=1
MKTSDFHYELPPELIAQTPLQRRDASRLMQLNKITGAIAHRHFYELPTLLREGDCLVLNDSRVLPARLFGRRLTGGAVEVVLLRDRGDGVWECLTRPGRKTKTGTQLFFGDDTLSAVVEDEIEGGNRLIRFHYDGIFLEALERLGKMPLPPYIHEELGDAERYQTVYSRVTGSAAAPTAGLHFTKALLREIENSGVIVKYVTLHVGLGTFRPVKAENIEDHEMHAEYCEIPEETAAAVSSAKTEGRRVVSVGTTSCRTLESRALEDGAVKSFSGFTNAFIYPGYRFKCVDALITNFHLPESTLLMLVSALAGRENILHAYEEAVRERYRFFSFGDAMLIE

SEQ ID NO: 72385 - protein, 348 aa, Sporocytophaga myxococcoides
  REGION 1..348: note = tr|A0A098L8Q8|A0A098L8Q8_9BACT S-adenosylmethionine:tRNA ribosyltransferase-isomerase; OS = Sporocytophaga myxococcoides OX=153721 GN=queA PE=3 SV=1
MKLSEFKFTLPSELLALYPAENRDESRLMVVNRADGTIEHRIFKDIVDYFGEGDVMVINNTKVFPARLYGNKEKTGAKIEVFLLRELNQEAHLWDVLVDPARKIRVGNKLYFGDGDLVAEVIDNTTSRGRTIRFLFDGTDEEFYKTIDSLGETPLPKYIKRKAEPADRDRYQTIYAEHTGAVAAPTAGLHFTKQVMKRLEIEGVNFAPITLHVGLGTFRPVDVEDLTKHKMDSENFVVSDETAKLVNTALDNKKRVCAIGTTSVRSLESSTSANNRLKPNQGWTDKFIFPPYDFKIANALLTNFHMPESTLLMLTCAFGGYDLVMKAYKTAIKERYRFFSYGDAMLIL

SEQ ID NO: 72386 - protein, 348 aa, Sporolactobacillus inulinus
  REGION 1..348: note = tr|A0A0U1QRH0|A0A0U1QRH0_9BACL S-adenosylmethionine:tRNA ribosyltransferase-isomerase; OS = Sporolactobacillus inulinus CASD OX=1069536 GN=queA; PE = 3 SV=1
MDLSDFDYDLPEELIAQTPLKDRAASRLMVLNPNKDMINHHHTFSEIIDYLNPGDCLVLNDTKVLPARLIGHKEETGAKIELLLLKQKEGDCWECLAKPAKRVHKGARISFGDGKLVGECAEELDEGRRMITFHYQGIFYEVLDELGKMPLPPYIKEQLDDPDMYQTVYAKHRGSAAAPTAGLHFTKELLVDIEKKGVHLVFITLHVGLGTFRPVKVDKIEEHTMHAEFYQMTAAAADTLTQARMQGKRIIACGTTVIRTLETIAAKHDGKLQESSGWTDIFIYPGFRYRAIDGMITNFHLPKSTLIMLVSAFAGRDFTLKAYREAVKERYRFFSFGDAMFIEEGINH

SEQ ID NO: 72387 - protein, 348 aa, Sporolactobacillus inulinus; identical to SEQ ID NO: 72386
  REGION 1..348: note = tr|A0A4Y1ZH96|A0A4Y1ZH96_9BACL S-adenosylmethionine:tRNA ribosyltransferase-isomerase; OS = Sporolactobacillus inulinus OX=2078 GN=queA PE=3 SV=1

SEQ ID NO: 72388 - protein, 348 aa, Sporolactobacillus laevolacticus
  REGION 1..348: note = tr|V6J9H4|V6J9H4_9BACL S-adenosylmethionine:tRNA ribosyltransferase-isomerase OS=Sporolactobacillus laevolacticus DSM 442 OX=1395513 GN=queA PE=3 SV=1
MDVTDFDYELPEELIAQTPLKDRAASRLMVLNPNKERIAHHTFSEIIDYLNSGDCLVLNDTKVLPARLIGHKEETGAKIELLLLKQKEGDSWECLAKPAKRVHEGARISFGDGMLEAVCTQELDEGRRMVTFNYKGIFYEVLDALGKMPLPPYIKEQLDDPDLYQTVYAKHRGSAAAPTAGLHFTKELLAEIENKGVHIVFITLHVGLGTFRPVKVDKIEEHTMHSEFYQMSAQAADQLTQARKNGKRIIACGTTVIRTLETITAKFDGAFEETSGWTDIFIYPGFRYRAIDGMITNFHLPKSTLIMLVSAFAGHDFILNAYREAVKQRYRFFSFGDAMFIEEGINHS

SEQ ID NO: 72389 - protein, 347 aa, unidentified
  source 1..347: note = Sporolactobacillus nakayamae
  REGION 1..347: note = tr|A0A1I2NSC9|A0A1I2NSC9_9BACL S-adenosylmethionine:tRNA ribosyltransferase-isomerase; OS = Sporolactobacillus nakayamae OX=269670 GN=queA PE=3 SV=1
MDVSDFDYELPEELIAQTPLKDRAASRLMVLNPNKDRIVHHTFSEIIDYLNPGDCLVLNDTKVLPARLIGHKEETGAKIELLLLKQTEGDSWECLAKPAKRVHQGARISFGDGMLEAECIKELDEGRRIVTFHYQGIFYEVLDALGKMPLPPYIKEQLDDPDLYQTVYAKHRGSAAAPTAGLHFTKALLAEIEKKGVHLVFITLHVGLGTFRPVKVDKIEEHTMHSEFYQMSAQAAEQLTKTRAEGKRIIACGTTVIRTLETITAKFNGTFEETSGWTDIFIYPGFRYRAIDAMITNFHLPKSTLIMLVSAFAGQDFILKAYREAVKERYRFFSFGDAMFIEEGINH

SEQ ID NO: 72390 - protein, 348 aa, unidentified
  source 1..348: note = Sporolactobacillus shoreae
  REGION 1..348: note = tr|A0A4Z0GQF5|A0A4Z0GQF5_9BACL S-adenosylmethionine:tRNA ribosyltransferase-isomerase; OS = Sporolactobacillus shoreae OX=1465501 GN=queA PE=3 SV=1
MDVSDFDYDLPEELIAQTPLKDRAASRLMVLNPNSDRIAHHHFSEIIDYLNPGDCLVLNDTKVLPARLIGHKEETGAKIELLLLKQTEGDSWECLAKPAKRVHEGEHIQFGDGRLEAVCTQELDEGRRIVTFHYEGIFYEVLEELGKMPLPPYIKEQLDDPDLYQTVYAKHRGSAAAPTAGLHFTKELLAKIEEKGIHLVFITLHVGLGTFRPVKVDKIEEHTMHSEFYQMSAQAADTLTNARAEGHRIIACGTTVIRTLETITAKYDGKYQEASGWTDIFIYPGFQYRAIDGMITNFHLPKSTLIMLVSAFAGRDFILKAYREAVKEKYRFFSFGDAMFIEEGNKNK

SEQ ID NO: 72391 - protein, 348 aa, Sporolactobacillus sp.
  REGION 1..348: note = tr|A0A4Q4INC9|A0A4Q4INC9_9BACL S-adenosylmethionine:tRNA ribosyltransferase-isomerase; OS = Sporolactobacillus sp. THM19-2 OX=2511171 GN=queA PE=3; SV = 1
MDVSDFDYELPKELIAQTPLKDRAASRLMVINPNTGRIAHHHFSDIINYLNPGDCLVLNDTKVLPARLIGHKEETGAKIELLLLKQTEGDTWECLAKPAKRLHQGAHVQFGDGRLEAVCAQELDEGRRLVTFHYEGIFYEVLEALGKMPLPPYIKKQLDDPNMYQTVYAKHRGSAAAPTAGLHFTEELLKAIEKKGVHIVFITLHVGLGTFRPVKVEKIEDHNMHSEFYQMSAQSAEILTKARAEGHRIIACGTTVIRTLETITAKYDGKYQEASGWTDIFIYPGFRYRAIDAMITNFHLPKSTLIMLVAAFAGRDFILKAYQEAVKEKYRFFSFGDAMFIEEGIHNE

SEQ ID NO: 72392 - protein, 349 aa, Sporolactobacillus sp.
  REGION 1..349: note = tr|A0A4Q4JIK8|A0A4Q4JIK8_9BACL S-adenosylmethionine:tRNA ribosyltransferase-isomerase; OS = Sporolactobacillus sp. THM7-7 OX=2511172 GN=queA PE=3; SV = 1
MDITEFDYDLPEELIAQTPLKDRAASRLMVINPNKETFDHHHHFGDIIDYLNPGDCLVLNDTKVLPARLIGHKKETGAKIELLLLKQTEGDSWECLAKPAKRVHAGIHIQFGDGRLEAVCDKELDEGRRIVTFRYNGLFYEILEALGEMPLPPYIKKQLDDPDLYQTVYAKHRGSAAAPTAGLHFTKGLLSRIEKKGIHLVFITLHVGLGTFRPVKVDKIEEHKMHAEFYQMTKDAADTLNKARQEGKRVIACGTTVIRTLETIAAKHDGSFREASGWTDIYIYPGYRYRAVDAMITNFHLPKSTLIMLVSAFAGKDFILKAYREAVKEKYRFFSFGDAMFIEEGIKNR

SEQ ID NO: 72393 - protein, 348 aa, Sporolactobacillus terrae
  REGION 1..348: note = tr|A0A410D9Z0|A0A410D9Z0_9BACL S-adenosylmethionine:tRNA ribosyltransferase-isomerase; OS = Sporolactobacillus terrae OX=269673 GN=queA PE=3 SV=1
MDLSDFDYDLPEELIAQTPLKDRAASRLMVLNPNKDMINHHHTFSEIIDYLNPGDCLVLNDTKVLPARLIGHKEETGAKIELLLLKQKEDDCWECLAKPAKRVHKGARVSFGDGKLIGECVEELDEGRRMITFHYQGIFYEVLDELGKMPLPPYIKEQLDDPDMYQTVYAKHRGSAAAPTAGLHFTKELLADIEKKGVHVVFITLHVGLGTFRPVKVDKIEEHTMHAEFYQMTAAAADTLTQARMQGKRIIACGTTVIRTLETIAAKYDGQLRESSGWTDIFIYPGFRYRAIDGMITNFHLPKSTLIMLVSAFAGRDFTLKAYREAVKERYRFFSFGDAMFIEEGINH

SEQ ID NO: 72394 - protein, 339 aa, Sporolituus thermophilus
  REGION 1..339: note = tr|A0A1G7IEX4|A0A1G7IEX4_9FIRM S-adenosylmethionine:tRNA ribosyltransferase-isomerase; OS = Sporolituus thermophilus DSM 23256 OX=1123285 GN=queA; PE = 3 SV=1
MLVTEFDYYLPEELIAQQPCEPRDHSRLLVLDRRTGNIEHRRFYNLPDYLQPGDTLVFNDTKVIPARLIGAKAGTGGKVEVFLLNRLTGDEWETLVKPGKRARPGTQVVFGDELSCEILASTDYGGRIVRFNYSGVFEEILDRLGETPLPPYIKARLADKDRYQTVYAKERGSAAAPTAGLHFTPALLDRIRAKGINLAFITLHVGLGTFRPVTVTDITQHTMHREYYSVSPETAGLINRTKQAGGRIIAVGTTAVRTLETVGAGGSVESGSGWTDIFIYPGYRFKVVDALVTNFHLPQSTLLMLVSALAGRENIMNAYHTAVREKYRFFSFGDAMLIL

SEQ ID NO: 72395 - protein, 339 aa, Sporomusa acidovorans
  REGION 1..339: note = tr|A0A259URW6|A0A259URW6_9FIRM S-adenosylmethionine:tRNA ribosyltransferase-isomerase; OS = Sporomusa acidovorans DSM 3132 OX=1123286 GN=queA PE=3; SV = 1
MLVSDFDYYLPEELIAQQPVEPRDHSRLLVLDRQNGHIEHSKFYNLPQYLQPGDTLVFNDTRVIPARLLGFKPETGGKVEVFLLNRTMKDEWEVLVKPGKKARPGTIIEFSDALRCEVLRDTDFGGRVVRFSYQGVFEEILDILGETPLPPYIKAKLADKERYQTVYARERGSAAAPTAGLHFTRELMNTIKQMGINLTFVTLHVGLGTFRPVSVENISEHVMHREHYSVPEETAAIVNQTLAAGNRVIAVGTTAVRTLETAGASGRLEAKSGWTEIFIYPGYDFKIVKALITNFHLPKSTLLMLVSALASRKHIFNAYQEAVNKRYRFFSFGDAMFIR

SEQ ID NO: 72396 - protein, 339 aa, Sporomusa malonica
  REGION 1..339: note = tr|A0A1W2AHG3|A0A1W2AHG3_9FIRM S-adenosylmethionine:tRNA ribosyltransferase-isomerase; OS = Sporomusa malonica OX=112901 GN=queA PE=3 SV=1
MLVSDFDYYLPEELIAQQPIEPRDQSRLLMLDRKTGVIEHKQFYNLPQFLQPGDTLVFNDTRVIPARLFGVKPETGGKLEVFLLNRTTKDEWEVLVKPGKRARIGTVIEFGETLRCEVIDTTDFGGRRVRFNYQGIFEEILDTLGETPLPPYIKAQLSDKERYQTVYARERGSAAAPTAGLHFTRELMENIESMGVNLAFVTLHVGLGTFRPVATETITEHIMHREYYSVPEETAAIVNATIAAGKRVIAVGTTAVRTLETAGTSGQLEAKSGWTEIFIYPGYEFKIVKALITNFHLPKSSLLMLVSALSSREHIFNAYREAVDKRYRFFSFGDAMFIS

SEQ ID NO: 72397 - protein, 339 aa, Sporomusa silvacetica
  REGION 1..339: note = tr|A0A259UV00|A0A259UV00_9FIRM S-adenosylmethionine:tRNA ribosyltransferase-isomerase; OS = Sporomusa silvacetica DSM 10669 OX=1123289 GN=queA PE=3; SV = 1
MLVSDFDYYLPEELIAQQPVEPRDQSRLLVLDRETGCIEHNEFHNLLHYLKPGDTLVFNDTRVIPARLFGARQKTGGKVEVFLLSRTTNDDWEVLVKPGKKAKPGTIIEFSDNLRCEVLQSTDFGGRIVRFQYQGIFEEILDSLGETPLPPYIKTKLTDKERYQTVYARERGSAAAPTAGLHFTRQLMDSCKNMGVNLTFVTLHVGLGTFRPVAVDTITDHVMHREYYSVPEKTAVIVNKTLAAGNRVIAVGTTAVRTLETAGTSGQLEAKSGWTQIFIYPGYEFKIVKALITNFHLPKSTLLMLVSALSSREHIFNAYREAVDKRYRFFSFGDAMFIR

SEQ ID NO: 72398 - protein, 339 aa, Sporomusa sp.
  REGION 1..339: note = tr|A0A562GQV2|A0A562GQV2_9FIRM S-adenosylmethionine:tRNA ribosyltransferase-isomerase; OS = Sporomusa sp. KB1 OX=943346 GN=queA PE=3 SV=1
MLVSDFDYYLPEELIAQQPVEPRDQSRLLVLDRETGCIEHNEFHNLLHYLKPGDTLVFNDTRVIPARLFGTKQETGGKVEVFLLSRTTNDDWEVLVKPGKKAKPGTVIEFSDNLRCEVLQSTDFGGRVVRFQYQGIFEEILDSLGETPLPPYIKTKLTDKERYQTVYARERGSAAAPTAGLHFTRQLMDSCKSMGVNLTFVTLHVGLGTFRPVAVDTITDHVMHREYYSVPEETAALVNKTLAAGNRVIAVGTTAVRTLETAGTSGQLEAKSGWTQIFIYPGYEFKIVKALITNFHLPKSTLLMLVSALAGREHIFNAYQEAVDKRYRFFSFGDAMFIR

SEQ ID NO: 72399 - protein, 339 aa, Sporomusa sp.
  REGION 1..339: note = tr|A0A0U1L3B3|A0A0U1L3B3_9FIRM S-adenosylmethionine:tRNA ribosyltransferase-isomerase; OS = Sporomusa sp. An4 OX=411922 GN=queA PE=3 SV=1
MLVSEFDYYLPEELIAQQPVEPRDQSRLLVLDRETGCIEHNEFHNLLHYLKPGDTLVFNDTRVIPARLFGAKQETGGKVEVFLLSRTTNDDWEVLVKPGKKAKPGTIIEFSGNLRCEVLQSTDFGGRIVRFQYQGIFEEILDSLGETPLPPYIKTKLTDKERYQTVYARERGSAAAPTAGLHFTRELMESCKHRGVNLSFVTLHVGLGTFRPVAVDTIAEHVMHREYYSVPEETAALVNKTLAAGNRVIAVGTTAVRTLETAGTSGQLEAKSGWTQIFIYPGYEFKIVKALITNFHLPKSTLLMLVSALAGREHIFNAYREAVDKRYRFFSFGDAMFIR

SEQ ID NO: 72400 - protein, 339 aa, Sporomusa sphaeroides
  REGION 1..339: note = tr|A0A1U7MLW3|A0A1U7MLW3_9FIRM S-adenosylmethionine:tRNA ribosyltransferase-isomerase; OS = Sporomusa sphaeroides DSM 2875 OX=1337886 GN=queA PE=3; SV = 1
MLVSDFDYYLPEELIAQQPVEPRDHSRLLVLDRKTGTITHNAFYNLPQLLQPGDTLVFNDTRVIPARLLGIKPETGGKVEVFLLNRTTKDDWEVLVKPGKRARPGTVIEFGENLRCEVLSTTDFGGRVVRFTYQGIFEEILDVLGETPLPPYIKAQLSDKERYQTVYARERGSAAAPTAGLHFTRELMENIENMGVNLAYITLHVGLGTFRPVVAENINEHVMHREYYSVPPATAEIVNKTLAAGNRVIAVGTTAVRTLESAGSSGCLEAKSGWTEIFIYPGYEFKIVKALITNFHLPKSTLLMLISALAGREFIFDAYREAVDKRYRFFSFGDAMFIR

SEQ ID NO: 72401 - protein, 339 aa, Sporomusa termitida
  REGION 1..339: note = tr|A0A517DU37|A0A517DU37_9FIRM S-adenosylmethionine:tRNA ribosyltransferase-isomerase; OS = Sporomusa termitida OX=2377 GN=queA PE=3 SV=1
MLVSDFAYYLPEELIAQHPVEPRDQSRLLLLDRQTGRIEHKQFFNLPQFLQPGDTLVFNDTRVIPARLLGVKPETGGKIEVFLLNRTTKDEWEVLVKPGKRAKPGTVIEFGSALRCEVVSATEFGGRIVRFDYQGIFEEILDVLGETPLPPYIKARLTDKERYQTVYARERGSAAAPTAGLHFTRGLMEKLRAMGVNLAFVTLHVGLGTFRPVAVENITDHVMHKEYYSVPAATAMVVNNTLAAGNRVIAVGTTAVRTLETAGGNGRLEPGSGWTEIFIYPGYKFNIVKAMITNFHLPQSTLLMLISALAGRENIFNAYREAVDKRYRFFSFGDAMFII

SEQ ID NO: 72402 - protein, 340 aa, unidentified
  source 1..340: note = Sporomusaceae bacterium
  REGION 1..340: note = tr|A0A402BPH1|A0A402BPH1_9FIRM S-adenosylmethionine:tRNA ribosyltransferase-isomerase; OS = Sporomusaceae bacterium OX=1917525 GN=queA PE=3 SV=1
MLLSDFDYFLPEELIAQCPHEPRDHSKLLVLDKVTGEFQHQHFFDVLKFLRPGDTLVFNDTKVLPARLIGIKAETGARIEVFLLNRKNGDDWEVLVKPGKRARIGSVISFSSELSCEVIADTDFGGRVVRFSYCGIFEELLDQLGETPLPPYIKEKLDNKERYQTVYARESGSAAAPTAGLHFTDQLMQAIKDKEIKLAFVTLHVGLGTFRPVNVENIQTHVMHKEYYSVPPETAELINSAKAQGNRIIAVGTTSIRTLESAADASGRIEAKSGWTDIFIYPGYDFKIIDGVITNFHLPKSTLLMLISAFAGRDAVMAAYQEAIKQRYRFFSFGDAMLLI

SEQ ID NO: 72403 - protein, 339 aa, unidentified
  source 1..339: note = Sporomusaceae bacterium
  REGION 1..339: note = tr|A0A3C0UBW4|A0A3C0UBW4_9FIRM S-adenosylmethionine:tRNA ribosyltransferase-isomerase; OS = Sporomusaceae bacterium OX=1917525 GN=queA PE=3 SV=1
MLLSDYHYNLPDGLIAQHPYEPRDHSRLMVLNRTTGEVSHQHFYNVPDYLEPGDTLVFNNTRVIPARLIGTRADTGGKVEVFLLNRLNHNEWETLVKPGKRARPGTTISFGEELSCEILDSTEFGGRVVRFTFQGAFEAILDRLGETPLPPYIRERLEDGERYQTVYSCESGSAAAPTAGLHFTEEMLENLKQRGINLAFITLHIGLGTFRPVSVADITQHVMHREYYSISPEAAQIINQTKEKGHRVVAVGTTSVRTLETVGTDGRIEAGSGWTNIFMYPGFEFKMIDAMVTNFHLPESTLLMLISEFAGRENVLAAYEIAVNEDYRFFSFGDAMLIL

SEQ ID NO: 72404 - protein, 342 aa, Sporosarcina globispora
  REGION 1..342: note = tr|A0A0M0GBW3|A0A0M0GBW3_SPOGL S-adenosylmethionine:tRNA ribosyltransferase-isomerase; OS = Sporosarcina globispora OX=1459 GN=queA PE=3 SV=1
MKVDLFDFHLPEELIAQTPLADRTSSRLMVLDKKTGDIQHSVFKDIKNYLKAGDCLVLNDTKVLPARVFGEKTGTGANIEVLLLKQLEGDSWETLVKPAKRVKEGTEITFGNGSLTAVCTGTSDHGGRVLEFRYDGIFYEVLEQLGEMPLPPYIKEQLDDRDRYQTVFARERGSAAAPTAGLHFTEQLLKEIKEMGVHIAFITLHVGLGTFRPVSVEDLNEHDMHAEFYQVTEGTARLLNEVRDQGGRIVSVGTTSTRTLETIASMHNGRFEEASGWTDIFIYPGYEFKAIDGMITNFHLPKSTLIMLVSALAGRENVLNAYNKAVEERYRFFSFGDAMLIM

SEQ ID NO: 72405 - protein, 346 aa, Sporosarcina luteola
  REGION 1..346: note = tr|A0A511Z4K3|A0A511Z4K3_9BACL S-adenosylmethionine:tRNA ribosyltransferase-isomerase; OS = Sporosarcina luteola OX=582850 GN=queA PE=3 SV=1
MDVNDFDFDLPEHLIAQTPLKDRTASRLMVLDKETGKVEHRQFRQIVDELQPGDVIVLNDTRVLPARLIGVKDDTGASIEVLLLKETGSDEWETLVKPAKRIKVGTFVTFGDGRLKAECTGVLDQGGRIFKFHYEGIFYEILDELGQMPLPPYITESLDDQSRYQTVFAKERGSAAAPTAGLHFTEAILQEIKDKGVGVEFITLHVGLGTFRPVSSDTIEEHTMHSEYYSVNESTANAINEAKANGGNIIAIGTTSARTLETIASQNNGKIISTSGWTSIFIYPGYTFSILDGMLTNFHLPKSTLIMLISAMVSREHILAAYNEAVKENYRFFSFGDAMFIKPSKK

SEQ ID NO: 72406 - protein, 351 aa, Sporosarcina newyorkensis
  REGION 1..351: note = tr|F9DVG9|F9DVG9_9BACL S-adenosylmethionine:tRNA ribosyltransferase-isomerase OS=Sporosarcina newyorkensis 2681 OX=1027292 GN=queA PE=3 SV=1
MMDVHDFDFDLPEHLIAQTPLLDRTASRLLVMDRQNGEVSHRHFRDLVDELEAGDLLVLNDTKVLPARLIGTKEDTGATIEVLLLKEIGEDRWETLVKPAKRVKVGTVVTFGDGRLQAKCTAIGEQGGREFAFMYDGIFYELLDQLGQMPLPPYITESLEDQSRYQTVFAKERGSAAAPTAGLHFTDEILDALRDKGVKIAFITLHVGLGTFRPVSVDSIEDHTMHAEYYVMTEETAALVRKTKATGGRVIAVGTTSTRTLETIASENGGNVVAASGWTSIFIFPGYAFKAIDGLVTNFHLPKSTLLMLLSAFAGREPILAAYEEAVKEQYRFFSFGDAMFIRPAKRKERD

SEQ ID NO: 72407 - protein, 350 aa, Sporosarcina newyorkensis
  REGION 1..350: note = tr|A0A1T4XNB9|A0A1T4XNB9_9BACL S-adenosylmethionine:tRNA ribosyltransferase-isomerase; OS = Sporosarcina newyorkensis OX=759851 GN=queA PE=3 SV=1
MDVHDFDFDLPEHLIAQTPLLDRTASRLLVMDRQNGEVSHRHFRDLVDELEAGDLLVLNDTKVLPARLIGTKEDTGATIEVLLLKEIGEDRWETLVKPAKRVKVGTVVTFGDGRLQAKCTAIGEQGGREFAFMYDGIFYELLDQLGQMPLPPYITESLEDQSRYQTVFAKERGSAAAPTAGLHFTDEILDALRDKGVKIAFITLHVGLGTFRPVSVDSIEDHTMHAEYYVMTEETAALVRKTKATGGRVIAVGTTSTRTLETIASENGGNVVAASGWTSIFIFPGYAFKAIDGLVTNFHLPKSTLLMLLSAFAGREPILAAYEEAVKEQYRFFSFGDAMFIRPAKRKERD

SEQ ID NO: 72408 - protein, 342 aa, Sporosarcina pasteurii
  REGION 1..342: note = tr|A0A380BUA5|A0A380BUA5_SPOPA S-adenosylmethionine:tRNA ribosyltransferase-isomerase; OS = Sporosarcina pasteurii OX=1474 GN=queA PE=3 SV=1
MNVEDFDFHLPEHLIAQTPLQDRTASRLLVLDKETGETKHRQFPDFVNELEAGDVLVLNNTRVLPARLIGVKEETGAAIEILLLKENGEDKWETLVKPAKRIKEGNVVSFGNGLLNAECTAVLPQGGREFKFTYNGIFFEILDQLGEMPLPPYITEKLDDEERYQTVFAKERGSAAAPTAGLHFTEEVLQQLKEKGVKIAFITLHVGLGTFRPVSVDTIEDHTMHAEYYSVTEVTANTINQAKASGRKVIAVGTTSARTLETIASENDGKIIEASGWTSIFIYPGYEFRILDGLLTNFHLPKSTLLMLVSAFASQEYIMDAYTSAVENEYRFFSFGDAMFIK

SEQ ID NO: 72409 - protein, 349 aa, Sporosarcina psychrophila
  REGION 1..349: note = tr|A0A127VXB3|A0A127VXB3_SPOPS S-adenosylmethionine:tRNA ribosyltransferase-isomerase; OS = Sporosarcina psychrophila OX=1476 GN=queA PE=3 SV=1
MDVNDFDFDLPDNLIAQTPLLDRTASRLMVLDPKTGEVEHRHFRDLLEELESGDMLVLNDTRVLPARLMGVKEDTGAMIEVLLLKQTADDEWETLAKPAKRVKLGTIVTFGDGRLKAECTGILEQGGRTFKFIYDGIFYEILDELGQMPLPPYITETLDDQARYQTVFAKERGSAAAPTAGLHFTDEILESIQNKGVNIAFITLHVGLGTFRPVSADTIEDHTMHSEYYHVTEQTADAINEAKAQGGRVIGVGTTSARTLETIASENAGKIVASSGWTSIFIYPGYTFSILDGLLTNFHLPKSTLIMLISALTTREHILAAYNRAVEEKYRFFSFGDAMFIKPSQRKES

SEQ ID NO: 72410 - protein, 349 aa, Sporosarcina sp.
  REGION 1..349: note = tr|A0A135WQZ8|A0A135WQZ8_9BACL S-adenosylmethionine:tRNA ribosyltransferase-isomerase; OS = Sporosarcina sp. HYO08 OX=1759557 GN=queA PE=3 SV=1
MDVNEFDFELPDHLIAQTPLKDRTASRLMVLDKETGEIRHHQFKALIDELEAGDLLVLNDTRVLPARLMGVKEDTGAAIEVLLLKELDIDEWETLVKPAKRVKVGTVVTFGDGRLKAECTGILEQGGRTFKFSYDGIFYEVLDALGTMPLPPYISETLDDQERYQTVFAKERGSAAAPTAGLHFTDEYLQQIKEKGIDLAFITLHVGLGTFRPVSVDTIENHTMHAEYYQVSEATAESINNTKARGGRVIAVGTTSARTLETIASANDGKIIASSGWTSIFIYPGYPFRVLDGLITNFHLPKSTLVMLVSAFASRDKVLAAYHEAVRQNYRFFSFGDAMFIRSPRRKEL

SEQ ID NO: 72411 - protein, 349 aa, Sporosarcina sp.
  REGION 1..349: note = tr|A0A5B0DFI7|A0A5B0DFI7_9BACL S-adenosylmethionine:tRNA ribosyltransferase-isomerase; OS = Sporosarcina sp. ANT_H38 OX=2597358 GN=queA PE=3 SV=1
MDVNDFDFDLPDNLIAQTPLLDRTASRLMVLDPETGEVKHNHFRDLLDELESGDILVLNDTRVLPARLMGVKEETGAMIEVLLLKQTGDDEWETLVKPAKRVKLGTIVTFGDGRLKAECTGILEQGGRIFKFIYEGIFYEILDELGQMPLPPYITETLDDQARYQTVFAKERGSAAAPTAGLHFTDEILASIRNKGVNIAFITLHVGLGTFRPISVDTIEDHTMHSEYYHVTEQTAAAINEAKAQGGRVIAVGTTSARTLETIASENGGKIIPSSGWTSIFIYPGYEFSILDGLLTNFHLPKSTLIMLISALTTRDHILAAYNKAVKEKYRFFSFGDAMFIKPSQRKES

SEQ ID NO: 72412 - protein, 415 aa, unidentified
  source 1..415: note = Unknown
  REGION 1..415: note = tr|A0A328EEW2|A0A328EEW2_9BACT S-adenosylmethionine:tRNA ribosyltransferase-isomerase; OS = SR1 bacterium human oral taxon HOT-345 OX=1540874; GN = BSK20_05425 PE=3 SV=1
MEEDLLLSSYTYILPESCIAQQPKLPEHNAKLMICSLQATGDLLYEDQIFADLPNYLDQHYMLFLNSTKVFKARIPLHNTKIRRKTGQELLLETGELLIYAIHSKTQFECLVSDNKNFRPGSQIFLGEGVVFRSLEFTANGILFEISSENPSETSVQIFDFLEKKGEMPLPPYIRYEKEKEKRYQTFFAEKLGSAAAPTASLHFTPELVKRLEKKGVEFQFPCLHVGLGTFKPVYEEHIQQQKLHFEPMILESDIRKTIADAKLAGKRFLPIGTTMIRYLESLPYIRRFLKKKNLNIAVDHATRDRRDHLTKTIDEKLVEEFIPEQEVCVEKTQFSSIPEKMIIQTRLFIRPGIPFLLTDELITNFHLPKSSLMILISAFIGRKNLLEAYQRAIQAGYKFYSFGDGMRIKKQTNQ

SEQ ID NO: 72413 - protein, 338 aa, unidentified
  source 1..338: note = Stackebrandtia endophytica
  REGION 1..338: note = tr|A0A543B4D0|A0A543B4D0_9ACTN S-adenosylmethionine:tRNA ribosyltransferase-isomerase; OS = Stackebrandtia endophytica OX=1496996 GN=FB566_5293; PE = 3 SV=1
MTTLEAGFEFALDAALHATEPAESTGRSRADVRLLSTDLSTRTTGHHRFEDMPNLLRPGDLLVVNNSATLPAAVWLDRMVVHFSTERDDGTWLVELRRRVGATHKPARLGRPGEWLPLPGGPTLKLIDRHSERLWIARLDASVSRYLEQHGRPIRYDYVDRDWPLETYQTVFSTVPGSAEMPSAGRPFTPELVTSLIGRGIGFAPITLHTGVASPEVDELPYPERFSVSEYTAGAINATKSAGGRVIAVGTTVVRALESAVGAGGVMWADRGVTSLVITPDRGVSIVDGILTGLHEPRSTHLAMLSAIADTSLLADAYRSAIESAYRWHEFGDVHLIA

SEQ ID NO: 72414 - protein, 338 aa, Stackebrandtia nassauensis
  REGION 1..338: note = tr|D3PXS8|D3PXS8_STANL S-adenosylmethionine:tRNA ribosyltransferase-isomerase OS=Stackebrandtia nassauensis (strain DSM 44728 / NRRL B-16338 / NBRC 102104 / LLR-40K- 21) OX=446470 GN=Snas_3751 PE=3 SV=1
MTTLQAGFGFALDAALEAGRPPEDRGSGRDDVRLLYTDKATGRTVSDGFRRLPGLLRPGDLLVVNDSATLPAAVWMRRLVVHFSTDRGDGTWLVELRKRVGGHHEQYSGGIPGELLPLPGGATLRLEARHTGRLWIARMNVSVPRYLGKHGVPIRYSYVDRDWPLDRYQTVFATRPGSAEMPSAARPFTTAIVDRLRERGVTIAPITLHTGVASPEVDETPYPERFRIGASTARAVNAARAAGGRVIAVGTTAVRALETAVDGDGVVKAASGFTEHIVTPAVGVRAVDGILTGLHEPRSTHLSMLSAIVDNDVLASAYHKAIAERYLWHEFGDVHLIA

SEQ ID NO: 72415 - protein, 341 aa, Stakelama pacifica
  REGION 1..341: note = tr|A0A4R6FS09|A0A4R6FS09_9SPHN S-adenosylmethionine:tRNA ribosyltransferase-isomerase; OS = Stakelama pacifica OX=517720 GN=queA PE=3 SV=1
MRVDDFDFDLPNDRIALRPAAPRDTARMLVVGSDAMLDKSVADLPAMLRAGDCLIFNDTRVIPAQLEGMRGEAKIGATLHKREGPREWRAFIRNAKRLRDGDEIDFSNGVTAVASDRAADGSFRLSFGGIEPVELLLERAGHMPLPPYIASKRPTDERDAQDYQTMFAREAGAVAAPTAALHFTPALIEALADAGVETATLTLHVGAGTFLPVKADDTDDHVMHAEWGRIDPATADRLNAVRAKGGRLIAVGTTSLRLIESATGEDGVVRPFEGDTAIFITPGYRFRGIDGLMTNFHLPRSTLFMLVSALMGLDRMQAAYAHAIANDYRFYSYGDASLLLP

SEQ ID NO: 72416 - protein, 371 aa, unidentified
  source 1..371: note = Stanieria cyanosphaera
  REGION 1..371: note = tr|K9XXV9|K9XXV9_STAC7 S-adenosylmethionine:tRNA ribosyltransferase-isomerase OS=Stanieria cyanosphaera (strain ATCC 29371 / PCC 7437) OX=111780 GN=queA PE=3 SV=1
MNLDKLLSSYGYELPSELIAQTPAVPRDSSRLLVVNSPTTQFHSRFSELIDWLLPGDLLVLNNTQVIPARLYGHKATGAPVEILLLEEKKNNCWLALVKPGKRFKLGTEIYFDSVDKSVTKEAEFKAQVIERDEATGGRILQFFCPEGRSFWQMLEEFGQIPLPPYINPDSFPSEPSNSLSLSSQYQTIFAQQPGAIAAPTAGLHFTEELLQKLQAKGINQAYLTLHVGVGTFRPVEVENITDHVMHQEWIELPLATVEQINATKARGGRIIAVGTTVVRALETAAKASQNQTLKPFRGKSDLFIYPGYRWQIVDGLITNFHLPYSSLLMLVSALIGRERLLALYDEAIAKQYRFYSFGDAMLILPEAKLG

SEQ ID NO: 72417 - protein, 371 aa, unidentified
  source 1..371: note = Stanieria sp.
  REGION 1..371: note = tr|A0A140K559|A0A140K559_9CYAN S-adenosylmethionine:tRNA ribosyltransferase-isomerase; OS = Stanieria sp. NIES-3757 OX=1807358 GN=queA PE=3 SV=1
MNPDQLLSSYGYELPSELIAQTPAVPRDSSRLLVVNSPTTELHRRFSDLIDWLLPGDLLVLNNTRVIPARLYGHKATGAPVEILLLEEKKDNCWLALVKPGKRFKLGTEIYFDSVDNSITNKSGFKAQVIERDEATGGRILQFFCPEGTSFWQMLEEFGQVPLPPYINSESSQSESSSLPFLSSQYQTIFAQQPGAIAAPTAGLHFTEELLQKLQAKGIAQAYLTLHVGVGTFRPVEVENITDHVMHQEWIELPLLTVDQINATKARGGRIIAVGTTVVRALEGAAKAAQNQSLKPFRGKTDLFIYPGYRWQVVDGLITNFHLPYSSLLMLVSALIGRERLLALYDEAIAKQYRFYSFGDAMLILPEAKLS

SEQ ID NO: 72418 - protein, 341 aa, Staphylococcus agnetis
  REGION 1..341: note = tr|A0A2T4MNN1|A0A2T4MNN1_9STAP S-adenosylmethionine:tRNA ribosyltransferase-isomerase; OS = Staphylococcus agnetis OX=985762 GN=queA PE=3 SV=1
MNIEDFNYHLPENLIAQTPLKERDTSKLLYMNRETGDIQDLQFKEVIRFFKPGDTLVLNDTKVMPARLFGLKKETNAKVEMLMLTNIEGDDWEVLLKPAKRIKVGQSISFGDGKIVATCMKELDQGGRVMRLHYEGILQERLDELGEMPLPPYIKERLDDRDRYQTVYAKATGSAAAPTAGLHFTDDLLKKVQDKGVQIAFVTLHVGLGTFRPVSVTDVNAHEMHSEYYTVSKETAQLLNDTKAKGHRIIAVGTTSTRTLETVVRDHGEFTQASGWTNIFIYPGFEFKAIDGLITNFHLPKSTLVMLVSAFSSTQYVLNAYTHAVNAKYRFFSFGDAMIII

SEQ ID NO: 72419 - protein, 131 aa, Staphylococcus agnetis
  REGION 1..131: note = tr|A0A2T4MME6|A0A2T4MME6_9STAP S-adenosylmethionine:tRNA ribosyltransferase-isomerase (Fragment) OS=Staphylococcus agnetis OX=985762 GN=queA; PE = 3 SV=1
MRVTDFSFELPESLIAHYPMPERSSCRLLSLDGPTGALTHGTFTDLLDKLNPGDLLVFNNTRVIPARLFGRKASGGKIEVLVERMLDDKRILAHIRASKAPKPGAELLLGDDESINATMTARHGALFEVEF

SEQ ID NO: 72420 - protein, 341 aa, unidentified
  source 1..341: note = Staphylococcus argensis
  REGION 1..341: note = tr|A0A2K4FFT4|A0A2K4FFT4_9STAP S-adenosylmethionine:tRNA ribosyltransferase-isomerase; OS = Staphylococcus argensis OX=1607738 GN=queA PE=3 SV=1
MDIEEFDYDLPESLIAQTPLKHRDQSRLLVMGRESGETTHLHFADVIDYLKEGDTLVLNDTRVMPARLFGIKEETGAKVEMLMLTHLEDNDWEVLLKPAKRIKVGQRLSFGEGKIVAECIKELDQGGRIMRLHYEGILQERLDELGEMPLPPYIKERLDDPDRYQTVYAKESGSAAAPTAGLHFTDELLESIKAKGIRIAFITLHVGLGTFRPVSVENIDDHEMHSEYYQISEETTQLLNETRREGGRIISVGTTTTRTLETVRSQHDQFVATSGWTDIFIYPGYQFKAIDGLITNFHLPKSTLVMLVSAFSTRENVLNAYREAVERKYRFFSFGDAMLII

SEQ ID NO: 72421 - protein, 341 aa, unidentified
  source 1..341: note = Staphylococcus argenteus
  REGION 1..341: note = tr|A0A380CDT8|A0A380CDT8_9STAP S-adenosylmethionine:tRNA ribosyltransferase-isomerase; OS = Staphylococcus argenteus OX=985002 GN=queA PE=3 SV=1
MNIEEFDYDLPESLIAQTPLKDRDQSRLLVMDRETGEMKHLHFKDIIEYFRAGDTLVLNDTRVMPARLFGLKEETGAKVEMLMLTQIEGNDWEVLLKPAKRIKVGNKLSFGNGKIVAECIKEMDQGGRIMRLHYEGILQERLDELGEMPLPPYIKERLDDPDRYQTVYAKESGSAAAPTAGLHFTDELLAKIKNKGVNIAFVTLHVGLGTFRPVSVNDVNDHEMHSEYYQMTQETADLLNDTKSKGHRIISVGTTSTRTLETIRRDYDQFVATSGWTNIFIYPGFEFKAIDGQITNFHLPKSTLVMLVSAFSTRENVLNAYRTAVSLEYRFFSFGDAMLII

SEQ ID NO: 72422 - protein, 341 aa, Staphylococcus arlettae
  REGION 1..341: note = tr|A0A380CEZ5|A0A380CEZ5_9STAP S-adenosylmethionine:tRNA ribosyltransferase-isomerase; OS = Staphylococcus arlettae OX=29378 GN=queA PE=3 SV=1
MDIEQFDYYLPEDLIAQTPLLNRDQSRLLVLGKNNGDIEHHHFKDIIDYLNPGDTLVLNDTRVMPARLFGIKEQTGAKVEMLMLTQIEGNDWEVLLKPAKRIKVGDKLNFGEGKIIAECIETLNQGGRIMRLHFDGILQERLDELGEMPLPPYIKERLDDPDRYQTVYAKEAGSAAAPTAGLHFTDTLLADIKAKGINIAFITLHVGLGTFRPVSVEDINDHEMHSEYYQMTQDTADLLNATQSQGGRIISVGTTSTRTLETIRQTNDQFLAASGWTDIFIYPGFEFKGVDGLITNFHLPKSTLVMLVSAFSTRENILNAYRTAVDERYRFFSFGDAMLII

SEQ ID NO: 72423 - protein, 341 aa, Staphylococcus aureus
  REGION 1..341: note = sp|Q2YT90|QUEA_STAAB S-adenosylmethionine:tRNA ribosyltransferase-isomerase OS=Staphylococcus aureus (strain bovine RF122 / ET3-1) OX=273036 GN=queA PE=3 SV=2
MNIEEFDYDLPESLIAQTPLKDRDHSRLLVMDRETGEMKHLHFKDIIEYFRPGDTLVLNDTRVMPARLFGLKEETGAKVEMLMLTQIEGNDWEVLLKPAKRIKVGNKLNFGNGKIIAECIKEMDQGGRIMRLHYEGILQERLDELGEMPLPPYIKERLDDPDRYQTVYAKESGSAAAPTAGLHFTDELLTEIKNKGVNIAFVTLHVGLGTFRPVSVDDVNDHEMHSEYYQMTQETADLLNDTKSKGHRIISVGTTSTRTLETIRRDHDKFVETSGWTNIFIYPGFDFKAIDGQITNFHLPKSTLVMLVSAFSTRENVLNAYKTAVNLEYRFFSFGDAMLII

SEQ ID NO: 72424 - protein, 341 aa, Staphylococcus aureus
  REGION 1..341: note = tr|A0A1Q8DG24|A0A1Q8DG24_STAAU S-adenosylmethionine:tRNA ribosyltransferase-isomerase; OS = Staphylococcus aureus OX=1280 GN=queA PE=3 SV=1
MNVEEFDYDLPESLIAQTPLKDRDQSKLLVLGRKDGHITHKHFKDVIDYLEAGDTLVLNDTRVMPARLFGLKEETGAKVEMLMLTRIEDNDWEVLLKPAKRIKVGNKLSFGDGKIVAECIKELDQGGRIMRLHYEGILEERLNELGEMPLPPYIKERLDDPDRYQTVYAKESGSAAAPTAGLHFTDELLDDIRAKGINIAFITLHVGLGTFRPVSVEDIIDHEMHSEYYQMTQETADLLNQTKKEGHRIISVGTTSTRTLETIRRDYSEFVAVSGWTDIFIYPGFTYKAIDGLITNFHLPKSTLVMLVSAFSSRENILNAYKEAVNLEYRFFSFGDAMLII

SEQ ID NO: 72425 - protein, 357 aa, Staphylococcus auricularis
  REGION 1..357: note = tr|A0A2K4BX08|A0A2K4BX08_9STAP S-adenosylmethionine:tRNA ribosyltransferase-isomerase; OS = Staphylococcus auricularis OX=29379 GN=queA PE=3 SV=1
MLTNILVTAKVKRGNKVNIEDFDYPLPESLIAQTPLKERDESRLLVMDRETGEVSHHTFKDIISYLEPGDTLVLNDTRVMPARLFGLKEGTGAKVEMLMLTQLEGNDWEVLLKPAKRIKVGDRLSFGDDKIVAECIEVLEQGGRIMRLHYDGILQERLDELGEMPLPPYIKERLEDPERYQTVYAKENGSAAAPTAGLHFTEALLDEIKDKGVNMAFITLHVGLGTFRPVSVENIDDHEMHSEYYQMSQETADLLNETRAKGNRIIAVGTTSTRTLETIRSSEDQFVAKSGWTDIFIYPGYEFKAIDGLITNFHLPKSTLVMLVSAFSTRENILNAYHEAVQQSYRFFSFGDAMFII

SEQ ID NO: 72426 - protein, 341 aa, Staphylococcus auricularis
  REGION 1..341: note = tr|A0A2X5D7B4|A0A2X5D7B4_9STAP S-adenosylmethionine:tRNA ribosyltransferase-isomerase; OS = Staphylococcus auricularis OX=29379 GN=queA PE=3 SV=1
MNIEDFDYPLPESLIAQTPLKERDESRLLVMDRETGEVSHHTFKDIISYLEPGDTLVLNDTRVMPARLFGLKEGTGAKVEMLMLTQLEGNDWEVLLKPAKRIKVGDRLSFGDDKIVAECIEVLEQGGRIMRLHYDGILQERLDELGEMPLPPYIKERLEDPERYQTVYAKENGSAAAPTAGLHFTEALLDEIKDKGVNMAFITLHVGLGTFRPVSVENIDDHEMHSEYYQMSQETADLLNETRAKGNRIIAVGTTSTRTLETIRSSEDQFVAKSGWTDIFIYPGYEFKAIDGLITNFHLPKSTLVMLVSAFSTRENILNAYHEAVQQSYRFFSFGDAMFII

SEQ ID NO: 72427 - protein, 347 aa, Staphylococcus capitis
  REGION 1..347: note = tr|A0A0U1E6Q9|A0A0U1E6Q9_STACP S-adenosylmethionine:tRNA ribosyltransferase-isomerase; OS = Staphylococcus capitis OX=29388 GN=queA PE=3 SV=1
MKRGSKLNIEEFDYHLPESLIAQTPLKNRDQNRLLVLQRETGKMTHLHFKDVIDYLNPGDTLVLNDTRVMPARLFGLKEETGAKVEMLMLTQIEGNDWEVLLKPAKRIKVGNRLSFGDGKIVAECIKELEQGGRIMRLHYDGILQERLDELGEMPLPPYIKERLDDPDRYQTVYAKESGSAAAPTAGLHFTDDLLNQIKQKGVNIAFITLHVGLGTFRPVSVDNIDDHEMHSEYYQMTQETADLLNQTKAKGKRIISVGTTSTRTLETIRRDHEQFVEKSGWTDIFIYPGFEYKAIDGLVTNFHLPKSTLVMLVSAFSTRENILNAYHKAVEMEYRFFSFGDAMLII

SEQ ID NO: 72428 - protein, 341 aa, Staphylococcus capitis
  REGION 1..341: note = tr|A0A4U9TDY4|A0A4U9TDY4_STACP S-adenosylmethionine:tRNA ribosyltransferase-isomerase; OS = Staphylococcus capitis OX=29388 GN=queA PE=3 SV=1
MNIEEFDYHLPESLIAQTPLKNRDQSRLLVLQRETGKMTHLHFKDVIDYLNPGDTLVLNDTRVMPARLFGLKEETGAKVEMLMLTQIEGNDWEVLLKPAKRIKVGNRLSFGDGKIVAECIKELEQGGRIMRLHYDGILQERLDELGEMPLPPYIKERLDDPDRYQTVYAKESGSAAAPTAGLHFTDDLLNQIKQKGVNIAFITLHVGLGTFRPVSVDNIDDHEMHSEYYQMTQETADLLNQTKAKGKRIISVGTTSTRTLETIRRGHEQFVEKSGWTDIFIYPGFEYKAIDGLITNFHLPKSTLVMLVSAFSTRENILNAYHKAVEMEYRFFSFGDAMLII

SEQ ID NO: 72429 - protein, 347 aa, Staphylococcus caprae
  REGION 1..347: note = tr|C5QT26|C5QT26_9STAP S-adenosylmethionine:tRNA ribosyltransferase-isomerase OS=Staphylococcus caprae M23864:W1 OX=525378 GN=queA PE=3 SV=1
MKRGSKLNIEEFDYHLPESLIAQTPLKNRDQSRLLVLQRETGEMAHLHFKDVIDYLNPGDTLVLNDTRVMPARLFGLKEETGAKVEMLMLTQIEGNDWEVLLKPAKRIKVGNRLSFGDGKIVAECVKELEQGGRIMRLHYEGILQERLDELGEMPLPPYIKERLDDPDRYQTVYAKESGSAAAPTAGLHFTEALLDQIKAKGVNITFITLHVGLGTFRPVSVDNIDDHEMHSEYYQMTSETAELLNQTRANGNRIISVGTTSTRTLETIRRDHEQFVEKSGWTDIFIYPGFEYKAIDGLITNFHLPKSTLVMLVSAFSTRDNILNAYQTAVEMKYRFFSFGDAMLII

SEQ ID NO: 72430 - protein, 341 aa, Staphylococcus carnosus
  REGION 1..341: note = tr|A0A431ZK47|A0A431ZK47_STACA S-adenosylmethionine:tRNA ribosyltransferase-isomerase; OS = Staphylococcus carnosus subsp. carnosus OX=147448; GN = queA PE=3 SV=1
MNVEEFDYHLPESLIAQTPLKDRDHSRLLVLGRESGEMEHKHFTDVIDYFEAGDTLVLNDTRVMPARLFGLKEETGAKVEMLMLTRIEDNDWEVLLKPAKRIKVGNKLSFGEGKIVAECIKELDQGGRIMRLHYDGILEERLNELGEMPLPPYIKERLDDPDRYQTVYARESGSAAAPTAGLHFTDDLLEKIKAKGVNIAFITLHVGLGTFRPVSVENIDDHEMHSEYYQMTQETADLLNETKAKGHRIISVGTTSTRTLETIRRDYDRFVAVSGWTDIFIYPGFEYKAIDGLITNFHLPKSTLVMLVSAFSSKKNILNAYNKAVELEYRFFSFGDAMLII

SEQ ID NO: 72431 - protein, 341 aa, Staphylococcus carnosus
  REGION 1..341: note = tr|B9DNF6|B9DNF6_STACT S-adenosylmethionine:tRNA ribosyltransferase-isomerase OS=Staphylococcus carnosus (strain TM300) OX=396513 GN=queA PE=3 SV=1
MNIEEFDYDLPEELIAQTPLKDRDTSRLLVLHKENGELEHRHFKDIIEYINSGDTLVLNDTKVMPARLFGVKQETKAKVEMLMLTQIEGDDWEVLLKPAKRIKVGQKLSFGEGKIEAECIEELDQGGRIMRLSYEGILQERLDELGEMPLPPYIKERLEDQDRYQTVYAKATGSAAAPTAGLHFTDELLDELKAKGVNLAFITLHVGLGTFRPVSVDNIDDHEMHSEYYQMTQETADLLNQTKQNGKRIISVGTTSTRTLETIRRDYDTFTAASGWTDIFIYPGFEFKAIDGLITNFHLPKSTLVMLVSAFSSRQYILNAYRTAVEMKYRFFSFGDAMLII

SEQ ID NO: 72432 - protein, 341 aa, Staphylococcus chromogenes
  REGION 1..341: note = tr|A0A2T4M1N2|A0A2T4M1N2_STACR S-adenosylmethionine:tRNA ribosyltransferase-isomerase; OS = Staphylococcus chromogenes OX=46126 GN=queA PE=3 SV=1
MNIEEFNYYLPEALIAQTPLKDRDTSRLLYLNRQTGDVKDLHFKDVVSFFEPGDTLVLNDTKVMPARLFGVKTETNAKVEMLMLTNIEGDDWEVLLKPAKRIKVGQSISFGNDKIIATCIKELDQGGRIMRLTYEGILQERLDELGEMPLPPYIKERLDDQDRYQTVYAKASGSAAAPTAGLHFTDELLNEVQQKGVNIAFVTLHVGLGTFRPVSVENIDDHEMHSEYYTMTQETADILNTTKASGHRIISVGTTSTRTLETIMRDFDTFKATSGWTNIFIYPGFEFKAIDGLITNFHLPKSTLVMLVSAFSSRQYVLNAYAHAVESKYRFFSFGDAMIII

SEQ ID NO: 72433 - protein, 341 aa, Staphylococcus cohnii
  REGION 1..341: note = tr|A0A3N0HSR7|A0A3N0HSR7_9STAP S-adenosylmethionine:tRNA ribosyltransferase-isomerase; OS = Staphylococcus cohnii OX=29382 GN=queA PE=3 SV=1
MDIEAFDYHLPESLIAQTPLKTRDESRLLVLGRKTGNIVHKHFKNIIDYLEAGDTLVLNDTKVMPARLFGLKEETGAKVEMLMLTQLEDNDWEVLLKPAKRIKVGDKLSFGEGKIVAECIETLDQGGRIMRLNYEGILQERLDELGEMPLPPYIKERLDDPDRYQTVYAKASGSAAAPTAGLHFTDKLLEQLQAKGVNIAFITLHVGLGTFRPVSVENIDDHEMHSEYYQMDQDTADLLNHTKSNGHRIISVGTTSTRTLETIMQSRNNFVADSGWTDIFIYPGFKFKAIDGLITNFHLPKSTLVMLVSAFSSRDYILNAYQQAVKLEYRFFSFGDAMLIL

SEQ ID NO: 72434 - protein, 341 aa, Staphylococcus cohnii; identical to SEQ ID NO: 64007
  REGION 1..341: note = tr|A0A0M2NZW2|A0A0M2NZW2_STACC S-adenosylmethionine:tRNA ribosyltransferase-isomerase; OS = Staphylococcus cohnii subsp. cohnii OX=74704 GN=queA; PE = 3 SV=1

SEQ ID NO: 72435 - protein, 341 aa, Staphylococcus condimenti
  REGION 1..341: note = tr|A0A143P7X1|A0A143P7X1_9STAP S-adenosylmethionine:tRNA ribosyltransferase-isomerase; OS = Staphylococcus condimenti OX=70255 GN=queA PE=3 SV=1
MNIEEFDYDLPEELIAQTPLKDRDTSRLLVLHKENGELEHRHFKDIIDYINPGDTLVLNDTKVMPARLFGVKQETKAKVEMLMLTQIEGDDWEVLLKPAKRIKVGQKLSFGEGKIEAECIEELEQGGRIMRLSYDGILQERLDELGEMPLPPYIKERLEDQDRYQTVYAKATGSAAAPTAGLHFTDELLDELKAKGVNLAFITLHVGLGTFRPVSVDNIDDHEMHSEYYQMTQETADLLNQTKQNDKRIISVGTTSTRTLETIRRDYDRFTAASGWTDIFIYPGFEFKAIDGLITNFHLPKSTLVMLVSAFSSRQYILHAYRTAVEMKYRFFSFGDAMLII

SEQ ID NO: 72436 - protein, 341 aa, Staphylococcus delphini
  REGION 1..341: note = tr|A0A2A4GXV8|A0A2A4GXV8_9STAP S-adenosylmethionine:tRNA ribosyltransferase-isomerase; OS = Staphylococcus delphini OX=53344 GN=queA PE=3 SV=1
MNIEEFDYELPESLIAQTPLKQRDQSRLLYLNRDTGETEDLHFKDITRFFQPGDTLVLNDTRVMPARLFGIKEETNAKVEMLMLTQIEGDDWEVLLKPAKRIKLGQTLSFGEGKIKATCIKELDQGGRIMRLSYEGILQERLDELGEMPLPPYIKERLDEKERYQTVYAKAAGSAAAPTAGLHFTDALLDDIRRQGVQIAFITLHVGLGTFRPVSVDNIDDHEMHSEYYQMSQETADILNQTKAAGHRIISVGTTSTRTLETIRSQFDSFQATSGWTNIFIYPGFEFKAIDGLITNFHLPKSTLVMLVSAFSSRQFVLSAYHHAVAEKYRFFSFGDAMIII

SEQ ID NO: 72437 - protein, 341 aa, Staphylococcus delphini
  REGION 1..341: note = tr|A0A2A4GT07|A0A2A4GT07_9STAP S-adenosylmethionine:tRNA ribosyltransferase-isomerase; OS = Staphylococcus delphini OX=53344 GN=queA PE=3 SV=1
MNIEEFDYELPESLIAQTPLKQRDQSRLLYLNRDTGETEDLHFKDITRFFQPGDTLVLNDTRVMPARLFGLKEETNAKVEMLMLTQIEGDDWEVLLKPAKRIKLGQTLSFGEGTIKATCIKELDQGGRIMRLSYEGILQERLDELGEMPLPPYIKERLDEKERYQTVYAKAAGSAAAPTAGLHFTDALLDDIRRQGVQIAFVTLHVGLGTFRPVSVDNIDDHEMHSEYYQMSQETADILNQTKAAGHRIISVGTTSTRTLETIRRQFDSFQATSGWTNIFIYPGFEFKAIDGLITNFHLPKSTLVMLVSAFSSRQFVLSAYHHAVAEKYRFFSFGDAMIII

SEQ ID NO: 72438 - protein, 341 aa, Staphylococcus devriesei
  REGION 1..341: note = tr|A0A2K4DMJ1|A0A2K4DMJ1_9STAP S-adenosylmethionine:tRNA ribosyltransferase-isomerase; OS = Staphylococcus devriesei OX=586733 GN=queA PE=3 SV=1
MNVEEFDYDLPESLIAQTPLKDRDHSRLLVLGRQSGEIDHKHFTDIIDYFNPGDTLVLNDTRVMPARLFGLKEETGAKVEMLMLTRIEKNDWEVLLKPAKRIKVGNKLSFGEGKIIAECIEELDQGGRIMRLHYEGILEERLNELGEMPLPPYIKERLDDPERYQTVYAKENGSAAAPTAGLHFTDDLLEKVKAKGVNIAFITLHVGLGTFRPVSVDNIDDHQMHSEYYQMTQQTADLLNQTKEQGNRIISVGTTSTRTLETIRRDNDEFVAVSGWTDIFIYPGFEYKAIDGLITNFHLPKSTLVMLVSAFSSRENILNAYNKAVELKYRFFSFGDAMLII

SEQ ID NO: 72439 - protein, 341 aa, Staphylococcus devriesei
  REGION 1..341: note = tr|A0A2T4KA57|A0A2T4KA57_9STAP S-adenosylmethionine:tRNA ribosyltransferase-isomerase; OS = Staphylococcus devriesei OX=586733 GN=queA PE=3 SV=1
MNVEEFDYDLPESLIAQTPLKDRDHSRLLVLGRQSGEIDHKHFTDIIDYFNPGDTLVLNDTRVMPARLFGLKEETGAKVEMLMLTRIEGNDWEVLLKPAKRIKIGNRLSFGEGKIIAECIDELEQGGRIMRLHYEGILEERLDELGEMPLPPYIKERLDDPDRYQTVYAKENGSAAAPTAGLHFTDDLLEKIKAKGVNIAFITLHVGLGTFRPVSVDNIDDHQMHSEYYQMTQQTADLLNQTKEQGHRIISVGTTSTRTLETIRRDYDKFVAVSGWTDIFIYPGFEYKAIDGLITNFHLPKSTLVMLVSAFSSRENILNAYNKAVELKYRFFSFGDAMLII

SEQ ID NO: 72440 - protein, 341 aa, unidentified
  source 1..341: note = Staphylococcus edaphicus
  REGION 1..341: note = tr|A0A2C6UB85|A0A2C6UB85_9STAP S-adenosylmethionine:tRNA ribosyltransferase-isomerase; OS = Staphylococcus edaphicus OX=1955013 GN=queA PE=3 SV=1
MNIEAFDYHLPESLIAQTPLKNRDESRLLILGRQSGNIEHKLFKDVVDYLKSGDTLVLNDTRVMPARLFGMKEETGAKVEMLMLTQIEGDDWEVLLKPAKRVKVGNKLTFGEGKIVAECIETLDQGGRIMRLHYEGILQERLDELGEMPLPPYIKERLDDQNRYQTVYAKETGSAAAPTAGLHFTDGLLERIRAKGVNIAFITLHVGLGTFRPVSVENIDDHEMHSEYYQMDEATAELLNHTKANGKRVISVGTTSTRTLETIMESHDRFVAKSGWTDIFIFPGFEFKAIDGLITNFHLPKSTLVMLVSAFSTRDYVINAYNQAVGSEYRFFSFGDAMLII

SEQ ID NO: 72441 - protein, 341 aa, Staphylococcus epidermidis
  REGION 1..341: note = sp|Q8CS92|QUEA_STAES S-adenosylmethionine:tRNA ribosyltransferase-isomerase OS=Staphylococcus epidermidis (strain ATCC 12228) OX=176280 GN=queA PE=3 SV=2
MNIEDFDYHLPESLIAQTPLKNRDQSRLLVLSKDTGELTHLHFRDVIHYFEPGDTLVLNDTRVMPARLFGLKEETGAKVEMLMLTQIEGNDWEVLLKPAKRIKKGHRLNFGDGKIVAECIEELEQGGRIMRLHYEGILQERLDELGEMPLPPYIKERLDDPDRYQTVYAKESGSAAAPTAGLHFTDDLLNKIKQKGVHIAFITLHVGLGTFRPVSVENIDDHEMHSEYYQMTQETADLLNKTKESGKRVISVGTTSTRTLETIRRDHPQFVATSGWTDIFIYPGFEFKAIDGLITNFHLPKSTLVMLVSAFSNKKYILNAYHKAVEMEYRFFSFGDAMLII

SEQ ID NO: 72442 - protein, 341 aa, Staphylococcus epidermidis
  REGION 1..341: note = sp|Q5HNR1|QUEA_STAEQ S-adenosylmethionine:tRNA ribosyltransferase-isomerase OS=Staphylococcus epidermidis (strain ATCC 35984 / RP62A) OX=176279 GN=queA PE=3 SV=1
MNIEDFDYHLPESLIAQTPLKNRDQSRLLVLSKDTGELTHLHFRDVIHYFEPGDTLVLNDTRVMPARLFGLKEETGAKVEMLMLTQIEGNDWEVLLKPAKRIKKGHRLNFGDGKIVAECIEELEQGGRIMRLHYEGILQERLDELGDMPLPPYIKERLDDPDRYQTVYAKESGSAAAPTAGLHFTDDLLNKIKQKGVHIAFITLHVGLGTFRPVSVENIDDHEMHSEYYQMTQETADLLNKTKESGKRVISVGTTSTRTLETIRRDHPQFVATSGWTDIFIYPGFEFKAIDGLITNFHLPKSTLVMLVSAFSNKKYILNAYHKAVEMEYRFFSFGDAMLII

SEQ ID NO: 72443 - protein, 354 aa, Staphylococcus equorum
  REGION 1..354: note = tr|A0A432A468|A0A432A468_9STAP S-adenosylmethionine:tRNA ribosyltransferase-isomerase; OS = Staphylococcus equorum subsp. equorum OX=29383 GN=queA; PE = 3 SV=1
MSTLIIHMKRGNKLNIEEFDYHLPESLIAQTPLKNRDQSRLLVLNKQNGTMEHLYFKDVIQYLNPGDTLVLNDTRVMPALLFGLKEETGAKVEMLMLAQIEGNDWEVLLKPAKRVKVGHRLNFGDGNITAECIKELEHGGRVMRLHYDGILQERLDELGEMPLPPYIKERLDDPDRYQTVYAKESGSAAAPTAGLHFTDDLLKQIKDKGVNIAFITLHVGLGTFRPVSVDNIDDHEMHSEYYQMTKKTADLLNQTRANGKRIISVGTTSTRTLETIRRDHSRFLEKSGWTDIFIYPGFKFKAIDGLITNFHLPKSTLVMLVSAFSTRDYILNAYQTAVQMEYRFFSFGDAMLII

SEQ ID NO: 72444 - protein, 341 aa, Staphylococcus equorum
  REGION 1..341: note = tr|A0A1E5TJI4|A0A1E5TJI4_9STAP S-adenosylmethionine:tRNA ribosyltransferase-isomerase; OS = Staphylococcus equorum OX=246432 GN=queA PE=3 SV=1
MDIEAFDYHLPEALIAQTPLKNRDESKLLVLGRQTGDIEHKHFKDVIDYLDKGDTLVLNDTRVMPARLFGLKEETGAKVEMLMLTQISGNDWEVLLKPAKRIKVGNKLSFGDGKIVAECIEELNQGGRIMRLHYEGILQERLDELGEMPLPPYIKERLDDQDRYQTVYAKASGSAAAPTAGLHFTDELLNRIKAKGINIAFITLHVGLGTFRPVSVDNIDDHEMHSEYYQMDQETAKLLNETKSKGHRVISVGTTSTRTLETIMQTNEAFKAQSGWTDIFIFPGYTFKAIDGLITNFHLPKSTLVMLVSAFSSRDYILNAYQQAVKSEYRFFSFGDAMLII

SEQ ID NO: 72445 - protein, 341 aa, Staphylococcus felis
  REGION 1..341: note = tr|A0A2K3ZJC9|A0A2K3ZJC9_9STAP S-adenosylmethionine:tRNA ribosyltransferase-isomerase; OS = Staphylococcus felis OX=46127 GN=queA PE=3 SV=1
MNIEEFDYHLPEALIAQTPLKNRDTSRLLHLNKVTGKVEDLHFKDIIHFLNKGDTLVLNDTKVMPARLFGIKEDTHAKVEMLMLTQLENDDWEVLLKPAKRIKLGQTLVFGDGKIKATCIEERSQGGRIMRLNYDGILQERLDELGEMPLPPYIKERLDEKDRYQTVYAKESGSAAAPTAGLHFTESLLSDIQEKGVKIAFVTLHVGLGTFRPVSVENIDDHDMHSEYYQMTEETARILRDTRLSGGRVISVGTTSTRTLETIYRDHNDFVASSGWTDIFIYPGFEFKAIDGLITNFHLPKSTLVMLVSAFSSKQYILNAYQHAVNHQYRFFSFGDAMIII

SEQ ID NO: 72446 - protein, 341 aa, Staphylococcus fleurettii
  REGION 1..341: note = tr|A0A3S0JXG4|A0A3S0JXG4_9STAP S-adenosylmethionine:tRNA ribosyltransferase-isomerase; OS = Staphylococcus fleurettii OX=150056 GN=queA PE=3 SV=1
MNIEEFDYELPESLIAQTPLKQRDQSRLLYLNRQTGDTEDLHFKDITRFFKQGDTLVLNDTKVMPARLFGVKEETLAKVEMLMLTQIEGDDWEVLLKPAKRIKVGQSLSFGDGKIIATCMKELDQGGRMMRLHYDGILQERLDELGEMPLPPYIKERLDEKDRYQTVYAKASGSAAAPTAGLHFTDQLLQQIRENGVNIAFITLHVGLGTFRPVSVENIDDHEMHSEYYQMSQETADLLNETKAKGHRIISVGTTSTRTLETIRQNNTQFVASSGWTDIFIYPGFEFKAIDGLITNFHLPKSTLVMLVSAFSSRQFVLSAYRHAVAEKYRFFSFGDAMIII

SEQ ID NO: 72447 - protein, 341 aa, Staphylococcus fleurettii
  REGION 1..341: note = tr|A0A380FSL3|A0A380FSL3_9STAP S-adenosylmethionine:tRNA ribosyltransferase-isomerase; OS = Staphylococcus fleurettii OX=150056 GN=queA PE=3 SV=1
MNIEDFDFDLPESLIAQTPLLDRESSRLLKCNKKTGELEDLTFKEVVNQLAPGDCLVLNDTKVMPARLFGLKEETGAKVEMLMLTQHEDNEWEVLIKPAKRIKVGQSVSFGEGKIIATCVKELEQGGRIMKLSYEGILQERLDELGEMPLPPYIKERLEDQDRYQTVYAKEVGSAAAPTAGLHFTEHLLQEIAAKGVHIAFITLHVGLGTFRPVSVDNIDDHEMHSEYYQMTAETADLLNRVKSEGNKIISVGTTSTRTLETIRSKNDEFVEASGWTDIFIYPGYEFKAIDGLITNFHLPKSTLIMLVSALSTRENILHAYQHAVDEKYRFFSFGDAMILI

SEQ ID NO: 72448 - protein, 271 aa, Staphylococcus gallinarum
  REGION 1..271: note = tr|A0A380FJR9|A0A380FJR9_STAGA S-adenosylmethionine:tRNA ribosyltransferase-isomerase; OS = Staphylococcus gallinarum OX=1293 GN=queA_1 PE=3 SV=1
MKEDTGAKVEMLMLTQIEGNDWEVLLKPAKRIKVGNKLSFGDGKIVAECMEELDQGGRIMRLHYEGILQERLDELGEMPLPPYIKERLDDQERYQTVYAKESGSAAAPTAGLHFTDDLLQQIRDKGVNIAFVTLHVGLGTFRPVSVDNIDDHEMHSEYYQINQETADLLNATRAQGKRIISVGTTSTRTLETIMQSNESFVAQSGWTDIFIYPGFEYKAIDGLITNFHLPKSTLVMLVSAFSSRDYIINAYQKAVELEYRFFSFGDAMLII

SEQ ID NO: 72449 - protein, 79 aa, Staphylococcus gallinarum
  REGION 1..79: note = tr|A0A380FHG5|A0A380FHG5_STAGA S-adenosylmethionine:tRNA ribosyltransferase-isomerase; OS = Staphylococcus gallinarum OX=1293 GN=queA_2 PE=3 SV=1
MDIEAFDYHLPESLIAQTPLKNRDESRLLVLGKDSGDIEHRQFKNVIEYLNEGDTLVLNDTRVMPARFIWFERRYWSQS

SEQ ID NO: 72450 - protein, 341 aa, Staphylococcus haemolyticus
  REGION 1..341: note = sp|Q4L6Y5|QUEA_STAHJ S-adenosylmethionine:tRNA ribosyltransferase-isomerase OS=Staphylococcus haemolyticus (strain JCSC1435) OX=279808 GN=queA PE=3 SV=1
MNVEEFDYDLPESLIAQTPLKDRDQSRLLVLGRNSGNIEHKHFKDVINYLETGDTLVLNDTRVMPARLFGLKEETGAKVEMLMLTRIENNDWEVLLKPAKRIKVGNKLSFGEGKIIAECIEELDQGGRIMRLHYEGILEERLNELGEMPLPPYIKERLDDPDRYQTVYAKESGSAAAPTAGLHFTDELLDEIRAKGINIAFITLHVGLGTFRPVSVEDINDHEMHSEYYQMTQETANLLNQTKKEGHRIISVGTTSTRTLETIRRDYNEFVAVSGWTDIFIYPGFTYKAIDGLITNFHLPKSTLVMLVSAFSSRENILNAYKEAVKLEYRFFSFGDAMLII

SEQ ID NO: 72451 - protein, 341 aa, Staphylococcus haemolyticus; identical to SEQ ID NO: 72450
  REGION 1..341: note = tr|A0A2A1KAX1|A0A2A1KAX1_STAHA S-adenosylmethionine:tRNA ribosyltransferase-isomerase; OS = Staphylococcus haemolyticus OX=1283 GN=queA PE=3 SV=1

SEQ ID NO: 72452 - protein, 341 aa, Staphylococcus hominis
  REGION 1..341: note = tr|A0A4Q9WQU7|A0A4Q9WQU7_STAHO S-adenosylmethionine:tRNA ribosyltransferase-isomerase; OS = Staphylococcus hominis OX=1290 GN=queA PE=3 SV=1
MNVEEFDYHLPESLIAQTPLKNRDQSRLLVLGRKTGNIAHKHFTDIMDYFEPGDTLVLNDTRVMPARLFGLKEETGAKVEMLMLTRIEDNDWEVLLKPAKRIKVGNTLSFGNGKIIAECIKELEQGGRIMRLHYEGILEERLDELGEMPLPPYIKERLDDPDRYQTVYAKENGSAAAPTAGLHFTDELLQKIKDKGVNIAFITLHVGLGTFRPVSVEDIDDHEMHSEYYQMTKETADMLNKTKENGYRIISVGTTSTRTLETIRRDHEQFVATSGWTDIFIYPGFEYKAIDGLITNFHLPKSTLVMLVSAFSSREYILNAYKEAVKLKYRFFSFGDAMLII

SEQ ID NO: 72453 - protein, 341 aa, Staphylococcus hominis
  REGION 1..341: note = tr|A0A533IY17|A0A533IY17_STAHO S-adenosylmethionine:tRNA ribosyltransferase-isomerase; OS = Staphylococcus hominis OX=1290 GN=queA PE=3 SV=1
MNVEEFDYHLPESLIAQTPLKNRDQSRLLVLGRKTGNIAHKHFTDIMDYFETGDTLVLNDTRVMPARLFGLKEETGAKVEMLMLTRIEDNDWEVLLKPAKRIKVGNTLSFGNGKIIAECIKELEQGGRIMRLHFEGILEERLDELGEMPLPPYIKERLDDPDRYQTVYAKENGSAAAPTAGLHFTDELLQKIKDKGVNIAFITLHVGLGTFRPVSVEDINDHEMHSEYYQMTKETADILNKTKENGNRIISVGTTSTRTLETVRRDHEQFVATSGWTDIFIYPGFEYKAIDGLITNFHLPKSTLVMLVSAFSSREYILNAYKEAVKLKYRFFSFGDAMLII

SEQ ID NO: 72454 - protein, 341 aa, Staphylococcus hyicus
  REGION 1..341: note = tr|A0A418JIB5|A0A418JIB5_STAHY S-adenosylmethionine:tRNA ribosyltransferase-isomerase; OS = Staphylococcus hyicus OX=1284 GN=queA PE=3 SV=1
MNIEDFNYHLPENLIAQTPLKERDTSKLLYMNRKTGETKDLHFKDVIQFLEPGDTLVLNDTKVMPARLFGLKKETNAKVEMLMLTNIEGDDWEVLIKPAKRIKVGQQVSFGDDKIVATCVKELDQGGRIMRLKYDGILQERLDELGEMPLPPYIKERLDDRDRYQTVYAKETGSAAAPTAGLHFTDELLNVVREKGVNIAFVTLHVGLGTFRPVSVDNVNDHEMHSEYYTVTKETAKLLNDTKSKGKRIISVGTTSTRTLETVVRDYGTFTQASGWTNIFIYPGFEFKAIDGLITNFHLPKSTLVMLVSAFSSTQFVINAYTHAVNEQYRFFSFGDAMIIL

SEQ ID NO: 72455 - protein, 341 aa, Staphylococcus hyicus
  REGION 1..341: note = tr|A0A3S5DYE5|A0A3S5DYE5_STAHY S-adenosylmethionine:tRNA ribosyltransferase-isomerase; OS = Staphylococcus hyicus OX=1284 GN=queA PE=3 SV=1
MNIEEFDYHLPEELIAQTPLKDRDTSRLLVLNRKNGDIEHRHFKDIIEYFNPGDTLVLNDTKVMPARLFGLKEDTKAKVEMLMLTQIEGNDWEVLLKPAKRIKVGQKLSFGEGKIIAECIKELEQGGRIMRLYYEGILQERLDELGEMPLPPYIKERLDDPDRYQTVYAKETGSAAAPTAGLHFTDELLEQLKAKQVNLAFVTLHVGLGTFRPVSVDNIDDHKMHSEYYQMSQATADLLNETKQKGHRIISVGTTSTRTLETIRRDHDQFTAQSGWTDIFIYPGFEFKAIDALITNFHLPKSTLVMLVSAFSSKQYILNAYQTAVEMKYRFFSFGDAMLII

SEQ ID NO: 72456 - protein, 341 aa, Staphylococcus intermedius
  REGION 1..341: note = tr|A0A380G730|A0A380G730_STAIN S-adenosylmethionine:tRNA ribosyltransferase-isomerase; OS = Staphylococcus intermedius NCTC 11048 OX=1141106; GN = queA PE=3 SV=1
MNIEEFDYVLPESLIAQTPLKQRDQSRLLYLNRDTGETEDLHFKDITRFFRPGDTLVLNDTRVMPARLFGVKEETNAKVEMLMLTQIEGDDWEVLLKPAKRIKVGQTLSFGEGKIKATCIKELNQGGRVMRLSYDGILQERLDELGEMPLPPYIKERLDEKERYQTVYAKAAGSAAAPTAGLHFTDELLEDIRKQGVHIAFVTLHVGLGTFRPVSVDNIDDHEMHSEYYQMSQETADILNQTKAAGHRIISVGTTSTRTLETIRTQFDSFKATSGWTDIFIYPGYEFKAIDGLITNFHLPKSTLVMLVSAFSSRQFVLSAYRHAVNEKYRFFSFGDAMIII

SEQ ID NO: 72457 - protein, 341 aa, Staphylococcus kloosii
  REGION 1..341: note = tr|A0A151A4F6|A0A151A4F6_9STAP S-adenosylmethionine:tRNA ribosyltransferase-isomerase; OS = Staphylococcus kloosii OX=29384 GN=queA PE=3 SV=1
MDIEDFDYHLPEALIAQTPLKDRDQSRLLVLGKNSGDIDHRHFKDVIDYFNQGDTLVLNDTRVMPARLFGIKEETGAKVEMLMLTQLEGNDWEVLLKPAKRIQIGDKLNFGEGKIIAECIETLNQGGRIMRLHFEGILQERLDELGEMPLPPYIKERLDDPERYQTVYAKEIGSAAAPTAGLHFTDELLSQIKQKGVNVAFITLHVGLGTFRPVSVDNIDDHEMHSEYYQMTQETADLLNATKENGGRIISVGTTSTRTLETIRQNNSQFEAESGWTDIFIYPGFDFKGVDGLITNFHLPKSTLVMLVSAFSSRENILNAYNQAVAEQYRFFSFGDAMLII

SEQ ID NO: 72458 - protein, 341 aa, Staphylococcus kloosii
  REGION 1..341: note = tr|A0A512QGY6|A0A512QGY6_9STAP S-adenosylmethionine:tRNA ribosyltransferase-isomerase; OS = Staphylococcus kloosii OX=29384 GN=queA PE=3 SV=1
MDIEDFDYHLPEALIAQTPLKDRDQSRLLVLGKNSGDIDHRHFKDVIDYFNQGDTLVLNDTRVMPARLFGIKEETGSKVEMLMLTQLEGNDWEVLLKPAKRIQIGDKLNFGEGKIIAECIETLNQGGRIMRLHFEGILQERLDELGEMPLPPYIKERLDDPERYQTVYAKEIGSAAAPTAGLHFTDELLSQIKQKGVNVAFITLHVGLGTFRPVSVDNIDDHEMHSEYYQMTQETADLLNATKENGGRIISVGTTSTRTLETIRQNNSQFEAESGWTDIFIYPGFDFKGVDGLITNFHLPKSTLVMLVSAFSSRENILNAYNQAVAEQYRFFSFGDAMLII

SEQ ID NO: 72459 - protein, 341 aa, Staphylococcus lentus
  REGION 1..341: note = tr|A0A5F0TX70|A0A5F0TX70_STALE S-adenosylmethionine:tRNA ribosyltransferase-isomerase; OS = Staphylococcus lentus OX=42858 GN=queA PE=3 SV=1
MNIEDFDFDLPESLIAQTPLLNRESSRLLKCDKVTGELEDLTFKDVIHQLSPGDCLVLNDTKVMPARLFGIKEETGAKVEMLMLTQQENDEWEVLIKPAKRIKINQSVSFGEGKIIATCVKELDQGGRIMKLSYEGILQERLDELGEMPLPPYIKERLDDQERYQTVYAKAVGSAAAPTAGLHFTKNLLQEIRDKGVHVAFITLHVGLGTFRPVSVDNIDEHEMHSEYYQMSEDTAELLNKVKADGKKIISVGTTSTRTLETIRSRNDKFIAESGWTDIFIYPGYEFKAIDGLITNFHLPKSTLIMLVSALSSRENILNAYRHAVESEYRFFSFGDAMIII

SEQ ID NO: 72460 - protein, 341 aa, Staphylococcus lentus
  REGION 1..341: note = tr|A0A178PLA4|A0A178PLA4_STALE S-adenosylmethionine:tRNA ribosyltransferase-isomerase; OS = Staphylococcus lentus OX=42858 GN=queA PE=3 SV=1
MNIEDFDFDLPESLIAQTPLLNRESSRLLKCDKVTGELEDLTFKDVIHQLSPGDCLVLNDTKVMPARLFGIKEETGAKVEMLMLTQQENDEWEVLIKPAKRIKINQSVSFGEGKIIATCVKELDQGGRIMKLSYEGILQERLDELGEMPLPPYIKERLDDQDRYQTVYAKAVGSAAAPTAGLHFTKNLLQEIRGRGVHVAFITLHVGLGTFRPVSVDNIDEHEMHSEYYQMSEDTAELLNKVKADGKKIISVGTTSTRTLETIRSRNDKFIAESGWTDIFIYPGYEFKAIDGLITNFHLPKSTLIMLVSALSSRENILNAYRHAVESEYRFFSFGDAMIII

SEQ ID NO: 72461 - protein, 341 aa, Staphylococcus lugdunensis
  REGION 1..341: note = tr|A0A4Q9W845|A0A4Q9W845_STALU S-adenosylmethionine:tRNA ribosyltransferase-isomerase; OS = Staphylococcus lugdunensis OX=28035 GN=queA PE=3 SV=1
MNIEDFDYHLPESLIAQTPLKNRDQSRLLVLNKETGDMKHQHFKDVINYLNPGDTLVLNDTRVMPARLFGVKEETGAKVEMLMLTQIENNDWEVLLKPAKRIKVGNQLSFGEGKIIAECIKELDQGGRIMRLHYEGILQERLDELGEMPLPPYIKARLDDPDRYQTVYAKENGSAAAPTAGLHFTDNLLKDIKAKGVNIAFITLHVGLGTFRPVSVENINEHEMHSEYYQMTENTAQLLNNTKLQGHRIIAVGTTSTRTLETIRRDHSQFIATSGWTDIFIYPGFEFKAIDALITNFHLPKSTLVMLVSAFSSRQFILTAYRKAVELEYRFFSFGDAMLII

SEQ ID NO: 72462 - protein, 341 aa, Staphylococcus lugdunensis
  REGION 1..341: note = tr|A0A133Q2E9|A0A133Q2E9_STALU S-adenosylmethionine:tRNA ribosyltransferase-isomerase; OS = Staphylococcus lugdunensis OX=28035 GN=queA PE=3 SV=1
MNIEDFDYHLPESLIAQTPLKNRDQSRLLVLNKKTGDMKHQHFKDVINYLNPGDTLVLNDTRVMPARLFGVKEETGAKVEMLMLTQIENNDWEVLLKPAKRIKVGNQLSFGEGKIIAECIKELDQGGRIMRLHYEGILQERLDELGEMPLPPYIKARLDDPDRYQTVYAKENGSAAAPTAGLHFTDNLLKDIKAKGVNIAFITLHVGLGTFRPVSVENINEHEMHSEYYQMTENTAQLLNNTKLQGHRIIAVGTTSTRTLETIRRDHSQFIATSGWTDIFIYPGFEFKAIDALITNFHLPKSTLVMLVSAFSSRQFILTAYRKAVELEYRFFSFGDAMLII

SEQ ID NO: 72463 - protein, 341 aa, Staphylococcus lutrae
  REGION 1..341: note = tr|A0A1W6BJF4|A0A1W6BJF4_9STAP S-adenosylmethionine:tRNA ribosyltransferase-isomerase; OS = Staphylococcus lutrae OX=155085 GN=queA PE=3 SV=1
MNIEEFDYELPESLIAQTPLLQRDQSRLLYLNRTTGEMEDLRFTAISQFFQRGDTLVLNDTRVMPARLFGIKEETNAKVEMLLLTQIEGDDWEVLLKPAKRIKIGQSLSFGDGIIKATCIQELDQGGRVMRLSYDGILQERLDELGEMPLPPYIKTRLDEKERYQTVYAKASGSAAAPTAGLHFTDELLDEIRNKGVNIAFITLHVGLGTFRPVSVNNIDDHEMHSEYYQMTQATADVLNDTKAAGHRIISVGTTSTRTLETIVAQHGTFIETSGWTDIFIYPGFHFKAIDGLITNFHLPKSTLVMLVSAFSTRQYVLNAYRHAVDEKYRFFSFGDAMMII

SEQ ID NO: 72464 - protein, 341 aa, Staphylococcus massiliensis
  REGION 1..341: note = tr|K9ARC3|K9ARC3_9STAP S-adenosylmethionine:tRNA ribosyltransferase-isomerase OS=Staphylococcus massiliensis S46 OX=1229783 GN=queA PE=3 SV=1
MNIEEFNYDLPESLIAQTPLKNRDESRLLHLNRHTGDVSHHTFKDIISFLKAGDTLVLNDTRVMPARLFGLKEDTLAKIEMLMLTQIEGDDWEVLIKPAKRIKVGQKVSFGEGKIIAECIEEQAQGGRIMRLSYEGILQERLDELGEMPLPPYIKERLDERERYQTVYAKEVGSAAAPTAGLHFTTPLLEAIKAKGVDLAYVTLHVGLGTFRPVSVDNIDDHTMHSEFYQMSEETAALLNETKARGGRIISVGTTSTRTLETIRAKHDTFVSSSGWTDIFIYPGYEFKAIDGLITNFHLPKSTLVMLVSAFSTKQYVLNAYQEAVESKYRFFSFGDAMIII

SEQ ID NO: 72465 - protein, 341 aa, Staphylococcus microti
  REGION 1..341: note = tr|A0A0D6XSF9|A0A0D6XSF9_9STAP S-adenosylmethionine:tRNA ribosyltransferase-isomerase; OS = Staphylococcus microti OX=569857 GN=queA PE=3 SV=1
MNIEQFDYDLPESLIAQTPLKDRDTSRLLHLDKQTGAVEDLHFKDILRFFQPGDTLVLNDTKVMPARLIGLKTETNAQVEMLMLNQVEGNDWEVLLKPAKRIKEGQSLSFGDGKIIATCIETREQGGRIMRLQYEGILQERLDELGEMPLPPYIKERLEDRDRYQTVYAKETGSAAAPTAGLHFTDALLEEVQKMGVRIAFVTLHVGLGTFRPVSVDNIDDHEMHSEYYMMSQETADLLNQTKAEGHRIISVGTTSTRTLETIRRDHDAFVATSGWTDIFIYPGFEFKAVDGLITNFHLPKSTLVMLVSAFSSRQFVLNAYEHAVKASYRFFSFGDAMIII

SEQ ID NO: 72466 - protein, 341 aa, Staphylococcus muscae
  REGION 1..341: note = tr|A0A240C3R6|A0A240C3R6_9STAP S-adenosylmethionine:tRNA ribosyltransferase-isomerase; OS = Staphylococcus muscae OX=1294 GN=queA PE=3 SV=1
MNIEAFDYDLPESLIAQTPLKDRDTSRLLHLDRQTGAVEDLHFKDITKFFKPGDTLVLNDTKVMPARLFGVKVETNAQVEMLMLNQVEGNDWEVLLKPAKRIKVGQSLSFGDGKIIATCIDTLDQGGRIMRLEYEGILQERLDELGEMPLPPYIKERLDDKDRYQTVYAKETGSAAAPTAGLHFTDSLLQDLQAMGVRLAFVTLHVGLGTFRPVSVDNIDDHEMHSEYYMMSQETADLLNQTKAEGHRIISVGTTSTRTLETIRRDHTQFVATSGWTDIFIYPGFEFKAVDGQITNFHLPKSTLVMLVSAFSTRQFVLDAYKHAVKESYRFFSFGDAMIII

SEQ ID NO: 72467 - protein, 341 aa, Staphylococcus nepalensis
  REGION 1..341: note = tr|A0A2T4SAF3|A0A2T4SAF3_9STAP S-adenosylmethionine:tRNA ribosyltransferase-isomerase; OS = Staphylococcus nepalensis OX=214473 GN=queA PE=3 SV=1
MDIESFDYHLPESLIAQTPLKNRDESRLLVLGRKTGDIEHKYFKNVIDYLQAGDTLVLTDTRVMPARLFGLKEETGAKVEMLMLTQLEDDDWEVLLKPAKRIKTGDKLSFGDGKIIAECVEELNQGGRIMRLDYDGILQERLDELGEMPLPPYIKERLDDPDRYQTVYAKASGSAAAPTAGLHFTDELLEQIKAKGVNITFITLHVGLGTFRPVSVENIDDHEMHSEYYQMDQETADLLNETKAKGHRVISVGTTSTRTLETIRASHNEFVADSGWTDIFIFPGFEFKAIDGLITNFHLPKSTLVMLVSAFSTKDYILNAYHQAVKSEYRFFSFGDAMLII

SEQ ID NO: 72468 - protein, 162 aa, Staphylococcus nepalensis
  REGION 1..162: note = tr|A0A2T4S7A8|A0A2T4S7A8_9STAP S-adenosylmethionine:tRNA ribosyltransferase-isomerase (Fragment) OS=Staphylococcus nepalensis OX=214473; GN = BUZ61_13605 PE=3 SV=1
AGLHFTDELLEQLKAKQVNLAFVTLHVGLGTFRPVSVDNIDDHKMHSEYYQMSQATADLLNETKQKGHRIISVGTTSTRTLETIRRDHDQFTAQSGWTDIFIYPGFEFKAIDALITNFHLPKSTLVMLVSAFSSKQYILNAYQTAVEMKYRFFSFGDAMLII

SEQ ID NO: 72469 - protein, 341 aa, Staphylococcus pasteuri
  REGION 1..341: note = tr|A0A518NUN5|A0A518NUN5_9STAP S-adenosylmethionine:tRNA ribosyltransferase-isomerase; OS = Staphylococcus pasteuri OX=45972 GN=queA PE=3 SV=1
MNIEDFDYDLPESLIAQTPLKNRDQSRLLVLDRNTGDMEHLHFRDVINYFEPGDTLVLNDTRVMPARLFGLKEETGAKVEMLMLTQIEDNDWEVLLKPAKRIKVGNKLNFGEGKIIAECIEELEQGGRIMRLHYDGILQERLDELGEMPLPPYIKERIDDPNRYQTVYAKESGSAAAPTAGLHFTDSLLEAIKEKGVNIAFITLHVGLGTFRPVSVDNIDDHEMHSEYYQMTQQTADLLNETKAKGHRIISVGTTSTRTLETIRRDHSEFVEKSGWTDIFIYPGFEYKAIDGLITNFHLPKSTLVMLVSAFSSRQYILNAYKKAVEMEYRFFSFGDAMLII

SEQ ID NO: 72470 - protein, 341 aa, Staphylococcus pasteuri
  REGION 1..341: note = tr|A0A269XLC1|A0A269XLC1_9STAP S-adenosylmethionine:tRNA ribosyltransferase-isomerase; OS = Staphylococcus pasteuri OX=45972 GN=queA PE=3 SV=1
MNIEDFDYDLPESLIAQTPLKNRDQSRLLVLNRKNGNMEHLHFKDVINYFNPGDTLVLNDTRVMPARLFGLKEETGAKVEMLMLTQIEGNDWEVLLKPAKRIKVGNQLNFGDGKIIAECIEELDQGGRIMRLHYEGILQERLDELGEMPLPPYIKERLDDPDRYQTVYAKESGSAAAPTAGLHFTDELLESIKAKGVNIAFITLHVGLGTFRPVSVDNIDDHEMHSEYYQMMQETADLLNKTRKNGHRIISVGTTSTRTLETIRRDHSEFVEKSGWTDIFIYPGFEYKAIDGLITNFHLPKSTLVMLVSAFSSREYILNAYQKAVEMEYRFFSFGDAMLII

SEQ ID NO: 72471 - protein, 341 aa, unidentified
  source 1..341: note = Staphylococcus petrasii
  REGION 1..341: note = tr|A0A5F1B4F1|A0A5F1B4F1_9STAP S-adenosylmethionine:tRNA ribosyltransferase-isomerase; OS = Staphylococcus petrasii subsp. petrasii OX=1276937; GN = queA PE=3 SV=1
MNVEEFDYHLPESLIAQTPLKDRDHSRLLVLGRESGEMEHKHFTDVIDYFEAGDTLVLNDTRVMPARLFGLKEETGAKVEMLMLTRIEDNDWEVLLKPAKRIKVGNKLSFGEGKIVAECIKELDQGGRIMRLHYDGILEERLDELGEMPLPPYIKERLDDPDRYQTVYARESGSAAAPTAGLHFTDELLEKIKAKGVNITFITLHVGLGTFRPVSVENIDDHEMHSEYYQMTQETADLLNETKAKGHRIISVGTTSTRTLETIRRDYDQFVAVSGWTDIFIYPGFEYKAIDGLITNFHLPKSTLVMLVSAFSSKKNILNAYNKAVELEYRFFSFGDAMLII

SEQ ID NO: 72472 - protein, 341 aa, unidentified
  source 1..341: note = Staphylococcus petrasii
  REGION 1..341: note = tr|A0A380G1Y5|A0A380G1Y5_9STAP S-adenosylmethionine:tRNA ribosyltransferase-isomerase; OS = Staphylococcus petrasii subsp. jettensis OX=1077965; GN = queA PE=3 SV=1
MNVEEFDYHLPESLIAQTPLKDRDHSRLLVLGRESGEMEHKHFTDVIDYFEAGDTLVLNDTRVMPARLFGLKEETGAKVEMLMLTRIEDNDWEVLLKPAKRIKVGNKLSFGEGKIVAECIKELDQGGRIMRLHYDGILEERLDELGEMPLPPYIKERLDDPDRYQTVYARESGSAAAPTAGLHFTDELLEKIKAKGVNIAFITLHVGLGTFRPVSVENIDDHEMHSEYYQMTQETADLLNETKAKGHRIISVGTTSTRTLETIRRDYDQFVAVSGWTDIFIYPGFEYKAIDGLITNFHLPKSTLVMLVSAFSSKKNILNAYNKAVELEYRFFSFGDAMLII

SEQ ID NO: 72473 - protein, 341 aa, Staphylococcus pettenkoferi
  REGION 1..341: note = tr|A0A2N6QJ66|A0A2N6QJ66_9STAP S-adenosylmethionine:tRNA ribosyltransferase-isomerase; OS = Staphylococcus pettenkoferi OX=170573 GN=queA PE=3 SV=1
MNIEEFDYDLPESLIAQTPLKHRDQSRLLVMGRESGKTTHQHFADVIDYFKEGDTLVLNDTRVMPARLFGIKEETGAKVEMLMLTHLEDNDWEVLLKPAKRIKVGQRLSFGDGKIVAECIEELDQGGRIMRLHYEGILQERLDELGEMPLPPYIKERLDDPDRYQTVYAKESGSAAAPTAGLHFTDELLEAIRAKGIRIVFITLHVGLGTFRPVSVDNIDDHEMHSEYYQISEDTAQLLNETRREGGRIISVGTTTTRTLETVRSQHDHFVAASGWTDIFIYPGYEFKAIDGLITNFHLPKSTLVMLVSAFSTRENVLNAYREAVERQYRFFSFGDAMLII

SEQ ID NO: 72474 - protein, 341 aa, Staphylococcus piscifermentans
  REGION 1..341: note = tr|A0A239U0I3|A0A239U0I3_9STAP S-adenosylmethionine:tRNA ribosyltransferase-isomerase; OS = Staphylococcus piscifermentans OX=70258 GN=queA PE=3; SV = 1
MNIEEFDYDLPEELIAQTPLKDRDTSRLLVLNRENGEIDHRHFKDVIEYINPGDTLVLNDTKVMPARLFGVKQETKAKVEMLMLTQIEGDDWEVLLKPAKRIKVGQKLSFGEGKIEALCIKELDQGGRIMRLSYDGILQERLDELGEMPLPPYIKERLEDQDRYQTVYAKATGSAAAPTAGLHFTDELLDELKAKGVQLAFITLHVGLGTFRPVSVENIDDHEMHSEYYQMTQETADLLNQTKENGKRIISVGTTSTRTLETIRRDYDEFKAVSGWTDIFIYPGFEFKAIDGLITNFHLPKSTLVMLVSAFSSRQYILNAYRTAVEMKYRFFSFGDAMLII

SEQ ID NO: 72475 - protein, 341 aa, Staphylococcus piscifermentans; identical to SEQ ID NO: 72444
  REGION 1..341: note = tr|A0A3S0K251|A0A3S0K251_9STAP S-adenosylmethionine:tRNA ribosyltransferase-isomerase; OS = Staphylococcus piscifermentans OX=70258 GN=queA PE=3; SV = 1

SEQ ID NO: 72476 - protein, 341 aa, Staphylococcus pseudintermedius
  REGION 1..341: note = tr|A0A317ZB77|A0A317ZB77_STAPS S-adenosylmethionine:tRNA ribosyltransferase-isomerase; OS = Staphylococcus pseudintermedius OX=283734 GN=queA PE=3; SV = 1
MNIEEFDYVLPESLIAQTPLKQRDQSRLLYLNRDTGETEDLHFKDITRFFQPGDTLVLNDTRVMPARLFGIKEETNAKVEMLMLTQIEGDDWEVLLKPAKRIKLGQTLSFGEGKIKATCIKELDQGGRIMRLSYEGILQERLDELSEMPLPPYIKERLDEKERYQTVYAKAAGSAAAPTAGLHFTDALLDDIRRQGVQIAFITLHVGLGTFRPVSVDHIDDHEMHSEYYQMSQETADILNQTKAAGHRIISVGTTSTRTLETIRSQFDTFQATSGWTNIFIYPGFEFKAIDGLITNFHLPKSTLVMLVSAFSSRQFVLSAYHHAVAEKYRFFSFGDAMIII

SEQ ID NO: 72477 - protein, 341 aa, Staphylococcus pseudintermedius
  REGION 1..341: note = tr|A0A166PV05|A0A166PV05_STAPS S-adenosylmethionine:tRNA ribosyltransferase-isomerase; OS = Staphylococcus pseudintermedius OX=283734 GN=queA PE=3; SV = 1
MNIEEFDYVLPESLIAQTPLKQRDQSRLLYLNRDTGETEDLHFKDITRFFQPGDTLVLNDTRVMPARLFGIKEETNAKVEMLMLTQIEGDDWEVLLKPAKRIKLGQTLSFGEGKIKATCIKELDQGGRIMRLSYEGILQERLDELGEMPLPPYIKERLDEKERYQTVYAKAAGSAAAPTAGLHFTDALLDDIRRQGVQIAFITLHVGLGTFRPVSVDHIDDHEMHSEYYQMSQETADILNQTKAAGHRIISVGTTSTRTLETIRSQFDTFQATSGWTNIFIYPGFEFKAIDGLITNFHLPKSTLVMLVSAFSSRQFVLSAYHHAVAEKYRFFSFGDAMIII

SEQ ID NO: 72478 - protein, 341 aa, Staphylococcus rostri
  REGION 1..341: note = tr|A0A2K3YHT7|A0A2K3YHT7_9STAP S-adenosylmethionine:tRNA ribosyltransferase-isomerase; OS = Staphylococcus rostri OX=522262 GN=queA PE=3 SV=1
MNIEEFDYDLPESLIAQTPLKNRDTSRLLHLDRETGAVEDLHFKDIVRFFKPGDTLVLNDTKVMPARLIGLKTETNAQVEMLMLNQVEGDDWEVLLKPAKRIKEGQSLSFGDGKIIATCIETRDQGGRIMRLQYDGILQERLDELGEMPLPPYIKERLADKDRYQTVYAKETGSAAAPTAGLHFTDELLAEVQNMGVRLAFVTLHVGLGTFRPVSVDNIDDHEMHSEFYMMSQETADLLNQTQADGHRIISVGTTSTRTLETIRRDNDKFVATSGWTDIFIYPGFEFKAVDGLITNFHLPKSTLVMLVSAFSTRQYVLNAYAHAVEASYRFFSFGDAMIII

SEQ ID NO: 72479 - protein, 341 aa, Staphylococcus saccharolyticus
  REGION 1..341: note = tr|A0A380H2N3|A0A380H2N3_9STAP S-adenosylmethionine:tRNA ribosyltransferase-isomerase; OS = Staphylococcus saccharolyticus OX=33028 GN=queA PE=3; SV = 1
MNIEEFDYHLPESLIAQTPLKNRDQSRLLVLNKQNGTMEHLYFKDVIQYLNPGDTLVLNDTRVMPALLFGLKEETGAKVEMLMLAQIEGNDWEVLLKPAKRVKVGHRLNFGDGNITAECIKELEHGGRVMRLHYDGILQERLDELGEMPLPPYIKERLDDPDRYQTVYAKESGSAAAPTAGLHFTDDLLKQIKDKGVNIAFITLHVGLGTFRPVSVDNIDDHEMHSEYYQMTKKTADLLNQTRANGKRIISVGTTSTRTLETIRRDHSRFLEKSGWTDIFIYPGFKFKAIDGLITNFHLPKSTLVMLVSAFSTRDYILNAYQTAVQMEYRFFSFGDAMLII

SEQ ID NO: 72480 - protein, 341 aa, Staphylococcus saccharolyticus
  REGION 1..341: note = tr|A0A431YL82|A0A431YL82_9STAP S-adenosylmethionine:tRNA ribosyltransferase-isomerase; OS = Staphylococcus saccharolyticus OX=33028 GN=queA PE=3; SV = 1
MNIEDFDYDLPESLIAQTPLKNRDQSRLLVLDRNTGDMEHLHFRDVINYFEPGDTLVLNDTRVMPARLFGLKEETGAKVEMLMLTQIEDNDWEVLLKPAKRIKVGNKLNFGEGKIIAECIEELEQGGRIMRLHYDGILQERLDELGEMPLPPYIKERLDDPNRYQTVYAKESGSAAAPTAGLHFTDSLLEAIKEKGVNIAFITLHVGLGTFRPVSVDNIDDHEMHSEYYQMTQQTADLLNETKAKGHRIISVGTTSTRTLETIRRDHSEFVEKSGWTDIFIYPGFEYKAIDGLITNFHLPKSTLVMLVSAFSSRQYILNAYKKAVEMEYRFFSFGDAMLII

SEQ ID NO: 72481 - protein, 341 aa, Staphylococcus saprophyticus
  REGION 1..341: note = sp|Q49Y78|QUEA_STAS1 S-adenosylmethionine:tRNA ribosyltransferase-isomerase OS=Staphylococcus saprophyticus subsp. saprophyticus (strain ATCC 15305 / DSM 20229 / NCI MB 8711 / NCTC 7292 / S-41) OX=342451; GN = queA PE
MDIEAFDYHLPEALIAQTPLKNRDESRLLILGRQSGYIEHKHFKDVTDYLNEGDTLVLNDTRVMPARLFGMKEETGAKVEMLMLTQIEGNDWEVLLKPAKRIKVGNKLTFGEGKIIAECIEELDQGGRIMRLHYDGILQERLDELGEMPLPPYIKERLDDQERYQTVYAKASGSAAAPTAGLHFTDELLERIKAQGVNIAFITLHVGLGTFRPVSVDNIDDHEMHSEYYQMDEATANLLNSTRDNGNRIISVGTTSTRTLETIMQSSDRFVAKSGWTDIFIFPGFNFKAIDGLITNFHLPKSTLVMLVSAFSSRDYIINAYNQAVASEYRFFSFGDAMLII

SEQ ID NO: 72482 - protein, 341 aa, Staphylococcus saprophyticus
  REGION 1..341: note = tr|A0A1D4Q4M7|A0A1D4Q4M7_STASA S-adenosylmethionine:tRNA ribosyltransferase-isomerase; OS = Staphylococcus saprophyticus OX=29385 GN=queA PE=3 SV=1
MDIEAFDYHLPESLIAQTPLKNRDESKLLILGRQSGEIEHKHFKNIIDYFEAGDTLVLNDTRVMPARLFGLKTETGAKVEMLMLTHIEENDWEVLLKPAKRIKVGNKLTFGEGKIVAECVKELDQGGRIMRLHYDGILQERLDELGEMPLPPYIKERLDDPDRYQTVYAKATGSAAAPTAGLHFTDALLDEIKAKGVNIAFITLHVGLGTFRPVSVDNIDDHEMHSEYYQMNEATAELLNQTKANGHRIISVGTTSTRTLETIMQTNEQFVAQSGWTDIFIFPGFTFKAIDGLITNFHLPKSTLVMLVSAFSSRDFILNAYNQAVSSKYRFFSFGDAMLII

SEQ ID NO: 72483 - protein, 341 aa, Staphylococcus schleiferi
  REGION 1..341: note = tr|A0A3S0LTR9|A0A3S0LTR9_9STAP S-adenosylmethionine:tRNA ribosyltransferase-isomerase; OS = Staphylococcus schleiferi subsp. schleiferi OX=74707; GN = queA PE=3 SV=1
MNIEDFDFDLPESLIAQTPLLDRESSRLLKCNKATGELEDLTFKEVVNQLSPGDCLVLNDTKVMPARLFGIKEETGAKVEMLMLTQQEDNEWEVLIKPAKRIRVGQSVSFGEGKIIATCVKELEQGGRIMKLSYEGILQERLDELGEMPLPPYIKERLDDQDRYQTVYAKAVGSAAAPTAGLHFTEHLLQEIADKGVHIAFITLHVGLGTFRPVSVDNIDDHEMHSEYYQMTAETADLLNRVKASGHKIISVGTTSTRTLETIRSKNDQFVEESGWTDIFIYPGYEFKAIDGLITNFHLPKSTLIMLVSALSTREHILNAYKHAVEEKYRFFSFGDAMILI

SEQ ID NO: 72484 - protein, 341 aa, Staphylococcus schleiferi
  REGION 1..341: note = tr|A0A0K0ZU71|A0A0K0ZU71_9STAP S-adenosylmethionine:tRNA ribosyltransferase-isomerase; OS = Staphylococcus schleiferi OX=1295 GN=queA PE=3 SV=1
MNIEEFDYELPESLIAQTPLKQRDQSRLLYLNRRTGETEDLHFKDITRFFEQGDTLVLNDTKVMPARLFGVKEETRAKVEMLMLTQIEGDDWEVLLKPAKRIKVGQTLSFGDGKIIATCMKELDQGGRIMRLHYDGILQERLDELGEMPLPPYIKERLDEKDRYQTVYAKASGSAAAPTAGLHFTDQLLQQIRENGVNIAFITLHVGLGTFRPVSVENIDDHEMHSEYYQMSQETADLLNKTKAKGHRIISVGTTSTRTLETIRQNHTQFVASSGWTDIFIYPGFEFKAIDGLITNFHLPKSTLVMLVSAFSSRQFVLSAYRHAVAEKYRFFSFGDAMIII

SEQ ID NO: 72485 - protein, 341 aa, unidentified
  source 1..341: note = Staphylococcus schweitzeri
  REGION 1..341: note = tr|A0A2K4AGQ0|A0A2K4AGQ0_9STAP S-adenosylmethionine:tRNA ribosyltransferase-isomerase; OS = Staphylococcus schweitzeri OX=1654388 GN=queA PE=3 SV=1
MNIEEFDYDLPESLIAQTPLKDRDQSRLLVMDKETGEMKHLHFKDIIEYFSSGDTLVLNDTRVMPARLFGLKEETGAKVEMLMLTQIEGNDWEVLLKPAKRIKVGNKLSFGNGKIVAECVKEMDQGGRIMRLHYEGILQERLDELGEMPLPPYIKERLDDPDRYQTVYAKESGSAAAPTAGLHFTDELLAEIKNKGVNIAFVTLHVGLGTFRPVSVNDVNDHEMHSEYYQMTQETADLLNDTKSKGHRIISVGTTSTRTLETIRRDHNQFVATSGWTNIFIYPGFEFKAIDGQITNFHLPKSTLVMLVSAFSTRENVLNAYRTAVNLEYRFFSFGDAMLII

SEQ ID NO: 72486 - protein, 341 aa, Staphylococcus sciuri
  REGION 1..341: note = tr|A0A431YBI2|A0A431YBI2_STASR S-adenosylmethionine:tRNA ribosyltransferase-isomerase; OS = Staphylococcus sciuri subsp. rodentium OX=147469; GN = queA PE=3 SV=1
MNIEDFNYHLPENLIAQTPLKERDTSKLLYMNRKTGETKDLHFKDVIQFLEPGDTLVLNDTKVMPARLFGLKKETNAKVEMLMLTNIEGDDWEVLIKPAKRIKVGQQVSFGDDKIVATCVKELDQGGRIMRLQYDGILQERLDELGEMPLPPYIKERLDDRDRYQTVYAKETGSAAAPTAGLHFTDELLNVVREKGVNIAFVTLHVGLGTFRPVSVDNVNDHEMHSEYYTVTKETAKLLNDTKSKGKRIISVGTTSTRTLETVVRDYGTFTQASGWTNIFIYPGFEFKAIDGLITNFHLPKSTLVMLVSAFSSTQFVINAYTHAVNEQYRFFSFGDAMIIL

SEQ ID NO: 72487 - protein, 341 aa, Staphylococcus sciuri
  REGION 1..341: note = tr|A0A2T4RX36|A0A2T4RX36_STASC S-adenosylmethionine:tRNA ribosyltransferase-isomerase; OS = Staphylococcus sciuri OX=1296 GN=queA PE=3 SV=1
MNIEDFDFDLPESLIAQTPLLDRESSRLLKCNKATGELEDLTFKEVVNQLSPGDCLVLNDTKVMPARLFGLKEETGAKVEMLMLTQQEDNEWEVLIKPAKRIRVGQSVSFGEGKIIATCIKELDQGGRIMKLSYEGILQERLDELGEMPLPPYIKERLDDQDRYQTVYAKAVGSAAAPTAGLHFTEHLLQEIADKGVHIAFITLHVGLGTFRPVSVDNIDDHEMHSEYYQMTAETAELLNCVKASGHKIISVGTTSTRTLETIRSKNDQFVEESGWTDIFIYPGYEFKAIDGLITNFHLPKSTLIMLVSALSTREHILNAYKHAVEEKYRFFSFGDAMILI

SEQ ID NO: 72488 - protein, 341 aa, Staphylococcus simiae
  REGION 1..341: note = tr|G5JHN8|G5JHN8_9STAP S-adenosylmethionine:tRNA ribosyltransferase-isomerase OS=Staphylococcus simiae CCM 7213 = CCUG 51256 OX=911238 GN=queA PE=3 SV=1
MNIEEFDYDLPESLIAQTPLKDRDHSRLLVMDRHSGELTHSHFKDVIDYFNPGDTLVLNDTRVMPARLFGLKEETGAKVEMLMLTQIEGNDWEVLLKPAKRIKVGNKLTFGEGKIIAECIKELDQGGRIMRLYYDGILQERLDELGEMPLPPYIKERLDDPDRYQTVYAKESGSAAAPTAGLHFTDELLTQIREKGVNIAFITLHVGLGTFRPVSVNNIDDHEMHSEYYQMSQATADLLNETKANHHRIISVGTTSTRTLETIRRDHDQFVATSGWTDIFIYPGFQFKAIDGQITNFHLPKSTLVMLVSAFSSRQHVLNAYRSAVEQQYRFFSFGDAMLII

SEQ ID NO: 72489 - protein, 341 aa, Staphylococcus simulans; identical to SEQ ID NO: 72455
  REGION 1..341: note = tr|A0A2X3SDL6|A0A2X3SDL6_STASI S-adenosylmethionine:tRNA ribosyltransferase-isomerase; OS = Staphylococcus simulans OX=1286 GN=queA PE=3 SV=1

SEQ ID NO: 72490 - protein, 347 aa, Staphylococcus simulans
  REGION 1..347: note = tr|A0A133QDU4|A0A133QDU4_STASI S-adenosylmethionine:tRNA ribosyltransferase-isomerase; OS = Staphylococcus simulans OX=1286 GN=queA PE=3 SV=1
MERGTILNIEEFDYHLPEELIAQTPLKDRDTSRLLVLNRKNGDIEHRHFKDIIEYFNPGDTLVLNDTKVMPARLFGLKEDTKAKVEMLMLTQIEGNDWEVLLKPAKRIKVGQKLSFGEGKIIAECIKELEQGGRIMRLYYEGILQERLDELGEMPLPPYIKERLDDPDRYQTVYAKETGSAAAPTAGLHFTDELLEQLKVKQVNLAFVTLHVGLGTFRPVSVDNIDDHKMHSEYYQMSQATADLLNETKQKGHRIISVGTTSTRTLETIRRDHDQFTAQSGWTDIFIYPGFEFKAIDALITNFHLPKSTLVMLVSAFSSKQYILNAYQTAVEMKYRFFSFGDAMLII

SEQ ID NO: 72491 - protein, 341 aa, Staphylococcus sp.
  REGION 1..341: note = tr|R6UMR3|R6UMR3_9STAP S-adenosylmethionine:tRNA ribosyltransferase-isomerase OS=Staphylococcus sp. CAG:324; OX = 1262969 GN=queA PE=3 SV=1
MRVTDFDYDLPEQLIAQTPLDERSSSRLLVLDKKTGEIEHKHFYDIVDYLDNNDVLVLNDTKVLPSRIYGKKIDTNASIELLLLKEIQNNIWEALARPAKRVKVGTKIIFGDGLLMATCLEEKPDGERVFQMEYQGIFLEILEQIGSMPLPPYIHKKLINQDRYQTVYARDYGSAAAPTAGLHFTKELLQKLKKKGVEIVYVTLNVGLGTFRPVTVDKVEEHHMHSETYQMSKETADTLNLAKKLGKRIISVGTTSTRTLESIMKKYGKFVECYESTNIFIYPPYEFMAVDALITNFHLPKSTLIMLVSAFSSKEVILNAYKIAVEKKYRFFSFGDAMFIK

SEQ ID NO: 72492 - protein, 341 aa, Staphylococcus sp.
  REGION 1..341: note = tr|A0A1J4E5H6|A0A1J4E5H6_9STAP S-adenosylmethionine:tRNA ribosyltransferase-isomerase; OS = Staphylococcus sp. HMSC067F07 OX=1715185 GN=queA PE=3; SV = 1
MNIEEFDYHLPESLIAQTPLKNRDQSRLLVLQRETGKMTHLHFKDVIDYLNPGDTLVLNDTRVMPARLFGLKEETGAKVEMLMLTQIEGNDWEVLLKPAKRIKVGNRLSFGDGKIVAECIKELEQGGRIMRLHYDGILQERLDELGEMPLPPYIKERLDDPDRYQTVYAKESGSAAAPTAGLHFTDDLLNQIKQKGVNIAFITLHVGLGTFRPVSVDNIDDHEMHSEYYQMTQETADLLNQTKAKGKRIISVGTTSTRTLETIRRDHEQFVEKSGWTDIFIYPGFEYKAIDGLITNFHLPKSTLVMLVSAFSTRENILNAYHKAVEMEYRFFSFGDAMLII

SEQ ID NO: 72493 - protein, 341 aa, unidentified
  source 1..341: note = Staphylococcus stepanovicii
  REGION 1..341: note = tr|A0A239Z1T6|A0A239Z1T6_9STAP S-adenosylmethionine:tRNA ribosyltransferase-isomerase; OS = Staphylococcus stepanovicii OX=643214 GN=queA PE=3 SV=1
MNIEDFDFDLPESLIAQTPLLNRESSRLLKCDKNSGSLEDLTFKDVINQFSSGDCLVLNDTKVMPARLFGLKEETGAKVEMLMLTQLEGDEWEVLIKPAKRIKVNQSVSFGEGKIIATCVKELNQGGRIMKLSYEGILQERLDELGEMPLPPYIKERLDDQNRYQTVYAKEIGSAAAPTAGLHFTESLLNEIASKGVHIAFITLHVGLGTFRPVSVDNIDEHEMHSEYYQMDEETADLLNTVKKNGNKIISVGTTSTRTLETICSKHGEFKADSGWTDIFIYPGYKFKAIDGLITNFHLPKSTLIMLVSALSTREHILNAYQHAVEEKYRFFSFGDAMIII

SEQ ID NO: 72494 - protein, 341 aa, Staphylococcus succinus
  REGION 1..341: note = tr|A0A2T4Q5X4|A0A2T4Q5X4_9STAP S-adenosylmethionine:tRNA ribosyltransferase-isomerase; OS = Staphylococcus succinus OX=61015 GN=queA PE=3 SV=1
MDIEAFDYHLPERLIAQTPLKNRDESRLLVLGRKSGNIEHKQFKNVIDHLESGDTLVLNDTRVMPARLFGLKEDTGAKVEMLMLTQIEGNDWEVLLKPAKRIRIGNKLSFGEGKIVAECIEELDQGGRIMRLHYEGILQERLDELGEMPLPPYIKERLDDPDRYQTVYAKATGSAAAPTAGLHFTDDLLNQIKAKGVHIAFITLHVGLGTFRPVSVDNIDDHEMHSEYYQMDEDTAKLLNETKANGKRIISVGTTSTRTLETIMQSNDQFMPKSGWTDIFIFPGFEYKAIDGLITNFHLPKSTLVMLVSAFSTRDFIINAYQQAVEAEYRFFSFGDAMLII

SEQ ID NO: 72495 - protein, 341 aa, Staphylococcus vitulinus
  REGION 1..341: note = tr|A0A2T4PV68|A0A2T4PV68_9STAP S-adenosylmethionine:tRNA ribosyltransferase-isomerase; OS = Staphylococcus vitulinus OX=71237 GN=queA PE=3 SV=1
MNIEDFDFDLPESLIAQTPLLDRESSRLLKCNKKTGELEDLTFKDVVNELMPGDCLVLNDTKVMPARLFGLKEETGAKVEMLMLTQHEDNEWEVLIKPAKRIKVGQSVSFGEGKIIATCVKELEQGGRIMKLSYEGILQERLDELGEMPLPPYIKERLDDQDRYQTVYAKEVGSAAAPTAGLHFTEHLLQEIAAKGIHIAFITLHVGLGTFRPVSVDNIDDHEMHSEYYQMTAETAELLNRVKANGHKIISVGTTSTRTLETIRSKNEKFVEQSGWTDIFIFPGYEFKAIDGLITNFHLPKSTLIMLVSALSTRENILNAYNHAVEEKYRFFSFGDAMILI

SEQ ID NO: 72496 - protein, 341 aa, Staphylococcus warneri
  REGION 1..341: note = tr|A0A2V3ZCI1|A0A2V3ZCI1_STAWA S-adenosylmethionine:tRNA ribosyltransferase-isomerase; OS = Staphylococcus warneri OX=1292 GN=queA PE=3 SV=1
MNIEDFDYDLPESLIAQTPLKNRDQSRLLVLNRKNGNMEHLHFKDVINYFNPGDTLVLNDTRVMPARLFGLKEETGAKVEMLMLTQIEGNDWEVLLKPAKRIKVGNQLNFGDGKIIAECIEELDQGGRIMRLHYEGILQERLDELGEMPLPPYIKERLDDPDRYQTVYAKESGSAAAPTAGLHFTDELLESIKAKSVNIAFITLHVGLGTFRPVSVDNIDDHEMHSEYYQMTQETADLLNETRKKGHRIISVGTTSTRTLETIRRDHSEFVEKSGWTDIFIYPGFEYKAIDGLITNFHLPKSTLVMLVSAFSSREYILNAYQKAVEMEYRFFSFGDAMLII

SEQ ID NO: 72497 - protein, 341 aa, Staphylococcus warneri
  REGION 1..341: note = tr|A0A5F0TZJ7|A0A5F0TZJ7_STAWA S-adenosylmethionine:tRNA ribosyltransferase-isomerase; OS = Staphylococcus warneri OX=1292 GN=queA PE=3 SV=1
MNIEDFDYDLPESLIAQTPLKNRDQSRLLVLNRKNGNMEHLHFKDVINYFNPGDTLVLNDTRVMPARLFGLKEETGAKVEMLMLTQIEGNDWEVLLKPAKRIKVGNQLNFGDGKIIAECIEELDQGGRIMRLHYEGILQERLDELGEMPLPPYIKERLDDPDRYQTVYAKESGSAAAPTAGLHFTDELLESIKAKGVNIAFITLHVGLGTFRPVSVDNIDDHEMHSEYYQMTQETADLLNKTRKNGHRIISVGTTSTRTLETIRRDHSEFVEKSGWTDIFIYPGFEYKAIDGLITNFHLPKSTLVMLVSAFSSREYILNAYQKAVEMEYRFFSFGDAMLII

SEQ ID NO: 72498 - protein, 341 aa, Staphylococcus xylosus
  REGION 1..341: note = tr|A0A418IKR8|A0A418IKR8_STAXY S-adenosylmethionine:tRNA ribosyltransferase-isomerase; OS = Staphylococcus xylosus OX=1288 GN=queA PE=3 SV=1
MDIEAFDYHLPESLIAQTPLKNRDESRLLILGRQSGNIEHQQFKNVIDYLESGDTLVLNDTRVMPARLFGLKEETGAKVEMLMLTQIEGDDWEVLLKPAKRIKVGNRLTFGEGKIVAECIKELDQGGRIMRLHYDGILQERLDELGEMPLPPYIKERLDDQERYQTVYAKASGSAAAPTAGLHFTDELLANIRDKGINIAFITLHVGLGTFRPVSVDNIDDHEMHSEYYQMDRETAELLNETKDNGHRIISVGTTSTRTLETIMQSNDKFVAQSGWTDIFIFPGFTFKAIDGLITNFHLPKSTLVMLVSAFSSRDNILNAYNQAVSSEYRFFSFGDAMLII

SEQ ID NO: 72499 - protein, 341 aa, Staphylococcus xylosus
  REGION 1..341: note = tr|A0A418IEC8|A0A418IEC8_STAXY S-adenosylmethionine:tRNA ribosyltransferase-isomerase; OS = Staphylococcus xylosus OX=1288 GN=queA PE=3 SV=1
MDIEAFDYHLPDSLIAQTPLKNRDESRLLILGRQSGNIEHQHFKDVIDYLESGDTLVLNDTRVMPARLFGLKEETGAKVEMLMLTQIEGNDWEVLLKPAKRIKVGNRLTFGEGKIVAECIKELDQGGRIMRLHYDGILQERLDELGEMPLPPYIKERLDDQDRYQTVYAKASGSAAAPTAGLHFTDELLARIRNKGINIAFITLHVGLGTFRPVSVDNIDDHEMHSEYYQMDQETATLLNETKEKGHRIISVGTTSTRTLETIMQSNEEFVAQSGWTDIFIFPGFTFKAIDGLITNFHLPKSTLVMLVSAFSSRDNILNAYNQAVLSEYRFFSFGDAMLII

SEQ ID NO: 72500 - protein, 361 aa, Stappia indica
  REGION 1..361: note = tr|A0A285SCN0|A0A285SCN0_9RHOB S-adenosylmethionine:tRNA ribosyltransferase-isomerase; OS = Stappia indica OX=538381 GN=queA PE=3 SV=1
MRVDDFDFELPPERIALRPARPRDAARLLVVRPNGEPVLDDRGVRDLPMLLEPGDALVFNDTRVIPAQLEGTRTRGEAVARIGATLHLRAGDDRWWAFVRPAKKLVVGDRVQFGGEGKACLLGTLDATVAEKRDTGEILFVFDLSGPMLDEAIAAVGHIPLPPYIAAKRGEDEQDRQDYQTIFAEKDGAVAAPTAGLHFTDELLAALDARGIERHRVTLHVGAGTFLPVKADDTDEHRMHAEWGEVSAETVAALRAVRARGNKVVAIGTTSLRILESAAQGEEGLAPFAGETSIFITPGYRFRAIDALMTNFHLPRSTLFMLVSALSGLDTMRAAYAHAIATGYRFYSYGDGSLLFPKDPA

SEQ ID NO: 72501 - protein, 366 aa, Stappia sp.
  REGION 1..366: note = tr|A0A2E6Y7W8|A0A2E6Y7W8_9RHOB S-adenosylmethionine:tRNA ribosyltransferase-isomerase; OS = Stappia sp. OX=1870903 GN=queA PE=3 SV=1
MRVDDFDFDLPAENIALRPARPRDSARLLLVRPGAADEGAGADLSDRSVSDLPGLLEPGDALVFNNTRVIPAQLQGTRTRGDAVARIGATLHLRAGPDRWVAFVRPAKKLAVGDRVRFGGEGEMCLAGTLDATVAEKRETGEILFAFDLSGPALDEAIAAVGHIPLPPYIAAKRGEDALDREDYQTIYAEKDGAVAAPTAGLHFTERLLAALDARGIERHTVTLHVGAGTFLPVKADDTADHKMHAEWGEVSAETAAALRAVRARGNKVVAVGTTSLRILESAAQGEAGLAAFSGETSIFITPGYRFRAIDALMTNFHLPRSTLFMLVSAFSGLDTMRAAYAHAIASGYRFYSYGDSSLLFPTVTE

SEQ ID NO: 72502 - protein, 362 aa, Stappia sp.
  REGION 1..362: note = tr|A0A1H2FJW4|A0A1H2FJW4_9RHOB S-adenosylmethionine:tRNA ribosyltransferase-isomerase; OS = Stappia sp. ES.058 OX=1881061 GN=queA PE=3 SV=1
MRVDDFDFELPPERIALRPARPRDAARMLVVRPGTEPLLDDRGVRDLPALLSPGDALVFNDTKVIPAQLEGTRTRGQAVARIGATLHLKAGDDRWWAFVRPAKKLVPGDRICFGSGKGETCLFGTLDATVAEKRDTGEVLLAFDFAGPDLDQAIAAVGHIPLPPYIAQKRGEDAADRDDYQTIYAEKDGAVAAPTAGLHFTPELMAAIDARGIERHLVTLHVGAGTFLPVKADDTDDHRMHAERGEISGETAEALRNVRARGNRVVAVGTTSLRILESAAQGEGGLSAFSGETSIFITPGYRFHVVDALMTNFHLPRSTLFMLVSALSGLDEMRAAYAHAITQEYRFYSYGDASLLFPKDAP

SEQ ID NO: 72503 - protein, 183 aa, Starkeya novella
  REGION 1..183: note = tr|A0A2W5SB84|A0A2W5SB84_STANO S-adenosylmethionine:tRNA ribosyltransferase-isomerase (Fragment) OS=Starkeya novella OX=921 GN=DI549_18315 PE=3; SV = 1
YQTMFASHEGSVAAPTAGLHFTPELIARLEARGVETHRVTLHVGAGTFLPVKADDTSDHRMHAEWGEVSPETADALNAVKARGGRIVTVGTTATRLIESAASEEGLLAAWRGETDIFITPGSRFRFIDGMLTNFHLPRSTLVMLVAAFIGHDVQKRAYAHAIATGYRFYSYGDACLLLPQARS

SEQ ID NO: 72504 - protein, 361 aa, Starkeya novella
  REGION 1..361: note = tr|A0A2W5KM83|A0A2W5KM83_STANO S-adenosylmethionine:tRNA ribosyltransferase-isomerase; OS = Starkeya novella OX=921 GN=queA PE=3 SV=1
MDVSLFDFDLPEELIALRPAVPRDAARLLVVRPGGSPELEDRVVSDLPDLLRAGDAMVVNATRVIPARLRGRRLRGEASAKVEIMLHQRLDGARWKAFARPAKKLAAGDRVEIGGGGDACLLGRLDATVEARGGEGEVTLRFDLAGPDLDAAIAAAGELPLPPYIAGKRATDGRDAQDYQTMFAREPGAVAAPTAGLHFTPALSEALAARGVGRYETVLHVGAGTFLPVKAEDTDDHRMHSETGFLDAATAEALNAVRDCGGRIVAVGTTSARLLESAAGPDGRLAPFSGETDIFLTPGCRFRAVDALMTNFHLPRSTLMMLISAFAGLDVVKRAYAHAVKERYRFYSYGDACLFLPGEGR

SEQ ID NO: 72505 - protein, 364 aa, Starkeya sp.
  REGION 1..364: note = tr|A0A556PB01|A0A556PB01_9RHIZ S-adenosylmethionine:tRNA ribosyltransferase-isomerase; OS = Starkeya sp. 3C OX=2597768 GN=queA PE=3 SV=1
MRVDLFDFELPPERIALRPVSPRDAARMLVVRPGDAPELTDAHVFDLPALLRPGDALVVNDTRVVPARLDGIRRRAASQGEGVRVEAMLHKRVAPDAWLALARPGKRLAPGDRIAFGGEGNTCLLGSLDATVEEKGEGGEVTLRFDLSGAALDEAVAAVGHIPLPPYIAAKRPDDEQDRSDYQTMFAAYEGSVAAPTAGLHFTPDLIHRLEERGVETHRVTLHVGAGTFLPVKADDTTDHRMHAEWGEVSAATAEALNTVKARGGRVVTVGTTATRLIESAASDDGRLAAWRGETDIFITPGYRFRFIDGMLTNFHLPRSTLVMLVAAFIGHESQKRAYAHAIANGYRFYSYGDACLLLPKARA

SEQ ID NO: 72506 - protein, 351 aa, Stella humosa
  REGION 1..351: note = tr|A0A3N1MCF2|A0A3N1MCF2_9PROT S-adenosylmethionine:tRNA ribosyltransferase-isomerase; OS = Stella humosa OX=94 GN=queA PE=3 SV=1
MPSDIAIADLLTADFDFDLPADRIAQAPARPRDAARLLAIGSTLADHGVRDLPRLLRPCDLLVSNDTRVIPARLTGQRGAAAVEVTLHLQQAPDRWRVFARPAKRLRPGDEVVFAADLSAEVIDKGDGGEVGLHFNVGGADLLAALERHGRMPLPPYIRGGAEGEGDRADYQTLFARREGAVAAPTAGLHFTPDLLEALDAAGIARTVVTLHVGAGTFLPVKADRARDHRMHAEWGEVGQETVDAIAACRARGGRVVAVGTTSLRLLETAAAGGGLVRPFSGTTDIFILPGHRFQVVDLLMTNFHLPRSTLFMLVSALAGLERMKTAYTHAIGSGYRFYSYGDACLIERAA

SEQ ID NO: 72507 - protein, 344 aa, Stenotrophomonas acidaminiphila
  REGION 1..344: note = tr|A0A2L0SL23|A0A2L0SL23_9GAMM S-adenosylmethionine:tRNA ribosyltransferase-isomerase; OS = Stenotrophomonas acidaminiphila OX=128780 GN=queA PE=3; SV = 1
MKKSDFHYDLPEELIAQAPLAERSASRLLVVPPAPAAYDDRHVRDLPELLQPGDLLVFNDTRVIPARLFGHKASGGRVEILIERLLGGQQARAQVGASKSPKPGSRIQLDAGGEAEVLGRDGEFYLLRFDLPEPLEAWLAHAGRLPLPPYIQREPGADDRERYQTVFAREVGAVAAPTAGLHFDDALLQRLRARGVAFGHITLHVGAGTFQPVRVDDLSQHVMHREWLNVGAGLVQQVRRTRAAGGRVIGVGTTVVRALESAMREGELQPFAGETQIFITPGYRIRSVDAMVTNFHLPESTLLMMISAFAGRQRVFDAYAHAIASRYRFFSYGDAMLLFPQPDA

SEQ ID NO: 72508 - protein, 344 aa, Stenotrophomonas acidaminiphila
  REGION 1..344: note = tr|A0A0R0E4H2|A0A0R0E4H2_9GAMM S-adenosylmethionine:tRNA ribosyltransferase-isomerase; OS = Stenotrophomonas acidaminiphila OX=128780 GN=queA PE=3; SV = 1
MKKSDFHYDLPEELIAQAPLAERSASRLLVVPPAPAALEDRHVRDLPELLQPGDLLVFNDTRVIPARLFGHKASGGRVEILIERLLGGQQARAQVGASKSPKPGSRIQLDAGGEAEVLGRDGEFYLLRFDVPESLESWLVHAGRLPLPPYIHREPGADDRERYQTVFARQVGAVAAPTAGLHFDEALLERLRARGVGFGHITLHVGAGTFQPVRVDDLSRHVMHREWLNVGAELVQQVRRTRAAGGRVIGVGTTVVRALESAMREGELHPFAGETQIFITPGYRIRSVDAMVTNFHLPESTLLMMISAFAGKQRVFDAYAHAIAGRYRFFSYGDAMLLFPQPDA

SEQ ID NO: 72509 - protein, 354 aa, Stenotrophomonas chelatiphaga
  REGION 1..354: note = tr|A0A0R0CUR5|A0A0R0CUR5_9GAMM S-adenosylmethionine:tRNA ribosyltransferase-isomerase; OS = Stenotrophomonas chelatiphaga OX=517011 GN=queA PE=3; SV = 1
MRAIADLLLRVPLKKSDFHYDLPAELIAQAPLPERSASRLLLVPPAPGALQDAHVRDLSALLREGDLLVFNDTRVIPARLFGQKATGGRVEILIERLLGAQQARAQVGASKTPKPGGRIALDAGGEVEVLGRDGEFYVLQFHVPEPLEQWLLHAGRLPLPPYIQREPGLDDRERYQTVFAREIGAVAAPTAGLHFDDALLAALQAKGVGFGHVTLHVGAGTFQPVRADDLKDHVMHREWLNVGAELVQQVRRTREAGGRVIGVGTTVVRALESAMRDGELLPFAGETQIFITPGYRIRSVDAMVTNFHLPESTLLMMISAFAGKERVFEAYRHAIEQRYRFFSYGDAMLLFPQG

SEQ ID NO: 72510 - protein, 354 aa, Stenotrophomonas daejeonensis
  REGION 1..354: note = tr|A0A0R0E283|A0A0R0E283_9GAMM S-adenosylmethionine:tRNA ribosyltransferase-isomerase; OS = Stenotrophomonas daejeonensis OX=659018 GN=queA PE=3; SV = 1
MKKSDFNYDLPAELIAQAPLPERSASRLLLVPPAPAAFADRHVRDLPDLLQPGDLLVFNDTRVIPARLFGQKASGGRVEILIERLLGGQQARAQVGASKSPKPGSRIALDAGGEVEVLGRDGEFYLLRFDIPEPLESWLVHAGRLPLPPYIQREPGADDRERYQTVFARQVGAVAAPTAGLHFDEPLLERLRGRGVQFGHITLHVGAGTFQPVRVDDLSQHVMHREWLNVGAELVQQVRRTRAAGGRVIGVGTTVVRALESAMRDGELHPYAGETQIFITPGYRIRSVDAMVTNFHLPESTLLMMISAFAGRERVFEAYAHAIAERYRFFSYGDAMLLWSREGTGAPTDAPIHS

SEQ ID NO: 72511 - protein, 351 aa, Stenotrophomonas ginsengisoli
  REGION 1..351: note = tr|A0A0R0DKD2|A0A0R0DKD2_9GAMM S-adenosylmethionine:tRNA ribosyltransferase-isomerase; OS = Stenotrophomonas ginsengisoli OX=336566 GN=queA PE=3; SV = 1
MPALKKSDFDYHLPSELIAQAPLAERSASRLLLVPPAPQAFDDRHVRDLDQLLQPGDLLVFNNTRVIPARLFGAKATGGRVEILIERLLGEHDVRAQVGVSKSPKPGSFIDLDAGGQAEVLGRDGEFYLLRLHVPGDLQDWLEQAGRLPLPPYITRDVENADKQRYQTVFAKEAGAVAAPTAGLHFDQALLERLRVRGVQVGHITLHVGAGTFQPVRVDDLAQHQMHSERAWVSQELVDRIKATRAAGGRVIGVGTTVVRALESATSDGVLSAWQGETRIFITPGYRITSVDAMVTNFHLPESTLLMMISAFAGRSRVFAAYAHAIEQRYRFFSYGDAMLLFPGPQDAQDA

SEQ ID NO: 72512 - protein, 347 aa, Stenotrophomonas humi
  REGION 1..347: note = tr|A0A0R0CAB3|A0A0R0CAB3_9GAMM S-adenosylmethionine:tRNA ribosyltransferase-isomerase; OS = Stenotrophomonas humi OX=405444 GN=queA PE=3 SV=1
MKKSDFNYELPEALIAQAPLAERSASRLLLVPPAPEAFDDRHVRDLPQLLQPGDLLIFNDTRVIPARLFGQKATGGRVEILIERLLGGQQARAQIGASKSPKPGSRIQLDAGGEAEVLGRDGEFYVLRFDIPEPLESWLVHEGRLPLPPYIHREPGADDRERYQTVFARQVGAVAAPTAGLHFDEALLAQLRERDVQFGHITLHVGAGTFQPVRVDDLTHHVMHREWLNVGAELVDKVRRTRAAGGRVIGVGTTVVRALESAMRDGELHPYAGETQIFITPGYRIRSVDAMVTNFHLPESTLLMMISAFAGKQRVFEAYAHAIEQRYRFFSYGDAMLLFPAQEGAAV

SEQ ID NO: 72513 - protein, 353 aa, Stenotrophomonas koreensis
  REGION 1..353: note = tr|A0A0R0BXZ9|A0A0R0BXZ9_9GAMM S-adenosylmethionine:tRNA ribosyltransferase-isomerase; OS = Stenotrophomonas koreensis OX=266128 GN=queA PE=3 SV=1
MELPALKKSDFAYHLPPELIAQAPLPERSASRLLLVPPAPAALEDRQVRDLDQLLQPGDLLVFNDTRVIPARLFGAKATGGRVEILIERLLGAQDVRAQLGVSKSPKAGSVIDLDAGGQAEVLGRDGEFYLLRLHVPGALEDWLEQAGRLPLPPYITRDVDNADKQRYQTVFAREAGAVAAPTAGLHFDQTLLDRLSARGVQFGHVTLHVGAGTFQPVRVEDLSEHRMHSERVRVSAELVEKVRATRAAGGRVIGVGTTVVRALESATSDGVLAAYEGETRIFITPGYTITSVDALLTNFHLPESTLLMMISAFVGRRRVFAAYAHAIAQRYRFFSYGDAMLLFPGPQDEQDT

SEQ ID NO: 72514 - protein, 343 aa, unidentified
  source 1..343: note = Stenotrophomonas lactitubi
  REGION 1..343: note = tr|A0A2M9R1T8|A0A2M9R1T8_9GAMM S-adenosylmethionine:tRNA ribosyltransferase-isomerase; OS = Stenotrophomonas lactitubi OX=2045214 GN=queA PE=3 SV=1
MKKSDFHYDLPAELIAQAPLAERSASRLLLVPPAPAAFTDLQVRDLPSLLQPGDLLVFNDTRVIPARLFGQKASGGRVEILIERLLGGQQARAQVGASKSPKPGSRIALDPGGEAEVLGRDGEFYVLQFHVPESLEQWLLHAGRLPLPPYIQREPGVDDRERYQTVFAREVGAVAAPTAGLHFDEALLAALKDKGVDFGHVTLHVGAGTFQPVRADDLKDHVMHREWLNVGAELVQQVRRTRAAGGRVIGVGTTVVRALESAMRDGELLPFAGETQIFITPGYRIRSVDAMVTNFHLPESTLLMMISAFAGKERVFEAYQHAIEQRYRFFSYGDAMLLFPQAG

SEQ ID NO: 72515 - protein, 355 aa, Stenotrophomonas maltophilia
  REGION 1..355: note = tr|A0A2R3PZT0|A0A2R3PZT0_STEMA S-adenosylmethionine:tRNA ribosyltransferase-isomerase; OS = Stenotrophomonas maltophilia OX=40324 GN=queA PE=3 SV=1
MRAIVDLLPPTALKKSDFNYDLPAELIAQAPLAERSASRLLLVPPAPDAFTDLQVRDLPSLLQPGDLMVFNDTRVIPARLFGQKASGGRVEILIERLLGGQQARAQVGASKSPKAGSRIALDAGGEAEVLGRDGEFYVLQFHVPESLEQWLLHAGRLPLPPYIQREPGVDDRERYQTVFAREVGAVAAPTAGLHFDEPLLAALKDKGVEFGHVTLHVGAGTFQPVRADDLKDHVMHREWLNVGAELVQQVRRTRAAGGRVIGVGTTVVRALESAMRDGELLRFAGETQIFITPGYRIRSVDAMVTNFHLPESTLLMMISAFAGKDRVFEAYQHAIEQRYRFFSYGDAMLLFPQAG

SEQ ID NO: 72516 - protein, 355 aa, Stenotrophomonas maltophilia
  REGION 1..355: note = tr|T5KX94|T5KX94_STEMA S-adenosylmethionine:tRNA ribosyltransferase-isomerase OS=Stenotrophomonas maltophilia MF89 OX=1333853 GN=queA PE=3 SV=1
MRAIVDLLPPTALKKSDFHYDLPAELIAQAPLAERSASRLMLVPAAPAAFTDLQVRDLPSLLQPGDLLVFNDTRVIPARLFGQKASGGRVEILIERLLGGQQARAQVGASKSPKAGSRIALDAGGEAEVLGRDGEFYVLQFHVPESLEQWLLHAGRLPLPPYIQREPGVDDRERYQTVFAREVGAVAAPTAGLHFDEPLLAALKEKGVDFGHVTLHVGAGTFQPVRADDLKDHVMHREWLNVGAELVQQVRRTRAAGGRVIGVGTTVVRALESAMRDGELLPFAGETQIFITPGYRIRSVDAMVTNFHLPESTLLMMISAFAGKERVFEAYRHAIEQRYRFFSYGDAMLLFPQAG

SEQ ID NO: 72517 - protein, 346 aa, unidentified
  source 1..346: note = Stenotrophomonas panacihumi
  REGION 1..346: note = tr|A0A0R0AXE0|A0A0R0AXE0_9GAMM S-adenosylmethionine:tRNA ribosyltransferase-isomerase; OS = Stenotrophomonas panacihumi OX=676599 GN=queA PE=3 SV=1
MKKSDFHYELPEALIAQAPLAERSASRLMIVPPAPAALQDRHVRDLPELLQPGDLLVFNDTRVIPARLFGQKASGGRVEILIERLLGAQQARAQIGASKSPKAGGRIALDAGGEAEVLGRDGEFYLLRFEVPEPLEQWLLHAGRLPLPPYIRREPGLDDRERYQTVFARETGAVAAPTAGLHFDEPLLARLRERGVEFGHVTLHVGAGTFQPVRVESLSDHVMHREWLNVGAELVEQVRRTRAAGGRVIAVGTTVVRSLESAMRDGELQPFAGETQIFILPGYRIRSVDAMVTNFHLPESTLLMMVSAFAGRERIFEAYHHAIAGQYRFFSYGDAMLLWSADAPTA

SEQ ID NO: 72518 - protein, 355 aa, Stenotrophomonas pavanii
  REGION 1..355: note = tr|A0A246L1G7|A0A246L1G7_9GAMM S-adenosylmethionine:tRNA ribosyltransferase-isomerase; OS = Stenotrophomonas pavanii OX=487698 GN=queA PE=3 SV=1
MRAIVDLLPPTALKKSDFHYDLPAELIAQAPLAERSASRLLLVPPAPAAFTDLQVRDLPSLLQPGDLLVFNDTRVIPARLFGQKASGGRVEILIERLLGGQQARAQVGASKSPKAGSRIALDAGGEAEVLGRDGEFYVLQFHVPESLEQWLLHAGRLPLPPYIQREPGVDDRERYQTVFAREVGAVAAPTAGLHFDEPLLAALKDRGVEFGHVTLHVGAGTFQPVRADDLKDHVMHREWLNVGAELVQQVRRTRAAGGRVIGVGTTVVRALESAMRDGELLPFAGETQIFITPGYRIRSVDAMVTNFHLPESTLLMMISAFAGKERVFEAYRHAIEQRYRFFSYGDAMLLFPQAG

SEQ ID NO: 72519 - protein, 346 aa, unidentified
  source 1..346: note = Stenotrophomonas pictorum
  REGION 1..346: note = tr|A0A0R0AD02|A0A0R0AD02_9GAMM S-adenosylmethionine:tRNA ribosyltransferase-isomerase; OS = Stenotrophomonas pictorum JCM 9942 OX=1236960 GN=queA; PE = 3 SV=1
MKKSDFHYDLPEALIAQAPLAERSASRLLLVPPVPGAFDDRHVRDLPQLLQPGDLLVFNDTRVIPARLFGQKATGGRVEILIERLLGKQQARAQIGASKSPKPGSRIQLDAGGEAEVLGRDGEFYVLRFEIPEPLESWLVHAGRLPLPPYIQREPGVDDRERYQTVFARQVGAVAAPTAGLHFDEPLLAQLRERGVQFGHVTLHVGAGTFQPVRVDDLSHHVMHREWLNVGAELVEQVRRTRAAGGRVIGVGTTVVRALESAMRDGELYPFAGETQIFITPGYRIRSVDAMVTNFHLPESTLLMMISAFAGRERVFEAYAHAIAQQYRFFSYGDAMLLFPAAYDDA

SEQ ID NO: 72520 - protein, 355 aa, Stenotrophomonas rhizophila
  REGION 1..355: note = tr|A0A498CEL9|A0A498CEL9_9GAMM S-adenosylmethionine:tRNA ribosyltransferase-isomerase; OS = Stenotrophomonas rhizophila OX=216778 GN=queA PE=3 SV=1
MADIAYTLPCAPLKKSDFNYDLPPELIAQAPLAERSASRLMVVPPAPAAFDHRQVRDLPDLLQPGDLLVFNDTRVIPARLFGQKASGGRVEILIERLLGGQQARAQVGASKSPKPGSRIALDAGGEAEVLGRDGEFYVLQFHVPEALEQWLLHAGRLPLPPYIQREPGMDDRERYQTVFAREIGAVAAPTAGLHFDEALLATLKDKGVDFGHVTLHVGAGTFQPVRVDDLKEHVMHREWLNVGAELVQQVRRTRAAGGRVIGVGTTVVRALESAMRDGELLPYAGETQIFITPGYRIRSVDAMVTNFHLPESTLLMMISAFAGQARVIEAYQAAIAEKYRFFSYGDAMLLFPQGE

SEQ ID NO: 72521 - protein, 354 aa, Stenotrophomonas rhizophila
  REGION 1..354: note = tr|A0A4U3GN18|A0A4U3GN18_9GAMM S-adenosylmethionine:tRNA ribosyltransferase-isomerase; OS = Stenotrophomonas rhizophila OX=216778 GN=queA PE=3 SV=1
MADIAYTLPCAALKKSDFNYELPPELIAQAPLAERSASRLMLVPQAPAAFDHRHVRDLPDLLNPGDLLVFNDTRVIPARLFGQKASGGRVEILIERLLGAQQARAQVGASKSPKPGSRIALDAGGEAEVLGRDGEFYVLQFHVPEALEQWLLHAGRLPLPPYIQREPGLDDRERYQTVFAREVGAVAAPTAGLHFDEALLAALKDKGVDFGHVTLHVGAGTFQPVRVDDLTDHVMHREWLNVGAELVQQVRRTRAAGGRVIGVGTTVVRALESAMRDGELLPYAGETQIFITPGYRIRSVDAMVTNFHLPESTLLMMISAFAGQARVFEAYRAAIAEKYRFFSYGDAMLLFPQG

SEQ ID NO: 72522 - protein, 357 aa, Stenotrophomonas sp.
  REGION 1..357: note = tr|A0A4R4IDI2|A0A4R4IDI2_9GAMM S-adenosylmethionine:tRNA ribosyltransferase-isomerase; OS = Stenotrophomonas sp. ATCM1_4 OX=2259330 GN=queA PE=3; SV = 1
MKKSDFHYDLPEALIAQAPLAERSASRLMLVPPAPAAFDDRHVRDLPTLLQPGDLLVFNDTRVIPARLFGQKATGGRVEILIERLLGGQQARAQIGASKSPKPGSRIQLDAGGEAEVLGRDGEFYVLRFDIPEPLESWLVHEGRLPLPPYIHREPGLDDRERYQTVFARQVGAVAAPTAGLHFDEGLLAQLRERGVQFGHITLHVGAGTFQPVRVDDLSQHVMHREWLNVGAELVEQVRRTRAAGGRVIGVGTTVVRALESAMREGELQPYAGETQIFITPGYRIRSVDAMVTNFHLPESTLLMMISAFAGKARVFEAYAHAIAQEYRFFSYGDAMLLFPQGGEGTGDGGDAASRPG

SEQ ID NO: 72523 - protein, 355 aa, Stenotrophomonas sp.
  REGION 1..355: note = tr|A0A3R8T439|A0A3R8T439_9GAMM S-adenosylmethionine:tRNA ribosyltransferase-isomerase; OS = Stenotrophomonas sp. 278 OX=2479851 GN=queA PE=3 SV=1
MRGIPDLLLHAALKKSDFHYDLPPELIAQAPLAERSASRLMLVPPAPAAFEHRRIRDLPDLLQPGDLLVFNDTRVIPARLFGQKASGGRVEILIERLLGGQQARAQVGASKSPKAGSRIALDAGGEAEVLGRDGEFYVLQFHVPENLEQWLLHAGRLPLPPYIQREPGMDDRERYQTVFAREVGAVAAPTAGLHFDENLLAALKARGVSTGHVTLHVGAGTFQPVRVDDLKDHVMHREWLNVGAELVQQVRQTRAAGGRVIGVGTTVVRALESAMRDGELLPYAGETQIFITPGYRIGSVDAMITNFHLPESTLLMMISAFAGQERVFEAYRAAIAEKYRFFSYGDAMLLFPKGE

SEQ ID NO: 72524 - protein, 347 aa, Stenotrophomonas terrae
  REGION 1..347: note = tr|A0A0R0C449|A0A0R0C449_9GAMM S-adenosylmethionine:tRNA ribosyltransferase-isomerase; OS = Stenotrophomonas terrae OX=405446 GN=queA PE=3 SV=1
MKKSDFTYDLPEELIAQAPLAERSASRLLLVPPAPGAFDDRHVSDLPTLLQPGDLLVFNDTRVIPARLFGQKASGGRVEILIERLLGGQQARAQIGASKSPKPGSRIQLDAGGEAEVLGRDGEFYVLRFDIPESLESWLVHEGRLPLPPYIHREPGVDDRERYQTVFAKQVGAVAAPTAGLHFDEPLLARLREGGVQFGHITLHVGAGTFQPVRVDDLSQHVMHREWLNVGAELVEQVRRTRAAGGRVIGVGTTVVRALESAMREGELHPYAGETQIFITPGYRIRSVDAMVTNFHLPESTLLMMISAFAGKARVFEAYAHAIEQKYRFFSYGDAMLLFPAGEGAAV

SEQ ID NO: 72525 - protein, 368 aa, Steroidobacter denitrificans
  REGION 1..368: note = tr|A0A127FAY4|A0A127FAY4_STEDE S-adenosylmethionine:tRNA ribosyltransferase-isomerase; OS = Steroidobacter denitrificans OX=465721 GN=queA PE=3 SV=1
MRRGDFDYFLPDELIAQRPPVRRGTSRLLHLPPEGGVVDLSFQDFPALLRPDDVLILNDTRVVPARLRGTKPTGGQVEILLERVLDGSRILAQVHASNPLRIGVPLALPGGVQAHYLGRQGELFEMELTLAANESPLAYFERHGTLPLPPYIERTADAQDAARYQTVFARTPGAVAAPTAGLHFDTAMLERCRERGASIAYVTLHVGAGTFQPVRVEALAEHRMHAERVSVNAETCEAIARARSRGGRVLAVGTTVVRSLEAAASASSQTAPSAPGEPARLAPFHGDTRLFITPGFRFQVVDALLTNFHLPQSTLLMLVCAFGGHAAVMQAYRHAVQRRYRFFSYGDAMFLERMTNQTASGLSFADPT

SEQ ID NO: 72526 - protein, 361 aa, Stigmatella aurantiaca
  REGION 1..361: note = tr|A0A1H7VMV4|A0A1H7VMV4_STIAU S-adenosylmethionine:tRNA ribosyltransferase-isomerase; OS = Stigmatella aurantiaca OX=41 GN=queA PE=3 SV=1
MSSRLSDYDFELPEAQIAQTPLGARDASRLMTLSRSTQACEHRRFSDLPSLLRPGDVLVVNDARVIPARLLGAKAGTGGRVELLVVRPAAPTMTSAALSQAPEALEWICLGQASKGLKPGARVDFTGGLTAEVLEGLGGGEYRVRFQAPPGGSLQALLEQAGRLPLPPYITREPEAADAERYQTLYARAPGAVAAPTAGLHFSEAIFAALAERGIRRVTVTLDVGPGTFLPVREEELDRHKMHPERYGIPEETAAEVNAARAEGRRVVAVGTTVVRTLESATDPATGRLSAGTGETVLFIRPGFAFRQVDLLLTNFHLPRSTLVMLVSALLGRERTLAAYAEAVREGYRFFSYGDAMLVTE

SEQ ID NO: 72527 - protein, 361 aa, Stigmatella aurantiaca
  REGION 1..361: note = tr|E3FSL7|E3FSL7_STIAD S-adenosylmethionine:tRNA ribosyltransferase-isomerase OS=Stigmatella aurantiaca (strain DW4/3-1) OX=378806 GN=queA PE=3 SV=1
MSSRLSDYDFELPEAQIAQAPLGARDASRLMTVSRSTKACEHLRFADLPSLLRPGDVLVVNDARVIPARLLGAKVGTGGRVELLVVRPAASTMTSAALSLAAEAMDWICLGQASKGLKPGAQVAFGGGLVGEVLEGLGGGEYRVRFQAPPGGSLQALLEQAGRLPLPPYITREPDAADAERYQTLYARAPGAVAAPTAGLHFSEAIFEALDARGVRRVTVTLDVGPGTFLPVREEELDRHKMHPERYGVPEQTAAEVNAARAEGRRVVAVGTTVVRTLEAATDPATGLLRAGTGETVLFIRPGYAFRQVDLMLTNFHLPRSTLVMLVSALLGREHTLAAYQEAVREGYRFFSYGDAMLVTE

SEQ ID NO: 72528 - protein, 361 aa, Stigmatella erecta
  REGION 1..361: note = tr|A0A1I0K383|A0A1I0K383_9DELT S-adenosylmethionine:tRNA ribosyltransferase-isomerase; OS = Stigmatella erecta OX=83460 GN=queA PE=3 SV=1
MSSRLSDYDFALPEAQIAQTPLGARDASRLMTLSRSTQACEHRRFADLPSLLRPGDVLVVNDARVIPARLLGAKAGTGGRVELLVVRPAAPTMTSAALSQAPEALEWICLGQASKGLKPGARVDFNGGLTAEVLEGLGGGEYRVRFQAPPGGSLQALLEQAGRLPLPPYITREPEAADAERYQTLYARAPGAVAAPTAGLHFSEAIFAALAERGIRRVTVTLDVGPGTFLPVREEALDRHKMHPERYGIPEETAAEVNAARAEGRRVVAVGTTVVRTLESATDPATGRLRAGTGETVLFIRPGFAFRQVDLLLTNFHLPRSTLVMLVSALLGRERTLAAYAEAVREGYRFFSYGDAMLVTE

SEQ ID NO: 72529 - protein, 341 aa, unidentified
  source 1..341: note = Stomatobaculum longum
  REGION 1..341: note = tr|H1HUE3|H1HUE3_9FIRM S-adenosylmethionine:tRNA ribosyltransferase-isomerase OS=Stomatobaculum longum; OX = 796942 GN=queA PE=3 SV=1
MELKDFYYELPEELIAQDPLEDRASSRLMVLHRESGEIEHRHFRDIAEYLKSGDCLVLNDTKVIPARLIGEKVGTGAKIEVLLLTRKEDRTWETLVKPGRKCPIGTKISFGEGKLIGEIVGQTEDGNRFVRFSYEGVFEEILDELGQMPLPPYIHHQLKDKNRYQTVYAAHEGSAAAPTAGLHFTEALLKSLEEKGVIIVRITLHVGLGTFRPVKEQDILKHHMHEEFYVVSEEAAETVNRAKAAGGRIVCVGTTSCRTLESAANEDGTLRAESGYTKIFIYPGYRFRILDCLITNFHLPESTLVMLVSALAGREKILNAYREAVQERYRFFSFGDAMLIE

SEQ ID NO: 72530 - protein, 397 aa, Streptacidiphilus jiangxiensis
  REGION 1..397: note = tr|A0A1H7VVK2|A0A1H7VVK2_STRJI S-adenosylmethionine:tRNA ribosyltransferase-isomerase; OS = Streptacidiphilus jiangxiensis OX=235985; GN = SAMN05414137_11917 PE=3 SV=1
MTGRTEVAVGGTAADEDGGFVDDGFVDDGFVDGLGDWQLPPELEADAPPEERGGSGRDDVRLLVARQPTNSTPLVTHHAFRELPALLRPGDVLVVNTSPTLSAAVDGRITETGEPVVAHFSTRQRESEWVVELRSPDGRGSTRRRPHDGSLVTVRLTGGARLSLVAPVDGQDGGSRRLWRACFAAAEPLAYLARYGRPIRYAYTSADRPSDAYQTVFAEPLASATAGSAEMPSAARPFTTELVTRLVARGVLVVPITLHTGVASIESHEPPYAEWFTVPEVTARVVNGARAAGSRVVAVGTTAVRALESAADPDGTVRARSGWTELVITPERGVRVVDGLLTGFHEPRASHLMMLEAVAGRALLDRSYAEALREGYLWHEFGDLHLILAEERAASTG

SEQ ID NO: 72531 - protein, 360 aa, unidentified
  source 1..360: note = Streptacidiphilus pinicola
  REGION 1..360: note = tr|A0A2X0IE53|A0A2X0IE53_9ACTN S-adenosylmethionine:tRNA ribosyltransferase-isomerase; OS = Streptacidiphilus pinicola OX=2219663 GN=DN069_30475; PE = 3 SV=1
MGDWELPPELEADAPPEERGADGRDDVRLLTARRVPGAAPVVTHHAFRELPDLLQPGDVLVVNTSATLPAALDGRITETGEPVVVHFSTRRGESEWVVELRSPDGHGSTRQRHHDGSLVTVRVTGGARLTLLSRVGDRAGGSSRLWRACFGAAEPLAYLARYGRAIRYAYTSADRPLAAYQTVFAEPVATAGAGSAEMPSAARPFTAELVTRLVSRGVLVVPITLHTGVASVESHEPPYAEWFDVPEATARVVNNARAAGSHVIAVGTTAVRALESAVDTEGTDDTVRARSGWTELVITPERGVRAVDGLLTGFHEPRASHLMMLEAVGGRPLLDRSYAEALREGYLWHEFGDLHLILAR

SEQ ID NO: 72532 - protein, 342 aa, Streptobacillus moniliformis
  REGION 1..342: note = tr|D1AXR9|D1AXR9_STRM9 S-adenosylmethionine:tRNA ribosyltransferase-isomerase OS=Streptobacillus moniliformis (strain ATCC 14647 / DSM 12112 / NCTC 10651 / 9901) OX= 519441 GN=queA PE=3 SV=1
MRVEDYDFELPLEFIAQHAIEPRDHSKLLVLNKNNGAIEDKKFYNIIDYLTPNDILVINRTKVIPARLFGKKENGVILECFLLKRIDLKKWEVLLKPAKKLKINDKLIFSEKLSAKLLEIKEDGNRIMEFEFEGVFEEILDELAEMPLPPYITEKLENKNRYQTVYAKSGESVAAPTAGLHFTTELLEKIEKKGITIVEVYLTVGLGTFRPVQVENVEDHIMHSEEYIVPEKTAEIINQGKKDGKRIIAVGTTSIRTLESSLDDNNNLIAQKSETSIFIHGEYKFKIVDALITNFHLPKSTLIMLVSSFANKEYVMNAYQHAIKNNYRFFSFGDAMFIQGEL

SEQ ID NO: 72533 - protein, 342 aa, Streptococcus acidominimus
  REGION 1..342: note = tr|A0A4Y9FMV3|A0A4Y9FMV3_STRAI S-adenosylmethionine:tRNA ribosyltransferase-isomerase; OS = Streptococcus acidominimus OX=1326 GN=queA PE=3 SV=1
MNTADFDFHLPEHLIAQVPLEQRDASRLLILDRKTETLTDGHFDQIIDELEAGDALVMNNTRVLPARLYGEKPETGGHVELLLLKNTHGDQWEVLAKPAKRLKIGSKISFGDGRLSATIVQELEHGGRIVEFSYEGIFLEVLESLGEMPLPPYIHEKLENRERYQTVYAKENGSAAAPTAGLHFTQELLERIEAKGVKLVYLTLHVGLGTFRPVSTSNLDEHEMHSEFYSLSEEAAATLREVKASGHRIIAVGTTSIRTLETIGNKFKGDIQADSGWTNIFIKPGYQFKVIDAFSTNFHLPKSTLVMLVSAFAGREFVLKAYQHAIESDYRFFSFGDAMFIK

SEQ ID NO: 72534 - protein, 342 aa, Streptococcus acidominimus
  REGION 1..342: note = tr|A0A1Q8EEC2|A0A1Q8EEC2_STRAI S-adenosylmethionine:tRNA ribosyltransferase-isomerase; OS = Streptococcus acidominimus OX=1326 GN=queA PE=3 SV=1
MNTADFDFHLPEHLIAQVPLEQRDASRLLILDRKTETLTDGHFDQIIDELEAGDALVMNNTRVLPARLYGEKPETGGHVELLLLKNTQGDQWEVLAKPAKRLKIGSKISFGDGRLSATIVQELEHGGRIVEFSYEGIFLEVLESLGEMPLPPYIHEKLEDRERYQTVYAKENGSAAAPTAGLHFTQELLERIEAKGVKLVYLTLHVGLGTFRPVSTSNLDEHEMHSEFYSLSEEAAATLREVKAAGHRIIAVGTTSIRTLETIGNKFKGDIQADSGWTNIFIKPGYQFKVIDAFSTNFHLPKSTLVMLVSAFAGREFVLEAYQHAIESDYRFFSFGDAMFIK

SEQ ID NO: 72535 - protein, 342 aa, Streptococcus agalactiae
  REGION 1..342: note = sp|Q8E0D7|QUEA_STRA5 S-adenosylmethionine:tRNA ribosyltransferase-isomerase OS=Streptococcus agalactiae serotype V (strain ATCC BAA-611 / 2603 V/R) OX=208435; GN = queAPE=3 SV=1
MNTNDFDFYLPEELIAQTPLEKRDASKLLVIDHKNKTMTDSHFDHILDELKPGDALVMNNTRVLPARLYGEKQDTHGHVELLLLKNTEGDQWEVLAKPAKRLRVGTKVSFGDGRLIATVTKELEHGGRIVEFSYDGIFLEVLESLGEMPLPPYIHEKLEDRDRYQTVYAKENGSAAAPTAGLHFTKELLEKIETKGVKLVYLTLHVGLGTFRPVSVDNLDEHEMHSEFYQLSKEAADTLNAVKESGGRIVAVGTTSIRTLETIGSKFNGELKADSGWTNIFIKPGYQFKVVDAFSTNFHLPKSTLVMLVSAFAGRDFVLEAYNHAVEERYRFFSFGDAMFVK

SEQ ID NO: 72536 - protein, 342 aa, Streptococcus agalactiae
  REGION 1..342: note = sp|Q8E611|QUEA_STRA3 S-adenosylmethionine:tRNA ribosyltransferase-isomerase OS=Streptococcus agalactiae serotype III (strain NEM316) OX=211110 GN=queA PE=3 SV=1
MNTNDFDFYLPEELIAQTPLEKRDASKLLVIDHKNKTMTDSHFDHILDELKPGDALVMNNTRVLPARLYGEKPDTHGHIELLLLKNTEGDQWEVLAKPAKRLRVGTKVSFGDGRLIATVTKELEHGGRIVEFSYDGIFLEVLESLGEMPLPPYIHEKLEDRDRYQTVYAKENGSAAAPTAGLHFTKELLEKIETKGVKLVYLTLHVGLGTFRPVSVDNLDEHEMHSEFYQLSKEAADTLNAVKESGGRIVAVGTTSIRTLETIGSKFNGELKADSGWTNIFIKPGYQFKVVDAFSTNFHLPKSTLVMLVSAFAGRDFVLEAYNHAVEERYRFFSFGDAMFVK

SEQ ID NO: 72537 - protein, 342 aa, Streptococcus anginosus
  REGION 1..342: note = tr|I0SBF5|I0SBF5_STRAP S-adenosylmethionine:tRNA ribosyltransferase-isomerase OS=Streptococcus anginosus subsp. whileyi CCUG 39159 OX=1095729 GN=queA PE=3 SV=1
MNTADFDFHLPEELIAQTPLEKRDASRLLVVNHETGQLEDTHFDAIIDQLHPGDALVMNDTRVLPARLHGEKPETGGHVELLLLKNIAGDNWEVLAKPAKRLKVGVAISFGDGRLTATVLEELEHGGRIVRFHYQGIFLEVLESLGEMPLPPYIHEKLKDRERYQTVYAKENGSAAAPTAGLHFTKELLAQIEAKGVKLVYLTLHVGLGTFRPVSVDNVDKHEMHSEFYTLSEEAANTLRQVKASGKRVIAVGTTSIRTLETIGSKFNGEIKADSGWTNIFIKPGYDWKIVDAFSTNFHLPKSTLVMLVSAFAGRELVLSAYQHAIDEKYRFFSFGDAMFIK

SEQ ID NO: 72538 - protein, 342 aa, Streptococcus anginosus
  REGION 1..342: note = tr|A0A412PPB9|A0A412PPB9_STRAP S-adenosylmethionine:tRNA ribosyltransferase-isomerase; OS = Streptococcus anginosus OX=1328 GN=queA PE=3 SV=1
MNTADFDFHLPEELIAQTPLEKRDASRLLIVNHETGQMEDTHFDAIIDQLHPGDALVMNDTRVLPARLHGEKSETGGHVELLLLKNIAGDDWEVLAKPAKRLKVGAAISFGDGRLTATVLEELEHGGRIVRFHYQGIFLEVLESLGEMPLPPYIHEKLKDRERYQTVYAKENGSAAAPTAGLHFTKELLAQIEAKGVKLVYLTLHVGLGTFRPVSVDNVDEHEMHSEFYTLSEEAANTLRQVKASGHHVVAVGTTSIRTLETIGSKFNGEIKADSGWTNIFIKPGYDWKIVDAFSTNFHLPKSTLVMLVSAFAGRELVLSAYQHAIDEKYRFFSFGDAMFIK

SEQ ID NO: 72539 - protein, 342 aa, Streptococcus australis
  REGION 1..342: note = tr|A0A4V0BWX9|A0A4V0BWX9_9STRE S-adenosylmethionine:tRNA ribosyltransferase-isomerase; OS = Streptococcus australis OX=113107 GN=queA PE=3 SV=1
MNTADFDFHLPEELIAQTPLEKRDASKLLIVNRETGEFQDKHFHSIIDMLEPGDALVMNDTRVLPARLYGQKEETGGHVELLLLKNTAGDEWEVLAKPAKRLKVGTRVSFGDGRLSAVVTEELTHGGRIVRFEYQGIFLEVLESLGEMPLPPYIHEKLDDRERYQTVYAKESGSAAAPTAGLHFTKELLAEIQAKGVHLVYLTLHVGLGTFRPVSVDNLDEHEMHSEFYQLSEEAAATLRSVKENGGRVIAVGTTSIRTLETIGSKFDGQIQADSGWTNIFIKPGYEWKVVDAFSTNFHLPKSTLVMLVSAFAGRDLVLDAYQHAIQEHYRFFSFGDAMFIY

SEQ ID NO: 72540 - protein, 342 aa, Streptococcus australis
  REGION 1..342: note = tr|A0A4V1PN92|A0A4V1PN92_9STRE S-adenosylmethionine:tRNA ribosyltransferase-isomerase; OS = Streptococcus australis OX=113107 GN=queA PE=3 SV=1
MNTNDFDFHLPEELIAQTPLEKRDASKLLILNRQTGQMEDQHFDAIINELEPGDALVMNNTRVLPARLHGVKPDTGGHVELLLLKNIEGDQWEVLAKPAKRLKEGGVVSFGDGRLQATLIKKLEHGGCIVEFSYQGIFLEVLESLGEMPLPPYIHEKLEDQERYQTVYAKENGSAAAPTAGLHFTPELLQKIEDKGVHLVYLTLHVGLGTFRPVSVDDLDQHEMHSEFYQLSEEAAQTLRQVKARGHRIVAVGTTSIRTLETIGNKFNGELQADSGWTNIFIKPGYQWQVVNAFSTNFHLPKSTLVMLVSAFAGRELTLDAYQHAIDQGYRFFSFGDAMFIK

SEQ ID NO: 72541 - protein, 342 aa, unidentified
  source 1..342: note = Streptococcus bovimastitidis
  REGION 1..342: note = tr|A0A1L8MMX9|A0A1L8MMX9_9STRE S-adenosylmethionine:tRNA ribosyltransferase-isomerase; OS = Streptococcus bovimastitidis OX=1856638 GN=queA PE=3; SV = 1
MNTNDFDFELPEELIAQTPLEQRDSSKLLIIDHENKTMVDSHFDQIIDQLNPGDALVMNNTRVLPARLHGEKPDTHGHVELLLLKNTQGDDWEVLAKPAKRLKVGSQISFGDGRLKATVLEELEHGGRIVTFSYEGIFLEVLESLGEMPLPPYIHEKLEDSERYQTVYAKENGSAAAPTAGLHFTQELLEKIQAKGVHLVYLTLHVGLGTFRPVSVDNVDAHEMHSEFYHLSEESAQILRDVKKAGGRVVAVGTTSIRTLETIGSKFKGDIQADSGWTNIFIKPGYQFTVVDAFSTNFHLPKSTLVMLVSAFAGREFVLEAYKHAVDEKYRFFSFGDAMFVK

SEQ ID NO: 72542 - protein, 342 aa, Streptococcus canis
  REGION 1..342: note = tr|A0A2D4DRC0|A0A2D4DRC0_STRCB S-adenosylmethionine:tRNA ribosyltransferase-isomerase; OS = Streptococcus canis OX=1329 GN=queA PE=3 SV=1
MNTNDFDFDLPEELIAQTPLEKRDSSKLLIIDHRQKTMVDSHFDHIIDQLNPGDALVMNNTRVLPARLYGEKPDTHGHVELLLLKNTQGDQWEVLAKPAKRLKVGSQVSFGDGRLKATIIDELEHGGRIVEFSYDGIFLEVLESLGEMPLPPYIHEKLEDAERYQTVYAKENGSAAAPTAGLHFTTDLLKKIQAKGVHLVYLTLHVGLGTFRPVSVDNLDDHDMHSEFYSLSEEAAQTLREVKQAGGRVIAVGTTSIRTLETIGSKFNGEIRADSGWTNIFIKPGYQFKVVDAFSTNFHLPKSTLVMLVSAFAGREFVLEAYKHAVDEKYRFFSFGDAMFVN

SEQ ID NO: 72543 - protein, 342 aa, Streptococcus canis; identical to SEQ ID NO: 72542
  REGION 1..342: note = tr|I7WFT5|I7WFT5_STRCB S-adenosylmethionine:tRNA ribosyltransferase-isomerase OS=Streptococcus canis FSL Z3-227 OX=482234 GN=queA PE=3 SV=1

SEQ ID NO: 72544 - protein, 342 aa, Streptococcus constellatus
  REGION 1..342: note = tr|A0A139QI23|A0A139QI23_STRCV S-adenosylmethionine:tRNA ribosyltransferase-isomerase; OS = Streptococcus constellatus OX=76860 GN=queA PE=3 SV=1
MNTADFDFHLPEELIAQTPLEKRDASRLLVVNHKTGQMEDTHFDAIIDQLHPGDALVMNDTRVLPARLHGEKPETGGHVELLLLKNIEGDDWEVLAKPAKRLKVGATISFGDGRLTATVLEELEHGGRIVRFHYQGIFLEVLESLGEMPLPPYIHEKLKDRERYQTVYAKENGSAAAPTAGLHFTKELLAKIEAKGVKLVYLTLHVGLGTFRPVSVNNVDEHEMHSEFYTLSDEAAETLRQVKASGKRVIAVGTTSIRTLETIGSKFNGEIKADSGWTNIFIKPGYDWKVVDAFSTNFHLPKSTLVMLVSAFAGRELVLSAYQHAIDEKYRFFSFGDAMFIK

SEQ ID NO: 72545 - protein, 342 aa, Streptococcus constellatus; identical to SEQ ID NO: 72537
  REGION 1..342: note = tr|F9P521|F9P521_STRCV S-adenosylmethionine:tRNA ribosyltransferase-isomerase OS=Streptococcus constellatus subsp. pharyngis SK1060 = CCUG 46377 OX=1035184 GN=queA P; E = 3 SV=1

SEQ ID NO: 72546 - protein, 342 aa, Streptococcus criceti
  REGION 1..342: note = tr|G5JT64|G5JT64_STRCG S-adenosylmethionine:tRNA ribosyltransferase-isomerase OS=Streptococcus criceti HS-6; OX = 873449 GN=queA PE=3 SV=1
MNTQDFDFHLPEELIAQTPLEKRDSSKLLVIDHKNHTMVDSHFDHILDELNPGDALVMNNTRVLPARLHGEKSETHGHVEFLLLKNTQDDQWEVLARPAKRLHVGTEISFGDGRLTATIVQELDHGGRIVEFHYDGIFLEVLESLGEMPLPPYIHEKLEDQERYQTVYAKENGSAAAPTAGLHFTQELLEKIEAKGVKLVYLTLHVGLGTFRPVSVNNIEDHEMHSEFYQLSEEAAQTLRQVKASGGRIVAVGTTSIRTLETIGNKFSGDIQADSGWTNIFIKPGYEFKIVDAFSTNFHLPKSTLVMLVSAFAGREFVLEAYKHAVDKHYRFFSFGDAMFVK

SEQ ID NO: 72547 - protein, 342 aa, Streptococcus cristatus
  REGION 1..342: note = tr|A0A428APR8|A0A428APR8_STRCR S-adenosylmethionine:tRNA ribosyltransferase-isomerase; OS = Streptococcus cristatus OX=45634 GN=queA PE=3 SV=1
MNTADFDFYLPEELIAQTPLEKRDSSRLLIVDRETGQFSDQHFDNIIDQLEPGDALVMNNTRVLPARLYGTKTETGGHVELLLLKNTQGDFWEVLAKPAKRLRVGTRVSFGDGRLTATVTEELEHGGRIVRFDYQGIFLEVLESLGEMPLPPYIHEKLEDRERYQTVYAKENGSAAAPTAGLHFTEELLDKIAAKGVKLVYLTLHVGLGTFRPVSVDNLEEHEMHSEFYSLSEEAAETLRQVKERGHRIVAVGTTSIRTLETIGSKFDGQIQADSGWTNIFIKPGYQWKIVDAFSTNFHLPKSTLVMLVSAFAGRQLTLQAYEHAIAERYRFFSFGDAMFIK

SEQ ID NO: 72548 - protein, 342 aa, Streptococcus cristatus
  REGION 1..342: note = tr|A0A5B0D9S3|A0A5B0D9S3_STRCR S-adenosylmethionine:tRNA ribosyltransferase-isomerase; OS = Streptococcus cristatus OX=45634 GN=queA PE=3 SV=1
MNTADFDFHLPEELIAQTPLEKRDSSRLLIVDRETGQFSDQHFDNIIDQLEPGDALVMNNTRVLPARLYGTKPETGGHVELLLLKNTQGDFWEVLAKPAKRLRVGTRVSFGDGRLTATVTEELEHGGRIVRFDYQGIFLEVLESLGEMPLPPYIHEKLEDRERYQTVYAKENGSAAAPTAGLHFTEELLDKIAAKGVKLVYLTLHVGLGTFRPVSVDNLEEHEMHSEFYSLSEEAAETLRQVKASGHRIIAVGTTSIRTLETIGSKFDGQIQADSGWTNIFIKPGYQWKIVDAFSTNFHLPKSTLVMLVSAFAGRQLTLQAYEHAIAERYRFFSFGDAMFIK

SEQ ID NO: 72549 - protein, 342 aa, unidentified
  source 1..342: note = Streptococcus cuniculi
  REGION 1..342: note = tr|A0A4Y9J7L8|A0A4Y9J7L8_9STRE S-adenosylmethionine:tRNA ribosyltransferase-isomerase; OS = Streptococcus cuniculi OX=1432788 GN=queA PE=3 SV=1
MNTADFDFHLPEHLIAQVPLEQRDASRLLILDREKQTMVDAHFDQIIDELEPGDALVMNNTRVLPARLYGEKPETGGHVELLLLKNTQGDQWEVLAKPAKRLKVGSQISFGDGRLTATIIQELEHGGRIVEFAYDSIFLEVLESLGEMPLPPYIHEKLDDRERYQTVYAKENGSAAAPTAGLHFTKDLLKKIEAKGVKLVYLTLHVGLGTFRPVSVDNVDEHEMHSEFYSLSKEAATTLREVKDSGHRIVAVGTTSIRTLETIGNKFEGDIQADSGWTNIFIKPGYQFKVVDAFSTNFHLPKSTLVMLVSAFAGRDFVLEAYQHAIDNEYRFFSFGDAMFIK

SEQ ID NO: 72550 - protein, 342 aa, unidentified
  source 1..342: note = Streptococcus cuniculi
  REGION 1..342: note = tr|A0A1Q8EAP6|A0A1Q8EAP6_9STRE S-adenosylmethionine:tRNA ribosyltransferase-isomerase; OS = Streptococcus cuniculi OX=1432788 GN=queA PE=3 SV=1
MNTADFDFHLPEHLIAQVPLEQRDASRLLILDREKQTMVDGHFDQIIDELEPGDALVMNNTRVLPARLYGEKPETGGHVELLLLKNTQGDQWEVLAKPAKRLKVGSQISFGDGRLTATIIQELEHGGRIVEFAYNGIFLEVLESLGEMPLPPYIHEKLDDRERYQTVYAKENGSAAAPTAGLHFTQDLLKKIEAKGVKLVYLTLHVGLGTFRPVSVDNVDEHEMHSEFYSLSEEAAATLREVKASGHRIIAVGTTSIRTLETIGNKFEGDIQADTGWTNIFIKPGYQFKVVDAFSTNFHLPKSTLVMLVAAFAGRDFVLEAYQHAIEEEYRFFSFGDAMFIK

SEQ ID NO: 72551 - protein, 342 aa, Streptococcus downei
  REGION 1..342: note = tr|A0A380JD48|A0A380JD48_STRDO S-adenosylmethionine:tRNA ribosyltransferase-isomerase; OS = Streptococcus downei MFe28 OX=764290 GN=queA PE=3 SV=1
MNTEDFNFHLPEDLIAQTPLEKRDSSKLLVIDHNKHTMLDSHFDHILEELNPGDALVMNNTRVLPARLHGEKPETHGHVEFLLLKNTQGDQWEVLAKPAKRLHVGTEVSFGDGRLRATVLEELEHGGRIVQFHYEGIFLEVLESLGEMPLPPYIHEKLEDQERYQTVYAKENGSAAAPTAGLHFTQELLEKIEAKGVKLVYLTLHVGLGTFRPVSVDNIEDHEMHSEFYQFSEEAAQTLRQVKASGGRIVAVGTTSIRTLETIGNKFNGQIQADSGWTNIFIKPGYQFKLVDAFSTNFHLPKSTLVMLVSAFAGRDFVLEAYKHAVEEHYRFFSFGDAMFVK

SEQ ID NO: 72552 - protein, 342 aa, Streptococcus dysgalactiae
  REGION 1..342: note = tr|M4YYT3|M4YYT3_STREQ S-adenosylmethionine:tRNA ribosyltransferase-isomerase OS=Streptococcus dysgalactiae subsp. equisimilis RE378 OX=617121 GN=queA PE=3 SV=1
MNTNDFDFDLPEELIAQTPLEKRDSSKLLIIDHEQKIMIDSHFDHIIDQLNPGDALVMNNTRVLPARLYGEKPDTHGHVELLLLKNTHGDQWEVLAKPAKRLKVGSQVSFGDGRLTATIVEELEHGGRIVEFNYEGIFLEVLESLGEMPLPPYIHEKLDDAERYQTVYAKENGSAAAPTAGLHFTTDLLSKIEAKGVHLVYLTLHVGLGTFRPVSVDNLDDHDMHSEFYSLSEEAAQTLRDVKKAGGRVVAVGTTSIRTLETIGSKFQGDIQADSGWTNIFIKPGYQFKVVDAFSTNFHLPKSTLVMLVSAFAGRDFVLDAYKHAVDEKYRFFSFGDAMFVK

SEQ ID NO: 72553 - protein, 342 aa, Streptococcus dysgalactiae
  REGION 1..342: note = tr|A0A380KCA1|A0A380KCA1_STREQ S-adenosylmethionine:tRNA ribosyltransferase-isomerase; OS = Streptococcus dysgalactiae subsp. equisimilis OX=119602; GN = queA PE=3 SV=1
MNTNDFDFDLPEELIAQTPLEKRDSSKLLIIDHEQKIMIDSHFDHIIDQLNPGDALVMNNTRVLPARLYGEKPDTHGHVELLLLKNTHGDQWEVLAKPAKRLKVGSQVSFGDGRLTATIVEELEHGGRIVEFNYEGIFLEVLESLGEMPLPPYIHEKLDDAERYQTVYAKENGSAAAPTAGLHFTTDLLSKIDAKGVHLVYLTLHVGLGTFRPVSVDNLDDHDMHSEFYSLSEEAAQTLRDVKKAGGHVVAVGTTSIRTLETIGSKFQGDIQADSGWTNIFIKPGYQFKVVDAFSTNFHLPKSTLVMLVSAFAGRDFVLDAYKHAVDEKYRFFSFGDAMFVK

SEQ ID NO: 72554 - protein, 342 aa, Streptococcus equi
  REGION 1..342: note = tr|C0MCU2|C0MCU2_STRS7 S-adenosylmethionine:tRNA ribosyltransferase-isomerase OS=Streptococcus equi subsp. zooepidemicus (strain H70) OX=553483 GN=queA PE=3 SV=1
MNTNDFDFELPEELIAQTPLEQRDRSKLLIIDHQEHTMTDSHFDHIIDQLEPGDALVMNNTRVLPARLYGEKMETHGHVELLLLKNIQGDQWEVLAKPAKRLKAGAQISFGDGLLKARVIQELEHGGRIVEFSYDGIFLEILETLGEMPLPPYIHEKLADAERYQTVYAKENGSAAAPTAGLHFTQELLQKIEAKGVHLVYLTLHVGLGTFRPVSVDNIDEHDMHSEFYLLSEEAAQTLRKVKAAGGRIVAVGTTSIRTLETIGSKFQGQILADSGWTNIFIKPGYQFKVVDAFSTNFHLPKSTLVMLVSAFAGRDFVLEAYKHAIDEHYRFFSFGDAMFVK

SEQ ID NO: 72555 - protein, 342 aa, Streptococcus equi
  REGION 1..342: note = tr|A0A2X3SWJ8|A0A2X3SWJ8_STRSZ S-adenosylmethionine:tRNA ribosyltransferase-isomerase; OS = Streptococcus equi subsp. zooepidemicus OX=40041; GN = queA PE=3 SV=1
MNTNDFDFELPEELIAQTPLEQRDRSKLLIIDHQEHTMTDSHFDHIIDQLEPGDALVMNNTRVLPARLYGEKMETHGHVELLLLKNIQGDQWEVLAKPAKRLKAGAQISFGDGRLKARVIQELEHGGRIVEFSYDGIFLEILETLGEMPLPPYIHEKLADAERYQTVYAKENGSAAAPTAGLHFTQELLQKIEAKGVHLIYLTLHVGLGTFRPVSVDNIDEHDMHSEFYLLSEEAAQTLRKVKAAGGRIVAVGTTSIRTLETIGSKFQGQILADSGWTNIFIKPGYQFKVVDAFSTNFHLPKSTLVMLVSAFAGRDFVLEAYKHAIDEHYRFFSFGDAMFVK

SEQ ID NO: 72556 - protein, 342 aa, Streptococcus equinus
  REGION 1..342: note = tr|A0A239RFH3|A0A239RFH3_STREI S-adenosylmethionine:tRNA ribosyltransferase-isomerase; OS = Streptococcus equinus OX=1335 GN=queA PE=3 SV=1
MNTNDFDFNLPEELIAQTPLEKRDSSKLLVIDRNTHEMVDAHFDHILDELNPGDALVMNNTRVLPARLYGEKPETHGHVELLLLKNTEGDKWEVLAKPAKRLRVGAKVSFGDGRLTATVVEELDHGGRIVEFDYDGIFLEVLESLGEMPLPPYIHEKLDDPDRYQTVYAKENGSAAAPTAGLHFTKELLKKIEAKGVKLVYVTLHVGLGTFRPVSVDNVEEHEMHSEFYRLSEEAAQTLRDVKAAGGRIVAVGTTSIRTLETIGSKFNGEIKADSGWTNIFIKPGYKFKVVDAFSTNFHLPKSTLVMLVSAFAGREFVLEAYQHAIDERYRFFSFGDAMFVK

SEQ ID NO: 72557 - protein, 342 aa, Streptococcus equinus
  REGION 1..342: note = tr|A0A1G9J3Z6|A0A1G9J3Z6_STREI S-adenosylmethionine:tRNA ribosyltransferase-isomerase; OS = Streptococcus equinus OX=1335 GN=queA PE=3 SV=1
MNTNDFDFNLPEELIAQTPLEKRDSSKLLVIDRNTHEMVDAHFDHILDELNPGDALVMNNTRVLPARLYGEKPETHGHVELLLLKNTEGDKWEVLAKPAKRLRVGAKVSFGDGRLTATVVEELDHGGRIVEFDYDGIFLEVLESLGEMPLPPYIHEKLDDPDRYQTVYAKENGSAAAPTAGLHFTKELLEKIEAKGVKLVYVTLHVGLGTFRPVSVDNVEEHEMHSEFYRLSEEAAQTLRDVKAAGGRIVAVGTTSIRTLETIGSKFNGEIKADSGWTNIFIKPGYEFKVVDAFSTNFHLPKSTLVMLVSAFAGREFVLEAYQHAIDERYRFFSFGDAMFVK

SEQ ID NO: 72558 - protein, 342 aa, Streptococcus ferus
  REGION 1..342: note = tr|A0A2X3XZE1|A0A2X3XZE1_9STRE S-adenosylmethionine:tRNA ribosyltransferase-isomerase; OS = Streptococcus ferus OX=1345 GN=queA PE=3 SV=1
MNTNDFDFALPEELIAQTPLEQRDASKLLIIDRAKQTMSDSHFDHIIDELEAGDALVMNNTRVLPARLYGQKAETLGHVELLLLKNTQADQWEVLAKPAKRLKVGSQILFGDGRLKATVLEELDHGGRIVDFSYDGIFLEVLESLGEMPLPPYIHEKLEDKERYQTVYAKENGSAAAPTAGLHFTTDLLDRIQAKGVKLVYLTLHVGLGTFRPVSVDNVDEHEMHSEFYSLSEEAAQTLNAVKRSGGRIVAVGTTSIRTLETIGHKFNGKLEADSGWTNIFIKPGYQFKIVDAFSTNFHLPKSTLVMLVAAFAGREFVLEAYKHAVQEKYRFFSFGDAMFIK

SEQ ID NO: 72559 - protein, 342 aa, Streptococcus gallolyticus
  REGION 1..342: note = tr|A0A0E1XJ23|A0A0E1XJ23_STRGY S-adenosylmethionine:tRNA ribosyltransferase-isomerase; OS = Streptococcus gallolyticus subsp. gallolyticus TX20005; OX = 545774 GN=queA PE= 3 SV=1
MNTNDFDFNLPEELIAQTPLEKRDSSKLLVIDHKTHEMVDAHFDHILDELNPGDALVMNNTRVLPARLYGEKPDTHGHVELLLLKNTQGDQWEVLAKPAKRLRVGAKVSFGDGRLTATVVEELDHGGRIVEFAYDGIFLEVLESLGEMPLPPYIHEKLDDPDRYQTVYAKENGSAAAPTAGLHFTQDLLAKIEAKGVKLVYLTLHVGLGTFRPVSVDNIEEHEMHSEFYTLSEEAAQTLRDVKAAGRRVVAVGTTSIRTLETIGSKFNGDIKADSGWTNIFIKPGYEFKVVDAFSTNFHLPKSTLVMLVSAFAGREFVLDAYQHAIDERYRFFSFGDAMFVK

SEQ ID NO: 72560 - protein, 342 aa, Streptococcus gallolyticus
  REGION 1..342: note = tr|A0A139QKT8|A0A139QKT8_9STRE S-adenosylmethionine:tRNA ribosyltransferase-isomerase; OS = Streptococcus gallolyticus OX=315405 GN=queA PE=3 SV=1
MNTNDFDFNLPEELIAQTPLEKRDSSKLLVIDHKTHEMVDAHFDHILDELNPGDALVMNNTRVLPARLYGEKPDTHGHVELLLLKNTQGDQWEVLAKPAKRLRVGAKVSFGDGRLTATVVEELDHGGRIVEFAYDGIFLEVLESLGEMPLPPYIHEKLDDPDRYQTVYAKENGSAAAPTAGLHFTQDLLAKIEAKGVKLVYLTLHVGLGTFRPVSVDNIEEHEMHSEFYTLSEETAQTLRDVKAAGGRVVAVGTTSIRTLETIGSKFNGDIKADSGWTNIFIKPGYEFKVVDAFSTNFHLPKSTLVMLVSAFAGREFVLDAYQHAIDERYRFFSFGDAMFVK

SEQ ID NO: 72561 - protein, 342 aa, Streptococcus gordonii
  REGION 1..342: note = sp|A8AYK5|QUEA_STRGC S-adenosylmethionine:tRNA ribosyltransferase-isomerase OS=Streptococcus gordonii (strain Challis / ATCC 35105 / BCRC 15272 / CH1 / DL1 / V288) O X=467705 GN=queA PE=2 SV=1
MNTADFDFHLPEELIAQTPLEKRDASRLLVVDRSSGEFSDQHFDSIIDQLQPGDALVMNNTRVLPARLYGEKPGTGGHVELLLLKNTEGDQWEVLAKPAKRLKVGAQVSFGDGRLTATVVDELEHGGRIVRFDYQGIFLEVLESLGEMPLPPYIHEKLADRERYQTVYAKENGSAAAPTAGLHFTKELLAQIEAKGVKLVYLTLHVGLGTFRPVSVDNLDDHEMHSEFYTLSEEAAATLREVKANGHRVIAVGTTSIRTLETIGNKFKGDIQADSGWTNIFIKPGYQWQIVDAFSTNFHLPKSTLVMLVSAFAGRDLTLKAYEHAIAERYRFFSFGDAMFIK

SEQ ID NO: 72562 - protein, 342 aa, Streptococcus gordonii
  REGION 1..342: note = tr|A0A0M5KEV5|A0A0M5KEV5_STRGN S-adenosylmethionine:tRNA ribosyltransferase-isomerase; OS = Streptococcus gordonii OX=1302 GN=queA PE=3 SV=1
MNTADFDFHLPEELIAQTPLEKRDASRLLVVDRSSGEFSDQHFDSIIDQLQPGDALVMNNTRVLPARLYGEKPGTGGHVELLLLKNTEGDQWEVLAKPAKRLKVGAQVSFGDGRLTATVVDELEHGGRIVRFDYQGIFLEVLESLGEMPLPPYIHEKLADRERYQTVYAKENGSAAAPTAGLHFTKELLAQIEAKGVKLVYLTLHVGLGTFRPVSVDNLEEHEMHSEFYTLSEEAAATLREVKANGHRVIAVGTTSIRTLETIGNKFQGDIQADSGWTNIFIKPGYQWQIVDAFSTNFHLPKSTLVMLVSAFAGRELTLKAYEHAIAERYRFFSFGDAMFIK

SEQ ID NO: 72563 - protein, 342 aa, unidentified
  source 1..342: note = Streptococcus halitosis
  REGION 1..342: note = tr|A0A3R8NV82|A0A3R8NV82_9STRE S-adenosylmethionine:tRNA ribosyltransferase-isomerase; OS = Streptococcus halitosis OX=2172545 GN=queA PE=3 SV=1
MNTADFDFHLPEELIAQTPLEKRDASKLLIVNRETGEMQDKHFHSIIDMLEPGDALVMNDTRVLPARLYGQKEETGGHVELLLLKNTSGDEWEVLAKPAKRLKVGTRVNFGDGRLSAVVTEELTHGGRIVRFEYQGIFLEVLESLGEMPLPPYIHEKLDDRERYQTVYAKESGSAAAPTAGLHFTRELLAEIQAKGVHLVYLTLHVGLGTFRPVSVDNLDEHEMHSEFYQLSEEAAATLRSVKENGGRVIAVGTTSIRTLETIGSKFDGQIQADSGWTNIFIKPGYEWKVVDAFSTNFHLPKSTLVMLVSAFAGRELVLDAYQHAIQERYRFFSFGDAMFIY

SEQ ID NO: 72564 - protein, 342 aa, Streptococcus henryi
  REGION 1..342: note = tr|A0A1G6B6A7|A0A1G6B6A7_9STRE S-adenosylmethionine:tRNA ribosyltransferase-isomerase; OS = Streptococcus henryi OX=439219 GN=queA PE=3 SV=1
MNTEDFNFHLPEELIAQTPLEQRDSSKLLVIDRESHEMVDAHFDHILDELNPGDALVMNNTRVLPARLYGEKPDTHGHVELLLLKNTEGDQWEVLAKPAKRLRVGAQVSFGDGRLMATVVQELDHGGRIVEFSYDGIFLEVLESLGEMPLPPYIHEKLQDRERYQTVYAKENGSAAAPTAGLHFTQELLAKIEAKGVKLVELTLHVGLGTFRPVSVDNLDEHDMHSEFYSLSEEAAQTLRQVKANGGRVVAVGTTSIRTLETIGSKFDGQIKADSGWTKIFIKPGYTFKVVDAFSTNFHLPKSTLVMLVSAFAGREFVLEAYKHAVDQHYRFFSFGDAMFVK

SEQ ID NO: 72565 - protein, 342 aa, Streptococcus hyointestinalis
  REGION 1..342: note = tr|A0A380K6W2|A0A380K6W2_9STRE S-adenosylmethionine:tRNA ribosyltransferase-isomerase; OS = Streptococcus hyointestinalis OX=1337 GN=queA PE=3 SV=1
MNTNDFDFDLPEELIAQTPLKQRDSSKLLVIDHKKHTMVDTHFDHIIDELNPGDALVMNNTRVLPARLYGEKPDTHGHVELLLLKNIENDDWEVLAKPAKRLRVGAQISFGDGRLTAVVKEELEHGGRIVTFSYEGIFLEVLESLGEMPLPPYIHEKLEDRERYQTVYAKENGSAAAPTAGLHFTQDLLDKIAAKGVKLVYLTLHVGLGTFRPVSVDNVDEHEMHSEFYQLAEEAADTLNQVRSNGGRIVAVGTTSIRTLETIGTKFDGDIKADSGWTNIFIKPGYQFKVVDAFSTNFHLPKSTLVMLVSAFAGREFVLEAYKHAVDENYRFFSFGDAMFVK

SEQ ID NO: 72566 - protein, 342 aa, Streptococcus ictaluri
  REGION 1..342: note = tr|G5K5Y8|G5K5Y8_9STRE S-adenosylmethionine:tRNA ribosyltransferase-isomerase OS=Streptococcus ictaluri 707-05 OX=764299 GN=queA PE=3 SV=1
MNTNDFDFDLPEELIAQTPLEKRDSSKLLIIDRDKKTMTDSHFDHIIDQLAPGDTLVMNNTRVLPARLYGEKEETHGHVELLLLKNLQGDQWEVLAKPAKRLKVGASISFGDGRLKATVLDELEHGGRIVSFSYEGIFLEVLESLGEMPLPPYIHEKLEDSERYQTVYAKENGSAAAPTAGLHFTQELLQKIEAKGVHLVYLTLHVGLGTFRPVSVENVDQHDMHSEFYSLSEEAAQTLREVKASGGRVVAVGTTSIRTLETIGSKFNGQIQADSGWTNIFIKPGYDFKVVDAFSTNFHLPKSTLVMLVSAFAGREFVLEAYKHAVDEKYRFFSFGDAMFVK

SEQ ID NO: 72567 - protein, 342 aa, Streptococcus infantarius
  REGION 1..342: note = tr|A0A380KMR9|A0A380KMR9_9STRE S-adenosylmethionine:tRNA ribosyltransferase-isomerase; OS = Streptococcus infantarius OX=102684 GN=queA PE=3 SV=1
MHTDDFDFNLPEELIAQTPLEKRDSSKLLVIDHKTHEMVDAHFDHILDELNSGDALVMNNTRVLPARLYGEKPDTHGHVELLLLKNTEGDQWEVLAKPAKRLHVGVKVSFGDGRLTATVVEELDNGGRIVEFDYDGIFLEVLESLGEMPLPPYIHEKLDDPNRYQTVYAKENGSAAAPTAGLHFTKELLEKIEAKGVKLVYVTLHVGLGTFRPVSVDNVEEHEMHSEFYRLSEEAAQTLRDVKATGGRVVAVGTTSIRTLETIGSKFNGEIKADSGWTNIFIKPGYDFKVVDAFSTNFHLPKSTLVMLVSAFAGREFVLEAYQHAIDERYRFFSFGDAMFVK

SEQ ID NO: 72568 - protein, 345 aa, Streptococcus infantis
  REGION 1..345: note = tr|E8K2M4|E8K2M4_9STRE S-adenosylmethionine:tRNA ribosyltransferase-isomerase OS=Streptococcus infantis ATCC 700779 OX=889204 GN=queA PE=3 SV=1
MTTLNTNDFDFHLPEELIAQTPLEKRDASKLLMVNRKTGEFQDRHFHSIIEMLEPGDALVMNDTRVLPARLHGQKEETGGHVELLLLKNTAGDEWEVLAKPAKRLKVGTRVIFGDGRLSAVVTEELTHGGRIVRFEYEGIFLEVLESLGEMPLPPYIHEKLDDRERYQTVYAKESGSAAAPTAGLHFTKELLEEIQQKGVHLVYLTLHVGLGTFRPVSVDNLDEHEMHSEFYQLSEEAAATLRQVKENGGRVIAVGTTSIRTLETIGSKFDGQIQADSGWTNIFIKPGYDWKVVDAFSTNFHLPKSTLVMLVSAFAGRELVLKAYQHAIDEKYRFFSFGDAMFIY

SEQ ID NO: 72569 - protein, 345 aa, Streptococcus infantis
  REGION 1..345: note = tr|A0A0F2E6S5|A0A0F2E6S5_9STRE S-adenosylmethionine:tRNA ribosyltransferase-isomerase; OS = Streptococcus infantis OX=68892 GN=queA PE=3 SV=1
MTTLNTNDFDFHLPEELIAQTPLEKRDASKLLMVNRKTGEFQDRHFHSIIEMLEPGDALVMNDTRVLPARLHGQKEETGGHVELLLLKNTAGDEWEVLAKPAKRLKVGTRVIFGDGRLSAVVTEELTHGGRIVRFEYEGIFLEVLESLGEMPLPPYIHEKLDDRERYQTVYAKESGSAAAPTAGLHFTKELLEEIQQKGVHLVYLTLHVGLGTFRPVSVDNLDEHEMHSEFYQLSEEAAATLRQVKENGGRVIAVGTTSIRTLETIGSKFDGQIQADSGWTNIFIKPGYDWKVVDAFSTNFHLPKSTLVMLVSAFAGRELVLEAYQHAIDQKYRFFSFGDAMFIY

SEQ ID NO: 72570 - protein, 342 aa, Streptococcus iniae
  REGION 1..342: note = tr|A0A3L8GLE7|A0A3L8GLE7_STRIN S-adenosylmethionine:tRNA ribosyltransferase-isomerase; OS = Streptococcus iniae OX=1346 GN=queA PE=3 SV=1
MNTNDFDFDLPEELIAQTPLEQRDSSKLLLLNTKDKSMKDSHFDHLIDYLNPGDALVMNNTRVLPARLHGEKIDTHGHVELLLLKNTEADQWEVLAKPAKRLKVGSQITFGDGRLQATVVKELEHGGRIVSFSYQGIFLEVLESLGEMPLPPYIHEKLDDSERYQTVYAKENGSAAAPTAGLHFTNDLLDRIKAKGVHLVYLTLHVGLGTFRPVSVDDVDNHEMHSEFYSLSQEAAQTLREVKAKGGRVVAVGTTSIRTLETIGSKFNGDIKADSGWTNIFIKPGYHFTVVDAFSTNFHLPKSTLVMLVSAFAGREFVLEAYKHAVNEKYRFFSFGDAMFVH

SEQ ID NO: 72571 - protein, 342 aa, Streptococcus intermedius
  REGION 1..342: note = tr|G6A456|G6A456_STRIT S-adenosylmethionine:tRNA ribosyltransferase-isomerase OS=Streptococcus intermedius F0395 OX=857292 GN=queA PE=3 SV=1
MNTADFDFHLPEELIAQTPLEKRDASRLLVVNHKTGQMEDTHFDAIIDQLHPGDALVMNDTRVLPARLHGEKPETGGHVELLLLKNTEGDNWEVLAKPAKRLKVGAAISFGDGRLTATVLEELEHGGRIVRFHYQGIFLEVLESLGEMPLPPYIHEKLKDRERYQTVYAKENGSAAAPTAGLHFTKELLAKIEAKGVKLVYLTLHVGLGTFRPVSVDNVDEHEMHSEFYTLSDEAAETLRQVKASGKRVIAVGTTSIRTLETIGSKFNGEIKAESGWTNIFIKPGYDWKVVDAFSTNFHLPKSTLVMLVSAFAGRELVLSAYQHAIDEKYRFFSFGDAVFIK

SEQ ID NO: 72572 - protein, 342 aa, Streptococcus intermedius
  REGION 1..342: note = tr|A0A428EXZ5|A0A428EXZ5_STRIT S-adenosylmethionine:tRNA ribosyltransferase-isomerase; OS = Streptococcus intermedius OX=1338 GN=queA PE=3 SV=1
MNTADFDFHLPEELIAQTPLEKRDASRLLIVNHKTGQMEDTHFDAIIDQLHPGDALVMNDTRVLPARLHGEKIETGGHVELLLLKNTEGDDWEVLAKPAKRLKVGAQISFGDGRLTATILEELKHGGRIVRFHYQGIFLEVLESLGEMPLPPYIHEKLKDRERYQTVYAKENGSAAAPTAGLHFTKELLAKIKAKGVKLVYLTLHVGLGTFRPVSVDNVDEHEMHSEFYTLSEEAAETLRQVKVSGKRVIAVGTTSIRTLETIGSKFNGEIKADSGWTNIFIKPGYDWKVVDAFSTNFHLPKSTLVMLVSAFAGRELVLSAYQHAINEKYRFFSFGDAMFIK

SEQ ID NO: 72573 - protein, 342 aa, Streptococcus lutetiensis
  REGION 1..342: note = tr|S5RH68|S5RH68_9STRE S-adenosylmethionine:tRNA ribosyltransferase-isomerase OS=Streptococcus lutetiensis 033 OX=1076934 GN=queA PE=3 SV=1
MHTDDFDFNLPEELIAQTPLEKRDSSKLLIIDHKTHEMVDTHFDHILDELNPGDALVMNNTRVLPARLYGEKPDTHGHVELLLLKNTEGDQWEVLAKPAKRLRVGAKVSFGDGRLTATVVEELDHGGRIVEFNYDGIFLEILESLGEMPLPPYIHEKLDDPDRYQTVYAKENGSAAAPTAGLHFTKELLEKIEAKGVKLVYVTLHVGLGTFRPVSVDNVEKHEMHSEFYRLSEEAAQTLRDVKAAGGRVVAVGTTSIRTLETIGSKFNGEIKADSGWTNIFIKPGYEFKVVDAFSTNFHLPKSTLVMLVSAFAGREFVLEAYQHAIDERYRFFSFGDAMFVK

SEQ ID NO: 72574 - protein, 342 aa, Streptococcus lutetiensis; identical to SEQ ID NO: 72573
  REGION 1..342: note = tr|A0A2X3VKF0|A0A2X3VKF0_9STRE S-adenosylmethionine:tRNA ribosyltransferase-isomerase; OS = Streptococcus lutetiensis OX=150055 GN=queA PE=3 SV=1

SEQ ID NO: 72575 - protein, 342 aa, Streptococcus macacae
  REGION 1..342: note = tr|G5JUV0|G5JUV0_9STRE S-adenosylmethionine:tRNA ribosyltransferase-isomerase OS=Streptococcus macacae NCTC 11558 OX=764298 GN=queA PE=3 SV=1
MNTSDFDFDLPEELIAQTPLKQRDSSKLLVIDHHHKTMKDTHFDHIIDELNPGDALVMNDTRVLPARLHGEKIATHGHVEFLLLKNTQGDQWEVLAKPAKRLKIGSQISFGDGRLKATVKEELEHGGRIVEFSYDGIFLEVLESLGEMPLPPYIHEKLKDRDRYQTVYAKENGSAAAPTAGLHFTEDLLSKIEAKGVNLVYLTLHVGLGTFRPVSVDNVDEHQMHSEFYSLSQEAAQTLKNVKASGGRIVAVGTTSIRTLETIGNKFAGHIEADSGWTNIFIKPGYQFKIVDAFSTNFHLPKSTLVMLVSAFAGRDFVLEAYKHAVDSHYRFFSFGDAMFVK

SEQ ID NO: 72576 - protein, 342 aa, unidentified
  source 1..342: note = Streptococcus macedonicus
  REGION 1..342: note = tr|H2A5D7|H2A5D7_STRMD S-adenosylmethionine:tRNA ribosyltransferase-isomerase OS=Streptococcus macedonicus (strain ACA-DC 198) OX=1116231 GN=queA PE=3 SV=1
MNINDFDFNLPEELIAQTPLEKRDSSKLLVIDHKTHEMVDAYFDHILDELNPGDALVMNNTRVLPARLYGEKTDTHGHVELLLLKNTQGDQWEVLAKPAKRLRVGAKVSFGDGRLTATVVEELDHGGRIVEFTYDGIFLEVLESLGEMPLPPYIHEKLDDPDRYQTVYAKENGSAAAPTAGLHFTQDLLAQIEAKGVKLVYLTLHVGLGTFRPVSVDNIEEHEMHSEFYTLSEEAAQTLRDVKAAGGRIVAVGTTSIRTLETIGSKFNGDIKADSGWTNIFIKPGYEFKVVDAFSTNFHLPKSTLVMLVSAFAGREFILDAYQHAIDERYRFFSFGDAMFVK

SEQ ID NO: 72577 - protein, 342 aa, unidentified
  source 1..342: note = Streptococcus macedonicus
  REGION 1..342: note = tr|A0A2G3NZ80|A0A2G3NZ80_STRMC S-adenosylmethionine:tRNA ribosyltransferase-isomerase; OS = Streptococcus macedonicus OX=59310 GN=queA PE=3 SV=1
MNINDFDFNLPEELIAQTPLEKRDSSKLLVIDHKTHEMVDAYFDHILDELNPGDALVMNNTRVLPARLYGEKTDTHGHVELLLLKNTQGDQWEVLAKPAKRLRVGAKVSFGDGRLTATVVEELDHGGRIVEFTYDGIFLEVLESLGEMPLPPYIHEKLDDPDRYQTVYAKENGSAAAPTAGLHFTQDLLAQIEAKGIKLVYLTLHVGLGTFRPVSVDNIEEHEMHSEFYTLSEEAAQTLRDVKAAGGRIVAVGTTSIRTLETIGSKFNGDIKADSGWTNIFIKPGYEFKVVDAFSTNFHLPKSTLVMLVSAFAGREFILDAYQHAIDERYRFFSFGDAMFVK

SEQ ID NO: 72578 - protein, 342 aa, Streptococcus massiliensis
  REGION 1..342: note = tr|A0A380L0F8|A0A380L0F8_9STRE S-adenosylmethionine:tRNA ribosyltransferase-isomerase; OS = Streptococcus massiliensis OX=313439 GN=queA PE=3 SV=1
MNTADFDFDLPEELIAQTPLEKRDASRLLIVNRQTGEFSDQHFDNIIDQLEPGDALVMNNTRVLPARLYGQKPETGGHVELLLLKNITGDEWEVLAKPAKRLHIGTKISFGDGRLNAVVIEELDHGGRIVRFDYEGIFLEVLESLGEMPLPPYIHEKLEDRERYQTVYAKENGSAAAPTAGLHFTPELLEKIAAKGVHLVHLTLHVGLGTFRPVSVDNLDEHEMHSEFYQLSEEAAATLRQVKAAGKRIIAVGTTSIRTLETIGNKFNGAIQADSGWTNIFIYPGYEWKIVDAFSTNFHLPKSTLVMLVSAFAGRKLTLSAYQHAIEERYRFFSFGDAMFVK

SEQ ID NO: 72579 - protein, 342 aa, Streptococcus merionis
  REGION 1..342: note = tr|A0A239SSR7|A0A239SSR7_9STRE S-adenosylmethionine:tRNA ribosyltransferase-isomerase; OS = Streptococcus merionis OX=400065 GN=queA PE=3 SV=1
MNTADFDFNLPEELIAQTPLLKRDSSRLLVLDRKTGTMSDQHFDQIIDQLNPGDALVMNNTRVLPARLYGQKPETGGHVELLLLKNTKGDEWEVLAKPAKRLKKGTVISFGDGRLTATITRELEHGGRIVQFDYDGIFLEVLESLGEMPLPPYIHEKLDDRERYQTVYAKENGSAAAPTAGLHFTEDLLNKIAAKGVKLVELTLHVGLGTFRPVSVDNVDEHDMHSEFYSLSEEAAQVLRDVKAAGGRIVAVGTTSIRTLETIGAKFDGEIVADSGWTNIFIKPGYHFKIVDAFSTNFHLPKSTLVMLVAAFAGREFILDAYKHAVDEQYRFFSFGDAMFVK

SEQ ID NO: 72580 - protein, 342 aa, unidentified
  source 1..342: note = Streptococcus milleri
  REGION 1..342: note = tr|A0A448D1C9|A0A448D1C9_9STRE S-adenosylmethionine:tRNA ribosyltransferase-isomerase; OS = Streptococcus milleri OX=33040 GN=queA PE=3 SV=1
MNTADFDFHLPEELIAQTPLEKRDASRLLVVNHKTGQMEDTHFDAIIDQLHPGDALVMNDTRVLPARLHGEKPETGGHVELLLLKNTEGDNWEVLAKPAKRLKVGAAISFGDGRLTATVLEELEHGGRIVRFHYQGIFLEVLESLGEMPLPPYIHEKLKDRERYQTVYAKENGSAAAPTAGLHFTKELLAKIEAKGVKLVYLTLHVGLGTFRPVSVNNVDEHEMHSEFYTLSDEAAETLRQVKASGKRVIAVGTTSIRTLETIGSKFNGEIKADSGWTNIFIKPGYDWKVVDAFSTNFHLPKSTLVMLVSAFAGRELVLSAYQHAIDEKYRFFSFGDAMFIK

SEQ ID NO: 72581 - protein, 342 aa, unidentified; identical to SEQ ID NO: 72544
  source 1..342: note = Streptococcus milleri
  REGION 1..342: note = tr|A0A380L3C2|A0A380L3C2_9STRE S-adenosylmethionine:tRNA ribosyltransferase-isomerase; OS = Streptococcus milleri OX=33040 GN=queA PE=3 SV=1

SEQ ID NO: 72582 - protein, 342 aa, Streptococcus minor
  REGION 1..342: note = tr|A0A3P1VG25|A0A3P1VG25_9STRE S-adenosylmethionine:tRNA ribosyltransferase-isomerase; OS = Streptococcus minor OX=229549 GN=queA PE=3 SV=1
MNTTDFDFDLPEELIAQTPLEVRDSSRLLILDKKQKTLTDSHFDAILDQLKPGDALVMNNTRVLPARLYGEKPDTHGHVELLLLKNTQADQWEVLAKPAKRLRVDARISFGDGRLMATVLEELEHGGRIVEFSYDGIFLEVLESLGEMPLPPYIHEKLEDRERYQTVYAKENGSAAAPTAGLHFTKELLEQIEAKGVHLVYLTLHVGLGTFRPVSVDNVEEHEMHSEYYQLSQEAADTLNQVKKNGGRVVAVGTTSIRTLETIGNKFDGQLEADSGWTNIFIKPGYEFKVVDAFSTNFHLPKSTLVMLVAAFAGREFVLEAYRHAVEERYRFFSFGDAMFLS

SEQ ID NO: 72583 - protein, 342 aa, Streptococcus mitis
  REGION 1..342: note = tr|A0A1X1JIN5|A0A1X1JIN5_STRMT S-adenosylmethionine:tRNA ribosyltransferase-isomerase; OS = Streptococcus mitis OX=28037 GN=queA PE=3 SV=1
MNTADFDFHLPEELIAQTPLEKRDASKLLIVNRETGEMQDKHFHSIIDMLEPGDALVMNDTRVLPARLYGQKEETGGHVELLLLKNISGDEWEVLAKPAKRLKIGTRVSFGDGRLSAVVTEELTHGGRIVRFEYQGIFLEVLESLGEMPLPPYIHEKLDDRERYQTVYAKESGSAAAPTAGLHFTKELLAEIQAKGVHLVYLTLHVGLGTFRPVSVDNLDEHEMHSEFYQLSEEAAATLRSVKENGGRVIAVGTTSIRTLETIGSKFDGQIQADSGWTNIFIKPGYEWKVVDAFSTNFHLPKSTLVMLVSAFAGRELVLDAYHHAIQEHYRFFSFGDAMFIY

SEQ ID NO: 72584 - protein, 342 aa, Streptococcus mitis
  REGION 1..342: note = tr|F9HQ43|F9HQ43_STRMT S-adenosylmethionine:tRNA ribosyltransferase-isomerase OS=Streptococcus mitis SK1080; OX = 1008453 GN=queA PE=3 SV=1
MNTADFDFYLPEELIAQTPLEKRDASKLLIVNRETGEMQDKHFHSIIDMLEPGDALVMNDTRVLPARLYGQKEETGGHVELLLLKNTAGDEWEVLAKPAKRLKVGTRVSFGDGRLSAVVTEELTHGGRIVRFEYQGIFLEVLESLGEMPLPPYIHEKLDDRERYQTVYAKESGSAAAPTAGLHFTKELLAEIQAKGVHLVYLTLHVGLGTFRPVSVDNLDEHEMHSEFYQLSEEAAATLRSVKENGGRVIAVGTTSIRTLETIGSKFEGQIQADSGWTNIFIKPGYEWKVVDAFSTNFHLPKSTLVMLVSAFAGRELVLDAYHHAIQEHYRFFSFGDAMFIY

SEQ ID NO: 72585 - protein, 342 aa, Streptococcus mutans
  REGION 1..342: note = sp|Q8DV72|QUEA_STRMU S-adenosylmethionine:tRNA ribosyltransferase-isomerase OS=Streptococcus mutans serotype c (strain ATCC 700610 / UA159) OX=210007 GN=queA; PE = 3 SV =1
MNTSDFDFNLPEALIAQTPLKKRDSSKLLVVDHQKKTMKDTHFDHIIDELNSGDALVMNDTRVLPARLHGEKTVTHGHVELLLLKNIQGDQWEVLAKPAKRLKVGSHISFGDGRLKAIIKEELDHGGRIVEFSYEGIFLEVLESLGEMPLPPYIHEKLEDRDRYQTVYAKENGSAAAPTAGLHFTEELLSKIEAKGVKLVYLTLHVGLGTFRPVSVDNVEEHQMHSEFYSLSPEAAQTLKDVKANGGRIVAVGTTSIRTLETIGNKFAGQIEADSGWTNIFIKPGYQFKIVDAFSTNFHLPKSTLVMLVSAFAGRDFILDAYKHAVDKHYRFFSFGDAMFVK

SEQ ID NO: 72586 - protein, 342 aa, Streptococcus mutans
  REGION 1..342: note = tr|A0A2J9QFB5|A0A2J9QFB5_STRMG S-adenosylmethionine:tRNA ribosyltransferase-isomerase; OS = Streptococcus mutans OX=1309 GN=queA PE=3 SV=1
MNTSDFDFNLPEALIAQTPLKQRDSSKLLVVDHQKKTMKDTHFDHIIDELNSGDALVMNDTRVLPARLHGEKTVTHGHVELLLLKNIQGDQWEVLAKPAKRLKVGSHISFGDGRLKAIIKEELDHGGRIVEFSYEGIFLEVLESLGEMPLPPYIHEKLEDRDRYQTVYAKENGSAAAPTAGLHFTEELLSKIEAKGVKLVYLTLHVGLGTFRPVSVDNVEEHQMHSEFYSLSPEAAQTLKDVKANGGRIVAVGTTSIRTLETIGNKFAGQIEADSGWTNIFIKPGYQFKIVDAFSTNFHLPKSTLVMLVSAFAGRDFILDAYKHAVDKHYRFFSFGDAMFVK

SEQ ID NO: 72587 - protein, 342 aa, Streptococcus oralis
  REGION 1..342: note = tr|A0A428ISA9|A0A428ISA9_STROR S-adenosylmethionine:tRNA ribosyltransferase-isomerase; OS = Streptococcus oralis OX=1303 GN=queA PE=3 SV=1
MNTADFDFHLPEELIAQTPLEKRDASKLLIVNRETGEMQDKHFHSIIDMLEPGDALVMNDTRVLPARLYGQKEETGGHVELLLLKNTSGDEWEVLAKPAKRLKVGTRVSFGDGRLSAVVTEELTHGGRIVRFEYQGIFLEVLESLGEMPLPPYIHEKLDDRERYQTVYAKESGSAAAPTAGLHFTKELLAEIQAKGVHLVYLTLHVGLGTFRPVSVDNLDEHEMHSEFYQLSEEAAATLRSVKENGGRVIAVGTTSIRTLETIGSKFEGQIQADSGWTNIFIKPGYEWKVVDAFSTNFHLPKSTLVMLVSAFAGRELVLDAYHHAIQEHYRFFSFGDAMFIY

SEQ ID NO: 72588 - protein, 342 aa, Streptococcus oralis
  REGION 1..342: note = tr|A0A1X1HDD7|A0A1X1HDD7_STROR S-adenosylmethionine:tRNA ribosyltransferase-isomerase; OS = Streptococcus oralis subsp. oralis OX=1891914 GN=queA; PE = 3 SV=1
MNTADFDFHLPEELIAQTPLEKRDSSKLLIVNRETGEFQDKHFHSIIDMLEPGDALVMNDTRVLPARLYGQKEETGGHVELLLLKNTSGDEWEVLAKPAKRLKVGTRVNFGDGRLSAVVTEELTHGGRIVRFEYRGIFLEVLESLGEMPLPPYIHEKLDDRERYQTVYAKESGSAAAPTAGLHFTKELLAEIQAKGVHLVYLTLHVGLGTFRPVSVDNLDEHEMHSEFYQLSEEAAATLRSVKENGGRVIAVGTTSIRTLETIGSKFNGQIQSDSGWTNIFIKPGYDWKVVDAFSTNFHLPKSTLVMLVSAFAGRDLVLDAYHHAIQEHYRFFSFGDAMFIY

SEQ ID NO: 72589 - protein, 342 aa, unidentified
  source 1..342: note = Streptococcus pantholopis
  REGION 1..342: note = tr|A0A172Q8C9|A0A172Q8C9_9STRE S-adenosylmethionine:tRNA ribosyltransferase-isomerase; OS = Streptococcus pantholopis OX=1811193 GN=queA PE=3 SV=1
MKTDSFDFNLPEELIAQTPLKKRDASKLLIINRQTHKILDSHFDHIIDELNPGDALVMNDTRVLPARLHGEKKETHGHVELLLLKNIQGDQWEVLAKPAKRLKTGSEISFGDGRLTASVVKELPEGGRLVEFSYNGIFLEVLESLGEMPLPPYIHEKLSDRERYQTVYAKENGSAAAPTAGLHFTQELLQKIKDKGVKLVYLTLHVGLGTFRPVAADDIKEHKMHSEFYTLSEEAAQTLRQVKAEGGRIVAVGTTSIRTLETIGQKYKGQIQADSGWTDIFIKPGYQFQIVDAFSTNFHLPKSTLIMLVSAFAGQEFVLEAYHHAIEENYRFFSFGDAMFVK

SEQ ID NO: 72590 - protein, 342 aa, Streptococcus parasanguinis
  REGION 1..342: note = tr|A0A414CIT6|A0A414CIT6_STRPA S-adenosylmethionine:tRNA ribosyltransferase-isomerase; OS = Streptococcus parasanguinis OX=1318 GN=queA PE=3 SV=1
MNTNDFDFDLPEELIAQTPLEKRDASKLLILDRKTGQFQDRHFDAILDELEPGDALVMNNTRVLPARLHGVKPETGGHVEFLLLKNTQDDCWEVLAKPAKRLKVGATVIFGDGRLTATVEEELEHGGRIVRFHYQGIFLEVLESLGEMPLPPYIHEKLADRERYQTVYAKENGSAAAPTAGLHFTQELLQKIEAKGVHLVYLTLHVGLGTFRPVSVDNLEDHEMHSEFYQLSEEAAATLRQVKAAGKRIVAVGTTSIRTLETIGNKFDGDIQADSGWTNIFIKPGYEWKVVDAFSTNFHLPKSTLVMLVSAFAGRELTLEAYHHAIQERYRFFSFGDAMFIK

SEQ ID NO: 72591 - protein, 342 aa, Streptococcus parasanguinis
  REGION 1..342: note = tr|A0A0F3H3R9|A0A0F3H3R9_STRPA S-adenosylmethionine:tRNA ribosyltransferase-isomerase; OS = Streptococcus parasanguinis OX=1318 GN=queA PE=3 SV=1
MNTNDFDFDLPEELIAQTPLEKRDASKLLILDRKTGQFQDRHFDAILDELEPGDALVMNNTRVLPARLHGVKPETGGHVEFLLLKNTQDDCWEVLAKPAKRLKVGATVSFGDGRLTATVEEELEHGGRIVRFHYQGIFLEVLESLGEMPLPPYIHEKLADRERYQTVYAKENGSAAAPTAGLHFTQELLQKIEAKGVHLVYLTLHVGLGTFRPVSVDNLEDHEMHSEFYQLSEEAAATLRQVKAAGKRIVAVGTTSIRTLETIGNKFDGDIQADSGWTNIFIKPGYEWKVVDAFSTNFHLPKSTLVMLVSAFAGRELTLEAYHHAIQERYRFFSFGDAMFIK

SEQ ID NO: 72592 - protein, 342 aa, unidentified
  source 1..342: note = Streptococcus parasuis
  REGION 1..342: note = tr|A0A4Q8L1L9|A0A4Q8L1L9_9STRE S-adenosylmethionine:tRNA ribosyltransferase-isomerase; OS = Streptococcus parasuis OX=1501662 GN=queA PE=3 SV=1
MNTADFDFDLPEELIAQVPLEKRDSSKLLILDREKHSMVDSRFDHIIDQLHPGDALVMNNTRVLPARLYGYKPETNGHVELLLLKNTQGDQWEVLAKPAKRLKVGTTVAFGDGRLTATIVEELEHGGRIVEFTYDGIFLEVLESLGEMPLPPYIHEKLEDRERYQTVYAKENGSAAAPTAGLHFTQELLEKIEAKGVKLVYLTLHVGLGTFRPVSVENVDEHEMHSEFYNLTAEAAQTLNQIKENGGRIVAVGTTSIRTLETIGNKFDGRLEADSGWTNIFIKPGYTFRIVDAFSTNFHLPKSTLVMLVSAFAGREFTLEAYKHAVEERYRFFSFGDAMFIQ

SEQ ID NO: 72593 - protein, 342 aa, Streptococcus parauberis
  REGION 1..342: note = tr|F1Z1Z3|F1Z1Z3_9STRE S-adenosylmethionine:tRNA ribosyltransferase-isomerase OS=Streptococcus parauberis NCFD 2020 OX=873447 GN=queA PE=3 SV=1
MNTNDFDFDLPEELIAQTPLEKRDSSKLLIIDHKKETMVDSHFDHIIKELNPGDALVMNNTRVLPARLYGEKPDTKGHVELLLLKNTSGDQWEVLAKPAKRLRVGSQVSFGDGRLSATVIEELEHGGRIVEFSYDGIFLEVLESLGEMPLPPYIHEKLEDSERYQTVYAKENGSAAAPTAGLHFTQELLEKIEAKGVKLVYLTLHVGLGTFRPVSVDNVDEHDMHSEFYSLSEEAATTLRQVKADGGRVIAVGTTSIRTLETIGSKFKGEIVADSGWTNIFIKPGYQFTIVDAFSTNFHLPKSTLVMLVSAFAGRDFVLEAYKHAVNEKYRFFSFGDAMFVK

SEQ ID NO: 72594 - protein, 342 aa, Streptococcus parauberis
  REGION 1..342: note = tr|A0A1S1ZP44|A0A1S1ZP44_9STRE S-adenosylmethionine:tRNA ribosyltransferase-isomerase; OS = Streptococcus parauberis OX=1348 GN=queA PE=3 SV=1
MNTNDFDFDLPEELIAQTPLEKRDSSKLLIIDHKKETMVDSHFDHIIKELNPGDALVMNNTRVLPARLHGEKPDTKGHVELLLLKNTSGDQWEVLAKPAKRLRVGSQVSFGDGRLSATVIEELEHGGRIVEFSYDGIFLEVLESLGEMPLPPYIHEKLEDSERYQTVYAKENGSAAAPTAGLHFTQELLEKIEAKGVKLVYLTLHVGLGTFRPVSVDNVDEHDMHSEFYSLSEEAATTLRQVKADGGRVIAVGTTSIRTLETIGSKFKGKIVADSGWTNIFIKPGYQFTIVDAFSTNFHLPKSTLVMLVSAFAGRDFVLEAYKHAVNEKYRFFSFGDAMFVK

SEQ ID NO: 72595 - protein, 342 aa, unidentified
  source 1..342: note = Streptococcus pasteurianus
  REGION 1..342: note = tr|F5X5G6|F5X5G6_STRPX S-adenosylmethionine:tRNA ribosyltransferase-isomerase OS=Streptococcus pasteurianus (strain ATCC 43144 / JCM 5346 / CDC 1723-81) OX=981540 GN =queA PE=3 SV=1
MNTNDFDFNLPEELIAQTPLEKRDSSKLLVIDHKTHEMVDAHFDHILDELNPGDALVMNNTRVLPARLYGEKPDTHGHVELLLLKNTQGDQWEVLAKPAKRLRVGVKVSFGDGRLTATVVEELDHGGRVVEFAYDGIFLEVLESLGEMPLPPYIHEKLDDPDRYQTVYAKENGSAAAPTAGLHFTQDLLAKIEAKGVKLVYLTLHVGLGTFRPVSVDNIEEHEMHSEFYTLSEEAAQTLRDVKAAGGRVVAVGTTSIRTLETIGSKFNGDIKADSGWTNIFIKPGYEFKVVDAFSTNFHLPKSTLVMLVSAFAGREFVLDAYQHAIDEHYRFFSFGDAMFVK

SEQ ID NO: 72596 - protein, 342 aa, unidentified
  source 1..342: note = Streptococcus pasteurianus
  REGION 1..342: note = tr|A0A4P7WHT3|A0A4P7WHT3_9STRE S-adenosylmethionine:tRNA ribosyltransferase-isomerase; OS = Streptococcus pasteurianus OX=197614 GN=queA PE=3 SV=1
MNTNDFDFNLPEELIAQTPLEKRDSSKLLVIDHKTHEMVDAHFDHILDELNPGDALVMNNTRVLPARLYGEKPDTHGHVELLLLKNTQGDQWEVLAKPAKRLRVGVKVSFGDGRLTATVVEELDHGGRVVEFAYDGIFLEVLESLGEMPLPPYIHEKLDDPDRYQTVYAKENGSAASPTAGLHFTQDLLAKIEAKGVKLVYLTLHVGLGTFRPVSVDNIEEHEMHSEFYTLSEEAAQTLRDVKAAGGRVVAVGTTSIRTLETIGSKFNGDIKADSGWTNIFIKPGYEFKVVDAFSTNFHLPKSTLVMLVSAFAGREFVLDAYQHAIDEHYRFFSFGDAMFVK

SEQ ID NO: 72597 - protein, 342 aa, unidentified
  source 1..342: note = Streptococcus penaeicida
  REGION 1..342: note = tr|A0A2N8LC85|A0A2N8LC85_9STRE S-adenosylmethionine:tRNA ribosyltransferase-isomerase; OS = Streptococcus penaeicida OX=1765960 GN=queA PE=3 SV=1
MNTNDFDFELPEELIAQTPLEQRDSSKLLIIDHEKKTMVDSHFDHIIDQLNPGDALVMNNTRVLPARLHGEKPDTHGHVELLLLKNTQGDDWEVLAKPAKRLKVGSQISFGDGRLKATVLEELEHGGRIVSFSYEGIFLEVLESLGEMPLPPYIHEKLEDSERYQTVYAKENGSAAAPTAGLHFTQELLEKIQAKGVHLVYLTLHVGLGTFRPVSVDNVDAHEMHSEFYHLSEESAQILRDVKKAGGRVVAVGTTSIRTLETIGSKFKGEIQADSGWTNIFIKPGYKFTVVDAFSTNFHLPKSTLVMLVSAFAGREFVLEAYKHAVDEKYRFFSFGDAMFVK

SEQ ID NO: 72598 - protein, 342 aa, Streptococcus peroris
  REGION 1..342: note = tr|E8KDF0|E8KDF0_9STRE S-adenosylmethionine:tRNA ribosyltransferase-isomerase OS=Streptococcus peroris ATCC 700780 OX=888746 GN=queA PE=3 SV=1
MNTNDFDFDLPEELIAQTPLEQRDASRLLIVNRKTGEFQDRHFHSIIEMLEPGDALVMNDTRVLPARLHGEKEETGGHVELLLLKNTVGDEWEVLAKPAKRLKVGARVIFGDGRLSAVVTEELTHGGRIVRFEYEGIFLEVLESLGEMPLPPYIHEKLDDQERYQTVYAKESGSAAAPTAGLHFTKELLEEIQQKGVHLVYLTLHVGLGTFRPVTVDNLDEHEMHSEFYQLSEEAAATLRQIKENGGRVIAVGTTSIRTLETIGSKFDGQIQADSGWTNIFIKPGYDWKVVDAFSTNFHLPKSTLVMLVSAFAGRELVLEAYQHAIEERYRFFSFGDAMFIY

SEQ ID NO: 72599 - protein, 342 aa, unidentified
  source 1..342: note = Streptococcus pharyngis
  REGION 1..342: note = tr|A0A5C5SF47|A0A5C5SF47_9STRE S-adenosylmethionine:tRNA ribosyltransferase-isomerase; OS = Streptococcus pharyngis OX=1562651 GN=queA PE=3 SV=1
MNVNDFDFYLPERLIAQTPLEKRDASKLLVLDREQGSMTDGHFHDIIDHLNPGDALVMNNTRVLPARLYGEKPDTHGHVEFLLLKNTQDNQWEVLAKPAKRLKVGSKVSFGDGRLMATVIEELEHGGRIVEFDYQGIFLEVLESLGEMPLPPYIHEKLADRERYQTVYAKENGSAAAPTAGLHFTPELLAAIEAKGVKLVYLTLHVGLGTFRPVSVDNIEDHDMHSEFYHLSAQAAKTLNQVKAKGGRIVAVGTTSIRTLETIGAKYDGQLQADSGWTNIFIKPGYQFKVVDAFSTNFHLPKSTLVMLVAAFAGRDFTLEAYQHAVEQDYRFFSFGDAMFVK

SEQ ID NO: 72600 - protein, 342 aa, Streptococcus phocae
  REGION 1..342: note = tr|A0A0P6S2B8|A0A0P6S2B8_9STRE S-adenosylmethionine:tRNA ribosyltransferase-isomerase; OS = Streptococcus phocae OX=119224 GN=queA PE=3 SV=1
MNTNDFDFELPEELIAQTPLEKRDSSKLLIIDHKKKTMVDSHFDHIIDQLNPGDALVMNNTRVLPARLYGEKRETHGHVELLLLKNTQGDQWEVLAKPAKRLKVGAEVSFGDGRLTARIIEELEHGGRIVEFSYDGIFLEVLESLGEMPLPPYIHEKLDDSERYQTVYAKENGSAAAPTAGLHFTKDLLKQIEEKGVHLVYLTLHVGLGTFRPVSVDNLEEHDMHSEFYSLSEDSARTLRQVKASGGRIVAVGTTSIRTLETIGSKFNGAIQADSGWTSIFIKPGYQFTVVDAFSTNFHLPKSTLVMLVSAFAGRDFVLDAYQHAVEEKYRFFSFGDAMFVQ

SEQ ID NO: 72601 - protein, 348 aa, Streptococcus pluranimalium
  REGION 1..348: note = tr|A0A2L0D363|A0A2L0D363_9STRE S-adenosylmethionine:tRNA ribosyltransferase-isomerase; OS = Streptococcus pluranimalium OX=82348 GN=queA PE=3 SV=1
MNTKDFDFDLPEELIAQTPLEKRDSSKLLVLDPVTTEMTDTHFDHIIDQLNPGDALVMNNTRVLPARLYGEKPDTHGHVEFLLLKNTSGDNWEVLAKPAKRLKVGSTVSFGDGRLMAEVIEELEHGGRIVRFSYDGIFLEVLESLGEMPLPPYIHEKLDDRDRYQTVYAKENGSAAAPTAGLHFTPELLEKIEAKGVKLVYLTLHVGLGTFRPVSVDNVDEHEMHSEFYQLSQEAASTLNQVKQEGGRIVAVGTTSIRTLETIGNKFNGKLEADSGWTNIFIKPGYHFTVVDAFSTNFHLPKSTLVMLVAAFAGRDFILDAYKHAVENKYRFFSFGDAMFLKRSYKED

SEQ ID NO: 72602 - protein, 348 aa, Streptococcus pluranimalium
  REGION 1..348: note = tr|A0A345VIR3|A0A345VIR3_9STRE S-adenosylmethionine:tRNA ribosyltransferase-isomerase; OS = Streptococcus pluranimalium OX=82348 GN=queA PE=3 SV=1
MNTKDFDFDLPEELIAQTPLEKRDSSKLLVLDPVTKEMTDTHFDHIIDQLNPGDALVMNNTRVLPARLYGEKPDTHGHVEFLLLKNTSGDNWEVLAKPAKRLKVGSTVSFGDGRLMAEVIEELEHGGRIVRFSYDGIFLEVLESLGEMPLPPYIHEKLDDRDRYQTVYAKENGSAAAPTAGLHFTPELLEKIEAKGVKLVYLTLHVGLGTFRPVSVDNVDEHEMHSEFYQLSQEAASTLNQVKQEGGRVVAVGTTSIRTLETIGNKFNGKLEADSGWTNIFIKPGYDFTVVDAFSTNFHLPKSTLVMLVSAFAGRDFILDAYKHAVDNKYRFFSFGDAMFLKRSYKED

SEQ ID NO: 72603 - protein, 342 aa, Streptococcus pneumoniae
  REGION 1..342: note = sp|Q8DPA0|QUEA_STRR6 S-adenosylmethionine:tRNA ribosyltransferase-isomerase OS=Streptococcus pneumoniae (strain ATCC BAA-255 / R6) OX=171101 GN=queA PE=3 SV=2
MNTADFDFHLPEELIAQTPLEKRDASKLLIVNRETGEMQDKHFHSIIDMLEPGDALVMNDTRVLPARLYGQKVETGSHVELLLLKNTSGDEWEVLAKPAKRLKVGTRISFGDGRLSAVVTEELTHGGRIVRFEYQRIFLEVLESLGEMPLPPYIHEKLDDRERYQTVYAKESGSAAAPTAGLHFTKELLAEIQAKGVHLVYLTLHVGLGTFRPVSVDNLDEHEMHSEFYQLSEEAAATLRSVKENGGRVIAVGTTSIRTLETIGSKFDGQIQADSGWTNIFIKPGYEWKVVDAFSTNFHLPKSTLVMLVSAFAGRELVLDAYHHSIQEHYRFFSFGDAMFIY

SEQ ID NO: 72604 - protein, 342 aa, Streptococcus pneumoniae
  REGION 1..342: note = sp|B5E5S4|QUEA_STRP4 S-adenosylmethionine:tRNA ribosyltransferase-isomerase OS=Streptococcus pneumoniae serotype 19F (strain G54) OX=512566 GN=queA PE=3 SV=1
  VARIANT 91: note = Xaa can be any naturally occurring amino acid
MNTADFDFHLPEELIAQTPLEKRDASKLLIVNRETGEMQDKHFHSIIDMLEPGDALVMNDTRVLPARLYGQKVETGGHVELLLLKNTSGDXWEVLAKPAKRLKVGTRISFGDGRLSAVVTEELTHGGRIVRFEYQGIFLEVLESLGEMPLPPYIHEKLDDRERYQTVYAKESGSAAAPTAGLHFTKELLAEIQAKGVHLVYLTLHVGLGTFRPVSVDNLDEHEMHSEFYQLSEEAAATLRSVKENGGRVIAVGTTSIRTLETIGSKFDGQIQADSGWTNIFIKPGYEWKVVDAFSTNFHLPKSTLVMLVSAFAGRELVLDAYHHAIQEHYRFFSFGDAMFIY

SEQ ID NO: 72605 - protein, 342 aa, Streptococcus porcinus
  REGION 1..342: note = tr|A0A4U9XJ37|A0A4U9XJ37_STRPO S-adenosylmethionine:tRNA ribosyltransferase-isomerase; OS = Streptococcus porcinus OX=1340 GN=queA PE=3 SV=1
MNTNDFDFELPEELIAQTPLEQRDRSKLLIIDYKTKTMVDSHFDHIIDQLNPGDALVMNNTRVLPARLHGEKPDTHGHVELLLLKNIQGDDWEVLAKPAKRLKVGSSISFGDGRLTATVIKELEHGGRIVSFSYQGIFLEVLESLGEMPLPPYIHEKLDDSERYQTVYAKENGSAAAPTAGLHFTQALLQKIQEKGVHLVYLTLHVGLGTFRPVSVDNVDEHEMHSEFYQLSEEAADTLRQVKKAGGRVVAVGTTSIRTLETIGNKFNGNIQADSGWTNIFIKPGYRFTVVDAFSTNFHLPKSTLVMLVSAFAGREFVLEAYKHAINEHYRFFSFGDAMFVK

SEQ ID NO: 72606 - protein, 342 aa, Streptococcus porcinus
  REGION 1..342: note = tr|A0A4U9Y437|A0A4U9Y437_STRPO S-adenosylmethionine:tRNA ribosyltransferase-isomerase; OS = Streptococcus porcinus OX=1340 GN=queA PE=3 SV=1
MNTNDFDFELPEELIAQTPLEQRDSSKLLVIDHKTKKMVDSHFDHIIDQLNPGDALVMNNTRVLPARLHGEKPDTHGHVELLLLKNTKGDEWEVLAKPAKRLKVGSTISFGDGRLKATVIKELDHGGRIVSFSYQGIFLEVLESLGEMPLPPYIHEKLDDSERYQTVYAKENGSAAAPTAGLHFTQELLQRIQEKGVHLVYLTLHVGLGTFRPVSVDNVDEHEMHSEFYQLSEEAANTLRQVKKAGGRVVAVGTTSIRTLETIGNKFNGGIQADSGWTNIFIKPGYRFTVVDAFSTNFHLPKSTLVMLVSAFAGRDFVLEAYKHAISEHYRFFSFGDAMFVK

SEQ ID NO: 72607 - protein, 342 aa, Streptococcus pseudopneumoniae
  REGION 1..342: note = tr|V8IBF3|V8IBF3_9STRE S-adenosylmethionine:tRNA ribosyltransferase-isomerase OS=Streptococcus pseudopneumoniae 5247 OX=1415761 GN=queA PE=3 SV=1
MNTADFDFHLPEELIAQTPLEKRDASKLLIVNRETGKMQDKHFHSIIDMLEPGDALVMNDTRVLPARLYGQKEETGGHVELLLLKNTAGDEWEVLAKPAKRLKVGTRISFGDGRLSAVITEELTHGGRIVHFEYHGIFLEVLESLGEMPLPPYIHEKLDDRERYQTVYAKESGSAAAPTAGLHFTKELLAEIQAKGVHLVYLTLHVGLGTFRPVSVDNLDEHEMHSEFYQLSEEAAATLRSVKENGGRVIAVGTTSIRTLETIGSKFDGQIQADSGWTNIFIKPGYEWKVVDAFSTNFHLPKSTLVMLVSAFAGRELVLDAYHHAIQEHYRFFSFGDAMFIY

SEQ ID NO: 72608 - protein, 342 aa, Streptococcus pseudopneumoniae
  REGION 1..342: note = tr|A0A3A4WU06|A0A3A4WU06_9STRE S-adenosylmethionine:tRNA ribosyltransferase-isomerase; OS = Streptococcus pseudopneumoniae OX=257758 GN=queA PE=3; SV = 1
MNTADFDFHLPEELIAQTPLEKRDASKLLIVNRETGKMQDKHFHSIIDMLEPGDALVMNDTRVLPARLYGQKEETGGHVELLLLKNTAGDEWEVLAKPAKRLKVGTRISFGDGRLSAVITEELTHGGRIVRFEYHGIFLEVLESLGEMPLPPYIHEKLDDRERYQTVYAKESGSAAAPTAGLHFTKELLAEIQAKGVHLVYLTLHVGLGTFRPVSVDNLDEHEMHSEFYQLSEEAAATLRSVKENGGRVIAVGTTSIRTLETIGSKFDGQIQADSGWTNIFIKPGYEWKVVDAFSTNFHLPKSTLVMLVSAFAGRELVLDAYHHAIQEHYRFFSFGDAMFIY

SEQ ID NO: 72609 - protein, 342 aa, Streptococcus pseudoporcinus
  REGION 1..342: note = tr|G5K8W9|G5K8W9_9STRE S-adenosylmethionine:tRNA ribosyltransferase-isomerase OS=Streptococcus pseudoporcinus LQ 940-04 OX=875093 GN=queA PE=3 SV=1
MNTNDFDFELPEELIAQTPLEQRDSSKLLIIDHKAKTMVDSHFDHIIDQLNPGDALVMNNTRVLPARLHGEKPDTHGHVELLLLKNIQGDDWEVLAKPAKRLKVGSSISFGDGRLTATVIKELEHGGRIVSFSYQGIFLEVLESLGEMPLPPYIHEKLDDSERYQTVYAKENGSAAAPTAGLHFTQALLQKIQEKGVHLVYLTLHVGLGTFRPVSVDNVDEHEMHSEFYQLSEEAADTLRQVKKAGGRVVAVGTTSIRTLETIGNKFNGDIQADSGWTNIFIKPGYRFTVVDAFSTNFHLPKSTLVMLVSAFAGREFVLEAYKHAINEHYRFFSFGDAMFVK

SEQ ID NO: 72610 - protein, 342 aa, Streptococcus pyogenes
  REGION 1..342: note = sp|P0DD77|QUEA_STRPQ S-adenosylmethionine:tRNA ribosyltransferase-isomerase OS=Streptococcus pyogenes serotype M3 (strain SSI-1) OX=193567 GN=queA PE=3 SV=1
MNTNDFDFELPEELIAQTPLEKRDSSKLLIIDHRQKTMVDSHFDHIIDQLNPGDALVMNNTRVLPARLYGEKPDTHGHVELLLLKNTQGDQWEVLAKPAKRLKVGSQVNFGDGHLKATIIDELEHGGRIVEFSYDGIFLEVLESLGEMPLPPYIHEKLEDAERYQTVYAKENGSAAAPTAGLHFTTDLLKKIEAKGVHLVYLTLHVGLGTFRPVSVDNLDEHDMHSEFYSLSEEAAQTLRDVKQAGGRVVAVGTTSIRTLETIGSKFQGDIQADSGWTNIFIKPGYQFKVVDAFSTNFHLPKSTLVMLVSAFAGRDFVLEAYRHAVDEKYRFFSFGDAMFVN

SEQ ID NO: 72611 - protein, 342 aa, Streptococcus pyogenes
  REGION 1..342: note = sp|Q48SR6|QUEA_STRPM S-adenosylmethionine:tRNA ribosyltransferase-isomerase OS=Streptococcus pyogenes serotype M28 (strain MGAS6180) OX=319701 GN=queA PE=3 SV=1
MNTNDFDFELPEELIAQTPLEKRDSSKLLIIDHRQKTMVDSHFDHIIDQLNPGDALVMNNTRVLPARLYGEKPDTHGHVELLLLKNTQGDQWEVLAKPAKRLKVGSQVNFGDGRLKATIIDELEHGGRIVEFSYDGIFLEVLESLGEMPLPPYIHEKLEDAERYQTVYAKENGSAAAPTAGLHFTTDLLKKIEAKGVHLVYLTLHVGLGTFRPVSVDNLDEHDMHSEFYSLSEEAAQTLRDVKQAGGRVVAVGTTSIRTLETIGGKFQGDIQADSGWTNIFIKPGYQFKVVDAFSTNFHLPKSTLVMLVSAFAGRDFVLEAYRHAVDEKYRFFSFGDAMFVN

SEQ ID NO: 72612 - protein, 342 aa, Streptococcus ratti
  REGION 1..342: note = tr|J3JPU7|J3JPU7_STRRT S-adenosylmethionine:tRNA ribosyltransferase-isomerase OS=Streptococcus ratti FA-1 = DSM 20564 OX=699248 GN=queA PE=3 SV=1
MNTTDFDFDLPENLIAQTPLKQRDSSKLLVIDHKTKAMKDTHFDHIIDELNPDDALVMNDTRVLPARLHGEKVQTHGHVELLLLKNTQGDQWEVLAKPAKRLKVGSQISFGDGRLKATIKEELNHGGRIVEFSYDGIFLEVLESLGEMPLPPYIHEKLEDRDRYQTVYAKENGSAAAPTAGLHFTEDLLNKIEAKGVKLVYLTLHVGLGTFRPVSVDNVDEHQMHSEFYSLSPEAAQTLKDVKAQGGRIVAVGTTSIRTLETIGNKFAGQIEADSGWTNIFIKPGYQFKIVDAFSTNFHLPKSTLVMLVSAFAGREFVLDAYQHAIDEHYRFFSFGDAMFVK

SEQ ID NO: 72613 - protein, 342 aa, Streptococcus ratti; identical to SEQ ID NO: 72612
  REGION 1..342: note = tr|A0A5J6NJI7|A0A5J6NJI7_STRRT tRNA preQ1(34) S-adenosylmethionine ribosyltransferase-isomerase QueA; OS = Streptococcus ratti OX=1341 GN=queA PE=4 SV=1

SEQ ID NO: 72614 - protein, 342 aa, unidentified
  source 1..342: note = Streptococcus rubneri
  REGION 1..342: note = tr|A0A4Z1DXI0|A0A4Z1DXI0_9STRE S-adenosylmethionine:tRNA ribosyltransferase-isomerase; OS = Streptococcus rubneri OX=1234680 GN=queA PE=3 SV=1
MNTQDFDFYLPEELIAQTPLEKRDASKLLILNHKTGEMVDEHFDAIIDELEPGDALVMNNTRVLPARLHGVKPETGGHVELLLLKNIQGDQWEVLAKPAKRLKEGSVVSFGDGRLEATLIKKLEHGGCIVEFSYQGIFLEVLESLGEMPLPPYIHEKLEDKERYQTVYAKENGSAAAPTAGLHFTAELLQKIKEKGVKLVYLTLHVGLGTFRPVSVDNLDQHEMHSEFYQLSEEAAQTLREVKAKGHRIVAVGTTSIRTLETIGNKFEGDIQADSGWTNIFIKPGYQWQVVDAFSTNFHLPKSTLVMLVSAFAGRELTLQAYQHAIDERYRFFSFGDAMFIK

SEQ ID NO: 72615 - protein, 348 aa, unidentified
  source 1..348: note = Streptococcus ruminantium
  REGION 1..348: note = tr|A0A2Z5TP01|A0A2Z5TP01_9STRE S-adenosylmethionine:tRNA ribosyltransferase-isomerase; OS = Streptococcus ruminantium OX=1917441 GN=queA PE=3 SV=1
MIQGENMNTADFDFELPEELIAQVPLEKRDSSRLLILNREHKSMVDSHFDHIIDQLNPGDALVMNNTRVLPARLYGYKPETNGHVELLLLKNIHGDQWEVLAKPAKRLKIGATIAFGDGRLTATIVEELEHGGRIVEFSYDGIFLEVLESLGEMPLPPYIHEKLEDRERYQTVYAKENGSAAAPTAGLHFTQELLKKIERKGVKLVYLTLHVGLGTFRPVSVDNVEEHEMHSEFYNLPAEAAQILNQVKDNGGRIIAVGTTSIRTLETIGNKFNGRLEADSGWTNIFIKPGYTFQIVDAFSTNFHLPKSTLVMLVSAFAGREFTLEAYKHAVEEGYRFFSFGDAMFIQ

SEQ ID NO: 72616 - protein, 347 aa, Streptococcus salivarius
  REGION 1..347: note = tr|J7SID2|J7SID2_STRSL S-adenosylmethionine:tRNA ribosyltransferase-isomerase OS=Streptococcus salivarius K12 OX=1200793 GN=queA PE=3 SV=1
MNTNDFDFELPEELIAQTPLEQRDASKLLVIDPVTKEMTDTHFDHIIDQLNPGDALVMNNTRVLPARLYGEKPDTHGHVEFLLLKNIQGDQWEVLAKPAKRLKVGAKVSFGDGRLTATVTEELDHGGRIVEFCYDGIFLEVLESLGEMPLPPYIHEKLEDRDRYQTVYAKENGSAAAPTAGLHFTPELLQKIEAKGVKLVYLTLHVGLGTFRPVSVENVDEHEMHSEFYTLSQDAADTLNSVKAAGGRIIAVGTTSIRTLETIGNKYDGQLQADSGWTNIFIKPGYQFTVVDAFSTNFHLPKSTLVMLVSAFAGREFVLDAYKHAVQERYRFFSFGDAMFVTRPAEK

SEQ ID NO: 72617 - protein, 347 aa, Streptococcus salivarius
  REGION 1..347: note = tr|A0A2A5QBE3|A0A2A5QBE3_STRSL S-adenosylmethionine:tRNA ribosyltransferase-isomerase; OS = Streptococcus salivarius OX=1304 GN=queA PE=3 SV=1
MNTNDFDFELPEELIAQTPLEQRDASKLLVIDPVTKEMTDTHFDHIIDQLNPGDALVMNNTRVLPARLYGEKPDTHGHVEFLLLKNTQGDQWEVLAKPAKRLKVGAKVSFGDGRLTATVTEELDHGGRIVEFSYDGIFLEVLESLGEMPLPPYIHEKLEDRDRYQTVYAKENGSAAAPTAGLHFTPELLQKIEAKGVKLVYLTLHVGLGTFRPVSVENVDEHEMHSEFYTLSQDAADTLNSVKAAGGRIIAVGTTSIRTLETIGNKYDGQLQADSGWTNIFIKPGYQFTVVDAFSTNFHLPKSTLVMLVSAFAGREFVLDAYKHAVQERYRFFSFGDAMFVTRPAEK

SEQ ID NO: 72618 - protein, 342 aa, Streptococcus sanguinis
  REGION 1..342: note = sp|A3CLX2|QUEA_STRSV S-adenosylmethionine:tRNA ribosyltransferase-isomerase OS=Streptococcus sanguinis (strain SK36) OX=388919 GN=queA PE=3 SV=1
MNTADFDFDLPEELIAQTPLEKRDASRLLVVDKETGAFSDQHFDQIIDQLQPGDALVMNNTRVLPARLYGIKPETGGHVELLLLKNTQGDDWEVLAKPAKRLRVGAQISFGDGRLTATVIEELEHGGRIVRFSYEGIFLEVLESLGEMPLPPYIHEKLADRERYQTVYAKENGSAAAPTAGLHFTEELLEQIAAKGVKLVYLTLHVGLGTFRPVSVDSLDDHEMHSEFYSLSEEAAQTLRQVKANGGRVIAVGTTSIRTLETIGSKFQGQIQADSGWTNIFIKPGYNWKVVDAFSTNFHLPKSTLVMLVSAFAGRSLTLEAYEHAIAERYRFFSFGDAMFIK

SEQ ID NO: 72619 - protein, 342 aa, Streptococcus sanguinis
  REGION 1..342: note = tr|F3UR26|F3UR26_STRSA S-adenosylmethionine:tRNA ribosyltransferase-isomerase OS=Streptococcus sanguinis SK355 OX=888816 GN=queA PE=3 SV=1
MNTADFDFDLPEELIAQTPLEKRDASRLLVVDKETGTFSDQHFDQIIDQLQPGDALVMNNTRVLPARLYGIKPETGGHVELLLLKNTQGDDWEVLAKPAKRLRVGAQISFGDGRLTATVVDELEHGGRIVCFGYEGIFLEVLESLGEMPLPPYIHEKLSDRERYQTVYAKENGSAAAPTAGLHFTEELLEQIAAKGVKLVYLTLHVGLGTFRPVSVDSLDDHEMHSEFYSLSEEAAQILRQVKAKGGRVIAVGTTSIRTLETIGSKFQGQIQADSGWTNIFIKPGYDWKVVDAFSTNFHLPKSTLVMLVSAFAGRSLTLKAYEHAIAERYRFFSFGDAMFIK

SEQ ID NO: 72620 - protein, 342 aa, Streptococcus sinensis
  REGION 1..342: note = tr|A0A0A0DJ27|A0A0A0DJ27_9STRE S-adenosylmethionine:tRNA ribosyltransferase-isomerase; OS = Streptococcus sinensis OX=176090 GN=queA PE=3 SV=1
MNTADFDFHLPEELIAQTPLEKRDSSRLLIVDRKTGQFSDQHFDNIIDQLEPGDALVMNNTRVLPARLYGTKPETGGHVELLLLKNTQGDFWEVLAKPAKRLRVGAHVSFGDGRLTATVTEELEHGGRIVRFDYQGIFLEVLESLGEMPLPPYIHEKLEDRERYQTVYAKENGSAAAPTAGLHFTEELLDKIGAKGIKLVYLTLHVGLGTFRPVSVDNLDEHEMHSEFYTLSEEAAETLRQVKASGHRVVAVGTTSIRTLETIGSKFDGQIQADSGWTNIFIKPGYQWKIVDAFSTNFHLPKSTLVMLVSAFAGRQLTLQAYEHAIAEYYRFFSFGDAMFIK

SEQ ID NO: 72621 - protein, 342 aa, Streptococcus sobrinus
  REGION 1..342: note = tr|U2J1M3|U2J1M3_9STRE S-adenosylmethionine:tRNA ribosyltransferase-isomerase OS=Streptococcus sobrinus W1703 OX=1227275 GN=queA PE=3 SV=1
MNTQDFDFHLPEELIAQTPLEKRDSSKLLVIDHKKHTMLDTHFDHILDELNPGDALVMNNTRVLPARLHGEKPETHGHVEFLLLKNTQGDQWEVLAKPAKRLHVGTEVSFGDGRLTATILEELDHGGRIVEFHYEGIFLEVLESLGEMPLPPYIHEKLEDQERYQTVYAKENGSAAAPTAGLHFTQELLEKIEAKGVKLVYLTLHVGLGTFRPVSVDMIEDHEMHSEFYQFSEEAAETLRQVKAAGGRIVAVGTTSIRTLETIGNKFDGQIQADSGWTNIFIKPGYQFKIVDAFSTNFHLPKSTLVMLVSAFAGREFVLEAYKHAVEEHYRFFSFGDAMFVK

SEQ ID NO: 72622 - protein, 347 aa, Streptococcus sp.
  REGION 1..347: note = tr|A0A1F0BPG0|A0A1F0BPG0_9STRE S-adenosylmethionine:tRNA ribosyltransferase-isomerase; OS = Streptococcus sp. HMSC078H03 OX=1715086 GN=queA PE=3; SV = 1
MNTNDFDFELPEELIAQTPLEQRDASKLLVIDPVTKEMTDTHFDHIIDQLNPGDALVMNNTRVLPARLYGEKPDTHGHVEFLLLKNTQGDQWEVLAKPAKRLKVGAKVSFGDGRLTATVTEELDHGGRIVEFSYDGIFLEVLESLGEMPLPPYIHEKLEDRDRYQTVYAKENGSAAAPTAGLHFTPELLQKIEAKGVKLVYLTLHVGLGTFRPVSVDNVDEHEMHSEFYTLSQDAADTLNSVKAAGGRIIAVGTTSIRTLETIGNKYDGQLQADSGWTNIFIKPGYQFTVVDAFSTNFHLPKSTLVMLVSAFAGREFVLDAYKHAVQERYRFFSFGDAMFVTRPAEK

SEQ ID NO: 72623 - protein, 342 aa, Streptococcus sp.
  REGION 1..342: note = tr|D2EQ92|D2EQ92_9STRE S-adenosylmethionine:tRNA ribosyltransferase-isomerase OS=Streptococcus sp. M143; OX = 563037 GN=queA PE=3 SV=1
MNTADFDFHLPEELIAQTPLEKRDASKLLIVNRETGEFQDKHFHSIIDMLEPGDALVMNDTRVLPARLYGQKEETGGHVELLLLKNTAGDEWEVLAKPAKRLKVGTRVSFGDGRLSAVVTEELTHGGRIVRFEYQGIFLEVLESLGEMPLPPYIHEKLDDRERYQTVYAKESGSAAAPTAGLHFTKELLAEIQAKGVHLVYLTLHVGLGTFRPVSVDNLDEHEMHSEFYQLSDEAAATLRSVKENGGRVIAVGTTSIRTLETIGSKFDGQIQADSGWTNIFIKPGYEWKVVDAFSTNFHLPKSTLVMLVSAFAGRDLVLDAYHHAIQEHYRFFSFGDAMFIY

SEQ ID NO: 72624 - protein, 342 aa, Streptococcus suis
  REGION 1..342: note = tr|A0A0Z8GRS5|A0A0Z8GRS5_STRSU S-adenosylmethionine:tRNA ribosyltransferase-isomerase; OS = Streptococcus suis OX=1307 GN=queA PE=3 SV=1
MNTADFDFDLPEELIAQVPLEKRDSSKLLILDREKRSMVDSHFDHIIDQLNPGDALVMNNTRVLPARLYGYKPETMGHVELLLLKNTQGDQWEVLAKPAKRLKVGTTVAFGDGRLTATIVEELEHGGRIVEFSYEGIFLEVLESLGEMPLPPYIHEKLEDRERYQTVYAKENGSAAAPTAGLHFTQELLEKIEAKGVKLVYLTLHVGLGTFRPVSVDNVDEHEMHSEFYNLSAEAAQTLNQVKDSGGRIIAVGTTSIRTLETIGNKFDGRLEADSGWTNIFIKPGYTFRIVDAFSTNFHLPKSTLVMLVSAFAGREFTLDAYKHAVEERYRFFSFGDAMFIQ

SEQ ID NO: 72625 - protein, 342 aa, Streptococcus suis
  REGION 1..342: note = tr|U5UJC1|U5UJC1_STRSU S-adenosylmethionine:tRNA ribosyltransferase-isomerase OS=Streptococcus suis T15; OX = 1340847 GN=queA PE=3 SV=1
MNTADFDFDLPEELIAQVPLEKRDSSKLLILDREKRSMVDSHFDHIIDQLNPGDALVMNNTRVLPARLYGYKPETMGHVELLLLKNTQGDQWEVLAKPAKRLKVGTTVAFGDGRLTATIVEELEHGGRIVEFSYEGIFLEVLESLGEMPLPPYIHEKLEDRERYQTVYAKENGSAAAPTAGLHFTQELLEKIEAKGVKLVYLTLHVGLGTFRPISVDNVDEHEMHSEFYNLSAEAAQTLNQVKDSGGRIVAVGTTSIRTLETIGNKFDGRLEADSGWTNIFIKPGYNFRIVDAFSTNFHLPKSTLVMLVSAFAGREFTLDAYKHAVEERYRFFSFGDAMFIQ

SEQ ID NO: 72626 - protein, 347 aa, Streptococcus thermophilus
  REGION 1..347: note = sp|Q5M5E8|QUEA_STRT2 S-adenosylmethionine:tRNA ribosyltransferase-isomerase OS=Streptococcus thermophilus (strain ATCC BAA-250 / LMG 18311) OX=264199 GN=queA PE=3; SV = 1
MNTNDFDFELPEELIAQTPLEQRDASKLLVIDPVTREMTDTHFDHIIDQLNPGDALVMNNTRVLPARLYGEKTDTHGHVEFLLLKNTQGDQWEVLAKPAKRLKVGAKVSFGDGRLTATVTEELDHGGRIVEFSYNGIFLEVLESLGEMPLPPYIHEKLEDRDRYQTVYAKENGSAAAPTAGLHFTPELLQKIEAKGVKLVYLTLHVGLGTFRPVSVDNVDEHEMHSEFYTLSQEAADTLNSVKAAGGRIVAVGTTSIRTLETIGNKYDGQLQADSGWTNIFIKPGYQFTVVDAFSTNFHLPKSTLVMLVSAFAGREFVLEAYKHAIQERYRFFSFGDAMFVTRPSEK

SEQ ID NO: 72627 - protein, 347 aa, Streptococcus thermophilus
  REGION 1..347: note = sp|Q5M0W1|QUEA_STRT1 S-adenosylmethionine:tRNA ribosyltransferase-isomerase OS=Streptococcus thermophilus (strain CNRZ 1066) OX=299768 GN=queA PE=3 SV=1
MNTNDFDFELPEELIAQTPLKQRDASKLLVIDPVTREMTDTHFDHIIDQLNPRDALVMNNTRVLPARLYGEKTDTHGHVEFLLLKNTQGDQWEVLAKPAKRLKVGAKVSFGYGRLTATVTEELDHGGRIVEFSYDGIFLEVLESLGEMPLPPYIHEKLEDRDRYQTVYAKENGSAAAPTAGLHFTPELLQKIEAKGVKLVYLTLHVGLGTFRPVSVDNIDEHEMHSEFYTLSQEAADTLNSVKTAGGRIVAVGTTSIRTLETIGNKYDGQLQADSGWTNIFIKPGYQFTVVDAFSTNFHLPKSTLVMLVSAFAGREFVLEAYKHAVQERYRFFSFGDAMFVTRPSEK

SEQ ID NO: 72628 - protein, 342 aa, unidentified
  source 1..342: note = Streptococcus troglodytae
  REGION 1..342: note = tr|A0A1L7LKK0|A0A1L7LKK0_9STRE S-adenosylmethionine:tRNA ribosyltransferase-isomerase; OS = Streptococcus troglodytae OX=1111760 GN=queA PE=3 SV=1
MNTSDFDFNLPEALIAQTPLKQRDSSRLLVVDHQKKTMKDTHFDHIIDELNSGDALVMNDTRVLPARLHGEKTVTHGHVELLLLKNIQGDQWEVLAKPAKRLKVGSHISFGDGRLKATIKEELDHGGRIVEFSYEGIFLEVLESLGEMPLPPYIHEKLEDRDRYQTVYAKENGSAAAPTAGLHFTEELLSKIEAKGVKLVYLTLHVGLGTFRPVSVDNVEEHQMHSEFYSLSPEAAQTLKDVKANGGRIVAVGTTSIRTLETIGNKFAGQIEADSGWTNIFIKPGYQFKIVDAFSTNFHLPKSTLVMLVSAFAGRDFILKAYKHAVDKHYRFFSFGDAMFVK

SEQ ID NO: 72629 - protein, 342 aa, Streptococcus uberis
  REGION 1..342: note = tr|A0A380MJT1|A0A380MJT1_STRUB S-adenosylmethionine:tRNA ribosyltransferase-isomerase; OS = Streptococcus uberis OX=1349 GN=queA PE=3 SV=1
MHTNDFDFDLPEELIAQTPLEKRDSSRLLIIDHQTKEMTDSHFDQIIDQLNPGDALVMNNTRVLPARLHGEKPDTHGHVELLLLKNTKEDQWEVLAKPAKRLKVGSQVSFGDGRLTATVIEELDHGGRIVEFSYSGIFLEVLESLGEMPLPPYIHEKLEDSERYQTVYAKENGSAAAPTAGLHFTEALLKKIKDKGVHLVYLTLHVGLGTFRPVSVDSVDEHEMHSEFYHLSEEAAQTLRQVKANGGRVVAVGTTSIRTLETIGTKFDGDIQADSGWTNIFIKPGYQFKVVDAFSTNFHLPKSTLVMLVSAFAGREFVLEAYQHAVDEKYRFFSFGDAMFVK

SEQ ID NO: 72630 - protein, 342 aa, Streptococcus uberis
  REGION 1..342: note = tr|B9DUQ3|B9DUQ3_STRU0 S-adenosylmethionine:tRNA ribosyltransferase-isomerase OS=Streptococcus uberis (strain ATCC BAA-854 / 0140J) OX=218495 GN=queA PE=3 SV=1
MHTNDFDFDLPEELIAQTPLEKRDSSRLLIIDHQTKEMTDSHFDQIVDQLNPGDALVMNNTRVLPARLHGEKPDTHGHVELLLLKNTKEDQWEVLAKPAKRLKVGSKVSFGDGRLTATVIEELDHGGRIVEFSYSGIFLEVLESLGEMPLPPYIHEKLEDSERYQTVYAKENGSAAAPTAGLHFTEALLKKIKDKGVHLVYLTLHVGLGTFRPVSVDSVDEHEMHSEFYHLSEEAAQTLRQVKANGGRLVAVGTTSIRTLETIGTKFDGDIQADSGWTNIFIKPGYQFKVVDAFSTNFHLPKSTLVMLVSAFAGREFVLEAYQHAVNEKYRFFSFGDAMFVK

SEQ ID NO: 72631 - protein, 342 aa, Streptococcus urinalis
  REGION 1..342: note = tr|G5KDK6|G5KDK6_9STRE S-adenosylmethionine:tRNA ribosyltransferase-isomerase OS=Streptococcus urinalis 2285-97 OX=764291 GN=queA PE=3 SV=1
MNTNDFDFFLPEELIAQTPLEKRDSSKLLVIDHQTHEMTDSHFDHIIDQLNPGDALVMNNTRVLPARLYGEKPDTHGHVELLLLKNTSGDKWEVLAKPAKRLRVGATISFGDGRLSATVCDELEHGGRIVEFSYQGIFLEVLESLGEMPLPPYIHEKLEDQERYQTVYAKENGSAAAPTAGLHFTKELLERIEEKGVKLVYLTLHVGLGTFRPVSVDNVDNHQMHSEFYQLTEDAADTLNEVKRSGGRIVAVGTTSIRTLETIGTKFNGGIKADSGWTDIFIKPGYQFKVVDAFSTNFHLPKSTLVMLVSAFAGRDFVLDAYKHAVDEKYRFFSFGDAMFVK

SEQ ID NO: 72632 - protein, 342 aa, unidentified
  source 1..342: note = Streptococcus varani
  REGION 1..342: note = tr|A0A0E4CSM1|A0A0E4CSM1_9STRE S-adenosylmethionine:tRNA ribosyltransferase-isomerase; OS = Streptococcus varani OX=1608583 GN=queA PE=3 SV=1
MNTNDFDFELPDELIAQTPLEVRDSSRLLILDRKNKSMTDSHFDSILDQLQPGDALVMNNTRVLPARLYGEKPETHGHVELLLLKNTQADQWEVLAKPAKRLRVGAQISFGDGRLMATVLEELEHGGRIVEFSYDGIFLEVLESLGEMPLPPYIHEKLKDRDRYQTVYAKENGSAAAPTAGLHFTKELLEQIEAKGVKLVYLTLHVGLGTFRPVSVDNLDEHEMHSEYYQLSQEGADTLNQVKENGGRVVAVGTTSIRTLETIGNKFDGKLVADSGWTSIFIKPGYQFKVVDAFSTNFHLPKSTLVMLVSAFAGKDFVLEAYRHAVHEKYRFFSFGDAMFLS

SEQ ID NO: 72633 - protein, 347 aa, Streptococcus vestibularis
  REGION 1..347: note = tr|A0A3S4MNJ0|A0A3S4MNJ0_STRVE S-adenosylmethionine:tRNA ribosyltransferase-isomerase; OS = Streptococcus vestibularis OX=1343 GN=queA PE=3 SV=1
MNTNDFDFELPEELIAQTPLEQRDASKLLVIDPVTKEMTDTHFDHIIDQLNPGDALVMNNTRVLPARLYGEKPDTHGHVEFLLLKNTQGDQWEVLAKPAKRLKVGAKVSFGDGRLTATVTEELDHGGRIVEFSYNGIFLEVLESLGEMPLPPYIHEKLEDRDRYQTVYAKENGSAAAPTAGLHFTPELLQKIEAKGVKLVYLTLHVGLGTFRPVSVDNVDEHEMHSEFYTLSQEAADTLNSVKATGGRIVAVGTTSIRTLETIGNKYNGRLQADSGWTNIFIKPGYQFTVVDAFSTNFHLPKSTLVMLVSAFAGREFVLDAYKHAVQERYRFFSFGDAMFVTRRAGK

SEQ ID NO: 72634 - protein, 347 aa, Streptococcus vestibularis
  REGION 1..347: note = tr|E8KW86|E8KW86_STRVE S-adenosylmethionine:tRNA ribosyltransferase-isomerase OS=Streptococcus vestibularis ATCC 49124 OX=889206 GN=queA PE=3 SV=1
MNTNDFDFELPEELIAQTPLEQRDASKLLVIDPVTKEMTDTHFDHIIDQLNPGDALVMNNTRVLPARLYGEKNDTHGHVEFLLLKNTQGDQWEVLAKPAKRLKVGAKVSFGDGRLTATVTEELDHGGRIVEFSYDGIFLEVLESLGEMPLPPYIHEKLEDRDRYQTVYAKENGSAAAPTAGLHFTPELLQNIEAKGVKLVYLTLHVGLGTFRPVSVDNVDEHEMHSEFYTLSQEAADTLNSVKATGGRIVAVGTTSIRTLETIGNKYNGRLQADSGWTNIFIKPGYQFTVVDAFSTNFHLPKSTLVMLVSAFAGREFVLDAYKHAVQERYRFFSFGDAMFVTQRAGK

SEQ ID NO: 72635 - protein, 342 aa, unidentified
  source 1..342: note = Streptococcus viridans
  REGION 1..342: note = tr|A0A447Z3R4|A0A447Z3R4_9STRE S-adenosylmethionine:tRNA ribosyltransferase-isomerase; OS = Streptococcus viridans OX=78535 GN=queA PE=3 SV=1
MNTNDFDFHLPEELIAQTPLEKRDASKLLILNRQTGQMEDQHFDAIINELEPGDALVMNNTRVLPARLHGVKPDTGGHVELLLLKNIEGDQWEVLAKPAKRLKEGGVVSFGDGRLQATLIKKLEHGGCIVEFSYQGIFLEVLESLGEMPLPPYIHEKLEDQERYQTVYAKENGSAAAPTAGLHFTPELLQKIEDKGVHLVYLTLHVGLGTFRPVSVDDLDQHEMHSEFYQLSEEAAQTLRQVKASGHRIVAVGTTSIRTLETIGNKFNGELQADSGWTNIFIKPGYQWQVVDAFSTNFHLPKSTLVMLVSAFAGRELTLDAYQHAIDQGYRFFSFGDAMFIK

SEQ ID NO: 72636 - protein, 342 aa, unidentified
  source 1..342: note = Streptococcus viridans
  REGION 1..342: note = tr|A0A380M4A3|A0A380M4A3_9STRE S-adenosylmethionine:tRNA ribosyltransferase-isomerase; OS = Streptococcus viridans OX=78535 GN=queA PE=3 SV=1
MNTADFDFHLPEELIAQTPLEKRDASRLLVVNHETGQMEDTHFDAIIDQLNPGDALVMNDTRVLPARLHGEKPETGGHVELLLLKNIAGDDWEVLAKPAKRLKVGAAISFGDGRLTATVLEELEHGGRTVRFHYQGIFLEVLESLGEMPLPPYIHEKLKDRERYQTVYAKENGSAAAPTAGLHFTKELLAQIEAKGVKLVYLTLHVGLGTFRPVSVDNVDEHEMHSEFYTLSEEAANTLRQVKASGHRVVAVGTTSIRTLETIGSKFNGEIKADSGWTNIFIKPGYDWKVVDAFSTNFHLPKSTLVMLVSAFAGRELVLSAYQHAIDEKYRFFSFGDAMFIK

SEQ ID NO: 72637 - protein, 342 aa, Streptohalobacillus salinus
  REGION 1..342: note = tr|A0A2V3W9V6|A0A2V3W9V6_9BACI S-adenosylmethionine:tRNA ribosyltransferase-isomerase; OS = Streptohalobacillus salinus OX=621096 GN=queA PE=3 SV=1
MNIEDFDFDLPEELIAQTPLLDRTASRLLVMDRASRTIEHRHFKDILDYLNAGDCLVLNNTKVLPARLYGIKEDTGAKVEMLLLTQKQDDAWEVLVKPAKKVKVGTKISFGQGKLMATCTDVLEHGGRLVRFSYEGIFLEVLTELGEMPLPPYIKEQLEDQDRYQTVYAKEEGSAAAPTAGLHFTNALLEQAQQQGIEIAFVTLHVGLGTFRPVSVTDPEKHDMHSEFYLVTAEEAAKIQAVKNRGNRVFAVGTTSTRTLETIARDHEGKIVEASGWTDIFIYPPYQFKAIDGLITNFHLPKSTLVMLVSALSDRDFIMEAYHAAITEKYRFFSFGDAMFIK

SEQ ID NO: 72638 - protein, 378 aa, unidentified
  source 1..378: note = Streptomyces actuosus
  REGION 1..378: note = tr|A0A2U9NZH9|A0A2U9NZH9_STRAS S-adenosylmethionine:tRNA ribosyltransferase-isomerase; OS = Streptomyces actuosus OX=1885 GN=DMT42_08195 PE=3 SV=1
MTLAQRVPEQLSARVPAEQRGPGLDRDAVRLLVSRGTEVAHHAFRELPALLRAGDVLVVNTSPTLAAAVDGWLGHARVVVHFSTRGDDGRWAVELREPDGRGTTRARAGTYAGEEVRLPGRLRLLLQEPVSAGSGRLWWARVSGGAAGAAEAAGRAVPGLLREYGRPIRYSYTERDQPLPVYQTVFAVPSPDGAGSAEMPSAGRPFTARTVLELVRRGVQFAPVTLHTGVASAEAHEPPYPERFAVPEASARAVNVARAGGGRVVAVGTTAVRAVESAAGADGVVRARAGWTDLVVTPERGVRVVDGLLTGLHEPEASHLLMLEAVAGAAAVRRAYEEALRGRYLWHEFGDVHLVLPEEALTQSIAPATGGETATGPM

SEQ ID NO: 72639 - protein, 347 aa, Streptomyces afghaniensis
  REGION 1..347: note = tr|S4MZY9|S4MZY9_9ACTN S-adenosylmethionine:tRNA ribosyltransferase-isomerase OS=Streptomyces afghaniensis 772 OX=1283301 GN=STAFG_3362 PE=3 SV=1
MTLAVRIPEELSARVPVEQREPGLDRDAVRMLVSRGVEVAHHTFPELPRLLRAGDLLVVNTSATLAAAVDGWIGHARVVVHFSTRGDDGRWAVELREPDGRGTTRARAGGPAGTGVCLPGGGWLVLEEPLSGRSRRLWWARVAGPGVPGLLREHGRPIRYSYTERDQPLSVYQTVFALPSEDGAGSAEMPSAARPFTGRLVAELVSRGVQFAPVTLHTGVASAEAHEPPYPERFAVSETSARLINAVRAGGGRIVAVGTTAVRAVESAAGADGVVRPRSGWTDLVVTPERGVLVVDGLLTGLHEPEASHLLMLEAVAGREAIRRGYEAAVRGRYLWHEFGDVHLVLP

SEQ ID NO: 72640 - protein, 354 aa, unidentified
  source 1..354: note = Streptomyces agglomeratus
  REGION 1..354: note = tr|A0A1E5PJM4|A0A1E5PJM4_9ACTN S-adenosylmethionine:tRNA ribosyltransferase-isomerase; OS = Streptomyces agglomeratus OX=285458 GN=AS594_26760 PE=3; SV = 1
MPGGLVARVPAEERGSGRDDVRLLVSRGAEVSHHRFRELGALLRAGDVLVVNTSPTLAAAVDGWVEPAGAGPGERVVVHFSTRGDDRRWAVELRGPLESGATRPRAGGPAGTVVRLPGGGLLVLEEPLAPGGERLWWARVSGGEVPELMRAHGRPIRYAYTERDQPLSAYQTVFARPSPDGSGSAEMPSAGRPFTAAAVAELVNRGVRFAPLTLHTGVASAEAHEPPYPERFEVPASTAGMVNAARAAGGRVVAVGTTAVRALESAAGPGGVVREAGGWTGLVVTPERGVRVVDGLLTGLHEPRASHLLMLEAVAGRAALGRAYTEALSLLYLWHEFGDVHLVLPEEAPGRGSR

SEQ ID NO: 72641 - protein, 365 aa, Streptomyces albidoflavus
  REGION 1..365: note = tr|A0A5C6I3M5|A0A5C6I3M5_9ACTN S-adenosylmethionine:tRNA ribosyltransferase-isomerase; OS = Streptomyces albidoflavus OX=1886 GN=FRZ02_18005 PE=3; SV = 1
MSARAVVGRVPGELSARVPVEEREPGRGRDGVRLLVSAGEREPRVGWFTELPGLLRAGDLLVVNTSATLPAAADGRLGGEPVVVHFSTRADGAGPGERWAVELRSPDGRGTTGPRPGGPAGAVVTLTDGARLELVEPLAPGAERLWWARAGGFGAADGSGSAVVAWLRRLGRPIRYAYTERDQPLAAYRTVFAAAGEDGGGSAEMPSAGRPFTARTVTELVRAGVQFAPVTLHTGVASAEAHEPPYPERYAVSPHAAWLVNAVRAGGGRVIAVGTTAVRALESAVGPDGRVRAASGWTGLVVTPERGVRVVDGLLTGLPEPEASHLLMLEAVAGAAAVERGYAAAVRARLLWHEFGDVHLLTRRG

SEQ ID NO: 72642 - protein, 267 aa, Streptomyces albidoflavus
  REGION 1..267: note = tr|A0A126Y9M2|A0A126Y9M2_9ACTN S-adenosylmethionine:tRNA ribosyltransferase-isomerase; OS = Streptomyces albidoflavus OX=1886 GN=Salbus254_5283; PE = 3 SV=1
MGGRAALAGRARDDGAAPGGPAGAVVALADGARLELVEPLAPGAERLWWARAGGFGAADGSGSAVVAWLRRHGRPIRYAYTERDQPLAAYRTVFAAAGEDGGGSAEMPSAGRPFTARTVTELVRAGVQFAPVTLHTGVASAEAHEPPYPERYAVSPHAAWLVNAVRAGGGRVIAVGTTAVRALESAVGPDGRVRAASGWTGLVVTPERGVRVVDGLLTGLHEPEASHLLMLEAVAGAAAVERGYAAAVRARLLWHEFGDVHLLTRRG

SEQ ID NO: 72643 - protein, 357 aa, Streptomyces albulus
  REGION 1..357: note = tr|A0A1A9QG83|A0A1A9QG83_STRA9 S-adenosylmethionine:tRNA ribosyltransferase-isomerase; OS = Streptomyces albulus OX=68570 GN=A4V12_30165 PE=3 SV=1
MSVPTALRVPAELSARVPAEQRGSGRDDVRLMVSRGTAVSHHAFRELPGLLRAGDVLVVNTSPTLAAAVTGRLGGDGGETVVVHFSTWGDDGRWSVELRNPDGRGTTRPRRGGPAGAVVRLPGGAQLVLEESLVAGPSGGGRLWWASVSVGVPGLLAGYGRPIRYGYTDRDQSPAAYQTVFARPARDGAGSAEMPSAARPFTAGLVTELVSRGVQVAPVVLHTGVASAEAHEPPYPERFEVPESTAWLVGAARAGGGRIVAVGTTAVRALESAAGEDGVVRPAGGWTDLVVTPRRGVRAVDGLLTGLHEPEASHLLLLEAVAGREALGLAYAEALRRRYLWHEFGDVHLVLPEEAPH

SEQ ID NO: 72644 - protein, 371 aa, Streptomyces albus
  REGION 1..371: note = tr|A0A0X7JM26|A0A0X7JM26_9ACTN S-adenosylmethionine:tRNA ribosyltransferase-isomerase; OS = Streptomyces albus subsp. albus OX=67257 GN=ADL21_14800; PE = 3 SV=1
MTAEVLRVPPELSAREPAEQRAPGRGRDAVRLLVSRGTAEPSHHTFKELPRLLSAGDVLVVNTSRTLPAALDGRLGDGRGRGEPVVVHFSTRADRQHPRPEAAAGDWAVELRTPDGCGSTRQRAGGPAGTVVRLPGGARLELRAPVERGSVRLWWARVSGAPVADLLPRYGRPIRYGYTDRDQPLDAYQTVFAVGSPDGGGSAEMPSAARPFTASLVARLVSRGVQIAPVTLHTGVASAEAYEPPYPERFAVPPSTAWQINAARAGGGKVVAVGTTAVRALETAADADGRIRAASGWTELVVTPEHGVRAVDGLLTGLHEPQASHLLMLEAVGQVAAGADFGDALCRAYAEAVRRRYLWHEFGDLHLILPS

SEQ ID NO: 72645 - protein, 347 aa, Streptomyces albus
  REGION 1..347: note = tr|A0A0B5F7L1|A0A0B5F7L1_STRA4 S-adenosylmethionine:tRNA ribosyltransferase-isomerase; OS = Streptomyces albus (strain ATCC 21838 / DSM 41398 / FERM P-419 / JCM 4703 /NBRC 107858) OX=1081613; GN = SLNWT_6076 PE=3 SV=1
MSLGLRVPEELSARIPAEQRGPGRDQGSVRLLVSYGTRVTHHRFAELPGLLRRGDVLVVNTSPTLAAAVDGRADGEAVVVHFSTRGDDGRWAVEIREPDGTGATRRRPGPGPARVRLPGGALLALEEPLDPAGGRLRWARLRGAGVPALLRVHGRPIRYGYTARDQPLSAYQSVFSLPAADGTGSAEMPSAARPFTAPLVAELVSRGVQFAPVRLDTGVASAEVQEPPYPERFEVSGASARLINAARRERGGRVVAVGTTAVRAVESAVGPDGLVRALHGWTPLVVTPGRGVRAVDGLLTGMHEPEASHLLMLEAIAGAPALRGAYAAALRERYLWHEFGDSHLLFP

SEQ ID NO: 72646 - protein, 363 aa, unidentified
  source 1..363: note = Streptomyces alfalfae
  REGION 1..363: note = tr|A0A1P8TMZ5|A0A1P8TMZ5_9ACTN S-adenosylmethionine:tRNA ribosyltransferase-isomerase; OS = Streptomyces alfalfae OX=1642299 GN=A7J05_27910 PE=3; SV = 1
MSVVGAWPRVPEGLHARVPAEQRGPGLGRDSVRLLLSRGTEVSHHAFRELPALLRAGDLLVVNTSRTLPAAVDGRLGHARVVVHFSTRGADGRWAVELRDPDGRGTTRARAGGPAGATVRFPGSVSLVWEEPLAAESRRLWWVRVAGDVPALLRRHGRPIRYRYTDRDQPLAAHQTVFALPSADGAGSAEMPSAGRPFTAAMVAELVSRGVQFAPVTLHTGVASQEAHEPPYPEPFEVPGTSAALINAARAGGGRVIAVGTTAVRAVESAAGADGVVRAASGRTELVVTPERGVRVVDGLLTGLHEPEASHLLMLEAVAGRAAIERGYAEAVRRLYLWHEFGDVHLILRSENTDREHCKGNVQ

SEQ ID NO: 72647 - protein, 374 aa, Streptomyces alni
  REGION 1..374: note = tr|A0A1I2GGG4|A0A1I2GGG4_9ACTN S-adenosylmethionine:tRNA ribosyltransferase-isomerase; OS = Streptomyces alni OX=380248 GN=SAMN05216251_10916 PE=3; SV = 1
MSAAPRTVGTKQAAHIKGTRVSNKDIGRGTGGLAGLRVPDSLLATAPAARRDAVRLLVGERRTGAVAQHAFRALPELLRAGDVLVVNTSRTLPAAVDGRLDGAPVVVHFSTRGADGRWVVEVRDPDGHGSTVRRTGGPAGAVVELAGGTRLVLAEPLDPAADRLWVARPTDWDPIAYMRRHGRPIRYGYTERDQPLAAYQTVFAVPSPDGTGSAEMPSAGRPFTRALVTELVSRGVQIAPITLHTGVASVESHEPPYAEPFAVSAATARQVNAARAGGGRVVAVGTTAVRALESVADERGVVRPGGGWTELVVTPERGVRAVDGLLTGLHEPEASHLLMLRALSGDRLLERVYAEALRGGYRWHEFGDVNLLLP

SEQ ID NO: 72648 - protein, 370 aa, Streptomyces ambofaciens
  REGION 1..370: note = tr|A0A0K2AP80|A0A0K2AP80_STRA7 S-adenosylmethionine:tRNA ribosyltransferase-isomerase; OS = Streptomyces ambofaciens (strain ATCC 23877 / 3486 / DSM 40053 / JCM 4204 /NBRC 12836 / NRRL B-2516) OX=278992; GN = SAM23877_
MTLVLRVPEELSARVPVEQRGPGLDRDGVRLLVSRGTEVSHHGFRELPGLLRAGDLLVVNTSVTLAAAVDGHIGRAPVVVHFSTRGDDGRWAVELRDPDGRGTTRPRARAGTRAGKERQAPPPADGGGGRAGSLRGTEVRLPEGARLVLEEPLSARGERLWWARVSGADVPVVLREHGRPIRYSYTERDQPLSVYRTVFALPSEDGAGSAEMPSAARPFTARLVAELVSRGVQFAPVTLHTGVASAEAHEPPYPERFVVPEASAQLVNAARAGGGRVVAVGTTAVRAVESAAGADGVVRARAGWTDLVVTPERGVRAVDGLLTGLHDPEASHLLMLEAVAGRAAIDRGHEAAMKGRYLWHEFGDAHLLLP

SEQ ID NO: 72649 - protein, 361 aa, Streptomyces antibioticus
  REGION 1..361: note = tr|A0A1S9NWZ3|A0A1S9NWZ3_STRAT S-adenosylmethionine:tRNA ribosyltransferase-isomerase; OS = Streptomyces antibioticus OX=1890 GN=AFM16_09375 PE=3; SV = 1
MGVPPREPVRAWGSVPEELSARVPAEQRGPGRGRDDVRLLVSWGTEVAHRGFRELPELLRAGDVLVVNTSMTLAAAVDGWIGHARVVVHFSTRGDDGRWAVELRDPDGKGTTRARAGGPAGARVRLPGGVRLVPAEALSPGSGRLWWARVSGGEVPELLREHGRPIRYAYTERDQPLSAYRTVFALPSADGAGSAEMPSAARPFTAGLVAELVSRGVRFAPVVLHTGVASAEAHEPPYPERFAVPEASARLIEATRAGRGRVIAVGTTAVRAVESAAGADGVVRARAGWTDLVVTPERGVRVVDGLLTGLHEPQASHLLMLEAVAGRAAIDRGYEEALRGRYLWHEFGDAHLLLPAEERSR

SEQ ID NO: 72650 - protein, 365 aa, Streptomyces antibioticus
  REGION 1..365: note = tr|A0A101PXK7|A0A101PXK7_STRAT S-adenosylmethionine:tRNA ribosyltransferase-isomerase; OS = Streptomyces antibioticus OX=1890 GN=AQJ23_36900 PE=3; SV = 1
MTLALRVPAELSARVPAEQRGPGLDRDAVRLLVSRGTEVAHHAFAELPCLLRAGDLLVVNTSPTLAAAVDGRIGHARVVVHFSTRGDDGRWAVELREPDGRGTTRARAGGPAGTEVRLPEGVRLTLEEPLSARGERLWWARVAGAGVPGLLREYGRPIRYSYTERDQPLSAYQTVFALPQPGGAGSAEMPSAARPFTARLVAELVSRGVQFAPITLHTGVASAEAHEPPYPERFAVPEASARLINAVKAGDGRVVAVGTTAVRAVESATGGDGIVRAREGWTDLVVTPERGVRVVDGLLTGLHEPEASHLLMLRAVAGRAAVDRGYEEAVRGLYLWHEFGDVHLLLPEEAGPEGPHAEHCFSNCR

SEQ ID NO: 72651 - protein, 347 aa, Streptomyces asterosporus
  REGION 1..347: note = tr|A0A514JWU5|A0A514JWU5_9ACTN S-adenosylmethionine:tRNA ribosyltransferase-isomerase; OS = Streptomyces asterosporus OX=285570 GN=CD934_26650 PE=3; SV = 1
MTLTVRVPEELSARVPVEQRGPGLDRDSVRLLVSRGTAVSHHAFVELPRLLRAGDLLVVNTSPTLAAAVDGWLGGTRVVVHFSTRGDDGRWAVELRDPDGRGTTRARAGVRAGDEVRLVGGAGLVVEEPLSTRGERLWRARVTRDVLGVLREHGRPVRYAYTERDQPLSAYQTVFALPSPDGAGSAEMPSAGRPFTGRTVAELVSRGVQFAPVTLHAGLASGEAHEPPYPERFVVPEASARLVGAVRAGGGRVIAVGTTAVRAVESAAGADGVVRAAAGWTGLVVTPERGVRVVDGLLTGLHEPEASHLLMLEAVAGRAAVDRGYEEALRGRYLWHEFGDVHLVLPG

SEQ ID NO: 72652 - protein, 389 aa, Streptomyces aurantiacus
  REGION 1..389: note = tr|S3ZUY1|S3ZUY1_9ACTN S-adenosylmethionine:tRNA ribosyltransferase-isomerase OS=Streptomyces aurantiacus JA 4570 OX=1286094 GN=STRAU_0374 PE=3 SV=1
MTVAVRVPEGLHAALPVEQRGRGLRRDSVRLLVSRGTQVSHHGFGELPHLLRAGDLLVVNTSPTLAAAVDGRLLDARGDQDKGHVRVHARVVVHFSTLGEDGRWAVELRDPDERGTTRARAGGPAGTEVELPGGVRLVCEEPLSADSARLWWARVPTDVPRLLRRHGRPIRYAYTERDQPLSVYQTVFALPSADGTGSAEMPSAARPFTARLVARLVSRGVQFAPVRLHTGVASPEVHEPPYPERFEVPEASARLINAVRAGRERARSASLEGRWRETGGRVVAVGTTAVRAVESAAGPDGVVRAAAGRTDLVVTPERGVRVVDGLLTGLHEPEASHLLMLEAVAGRAAVERGYAEAVRHLYLWHEFGDVHLLLPDEFAHREHCCSNSW

SEQ ID NO: 72653 - protein, 369 aa, Streptomyces auratus
  REGION 1..369: note = tr|J2JW90|J2JW90_9ACTN S-adenosylmethionine:tRNA ribosyltransferase-isomerase OS=Streptomyces auratus AGR0001 OX=1160718 GN=SU9_24547 PE=3 SV=1
MTAALRVPQELSAGVPAEQRGPGLDRDAVRLLVSRGTAEPGHHDFGALPELLAAGDVLIVNTSRTLPAAVDGRVGDGRGRGEPVVVHFSTRADRWHPAGRAMAGHWAVELRSPDGRGSTRPRAGGPAGAVVRLPGGGRLVLEAPVDPGSARLWWARVTGVGVPELMRRHGRPIRYGYTERDQPLAAYQTVFALDGPGGSAEMPSAARPFTAELVTRLVSKGVQCAPVSLHTGVASAEAFEPPYPERFVVPPATAWLVNAVRARRRTAQGGTGGRIVAVGTTAVRALESAAGADGRVRAAAGWTDLVVTPRRGVRAVDGLLTGLHEPTASHLLMLEAVADADVLRRAYAAAVERRYLWHEFGDLHLVLPD

SEQ ID NO: 72654 - protein, 410 aa, Streptomyces avermitilis
  REGION 1..410: note = tr|Q829D7|Q829D7_STRAW S-adenosylmethionine:tRNA ribosyltransferase-isomerase OS=Streptomyces avermitilis (strain ATCC 31267 / DSM 46492 / JCM 5070 / NBRC 14893 / NC IMB 12804 / NRRL 8165 / MA-4680) OX=227882 GN=qu
MGVPPVGRGRAWGKVPEELSARVPAEQRGPGLDRDSVRLLVSRGTEVSHHDFVELPRQLRAGDLLVVNTSPTLAAAVDGRIGHARVVVHFSTRGEDGRWAVELRDPDGRGTTRARTGGPAGTEVRLPDGVRLVLEEPLAGRSERLWWARVSAPGDADVTVLLRGHGRPIRYSYTERDQPLSVYQTVFALPSADGAGSAEMPSAARPFTARLVAELVSRGVQFAPITLHTGVASAEAHEPPYPERFAVPEASARLINAARAHRTPREASSSRGGDGSREGGRVIAVGTTAVRAVESATGTDGVVRPAEGWTDLVVTPERGVRAVDGLLTGLHEPEASHLLMLEALAGRTAIDRSYEEALAGLYLWHEFGDLHLILPDGESSHSALLPQPNVRLPLGRCDPAHRAHITYEEG

SEQ ID NO: 72655 - protein, 388 aa, Streptomyces avermitilis
  REGION 1..388: note = tr|A0A4D4M4C4|A0A4D4M4C4_STRAX S-adenosylmethionine:tRNA ribosyltransferase-isomerase; OS = Streptomyces avermitilis OX=33903 GN=SAV14893_061140; PE = 3 SV=1
MPAEQRGPGLDRDSVRLLVSRGTEVSHHDFVELPRQLRAGDLLVVNTSPTLAAAVDGRIGHARVVVHFSTRGEDGRWAVELRDPDGRGTTRARTGGPAGTEVRLPDGVRLVLEEPLAGRSERLWWARVSAPGDADVTVLLRGHGRPIRYSYTERDQPLSVYQTVFALPSADGAGSAEMPSAARPFTARLVAELVSRGVQFAPITLHTGVASAEAHEPPYPERFAVPEASARLINAARAHRTPREASSSRGGDGSREGGRVIAVGTTAVRAVESATGTDGVVRPAEGWTDLVVTPERGVRAVDGLLTGLHEPEASHLLMLEALAGRTAIDRSYEEALAGLYLWHEFGDLHLILPDGESSHSALLPQPNVRLPLGRCDPAHRAHITYEEG

SEQ ID NO: 72656 - protein, 347 aa, Streptomyces azureus
  REGION 1..347: note = tr|A0A0K8PX16|A0A0K8PX16_STRAJ S-adenosylmethionine:tRNA ribosyltransferase-isomerase; OS = Streptomyces azureus OX=146537 GN=SAZU_7231 PE=3 SV=1
MTPALRVPAELSARVPVEQRGPGVDRDVVRMLVSRGVEVAHHTFTELPRLLRAGDLLVVNTSATLAAAVDGWIGHARVVVHFSTRGDDGRWAVELREPDGRGTTRARAGGPVGTEVCLPGGVRLVLDQPLSGRSERLWWSRVSGPGVPGLLREHGRPIRYAYTERDQPLSVYQTVFAVPSADGAGSAEMPSAARPFTARLVTELVSRGVQFAPVTLHAGVASAEAHEPPYPERFVVPEASARLINAAKAGGGRVVAVGTTAVRAVESAVGGDGVVHGRAGWTDLVVTPERGVRVVDGLLTGLHEPEASHLLMLEAVAGREAIERGYGAAFQGRYLWHEFGDVHLVLP

SEQ ID NO: 72657 - protein, 403 aa, Streptomyces badius
  REGION 1..403: note = tr|A0A328JK33|A0A328JK33_STRBA S-adenosylmethionine:tRNA ribosyltransferase-isomerase; OS = Streptomyces badius OX=1941 GN=A3838_26840 PE=3 SV=1
MTARGRCEGGDVALAAPGRGGAQPGAADSPALDARPGRAGEATALEALRVPDALSARVPAEQRGAGRDDVRLLVSRGRAVAHHAFRELPEQLRAGDVLVVNTSMTLPAAVNGRVGGERVVVHFSTRGADGRWAVELRAPRGAGVTGPRPGGPAGAVVRLPGGRALVLEEPLGPAAGARLWWARAPERVPELLRGYGRPIRYGYTDRDQPLSAYRTVFAVDSPDGSGSAEMPSAARPFTVPLVAELVRRGVLFAPLSLHTGVASAEAHEPPYPERFAVPAATAWLVNAVRAAGSGRVVAVGTTAVRALESAVGEDGVVRPAEGWTDLVVTPRRGVRVVDGLLTGLHEPQASHLLMLEAVAGREALRRGYEAALQERYLWHEFGDVHLILPDEEHNAPDCFSNEW

SEQ ID NO: 72658 - protein, 367 aa, Streptomyces bottropensis
  REGION 1..367: note = tr|M3DEI9|M3DEI9_9ACTN S-adenosylmethionine:tRNA ribosyltransferase-isomerase OS=Streptomyces bottropensis ATCC 25435 OX=1054862 GN=SBD_2370 PE=3 SV=1
MSTVAVGVPEELHARVPAEQRGPGLDRDGVRLLVSCGTRVSHHAFAALPGLLRAGDLLVVNTSPTLAAAVDGTVGHARVVVHFSTRGDDGRWAVELRDPDGRGTTRARAGGPAGTEVVLPGGARLVLEEPLSARGERLWWARVSAPDVAGVLREHGRPIRYSYTERDQPLSVYQTVFALPSRDGAGSAEMPSAGRPFTARLVAELVSRGVQFAPVTLHTGVASAEAHEPPYPERFAVPEASARLINAARANGGRRPGGRVVAVGTTAVRAVESATGPDGVVRARRGWTDLVVTPERGVRVVDGLLTGLHEPEASHLLMLEAVAGRAAVDRSYEAAAEGRYLWHEFGDVHLILPEETPHAEHCASNCR

SEQ ID NO: 72659 - protein, 347 aa, Streptomyces caelestis
  REGION 1..347: note = tr|A0A0M8QLK0|A0A0M8QLK0_9ACTN S-adenosylmethionine:tRNA ribosyltransferase-isomerase; OS = Streptomyces caelestis OX=36816 GN=ADK41_16600 PE=3 SV=1
MTVVVEVPEELSARVPVEQRGPGLDRDSVRLLVSRGTAVSHHAFVELPRLLRAGDLLVVNTSPTLAAAVGGWIGPTRVVVHFSTRGDDGRWAVELRDPDGRGTTRARAGGPAGTEVRLTGGTRLVLEEPLSARGERLWWARVAGDVLGVLREHGRAVRYAYTERDQPLSAYQTVFALPSPDGAGSAEMPSAGRPFTARTVVGLVSRGVQFAPVTLHTGVASGEAHEPPYPERFVVPETSARLIGAVRAGGGRVIAVGTTAVRAVESAAGADGVVRARAGWTDLVVTPERGVRVVDGLLTGLHEPEASHLLMLEAVAGRAAIDRGYEEALRGRYLWHEFGDVHLVLPE

SEQ ID NO: 72660 - protein, 433 aa, Streptomyces caeruleatus
  REGION 1..433: note = tr|A0A101TED1|A0A101TED1_9ACTN S-adenosylmethionine:tRNA ribosyltransferase-isomerase; OS = Streptomyces caeruleatus OX=661399 GN=AQJ67_43725 PE=3; SV = 1
MTLAVRVPEELSARVPAEQRGPGLGRDAVRLLVSRGTDVSHHAFGELPRLLRAGDVLVVNTSQTLAAAVDGWVGHARVVVHFSTRGDDGRWAVELRDPDGRGTTRARTGGPAGTEVRLPGGAGLVLEEPLGPGSGRLWWARASSAGVGRGWGAGEGSGGVWGVGRGGARTGAEGVGGAGAEGVGGAGTEGPGGVGAEGLWGAHPQADGPAAAEEDGTGILRVMREYGRPIRYSYTERDQPLSVYQTVFALPSGDGAGSAEMPSAARPFTMRTVTELVSRGVQFAPVTLHTGVASAEAHEPPYPERFAVPEASARLINAVRAGGGRVVAVGTTAVRAVESAVDADGVVRARAGWTDLVVTPERGVRAVDGLLTGLHEPQASHLLMLEAVAGRAAIERSYEAALQGLYLWHEFGDVHLILPAEGPHAEHCCSNCR

SEQ ID NO: 72661 - protein, 358 aa, Streptomyces canus
  REGION 1..358: note = tr|A0A101SCH8|A0A101SCH8_9ACTN S-adenosylmethionine:tRNA ribosyltransferase-isomerase; OS = Streptomyces canus OX=58343 GN=AQJ46_16710 PE=3 SV=1
MTLAVRVPEELSARLPAEQRGPGLDRDAVRLLVSRGTAVSHHSFGELPRLLRAGDLLVVNTSPTLAAAVDGRIGHVRVVVHFSTRGDDGRWAVELRDPDGRGTTRARAGGPAGTEVRLPGGGRLVLEEAVSERLWWARVCGGEVPGLLREHGRPIRYSYTERDQPLSVYQTVFALPSPDGSGSAEMPSAARPFTARLVAELVSRGVQFAPVSLHTGVASAEAHEPPYPERFSVPEASARLINAVRAGGGRVVAVGTTAVRAVESAAGADGVVRAREGWTDLVVTPERGVRVVDGLLTGLHEPEASHLLMLEAVAGRAAIDRGYEEALRRLYLWHEFGDLHLFLPREEAHAEHCSSNCR

SEQ ID NO: 72662 - protein, 358 aa, Streptomyces canus
  REGION 1..358: note = tr|A0A101PMT2|A0A101PMT2_9ACTN S-adenosylmethionine:tRNA ribosyltransferase-isomerase; OS = Streptomyces canus OX=58343 GN=AQI96_07105 PE=3 SV=1
MTLAVRVPEELSARLPAEQRGPGLDRDAVRLLVSRGTAVSHHSFGELPGLLRAGDLLVVNTSPTLAAAVDGRIGHARVVVHFSTRGDDGRWAVELRDPDERGTTRARAGGPAGTEVRLPGGGRLVLEEAVSERLWWARAGGGDVPGLLREHGRPIRYSYTERDQPLSVYQTVFALPSSDGSGSAEMPSAARPFTARLVAELVSRGVQFAPVSLHTGVASAEAHEPPYPERFSVPEASARLINAVRAGGGRVVAVGTTAVRAVESAAGADGVVRAREGWTDLVVTPERGVRVVDGLLTGLHEPEASHLLMLEAVAGRAAIDRGYEEALRRLYLWHEFGDVHLLLPREEAHAEHCSSNCR

SEQ ID NO: 72663 - protein, 347 aa, unidentified
  source 1..347: note = Streptomyces cattleya
  REGION 1..347: note = tr|F8JXY8|F8JXY8_STREN S-adenosylmethionine:tRNA ribosyltransferase-isomerase OS=Streptomyces cattleya (strain ATCC 35852 / DSM 46488 / JCM 4925 / NBRC 14057 / NRRL8057) OX=1003195 GN=SCATT_09980 PE=3 SV=1
MTASAVRTVRVPPELSARVPPARRDAVRLITGRRSTGEVSHHAFRALPRLLCAGDVLVVNTSPTLPAAVDGVLAGEAVVVHFSTRRDDGRWAVELRTPDGRGTTRARPGGPAGAVVALAGGGRLVLDAPLAAGSDRLWLATVAPADTVAYLRRNGRPIRYGYTERDQPLAAYRTVFSVPSADGLGSAEMPGAGRPFTAGMVAALVSRGVQVAPLTLHTGVASAQAHEPPYPERFAVPESTARLVNAARAGGGRVIAVGTTAVRALESAADEGGRVRAARGWTDLVVTPERGTRVVDGLLTGLHEPEASHLLMLAAVAGVELLDRVYAEAVRERYRWHEFGDVNLLLP

SEQ ID NO: 72664 - protein, 402 aa, Streptomyces cavourensis
  REGION 1..402: note = tr|A0A543VIS5|A0A543VIS5_9ACTN S-adenosylmethionine:tRNA ribosyltransferase-isomerase; OS = Streptomyces cavourensis OX=67258 GN=FHX79_111162 PE=3; SV = 1
MSSLEALRVPPELSARVPAEQRGSGRDDVRLLVTRGTDVSHHAFRELPGQVRAGDVLVVNTSATLPAAVNGRVGGERVVVHFSTRGEDGRWAVELRAPGASGATVPRPGGPAGAAVRLPGGRELVLEEPMGGALSAGGGLPTGPGRAPGRTPALAPGTAEAGPVERRPVGAEPSEGARLWWARVPEGVPGLLRRYGRPIRYGYTERDQPLSAYQTVFAVAAPDGSGSAEMPSAARPFTAALVAELVSRGVQFAPLSLDTGVASAEAHEPPYPERFSVPPTTAWLVNAARAAGGRVIAVGTTAVRALESAVDAEGVVRPVAGWTDLVVTPRRGVRVVDGLLTGLHEPEASHLLMLEAVAGREALRRGYEAALERHYLWHEFGDVHLILPDEERNAPDCSSNVR

SEQ ID NO: 72665 - protein, 361 aa, Streptomyces cellostaticus
  REGION 1..361: note = tr|A0A101NRW3|A0A101NRW3_9ACTN S-adenosylmethionine:tRNA ribosyltransferase-isomerase; OS = Streptomyces cellostaticus OX=67285 GN=AQI88_03645 PE=3; SV = 1
MTVVVRVPEELSARVPAEQRGPGLDRDAVRLLVSRGTEVSHHGFAELPRLLRAGDLLVVNTSSTLAAAVDGRIGHARVVVHFSTRGDDGRWAVELRDPDGRGTTRARAGRPAGTEVGLPGGARLVLEEPLSGHGERLWWARASGAEVLGVLREHGRPIRYSYTERDQPLSVYQTVFALPSPDGTGSAEMPSAARPFTARLVAELVSRGVQFAPVTLHTGVASAEAHEPPYPERFTVPEASARLINAVGAGDGRVIAVGTTAVRAVESATGPDRVVRAADGWTDLVVTPERGVRTVDGLLTGLHEPKASHLLMLEAVAGRTAVDRAYEEALRGLYLWHEFGDVHLILPEEAPHAERCDGNSW

SEQ ID NO: 72666 - protein, 359 aa, Streptomyces chartreusis
  REGION 1..359: note = tr|A0A2N9BHJ9|A0A2N9BHJ9_STRCX S-adenosylmethionine:tRNA ribosyltransferase-isomerase; OS = Streptomyces chartreusis NRRL 3882 OX=1079985 GN=queA; PE = 3 SV=1
MTLAMGVPPHEPVRAWASVPEELSARVPVEQRRPGLDRDAVRMLVSRGVEVAHHTFPELPRLLRAGDLLVVNTSATLAAAVDGWIGHARVVVHFSTRGDDGRWAVELREPDGRGTTRARAGGPAGTEVCLPGGGWLVLEEPLSGRSGRLWWARVTGPGVPGLLREHGRPIRYSYTERDQPLSVYQTVFALPSADGAGSAEMPSAARPFTARLVTELVSRGVQFAPVTLHTGVASAEAHEPPYPERFVVPEASARVINAVRAGGGRIVAVGTTAVRAVESAAGADGVVGARAGWTDLVVTPERGVRVVDGLLTGLHEPEASHLLMLEAVAGREAIRRGYEAAVRGRYLWHEFGDVHFVLP

SEQ ID NO: 72667 - protein, 369 aa, Streptomyces clavuligerus
  REGION 1..369: note = tr|B5H0W6|B5H0W6_STRC2 S-adenosylmethionine:tRNA ribosyltransferase-isomerase OS=Streptomyces clavuligerus (strain ATCC 27064 / DSM 738 / JCM 4710 / NBRC 13307 / NCI MB 12785 / NRRL 3585 / VKM Ac-602) OX=443255 GN=
MRVRTMAERADAPVALRVPDELSAGVPAEVRGAGRDDVRLLVSRGERVSHRVFGELPGLLRAGDVLVVNTSRTLPAAVNGRVQGEPVVVHFSTRGDDGRWAVELRTPDGRGSSLPRAGGPVGAVVRLPGGERLVQEAPLSPGSGRLWWAWVSTPVPELLGRCGRPIRYGYTAGDQPLSAYQTVFARRSPDGSGSAEMPSAARPFTERTVAALVRRGVQFAPVVLHTGVASAEAHEPPYPERFAVPAASAWLVNAARAGGGRILAVGTTAVRALESATGADGVVREASGWTDLVIGPKRGVRAVDGLLTGLHEPAASHLLMLEAIAGRPALSRAYDEALRGLYLWHEFGDVHLVLPDDYPYSLNCWSNAS

SEQ ID NO: 72668 - protein, 366 aa, Streptomyces coelicoflavus
  REGION 1..366: note = tr|H1Q8A7|H1Q8A7_9ACTN S-adenosylmethionine:tRNA ribosyltransferase-isomerase OS=Streptomyces coelicoflavus ZG0656 OX=1120227 GN=SMCF_1091 PE=3 SV=1
MRAPAVRVPEELSARVPVEQRGPGLDRDGVRLLVSHGTEVSHHVFGELPGLLRAGDLLVVNTSPTLAAAVDGRVGHARVVVHFSTRGDDGRWAVELREPDGRGTTRARADAAGITRARADAVEGRGCGGPAGTKVRLPGGARLVLEEPLSARGERLWWARVSRAEVPALLREHGRPIRYSYTERDQPLSVYQTVFAVPPGDGTGSAEMPSAARPFTARLVAELVSRGVQFAPVTLHTGVASAESHEPPYPERFAVPEASARLINAVRAGDGRVVAVGTTAVRAVESAVGSDGVVRARAGWTDLVVTPERGVRVVEGLLTGLHEPEASHLLMLEAVAGRAAIDRGYDAAVRGRYLWHEFGDVHLLLP

SEQ ID NO: 72669 - protein, 358 aa, unidentified
  source 1..358: note = Streptomyces coelicolor
  REGION 1..358: note = tr|A0A4R8NN53|A0A4R8NN53_STRCH S-adenosylmethionine:tRNA ribosyltransferase-isomerase; OS = Streptomyces coelicolor OX=1902 GN=C7986_12213 PE=3 SV=1
MSPLAVRVPEELSARVPAEQRGPGLDRDDVRLLVSRGTEVSHHGFAELPGLLRAGDLLVVNTSPTLAAAVDGRVGHARVVVHFSTRGDDDRWAVELREPDGRGATRARAEAEGVEGRGCGGLAGTKVRLPGGARLVLEEPLSARGERLWWARVSGAEVPALLREHGRPIRYSYTERDQPLSVYQTVFALPYADGTGSAEMPSAARPFTARLVAELVSRGVQFAPVTLHTGVASAESHEPPYPERFAVPEASARLINAVRAGDGRVVAVGTTAVRAVESAAGADGVVRARAGWTDLVVTPERGVRVVDGLLTGLHEPEASHLLMLEAVAGQAAIDRGYEAAVRRRYLWHEFGDVHLLLP

SEQ ID NO: 72670 - protein, 358 aa, unidentified; identical to SEQ ID NO: 72669
  source 1..358: note = Streptomyces coelicolor
  REGION 1..358: note = tr|Q9AJX3|Q9AJX3_STRCO S-adenosylmethionine:tRNA ribosyltransferase-isomerase OS=Streptomyces coelicolor (strain ATCC BAA-471 / A3(2) / M145) OX=100226 GN=SCO1804; PE = 3 SV=1

SEQ ID NO: 72671 - protein, 347 aa, Streptomyces collinus
  REGION 1..347: note = tr|S5US45|S5US45_STRC3 S-adenosylmethionine:tRNA ribosyltransferase-isomerase OS=Streptomyces collinus (strain DSM 40733 / Tu 365) OX=1214242 GN=B446_09340 PE=3; SV = 1
MRVPEELSARVPAEQRGPGLDRDSVRLLVSRGTEVTHHAFAELPRLLRAGDLLVVNTSPTLAAAVDGRIGHARVVVHFSTRGDDGRWAVELRDPDGAGTTRARTGTRAGTEVVLPGAGALVLEEPLSARGERLWWARAAGDVRQALRVHGRPIRYSYTERDQPLPVYQTVFALPSADGAGSAEMPSAARPFTARLVTELVSRGVQFAPVTLHTGVASMEAHEPPYPERFAVPEASARAVEAARAGGGRVIAVGTTAVRALESAAGPDGAVGAARGWTDLVVTPGRGVQVVDGLLTGLHEPEASHLLMLEAVAGRAAVERAYAEALRGRYLWHEFGDVHLILPAEAAH

SEQ ID NO: 72672 - protein, 383 aa, Streptomyces corchorusii
  REGION 1..383: note = tr|A0A117QFR0|A0A117QFR0_STRCK S-adenosylmethionine:tRNA ribosyltransferase-isomerase; OS = Streptomyces corchorusii OX=1903 GN=AQJ11_21045 PE=3; SV = 1
MTVSTGVCPLGPRKRGEVPAELSARVPAEQRGPGLGRDAVRLMVSRGTEVAHHAFSELPGLLRAGDLLVVNTSPTLAAAVDGRIGHARVVVHFSTRGDDGRWAVELREPDGRGTTRARAGSPAGTEVSLPGGGRLLLEEPLSARGERLWWARVAGADVREVLGGHGRPIRYSYTERDQPLSAYQTVFALPSPDGAGSAEMPSAARPFTARLVAELVSRGVWFAPVTLHTGVSSAEAHEPPYPERFSVPEASARLINQVRTRREGLHAPPRAEGGRVIAVGTTAVRAVESAAGPDGVVRAAEGWTDLVVTPERGVRAVDGLLTGLHEPEASHLLMLEAVAGRAAVDRAYEEALRALYLWHEFGDVHLILPVENPHPEHCDGNKK

SEQ ID NO: 72673 - protein, 379 aa, Streptomyces curacoi
  REGION 1..379: note = tr|A0A117PLC0|A0A117PLC0_9ACTN S-adenosylmethionine:tRNA ribosyltransferase-isomerase; OS = Streptomyces curacoi OX=146536 GN=AQI70_00065 PE=3 SV=1
MVTVSLRVPEELSARIPAEQRGPGLDRDAVRLLVSRGTEVSHHAFGELPRVLRSGDLLVVNTSETLAAAVDGRIGHGDVVVHFSTRGDDGRWAVELRDPDERGTTRARAGGSAGTEVRLPGGVRLVLEEPLSAGSERLWWARVGRVRGAGGAGLEERADNPGAVILGLMREHGRPIRYSYTERDQPLSVYRTVFALPSADGTGSAEMPSAARPFTVRMVTELVSRGVQFAPITLHTGVASAEAQEPPYPERFAVSEASARLINAVQAGDGRVVAVGTTAVRAVESAAGADGVVRAHEGWTDLVVTPERGVRVVDGLLTGLHEPQASHLLMLEAVAGRAAIDRSYEAALRGLYLWHEFGDVHLILPADNPHSAHCSSNRR

SEQ ID NO: 72674 - protein, 361 aa, unidentified
  source 1..361: note = Streptomyces davaonensis
  REGION 1..361: note = tr|K4RC08|K4RC08_STRDJ S-adenosylmethionine:tRNA ribosyltransferase-isomerase OS=Streptomyces davaonensis (strain DSM 101723 / JCM 4913 / KCC S-0913 / 768); OX = 121410 1 GN=BN159_6729 PE=3 SV=1
MTLALQVPEELSARVPAEQRGPGLGRDSVRLLVSRGTEVAHHAFRELPGLLRAGDLLVVNTSPTLAAAVDGEIGHARVVVHFSTRGDDGRWAVELRDPDGRGTTRARAGGPAGTGVRLPGGMRLVLEEPLSAGGERLWWARASGPEVLGMLREYGRPIRYSYTERDQPLSAYQTVFALESGDGAGSAEMPSAARPFTARMVAELVSRGVQFAPVTLHTGVASAEAHEPPYPERFAVPEVSARLINAVRAGGGRVIAVGTTAVRAVESAAGAEGTVRARAGWTDLVVTPERGGRVVDGLLTGLHEPEASHLLMLEAVAGRAAVGRGYEEALRGRYLWHEFGDLHLLLPAENPHTEHCSRNCQ

SEQ ID NO: 72675 - protein, 389 aa, unidentified
  source 1..389: note = Streptomyces dengpaensis
  REGION 1..389: note = tr|A0A2L2MSG6|A0A2L2MSG6_9ACTN S-adenosylmethionine:tRNA ribosyltransferase-isomerase; OS = Streptomyces dengpaensis OX=2049881 GN=C4B68_31395 PE=3; SV = 1
MTTAMGVPPFERSRAWGRVPEELSARVPAEQRGPGLDRDSVRLLVSRGTEVSHHAFVELPRQLRAGDVLVVNTSPTLAAAVDGRVGHARVVVHFSTRGDDGRWAVELRDPDGTGTTRARAGGPAGTEVCLPGDVGLVLEEPLTSRSPRLWWGRVPGADVLGLLRRHGRPIRYSYTERDQPLSAYQTVFALPSADGAGSAEMPSAARPFTSRLVAELVSRGVQFAPVTLHTGVASAEAHEPPYPEKYEVPWASARLINAAKGEQRRAALAWKSGDGSRADGRIVAVGTTAVRAVESATGPDGLVRAAKGWTDLVVTPERGVRVIDGLLTGLHEPEASHLLMLEAIAGGAAIDRSYEEALRGHYLWHEFGDVHLIVPDESTHSEHCDSNCW

SEQ ID NO: 72676 - protein, 361 aa, Streptomyces diastatochromogenes
  REGION 1..361: note = tr|A0A233SV07|A0A233SV07_9ACTN S-adenosylmethionine:tRNA ribosyltransferase-isomerase; OS = Streptomyces diastatochromogenes OX=42236; GN = BEK98_02215 PE=3 SV=1
MSVRVRVPEGLSARVPAEQRGPGLDRDDVRLLVSRGTEVTHHVFAELPRLLRAGDLLVVNTSPTLAAAVDGRIGHARVVVHFSTRGDDGRWAVELREPDGRGTTRARAGTPAGTEVGLPGGARLVLEEPLSGRGERLWWARVSGAEVLRVLGEHGRPIRYSYTERDQPLSVYQTVFALPSPDGAGSAEMPSAARPFTARLVAELVSRGVQFAPITLHTGVASAEAHEPPYPERFAVPVASARLINAVKAGDGRVIAVGTTAVRAVESATGPDGVVRAAEGWTDLVVTPERGVRAVDGLLTGLHEPEASHLLMLEAVAGRAAVDRAYEEALRGLYLWHEFGDVHLILPEEAPHSERCDGNSW

SEQ ID NO: 72677 - protein, 391 aa, Streptomyces filamentosus
  REGION 1..391: note = tr|D6AP51|D6AP51_STRFL S-adenosylmethionine:tRNA ribosyltransferase-isomerase OS=Streptomyces filamentosus NRRL 15998 OX=457431 GN=SSGG_00933 PE=3 SV=1
MTARGRYEGGDVALAVPGAGGDGAGPVDEVTALEALRVPEELSARVPAEQRGAGRDDVRLLVSRGRSVAHQAFRELPEQLRGGDVLVVNTSMTLPAAVNGRVGGERVVVHFSTRGADGRWAVEVRAPAGAGVTGPRPGGPAGAVVRLPGGRALVLEDPLGPSAGARLWWARVPEAVPELLRRYGRPIRYGYTDRDQPLSAYRTVFAVDSPDGGGSAEMPSAARPFTVPLVAELVRRGVLFAPLFLHTGVASAESHEPPYPERFAVPAATAWLVNAVRAAGSGRVIAVGTTAVRALESAAGADGVVRPAEGWTDLVVTPRRGVRVVDGLLTGLHEPRASHLLMLEAVAGREALRHGYEAALQERYLWHEFGDVHLILPDEERNAPNCSSNEW

SEQ ID NO: 72678 - protein, 391 aa, Streptomyces filamentosus; identical to SEQ ID NO: 72677
  REGION 1..391: note = tr|W9FMZ9|W9FMZ9_STRFL S-adenosylmethionine:tRNA ribosyltransferase-isomerase OS=Streptomyces filamentosus NRRL 11379 OX=457430 GN=SSIG_01127 PE=3 SV=1

SEQ ID NO: 72679 - protein, 358 aa, unidentified
  source 1..358: note = Streptomyces formicae
  REGION 1..358: note = tr|A0A291Q5E4|A0A291Q5E4_9ACTN S-adenosylmethionine:tRNA ribosyltransferase-isomerase; OS = Streptomyces formicae OX=1616117 GN=KY5_1708 PE=3 SV=1
MSMLGAARHVPAALLARVPAEQRGPGLGRDAVRLLVSRGTAVSHHAFAELPTLLRAGDLLVVNTSRTLPAAVDGRLGHARVVVHFSTRGEGGRWAVELRDPDGKGTTRARAGGPAGAVVRLPGDVPLVCEERLAEGSGRLWWVRVSADVPGLLRRHGRPIRYSYTDRDQPLSAHQTVFALPSPDGAGSAEMPSAGRPFTAALVAELVSRGVQFAPVTLHTGVASQEAHEPPYPELFEVPLPSARLINAAKAGGGRVVAVGTTAVRAVESAAGSDGVVRAAAGRTDLLVTPERGVRVVDGLLTGLHEPAASHLLMLEAVAGRAAVDRGYAEAVRRLYLWHEFGDAHLILREDAPHCERC

SEQ ID NO: 72680 - protein, 363 aa, Streptomyces fradiae; identical to SEQ ID NO: 72646
  REGION 1..363: note = tr|A0A3B7R0R5|A0A3B7R0R5_STRFR S-adenosylmethionine:tRNA ribosyltransferase-isomerase; OS = Streptomyces fradiae OX=1906 GN=D3X13_27095 PE=3 SV=1

SEQ ID NO: 72681 - protein, 408 aa, Streptomyces fulvissimus
  REGION 1..408: note = tr|N0CJL4|N0CJL4_9ACTN S-adenosylmethionine:tRNA ribosyltransferase-isomerase OS=Streptomyces fulvissimus DSM 40593 OX=1303692 GN=SFUL_1377 PE=3 SV=1
MRAVGAARGDGGGAPSAGAGDSLLEGLRVPAELSARVPAEQRGAGRDDVRLLVTRGAAVSHHAFRELTGQLRAGDVLVVNTSATLPAAVNGRVGGERVVVHFSTRGEDGRWAVELRAPGASGAGVPRPGGPAGCVVRLPGGRELVLEEPLGGGLSAGPDQGAVPGTASPAGPAGSPLAPAAGARLWWARVPERVPELLRRYGRPIRYAYTERDQPLSAYQTVFAVRAPDGSGSAEMPSAARPFTAALVAELVSRGVQFAPLSLDTGVASAEAHEPPYPERFAVPSTTAWLVNAARAAGGRVVAVGTTAVRALESAADADGVVRPAAGWTDLVVTPRRGVRVVDGLLTGLHEPEASHLLMLEAVAGREALRRGYEAALERRYLWHEFGDVHLILPKEERNTPDCFSNEW

SEQ ID NO: 72682 - protein, 347 aa, unidentified
  source 1..347: note = Streptomyces fungicidicus
  REGION 1..347: note = tr|A0A494UXT9|A0A494UXT9_9ACTN S-adenosylmethionine:tRNA ribosyltransferase-isomerase; OS = Streptomyces fungicidicus OX=68203 GN=CNQ36_07705 PE=3; SV = 1
MTVIAGVPEELSARVPVEQRGPGLDRDSVRLLVSRGTAVSHHAFVELPRLLRAGDLLVVNTSPTLAAAVGGWIGHGRVVVHFSTRGDDGRWAVELRDPDGHGTTRARAGAPAGTEVRLAGGVRLVLEEPLSARGERLWWARASGDVRGALREYGRPIRYAYTERDQPLSAYQTVFALPSPDGAGSAEMPSAGRPFTARMVTELVSRGVQFAPVTLHCGVASQEAHEPPYAERFVVPEASARLIGAVRAGGGRVIAVGTTAVRAVESAAGADGVVRARAGWTDLVVTPERGVRVVDGLLTGLHEPEASHLLMLEAVAGRAAVGRGYEEALGGRYLWHEFGDVHLVLPG

SEQ ID NO: 72683 - protein, 389 aa, Streptomyces galbus
  REGION 1..389: note = tr|A0A4U5X331|A0A4U5X331_STRGB S-adenosylmethionine:tRNA ribosyltransferase-isomerase; OS = Streptomyces galbus OX=33898 GN=E4U92_16360 PE=3 SV=1
MTAALRVPRELSARVPAEQRGPGLGRDDVRLLVSRGTRVTHHAFRELPHLLRAGDVLVVNTSCTLAAAVDGWAGDARVVVHFSTRGDDGRWAVELRDPDGRGTTRARAGGPAGTRVRLPGAVLVLEEPLSGRGERLWWARVSVPDAPARTPGRGSARTAPARGAVADVPALLREHGRPIRYSYTERDQPLSVYQTVFALPAPDGSGSAEMPSAARPFTAGLVTELVSRGVQFAPVTLHTGVASAEAHEPPYPERFSVPEASARLVNAARAGGGRVIAVGTTAVRALESAAGADGVVRAREGWTDLVVTPQRGVRVVDGLLTGLHEPEASHLLMLRAVAGRAVVERSYEEALNGRYLWHEFGDVHLLLPGKDLTHGIASATLGENAVSAV

SEQ ID NO: 72684 - protein, 385 aa, Streptomyces gancidicus
  REGION 1..385: note = tr|M3DQB5|M3DQB5_9ACTN S-adenosylmethionine:tRNA ribosyltransferase-isomerase OS=Streptomyces gancidicus BKS 13-15 OX=1284664 GN=H114_29006 PE=3 SV=1
MTVTFRVPEELSARVPAEVRAPGGDRDAVRLLVSRGVEVSHLAFAELPSLLRAGDVLVVNTSPTLAAAVDGRIGDARVVVHFSTRGDDGRWAVELREPDGRGTTRVRAGTRAGTGVRLAGGARLGIEEPLSPGASRLWWARVSRDVPGLLREHGRPIRYAYTERDQPLSAYQTVFALPARDGSGSAEMPSAGRPFTARTVTELVSRGVQFAPVRLDTGVASAEAHEPPYPERFAVPEASARVIGAVRAGGGRVIAVGTTAVRALESAAGPDGAVRARAGWTDLVVTPERGVRVVDGLLTGLHEPEASHLLMLEAVAGREAVARATRRRCAGGTCGTSSGTCTCCCRADPAREISSPSALRQQHAVRSEGVRCEAAHRAHITYEAE

SEQ ID NO: 72685 - protein, 363 aa, unidentified
  source 1..363: note = Streptomyces gilvosporeus
  REGION 1..363: note = tr|A0A1V0TP19|A0A1V0TP19_9ACTN S-adenosylmethionine:tRNA ribosyltransferase-isomerase; OS = Streptomyces gilvosporeus OX=553510 GN=B1H19_11110 PE=3; SV = 1
MPVAIVTGASKGPGRAPDRDAVRLLVSRGGAAPAHHAFGELPGLLARGDVLVVNTSRTLPAAVDGRTGDGRGRGEPVVVHFSTRADRWHPAGREVAGCWAVELRTPDGRGGTRPRAGGPEGAVVRLPGGARLTLWAPVEPGGVRLWWGRVTGGCAMQVMRHHGRPIRYGYPEREQPPGAQQSVFAVDSPGAGSARMPGAARPFTAGLVARLVGAGVQFAPISLHTGVASAEAFEPPDAERFAVPAATAWLVNAARARRRAASRAAGGRVVAVGATAVRALESATGPDGRVRAAAGWTDLVVTPKRGVRAVDGLLTGLHEPTASTLLMLGAMAEPDVLERAYAAAGARRRLWQECGDLHLVLPG

SEQ ID NO: 72686 - protein, 369 aa, Streptomyces glaucescens
  REGION 1..369: note = tr|A0A089X8Z6|A0A089X8Z6_STRGA S-adenosylmethionine:tRNA ribosyltransferase-isomerase; OS = Streptomyces glaucescens OX=1907 GN=SGLAU_07985 PE=3; SV = 1
MRAPALRVPEALSARVPAEQRGPGLDRDAVRLLVSRGTRVSHHAFGELPRLLRAGDLLVVNTSPTLAAAVDGLLGHARVVVHFSARGDDGRWAVELREPDGRGTTRARAGGPAGAVLCLPAGARLLVEEPLGEGGGRLWWARAEGADVRAVLREHGRPIRYSYTERDQPLSAYQTVFALPSPDGEGSAEMPSAARPFTHRMVTELVSRGVRFAPVVLHAGVASAEAHEPPAAERFAVPETSARLIDATRAAGGRVIAVGTTAVRAVESAVDAGGVVRARAGWTDLVVTPERGVRGVDGLLTGLHEPEASHLLMLRAVAGRAAVERGYEEAVRGRCLWHEFGDVHLVLPDKPLTQSVARATLGESAARVM

SEQ ID NO: 72687 - protein, 352 aa, Streptomyces glauciniger
  REGION 1..352: note = tr|A0A239A4P0|A0A239A4P0_9ACTN S-adenosylmethionine:tRNA ribosyltransferase-isomerase; OS = Streptomyces glauciniger OX=235986; GN = SAMN05216252_101775 PE=3 SV=1
MTALDALRVPEELAARVPVEQRAGGAAGRDGVRLLVGRRAGGEVAHHAFGDLPELLRAGDVLVVNTSRTLPAAVDATLGESPVVVHFSGLLDDGRWVVELRTPDGRGTTRPRTGGPAGVAVALPGGERLVPQEPLSPCGERLWVARASVADAMAFLHRHGRPIRYAYTERDQPAAAYRTVFSLPSADGLGSAEMPSAARPFTTGLVTALVSRGVQIAPVVLHTGVSSGEAHEPPYPERFSVPESTAWLVNAARAGGGRVVAVGTTAVRALETAADARGRVAAAGGWTDLVVTPERGVRTVDGLLTGLHDPAASHVLMLEAVAGRELLERVYDAAVGAGYLWHEFGDVNLLLP

SEQ ID NO: 72688 - protein, 244 aa, Streptomyces globisporus
  REGION 1..244: note = tr|A0A423V496|A0A423V496_STRGL S-adenosylmethionine:tRNA ribosyltransferase-isomerase (Fragment) OS=Streptomyces globisporus OX=1908; GN = D3105_05770 PE=3 SV=1
AGAPAPVLEEPLGPAAGARLWWARVPERVPELLRRYGRPIRYGYTDRDQPLSAYRTVFAVDSPDGSGSAEMPSAARPFTAPLVAELVRRGVLFAPLSLHTGVASAEAHEPPYPERFAVPAATAWLVNAVRAAGRARVVAVGTTAVRALETAVGADGVVRPAEGWTDLVVTPRRGVRVVDGLLTGLHEPQASHLLMLEAVAGREALRRGYEAALQERYLWHEFGDVHLILPDEERNAPDCFSNDW

SEQ ID NO: 72689 - protein, 410 aa, Streptomyces globisporus
  REGION 1..410: note = tr|A0A0U3BTH2|A0A0U3BTH2_STRGL S-adenosylmethionine:tRNA ribosyltransferase-isomerase; OS = Streptomyces globisporus C-1027 OX=1172567 GN=WQO_06865; PE = 3 SV=1
MTARGRCEGGDVALAVPGAGGAEPATAAADPPALDERPGRAGTAVVAEVTALEALRVPDALSARVPAEQRGAGRDDVRLLVSRGRAVTHHAFRELPEQLRAGDVLVVNTSMTLPAAVNGRVGGERVVVHFSTRGADGRWAVELRAPRGAGVTGPRPGGPAGAVVRLPGGRALVLEEPLGPAAGARLWWAQAPERVPELLRRYGRPIRYGYTDRDQPLSAYRTVFAVDSPDGSGSAEMPSAARPFTVPLVAELVRRGVLFAPLSLHTGVASAEAHEPPYPERFAVPAATAWLVNAVRAAGSGRVVAVGTTAVRALESAVGADGVVRPAEGWTDLVVTPRRGVRVVDGLLTGLHEPQASHLLMLEAVAGREALRRGYEAALQERYLWHEFGDVHLILPDEERNAPDCFSNEW

SEQ ID NO: 72690 - protein, 415 aa, Streptomyces griseoaurantiacus
  REGION 1..415: note = tr|F3NQR4|F3NQR4_9ACTN S-adenosylmethionine:tRNA ribosyltransferase-isomerase OS=Streptomyces griseoaurantiacus M045 OX=996637 GN=SGM_5478 PE=3 SV=1
MRALARGRAWSVPEELSARVPAERRGPGLGRDAVRLLVSRGTEVTHHAFPELPGLLRAGDLLLVNTSPTLAAAADGRLGSDRVVVHFSTRGEDGRWAVELRAPDGRGTTRPRAGGPAGAVVELAEGVRLVLEEPLAAGSERLWWARAVAPWARDGRVRGGNALGGGPHDGGARDGEATGADATGTDARDGGTADAGTRDGGAAGRVVHPSGVADVPGLLRRHGRPIRYAYTERDQPLSAYQTVFALPGADGAGSAEMPSAARPFTPRLVAELVSRGVQFAPLTLHTGVASAEAHEPPYPERFAVPEASARLVNAARAGGGRVVAVGTTAVRAVESAAGADGIVRACAGWTDLVVTPGRGVRVVDGLLTGLHEPEASHLLMLEAVAGREAVERGYEEALAGRYLWHEFGDTHLLLR

SEQ ID NO: 72691 - protein, 378 aa, Streptomyces griseochromogenes
  REGION 1..378: note = tr|A0A1B1B5X6|A0A1B1B5X6_9ACTN S-adenosylmethionine:tRNA ribosyltransferase-isomerase; OS = Streptomyces griseochromogenes OX=68214 GN=AVL59_35790; PE = 3 SV=1
MTIALGVPGELSARVPAEQRGPGLDRDAVRLLVSRGTEVSHHGFAELPRLLRAGDLLVVNTSPTLAAAVDGRIGHARVVVHFSTRGDDGRWAVELREPDGRGTTRARRESGARSAPRKGGDGRRAGIPAGTEVRLPGGARLVLEEPLSGRGERLWWARASGAEVLQVLGEHGRPIRYSYTERDQPLSVYQTVFALPSPDGSGSAEMPSAARPFTARLVAELVSRGIQIVPVTLHTGVASAEAHEPPYPERFAVPEASARSINAVKAGEGRVIAVGTTAVRAVESATGPDGVVRAARGWTDLVVTPERGVRTVDGLLTGLHEPEASHLLMLEAVAGRAAVDRAYEEALRGLYLWHEFGDVHLILPEESPHPERCDGNSW

SEQ ID NO: 72692 - protein, 347 aa, Streptomyces griseoflavus
  REGION 1..347: note = tr|D9XS21|D9XS21_9ACTN S-adenosylmethionine:tRNA ribosyltransferase-isomerase OS=Streptomyces griseoflavus Tu4000 OX=467200 GN=SSRG_04922 PE=3 SV=1
MTVIAGVPEELSARVPVEQRGPGLDRDSVRLLVSRGTAVSHHAFMELPRLLRAGDLLVVNTSPTLAAAVGGWIGHGRVVVHFSTRGDDGRWAVELRDPDGHGTTRARAGAPAGTEVRLAGGVRLVLEEPLSARGERLWWARASGDVRGALREYGRPIRYAYTERDQPLSAYQTVFALPSPDGAGSAEMPSAGRPFTARMVTELVSRGVQFAPVTLHCGVASQEAHEPPYAERFVVPEASARLIGAVRAGGGRVIAVGTTAVRAVESAAGADGVVRARAGWTDLVVTPERGVRVVDGLLTGLHEPEASHLLMLEAVAGRAAVGRGYEEALGGRYLWHEFGDVHLVLPG

SEQ ID NO: 72693 - protein, 371 aa, Streptomyces griseoflavus
  REGION 1..371: note = tr|A0A0L8MQA8|A0A0L8MQA8_9ACTN S-adenosylmethionine:tRNA ribosyltransferase-isomerase; OS = Streptomyces griseoflavus OX=35619 GN=ADK76_31835 PE=3; SV = 1
MTAEVLRVPPELSAREPAEQRAPGRGRDAVRLLVSRGTAEPSHHTFKELPRLLSAGDVLVVNTSRTLPAALDGRLGDGRGRGEPVVAHFSTRADRQHPRPEAAAGDWAVELRTPDGCGSTRQRAGGPAGTVVRLPGGARLELRAPVERGSVRLWWARVSGAPVADLLRRYGRPIRYGYTDRDQPLDAYQTVFAVGSPDGGGSAEMPSAARPFTASLVARLVSRGVQIAPVTLHTGVASAEAYEPPYPERFAVPPSTAWQINAARAGGGKVVAVGTTAVRALETAAGADGRIRAASGWTELVVTPERGVRAVDGLLTGLHEPQASHLLMLEAVGQVAAGADFGDALCRAYAEAVRRRYLWHEFGDLHLILPS

SEQ ID NO: 72694 - protein, 368 aa, Streptomyces griseofuscus
  REGION 1..368: note = tr|A0A426SDK0|A0A426SDK0_9ACTN S-adenosylmethionine:tRNA ribosyltransferase-isomerase; OS = Streptomyces griseofuscus OX=146922 GN=CQW44_00070 PE=3; SV = 1
MTTIVRVPEELSARVPAEQRGPGRARDDVRLLVSRGTRVTHHAFRELPGLLRAGDLLVVNTSPTLAAAVDGRIGDAPVVVHFSTRGDDGRWAVELREPDGRGTTRARPGTRAGTEVRLPEGVRLVVEEPVGGPEPVGGQPLGGHPVGRYRERLWWGRVEGGAVLGLLRGHGRPIRYSYTTRDQPLSAYQTLFSLPSPDGAGSAEMPSAGRPFTERVVAELVRGGVGFARVTLHTGVASAEAHEPPYPEWFTVPEASARAIGAAAAGGGRVIAVGTTAVRAVESAVGADGAVRACQGWTDLVVTPERGVRVVDGLLTGLHEPEASHLLMLRAVAGRAAVDRAYEEALRGLYLWHEFGDVHLLLGKETPR

SEQ ID NO: 72695 - protein, 379 aa, Streptomyces griseoruber
  REGION 1..379: note = tr|A0A117RF53|A0A117RF53_9ACTN S-adenosylmethionine:tRNA ribosyltransferase-isomerase; OS = Streptomyces griseoruber OX=1943 GN=AQJ64_04410 PE=3; SV = 1
MTLAVRVPEELSARVPAEQRGPGRQRDDVRLLVSRGTEPAHHAFRELPCLLRAGDLLVVNTSPTLAAAVNGRIAHARVVVHFSTRGDAAYGGAARWAVELRDPDGRGTTRARAGGPAGTEVRLPGGVRLTLEEPLSPGSGRLWWARAAGGAGAGGRGAADVPGLLREHGRPIRYSYTERDQPLSVHQTVFALPSADGAGSAEMPSAARPFTAGLVAELVSRGVQFAPVALHTGVASAEVHEPPYPERFSVPEASARLINAVRAGDGRVIAVGTTAVRAVESAMGPDGVVRAREGWTDLVVTPGRGVRVVDGLLTGLHEPEASHLLMLEAVAGRAAIDRGYEEALRGRYLWHEFGDVHLLLPEEGPAEGPHGEHCFSNCP

SEQ ID NO: 72696 - protein, 368 aa, Streptomyces griseorubiginosus
  REGION 1..368: note = tr|A0A385ZV48|A0A385ZV48_9ACTN S-adenosylmethionine:tRNA ribosyltransferase-isomerase; OS = Streptomyces griseorubiginosus OX=67304 GN=queA PE=3; SV = 1
MTVATGVPAFGRRGYRVPEELSARVPAEQRGPGLDRDAVRLLVSRGTEVSHHSFAELPRLLRAGDLLVVNTSPTLAAAVDGRIGHTRVVVHFSTRGDDGRWTVELRDPDGRGTTRARAGGPAGTEVRLPGGLRLVLEEAVSERLWWARVSGGEVFGLLREHGRPVRYSYTERDQPLSVYQTVFALPSADGSGSAEMPSAARPFTGRTVAELVSRGVGFAPVRLDAGVASVEAHEPPYPERFAVPETSARLINAVKAGDGRVLAVGTTSVRAVESAAGADGVVRARAGWTELVVTPERGVRVVDGLLTGLHEPEASHLLMLEAVAGRAAIDRGYEEALRGRYLWHEFGDVHLLLPPEDPHAEHCFSNCS

SEQ ID NO: 72697 - protein, 362 aa, Streptomyces griseorubiginosus
  REGION 1..362: note = tr|A0A101S7E5|A0A101S7E5_9ACTN S-adenosylmethionine:tRNA ribosyltransferase-isomerase; OS = Streptomyces griseorubiginosus OX=67304 GN=AQJ54_12630; PE = 3 SV=1
MPAFGRRGYRVPEELSARVPAEQRGPGLDRDAVRLLVSRGTEVSHHSFAELPRLLRAGDLLVVNTSPTLAAAVDGRIGHTRVVVHFSTRGDDGRWTVELRDPDGRGTTRARAGGPAGTEVRLPGGPRLVLEEAVSERLWWARVSGGEVFGLLREHGRPVRYSYTERDQPLSVYQTVFALPSSDGAGSAEMPSAARPFTGRTVAELVSRGVGFAPVRLHAGVASVEAHEPPYPEWFAVPETSARLINAVRAGDGRVLAVGTTSVRAVESAAGADGVVRARAGWTDLVVTPGRGVRVVDGLLTGLHEPEASHLLMLEAVAGRAAIDRGYEEALRGRYLWHEFGDVHLLLPPEDPHAEHCFSNCS

SEQ ID NO: 72698 - protein, 427 aa, Streptomyces griseoviridis
  REGION 1..427: note = tr|A0A3S9ZHH6|A0A3S9ZHH6_STRGD S-adenosylmethionine:tRNA ribosyltransferase-isomerase; OS = Streptomyces griseoviridis OX=45398 GN=ELQ87_25485 PE=3; SV = 1
MVQLPPLPGWLRRMRMLWVCDGCGWRTAFLSGASCPVPGTGAPRANVDGDRRAVVVAEVPDREDYAFDLPVELLAQEPQEARGGKRSDARLAVLHRSGGRVEHRVFTDIVEYVGAGDVLVVNNARFVPSLLPGVDEEGRAVAVSIHSPQGEGTWHCLVAPQAACRPGARFVLGAGLQVTGQLLDETAAGRWRIALDPCDPATLYALAEPAYSPYLKQAPADPEYYQNTYASVPGAVGNPAAGRHFTPALLDLLRERAVSVAEVTHFLAARTRREVTRMLRNLIAQGGAGDLAAEDLVDGTRLSDEFDFPPAERYRISEHAADLINDRRASGGRILVVGTSALRALETVTGPDGRTQPGSGSTSLRIMPGHRFRACDAFLTNLHEPRSSELILVAALTGRDFLLDTYRNELIPRGYRFNYFGDSMLIA

SEQ ID NO: 72699 - protein, 356 aa, Streptomyces griseoviridis
  REGION 1..356: note = tr|A0A3S9ZK61|A0A3S9ZK61_STRGD S-adenosylmethionine:tRNA ribosyltransferase-isomerase; OS = Streptomyces griseoviridis OX=45398 GN=ELQ87_30570 PE=3; SV = 1
MTLTVEVPTELSARVPAEQRGPGLGRDAVRLLVSRGTEVSHHAFRELPGLLRAGDLLVVNTSATVAAAVDGRVGHARVVVHFSTRGDDGRWAVELREPSGDGSTRARAGGPAGTEVRLAGGARLVLEEPLSARGERLWWARVSGAGVPGLLRERGRPIRYAYTDRDQPLSAYQTVFALPSGDGTGSAEMPSAARPFTARLVTELVSRGVWFAPIALDTGVASAEAHEPPYPERFSVPEASARLVNAVRAGGGRVVAVGTTTVRAVESAAGPDGVVRARAGWTDLVVTPERGVRVVDGLLTGLHEPQASHLLMLAAVAGRAAVERGYAAAVRGRYLWHEFGDVHLLLPAEDLTESIA

SEQ ID NO: 72700 - protein, 440 aa, Streptomyces griseus
  REGION 1..440: note = tr|B1W1X4|B1W1X4_STRGG S-adenosylmethionine:tRNA ribosyltransferase-isomerase OS=Streptomyces griseus subsp. griseus (strain JCM 4626 / NBRC 13350) OX=455632; GN = queAPE=3 SV=1
MTGRERYPERVATGGARDGGPGPGSAGAGGAPVDGTARPGAGGDGPEAPEAWRGSESPVAPRGPEAPAASRGPESPVAWRVPDALSARVPAEQRGSGRDDVRLLVSRGCAVSHHAFRELPGQVRAGDVLVVNTSMTLPAAVNGRVGGERVVVHFSTRGADGRWAVELRAPGRAGATGPRPGGPAGAVVRLPGGRALVLEEPLGPVAGARLWWARTPERVPELLRRYGRPIRYGYTERDQPLSAYRTVFATPSQDGSGSAEMPSAGRPFTAALVAGLVRRGVLFAPLSLHTGVASAEAHEPPYPERFAVPAATAWLVNAVRAARGGDRAAGGRVIAVGTTAVRALESAAGADGVVRQAEGWTDLVVTPRRGVRVVDGLLTGLHEPEASHLLMLEAVAGREALRLGYEAALQERYLWHEFGDVHLILPDEERDAPNCFSNEW

SEQ ID NO: 72701 - protein, 403 aa, Streptomyces griseus; identical to SEQ ID NO: 72657
  REGION 1..403: note = tr|A0A2P5JVH4|A0A2P5JVH4_STRGR S-adenosylmethionine:tRNA ribosyltransferase-isomerase; OS = Streptomyces griseus OX=1911 GN=BF14_027430 PE=3 SV=1

SEQ ID NO: 72702 - protein, 359 aa, unidentified
  source 1..359: note = Streptomyces hundungensis
  REGION 1..359: note = tr|A0A387HN59|A0A387HN59_9ACTN S-adenosylmethionine:tRNA ribosyltransferase-isomerase; OS = Streptomyces hundungensis OX=1077946 GN=queA PE=3 SV=1
MTAPLVVRVPEALLASVPAEVRGAGRDDVRLMVSRGTAVTHHRFRELAGQLRAGDVLVVNTSRTLPAAVDGRVGGRPVVVHFSTLGPDGRWAVELRRPTASGSTERRTGDRAGTRVVLPDGERLVLDEALSPDRLWWARVSAADVPGLMRRHGRPIRYSYTERDQPLAAYQTVFARPAPGGLGSAEMPSAARPFTEGLVAELVRRGVRFAPVVLHTGVASAEAHEPPYPERFEVSAATARLVNAARADGARIVAVGTTAVRALESAAGPGRVVRAAAGWTDLVVTPERGVRVVDGLLTGLHEPEASHLLMLEAIAGREALAVAYDQALSRLYLWHEFGDVHLILAEENPHAAHCSSNVR

SEQ ID NO: 72703 - protein, 338 aa, unidentified
  source 1..338: note = Streptomyces hyalinus
  REGION 1..338: note = tr|A0A401Z446|A0A401Z446_9ACTN S-adenosylmethionine:tRNA ribosyltransferase-isomerase; OS = Streptomyces hyalinus OX=516124 GN=EHYA_09386 PE=3 SV=1
MTTATVHEATEPAEARGLARDGVRLLVHAGERVEHTVFRDLGRHLGPGDLLVVNTSATLPAAVDGYRADGSPVTVHFATRLDEETWILELRHTDGTPGPVAGVRRFEAVRFPGTRCGMALLLDPYPHEHTPQRLWKARITVPHARVETFLADRGRPISYAHVRERWPLTAYQTIFARDEGSAEMPSAGRPFTHELVVDLITRGVTVAPIVLHTGVSSQEVGEPPLREWFAVPESTAHLVRRARRVIAVGTTVTRALESAVGPDGEIAATSGWTDLMLGPDRPARVVDGVISGLHAPEATHLLLLEAVVGRAAVRRAYDAALAEDYLWHEFGDSSLLLP

SEQ ID NO: 72704 - protein, 383 aa, Streptomyces hygroscopicus
  REGION 1..383: note = tr|A0A0S2NXQ1|A0A0S2NXQ1_STRHL S-adenosylmethionine:tRNA ribosyltransferase-isomerase; OS = Streptomyces hygroscopicus subsp. limoneus OX=264445; GN = SHL15_1796 PE=3 SV=1
MTVSTGVCPLGPRKRGEVPAELSARVPAEQRGPGLGRDAVRLMVSRGTEVAHHAFSELPELLRAGDLLVVNTSPTLAAAVDGRIGHARVVVHFSTRGDDGRWAVELREPDGRGTTRARAGSPAGTEVSLPGGGRLLLEEPLSARGERLWWARVAGADVREVLGGHGRPIRYSYTERDQPLSAYQTVFALPSPDGAGSAEMPSAARPFTARLVAELVSRGVWFAPVTLHTGVSSAEAHEPPYPERFSVPEASARLINQVRTRREGLHAPPLAEGGRVIAVGTTAVRAVESAAGPDGVVRAAEGWTDLVVTPERGVRAVDGLLTGLHEPEASHLLMLEAAAGRAAVDRAYEEALRALYLWHEFGDVHLILPVEKPHSEHCDGNKK

SEQ ID NO: 72705 - protein, 384 aa, Streptomyces hygroscopicus
  REGION 1..384: note = tr|H2JRB7|H2JRB7_STRHJ S-adenosylmethionine:tRNA ribosyltransferase-isomerase OS=Streptomyces hygroscopicus subsp. jinggangensis (strain 5008) OX=1133850 GN=SHJG_325 5 PE=3 SV=1
MTVSTGVCPLGPRKRWEVPAELSARVPAEQRGPGLGRDAVRLMVSRGTEVAHHAFSELPELLRAGDLLVVNTSPTLAAAVDGRIGHARVVVVHFSTRGDDGRWAVELREPDGRGTTRARAGSPAGTEVSLPGGGRLLLEEPLSARGERLWWARVAGADVREVLGGHGRPIRYSYTERDQPLSAYQTVFALPSPDGAGSAEMPSAARPFTARLVAELVSRGVWFAPVTLHTGVSSAEAHEPPYPERFSVPEASARLINQVRTRREGLHAPPRAEGGRVIAVGTTAVRAVESAAGPDGVVRAAEGWTDLVVTPERGVRAVDGLLTGLHEPEASHLLMLEAVAGRAAVDRAYEEALRALYLWHEFGDVHLILPVENPHPEHCDGNKK

SEQ ID NO: 72706 - protein, 360 aa, unidentified
  source 1..360: note = Streptomyces incarnatus
  REGION 1..360: note = tr|A0A0G3ANP1|A0A0G3ANP1_9ACTN S-adenosylmethionine:tRNA ribosyltransferase-isomerase; OS = Streptomyces incarnatus OX=665007 GN=ABB07_29525 PE=3; SV = 1
MTVLVRVPPELSARVPVEQRAPGLDRDAVRMLVSRGTEVTHHGFRELPRLLRAGDLLVVNTSPTLAAAVDGRIGHARVVVHFSTRGDDGRWAVELREPDGRGTTRARTGTRAGTEVVLPGTGRLVVEEPLSPRGERLRWARAEGDVLAMLRVHGRPIRYSYTERDQPLSVYQTVFALPQPDGAGSAEMPSAARPFTAPLVAELVSRGVQFAPVTLHTGVASAEAHEPPYPERFSVPEASARQVNAAKAGGRRVIAVGTTAVRAVESAAGPDGVVRAAEGWTDLVVTPERGVRVVDGLLTGLHEPEASHLLMLRAVAGRAAVGRAYEEALRGLYLWHEFGDVHLILPEEGTHTERCDGNSW

SEQ ID NO: 72707 - protein, 366 aa, Streptomyces indicus
  REGION 1..366: note = tr|A0A1G9JVP7|A0A1G9JVP7_9ACTN S-adenosylmethionine:tRNA ribosyltransferase-isomerase; OS = Streptomyces indicus OX=417292 GN=SAMN05421806_13711; PE = 3 SV=1
MSVDEAVRLAGLRVPEELSAREPAEQRGPGRDRDSVRLLVSRGTAVSHHDFRALPGLLRAGDLLIVNTSPTLAAALDGRIGRTRVVVHFSTRGDDGRWAVELRDPDRAGTTRARAGQPGAVLLRGGARLVLEEPLDPAGTRLWWARVSVADVPGLLQRYGRPIRYSYTKEDQPLAAYQTVFALPQPGGAGSAEMPSAGRPFTARLVAELVSRGVQFAPVTLHTGVASGEAHEPPYPERFEVPAASARLINAAKAGGGRIIAVGTTGVRAVESAAGPDGIVRPAAGWTDLVVTPERGVRVVDGLLTGLHEPEASHLLMLEAIAGKPALERAYAAAVRGLYLWHEFGDSHLILREETDYGSNCSGNCW

SEQ ID NO: 72708 - protein, 393 aa, Streptomyces ipomoeae
  REGION 1..393: note = tr|A0A540P700|A0A540P700_9ACTN S-adenosylmethionine:tRNA ribosyltransferase-isomerase; OS = Streptomyces ipomoeae OX=103232 GN=SipoB123_31740 PE=3; SV = 1
MTTATVRVPEELHARVPAEQRGPGLDRDAVRLLVSCGTEVSHHEFVELPLLLRAGDLLIVNTSPTLAAAVDGAIGHARVVVHFSTRGDDGRWAVELRDPDGRGTTRARAGGPAGTEVQLPGGVRLVLEEPLSERGERLWWARVSAPGGVRSRGASGAPSAAGEPVPGALAPSGAPVCVVEALLREHGRPIRYSYTERDQPLPVYQTVFALPSADGSGSAEMPSAARPFTTRLVAELVSRGVRFAPVTLHTGVASAEAHEPPYPERFAVPEASARLINAAVAGDGRVIAVGTTAVRAVESAAGPDGVVRACAGWTDLVVTPERGVRVVDGLLTGLHEPEASHLLMLEAIAGRAAIERAYDEAIGGRYLWHEFGDVHLILPEEAPHTEHCDSNRQ

SEQ ID NO: 72709 - protein, 388 aa, Streptomyces ipomoeae
  REGION 1..388: note = tr|L1L6W2|L1L6W2_9ACTN S-adenosylmethionine:tRNA ribosyltransferase-isomerase OS=Streptomyces ipomoeae 91-03 OX=698759 GN=STRIP9103_01886 PE=3 SV=1
MRVPEELHARVPAEQRGPGLDRDAVRLLVSRGTEVSHHEFVELPLLLRAGDLLIVNTSPTLAAAVDGAIGHARVVVHFSTRGDDGRWAVELRVPDGRGTTRARAGGPAGTEVQLPGGVRLVLEEPLSERGERLWWARVSAPGGVRSRGASGAPSAAGEPVPGAPAPSGAPVCVVEALLREHGRPIRYSYTERDQPLPVYQTVFALPSADGSGSAEMPSAARPFTTRLVAELVSRGVRFAPVTLHTGVASAEAHEPPYPERFAVPEASARLINAAVAGDGRVIAVGTTAVRAVESAAGPDGVVRACAGWTDLVVTPERGVRVVDGLLTGLHEPEASHLLMLEAIAGRAAIERAYDEAIGGRYLWHEFGDVHLILPEEAPHTERCDSNRR

SEQ ID NO: 72710 - protein, 137 aa, unidentified
  source 1..137: note = Streptomyces jeddahensis
  REGION 1..137: note = tr|A0A177HHX3|A0A177HHX3_9ACTN S-adenosylmethionine:tRNA ribosyltransferase-isomerase; OS = Streptomyces jeddahensis OX=1716141 GN=queA PE=3 SV=1
MPSAARSFTPLFVAGLVSRGVQFAPITLHTGVASAEVHEPPDGRVIAVGTAAVRAVESATGPDGVRAASGWTDLVVTPERGVRVVDGLLIGLHEPEASHLLMLEAIAGRQAISGGYGKALRHGYLWHEFGDTHLVMP

SEQ ID NO: 72711 - protein, 415 aa, Streptomyces jietaisiensis
  REGION 1..415: note = tr|A0A1G7V818|A0A1G7V818_9ACTN S-adenosylmethionine:tRNA ribosyltransferase-isomerase; OS = Streptomyces jietaisiensis OX=235987; GN = SAMN05216260_122103 PE=3 SV=1
MRALARGRAWSVPEELSARVPAERRGPGLGRDAVRLLVSRGTEVTHHAFPELPGLLCAGDLLLVNTSPTLAAAADGRLGSDRVVVHFSTRGEDGRWAVELRAPDGRGTTRPRAGGPAGAVVELAEGVRLVLEEPLAAGSERLWWARAVASGARDGRVRGGNALGGGPHDGGARDGEATGADATGTDARDGGTADAGTRDGGAAGRVVRPSGVADVPGLLRRHGRPIRYAYTERDQPLSAYQTVFALPGADGAGSAEMPSAARPFTPRLVAELVSRGVQFAPLTLHTGVASAEAHEPPYPERFAVPEASARLVNAARAGGGRVVAVGTTAVRAVESAAGADGIVRACAGWTDLVVTPGRGVRVVDGLLTGLHEPEASHLLMLEAVAGREAVERGYEEALAGRYLWHEFGDTHLLLR

SEQ ID NO: 72712 - protein, 365 aa, Streptomyces koyangensis
  REGION 1..365: note = tr|A0A385DHI8|A0A385DHI8_9ACTN S-adenosylmethionine:tRNA ribosyltransferase-isomerase; OS = Streptomyces koyangensis OX=188770 GN=D0C37_27100 PE=3; SV = 1
MSARAVVGRVPEELSARVPVEEREPGRGRDGVRLLVSAGEREPRVGWFTELPGLLRAGDLLVVNTSATLPAAADGRLGGEPVVVHFSTRADGPGPGERWAVELRAPDGRGTTGPRPGGPAGAVVALAGGARLELVEPLAPGAERLWWAQTGGFGAADGSGSAVVAWLRRHGRPIRYAYTERDQPLAAYRTVFAAAGEEGGGSAEMPSAGRPFTTRTVTELVRAGVQFAPVTLHTGVASAEAHEPPYPERYTVSAHAAWLVNAVRAGGGRVIAVGTTAVRALESAAGPDGRVRAASGWTGLVVTPERGVRVVDGLLTGLHEPEASHLLMLEAVAGAAAVERGYEAAVRARLLWHEFGDVHLLTRRE

SEQ ID NO: 72713 - protein, 389 aa, unidentified
  source 1..389: note = Streptomyces lasaliensis
  REGION 1..389: note = tr|A0A4U5WHV3|A0A4U5WHV3_STRLS S-adenosylmethionine:tRNA ribosyltransferase-isomerase; OS = Streptomyces lasaliensis OX=324833 GN=E4U91_07955 PE=3; SV = 1
MTPALRVPEELSARVPAEQRGPGLRRDDVRLLVSRGTEVAHHAFRELPGLLRAGDVLVVNTSSTLAAAVDGWVGSARVVVHFSTRGDDGRWAVELRDPDGRGTTRARAGGPAGTRVRLPGAVLVLEEPQSGRGERLWWARVSAPDAPARTAGRGPAAAAPARGAVADVPALLREHGRPIRYSYTERDQPLSVYQTVFALPSPDGSGSAEMPSAARPFTAALVAELVSRGVQFAPVTLHTGVASAEAHEPPYPERFSVPEASARLVDAVRAGGGRVIAVGTTAVRAVESAAGADGVVRAREGWTDLVVTPERGVRAVDGLLTGLHEPEASHLLMLRAVAGRAVVERSYEAALNGRYLWHEFGDVHLLLPGNPLTHRIAPATRGENAVSAV

SEQ ID NO: 72714 - protein, 363 aa, Streptomyces lavendulae
  REGION 1..363: note = tr|A0A5C8GRD0|A0A5C8GRD0_STRLA S-adenosylmethionine:tRNA ribosyltransferase-isomerase; OS = Streptomyces lavendulae OX=1914 GN=E2C11_29685 PE=3 SV=1
MNTIVRVPEERSARVPAEQRGPGRARDDVRLLVSHGTRVTHHAFRELPGLLRAGDLLVVNTSPTLAAAVDGRIGDAPVVVHFSTRGDDGRWAVEPREPDGRGTTRARAGTRAGTEVRLAGGVRLVLAEPVGGRAPAGGHRERLWWARVEGGAVPGLLREHGRPIRYSYTTRDQPLSAYQTLFSVPSPDGTGSAEMPSAGRPFTERVVAELARRGVGLARVTLHTGVASAQAHEPPYPEWFSVPRASARAINAAAAGAGRVIAVGTTVVRAVESAAGADGIVRAGEGWTDLVVTPGRGVRVVDGLLTGLHEPEASHLLMLRAVAGRAAVDRAYEEALRGLYLWHEFGDVHLLLREETARRALTE

SEQ ID NO: 72715 - protein, 361 aa, Streptomyces lincolnensis
  REGION 1..361: note = tr|A0A1B1M6M9|A0A1B1M6M9_STRLN S-adenosylmethionine:tRNA ribosyltransferase-isomerase; OS = Streptomyces lincolnensis OX=1915 GN=SLCG_6345 PE=3 SV=1
MTLALRVPEELSARVPAEQRGPGRGRDAVRLLVSRGTAVSHHAFVELPRLLRAGDLLVVNTSSTLAAAVDGRIGPARVVVHFSTRGDDGRWAVELRDPDGKGTTRARAGGPAGTRVRLPGGVRLTLEEPVAAASERLWWARVAGAGVLGLLREYGRPIRYSYTERDQPLSVYRTVFALPSPDGSGSAEMPSAARPFTARLVAELVSRGVQFAPVTLHTGVASVEAHEPPYPERFSVPEASARLINAVRAGDGRVVAVGTTAVRAVESAAGCDGVVRARAGWTDLVVTPERGVRVVDGLLTGLHEPEASHLLMLEAVAGRAAIDRGYEAALRGLYLWHEFGDVHLLLPEEGPHAEHCGSNSW

SEQ ID NO: 72716 - protein, 358 aa, unidentified; identical to SEQ ID NO: 72669
  source 1..358: note = Streptomyces lividans
  REGION 1..358: note = tr|A0A076M880|A0A076M880_STRLI S-adenosylmethionine:tRNA ribosyltransferase-isomerase; OS = Streptomyces lividans TK24 OX=457428 GN=SLIV_28700 PE=3; SV = 1

SEQ ID NO: 72717 - protein, 372 aa, unidentified
  source 1..372: note = Streptomyces lunaelactis
  REGION 1..372: note = tr|A0A2R4SZI2|A0A2R4SZI2_9ACTN S-adenosylmethionine:tRNA ribosyltransferase-isomerase; OS = Streptomyces lunaelactis OX=1535768 GN=SLUN_08680 PE=3; SV = 1
MSVLETLWVPEELSARVPAEERGSGRDDVRLMVSRGTEVSHHAFRDLPGQLLAGDVLVVNTSVTLPAAVNGRVGGDAVVVHFSTRGDDHRWAVELRRPDGSGSTLPRAGGPVGALVRLPGGEKLVLEEPLTPGADRLWWASVSTDVAGLMRRCGRPIRYRYTVRDQPLSAYQTVFALPSPDGAGSAEMPSAARPFTARLVAELVSRGVQFAPVTLHTGVASAEAYEPPYPERFEVPPTTAWLVNAARAKRAGRGALPWKGGGGRRAGGRIVAVGTTAVRALESAAGPDGVVHAASGWTDLVITPGRGARAVDGLLTGLHEPEASHLLMLEAIAGREALYRGYAEALRRLYLWHEFGDVHLILPDDNPHSLHC

SEQ ID NO: 72718 - protein, 375 aa, Streptomyces lydicus
  REGION 1..375: note = tr|A0A1D7VIL4|A0A1D7VIL4_9ACTN S-adenosylmethionine:tRNA ribosyltransferase-isomerase; OS = Streptomyces lydicus OX=47763 GN=SL103_10165 PE=3 SV=1
MIADTLRVPAELSARVPAEQRGPGLGRDAVRLLVSRGTAEPAHHAFGELPELLAPGDVLVVNTSSTLPAAVDGRVGDGRGRGEPVVVHFSTRADRWHPAGRAVAGRWAVELRSPDGRGSTRPRAGGPPGAVVRMPGGARLALEAPVDPGGVRLWWARLRGARADELMRRHGRPIRYGYTDRDQPLAAYRTVFAVDSPGGGSAEMPSAARPFTAELVARLVSKGVQFAPISLDTGVASAEAFEPPYPERFVVPAATAWLVNAARARRRAAPRAVGGRIVAVGTTAVRALESAAGADGRIRAAAGWTDLVVTPERGVRAVDGLLTGLHEPTASHLLMLRAVASATADGEALGRAYAAAVRRRYLWHEFGDLHLLLPG

SEQ ID NO: 72719 - protein, 382 aa, Streptomyces lydicus
  REGION 1..382: note = tr|A0A3S9Y800|A0A3S9Y800_9ACTN S-adenosylmethionine:tRNA ribosyltransferase-isomerase; OS = Streptomyces lydicus OX=47763 GN=DDE74_09305 PE=3 SV=1
MIVDLLQVPDELSARVPAEQRGPGLGRDAVRLLVSRGATEVGHHTFGDLPDLLAAGDVLVVNTSRTLPAAVDGRVGDGRGRGEPVVVHFSTRADRWHPAGRAVAGRWAVELRSPDGHGSTRPRAGGPAGTVVRLPGGARLVLEGPVDPGSVRLWWARVTGARVTELMRRHGRPIRYGYTDRDQPLAAYQTVFAVDAPGGGSAEMPSAARPFTPELVARLVSKGVQFAPVALHTGVASAEAFEPPYPERFVVPPVTAWLVNAARARRRAAARRHPAAGSAPSGRIVAVGTTAVRALESAAGADGRVRAAAGWTDLVVTPERGVRAVDGLLTGLHEPTASHLLMLEAVASVTADGEALRRAYAAAVRGRYLWHEFGDLHLVLPD

SEQ ID NO: 72720 - protein, 388 aa, unidentified
  source 1..388: note = Streptomyces malaysiense
  REGION 1..388: note = tr|A0A1J4Q223|A0A1J4Q223_9ACTN S-adenosylmethionine:tRNA ribosyltransferase-isomerase; OS = Streptomyces malaysiense OX=1428626 GN=VT52_015330 PE=3; SV = 1
MTMIARVPEERSARVPAEQRGPGRTRDDVRLLVSRGTRVAHHTFRELPALLRAGDLLVVNTSPTLAAAVDGRTGGAPVVVHFSIRGDDGRWAVELREPDGRGTTRARAGTRAGTEVRLAEGVRLVLEEPVGGRAPGSVGAAVSGRERPTGRVPRSGRPPGYGREPEDGRGERLWWVRVAGGPVPGLLQRHGRPIRYSYTARDQPLSAYQTLFSLPCPDGAGSAEMPSAGRPFTERVVAELVRSGVGFARVTLHTGVASAEAHEPPAPEWFAVPEASARAINAVAAGEGRVIAVGTTAVRAVESAVAADGAVRAGEGSTDLVVTPERGVRVVDGLLTGLHEPEASHLLMLRAVAGRAAVDRAYEEALRGLYLWHEFGDVHLLLRDESPH

SEQ ID NO: 72721 - protein, 353 aa, unidentified
  source 1..353: note = Streptomyces mangrovisoli
  REGION 1..353: note = tr|A0A1J4NLI4|A0A1J4NLI4_9ACTN S-adenosylmethionine:tRNA ribosyltransferase-isomerase; OS = Streptomyces mangrovisoli OX=1428628 GN=WN71_035715; PE = 3 SV=1
MTLAIRVPAELSARVPAEQRGPGLDRDAVRMLVSHGTAVSHHAFPELPRLLRAGDLLVVNTSPTLAAAVDGWIGRARVVVHFSTRGDDGRWAVELREPDGGGTTRPRAGGPAGTGVRLPGGGRLVLEEPLAPGGARLWWARADGPAVGGLLRRHGRPIRYAYTERDQPLAAYQTVFALPQPGGAGSAEMPSAARPFTARLVAELVSRGVQFAPITLHTGVASAEAHEPPYPERFAVPEASARLVNAARAGGGRVVAVGTTAVRAVESATGADGTVRAARGWTDLVVTPGRGVRAVDGLLTGLHEPEASHLLMLEAVAGRAAVDRAYGEALRGRYLWHEFGDVHLILPGLSGPS

SEQ ID NO: 72722 - protein, 361 aa, Streptomyces mirabilis
  REGION 1..361: note = tr|A0A1I2C389|A0A1I2C389_9ACTN S-adenosylmethionine:tRNA ribosyltransferase-isomerase; OS = Streptomyces mirabilis OX=68239 GN=SAMN02787118_10213; PE = 3 SV=1
MTTTVRVPEERSARVPAEQRGPGRDRDSVRLLVSCGTEVSHHAFAELPRRLRAGDLLIVNTSPTLAAAVDGRIGHARVVVHFSTRGDDGRWAVELRDPDGRGTTRARAGEPAGTEVRLAGDVRLVLEEPLTPYGSRLWWGRVSDPDVLGLLRRHGRPIRYSYTQRDQPLSVYQTVFALPSADGSGSAEMPSAARPFTARLVAELVSRGVQFAPITLHTGVASAEAHEPPYPERYEVPEASARLINAARAGEGRILAVGTTAVRAVESAVDAGGAVRARKGWTDLVVTPERGVRVVDGLLTGLHEPEASHLLMLEAIAGRAAIERSYGEASTGPYLWHEFGDVHLILPEEGPHTEHCSSNYR

SEQ ID NO: 72723 - protein, 86 aa, Streptomyces misionensis
  REGION 1..86: note = tr|A0A5C6JGQ4|A0A5C6JGQ4_9ACTN S-adenosylmethionine:tRNA ribosyltransferase-isomerase (Fragment) OS=Streptomyces misionensis OX=67331; GN = FRZ03_24080 PE=3 SV=1
VVRAAEGWTDLVVTPERGVRVVDGLLTGLHEPEASHLLMLRAVAGRAAVDRAYEEALRGPYLWHEFGDVHLLLPEEGTHRARCDGN

SEQ ID NO: 72724 - protein, 359 aa, Streptomyces misionensis
  REGION 1..359: note = tr|A0A1H4TBU1|A0A1H4TBU1_9ACTN S-adenosylmethionine:tRNA ribosyltransferase-isomerase; OS = Streptomyces misionensis OX=67331 GN=SAMN04490357_2244; PE = 3 SV=1
MSTVVRVPRERSARVPAEQRGPGLDRDDVRLLVSRGTRVAHHAFGELPSLLRAGDLLVVNTSPTLAAAVDGRIGPGRVVVHFSTRGDDGRWAVELREPDGRGTTRARTGTRAGMEVALAGGARLVVEEPVSARGERLWWARAVGGRVLELLREHGRPIRYSYTERDQPLSAYQTLFALPSPDGAGSAEMPSAARPFTARLVAELVRRGVGFARVTLHTGVASAEAHEPPYPERFSVPESSARLVNAVTAGEGRVIAVGTTAVRALESAAGPDGVVRAAAGWTDLVVTPERGVRVVDGLLTGLHEPEASHLLMLRAIAGRAAVDRAYEEALRGPYLWHEFGDVHLLLPEEDTHSTRCDGN

SEQ ID NO: 72725 - protein, 141 aa, Streptomyces nanshensis
  REGION 1..141: note = tr|A0A1E7LU78|A0A1E7LU78_9ACTN S-adenosylmethionine:tRNA ribosyltransferase-isomerase (Fragment) OS=Streptomyces nanshensis OX=518642; GN = AN221_15530 PE=3 SV=1
MSAVGAVRRDGRSGAPVEEGCGVSSLEALRVPPELSARVPAEQRGSGRDDVRLLVTRGTDVSHHAFRELPGQVRAGDVLVVNTSATLPAAVNGRVGGERVVVHFSTRGEDGRWAVELRAPGASGATVPRPGGPAGAGGRLP

SEQ ID NO: 72726 - protein, 363 aa, unidentified
  source 1..363: note = Streptomyces natalensis
  REGION 1..363: note = tr|A0A0D7CQ06|A0A0D7CQ06_9ACTN S-adenosylmethionine:tRNA ribosyltransferase-isomerase; OS = Streptomyces natalensis ATCC 27448 OX=1240678; GN = SNA_11230 PE=3 SV=1
MPVAVMTGASKGPGPAPALDAVRLLVSRGGAAPAHHAFGELPGLLAPGDVLVVNTSRTLPAAVDGRTGDGRGRGEPVVVHFSTRADRWHPGGREVAGCWAVELRTPDGRGGTRPRAGGPEGRVVRLPGGARLTLRAPVDPGGVRLWWGRVTGATAMQVMHHHGRPIRYGPPDQEQPPAAYQSVFAEDSPGAGSAELPGAARPFTAGLVARLVGAGVRFAPLSLHTGVASAEAFEPPYAERFAVPAATARLVNAARARRRAAPRAPGGRVVAVGTTAVRALESAAGPDGRVRAASGWTDLVVTPKRGVRAVDGLLTGLHEPTASPALMLAAVAEPDALERAYAAAVARRYRWRECGDLHLVLPG

SEQ ID NO: 72727 - protein, 373 aa, unidentified
  source 1..373: note = Streptomyces nigra
  REGION 1..373: note = tr|A0A2S1IA99|A0A2S1IA99_9ACTN S-adenosylmethionine:tRNA ribosyltransferase-isomerase; OS = Streptomyces nigra OX=1827580 GN=DC008_07215 PE=3 SV=1
MRVAVRVPPELSARVPAEQRGPGLDRDAVRLLVSRGTEVTHHGFRELPGLLRAGDVLVVNTSETLPAAVDGAVGHARVVVHFSTRGDDGRWAVELRDPDGRGTTRARAGGPAGTEVSLPGGLRLLLEEPLDRAGGRLWWARPLVDDGGSGPAPAGPGRVLGVMRAHGRPIRYSYTARDQPLSVYRTVFALPSADGAGSAEMPSAARPFTVRMVTELVSRGVQFAPIELHTGVASAEAHEPPYPERFRVPEVSARLIRAARAAGGRVVAVGTTAVRAVESAVDADGVVRAREGWTDLVITPERGVRVVDGPLTGLHEPEASHLLMLEAVAGWAAVERGYAQALHGRYLWHEFGDVHLVLPPEGPHAERCVSNCA

SEQ ID NO: 72728 - protein, 268 aa, unidentified
  source 1..268: note = Streptomyces niveus
  REGION 1..268: note = tr|V6JM57|V6JM57_STRNV S-adenosylmethionine:tRNA ribosyltransferase-isomerase (Fragment) OS=Streptomyces niveus NCIMB 11891 OX=1352941 GN=M877_32875 PE=3 SV=1
TSVRAGGPAGAVVRLPGGGHLVLEEPLDPAGTRLWWARVAGGDVAGLLARYGRPIRYEYTERDQPLSAYQTVFALPSPDGSGSAEMPSAGRPFTARLVAELVSRGVQFAPIRLDTGVASAEAHEPPYPERFEVPATTARLVNAAVAGAGLVDQAGPGGGRVVAVGTTAVRALESAAGPGGGVRAAAGWTDLVVTPGRGVRVVDGLLTGLHEPAASHLLMLEAIAGRPALERAYTEAVQHLYLWHEFGDVHLVLPDETAHSPSCASNFR

SEQ ID NO: 72729 - protein, 397 aa, Streptomyces olivaceus
  REGION 1..397: note = tr|A0A1D8SLN6|A0A1D8SLN6_STROV S-adenosylmethionine:tRNA ribosyltransferase-isomerase; OS = Streptomyces olivaceus OX=47716 GN=BC342_06775 PE=3 SV=1
MTGPALRVPEELSARVPAEQRGAGRDRDGVRLLVSHGTEVSHHVFGELPGLLRAGDLLVVNTSPTLAAAVDGRVGHTRVVVHFSTRGDDGRWAVELREPDGRGTTRARAGAPGTTRARASAPGTPRARAEVTEAAEETSRTRARAGVRGRGALPAAAGGGPAGAQVRLPGGARLVLEEPLSARGDRLWWARVSGAEVPAVLREHGRAIRYSYTERDQPLSAYQTVFALPSADGTGSAEMPSAARPFTARLVAELVSRGVQFAPVTLHTGVASAEVHEPPYPERFSVPEASARLINAAGAGDGRVIAVGTTAVRAVESAAGAGGVVRAAAGWTDLVVTPERGVRVVDGLLTGLHEPEASHLLMLEAVAGRAAIDRGYDAAVRGRYLWHEFGDVHLLLP

SEQ ID NO: 72730 - protein, 361 aa, Streptomyces olivochromogenes
  REGION 1..361: note = tr|A0A250V877|A0A250V877_STROL S-adenosylmethionine:tRNA ribosyltransferase-isomerase; OS = Streptomyces olivochromogenes OX=1963 GN=SO3561_01859; PE = 3 SV=1
MTTTVRVPEERSARVPAEQRGPGRDRDSVRLLVSCGTEVSHHAFVELPRRLRAGDLLIVNTSPTLAAAVDGRIGHARVVVHFSTRGDDGRWAVELRDPDGRGTTRARGGGPAGTEVRLAGDVRLVLEEPLTPHGSRLWWGRVSDPDVLGLLRRHGRPIRYSYTRRDQPLSAYQTVFALPSADGGGSAEMPSAARPFTARLVAELVSRGVQFAPITLHTGVASAEAHEPPYPERYEVPEASARLINAARAGEGRILAVGTTAVRAVESAVDADGVVRARKGWTDLVVTPERGVRVVDGLLTGLHEPEASHLLMLEAIAGGAAIERSYGEALSGPYLWHEFGDVHLILPEEGPHTERCVSNCR

SEQ ID NO: 72731 - protein, 361 aa, unidentified
  source 1..361: note = Streptomyces ossamyceticus
  REGION 1..361: note = tr|A0A3N1M586|A0A3N1M586_9ACTN S-adenosylmethionine:tRNA ribosyltransferase-isomerase; OS = Streptomyces ossamyceticus OX=249581 GN=EDD87_6631 PE=3; SV = 1
MTTALKVPGDRSARVPVEQRGPGLDRDSVRLLVSRGTEVSHHAFAELPRLLRAGDLLVVNTSSTLAAAVDGVIGHARVVVHFSTRGDDGRWAVELRDPDGRGTTRARAGGPAGAAVRLAGGAGLVLEEPLSGRGGRLWWARVSSPDVLGLLREHGRPIRYSYTERDQPLSVYQTVFALPSEDGAGSAEMPSAARPFTPRLVAELVSRGVQFAPVTLHAGVASAEAHEPPYPERFAVPEASARLINAVGAGDGRVVAVGTTAVRAVESAAGADGVVRAGAGWTDLVVTPERGVRVVDGLVTGLHEPEASHLLMLEAVAGRAAVERAYGEAVAGDYLWHEFGDVHLILPPQTPHPAHCASNCT

SEQ ID NO: 72732 - protein, 363 aa, Streptomyces pactum
  REGION 1..363: note = tr|A0A1S6JEY8|A0A1S6JEY8_9ACTN S-adenosylmethionine:tRNA ribosyltransferase-isomerase; OS = Streptomyces pactum OX=68249 GN=B1H29_28500 PE=3 SV=1
MTLALRVLEELSARVPVEQRGPGRDRDGVRLLVSRGTEVSHHGFRELPGLLRAGDLLIVNTSATLAAAVDGRVGHARVVVHFSTRGDDGRWAVELRDPDGRGTTRARAEGEREGLPSKGGGRGAGGPRGTEVRLPGGARLVLEEPLSPRGERLWWARMSGAEVPVVLREHGRPIRYSYTERDQPLSAYQTVFALPSADGTGSAEMPSAARPFTARLVAELVSRGVQFAPVTLHTGVASAQAHEPPYPERFRVPEASARLINAARAGDGRVLAVGTTAVRAVESAAGADGTVRARAGWTDLVVTPERGVRVVDGLLTGLHEPEASHLLMLEAVAGRAAIDRGYEAAVRGRYLWHEFGDVHLLLP

SEQ ID NO: 72733 - protein, 347 aa, Streptomyces parvulus
  REGION 1..347: note = tr|A0A191UVM9|A0A191UVM9_9ACTN S-adenosylmethionine:tRNA ribosyltransferase-isomerase; OS = Streptomyces parvulus OX=146923 GN=Spa2297_07165 PE=3; SV = 1
MTPAPRVPEGLSARVPAEQREPGLDRDGVRLLVSRGTEVSHHAFGELPGLLRAGDLLVVNTSPTLAAAVDGSVGHTRVVVHFSTRGDDARWAVEVREPDGRGTTRARACVDKGTVVRLPGGGRLVAEEPLSPRGDRLWWARVSGAEVTALLREHGRPIRYAYTDRDQPLCAYQTVFALPVPDGTGSAEMPSAARPFTARLVTELVSRGVQFAPVTLHTGVASAESHEPPYPERFSVPGESARLINAARAAGRRVVAVGTTAVRAVESAAGADGVVRPRAGWTDLVVTPERGVRVVDGLLTGLHEPEASHLLMLEAVAGRAAIDRGYDAAVRGRYLWHEFGDVHLLLR

SEQ ID NO: 72734 - protein, 348 aa, Streptomyces parvulus
  REGION 1..348: note = tr|A0A369UUU8|A0A369UUU8_9ACTN S-adenosylmethionine:tRNA ribosyltransferase-isomerase; OS = Streptomyces parvulus OX=146923 GN=DVZ84_34830 PE=3 SV=1
MMTLAVRVPEELSARVPAEQRGPGLDRDGVRLLVSRGTEVSHHVFGELPGLLRAGDLLVVNTSPTLAAAVDGAVGHTRVVVHFSTRGDDGRWAVEVREPDGRGTTRARACVDKGTVVRLPGGGRLVAEEPLSPRGDRLWWARVSGAEVTAVLREHGRPIRYAYTERDQPLSVYQTVFALPAPDGSGSAEMPSAARPFTARLVAELVSRGVQFAPVTLHTGVASAESHEPPYPERFSVPGESARLINAARAAGRRVVAVGTTAVRAVESAAGADRVVRAREGWTDLVVTPERGVRVVDGLLTGLHEPEASHLLMLEAVAGRAAIDRGYDAAVRGRYLWHEFGDVHLLLR

SEQ ID NO: 72735 - protein, 104 aa, Streptomyces parvus
  REGION 1..104: note = tr|A0A5D4JIT6|A0A5D4JIT6_9ACTN S-adenosylmethionine:tRNA ribosyltransferase-isomerase (Fragment) OS=Streptomyces parvus OX=66428 GN=FY004_08340; PE = 3 SV=1
GTTAVRALESAVGADGVVRPAEGWTDLVVTPRRGVRVVDGLLTGLHEPQASHLLMLEAVAGREALRHGYEAALQERYLWHEFGDVHLLLPDEERNAPNCSSNEW

SEQ ID NO: 72736 - protein, 352 aa, Streptomyces paucisporeus
  REGION 1..352: note = tr|A0A1M7DAT9|A0A1M7DAT9_9ACTN S-adenosylmethionine:tRNA ribosyltransferase-isomerase; OS = Streptomyces paucisporeus OX=310782; GN = SAMN05216499_10616 PE=3 SV=1
MTDTSRTADILCDFRVPPESLAAAPPARRDGVRLLVGRQGAGEVAHHAFRELPGLLRAGDVLVVNTSRTLPAAVDGSLGGDPVVVHFSTRRDDGRWVVEIRDPDGRGSTVRRPGGPAGAVVRLAGGERLALDEPLDPCGDRLWVASPSMADPLRHLHRHGRPIRYAYTERDQPLAAHQTVFATASPDGAGSAEMPSAGRPFTAPLVTELVSRGVQIAPIVLHTGVASAEAYEPPYAEPYTVPAATAWQVNAARAAGGRVIAVGTTAVRALESAADPRGVVRPARGWTELVITPERGVRAVDGLLTGLHEPEASHLLMLRAVSGDGLLERVYAEALQHRYLWHEFGDVNLLLP

SEQ ID NO: 72737 - protein, 367 aa, Streptomyces peucetius
  REGION 1..367: note = tr|A0A2D3U630|A0A2D3U630_STRC0 S-adenosylmethionine:tRNA ribosyltransferase-isomerase; OS = Streptomyces peucetius subsp. caesius ATCC 27952; OX = 316280 GN=CGZ69_07710 PE =3 SV=1
MRPGPGAVPALETLRVPDELSARVPAEQRGAGRDDVRLLVSRGSEVSHHRFGELPGRLRAGDVLVVNTSATLAAAVDGRLGGQAVVVHFSTRGDGGRWAVELRRPDGSGSTAPLAGGPAGAVVRLPGGGELVLEEPLAPGADRLWWASVSGDVARLLRRYGRPIRYGYTARNQPLSAYQTVFALPSPDGSGSAEMPSAARPFTARMVAELVSRGVQFAPLVLHTGVASAEAHEPPYPERFGVPAATAWLVNAARAAGGRIVAVGTTAVRALESAADPGGLVRPASGWTDLVVTPRRGVRAVDGLLTGLHEPEASHLLMLEAIAGRAALTCAYSEALGHRYLWHEFGDVHLVLPEEKPHSLHCSRNTW

SEQ ID NO: 72738 - protein, 371 aa, Streptomyces phaeoluteigriseus
  REGION 1..371: note = tr|A0A1V6MQ19|A0A1V6MQ19_9ACTN S-adenosylmethionine:tRNA ribosyltransferase-isomerase; OS = Streptomyces phaeoluteigriseus OX=114686; GN = BM536_021110 PE=3 SV=1
MTLALRVPAELSARVPAEQRGQGRDRDSVRLLVSRGSEPTHHGFRELPSLLRAGDLLVVNTSPTLAAAVDGRIGHARVVVHFSTLGDDGRWAVELREPDGRGTTRPRAAEPAGTEVRLPAGMRLVLEEGLGGPGGRLWWARVTAGAVPGLLREHGRAIRYSYTERDQPLSAYQTVFALPSADGSGSAEMPSAARPFTARLVAELVSRGVQFAPVTLHTGVASAEAHEPPYPERFAVPEASARLINAARAGAGRVIAVGTTAVRAVESAGADGVVRARAGWTDLVVTPERGVRVVDGLLTGLHEPEASHLLMLEAVAGRAAIDRGYAEALRGLYLWHEFGDVHLLLPEEPTHSPLTQCIASATVGEKTSAPL

SEQ ID NO: 72739 - protein, 361 aa, unidentified
  source 1..361: note = Streptomyces populi
  REGION 1..361: note = tr|A0A2I0SCE5|A0A2I0SCE5_9ACTN S-adenosylmethionine:tRNA ribosyltransferase-isomerase; OS = Streptomyces populi OX=2058924 GN=CW362_39725 PE=3 SV=1
MGATRAGRGRKRGGVPEELSARVPAEQRGAGRDRDSVRLLVSRGTEVSHHAFVELPRLLRAGDLLIVNTSATLAAAVDGRIGHARVVVHFSTRGDDGRWAVELRDPDGRGTTRARAGGPAGTVVRLPGDVRLVLEEPLSERGARLWWGRVPDTDVPALLRRYGRPIRYSYTERDQPLSVYQTVFALPSDDGSGSAEMPSAARPFTSRLVAELVSRGVQFAPVTLHTGVASAEAHEPPYPERFEVPAVSARLINAARAGGGRIVAVGTTAVRAVESAVSEDGLVRAAKGWTGLVVTPERGVRAVDGLLTGLHEPEASHLLMLEAIAGDAAVDRGYAEALRRRYLWHEFGDVHLILPPEKPSL

SEQ ID NO: 72740 - protein, 415 aa, unidentified
  source 1..415: note = Streptomyces pristinaespiralis
  REGION 1..415: note = tr|B5HGW1|B5HGW1_STRE2 S-adenosylmethionine:tRNA ribosyltransferase-isomerase OS=Streptomyces pristinaespiralis (strain ATCC 25486 / DSM 40338 / CBS 914.69 / JCM 450 7 / NBRC 13074 / NRRL 2958 / 5647); OX = 457429 GN=
MERRPGRHADGPLRGSGAGGRRSPPLPRIRGSRVPAPARGAARQWPVRGPVAAGDPMMTGRRAEAVLESLRVPEELSARVPAEERGSGRDDVRLLVSRGTEVSHHGFRDLPGRLRAGDVLVVNTSATLAAAVDGRLGGDAVVVHFSTRGDLGRWAVELRRPDGAGSTLPRPGGPAGAVVRVPGGGELVLEAPLVAGGERLWWARASVDVPTLLRRYGRPIRYRYTQRDQPLSAYQTVFALPSPDGSGSAEMPSAARPFTAGVVADLVSRGVQFAPLVLHTGVASAEAHEPPYPERFEVPATTAWLVNAARAAGGRIVAVGTTAVRALESAADGEGVVRPVSGWTDLVVTPRRGVRAVDGLLTGLHEPEASHLLMLAAVAGRDALTCAYEEALRHRYLWHEFGDVHLILPGEGLTE

SEQ ID NO: 72741 - protein, 359 aa, unidentified
  source 1..359: note = Streptomyces pristinaespiralis
  REGION 1..359: note = tr|A0A0M4DGD6|A0A0M4DGD6_STRPR S-adenosylmethionine:tRNA ribosyltransferase-isomerase; OS = Streptomyces pristinaespiralis OX=38300 GN=SPRI_5720; PE = 3 SV=1
MMTGRRAEAVLESLRVPEELSARVPAEERGSGRDDVRLLVSRGTEVSHHGFRDLPGRLRAGDVLVVNTSATLAAAVDGRLGGDAVVVHFSTRGDLGRWAVELRRPDGAGSTLPRPGGPAGAVVRVPGGGELVLEAPLVAGGERLWWARASVDVPTLLRRYGRPIRYRYTQRDQPLSAYQTVFALPSPDGSGSAEMPSAARPFTAGVVADLVSRGVQFAPLVLHTGVASAEAHEPPYPERFEVPATTAWLVNAARAAGGRIVAVGTTAVRALESAADGEGVVRPVSGWTDLVVTPRRGVRAVDGLLTGLHEPEASHLLMLAAVAGRDALTCAYEEALRHRYLWHEFGDVHLILPGEGLTE

SEQ ID NO: 72742 - protein, 370 aa, Streptomyces pseudovenezuelae
  REGION 1..370: note = tr|A0A101NAQ0|A0A101NAQ0_9ACTN S-adenosylmethionine:tRNA ribosyltransferase-isomerase; OS = Streptomyces pseudovenezuelae OX=67350 GN=AQI94_07260; PE = 3 SV=1
MRLATGVPPLEPVRKRASVPEELSARVPAEQRGAGLDRDAVRLLVSRGTEVSHHCFGELPRLLRSGDLLVVNTSPTLAAAVDGRIGHARVVVHFSTRGDDGRWAVELRDPDGRGTTRARAGGPAGTEVRLPGGGRLVLEEAVSGRLWWARVCEADVVGLLREHGRPIRYSYTERDQPLSVYQTVFALPSPDGAGSAEMPSAARPFTARLVAELVSRGVQFAPVTLHTGVASAEAHEPPYPERFSVPEASARLINAVRAGDGRVIAVGTTAVRAVESAAGADGAVRACAGWTDLVVTPERGVRVVDGLLTGLHEPEASHLLMLEAVAGRAAVDRGYEEALRRNYLWHEFGDVHLLLPREDPHTEHCVRNCW

SEQ ID NO: 72743 - protein, 360 aa, Streptomyces puniciscabiei
  REGION 1..360: note = tr|A0A542UM39|A0A542UM39_9ACTN S-adenosylmethionine:tRNA ribosyltransferase-isomerase; OS = Streptomyces puniciscabiei OX=164348 GN=FB563_5130 PE=3; SV = 1
MTVLVRVPPELSARVPVEQRGPGLDRDAVRLLVSRGTEVTHHGFRELPRLLRAGDLLVVNTSPTLAAAVDGRTGHARVVVHFSTRGDDGRWAVELREPDGRGTTRARTGTRASTEVVLPGAGRLVLQEPLSPRGERLRWARAEGDVLAMLRAHGRPIRYSYTESDQPLSVYQTVFALPSPDGAGSAEMPSAARPFTASLVAELVSRGVQFAPVTLHTGVASAEAHEPPYPERFSVPETSARLVNAARAGDGRVIAVGTTAVRAVESAAGPDGVVRAAEGWTDLVVTPGRGVRVVEGLLTGLHEPEASHLLMLRAVAGPAAVDRAYEEALRGLYLWHEFGDVHLILPEEGTHAERCDGNSW

SEQ ID NO: 72744 - protein, 360 aa, Streptomyces puniciscabiei
  REGION 1..360: note = tr|A0A1D7YHR1|A0A1D7YHR1_9ACTN S-adenosylmethionine:tRNA ribosyltransferase-isomerase; OS = Streptomyces puniciscabiei OX=164348 GN=BFF78_32380; PE = 3 SV=1
MTVTVRVPEELSARVPAEQRGPGLDRDAVRLLVSRGTEVTHHVFPELPRLLRAGDLLVVNTSPTLAAAVDGRIGHARVVVHVSTRGDDGRWAVELREPDGRGTTRARAGTHAGTEVVLPGAGRLVLEEPLSPRGERLWWARPAGDVLAVLRAYGRPIRYSYTERDQPLSAYQTVFALPSPDGSGSAEMPSAARPFTARLVAELVSRGVQFAPVTLHTGVASAQAHEPPYPERFAVPEASARLINAVRAGDGRVLAVGTTAVRAVESAAGPDGVVRAASGWTDLVVTPERGVRVVDGLLTGLHEPEASHLLMLEAVAGRAGVDRAYEEALRGLYLWHEFGDIHLILPDEGPHTERCDGNSW

SEQ ID NO: 72745 - protein, 347 aa, unidentified
  source 1..347: note = Streptomyces qaidamensis
  REGION 1..347: note = tr|A0A143BXQ7|A0A143BXQ7_9ACTN S-adenosylmethionine:tRNA ribosyltransferase-isomerase; OS = Streptomyces qaidamensis OX=1783515 GN=A4E84_09100 PE=3; SV = 1
MTSAVRVPAELSARVPVEQRGPGLERDAVRMLVSRGAEVAHHTFTELPLLLRAGDLLVVNTSATLAAAVDGWSGHARVVVHFSTRGDDGRWAVELREPDGRGTTRARTGGPPGSEVCLPGGGRLVLEEPLSGRSERLWWARVSGPEVPGLLREYGRPIRYAYTERDQPLSVYQTVFALPSADGAGSAEMPSAARPFTARLVTELVSRGVQFAPVTLHTGVASAEAHEPPCAERFVVPGASAWLINAAKAGGGRVVAVGTTAVRAVESAVGADGAVRARAGWTDLVVTPERGVRVVDGLLTGLHEPEASHLLMLEAVAGRVAVGRAYTAALQHRYQWHEFGDVHLVLP

SEQ ID NO: 72746 - protein, 364 aa, unidentified
  source 1..364: note = Streptomyces regalis
  REGION 1..364: note = tr|A0A0X3VAE4|A0A0X3VAE4_9ACTN S-adenosylmethionine:tRNA ribosyltransferase-isomerase; OS = Streptomyces regalis OX=68262 GN=ADL12_11495 PE=3 SV=1
MTLTVRVPEELSARIPAEQRGPGLDRDAVRLLVSRGTEVSHHAFGELPRLLRAGDLLVVNTSETLAAAVDGRIGHAHVVVHFSTRGDDGRWAVELRDPDERGTTRARAGGPAGTGVRLPGGVRMVLEEPLGAGSERLWWARVGGPRGSGVLGLMREHGRPIRYSYTERDQPLSVYQTVFALPSADGTGSAEMPSAARPFTLRMVTELVSRGVQFAPITLHTGVASAEAHEPPYPERFAVPEASARLINAAKAGGRRIVAVGTTAVRAVESAAGADGVVRAREGWTDLVVTPERGVRVVDGLLTGLHEPEASHLLMLEAVAGRAAIDRSYEAALRGLYLWHEFGDVHLILPAEGPHAEHCASNCR

SEQ ID NO: 72747 - protein, 387 aa, Streptomyces resistomycificus
  REGION 1..387: note = tr|A0A0L8LXA5|A0A0L8LXA5_9ACTN S-adenosylmethionine:tRNA ribosyltransferase-isomerase; OS = Streptomyces resistomycificus OX=67356 GN=ADK37_04285; PE = 3 SV=1
MTLAVRVPQELSARVPAEQRGPGLDRDAVRLLVSRGTEVSHHAFAELPGLLRAGDLLVVNTSPTLAAAVDGRIGHARVVVHFSTLGDDGRWAVELREPDGKGTTRARAGGPVGTEVRVPGGGRLVMEEPMGADAGRLGLEEPVGANGGRLVMEEPVGADGGRLWWARVLGTAVPGLLREHGRPIRYSYTERDQPLSVYQTVFALPSPDGSGSAEMPSAARPFTARLVAELVSRGVQFAPVTLHTGVASAEAHEPPYPERFAVPEASARLINAARAGDGRVVAVGTTAVRAVESAAGPDGVVRARAGWTDLVITPQRGVRVVDGLLTGLHEPEASHLLMLEAVGGRAAMDRAYGEALRGLYLWHEFGDVHLVLPEEMPHTEHCVSNSW

SEQ ID NO: 72748 - protein, 372 aa, Streptomyces rimosus
  REGION 1..372: note = tr|A0A401WBV4|A0A401WBV4_STRRY S-adenosylmethionine:tRNA ribosyltransferase-isomerase; OS = Streptomyces rimosus subsp. paromomycinus OX=92743; GN = GKJPGBOP_06559 PE=3 SV =1
MTAEVLRVPAELSAREPAEQRAPGRGRDAVRLLVSRGTAEPAHHAFRELPELLSAGDVLVVNTSRTLPAAVDGRIGDGRGRGEPVVVHFSTRADGRYPRPEAAAGDWAVELRTPDGRGSTRQRAGGPAGTVVRLPGGARLTLRAPVDPGSVRLWWARVSGAPVADVLHRYGRPIRYGYTDRDQPLSAYQTVFAVGSPDGGGSAEMPSAARPFTASLVARLVSRGVQIAPVTLHTGVASAEAYEPPYPERFAVPPSTAWQINAARAGGGRTVAVGTTAVRALESAADGAGRIRAASGWTDLVVTPERGVRAVDGLLTGLHEPEASHLLMLAAVGRAAAGGAAFGDALCRAYAEAVRQRYLWHEFGDLHLVLPV

SEQ ID NO: 72749 - protein, 371 aa, Streptomyces rimosus; identical to SEQ ID NO: 67659
  REGION 1..371: note = tr|L8EEY1|L8EEY1_STRR1 S-adenosylmethionine:tRNA ribosyltransferase-isomerase OS=Streptomyces rimosus subsp. rimosus (strain ATCC 10970 / DSM 40260 / JCM 4667 / NRRL2234) OX=1265868 GN=SRIM_37787 PE=3 SV=1

SEQ ID NO: 72750 - protein, 368 aa, Streptomyces rochei
  REGION 1..368: note = tr|A0A510DBK2|A0A510DBK2_STRRO S-adenosylmethionine:tRNA ribosyltransferase-isomerase; OS = Streptomyces rochei OX=1928 GN=SRO_5664 PE=3 SV=1
MTTIVRVPEELSARVPAEQRGPGRARDDVRLLVSRGTRVTHHAFRELPGLLRAGDLLVVNTSPTLAAAVDGRIGDAPVVVHFSTRGDDGRWAVELREPDGRGTTRARPGTRAGTEVRLPEGVRLVVEEPVGGPEPVGGHPLGGHPVGRYRDRLWWARVEGGAVLGLLRGHGRPIRYSYTTRDQPLSAYQTLFSLPSPDGAGSAEMPSAGRPFTERVVAELVRGGVGFARVTLHTGVASAEAHEPPYPEWFTVPEASARAIGAAAAGGGRVIAVGTTAVRAVESAVGADGAVRACQGWTDLVVTPERGVRVVDGLLTGLHEPEASHLLMLRAVAGRAAVDRAYEEALRGLYLWHEFGDVHLLLGEETPR

SEQ ID NO: 72751 - protein, 383 aa, unidentified
  source 1..383: note = Streptomyces roseochromogenus
  REGION 1..383: note = tr|V6JSV0|V6JSV0_STRRC S-adenosylmethionine:tRNA ribosyltransferase-isomerase OS=Streptomyces roseochromogenus subsp. oscitans DS 12.976 OX=1352936; GN = M878_35355 PE= 3 SV=1
MSTVVRLPGGLSARVPAEQRGPGLDRDAVRLLVSRGEEVTHHAFPELPLLLRAGDLLVVNTSPTLAAAVDGRIGHARAVVHFSTLGDDGRWAVELREPDGRGTTRARTGTRAGTEVVLPGAGRLVLEEPLSPRGERLWWARAAGDALGVLRAYGRPIRYSYTERDQPLSAYQTVFALPSPDGAGSAEMPSAARPFTARLVAELVSRGVRFAPVTLHTGVASAEAHEPPYPERFAVPEASARLINAVKGNQGSQGNQKRREALPWKGGGGKRAGGRVVAVGTTAVRAVESAAGPDGVVRAAEGWTDLVVTPERGVRVVDGLLTGLHEPEASHLLMLEAVAGRAGVGRAYDEALRGLYLWHEFGDVHLILPAESPHTERCDGNSW

SEQ ID NO: 72752 - protein, 363 aa, Streptomyces rubidus
  REGION 1..363: note = tr|A0A1H8S8X3|A0A1H8S8X3_9ACTN S-adenosylmethionine:tRNA ribosyltransferase-isomerase; OS = Streptomyces rubidus OX=310780 GN=SAMN05216267_104015; PE = 3 SV=1
MTAVITCETCDAEADRVDAAGLAGLRVPSELLARVPAPRRDAVRLLVGRREGGAVTHHGFRELPRLLRAGDVLVVNTSRTLPAAVDGRLPGEDVVVHFSTRRDDGRWVVEVRSPDGRGSTERRAGGPAGGVVRLRGGAELRLVAALDASGDRLWVAEPSVPAVERYLHRHGRPIRYSYTERDQPLSAYQTVFATGPAGGAGSAEMPSAGRPFTAPLVTELVSRGVQVAPIVLHTGVASAEAHEPPYAEPFAVPASTAWQVNAARAAGGRVVAVGTTAVRALESAADARGVVRAARGWTELVVTPERGVGVVDGLLTGLHEPEASHLLMLRAISGDALLERVYAEALRARYLWHEFGDVNLLLP

SEQ ID NO: 72753 - protein, 384 aa, Streptomyces scabiei
  REGION 1..384: note = tr|C9YZW6|C9YZW6_STRSW S-adenosylmethionine:tRNA ribosyltransferase-isomerase OS=Streptomyces scabiei (strain 87.22) OX=680198 GN=SCAB_71451 PE=3 SV=1
MTTAAVRVPEGLHARVPAEQRGPGLDRDGVRLMVSRGTEVSHHVFAELPRLLGAGDLLVVNTSPTLAAAVDGTVGDARVVVHFSTRGDDGRWAVELRDPDGHGTTRVRAGGPAGTRVRLPCEVRLVLEEPLSARGERLWWARVSLPSPEFPASPASSASPGPSEAVAEVLREHGRPIRYSYTERDQPLSVYQTVFALPSQDGAGSAEMPSAGRPFTARMVAELVSRGVQFAPVTLHTGVASAEAHEPPYPERFSVPEASARLVNAARAGGRRVIAVGTTAVRAVESAAGPDGVVRARDGWTDLVVTPERGVRVVDGLLTGLHEPEASHLLMLEAVAGRAAIDRSYEAAVEGRYLWHEFGDVHLVLPGIPPAHGPHGVHCDSNCP

SEQ ID NO: 72754 - protein, 385 aa, Streptomyces scabiei
  REGION 1..385: note = tr|A0A100JL67|A0A100JL67_STRSC S-adenosylmethionine:tRNA ribosyltransferase-isomerase; OS = Streptomyces scabiei OX=1930 GN=queA PE=3 SV=1
MTTAAVRVPEGLHARVPAEQRGPGLDRDGVRLMVSRGTEVSHHAFAALPRLLGAGDLLVVNTSPTLAAAVDGTVGDARVVVHFSTRGDDGRWAVELRDPDGHGTTRVRVGGPAGTRVRLPCEVRLVLEEPLSARGERLWWARVSLPSSEFPASPASSASPGPSAASEAVAEVLREHGRPIRYSYTERDQPLSVYQTVFALPSQDGAGSAEMPSAGRPFTARMVAELVSRGVQFAPVTLHTGVASAEAHEPPYPERFSVPEASARLVNAARAGGRRVIAVGTTAVRAVESAAGPDGLVRARDGWTDLVVTPERGVRVVDGLLTGLHEPEASHLLMLEAVAGRAAIDRAYEAAVEGRYLWHEFGDVHLVLPGIPPAHSPDGAHCGSN

SEQ ID NO: 72755 - protein, 338 aa, Streptomyces scabrisporus
  REGION 1..338: note = tr|A0A1T3P1L0|A0A1T3P1L0_9ACTN S-adenosylmethionine:tRNA ribosyltransferase-isomerase; OS = Streptomyces scabrisporus OX=159449 GN=B4N89_19505 PE=3; SV = 1
MTTATVHEATEPAEARGLARDGVRLLVHAGERVEHTVFRDLGRHLGAGDLLVVNTSATLPAAVDGYRADGSPVTAHFATRLDEETWILELRHTDGTPGPVAGVRRFEAVRFPGTGCGMALLLDPYPHEHTPQRLWKARITVPHARVETFLADRGRPISYAHVRERWPLTAYQTIFARDEGSAEMPSAGRPFTHELVVDLITRGVTVAPIVLHTGVSSQEVGEPPLREWFAVPESTAHQVRRARRVIAVGTTVTRALESAVGPDGEIAAASGWTDLMLGPDRPARVVDGVISGLHAPEATHLLLLEAVVGRAAVRRAYDAALAEEYLWHEFGDSSLLLP

SEQ ID NO: 72756 - protein, 388 aa, Streptomyces scopuliridis
  REGION 1..388: note = tr|A0A2T7T8F0|A0A2T7T8F0_9ACTN S-adenosylmethionine:tRNA ribosyltransferase-isomerase; OS = Streptomyces scopuliridis RB72 OX=1440053 GN=Y717_04295; PE = 3 SV=1
MSVLPALRVPEELSARVPAEQRGSGRDDVRLLVSRGTSVTHHAFRELPGQLRAGDVLVVNTSATLPAAVSGRLGPDPGGEPVVVHFSTRGDDGRWAVELRTPRRDSGAGTTLPRAGGPAGAVVRLPGGEHLVLDAPLAPGGSRLWWTRVSCADVPALLGRHGRPIRYGYTDRDQPLSAYQTLFARPSPDGAGSAEMPSAGRPFTARLVAELKSRGVRFAPITLHTGVASAEAHEPPYPERFEVPRSTAQLVNAVAADRGRIIAVGTTAVRALESAAGPDGVVRAASGWTDLVITPRRGVRVVDGLLTGLHEPEASHLLMLAAIAGRAALARGYEEALDGLYLWHEFGDVHLPPGGDRSRFALLKQHPVRLPCARCEPGHRTYITYELH

SEQ ID NO: 72757 - protein, 97 aa, Streptomyces showdoensis
  REGION 1..97: note = tr|A0A2P2GPK7|A0A2P2GPK7_9ACTN S-adenosylmethionine:tRNA ribosyltransferase-isomerase; OS = Streptomyces showdoensis OX=68268 GN=VO63_13470 PE=3; SV = 1
MLATGAGASGRKPAVVRAAAGWTGLVVTPERGVRVVDGLLTGLHEPEASHLLMLEAVAGRPALRRAYAEAVRERYLWHEFGDLHLILPEENPHRTHC

SEQ ID NO: 72758 - protein, 375 aa, Streptomyces sioyaensis
  REGION 1..375: note = tr|A0A4V1NNZ9|A0A4V1NNZ9_9ACTN S-adenosylmethionine:tRNA ribosyltransferase-isomerase; OS = Streptomyces sioyaensis OX=67364 GN=EST54_27490 PE=3; SV = 1
MTAALRVPQELSAAVPAEQRGPGLDRDAVRLLVSRGTAEPGHHDFGALPELLAAGDVLVVNTSRTLPAAVDGRVGDGRGRGEPVVVHFSTRADRWHPAGRAVAGCWAVELRSPDGRGSTRPRAGGPAGTVVRLPGGARLVLEAPLDPGSARLWWARVTRGGVSELMRCHGRPIRYGYTRRDQPLAAYQTVFALDGPGGSAEMPSAARPFTAELVARLVSKGVQFAPVSLHTGVASAEAFEPPYPERFVVPPATAWLVNAVRARQQAAGRRRSARGGAGGRIVAVGTTAVRALESAAGADGKVRAAAGWTDLVVTPQRGVRAVDGLLTGLHEPTASHLLMLEAVADAEVLRRAYAAAVERRYLWHEFGDLHLVLPD

SEQ ID NO: 72759 - protein, 414 aa, Streptomyces sp.
  REGION 1..414: note = tr|A0A2T7L7B1|A0A2T7L7B1_9ACTN S-adenosylmethionine:tRNA ribosyltransferase-isomerase; OS = Streptomyces sp. CS014 OX=2162707 GN=DBP12_28185 PE=3; SV = 1
MTARGRCGSGDVALAVPGAGGEPSHSPGPGGAGMAAGADSPALDARPGRAGEATALEALRVPDALSARVPAEQRGAGRDDVRLLVSRGRSVAHHAFRELPEQLRGGDVLVVNTSMTLPAAVNGRVGGERVVVHFSTRGADGRWAVELRAPAGAGVTGPRPGGPAGAVVRLPGGRALVLEDPLGPSAGARLWWARVPEAVPELLRRYGRPIRYGYTNRDQPLSAYRTVFAVPSPDGSGSAEMPSAARPFTAPLVAELVRRGVLFAPLSLHTGVASAESHEPPYPERFAVPAATAWLVNAVRAAGSGRVVAVGTTAVRALESAVGADGVVRPAEGWTDLVVTPRRGVRVVDGLLTGLHEPQASHLLMLEAVAGREALRHGYEAALQERYLWHEFGDVHLILPDEERNAPNCSSNEW

SEQ ID NO: 72760 - protein, 247 aa, Streptomyces sp.
  REGION 1..247: note = tr|A0A1C4SVR4|A0A1C4SVR4_9ACTN S-adenosylmethionine:tRNA ribosyltransferase-isomerase; OS = Streptomyces sp. Termitarium-T10T-6 OX=1839775; GN = GA0115253_106223 PE=3 SV=1
MRLPGGRALVLEDPLGPSAGARLWWARVPEAVPELLRRYGRPIRYGYTDRDQPLSAYRTVFAVPSPDGSGSAEMPSAARPFTVPLVAELVRRGVLFAPLSLHTGVASAEAHEPPYPERFAVPAATAWLVNAVRAAGSRRVVAVGTTAVRALESAVGPDGVVRPAEGWTDLVVTPRRGVRVVDGLLTGLHEPQASHLLMLEAVAGREALRHGYEAALQERYLWHEFGDVHLILPDEERNAPDCFSNEW

SEQ ID NO: 72761 - protein, 351 aa, Streptomyces spectabilis
  REGION 1..351: note = tr|A0A516R532|A0A516R532_STRST S-adenosylmethionine:tRNA ribosyltransferase-isomerase; OS = Streptomyces spectabilis OX=68270 GN=FH965_09410 PE=3; SV = 1
MTVVVRVPEGLDAALPVERRGRGLRRDSVRLLVSRGSAVSHHAFTELPGLLRAGDVLVVNTSPTLPAAIDGRMGHARVVVHFSTLGLDGRWAVELRDPDGEGTTRARAGGPEGAVVELPGEARLVYEEPLSADSGRLWWARVPVDVPRLLRRHGRPIRYSYTERDQPLSVYQTVFAVPSADGTGSAEMPSAARPFTPRLVARLVSRGVQFAPVRLHTGVASPEAHEPPYPERFEVPEPSARLINAARAGGGRVVAVGTTAVRAVESATGPDGVVRAAAGRTGLVVTPERGVRVVDGLLTGLHEPEASHLLMLEAVAGRAAVERGYAEAVRRLYLWHEFGDVHLLLREEFAH

SEQ ID NO: 72762 - protein, 373 aa, Streptomyces spinoverrucosus
  REGION 1..373: note = tr|A0A4Y3VH96|A0A4Y3VH96_9ACTN S-adenosylmethionine:tRNA ribosyltransferase-isomerase; OS = Streptomyces spinoverrucosus OX=284043 GN=SSP24_20410; PE = 3 SV=1
MTSALGVTPVEHVREWGKVPQELSARVPAEQRGPGLDRDAVRLLVSRGTEVSHHAFAELPRLLRAGDLLIVNTSPTLAAAVDGWIGHARVVVHFSTRGDDGRWAVELRDPDEKGTTRARAGGPAGTEVRLPGDVRLVLEEPLSARGERLWWARATGAEVRELLGAYGRPIRYSYTERDQPLSVYQTVFALPPADGAGSAEMPSAARPFTHRMVAELVSRGVQFAPITLHTGVASAEAHEPPYPERFAVPEASARVINAVRAGDGRVIAVGTTAVRAVESAAGSDGVVRAVEGWTDLVVTPERGVRVVDGLLTGLHEPEASHLLMLEAVAGAAAINRGYEEALRHRYLWHEFGDVHLLLPEEAGHTEHCSSNCW

SEQ ID NO: 72763 - protein, 630 aa, unidentified
  source 1..630: note = Streptomyces spongiicola
  REGION 1..630: note = tr|A0A388SVB5|A0A388SVB5_9ACTN S-adenosylmethionine:tRNA ribosyltransferase-isomerase; OS = Streptomyces spongiicola OX=1690221 GN=SSP531S_17100; PE = 3 SV=1
MRSGAQSLESGMRTAVIAGSLDAPTLELARRLHGRGWSLVLDTADAGAVDGVGASARTPVTALAGDVRDESHQTALVEAARGLGGLDLLVSNAGVRPPLALCDQPPDAFRRLLDVTVLAPLGLLRTALPLLRESRGVVAAVSPHTGAEPGGPHGGYDAVKAALDRLAAEIAIEEPLVRVWTVDSDDHTQVPALLELLEHGAPSGHYDTAEILRGAGAGTSLPTGPTGPTDGTNSTDPAGPTDGTNGTNGTDPTDGTSASAPDTQRGGRRPPARGSTGLSRGNFSLPANLKANVPPEEHGVDRGDVRLLVGRKASGEVTHHHFSELPRLLRPLDVLVVNTSATAPPKVDGRAGSEPVTLRFSTRLDDGRWVVELSSAEGGTPAGTCVPGTVVAVDDHARVRVVLDHRLEPGSNRLWLARFLASGPATEYLRRRGRPFHEGAGDCHPPSAQQTVFAEAAEVASGTPTHQSAELPSAARPFTDQLVTALVTRGVVIAPIELHTRPTPGAPSRPPGPELFAVPPATAHLINHVRASGGRIIAVGTTAVRALESAADPRGGVRAARGWTDLVIGPRRAIRTVSGLLTGLHQAEASHLRLLEVLAGAELLTACYAQARAERYLWGEFGDVNLLLPD

SEQ ID NO: 72764 - protein, 630 aa, unidentified
  source 1..630: note = Streptomyces spongiicola
  REGION 1..630: note = tr|A0A2S1Z430|A0A2S1Z430_9ACTN S-adenosylmethionine:tRNA ribosyltransferase-isomerase; OS = Streptomyces spongiicola OX=1690221 GN=DDQ41_21750 PE=3; SV = 1
MRSGAQSLESGMRTAVIAGSLDAPTLELARRLHGRGWSLVLDTADAGAVDGVGASARTPVTALAGDVRDESHQTALVEAARGLGGLDLLVSNAGVRPPLALCDQPPDAFRRLLDVTVLAPLGLLRTALPLLRESRGVVAAVSPHTGAEPGGPHGGYDAVKAALDRLAAEIAIEEPLVRVWTVDSDDHTQVPALLELLEHGAPSGHYDTAEILRGAGAGTSLPTGPTGPTDGTNSTDPAGPTDGTNGTNGTGPTDGTSASAPDTQRGGRRPPARGSTGLSRGNFSLPANLKANVPPEEHGVDRGDVRLLVGRKASGEVTHHHFSELPRLLRPLDVLVVNTSATAPPKVDGRAGSEPVTLRFSTRLDDGRWVVELSSAEGGTPAGTCVPGTVVAVDDHARVRVVLDHRLEPGSNRLWLARFLASGPATERLRLRGRPFHEGAGDCHPPSAQQTVFAEAAEVASGAPTHQSAELPSAARPFTDQLVTALVTRGVVIAPIELHTRPTPGAPSRPPGPELFAVPPATAHLINHVRASGGRIIAVGTTAVRALESAADPRGGVRAARGWTDLVIGPRRAIRTVSGLLTGLHQAEASHLRLLEVLAGAELLTACYAQARAERYLWGEFGDVNLLLPD

SEQ ID NO: 72765 - protein, 69 aa, Streptomyces stelliscabiei
  REGION 1..69: note = tr|A0A0L0L305|A0A0L0L305_9ACTN S-adenosylmethionine:tRNA ribosyltransferase-isomerase (Fragment) OS=Streptomyces stelliscabiei OX=146820; GN = IQ64_09685 PE=3 SV=1
RVVDGLLTGLHEPEASHLLMLEAVAGRAAVDRAYEAAAEGRYLWHEFGDVHLILPEEAPHAEHCASNCR

SEQ ID NO: 72766 - protein, 280 aa, Streptomyces stelliscabiei
  REGION 1..280: note = tr|A0A0L0L4F1|A0A0L0L4F1_9ACTN S-adenosylmethionine:tRNA ribosyltransferase-isomerase (Fragment) OS=Streptomyces stelliscabiei OX=146820; GN = IQ64_09680 PE=3 SV=1
MSTVAVGVPEELHARVPAEQRGPGLDRDGVRLLVSCGTRVSHHAFAALPGLLRAGDLLVVNTSPTLAAAVDGTVGHARVVVHFSTRGDDGRWAVELRDPDGRGTTRARAGGPAGTEVGLPGEVRLVLEEPLSARGERLWWARVSAPDVAGVLREHGRPIRYSYTERDQPLSVYQTVFALPSRDGAGSAEMPSAGRPFTARLVAELVSRGVQFAPVTLHTGVASAEAHEPPYPERFAVPEASARLINAARAKGGRRAGGRVVAVGTTAVRAVESATGPDGV

SEQ ID NO: 72767 - protein, 358 aa, unidentified
  source 1..358: note = Streptomyces sviceus
  REGION 1..358: note = tr|B5I2X4|B5I2X4_9ACTN S-adenosylmethionine:tRNA ribosyltransferase-isomerase OS=Streptomyces sviceus ATCC 29083 OX=463191 GN=SSEG_09833 PE=3 SV=1
MTLAVHVPEELSARVPAEQRGPGLDRDAVRLLVSRSTEVSHHAFGELPRLLRAGDLLVVNTSPTLAAAVDGRIRHARVVVHFSTRGDDGRWAVELRDPDGRGTTRARAGGPAGTEVRLPGGGRLILEEAVSGRLWWARVCGGEVLGLLREHGRPIRYSYTERDQPLSVYQTVFALPSPDGAGSAEMPSAARPFTARLVAELVSRGVQFAPVTLHTGVASAEAHEPPYPERFSVPEASARLINAAKAGDGRVVAVGTTAVRAVESAAGADGVVRARAGWTDLVVTPERGVRVVDGLLTGLHEPEASHLLMLEAVAGRAAIDRGYEEALRRNYLWHEFGDVHLLLPQEGPHAEHCGRNYR

SEQ ID NO: 72768 - protein, 347 aa, unidentified
  source 1..347: note = Streptomyces swartbergensis
  REGION 1..347: note = tr|A0A243RAN1|A0A243RAN1_9ACTN S-adenosylmethionine:tRNA ribosyltransferase-isomerase; OS = Streptomyces swartbergensis OX=487165 GN=CA983_39235; PE = 3 SV=1
MTSAVRVPEELSARVPVEQRGAGLERDAVRMLVSRGAEVAHHTFRELPRLLRAGDVLVVNTSATLAAAVDGWIGHARVVVHFSTRGDDGRWAVELREPDGRGTTRARAGGPAGTEVCLPGGGGLVLEEPLSGRSGRLWWARVAGPDVPGLLREHGRPIRYAYTERDQPLSVYQTVFALPSADGAGSAEMPSAARPFTARVVAELVSRGVWFAPVTLHTGVASAEVHEPPYPERFAVPEASARLINAARAGGGRVVAVGTTAVRAVESAVGADGVVRARAGWTRLVVTPERGVRVVDGLLTGLHEPEASHLLMLEAVVGRVAIERGYRAALQGRYLWHEFGDVHLVLP

SEQ ID NO: 72769 - protein, 377 aa, unidentified
  source 1..377: note = Streptomyces tirandamycinicus
  REGION 1..377: note = tr|A0A2S1SQF3|A0A2S1SQF3_9ACTN S-adenosylmethionine:tRNA ribosyltransferase-isomerase; OS = Streptomyces tirandamycinicus OX=2174846 GN=DDW44_07445; PE = 3 SV=1
MSVLEALRVPDGLSARVPAEERGAGRDDVRLMVSRGTAVAHHAFRELPGLLRAGDVLVVNTSTTLPAAVNARLGGERLVVHFSTRGDAGPSGAAPTGGVWAVELRSPDGAGSTLPRAGGPAGARVRLPGGGVLVPREPLVEGSPRLWWAAVSVDVPALLARYGRPIRYRYTERDQPLSAYRTVFALPAPDGSGSAEMPSAARPFTESLVTELVRRGVQFAPVTLHTGVASAEAHEPPYPERFEVPAATAWLVNAARASRRTGGGRRTGEGGRAGEGGRIVAVGTTAVRALESAAGPDGTVRPSAGWTDLVVTPARGVRVVEGLLTGLHEPAASHLLMLEAITGREALTRSYTEALRHRYLWHEFGDVHLVLPAEDAH

SEQ ID NO: 72770 - protein, 344 aa, Streptomyces turgidiscabies
  REGION 1..344: note = tr|L7EZ47|L7EZ47_9ACTN S-adenosylmethionine:tRNA ribosyltransferase-isomerase OS=Streptomyces turgidiscabies Car8 OX=698760 GN=STRTUCAR8_02636 PE=3 SV=1
MQVPRELSARVPAEQRGPGLDRDDVRLLVSRGTAVSHHRFAELPRRLRAGDLLVVNTSSTLAAAVDGRAGHARVVVHFSTRGDDGRWAVELRDPDGTGTTRARAGASGAVVRLPGGVELVLGEPLTAGSPRLWWAWVDGPVLPLLREYGRPIRYSYTERDQPLSVYQTVFALPSRNGAGSAEMPSAGRPFTARLVTELVSRGVQFAPVRLHTGVASAEAHEPPYPERFAVPEASARLINAVRAGDGRVVAVGTTAVRAVESAAGPDGVVRAAEGWTDLVVAPGRGVRVVEGLLTGLHEPEASHLLMLEAVAGRAAIDRGYEEALRERYLWHEFGDVHLLLPAET

SEQ ID NO: 72771 - protein, 415 aa, unidentified
  source 1..415: note = Streptomyces uncialis
  REGION 1..415: note = tr|A0A1Q4V4R2|A0A1Q4V4R2_9ACTN S-adenosylmethionine:tRNA ribosyltransferase-isomerase; OS = Streptomyces uncialis OX=1048205 GN=AB852_20030 PE=3; SV = 1
MTVGRGAAPVFRVPDGLPARLPVERRGGGAGRDAVRLLVSRGPEVSGHMFRELPALLRAGDVLVVNTSPTLAAAVDGEVGRARVVVHFSVCGDDGRWAVELREPDGTGTTRARAGSRVDTAVRLPGGARLVLEESAGGGDRLWWARLVAGAAGRAAGTGVPELLRRYGRPVRYAYTERDQPLSAYRTVFALRSDDGSGSAEMPAAGRPFTARVVTDLVRRGVQFAPVRLDRGVAPPEAVGPPPAERFGVPEASARLINAARAGGGRVIAVGATAVRAVESAVEPLGASTGAGAPEGVSGGVRLGQGAGARGAADPTPRDGGAAGAPAVVRAARGWTDLVVAPGRGARVVDGLLTGLHGPRAPQRALLRALAGERAVARAYEEALHGLYLWHEFGDVHLVLPTENPHGERCSSNSR

SEQ ID NO: 72772 - protein, 347 aa, Streptomyces variegatus
  REGION 1..347: note = tr|A0A0M2GE53|A0A0M2GE53_9ACTN S-adenosylmethionine:tRNA ribosyltransferase-isomerase; OS = Streptomyces variegatus OX=284040 GN=UK15_31535 PE=3; SV = 1
MTPAVCVPEELSARVPVEQRGPGLERDSVRMLVSRGTDVAHHAFTELPRLLRAGDLLVVNTSATLAAAVDGWTGHARVVVHFSTPGDDGRWAVELRDPDGRGTTRARAGGPAGREVCLPGDVRLVLEEPLSGRSERLWWARVSGPGVPGLLRAYGRPIRYAYTRRDQPLSVYQTVFALPSADGAGSAEMPSAARPFTARLVAELVSRGVQFAPVTLHTGVASAEAHEPPYPERFAVPEASARLINAAEAGGGRVVAVGTTAVRAVESAVGADGAVRARAGWTDLVVTPERGVRVVDGLLTGLHEPEASHLLMLEAVAGRVAIERGYEAALQGRYLWHEFGDVHLVLP

SEQ ID NO: 72773 - protein, 151 aa, Streptomyces varsoviensis
  REGION 1..151: note = tr|A0A0L8QQE8|A0A0L8QQE8_9ACTN S-adenosylmethionine:tRNA ribosyltransferase-isomerase (Fragment) OS=Streptomyces varsoviensis OX=67373; GN = ADK38_14300 PE=3 SV=1
MRAGEALRGMNPRDVLRVPEELSARVPVEARGGGLDRDGVRLLVSGRDGVSHHAFRDLPELLRAGDVLVVNTSRTLPAAVDGRLGAEPVVVHFSTRADDGRWSVEVRRPDGRGTTWRRTGDLTWAVVALPGGLRLVLEGPVDPAGDRLWWA

SEQ ID NO: 72774 - protein, 207 aa, Streptomyces varsoviensis
  REGION 1..207: note = tr|A0A0L8QQF9|A0A0L8QQF9_9ACTN S-adenosylmethionine:tRNA ribosyltransferase-isomerase (Fragment) OS=Streptomyces varsoviensis OX=67373; GN = ADK38_14295 PE=3 SV=1
HGRPIRYGYTERDQPLSAYQSVFAVPDAEGHGSAEMPSAARPFTERLVARLVSRGVQIAPVSLHTGVASGETHEPPYPERFAVPPSTAWLVNAARAGGGRIVAVGTTAVRALETAADPARGGGGRTAEPGGGAVRAAAGWTDLVVTPERGVRVVDGLLTGLHEPEASHLLMLAALAGEELLCSSYTEAIEQGYLWHEFGDVHLILPH

SEQ ID NO: 72775 - protein, 424 aa, Streptomyces vietnamensis
  REGION 1..424: note = tr|A0A0B5I8A1|A0A0B5I8A1_9ACTN S-adenosylmethionine:tRNA ribosyltransferase-isomerase; OS = Streptomyces vietnamensis OX=362257 GN=SVTN_08680 PE=3; SV = 1
MALAVRVPTELSARVPAEQRGPGRGRDDVRLLVSRGEAVSHHSFRELPVLLRAGDVLVVNTSTTLAAAVDGRLGPEPGGEPVVVHFSTRGDDGRWAVELRTPEPSGSTRPRGGGPAGAVVRLPGGGRLVLAGPLVPGSGRLWWARVSVDVPGLLGGYGRPIRYGYTERDQPLSAYRTVFARPSPDGSGSAEMPSAGRPFTARLVAELVDRGVRIAPLSLHTGVASAEAHEPPYPERFEVPAATAALVNAARAGGGRVIAVGTTVVRALESAAVGPAGRTGPGPAGSRPGGAPGASGAGSGGPGAGAGLGGPGEGTGAGSGGSVRAVGAGGPGEGTGAGSGGVVRAVRGWTDLVVTPARGVRVVDGLLTGLHEPEASHLLMLEAVAGRPALRSAYAAAVRGRYLWHEFGDVHLLLPEEGPHPPHC

SEQ ID NO: 72776 - protein, 353 aa, Streptomyces virginiae
  REGION 1..353: note = tr|A0A0L8N0X0|A0A0L8N0X0_STRVG S-adenosylmethionine:tRNA ribosyltransferase-isomerase; OS = Streptomyces virginiae OX=1961 GN=ADK75_08275 PE=3 SV=1
MPEHLVARIPAEQRGPGRGRDDVRLLVSRGTRQVSLHAFRELPGLLRAGDVLVVNTSTTLAAAVDARLGREDLVVHFSTRGDDGRWAVELRAPAGGGTTRPRAGGPAGAVVELPDGGRLVLEEPLAAGADRLWWARPHPAPYGVPALLRAYGRPIRYAYTERDQPLSAHQTVFAVPAADGSGSAEMPSAGRPFTPELVARLVSRGVQFAPLVLHTGVASQEAHEPPYPERYEVSPTTAGLVNAARAGGGRVIAVGTTAVRALESAVDEAGRVRPAAGWADLVVTPERGVRVVDGLLTGLHEPGASHLLMLEAVAGRAAVRLGYAEARARLCLWHEFGDIHLLLKDENRHHSHC

SEQ ID NO: 72777 - protein, 355 aa, unidentified
  source 1..355: note = Streptomyces viridifaciens
  REGION 1..355: note = tr|A0A1L9DSU6|A0A1L9DSU6_STRVF S-adenosylmethionine:tRNA ribosyltransferase-isomerase; OS = Streptomyces viridifaciens OX=48665 GN=BOQ63_34950 PE=3; SV = 1
MTTLTELDLHVTVPPELSARAPAEARGGARDGVRMLVGRRATGAVEHRRFTELPEALRPGDLLVVNNSGTLPAALPGRLPDGTPVALHLSSAQPDQRGSHLVELRRPMPGSAASYYPPQESPARPGLHVALPAGGAAELVQPFTDRLWYAELSLPATLLPYLRLHGRAIRYGYVDRDWPIEAYQTVFASVPGSSEMPSAARPFTPTVVARLAGRGVLVAPVTLHTGVASPEAHEAPYAERFRVPATTARLVGHVRAGGGRVIAVGTTVVRALESAVGPDGTLQEADGWTELVITPVRGVRGVDGLLTGWHEPRASHLLMLAAVAGRPLLTACYREAVRQRYLWHEFGDVNLLLPD

SEQ ID NO: 72778 - protein, 347 aa, Streptomyces viridochromogenes
  REGION 1..347: note = tr|D9WZK2|D9WZK2_STRVT S-adenosylmethionine:tRNA ribosyltransferase-isomerase OS=Streptomyces viridochromogenes (strain DSM 40736 / JCM 4977 / BCRC 1201 / Tue 494) O X=591159 GN=SSQG_01702 PE=3 SV=1
MTPAMRVPEELSARVPVEQRGPGLDRDAVRMLVSRGTEVAHHTFTELPRVLRAWDLLVVNTSATLAAAVDGWSGHTRVVVHFSTRGDDGRWAVELREPDGRGTTRPRAGGPAGTEVCLPGGVRLVLEEPLSGRSERLWWARVAGPGVVGLLREHGRPIRYAYTERDQPLSVYQTIFALPSADGAGSAEMPSAARPFTARVVAELVSRGVRLAPVTLHTGVASAEAHEPPYPERFAVPEASARLINATKAGGGRVVAVGTTAVRAVESAAGADGVVRPRAGWTGLVVTPERGVRVVDGLLTGLHEPEASHLLMLEAVAGRVAVERGYEAALQGRYLWHEFGDVHLVLR

SEQ ID NO: 72779 - protein, 378 aa, Streptomyces viridochromogenes
  REGION 1..378: note = tr|A0A0J7YUM6|A0A0J7YUM6_STRVR S-adenosylmethionine:tRNA ribosyltransferase-isomerase; OS = Streptomyces viridochromogenes OX=1938 GN=ACM01_43740; PE = 3 SV=1
MTPAMGVPLFERGRAGWSVPEELSARIPAEQRGTGLDRDAVRLLVSRGREVSHHTFGALPRLLRAGDLLVVNTSRTLAAAVDGSVGHARVVVHFSTHGDDGRWAVELRDPDGRGTTRARAGAPGMRVWLPGGVRLLLEEPLEPGSGRLWWARVSPAGVAGTDGVAGLMREHGRPIRYSYTERDQPLSVYQTVFALPSTDGAGSAEMPSAARPFTARMVTELVSRGVRFAPITLHTGVASTEMHQPPYPERFAVPGASARLINAVKAGDGRVVAVGTTAVRAVESAVGADGVVRAREGWTDLVVTPERGVRVVDGLLTGLHEPEASHLLMLEAVAGRAAIDRGYEAALRGLYLWHEFGDVHLILPTEAPHSEHCVSNCR

SEQ ID NO: 72780 - protein, 377 aa, Streptomyces viridosporus
  REGION 1..377: note = tr|D5ZQ17|D5ZQ17_STRV1 S-adenosylmethionine:tRNA ribosyltransferase-isomerase OS=Streptomyces viridosporus (strain ATCC 14672 / DSM 40746 / JCM 4963 / KCTC 9882 / NR RL B-12104 / FH 1290) OX=566461 GN=SSFG_05583 PE
MTLAVRVPEELSARVPVEQRGPGLDRDSVRLLVSRGTAVSHHAFVELPWLLRAGDLLVVNTSPTLAAAVDGWIGHTRVVVHFSTRGDDGRWAVELRDPDGRGTTRARGRGGEPGAPRGGGGGGRAGGPAGTEVRLVGGARLVLEEPLSARGERLWWARVSRDVPGVLREHGRPIRYAYTERDQPLSAYQTVFALPSPEGTGSAEMPSAGRPFTARMVAELVSRGVQFAPVVLHAGVASAEAHEPPYPERFVVPEASARLVGAVRAGGGRVIAVGTTAVRAVESAAGADGVVRARAGWTDLVVTPERGVRVVDGLLTGLHEPEASHLLMLEAVAGRAAVDRGYEEALHGRYLWHEFGDVHLVLPEEAPHTPHCSSNHE

SEQ ID NO: 72781 - protein, 365 aa, unidentified
  source 1..365: note = Streptomyces wuyuanensis
  REGION 1..365: note = tr|A0A1G9QGB9|A0A1G9QGB9_9ACTN S-adenosylmethionine:tRNA ribosyltransferase-isomerase; OS = Streptomyces wuyuanensis OX=1196353; GN = SAMN05444921_10414 PE=3 SV=1
MSVLEALRVPDGLSARVPAEERGTGRDDVRLMVSRGSAVTHHAFRALPGLLRAGDVLAVNTSATLPAAVNARLGGERLVVHFSTRADGERAGTASGGGLWAVELRSPDGAGSTLPRAGGPAGARIRLPGGGLLVPREPLVEGSPRLWWAAVSVDVPGLMARYGRPIRYGYTERDQPLSVYQTVFALPEPDGAGSAEMPSAARPFTEPLVAELVRRGVQFAPVTLHTGVASSEAHEPPYPERFEVPAATAWLLNAARARRRAGGGGRIVAVGTTAVRALESATDPDGTVRPAAGWTDLVVTPARGVRVVEGLLTGLHEPAASHLLMLAAIAGREALARSYTEALRRLYLWHEFGDVHLILPDQDTH

SEQ ID NO: 72782 - protein, 374 aa, Streptomyces yanglinensis
  REGION 1..374: note = tr|A0A1H5U549|A0A1H5U549_9ACTN S-adenosylmethionine:tRNA ribosyltransferase-isomerase; OS = Streptomyces yanglinensis OX=310779; GN = SAMN05216223_101779 PE=3 SV=1
MSAAAPAVVCETCDTEAARVDAGSLADLRLPPELLAAAPAPRRDAVRLLVGRRGSGEVTHHGFRELPGLLRAGDVLVVNTSRTLPAALNGRMAELGADPATGALVVVHFSTRRDDGRWVVEVRSPDGRGSTVRRPGGPAGAEVRLAGGGRLVLERPLVPDADRLWVASVRVPDVVRHLQRHGRPIRYGYTARDQPLSAYQTVFGTPSADGRASAEMPSAGRPFTAPLVTELVSRGVQLAPIELHTGVASAEAHEPPYAEPFTVPASTAWQVNAARAAGGRVVAVGTTAVRALETASDERGTVRAAHGWTELVVTPERGVRAVDGLLTGLHEPEASHLLMLRAVSGEQLLARVYAEALRGRYLWHEFGDVNLLLP

SEQ ID NO: 72783 - protein, 381 aa, Streptomyces yokosukanensis
  REGION 1..381: note = tr|A0A117Q2A0|A0A117Q2A0_9ACTN S-adenosylmethionine:tRNA ribosyltransferase-isomerase; OS = Streptomyces yokosukanensis OX=67386 GN=AQI95_22175; PE = 3 SV=1
MRTGFRVPEGLSARVPVEQRGPGLDRDAVRLLVSCGTRVTHHAFSELPRLLRAGDLLVVNTSPTLAAAVDGRIGHARVVVHFSTRGDDGRWAVELREPDGRGTTHPRAGTRAGTEGIEGIEGTEVVLQGAGRLVLEEPLGPRGQRLRWARAAGDVLEVLRAHGRPIRYSYTERDQPLSAYQSVFALPPPDGAGSAEMPSAARPFTARLVAELVSRGVWFAPVTLHTGVASAQAHEPPYPERFVVPEASARLINAVKAGRTGRAAPAGPSGGGRVVAVGTTAVRAVESAAGPDGVVRAAEGWTDLVVTPQRGVRVVDGLLTGLHEPEASHLLMLEAVAGRAGVDRAYEEALRGLYLWHEFGDVHLILPEESPHTERCDGNSW

SEQ ID NO: 72784 - protein, 436 aa, unidentified
  source 1..436: note = Streptosporangiaceae bacterium
  REGION 1..436: note = tr|A0A3A4B4M5|A0A3A4B4M5_9ACTN S-adenosylmethionine:tRNA ribosyltransferase-isomerase; OS = Streptosporangiaceae bacterium YIM 75507 OX=2339229; GN = D5H75_10630 PE=3 SV=1
MPSGGRLSIAGHLILERFSLSRPGFQQYRGLTAKAVQCSHGTAHPATRRGGRPVTLSAGATGSPGPLSPPAPVNQYDFDFSPSLVAQRPPEVRGTGRDDAKLLVLDRRSGLVEHRRFRDLGSYLSPGDALVLNNARVVPSLLRGEDGRGGPVVVNLFSPMDDGTWHCLVLPASAGAPGKVLRFGADGAVTGTLLGEDGAGVWRIRLDPGGTDVLDEIGEIAYPDYLVERPIDPGHYQTVFATRPGATLFPSAGRHFTSAMLDELRNRGVAVVEVTHFIAARWQHGYLRDWLGDEVDWPEDADIELTPGAAAPSLPFPRPERYEVSTRAADEINERRRAGGRVVVCGTSALRALETVTDERGGRVWPGSGWTNLIIGPGHRPRSCDSFLTNFHLPRSSELRLTAAFTGRQPLLDLYREEVIPNGYLFNEFGDSMLII

SEQ ID NO: 72785 - protein, 331 aa, unidentified
  source 1..331: note = Streptosporangiaceae bacterium
  REGION 1..331: note = tr|A0A3A3ZZ54|A0A3A3ZZ54_9ACTN S-adenosylmethionine:tRNA ribosyltransferase-isomerase; OS = Streptosporangiaceae bacterium YIM 75507 OX=2339229; GN = D5H75_39590 PE=3 SV=1
MSAAEDTAPRILEAHEPPEARGLARDEVRLLVAGPSGLRHLRFRDLPDVLAPGDVLVVNNSATLPAAVRLDKIAVHFSTELDDGDWLVELRRLTPAATEPYAGGAAGEWLPLPGGRTLVLRGRHTPRLWRARLDTDVPSYLRAHGVPIRYSYVERDWPLSAYQTVFSTVPGSAEMPSAARPFTAELVTRLVSAGVAIAPITLHTGVASPEKDEPPYPERFEVPESTARLVNARTGRLIAVGTTVVRALETAARPGGAVEAARGWTEHVVTPEGGVRAVDGLITGLHEPRSSHLRMLTAIAGQDRLARAYTAAYAERYLWHEFGDSNLLLRS

SEQ ID NO: 72786 - protein, 367 aa, Streptosporangium canum
  REGION 1..367: note = tr|A0A1I3VQ45|A0A1I3VQ45_9ACTN S-adenosylmethionine:tRNA ribosyltransferase-isomerase; OS = Streptosporangium canum OX=324952; GN = SAMN05216275_114173 PE=3 SV=1
MNAPVTDAMAPGFVLPHDLEAHEPPEARGLTRDGVRLLVSHGDTGEITHHGFAELPGLLHPGDLLVVNNSATLPAAVRLDRLAVHFSTEREDGTWLVELRRRLELRSGPGGGGAGQDTRRPGAAGAGAEMASEPYPGGAAGEWLPLPGGATLFLLERETPRLWRARLDREVPAYLRRYGVPIRYSYVERDWPLEDYQTVFGVRPGSAEMPSAGRPFTTGLVTGLVSRGIGVAPITLHTGVASPTADEPPCPEWFEVSEATARQVRLTRGSGGRVIAVGTTVVRALETAALTGGRVRAARGWTSHLVTPSTGVRAVSGLITGLHGPRSSHLLMLSAIAGGELLSLSYAEALGEGYLWHEFGDVHLILQ

SEQ ID NO: 72787 - protein, 370 aa, unidentified
  source 1..370: note = Streptosporangium minutum
  REGION 1..370: note = tr|A0A243RPI4|A0A243RPI4_9ACTN S-adenosylmethionine:tRNA ribosyltransferase-isomerase; OS = Streptosporangium minutum OX=569862 GN=CA984_13615 PE=3; SV = 1
MNTPVTDAMAPGFVLPHDLEAHEPPEARGLTRDGVRLLVSNGATGEITHHRFAGLPGLLHPGDLLVVNNSATLPAAVRLDRLAVHFSTEREDGTWLVELRRRLELRPGPSGGGAGQDARDPRRPGATGADAEMASEPYPGGAAGEWLPLPGGATLCLLERETPRLWRARLDREVPAYLRRHGVPIRYSYVERDWPLEDYQTVFGVRPGSAEMPSAGRPFTTGLVTGLVSRGIGVAPITLHTGVASPTADEPPYPEWFEVSEATARQVRLTRESGGRVIAVGTTVVRALETAALTRGRVRATRGWTSHLVTPSTGVRAVNGLITGLHEPRSSHLLMLSAIAGGELLSRSYAEALKEGYLWHEFGDVHLILR

SEQ ID NO: 72788 - protein, 371 aa, Streptosporangium roseum
  REGION 1..371: note = tr|D2B2Q3|D2B2Q3_STRRD S-adenosylmethionine:tRNA ribosyltransferase-isomerase OS=Streptosporangium roseum (strain ATCC 12428 / DSM 43021 / JCM 3005 / NI 9100); OX = 479 432 GN=Sros_0506 PE=3 SV=1
MSTPVTDAMAPGFVLPHDLEAHEPPEARGLTRDGVRLLVSHGATGEITHHGFAELPGLLHPGDLLVVNNSATLPAAVRLDRLAVHFSTEREDGTWLVELRRRMERRSGPGGGGAGQDARDRRRPGTAPAAGTEMASEPYPGGAAGEWLPLPGGATLRLLDRETPRLWRARLDREVPAYLRRYGVPIRYSYVERDWPLEDYQTVFGIRPGSAEMPSAGRPFTAELVTGLVSRGIGVAPITLHTGVTSPSTDEPPCPEWFEVSEATARQAELTRESGGRVIAVGTTVVRALETAALACGRVRAARGWTSHLVTPSAGVRAVNGLITGLHGPRSSHLPMLSAIAGGELLSRSYAEALGEGYLWHEFGDVHLILQ

SEQ ID NO: 72789 - protein, 296 aa, Streptosporangium sp.
  REGION 1..296: note = tr|A0A2Z3V698|A0A2Z3V698_9ACTN S-adenosylmethionine:tRNA ribosyltransferase-isomerase; OS = Streptosporangium sp. 'caverna' OX=2202249; GN = DKM19_00345 PE=3 SV=1
MSHRTFADLPSLLEPGDLLVVNNSATLPAAVRLDRLAVHFSTEREDGTWLVELRRRMRTASEPYPGGAGGEWLPLPGGATLRLLERETPRLWRARLDREVPAYLHRYGVPIRYSYVDEDWPLADYQTVFGVRPGSAEMPSAGRPFTTGLVTELVSRGIGMAPITLHTGVASPEKNEPPYPEWFEVPETTARQVELARESGSRVIAVGTTVVRALETAALATGRVRAARGWTSHIVTPSAGVRAVNGLITGLHEPRSSHLLMLSAIAGGELLSRSYAEALREGYLWHEFGDVHLILS

SEQ ID NO: 72790 - protein, 407 aa, Streptosporangium subroseum
  REGION 1..407: note = tr|A0A239IFY8|A0A239IFY8_9ACTN S-adenosylmethionine:tRNA ribosyltransferase-isomerase; OS = Streptosporangium subroseum OX=106412; GN = SAMN05216276_1019118 PE=3 SV=1
MSTPTTDAMASDFVLPYDLEAHEPPEARGLARDGVRLLVSRGGGSGAGEARRSTEGARGKARDARETRGCPEETRTDTRDIHGSGGDTTGARESTEDPHGKARETRGRGGEIGHRTFADLPGLLEPGDLLVVNNSATLPAAVRLDRLAVHFSTEREDGTWLVELRRRMETASEPYPGGAGGEWLPLPGGATLRLLERETPRLWRARLDREVPAYLHRYGVPIRYSYVDEDWPLADYQTVFGVRPGSAEMPSAGRPFTTGLVTELVSRGIGMAPITLHTGVASPEKNEPPYPEWFEVPETTARQVELAHESGSRVIAVGTTVVRALETAALATGRARAARGWTSHIVTPSTGVRAVNGLITGLHEPRSSHLLMLSAIAGGELLSRSYAEALREGYLWHEFGDVHLILS

SEQ ID NO: 72791 - protein, 342 aa, Subdoligranulum sp.
  REGION 1..342: note = tr|A0A1Q6SYU0|A0A1Q6SYU0_9FIRM S-adenosylmethionine:tRNA ribosyltransferase-isomerase; OS = Subdoligranulum sp. 60_17 OX=1897022 GN=queA PE=3 SV=1
MLKKDFWYDLPKELIAQEPADPRDAARLMVLDRKNDKILHSVFHELPHYLEKGDLLVVNNSKVLPARLMGTKVPTGAVCELLLLRQVKGDTWECLARPGKRMQPGTKVEFGDGSLTAVVDETLPDGNKYVTFTYDTETLYEKLDEFGKMPLPPYITKQLEDQSQYQTVYAKELGSAAAPTAGLHFTPQLMDTIRSRGVNIAEVTLHVGLGTFRPVNEESIEDHQMHSEWYSVSEETAKLINETRAAGHRVIAVGTTSCRTLESVWAKYGKIVPCSGNTSIFIYPGVELKAIDGLITNFHLPESTLIMLIAAFYGYDKTMAAYKVAVEEKYRFFSFGDAMFIR

SEQ ID NO: 72792 - protein, 342 aa, Subdoligranulum sp.
  REGION 1..342: note = tr|A0A367GF00|A0A367GF00_9FIRM S-adenosylmethionine:tRNA ribosyltransferase-isomerase; OS = Subdoligranulum sp. APC924/74 OX=2086273 GN=queA PE=3; SV = 1
MLKKDFWYDLPKELIAQEPADPRDSARLMVLDRKNDTIEHRIFHDLPEYLNAGDVLVVNNSKVLPARLMGVKVPTGAVCEVLLLRQAHGDTWECLARPGRRMQAGTKLSFGDGSLTATVDETLPDGNKYVTFQYDTQTLYEKLDEFGKMPLPPYITRQLEDQSQYQTVYAKELGSAAAPTAGLHFTPELLDTIRAKGVNIVEVTLHVGLGTFRPVNEDNIQEHQMHTEWYCVDDTAAEAINAARASGHRVIAVGTTSCRTLEAVWAKYGKIVPCSGTTDIFLYPGVELHAIDGLVTNFHLPESTLIMLISAFYGYEKTMAAYKVAVQEKYRFFSFGDAMFIQ

SEQ ID NO: 72793 - protein, 342 aa, Subdoligranulum variabile
  REGION 1..342: note = tr|D1PKT5|D1PKT5_9FIRM S-adenosylmethionine:tRNA ribosyltransferase-isomerase OS=Subdoligranulum variabile DSM 15176 OX=411471 GN=queA PE=3 SV=1
MLKKDFWYDLPKELIAQEPAEPRDAARLMVLNRKNDTIEHAIFHDLPKYLEKGDLLVVNNSKVLPARLLGTKVPTGAVCELLLLRQVKGDTWECLARPGKRMQPGTKVTFGDGTLTAVVDETMPDGNKFVTFTYDTETLYEKLDEFGKMPLPPYITKQLEDQSQYQTVYAKELGSAAAPTAGLHFTPELLDTIRANGVNIAEVTLHVGLGTFRPVNEEEIEDHQMHSEWYSVSEDTANAINATRASGHRVIAVGTTSCRTLEAVWAKYGKIVPCSGNTDIFIYPGIDLHAIDGMITNFHLPESTLIMLISAFYGYEKTMAAYKVAVEEKYRFFSFGDAMLIL

SEQ ID NO: 72794 - protein, 342 aa, Subdoligranulum variabile
  REGION 1..342: note = tr|A0A2V2FP52|A0A2V2FP52_9FIRM S-adenosylmethionine:tRNA ribosyltransferase-isomerase; OS = Subdoligranulum variabile OX=214851 GN=queA PE=3 SV=1
MLKKDFWYDLPKELIAQEPADPRDSARLMVLDRRNDRIEHAVFRDLPRYLEKGDLLVVNNSKVLPARLLGTKVPTGAVCELLLLRQVKGDTWECLARPGKRMQAGTKVSFGDGTLTAVVDETMPDGNKLVTFTYDTETLYEKLDEFGKMPLPPYITKQLEDQSQYQTVYAKELGSAAAPTAGLHFTPELMDTLRAGGVNIAEVTLHVGLGTFRPVSEDDIEDHQMHSEWYSVSEETAAAINAARQSGHRVIAVGTTSCRTLEAVWARYGKIVPCSGNTDIFIYPGVELHAIDGLITNFHLPESTLIMLISAFYGYEKTMAAYKTAVAERYRFFSFGDAMLIQ

SEQ ID NO: 72795 - protein, 349 aa, Subsaximicrobium wynnwilliamsii
  REGION 1..349: note = tr|A0A5C6ZKJ0|A0A5C6ZKJ0_9FLAO S-adenosylmethionine:tRNA ribosyltransferase-isomerase; OS = Subsaximicrobium wynnwilliamsii OX=291179 GN=queA PE=3; SV = 1
MKLSHFSFKLPEELLAEHPSEIRDESRLMVLDRKNQTIEHKLFKDVIDYFKEDDVMILNNTKVFPARLFGNKEKTGARIEVFLLRELNEEQRLWDVLVDPARKIRIGNKLYFGEDETLVAEVIDNTTSRGRTLRFLYDGSYTEFRRKLTELGETPLPKYIQRDVEPEDAERYQTIFAKNEGAVAAPTAGLHFSKHLLKRLEIKGVHLPEVTLHVGLGTFNPVEVEDLSKHKMDSEEIFITKPAVDVINRGIREKRRVCAVGTTAMRTVESSVSSNGMLNEFSGWTNKFIFPPYEFSIANCMITNFHTPKSTLLMMVSAFAGHDFMKRAYEEAVKEKYRFYTYGDAMLII

SEQ ID NO: 72796 - protein, 359 aa, Succinatimonas hippei
  REGION 1..359: note = tr|E8LK25|E8LK25_SUCHY S-adenosylmethionine:tRNA ribosyltransferase-isomerase OS=Succinatimonas hippei (strain DSM 22608 / JCM 16073 / KCTC 15190 / YIT 12066); OX = 762 983 GN=queA PE=3 SV=1
MTVLRSDFNFDLPKELIANYPSAERTKCRMLCLDGNTGELCDRTFIDLKDFLRPGDLLVFNDTKVIPARLYGTKKTGGAVELLIERITGLNTALSHIRASKAPKAGSELFIDGGYVLNVTGRDGDLFMIETADGSSLLDLLDKVGHIPLPPYIEREDEALDKDRYQTVYSKVPGAVAAPTAGLHFDNAQIEELKSLGVNTAFVTLHVGAGTFQPVREDDIVKHHMHKEFVQLPEEVANAVKATHAAGHRVIAVGTTAVRSLESAATYARENGLGEIAPFHNDTSIFIYPGYQYQVVDCLITNFHLPESTLIMLVCAFAGYKNTMHAYHHAVKDKYKFFSYGDCMFITKRTKPMDLPPSA

SEQ ID NO: 72797 - protein, 359 aa, Succinatimonas sp.
  REGION 1..359: note = tr|R5EHX1|R5EHX1_9GAMM S-adenosylmethionine:tRNA ribosyltransferase-isomerase OS=Succinatimonas sp. CAG:777; OX = 1262974 GN=queA PE=3 SV=1
MLRSDFNFDLPLELIAEYPSKERTSCRMLCLDGKDGSLMDKHFYDLKEFLKPGDLLVFNDTKVIPARLYGKKETGGACEFLIERMTGESTALSHIKASKAPKAGTVIHIDGGYDVTVTGREGDLFKIETVGDKSLLDILYEVGHIPLPPYIERPDESLDRERYQTVYSKVPGAVAAPTAGLHFDEKQLAQLKNMGVNMAFVTLHVGAGTFQPVREDDILKHHMHKEFVHLSEEVAKAVIDTHKAGHRVIAVGTTAVRSLESAATYAKSIGATEEIVPFANDTSIFIYPGYKYQVIDCLITNFHLPESTLIMLVSAFAGYKHTMNAYKHAVEEKYKFFSYGDCMFIQKNEAALNDLPPSA

SEQ ID NO: 72798 - protein, 343 aa, Succiniclasticum ruminis
  REGION 1..343: note = tr|A0A1G6MX60|A0A1G6MX60_9FIRM S-adenosylmethionine:tRNA ribosyltransferase-isomerase; OS = Succiniclasticum ruminis OX=40841 GN=queA PE=3 SV=1
MKVIDFDYALPKERIAQHPVEPRDHSRLLVVDKTTGEMEHRHFYNLPEYLKPGDLLVFNDTRVIPARLYGFKDTGAHVEVFLLTRLNNTDWEVLVRPGKKLQVGAHINFSDELSGTIIDHTDFGGRIIRFSFDGVFEEILDRLGEVPLPPYITEKLEDKERYQTVYNRDPGSAAAPTAGLHFTKELLQKIKDMGCEEVFVTLNVGLGTFRPVTEENIEDHPMHREFYSVTPEAAAAINRAKAEGRRIIAVGTTAVRTLESAGVTGEVKAGGNWTQIYIYPGYQWHIVDALVTNFHLPQSTLLMLVSSLSSREVMLRTYEEAVKLEYRFFSFGDAMFITELDKK

SEQ ID NO: 72799 - protein, 343 aa, Succiniclasticum ruminis
  REGION 1..343: note = tr|A0A1I1YX89|A0A1I1YX89_9FIRM S-adenosylmethionine:tRNA ribosyltransferase-isomerase; OS = Succiniclasticum ruminis DSM 9236 OX=1123323 GN=queA; PE = 3 SV=1
MKVTDFDYDLPKERIAQHPMEPRDHSRLLVVDKNTGVMEHRHFYDLPEYLRPGDVLVFNDTRVIPARLYGFKDTGAHVEVFLLTRLNNTDWEVLVRPGKKLQVGAHIKFAEELSGTIIDHTDFGGRIIRFAFEGVFEEILDRLGEVPLPPYITAELEDKERYQTVYNRDPGSAAAPTAGLHFTKELLQKIKDMGCEEVFVTLNVGLGTFRPVTEENIEDHPMHREFYSVTPEAAAAINRAKAEGRRIVAVGTTAVRTLESAGATGEVKAGSSWTQIYIYPGFQWHIVDALVTNFHLPQSTLLMLVSSLSSREVMLHTYAEAVKREYRFFSFGDAMFITDLEHK

SEQ ID NO: 72800 - protein, 361 aa, Succinivibrio dextrinosolvens
  REGION 1..361: note = tr|A0A1T4VKM6|A0A1T4VKM6_9GAMM S-adenosylmethionine:tRNA ribosyltransferase-isomerase; OS = Succinivibrio dextrinosolvens DSM 3072 OX=1123324; GN = queA PE=3 SV=1
MLRSDFNFDLPLNLIADYPSEQRTGCRMLCLDGSDGKLSDQHFYDLKNFLQPGDLLVFNDTKVIPARMYGKKDTGGAIEFLIERIISETCALTHIKASKAPKTRAVLHIDGGYEVNVIGREGDLFKIETVGGKSLLDILYAVGHIPLPPYIDRPDETLDRERYQTVYSKYPGAVAAPTAGLHFDEAQLEDLKAYGVNMAFVTLHVGAGTFQPVREDDILKHHMHKEFVHLTKEVADAVIATHKAGHRVIAVGTTAVRSLESAATFAKSQNSADEIVPFSNDTSIFIYPGYKYQVVDALITNFHLPESTLIMLVSAFAGYEKTMNAYKHAVADKYKFFSYGDCMFITKNPKADEDLPPSAKN

SEQ ID NO: 72801 - protein, 359 aa, Succinivibrio sp.; identical to SEQ ID NO: 72797
  REGION 1..359: note = tr|A0A316SJM7|A0A316SJM7_9GAMM S-adenosylmethionine:tRNA ribosyltransferase-isomerase; OS = Succinivibrio sp. OX=2053619 GN=queA PE=3 SV=1

SEQ ID NO: 72802 - protein, 360 aa, Succinivibrio sp.
  REGION 1..360: note = tr|A0A3C1W1L8|A0A3C1W1L8_9GAMM S-adenosylmethionine:tRNA ribosyltransferase-isomerase; OS = Succinivibrio sp. OX=2053619 GN=queA PE=3 SV=1
MLRSDFNFDLPLELIANYPSKDRTACRMLALDGNTGALSDKHFYDLKNFLKPGDLLVFNDTKVIPARLYGKKDTGGACEFLIERLLSENSALSHIKASKAPKAGQILHVDGGYDLEVKGREGDLFIIETKDQTSLLDILYKVGHIPLPPYIERADEDLDKERYQTVYSKVPGAVAAPTAGLHFDKEQLEDLKAYGVNQAFVTLHVGAGTFQPVREDDILKHHMHKEFVHLSKEVADLVIKTHQQGHRVIAVGTTAVRSLESAASYAKEIGSKDEIVPFSKDTSIFIYPGYKYQVIDGLITNFHLPESTLIMLVSAFAGYKHTMDAYKHAVALQYKFFSYGDCMFITKNDEANKDLPPSAK

SEQ ID NO: 72803 - protein, 72 aa, unidentified
  source 1..72: note = Succinivibrionaceae bacterium
  REGION 1..72: note = tr|A0A3C0C8Y8|A0A3C0C8Y8_9GAMM S-adenosylmethionine:tRNA ribosyltransferase-isomerase (Fragment) OS=Succinivibrionaceae bacterium OX=2053620; GN = DCL74_02895 PE=3 SV=1
MLRSDFNFELPRELIAEYPSAERTGCRMLCLNGADGSYEDRHFYDLKNFLKPGDLLVFNDTKVIPARLYGKK

SEQ ID NO: 72804 - protein, 290 aa, unidentified
  source 1..290: note = Succinivibrionaceae bacterium
  REGION 1..290: note = tr|A0A3C0C9L7|A0A3C0C9L7_9GAMM S-adenosylmethionine:tRNA ribosyltransferase-isomerase (Fragment) OS=Succinivibrionaceae bacterium OX=2053620; GN = queA PE=3 SV=1
GGAVEILIERILSQTSALCHMRASKPAKAGSCVNLNGGRKLLVSGREGELFKIETVNGQSVLDVLNAEGHIPLPPYIDREDEPLDRERYQTVYSREPGAVAAPTAGLHFDEPQLQELKKLGINMAFCTLHVGAGTFQPVREDDISAHHMHSEFVHLSKEVADAVIKARREGHRVIAVGTTAVRSLESAALQAEKDGCSDVIAPFSADTSIFIYPGYRYRAVDALITNFHLPESTLIMLVAAFAGYSHTMKAYEHAVKDAYKFFSYGDCMFITKNEKAYQDLPPSALAKQD

SEQ ID NO: 72805 - protein, 350 aa, Sulfitobacter brevis
  REGION 1..350: note = tr|A0A1I1ZP82|A0A1I1ZP82_9RHOB S-adenosylmethionine:tRNA ribosyltransferase-isomerase; OS = Sulfitobacter brevis OX=74348 GN=queA PE=3 SV=1
MKLSDFDFDLPERLIATRPAVPRTSARMLVADGDTIHDARVSDLTDWLRAGDLLVLNDTRVIPARLSGQRRRDSKQGPVTAKIEVTLLEPRSDGTWSALLKPLRKVHEGEEIVFSDQLSATLEGTADGQGHLRFNCAGEDFDTALAGAGSMPLPPYIAAKRPADAQDMTDYQTVFARNSGAVAAPTASLHFDDELLARLQDLGVEFVHVTLHVGAGTFLPVKVDDVSQHKMHAEWGQVSEDAAARIAAAKRQGRRVIPVGTTALRLIETAARGGEITPWQGDTDIFITPGFEFRVADALMTNFHLPKSTLMMLVSALMGPAPIRAIYAHAIAEEYRFFSYGDSSLLLPKA

SEQ ID NO: 72806 - protein, 354 aa, Sulfitobacter delicatus
  REGION 1..354: note = tr|A0A1G7PP68|A0A1G7PP68_9RHOB S-adenosylmethionine:tRNA ribosyltransferase-isomerase; OS = Sulfitobacter delicatus OX=218672 GN=queA PE=3 SV=1
MKLSDFDFDLPEDLIATRPANPRSSARLLVAEGEVLHDQRVTDLTNWLRPGDRLVLNDTRVIPARLSGLRHRASAQGNVQAKIEVTLLEPRGDGTWSALIKPLRKLKIGEEVIFSDDLRATLEAVEDGQGHLRFNCTGDDFDAALNAAGAMPLPPYIAAKRAADAQDMMDYQTVFARHAGAVAAPTASLHFDAPLLEALAAKGVAFSHVTLHVGAGTFLPVKVDDISEHKMHAEWGKVSAKAAEEITATRVAGGRVIPVGTTALRLIETAARGGEIAAWEGDTDIFITPGFTFNVTDGLMTNFHLPKSTLMMLVSALMGVQAVKDIYAYAIAEKYRFFSYGDSSLLLPQAQKPA

SEQ ID NO: 72807 - protein, 341 aa, Sulfitobacter donghicola
  REGION 1..341: note = tr|A0A410XZ81|A0A410XZ81_9RHOB S-adenosylmethionine:tRNA ribosyltransferase-isomerase; OS = Sulfitobacter donghicola OX=421000 GN=queA PE=3 SV=1
MNIEDFDYDLPESLIAQTPLKNRDQSRLLVLNRKNGNMEHLHFKDVINYFNPGDTLVLNDTRVMPARLFGLKEETGAKVEMLMLTQIEGNDWEVLLKPAKRIKVGNQLNFGDGKIIAECIEELDQGGRIMRLHYEGILQERLDELGEMPLPPYIKERLDDPDRYQTVYAKESGSAAAPTAGLHFTDELLESIKAKGVNIAFITLHVGLGTFRPVSVDNIDDHEMHSEYYQMTQETADLLNETRKKGHRIISVGTTSTRTLETIRRDHSEFVEKSGWTDIFIYPGFEYKAIDGLITNFHLPKSTLVMLVSAFSSREYILNAYQKAVEMEYRFFSFGDAMLII

SEQ ID NO: 72808 - protein, 354 aa, Sulfitobacter donghicola
  REGION 1..354: note = tr|A0A073IL45|A0A073IL45_9RHOB S-adenosylmethionine:tRNA ribosyltransferase-isomerase; OS = Sulfitobacter donghicola DSW-25 = KCTC 12864 = JCM 14565 OX=1300350 GN=queAPE=3 SV=1
MKLSDFDFDLPEELIAVRPAQPRSSARLLVAQADAIHDQHVSDLVSWLRAGDRLVLNDTRVIPARLTGARHRETGQGPVSAKIEATLLEPQADAGVWSALVKPLKKLKQGEEIVFSPELSATFEGIDQGLAYLRFNLTGEDFDTALDAAGAMPLPPYIAAKRPADSQDKTDYQTVWAKTAGAVAAPTASLHFDAALLQQLRDLGVSFTYVTLHVGAGTFLPVKVDDISDHKMHAEWGQVSAQAAQEIAQTKAEGGRVIPVGTTALRLIETAGRQGEIAPWEGDTDIFITPGFQFNVADALMTNFHLPKSTLMMLVSALMGQETIRNIYAHAVKTGYRFFSYGDASLLLPARKSD

SEQ ID NO: 72809 - protein, 354 aa, Sulfitobacter dubius
  REGION 1..354: note = tr|A0A1I2QT24|A0A1I2QT24_9RHOB S-adenosylmethionine:tRNA ribosyltransferase-isomerase; OS = Sulfitobacter dubius OX=218673 GN=queA PE=3 SV=1
MKLSDFDFDLPEELIATRPANPRSSARLLVADGAVLHDRRVTDLTDWLRPGDRLVLNDTRVIPARLSGVRHRASAQGAVQAKIEVTLLEPRGDGTWSALIKPLRKLKIGEEVIFTDALRAKLEAVEDGQGHLRFNCTGDDFDAALNAAGAMPLPPYIAAKRAADAQDMTDYQTVFARHAGAVAAPTASLHFDEALLAALAAQGVEFSHVTLHVGAGTFLPVKVDDISEHKMHAEWGRVSAKAAEEITATRVAGGRVIPVGTTALRLIETAARGGQITAWEGDTDIFITPGFEFNVTDGLMTNFHLPKSTLMMLVSALMGVQQVKDIYAHAIAEKYRFFSYGDSSLLLPKAQKPA

SEQ ID NO: 72810 - protein, 351 aa, unidentified
  source 1..351: note = Sulfitobacter geojensis
  REGION 1..351: note = tr|A0A196QPI2|A0A196QPI2_9RHOB S-adenosylmethionine:tRNA ribosyltransferase-isomerase; OS = Sulfitobacter geojensis OX=1342299 GN=queA PE=3 SV=1
MKLSDFDFDLPETLIATRPAVPRTSARLLVAEGDAIHDQRVTDLTTWLRAGDRLVLNDTRVIPARLFGVRVRDSSQGRVEAKIEVTLLEPRGDGTWSALIKPLRKLKIGEVVTFSPDLSATLQDTQDGQGHLRFNCTGPDFDAALNAAGAMPLPPYIAAKRPADAQDKTDYQTVWAKHAGAVAAPTASLHFDEALLAQLQEMGVTFTYVTLHVGAGTFLPVKVDDIAEHKMHAEWGSVSAAAADEIAETKAAGGRVIPVGTTALRLIETAGRAGRITAWEGDTDIFITPGFTFNVADALMTNFHLPKSTLMMLVSALMGTEQIKTIYAHAVTQGYRFFSYGDASLLLPPKP

SEQ ID NO: 72811 - protein, 354 aa, Sulfitobacter guttiformis
  REGION 1..354: note = tr|A0A420DIN3|A0A420DIN3_9RHOB S-adenosylmethionine:tRNA ribosyltransferase-isomerase; OS = Sulfitobacter guttiformis OX=74349 GN=queA PE=3 SV=1
MKLSDFDFDLPETLIAVRPAQPRSSARLLVAEGGKIHDGHVTDLTKWLRAGDRLVLNDTRVIPARLTGVRHRDSAQGPVSAKVEVTLLEPQAEAGVWSALVKPLKKLKPGEDVIFSDNLRATLVGVADGQGYLRFNLEGDDFDTALNAAGAMPLPPYIAAKRPADAQDKIDYQTVWAKNSGAVAAPTASLHFDAPLLEVLRDMGVVFSYVTLHVGAGTFLPVKVDDISEHKMHAEWGQVSAQASAEIAATKAAGGRVIPVGTTALRLIETAGKGGTITPWEGDTDIFITPGFIFNVADALMTNFHLPRSTLMMLVSALMGAQTIRDIYSHAINENYRFFSYGDASLLIPPRKSD

SEQ ID NO: 72812 - protein, 348 aa, unidentified
  source 1..348: note = Sulfitobacter indolifex
  REGION 1..348: note = tr|A9E6X4|A9E6X4_9RHOB S-adenosylmethionine:tRNA ribosyltransferase-isomerase OS=Sulfitobacter indolifex HEL-45 OX=391624 GN=queA PE=3 SV=1
MKLSDFDFDLPEELIATRPANPRSSARLLVAEGAQLHDRRVTDLTDWLRPGDRLVLNDTRVIPARLSGLRHRASAQGAVQAKIEVTLLEPRGDGTWSALIKPLRKLKIGEEVIFSDDLRATLEAVEDGQGHLRFNCAGDDFDAALNAAGAMPLPPYIAAKRAADAQDMTDYQTVFARHAGAVAAPTASLHFDETLLAALAAKGVTFSHVTLHVGAGTFLPVKVDDISEHKMHAEWGRVSAEAAEEITATRAAGGRVIPVGTTALRLIETAARDGQITAWEGDTDIFITPGFTFNVTDGLMTNFHLPKSTLMMLVSALMGVQQVKDIYAHAIAEKYRFFSYGDSSLLLP

SEQ ID NO: 72813 - protein, 350 aa, Sulfitobacter litoralis
  REGION 1..350: note = tr|A0A1H0PUM8|A0A1H0PUM8_9RHOB S-adenosylmethionine:tRNA ribosyltransferase-isomerase; OS = Sulfitobacter litoralis OX=335975 GN=queA PE=3 SV=1
MKLSDFDFDLPERLIATRPAVPRTAAKMLVAHNDAIIDSTVSRITDWLRPGDRLVLNDTRVIPARLTGYRSRDSAQGHVQARIEVTLLEPRGDSDWTALIKPLKKLKLFEAVVFSSDLSARLEGIENGQGVLRFNCTGPDFDSALNSAGAMPLPPYIAGKRPADAQDLTDYQTVFARKAGAVAAPTASLHFDQMLLDQLAAMGVDFSHVTLHVGAGTFLPVKVDDIADHKMHSEWGQVSAQAAAEIIETKAAGGRVIPVGTTALRLVETAARSGIIQPWEGDTDIFITPGFEFNVADALMTNFHLPKSTLMMLVSALMGQKTVQNIYKHAIESNYRFFSYGDASLLFPKT

SEQ ID NO: 72814 - protein, 354 aa, Sulfitobacter marinus
  REGION 1..354: note = tr|A0A1I6Q763|A0A1I6Q763_9RHOB S-adenosylmethionine:tRNA ribosyltransferase-isomerase; OS = Sulfitobacter marinus OX=394264 GN=queA PE=3 SV=1
MKLSDFDFDLPDRLIATRPAVPRTSARLLVADGPVLHDKKVSDLPDWLRAGDRLVLNDTRVIPARLSGQRHRDSAQGPVQARIEVTLLEPRADGTWAALIKPLKKLKIGEEVLFSDDLRATLEAVEDGQGHLRFNCGGDDFDRALNAAGAMPLPPYIAAKRPADAQDMTDYQTVFARNKGAVAAPTASLHFDEALLAQLAAMGVTFSHVTLHVGAGTFLPVKVDDISEHKMHSEWGQVSAQAASEIAETKAAGGRIIPVGTTALRLIETAGRSGSIQPWEGDTDIFITPGFTFNVADALMTNFHLPKSTLMMLVAALMGQDAIKTLYTHAIESNYRFFSYGDASLLFPRAQKTA

SEQ ID NO: 72815 - protein, 348 aa, Sulfitobacter mediterraneus
  REGION 1..348: note = tr|A0A061SQV1|A0A061SQV1_9RHOB S-adenosylmethionine:tRNA ribosyltransferase-isomerase; OS = Sulfitobacter mediterraneus OX=83219 GN=queA PE=3 SV=1
MKLSDFDFDLPEDLIATRPAVPRSAARLLVAEGDTIHDQQVTDLTKWLRPGDRLVLNDTRVIPARLSGLRFRDSAQGRVQAKIEVTLLEPRGDGTWGALIKPLRKLKIGEEVIFSDDLRATLQTVEDGQGHLAFNCTGDDFDAALNAAGAMPLPPYIAAKRAADAQDKTDYQTVWARNTGAVAAPTASLHFDEPLLAALRGKGVTFSHVTLHVGAGTFLPVKVDDISQHKMHSEWGQVSADAAAEMAATKAAGGRVIPVGTTALRLIETAAKGGAIRAWEGDTDIFITPGFEFQIADALMTNFHLPKSTLMMLVSALMGQGRIKSIYAHAIAERYRFFSYGDASLLLP

SEQ ID NO: 72816 - protein, 348 aa, Sulfitobacter mediterraneus
  REGION 1..348: note = tr|A0A2T6CGU1|A0A2T6CGU1_9RHOB S-adenosylmethionine:tRNA ribosyltransferase-isomerase; OS = Sulfitobacter mediterraneus OX=83219 GN=queA PE=3 SV=1
MKLSDFDFDLPEDLIATRPAVPRSAARLLVAEGDAIHDQQVTDLTKWLRPGDRLVLNDTRVIPARLSGLRFRDSAQGRVQAKIEVTLLEPRGDGTWGALIKPLRKLKIGEEVIFSDDLRATLQAVEDGQGHLAFNCTGDDFDAALNAAGAMPLPPYIAAKRAADAQDKTDYQTVWARNTGAVAAPTASLHFDEPLLAALRDKGVTFSHVTLHVGAGTFLPVKVDDISQHKMHSEWGQVSADAAAEMAATKAAGGRVIPVGTTALRLIETAAKGGAICAWEGDTDIFITPGFEFQIADALMTNFHLPKSTLMMLVSALMGQGRVKSIYAHAIAERYRFFSYGDASLLLP

SEQ ID NO: 72817 - protein, 354 aa, Sulfitobacter pontiacus
  REGION 1..354: note = tr|A0A1H2UFS5|A0A1H2UFS5_9RHOB S-adenosylmethionine:tRNA ribosyltransferase-isomerase; OS = Sulfitobacter pontiacus OX=60137 GN=queA PE=3 SV=1
MKLSDFDFELPERLIATRPAVPRTSAKMLVAQGDHITDTTVANISDWLRPGDRLVLNDTRVIPARLSGVRRRDSAQGPVQARIEVTLLEPRGDADWTALIKPLKKLKIDETVVFSADLSARLIGVEDGQGRLRFNCSGDDFDAALNDAGAMPLPPYIAGKRPADAQDMTDYQTVFAKNAGAVAAPTASLHFDQLLLDQLAEMGVRFSHVTLHVGAGTFLPVKVDDIADHKMHSEWGQVSAQAAAEISATKAAGGRVIPVGTTALRLVETAARSGNIQPWEGDTDIFITPGFEFNVADALMTNFHLPKSTLMMLVSALMGQKTIQKIYNHAIESNYRFFSYGDASLLFPKTQINA

SEQ ID NO: 72818 - protein, 358 aa, unidentified
  source 1..358: note = Sulfitobacter pseudonitzschiae
  REGION 1..358: note = tr|A0A221JZ76|A0A221JZ76_9RHOB S-adenosylmethionine:tRNA ribosyltransferase-isomerase; OS = Sulfitobacter pseudonitzschiae OX=1402135 GN=queA PE=3; SV = 1
MKLTDFDFDLPDELIATRPAVPRTSARLLVADTAQIHDARVSDLGRWLRAGDRLVLNDTRVIPARLSGLRARMSAQGATEARIEVTLLEPRADGTWSALVKPLKKLKIAEVVQFSDALSATLDGVEDGQGHLRFNLAGDDFDAALAEAGAMPLPPYIAAKRPADEQDKHDYQTVWARHSGAVAAPTASLHFDDALLAELAAMGVAFTHVTLHVGAGTFLPVKVDDVTTHKMHAEWGHVSATAAAEIAATKAAGGRVIPVGTTALRLIESAAQDGTVQPWDGTTDIFIYPGFTFQVADGLVTNFHLPKSTLMMLVAALIGQNRIREIYAHAIAEKYRFFSYGDASLLLPLGTDDPNRPQ

SEQ ID NO: 72819 - protein, 359 aa, unidentified
  source 1..359: note = Sulfitobacter pseudonitzschiae
  REGION 1..359: note = tr|A0A073IW88|A0A073IW88_9RHOB S-adenosylmethionine:tRNA ribosyltransferase-isomerase; OS = Sulfitobacter pseudonitzschiae OX=1402135 GN=queA PE=3; SV = 1
MKLTDFDFDLPEGLIATRPAVPRTSARLLVADAAQIHDARVSDLGSWLRPGDRLVLNDTRVIPARLSGLRARMSAQGATEARIEVTLLEPRADGTWSAMVKPLKKLKVGEVVQFSEALSATLEGTAEGQGHLRFNLTGDDFDAALAEAGAMPLPPYIAAKRPADAQDKHDYQTVWARHSGAVAAPTASLHFDEALLAELAAMGVTFTHVTLHVGAGTFLPVKVDDVTTHKMHAEWGHVSDAAAAEITATKAAGGRVIPVGTTALRLIESAARNSGTVQPWEGETDIFIYPGFRFQVADGLMTNFHLPKSTLMMLVSALIGQDRIREIYAHAITESYRFFSYGDASLLLPHGAGDPNRPQ

SEQ ID NO: 72820 - protein, 354 aa, Sulfitobacter sp.
  REGION 1..354: note = tr|A0A1J0WHL1|A0A1J0WHL1_9RHOB S-adenosylmethionine:tRNA ribosyltransferase-isomerase; OS = Sulfitobacter sp. AM1-D1 OX=1917485 GN=queA PE=3 SV=1
MKLSDFDFDLPEDLIATRPAVPRSSARLLVAEGDALHDGVVTDLTEWLRAGDRLVLNDTRVIPARLTGMRTRQSAQGAVSARIEVTLLEPRADGTWAALVKPLRKLRQGERVVFSRDLDATLEAVSDGQAHLRFNCTGADFDAALNAAGAMPLPPYIAARRPADAQDRTDYQTVWARHAGAVAAPTASLHFDQPLLEALAAKGVTFSHVTLHVGAGTFLPVKVDDITQHRMHAEWGRVDADAAAEIAATRAAGGRVIAVGTTALRLIETAARDGEIGPWEGDTDIFITPGFRFNVTDALMTNFHLPRSTLMMLVSALMGQQAIRDIYAHAIDRKYRFFSYGDASLLIPASKKIW

SEQ ID NO: 72821 - protein, 349 aa, Sulfitobacter sp.
  REGION 1..349: note = tr|A0A345RAK0|A0A345RAK0_9RHOB S-adenosylmethionine:tRNA ribosyltransferase-isomerase; OS = Sulfitobacter sp. JL08 OX=2070369 GN=queA PE=3 SV=1
MKLSDFDFDLPDALIATRPATPRTSARLLVASGDRITDAQVHDLGTYLRAGDLLVLNDTKVIPARLSGIRKRDSAQGQTKARIEVTLLEPAADGTWSALIKPLKKVRIGETIEFPLGLTATLTGTGDGQGQLQFNLSGDDFDHGLAAAGAMPLPPYIAAKRPADERDKTDYQTVFARNVGAVAAPTASLHFDQALLAQLQDMGVRLTYVTLHVGAGTFLPVKVDDVTTHKMHAEWGQVSAEAAAAIAQTKTAGGRVIPVGTTALRLIESAARETGSVAQWQGDTDIFIYPGFAFRVTDALMTNFHLPRSTLMMLVSALMGQDRIARIYEHAISQGYRFFSYGDSSLLIP

SEQ ID NO: 72822 - protein, 348 aa, Sulfobacillus acidophilus
  REGION 1..348: note = tr|G8TW14|G8TW14_SULAD S-adenosylmethionine:tRNA ribosyltransferase-isomerase OS=Sulfobacillus acidophilus (strain ATCC 700253 / DSM 10332 / NAL) OX=679936 GN=Sulac_ 2478 PE=3 SV=1
MTPPIEWNLGMTVTEAAAPPEAVGRSRAQVRLLVVDRRRGVVRCEEFTGFPSWLGPGDVLVYNDSRTIPAALPALWDGVPARVHLAVRLSSRRAIVEKRRADGGPDPALSDRNASVAILSRLGDLMALGRVVRRFHPESRLWVIDTDRDLYELAPLVGDPIRYGYVDRPYPLYYYQTIFGRVPGSAEMPSAGRPFTYEIVARMVERGVILCPITLHTSVSSHEVTQGLARYPVLPEYYHIPRRTVRHITEARQDGRRIIALGTTVVRGLETWAASGFGRRRGWTRYLITPNNPPLVVTNLVTGLHDNFSSHLALLYAFVDPPFLREAYRQAGLAGFRWHEFGDLSFIV

SEQ ID NO: 72823 - protein, 363 aa, Sulfobacillus benefaciens
  REGION 1..363: note = tr|A0A2T2XFW8|A0A2T2XFW8_9FIRM S-adenosylmethionine:tRNA ribosyltransferase-isomerase; OS = Sulfobacillus benefaciens OX=453960 GN=C7B46_09945 PE=3; SV = 1
MKASQLNLEIHAPAAIVPSELRGIPRDGVKLLVMDPSTKTIRHALVQDLYKFLRRGDLVVVNDSAMIGARLSALHDGTPLTVHLAGELGENSVLIERRQSTGAPDWTPFPLGSRLKIVDDGGQPVSSGVIVQHFHPRSRLWVVNTETSWYRIAQQLGRPIRYQYIAQDLPMSSYQTIFGHRPGSVEMPSASRPFTLEMMSKLREIGVEFSPITLHTTVSSHEIDSSWEDHPAFPEWFEVSETTARRVNGAIRHRHRIIALGTTVVRALESAYDERLQRIVATAGWTRRLITPELPPRVVDGLITGLHDNFTSHLALLYAFVEPDWLKLVYHGAVQSGYLWHEFGDLCLIASGSNKLEEGLTSP

SEQ ID NO: 72824 - protein, 362 aa, unidentified
  source 1..362: note = Sulfuricaulis limicola
  REGION 1..362: note = tr|A0A1B4XF49|A0A1B4XF49_9GAMM S-adenosylmethionine:tRNA ribosyltransferase-isomerase; OS = Sulfuricaulis limicola OX=1620215 GN=queA PE=3 SV=1
MRKSDFNYSLPPELVAQYPASPRSASRLLHLDGASGACRDMKFADLPALLRAGDLLVFNDTCVIPARLLGYKDSGGRIEVLIERLLDVHRVLAQVRSSKPPRPGQKLILDGGATAVVQGREGEFYVLEFEIGVKLKESPLPLKGGEGEGKGEGVDESVTEILDRIGHVPLPPYIARADEGADRERYQTVYARHRGAVAAPTAGLHFDEAMLGRLKEMGVDSAFVTLHVGAGTFQPLRVEDIREHRMHAEYVRVLPGDSDKINSAKKEGRRVVAVGTTVVRALETAARDGRLDPFEGETDIFIYPGYRFQIVDALLTNFHLPGSTLLMLVCAFGGTENVLNAYRHAVEGRYRFYSYGDAMFVD

SEQ ID NO: 72825 - protein, 342 aa, Sulfuricella denitrificans
  REGION 1..342: note = tr|S6B682|S6B682_SULDS S-adenosylmethionine:tRNA ribosyltransferase-isomerase OS=Sulfuricella denitrificans (strain DSM 22764 / NBRC 105220 / skB26) OX=1163617 GN=qu eA PE=3 SV=1
MKTSDFDFDLPPELIAQFPTQERSQSRLLHLNGVSGALADGRFCDLTQLLKPGDLLVFNDTRVIKARLFGVKDSGGKLEVLIERVLDEHHALAQIRASHAPKLDSGLLLAGVIAATVEERQGELYRLHFAGETPLLELLEQYGSLPLPPYITHAPEALDESRYQTVYARQPGAVAAPTAGLHFDPAMLESLEKMGVKIAYVTLHVGAGTFQPVRVENIAEHHMHSEWYTVPQRTVDLIRQARTAGGRVMAVGTTSLRALESAAASGELEAGSSETNIFIFPGYRFRVVERLLTNFHLPKSTLLMLVSAFGGMENIRCAYRHAVEQRYRFFSYGDAMLIERKE

SEQ ID NO: 72826 - protein, 342 aa, Sulfuricella sp.
  REGION 1..342: note = tr|A0A0E9ME03|A0A0E9ME03_9PROT S-adenosylmethionine:tRNA ribosyltransferase-isomerase; OS = Sulfuricella sp. T08 OX=1632857 GN=queA PE=3 SV=1
MKTSDFDFDLPPELIAQFPTQERSQSRLLHLDGANGELADEQFSDLPKFLKPGDLLVFNDTRVIKARLFGVKDSGGKLEVLIERLLDEHHALAHIRASHAPKPGSGLLLAGEIAATVEERQGELYRLRFAGETPLLELLEQYGSLPLPPYITHAPEALDETRYQTVYARQPGAVAAPTAGLHFDPAMLETLEKMGVKIAYVTLHVGAGTFQPVRVEEIAEHHMHSEWYTVPQRTVDLIRLARAEGGRVMAVGTTSLRALESASAGGELEAGSGETNIFIFPGYRFRVVERLLTNFHLPRSTLLMLVSAFGGMENIRRAYRHAVENRYRFFSYGDAMLIERQQ

SEQ ID NO: 72827 - protein, 370 aa, Sulfuricurvum kujiense
  REGION 1..370: note = tr|A0A2D3WIQ2|A0A2D3WIQ2_9HELI S-adenosylmethionine:tRNA ribosyltransferase-isomerase; OS = Sulfuricurvum kujiense OX=148813 GN=queA PE=3 SV=1
MEFLFLSFVLLIRHRKKKPIWLKTKKRRLTNLDPLLTSSYHYELPDELIATHPIHPRDHARLLVYNRSDKTITHARFDALESFLPQNCGIIFNDTKVIKARLYGKKESGGAIELLINRPLDAYAINVYIKGRVKLNTLLLFDADLTARITALNEDGSREVNFYLRECRIRFEELLPILEKVGHIPLPPYLGREDNSEDEREYQSVFAHYEGAVAAPTASLHFSDKLFEAVCSSHPHAFVTLHVGSGTFKPVEAEIITDHPMHSEYFDISASAQELLHSDIPLLSIGTTSTRTVEYHVRTQELSGEANLFLHPNNPPQRVNHLLTNFHLPQSTLLMLVASFVGLEETHRIYQSAIDEKYRFFSYGDAMLIL

SEQ ID NO: 72828 - protein, 340 aa, Sulfuricurvum kujiense
  REGION 1..340: note = tr|E4U0G6|E4U0G6_SULKY S-adenosylmethionine:tRNA ribosyltransferase-isomerase OS=Sulfuricurvum kujiense (strain ATCC BAA-921 / DSM 16994 / JCM 11577 / YK-1); OX = 70903 2 GN=queA PE=3 SV=1
MLDPLLTSSYEYTLPEELIATHPIHPRDHARLLVYNRSDKTITHARFDALESFLPENCGIIFNDTKVIKARLYGKKESGGAIELLINRPHDAYAINVYIKGRVKTGTILLFDDTLHAKVIQLHDDGSREVNFYHHENLIRFEELLPILEKIGHIPLPPYLGREDDSEDEREYQSVFAHHEGAVAAPTASLHFTDELFDAVCSSHPHAFVTLHVGSGTFKPVEAEVITDHPMHSEYFHISTDAQNLIRSDLPLLCIGTTSTRTVEYHVRAKETQGEANLFLHPNNPPLRINHLLTNFHLPQSTLLMLVASFVGLEETHRIYREAIDQNYRFFSYGDAMLIL

SEQ ID NO: 72829 - protein, 342 aa, Sulfuricurvum sp.
  REGION 1..342: note = tr|A0A1G3SK27|A0A1G3SK27_9HELI S-adenosylmethionine:tRNA ribosyltransferase-isomerase; OS = Sulfuricurvum sp. RIFOXYD2_FULL_44_160 OX=1802249; GN = queA PE=3 SV=1
MTNLDPLLTSSYHYELPDELIATHPIHPRDHARLLVYNRSDKTITHARFDALESFLPQNCGIIFNDTKVIKARLYGKKESGGAIELLINRPLDAYAINVYIKGRVKLNTLLLFDADLTARITALNEDGSREVNFYLRECRIRFEELLPILEKVGHIPLPPYLGREDNSEDEREYQSVFAHYEGAVAAPTASLHFSDKLFEAVCSSHPHAFVTLHVGSGTFKPVEAEIITDHPMHSEYFDISASAQELLHSDIPLLSIGTTSTRTVEYHVRTQELSGEANLFLHPNNPPQRVNHLLTNFHLPQSTLLMLVASFVGLEETHRIYQSAIDEKYRFFSYGDAMLIL

SEQ ID NO: 72830 - protein, 341 aa, Sulfuricurvum sp.
  REGION 1..341: note = tr|A0A0C2VWX3|A0A0C2VWX3_9HELI S-adenosylmethionine:tRNA ribosyltransferase-isomerase; OS = Sulfuricurvum sp. PC08-66 OX=1539066 GN=queA PE=3 SV=1
MENSLFLTQTYDYALDDSYIATHPAHPKDSAKLLVYHRKSGTITHTTFAHLLEFLPPDAALLLNDTKVIKARLYGHKKSGGAIELLLNSPQNDNRFLVYIKGRVKVGTQLLFDEDLTAQVEALHKDGTRSVTFWQGDTQLDFVALEAILARIGHLPLPPYIKRADTLQDTQDYQTLFAQNIGAVAAPTASLHFTPELLEATLARHAHAFVTLHVGAGTFKPVEHEDIRHHTMHSEVFALSDEAKKLIDSPVPIIAVGTTVTRTVEYYVRTQEHMGQANLFLHPHNPPQRVNHLITNFHLPKSTLLMLVASFVGVEKTLALYEEAKRQNYRFFSYGDAMLIL

SEQ ID NO: 72831 - protein, 345 aa, unidentified
  source 1..345: note = Sulfuriferula multivorans
  REGION 1..345: note = tr|A0A401JGU3|A0A401JGU3_9PROT S-adenosylmethionine:tRNA ribosyltransferase-isomerase; OS = Sulfuriferula multivorans OX=1559896 GN=queA PE=3 SV=1
MRTTDFDFSLPDELIAQFPPSSRSSSRLLHLDGASGQLADRLFTGLPAYLRRGDVMVFNDTRVIKARLYGRKASGGQVELLIERVTGDHEALAFIRASHAPQPGSTLSVADAVTLTVLAREHDLYRLRFDGSASVLDVLEQYGALPLPPYIERAADSADDARYQTVYARHPGAVAAPTAGLHFDEAMLAQLDAMGVIRTHVTLHVGAGTFQPVRVDDLAEHTMHSERYTIPQATVDAIAQAKAQGGRVLAVGTTSLRALEAAAQSGTLIAGAGETSIFITPGYRFKVVERLLTNFHLPKSTLVMLVSAFAGLDHIRHAYAHAVAERYRFFSYGDAMLIERKDHGI

SEQ ID NO: 72832 - protein, 345 aa, unidentified
  source 1..345: note = Sulfuriferula plumbiphila
  REGION 1..345: note = tr|A0A512L895|A0A512L895_9PROT S-adenosylmethionine:tRNA ribosyltransferase-isomerase; OS = Sulfuriferula plumbiphila OX=171865 GN=queA PE=3 SV=1
MRTADFDFSLPAELIAQFPPSSRSSSRLLHLDSASGQLADCQFTDLPGYLRRGDVMVFNDTRVIKARLYGRKASGGQVELLIERVTGDHEALAFIRASHAPRPGSALSVADTVTVTVLAREQDLYRLRFDGSASVLEVLEQYGTLPLPPYIERAADGADDARYQTVYARHPGAVAAPTAGLHFDQAMLAQLDAMGVIRTHVTLHVGAGTFQPVRVDDLAEHTMHSERYTIPQATVDAIAQAKAQGGRIVAVGTTSLRALEAAAQSGTLIAGAGETSIFITPGYRFKVVERLLTNFHLPKSTLLMLVSAFAGLDNIRHAYAHAVTERYRFFSYGDAMLIERKYHEI

SEQ ID NO: 72833 - protein, 342 aa, unidentified
  source 1..342: note = Sulfuriferula sp.
  REGION 1..342: note = tr|A0A1Y0G618|A0A1Y0G618_9PROT S-adenosylmethionine:tRNA ribosyltransferase-isomerase; OS = Sulfuriferula sp. AH1 OX=1985873 GN=queA PE=3 SV=1
MRTDDFDFELPDALIAQFPPAVRTASRMLHVDPKNRQLTDRLFTDLPTYLQAGDVLVFNDTRVIKARLYGQKISGGQVELLIERVINEHEALTFIRASHAPKTDSQITIAEQVPLTVLGREHDLYHVRFDVPQTVLEVLEQYGALPLPPYIERAADRADDARYQTVYARHPGAVAAPTAGLHFDETMLAQLDAMGVIRAHVTLHVGAGTFQPVRVDNIADHVMHSERYTIPQATVDAIAQANAGSGRIVAVGTTSLRALEAAAQSGHLQAGEGETSIFITPGYRFKVVERLLTNFHLPKSTLLMLVSAFGGMDMMRQAYAHAVARKYRFFSYGDAMLIERAD

SEQ ID NO: 72834 - protein, 344 aa, unidentified
  source 1..344: note = Sulfurifustis variabilis
  REGION 1..344: note = tr|A0A1B4VDS7|A0A1B4VDS7_9GAMM S-adenosylmethionine:tRNA ribosyltransferase-isomerase; OS = Sulfurifustis variabilis OX=1675686 GN=queA PE=3 SV=1
MRKSDFYYELPPDLIAQYPPSERTHARLLHLDGASAVPVDRTFVDLPRLLRAGDLLVFNDTRVLRARIHGTKDTGGRVELLVERVLGERRASAHVRASKPPKPGQRIALEGGAACRVERRTGELYDLAFDRPVLETLERHGHVPLPPYIDRADEPGDHARYQTVYARVPGAVAAPTAGLHFDEALLAQLDAAGTERACVTLHVGSGTFQPLRGDEVEGQRLHAERVVVSAQAADRVNRAKGEGRRVVAVGTTVVRALEASAREGRARAFDGETDIFIYPGFRFRVVDALLTNFHLPESTLLMLVCAFGGTERVLAAYRHAVRQRYRFYSYGDAMFVEPRTGATA

SEQ ID NO: 72835 - protein, 336 aa, Sulfurihydrogenibium azorense
  REGION 1..336: note = tr|C1DXU9|C1DXU9_SULAA S-adenosylmethionine:tRNA ribosyltransferase-isomerase OS=Sulfurihydrogenibium azorense (strain Az-Fu1 / DSM 15241 / OCM 825) OX=204536; GN = que A PE=3 SV=1
MKLSDFDYHLPKELIAKYPVEPRDSCRLMVLNREKKSIEHRVFRDIVDYLQEGDLLVLNDTKVIPARLIGKKEKTGANIEVFLLKPVEDNIWEALIKNVRRLKPKDKIVVAQDFFVEFLERQEDKVIVKLHSKDIKEDLEKYGHIPLPPYIERPDEEKDKQLYQTVFAKKEGSVASPTAGLHFTEELLKKVKDKGVNITYITLHVGLGTFKPVKEEDITKHKMHEEFYSIPKESLDLIEKTKESGKSVIAVGTTVVRTLESFVLTGKTEGFTDIFIYPPFEFKIVDKLITNFHLPKSTLLMLVSAFASKDFILKAYNEAVKQKYRFFSYGDAMFII

SEQ ID NO: 72836 - protein, 336 aa, Sulfurihydrogenibium sp.
  REGION 1..336: note = sp|B2V7F8|QUEA_SULSY S-adenosylmethionine:tRNA ribosyltransferase-isomerase OS=Sulfurihydrogenibium sp. (strain YO3AOP1) OX=436114 GN=queA PE=3 SV=1
MKLSDFDYHLPKELIAKYPAQPRDSCRLMVLNRKDKTIEHRIFRDVIDYLKPGDTLVLNNTKVIPARLIGKKEKTNANIEVFLLRPIEDNIWETLIKNVRRLKKNQKIIISDDFYVEFLSKDDEKAIVKIHSKDIKSDLEKYGHVPLPPYIEREDEEKDKDYYQTVFADKEGSVASPTAGLHFTKELLEKIKEKGVNIAYITLHVGLGTFKPVKTEDITKHKMHEEYFTIPKETLEMIKKTKENKKSLVAVGTTVVRALETYGKFGKTEGFTDIFIYPPYEFKIVDKLITNFHLPKSTLLMLVSAFADRDFILRAYNGAVKEKYRFFSYGDAMLIV

SEQ ID NO: 72837 - protein, 336 aa, Sulfurihydrogenibium sp.
  REGION 1..336: note = tr|A0A2J6WYQ7|A0A2J6WYQ7_9AQUI S-adenosylmethionine:tRNA ribosyltransferase-isomerase; OS = Sulfurihydrogenibium sp. OX=2053621 GN=queA PE=3 SV=1
MKLSDFDYHLPKELIAKYPVEPRDSCRLMVLDRKNQTIEHRIFRDIVDYLKEGDLLVLNDTKVIPARLIGKKEKTGANLEVFLLKQVEDNVWEALIKNIRRLKPGDRIFISEDFFVEYLSREEDKGFVKLHSKNLKEDLEKYGHIPLPPYIERPDEEKDKQLYQTVFAKKEGSVASPTAGLHFTTELLEKIKSKGVKIAYVTLHVGLGTFKPVKDEDITKHKMHEEFYSIPEETLTMIKETKEKGKSVIAVGTTVVRTLESYAITGKREDYTNIFIYPPFEFKIVDKLITNFHLPKSTLIMLVSAFATREFILKAYNEAVKEKYRFFSYGDAMFIM

SEQ ID NO: 72838 - protein, 147 aa, Sulfurihydrogenibium yellowstonense
  REGION 1..147: note = tr|C4FL88|C4FL88_9AQUI S-adenosylmethionine:tRNA ribosyltransferase-isomerase (Fragment); OS = Sulfurihydrogenibium yellowstonense SS-5 OX=432331; GN = SULYE_1342 PE=3 SV= 1
KIKEKGVNIAYITLHVGLGTFKPVKTEDITKHKMHEEYFTIPKETLEMIKKTKENKKSVVAVGTTVVRALETYGKFGKTEGFTDIFIYPPYEFKIVDKLITNFHLPKSTLLMLVSAFADRDFILKAYNEAVKERYRFFSYGDAMLIV

SEQ ID NO: 72839 - protein, 190 aa, Sulfurihydrogenibium yellowstonense
  REGION 1..190: note = tr|C4FJ30|C4FJ30_9AQUI S-adenosylmethionine:tRNA ribosyltransferase-isomerase OS=Sulfurihydrogenibium yellowstonense SS-5 OX=432331 GN=SULYE_0571 PE=3 SV=1
MKLSDFDYHLPKELIAKYPAQPRDSCRLMVLDRKDKTIEHRIFRDVIDYLKPGDTLVLNNTKVIPARLIGKKEKTNANIEVFLLRPIEDNIWEALIKNVRRLKKNQKIIISDDFYVEFLSKDDEKAIVKIHSKDIKSDLEKYGHIPLPPYIEREDEEKDKDYYQTVFAEKEGSVASPTAGLHFTKELLEK

SEQ ID NO: 72840 - protein, 342 aa, Sulfurimonas autotrophica
  REGION 1..342: note = tr|E0UPU2|E0UPU2_SULAO S-adenosylmethionine:tRNA ribosyltransferase-isomerase OS=Sulfurimonas autotrophica (strain ATCC BAA-671 / DSM 16294 / JCM 11897 / OK10) OX=56 3040 GN=queA PE=3 SV=1
MSNKELLTSSYDFTLPDELIASYPASPRDHAKLLVYDRATDTITHTFFYNLEEFLPKECALIFNDTKVIKARLFGQKPSGGKIELLINRALNACDVNVYIRGKVKAGSEIFFEDNLKAKVTKLNDDGSREVNFYQNDTLLRFEDLLPIIDKIGHIPLPPYIQRADEDEDANEYQSVFACQEGAVAAPTASLHFTPAQHERICKNHKHAYVTLHVGSGTFKPVEADIITEHPMHSEYYDISPQAQAILDSNIPIVSVGTTSTRTIEFYARHKEQTKGEANLFLHPNNKPLRVNHLLTNFHLPKSTLLMLVASFVGLQKTQELYAEAIKEKYRFYSYGDAMLIL

SEQ ID NO: 72841 - protein, 342 aa, Sulfurimonas denitrificans
  REGION 1..342: note = sp|Q30PZ7|QUEA_SULDN S-adenosylmethionine:tRNA ribosyltransferase-isomerase OS=Sulfurimonas denitrificans (strain ATCC 33889 / DSM 1251) OX=326298 GN=queA PE=3 SV=1
MSSSELLTSSYDFTLPEELIATQPANPRDSAKLLVYDRASDEISHVHFYDFEKFIPKNCALIFNDTKVIKARLFGQKESGGKIELLINRALDAHNIHVFTRGKVKIGTKISFGLELFAKIIELLEDGSRVVNFYKNDSILRFEEILPIIDKIGHIPLPPYIQREDNKDDEIEYQSVFAKEEGAVAAPTASLHFTKEQHERVCTKFTHAYITLHVGSGTFKPVECEKILEHTMHSEYYDISDRAKELLDSKVSILSVGTTSTRTIEFYARNKEHQRGEANLFLHPKNKPLRVDHILTNFHLPKSTLLMLVASFVGVDKAQELYKIAIEKEYRFYSYGDAMLIL

SEQ ID NO: 72842 - protein, 342 aa, unidentified
  source 1..342: note = Sulfurimonas gotlandica
  REGION 1..342: note = tr|B6BIN2|B6BIN2_SULGG S-adenosylmethionine:tRNA ribosyltransferase-isomerase OS=Sulfurimonas gotlandica (strain DSM 19862 / JCM 16533 / GD1) OX=929558 GN=queA; PE = 3SV=1
MNNPELLTSSYDFILPDELIATHPASPRDHAKLLVYNRRTNEIKHCHFYDFEKYIPKDCALIFNDTKVIKARLYGHKLSGGKIELLINKPLDANNINVYIRGKVKDETKILFDEDLEAVVLKLNDDGSRVVNFFQKNKLLRFEDILPIIDRIGHIPLPPYIQREDNAEDASEYQSVFARQEGAVAAPTASLHFTEEQHERVCKNHDHAFITLHVGSGTFKPVEAQTITDHPMHSEYYEISNKAKELLDSDKPILSIGTTSTRTVEFYARHKEMQRGEANLFLHPNNKPIRVNYLLTNFHLPKSTLLMLVASFVGVEKAQQLYANAIKNNYRFYSYGDAMLIL

SEQ ID NO: 72843 - protein, 348 aa, unidentified
  source 1..348: note = Sulfurimonas hongkongensis
  REGION 1..348: note = tr|T0JSY2|T0JSY2_9HELI S-adenosylmethionine:tRNA ribosyltransferase-isomerase OS=Sulfurimonas hongkongensis; OX = 1172190 GN=queA PE=3 SV=1
MLQSPRVSKDELLTSSYDFLLPEKLIASYPANPRDSAKLLIYNRQTKEIIHTHFYELESFIPKECALIFNDTKVIKARLFGKKASGGKLELLLNRPLDATNINVYIRGKVKVSSEIFFGNGLVAVVKELKDDGSRVVNFTKEGKLLRFEELLPIIDKIGHIPLPPYIQREDNTDDAKEYQSVFAKEEGAVAAPTASLHFTQEQHERVCKNYRHAYVTLHVGSGTFKPVEVETITDHPMHSEYYEISDDAKELLDSNLPILSVGTTSTRTIEFYVRNKEQQRGEANLFLHPQNKPLRVNHLLTNFHLPKSTLLMLVASFVGVQIAQKLYREAINKEYRFYSYGDAMLIL

SEQ ID NO: 72844 - protein, 342 aa, Sulfurimonas sp.
  REGION 1..342: note = tr|A0A2D3VXW7|A0A2D3VXW7_9HELI S-adenosylmethionine:tRNA ribosyltransferase-isomerase; OS = Sulfurimonas sp. UBA12504 OX=2015903 GN=queA PE=3 SV=1
MHTQEYFTSSYDFELPSELIATHPAHPRDHAKLLVYNRQTQEISHAYFYDLENFLPKDVALIFNDTKVIKARLFGHKKSGGKVELLINRPLNAKDISVYVRGKVKPQTQLFFDNDLIAIVKELHEDGSRVVVFERDGTELRFEELLPIIDKIGHIPLPPYIQRDDNEEDAQEYQSVFASQEGAVAAPTASLHFTHEQHTRICANYKHAYVTLHVGSGTFKPVETNIITEHPMHSEYYEISEAAKTLLNLDTKILSIGTTSTRTIEFYTRNKTQLSGEANLFLHPNNKPLRVDYLLTNFHLPKSTLLMLVASFVGLEKTQELYAEAIKEKYRFYSYGDAMLIL

SEQ ID NO: 72845 - protein, 341 aa, Sulfurimonas sp.
  REGION 1..341: note = tr|A0A4U2Z567|A0A4U2Z567_9HELI S-adenosylmethionine:tRNA ribosyltransferase-isomerase; OS = Sulfurimonas sp. SN118 OX=2574727 GN=queA PE=3 SV=1
MSNKELLTSSYDFALPKELIATHPANPRDSAKLLVYNRATGEVSHLKFSDLETLIPKDCALIFNDTKVIKARLFGKKESGGKIELLINRALNAHDVNVYIRGKVKIGTEIFFANDLVAIVKELHEDGSRVVNFYQNATALRFEELLPIIDKIGHIPLPPYIQREDNKEDESEYQSVFAKEEGAVAAPTASLHFTKEQHERVCKNFAHAYVTLHVGSGTFKPVECETITEHPMHSEYYAISDAAKKLLDSDIKILSIGTTSTRTIEFYARSEKQRGEANLFLHPNNKPLRVDHLLTNFHLPKSTLLMLVASFTGLEKAQELYKTAIEEKYRFYSYGDAMLIL

SEQ ID NO: 72846 - protein, 348 aa, unidentified
  source 1..348: note = Sulfurirhabdus autotrophica
  REGION 1..348: note = tr|A0A4R3Y4T3|A0A4R3Y4T3_9PROT S-adenosylmethionine:tRNA ribosyltransferase-isomerase; OS = Sulfurirhabdus autotrophica OX=1706046 GN=queA PE=3 SV=1
MRTSDFDFDLPEELIAQFPAEKRAQSRMLWLNGAGGELRDMHFSELTQILRPGDVLVMNDTRVIKARLYGKKESGGRIEILVERILDEHHVLAHMRAGHSPKPGSKLLLDGNVEVTVIGRQDEFYHLRFDVEKTVLEILDEHGSLPLPPYITRVPEFPDEERYQTVYARAPGAVAAPTAGLHFDEAMLVRIKEMGVTLAYVTLHVGAGTFQPVRAESVAEHKMHSELYHVPEETVAAIRRAKQSGGRVMAVGTTSLRALESAAASGELSAGQGDTNIFIIPGYRFKVVERLLTNFHLPKSTLMMLVSAFGGLENIRQAYRHAIAQRYRFFSYGDAMLIERQTEGQNEI

SEQ ID NO: 72847 - protein, 340 aa, unidentified
  source 1..340: note = Sulfurisoma sediminicola
  REGION 1..340: note = tr|A0A497XAH7|A0A497XAH7_9PROT S-adenosylmethionine:tRNA ribosyltransferase-isomerase; OS = Sulfurisoma sediminicola OX=1381557 GN=queA PE=3 SV=1
MTFTLDDFDYHLPPECIAQAPLAERSASLLLVMRGAALDDRAFTDLPDFLVPGDLLVMNDTRVLHARLFGRKDSGGQVEVLVERVTGDDEVLAQVRASKPPKAGGTIHLEEAFDAEVLGREGEFYRLRFPGDAVELIEHHGRLPLPPYIERAAASADEERYQTVFARERGSVAAPTAGLHFDAPLLERLRQRGAGIAHVTLHVGAGTFQPVRVHELSEHRMHRERYVVPQATVEAIAATRQRGGRVVAVGTTTLRTLESAANADGSIKVGAGETAIFITPGFAFRVVDVLITNFHLPKSTLLMLVSAFAGMDEIRAAYRHAMESGYRFFSYGDAMLLFRK

SEQ ID NO: 72848 - protein, 341 aa, Sulfuritalea hydrogenivorans
  REGION 1..341: note = tr|W0SI61|W0SI61_9PROT S-adenosylmethionine:tRNA ribosyltransferase-isomerase OS=Sulfuritalea hydrogenivorans sk43H OX=1223802 GN=queA PE=3 SV=1
MPLTLADFDYALPPELVAQAPLPQRSASRLLVVDGERRTDSQFVDLPQWLRAGDLLVMNDSRVLHARLLGRKESGGQVEVLVERLLEPDVVLAQVRASKSPQPGSRLRLEDVLDVEVLGREGEFYRLRFAGDAAELIEQHGRLPLPPYIERTAEAPDELRYQTVYARETGSVAAPTAGLHFDHDLLAKLREKQVEVAYVTLHVGAGTFQPVRVENLAEHRMHTERYLLPQSTADAIAATRARGGRIVAVGTTSLRVLESAALDGKLKVGAGETALFVTPGFKFRVVDLLITNFHLSKSTLLMLVSAFGGLEEIRDAYRHAIAARYRFFSYGDAMLLHRKST

SEQ ID NO: 72849 - protein, 347 aa, unidentified
  source 1..347: note = Sulfuritortus calidifontis
  REGION 1..347: note = tr|A0A4R3JXZ2|A0A4R3JXZ2_9PROT S-adenosylmethionine:tRNA ribosyltransferase-isomerase; OS = Sulfuritortus calidifontis OX=1914471 GN=queA PE=3 SV=1
MKTADFDYALPEELIARYPLAERTASRLLHVDGPNKRFSDRRFAELAEFFRAGDLLVFNDTRVIKARLFGEKASGGRIEALIERVLSEHEAIAFIRASKSPKPGMRLRFADSFEAEVIERSDDLYRLRFDPAKTVLDWLEAYGELPLPPYLERRPEAADEARYQTVYAREPGAVAAPTAGLHFDEAMLDALKAKGVATARVTLHVGAGTFQPVRVDDIHEHKMHSERYEVPNETVAAVELAKAHGGRVTAVGTTSLRALESAAHSGSLRAGQGETDLFITPGYEFRVVERLITNFHLPRSTLLMLVCAFGGMDLMLAAYRHAVEQRYRFFSYGDAMLIERIANQDAI

SEQ ID NO: 72850 - protein, 350 aa, Sulfurivirga caldicuralii
  REGION 1..350: note = tr|A0A1N6E4T8|A0A1N6E4T8_9GAMM S-adenosylmethionine:tRNA ribosyltransferase-isomerase; OS = Sulfurivirga caldicuralii OX=364032 GN=queA PE=3 SV=1
MRAMKMFKRQDFDFELPESLIAQQPTAERPASRLLVLGPDGVEDRIFRDIEAYLQPGDLLVFNDTRVMPARLFGQKATGGKVEILIERVLSEREALAHVRASRSPRPGSELLIKGQVPVAVLGREAELFRLQLEDGDWKGVMAAHGHIPLPPYIARSDEAFDHERYQTVYARKEGAVAAPTAGLHFDEALLSRLKEKGVEQGFVTLHVGAGTFKPVQVDDIREHRMHSEWIEVSPELVAQVEATRARGGRVVAVGTTAVRCLESASVEGRLQPMQGETDIFITPGYRFQQVDLLITNFHLPESTLIMLVSAFAGYERTMNAYRHAVAEKYRFFSYGDAMLVYPKEDPDEI

SEQ ID NO: 72851 - protein, 317 aa, Sulfurospirillum barnesii
  REGION 1..317: note = tr|I3XXX8|I3XXX8_SULBS S-adenosylmethionine:tRNA ribosyltransferase-isomerase OS=Sulfurospirillum barnesii (strain ATCC 700032 / DSM 10660 / SES-3) OX=760154 GN=Sulb a_1514 PE=3 SV=1
MEPRDEARLLVFNRQTGTLTHTLFKELFQFLPENSAVILNDTKVVKARVFGKKQSGGEIELLLNAPLHENFYSVYIRGRVKEKMRLFFDEALEAEVVELKEDGTRIVAFFRDKVPLHTKALFDTLETIGHIPLPPYIKREDTKEDTIDYQTVFAKEQGAVAAPTASLHFTDSMFEALKQRYETHFLTLHVGAGTFKPVEAEHIADHVMHSEMYAIPEITCKLIDSQKPLLAVGTTVTRSVEYYARTKESMGKCNLFLHPNNPPLRINHLLTNFHLPKSTLIMLVASFVGIEKTLELYEEAVKEQYRFFSYGDAMLII

SEQ ID NO: 72852 - protein, 114 aa, Sulfurospirillum cavolei
  REGION 1..114: note = tr|A0A2D3W8R2|A0A2D3W8R2_9PROT S-adenosylmethionine:tRNA ribosyltransferase-isomerase (Fragment) OS=Sulfurospirillum cavolei OX=366522; GN = CFH80_05680 PE=3 SV=1
QDHVMHSEIYAIPEATCRLIDSPKPLLAVGTTVTRTIEYYARTHHQQGACNLFLHPKNPPIRVNYLLTNFHLPQSTLIMLVASFIGIEETLKLYAIAVKEKYRFFSYGDAMLIV

SEQ ID NO: 72853 - protein, 308 aa, Sulfurospirillum deleyianum
  REGION 1..308: note = tr|D1B302|D1B302_SULD5 S-adenosylmethionine:tRNA ribosyltransferase-isomerase OS=Sulfurospirillum deleyianum (strain ATCC 51133 / DSM 6946 / 5175) OX=525898; GN = Sdel_ 1454 PE=3 SV=1
MVFNRSSGQITHTFFKHLFDFLPEDIGVLLNDTRVVKARIFGKKESGGEIELLLNAPLQENLYSVYIKGRVKKGMRLFFDADLEAELIELKEDGTRLVAFFRKNEALHTKALFDILEIIGHIPLPPYIKREDQEEDSVDYQTVFAKEQGAVAAPTASLHFTDSMFEALKKRYETHFLTLHVGAGTFKPVEAEHILEHVMHSEIYTIPELTCKLIESKKPLLAVGTTVTRTVEYYARTNIPVGKCDLFLHPNNPPLRVNHLLTNFHLPKSTLIMLVASFIGIEKTLELYEEAVKEKYRFFSYGDAMLII

SEQ ID NO: 72854 - protein, 308 aa, Sulfurospirillum halorespirans
  REGION 1..308: note = tr|A0A1D7TKV7|A0A1D7TKV7_9PROT S-adenosylmethionine:tRNA ribosyltransferase-isomerase; OS = Sulfurospirillum halorespirans DSM 13726 OX=1193502; GN = SHALO_1819 PE=3 SV=1
MVFDRHSGRITHTHFKHLFDFLPSDIAVLLNDTKVIKARVFGKKESGGEVEVLLNAPLQENLYSVYIRGRVKVGTKLFFDEKMLAKIIELKEDGTRVVAFFQAEKPLHTQALFDVLDKIGHIPLPPYIKREDTDEDSVDYQTVFAKEQGAVAAPTASLHFTDTMFEALKKRYETHFLTLHVGAGTFKPVEAEHIKDHVMHSEIYAIPPFTCKLIESPKNILAVGTTVTRTVEYFVRTKEPVGKCDLFLHPQNPPLRVNHLLTNFHLPKSTLIMLVASFIGIEQTLELYEEAVKERYRFFSYGDAMLIV

SEQ ID NO: 72855 - protein, 307 aa, Sulfurospirillum multivorans
  REGION 1..307: note = tr|A0A5B9TTA6|A0A5B9TTA6_SULMU S-adenosylmethionine:tRNA ribosyltransferase-isomerase; OS = Sulfurospirillum multivorans OX=66821 GN=SMN_2048 PE=3; SV = 1
MFDRHNGRITHTLFKHLFDFLPSDIAVLLNDTKVIKARVFGKKQSGGEVEVLLNAPLQDNLYSVYIKGRVKVGTKLFFDEKMEAEIRELKEDGTRVVAFFQAEKALHTQALFDVLEKIGHIPLPPYIKREDTDEDSVDYQTVFAKEQGAVAAPTASLHFTDAMFEALKKRYETHFLTLHVGAGTFKPVEAEHIHDHVMHSEIYAIPSLTCKRIESPKNILAVGTTVTRTVEYFARTKEPMGKCDLFLHPQNPPLRVNHLLTNFHLPKSTLIMLVASFIGIEKTLELYEEAVKEKYRFFSYGDAMLIV

SEQ ID NO: 72856 - protein, 342 aa, Sulfurospirillum sp.
  REGION 1..342: note = tr|A0A432SM50|A0A432SM50_9PROT S-adenosylmethionine:tRNA ribosyltransferase-isomerase; OS = Sulfurospirillum sp. OX=2053622 GN=queA PE=3 SV=1
MPKPDPLLVDSYDYDLPSHLIASRPAEPKDSAKLLVYDRNTGSITHTVFREILNFVPQTYAVILNDTKVIKARIFGQKESGGKVELLINSPLPQNRFLVYIRGRVKEGTKLFFENGLQATVVQLHEDGTRTVQFSRHNRTLDFPALHELLEEIGHVPLPPYIKREDTEADAQDYQTLFAQKIGAVAAPTASLHFTDALFHKMQQQYETYYVTLHVGAGTFKPVEAANIKDHVMHSEFYEIPEATRKIIDSKKKILAVGTTVTRTVEYYVRKHLPNGQSDLFLHPQNPPQRVDALLTNFHLPKSTLLMLVASFTGLEKALEIYHEAIEEEYHFFSYGDAMLIL

SEQ ID NO: 72857 - protein, 307 aa, Sulfurospirillum sp.
  REGION 1..307: note = tr|A0A290HQE8|A0A290HQE8_9PROT S-adenosylmethionine:tRNA ribosyltransferase-isomerase; OS = Sulfurospirillum sp. JPD-1 OX=220622 GN=SJPD1_1833 PE=3; SV = 1
MFDRKTGRITHTLFKHLFDFLPADIAVLLNDTKVIKARIFGKKESGGEIEVLLNAPLQENCYSVYIRGRVKAGTELFFDEHMHAKIIELKEDGTRVVAFFQEGKALHTKALFDVLEKIGHIPLPPYIKREDTNEDSVDYQTVFAKEQGAVAAPTASLHFTDAMFKALKKRYETHFLTLHVGAGTFKPVEAEHIKDHVMHSEIYAIPSLTCKLIESPKNILAVGTTVTRTVEYFARTKVPVGKCDLFLHPQNPPIRVNHLLTNFHLPKSTLIMLVASFVGIEKTLELYEEAVKKKYRFFSYGDAMLIL

SEQ ID NO: 72858 - protein, 351 aa, Sulfurovum lithotrophicum
  REGION 1..351: note = tr|A0A2T4CQD3|A0A2T4CQD3_9PROT S-adenosylmethionine:tRNA ribosyltransferase-isomerase; OS = Sulfurovum lithotrophicum OX=206403 GN=queA PE=3 SV=1
MSLDLRTENYDYELPEGFIATSPVYPRDHAKLLVYDRKTDTITHTTFQHLLEFLPKECDVFLNDTRVIKARIFGVKEAQSVNKKGFAQGGGKVELLFNKPLDAHHYLVMIRGKVHIGTKLLFDDDLVATVTTFNEDGSRVVTFSHKGQEIRFEELVLILDKIGHLPLPPYMQREDNKEDETDYQTLFAKNAGAVAAPTASLHFTPELFEALEKRHATHKITLHVGAGTFKPVDVEEILSHPMHSEYFHIPEASAHVLDSDRPLLAIGTTVTRTLEYYVRTKKTQGECDLFLNPSNPPQRVTHLLTNFHLPKSTLIMLVSAFIGREKTLDLYKEAIEKKYRFFSYGDAMLIL

SEQ ID NO: 72859 - protein, 350 aa, unidentified
  source 1..350: note = Sulfurovum riftiae
  REGION 1..350: note = tr|A0A151CDD5|A0A151CDD5_9PROT S-adenosylmethionine:tRNA ribosyltransferase-isomerase; OS = Sulfurovum riftiae OX=1630136 GN=queA PE=3 SV=1
MSSHTPSPELLTKNYDYELPEGFIATKPVHPRDEAKLLVYNRKDDTVTHTTFKHLLDFLPENCDVFLNDTRVIKARIFGHKVSAEGQGGGKVELLFNKPLDAHHYLVLIRGKVKVGTKLLFDEGLGAIVTALNEDGSRIVTFTHHDKEIRFEDLVQVLDEIGHIPLPPYMQREDNKEDETDYQTLFAKKAGAVAAPTASLHFTPELFEALQKRHRTHKVTLHVGAGTFKPVEVEEILAHPMHSEYFHIPPEAVEILESDRNILAIGTTVTRTVEYYVRTKKTQGECDLFLNPYNPPQRVTHLLTNFHLPKSTLIMLVSAFIGREKTLQLYKEAIDKNYRFFSYGDAMLIL

SEQ ID NO: 72860 - protein, 340 aa, Sulfurovum sp.
  REGION 1..340: note = tr|A0A0C2ZQ08|A0A0C2ZQ08_9PROT S-adenosylmethionine:tRNA ribosyltransferase-isomerase; OS = Sulfurovum sp. FS06-10 OX=1539064 GN=queA PE=3 SV=1
MNSELLTSSYDYELPAHLIAQSPVYPRDHAKLLVYNRKTNTTIHTTFKHLLDHLPKTCNVFLNDTKVIKARIFGSKASGGKVELLFNKPLNATTYLVLIRGKVTIGTELFFEDSLIATVKELNNDGSRVVTFTHHNKIIRFEELVIVLDKIGHIPLPPYMQRQDNEQDETDYQTLFAKNAGAVAAPTASLHFTPELFTALQKRHQTHKITLHVGAGTFKPVEVEHILEHPMHSEYFDIPKESAELLKTQTPILAIGTTVTRTVEYFTRTQKTHGECDLFLNPSNKPQRVTHLLTNFHLPKSTLIMLVSAFIGREKTLELYHDAIQREYRFFSYGDAMLII

SEQ ID NO: 72861 - protein, 345 aa, Sulfurovum sp.
  REGION 1..345: note = tr|I2K4T0|I2K4T0_9PROT S-adenosylmethionine:tRNA ribosyltransferase-isomerase OS=Sulfurovum sp. AR; OX = 1165841 GN=queA PE=3 SV=1
MNEELLTKNYDYELPEGFIATAPVQPRDHAKLLVYDRKTDTVTHTTFKHLLEYLPKECDVFLNDTRVIKARIFGHKRSLNNQGGGQVELLFNKPIDAHHYLVLIRGKVKIGTELLFDDELVAMVTELNDDGSRIVTFTHHGKEIRFEELVLVLDAIGHIPLPPYMQREDKKEDETDYQTLFAKNAGAVAAPTASLHFTPELFAELEKRHKTHTVTLHVGAGTFKPVEAEEILDHPMHSEYFEIPESSAKVLDSDTPVLAIGTTVTRTIEYYARTKKTHGECDLFLNPSNPPQRVTYLLTNFHLPKSTLIMLVSSFIGRKKTLDLYKEAIEKKYRFFSYGDAMLIL

SEQ ID NO: 72862 - protein, 411 aa, unidentified
  source 1..411: note = Sunxiuqinia dokdonensis
  REGION 1..411: note = tr|A0A0L8V809|A0A0L8V809_9BACT S-adenosylmethionine:tRNA ribosyltransferase-isomerase; OS = Sunxiuqinia dokdonensis OX=1409788 GN=NC99_28690 PE=3; SV = 1
MSEKSSIKPVFDQSAQALNYELPDERVAKYPLAERDASKLLVWKNGQIEDASFQSLADFLPESSLLVFNNTKVIRARMPFQKKTGAQIEIFCLDPAHPADYQLAFQQTRRCSWNCMVGNLKKWKHEPLERLVDVDGKAVTLVAEKLSQSREHVLVEFSWNDDSVDFASLIEASGILPIPPYLHRDTEASDLERYQTIYSKIKGSVAAPTAGLHFTDSVFASLKKKNISCTEVTLHVGAGTFKPVKAATIADHEMHAEQFVVSRQLIEQLLRKEGKLIAVGTTSIRTLESLYWLGVSVMNDANQSPANLHVEQWAPYENADQQPVKIVLQALINYMDRHQLTVLIASTQIIIVPGYQFQIVDGMITNFHQPQSTLLLLISAYVGNDWQRIYQHALDNNYRFLSYGDSNLYLK

SEQ ID NO: 72863 - protein, 349 aa, unidentified
  source 1..349: note = Sunxiuqinia dokdonensis
  REGION 1..349: note = tr|A0A0L8V6B8|A0A0L8V6B8_9BACT S-adenosylmethionine:tRNA ribosyltransferase-isomerase; OS = Sunxiuqinia dokdonensis OX=1409788 GN=queA PE=3 SV=1
MKLSKFKYKLPEELIALHPSKNRDESKLMVLHRDSRKIEHKLFKDITEYFDDQDVMVFNDTKVFPARLYGNKEKTGAEIEVFLLRELNREQRLWDVLVDPARKIRIGNKLYFGEDDMLVAEVIDNTTSRGRTLRFLFDGPYDEFKKTLYSLGETPLPKFIQRAVQPEDKDRYQTIFAKHEGAVAAPTAGLHFSRELLKRLEIIGVDFGYVTLHVGLGNFRSVDVEDLTKHKMDSEQIWIRDEACDLVNNAKTKKKNICAVGTTVMRTLESSVSTQGHLKPFEGWTNKFIFPPYEFSVANRMITNFHLPMSTLLMMVAAFGGYDFVMEAYQKAIKEGYRFGTYGDAMLIL

SEQ ID NO: 72864 - protein, 411 aa, Sunxiuqinia elliptica
  REGION 1..411: note = tr|A0A1I2HCM1|A0A1I2HCM1_9BACT S-adenosylmethionine:tRNA ribosyltransferase-isomerase; OS = Sunxiuqinia elliptica OX=655355 GN=SAMN05216283_10412; PE = 3 SV=1
MNKKTSTTPVFDQSAQALNYELPDAKIAKYPLAERDASKLLVWQNGTIQDANFGTIAEFLPEESLLVFNNTKVIRARLPFQKTTGAQIEIFCLDPHTPADYQLAFQQTKSCSWNCMVGNLKKWKQEPLQRRIPINGKEVVLTAKKISQSEGNVLVQFSWDDESVDFSSLIEACGILPIPPYLHRETESSDLERYQTIYSKVKGSVAAPTAGLHFTDQVFQTFQQKNITTAEVTLHVGAGTFKPVKAATIADHEMHAEQFLVTRELLVRLQKQRNPIIAVGTTSIRTLESLYWLGTSFIDNEDQAPDSLHISQWQPYQNTTEASKTQALQALIDFMDKHSINHLTASTQIIIVPGYNFRVVDGMITNFHQPQSTLLLLIAAYLGDNWKQIYQHALDNNYRFLSYGDSNLYLK

SEQ ID NO: 72865 - protein, 349 aa, Sunxiuqinia elliptica
  REGION 1..349: note = tr|A0A4V3BYT4|A0A4V3BYT4_9BACT S-adenosylmethionine:tRNA ribosyltransferase-isomerase; OS = Sunxiuqinia elliptica OX=655355 GN=queA PE=3 SV=1
MKLSKFKYKLPENQIALHPADNRDESRMMVLHRESRKIEHKLFKDITDYFDDKDVMVFNDTKVFPARLYGNKEKTGAEIEVFLLRELNREQRLWDVLVDPARKIRIGNKLYFGEDDMLVAEVIDNTTSRGRTLRFLFDGPYDEFKKTLYGLGETPLPKFIQRPVQPEDKDRYQTIFAKHEGAVAAPTAGLHFSRELLKRLEIIGVDFSYVTLHVGLGNFRSVDVEDLTKHKMDSEQIWIKEDACNVVNDAKTNKKNVCAVGTTVMRTLESSVSTQGHLKPFEGWTNKFIFPPYEFSVANSMVTNFHLPMSTLLMMVAAFGGYDFVMEAYQEAIKEGYRFGTYGDAMLIL

SEQ ID NO: 72866 - protein, 356 aa, unidentified
  source 1..356: note = Superficieibacter electus
  REGION 1..356: note = tr|A0A2P5GSG8|A0A2P5GSG8_9ENTR S-adenosylmethionine:tRNA ribosyltransferase-isomerase; OS = Superficieibacter electus OX=2022662 GN=queA PE=3 SV=1
MRLADFSFELPESLIAHYPQPERSACRLLSLDGPTGALTHGTFTDLLDKLNPGDLLVFNNTRVIPARLFGRKASGGKIEVLVERMLDDKRILAHIRASKAPKPGAELLLGDDESIQATMTARHDALFEVEFHDERPVLDILNAIGHMPLPPYIDRPDEDADRELYQTVYSQKPGAVAAPTAGLHFDEPLLERLRSKGIEMAFVTLHVGAGTFQPVRVESIEDHIMHSEYAEVPQEVVDAVLAAKARGNRVIAVGTTSVRSLESAAQAAKNDLIEPFFGDTQIFIYPGYHYKVIDALVTNFHLPESTLIMLVSAFAGYKHTMNAYQQAVNAEYRFFSYGDAMYITYNPSAINERVGE

SEQ ID NO: 72867 - protein, 347 aa, unidentified
  source 1..347: note = Sutterella megalosphaeroides
  REGION 1..347: note = tr|A0A2Z6I7Y3|A0A2Z6I7Y3_9BURK S-adenosylmethionine:tRNA ribosyltransferase-isomerase; OS = Sutterella megalosphaeroides OX=2494234 GN=queA PE=3; SV = 1
MQEQFLSDFDFELPPELIAQYPLADRSASRLLHITTDVIEDKRFTDIESYLRPGDLLIANNTRVIKARLLGRKETGGAVEALVERVTGEKSAIAMVRASKSPKPGTKLIFSADGAEETVIVTGRQGEFFVLEFDRPVLDVLEAFGKVPLPPYIEHAAEKSDEGRYQTVYAKYPGAVAAPTAGLHFTDELLERLKERGVDIEYVTLHVGAGTFQPVRVEKLSEHHMHSEWYSMPADVAEKINRAKAEGRRVIAVGTTSLRTLESAADRIGHVEAGARDTALFITPGYTFRIVDALVTNFHLPKSTLVMLVSALVGRERILEAYRHAVDAKYRFFSYGDACFIEKAPGA

SEQ ID NO: 72868 - protein, 353 aa, Sutterella parvirubra
  REGION 1..353: note = tr|H3KCS0|H3KCS0_9BURK S-adenosylmethionine:tRNA ribosyltransferase-isomerase OS=Sutterella parvirubra YIT 11816 OX=762967 GN=queA PE=3 SV=1
MREQHLSDFDFELPEELIAQYPLAERSASRLLRITPETLVDGHFTDVEELLRPGDLLIANNTKVIKARLLGHKETSGAVEALIERVTGERTAIAMIRASKSPKPGTAVYFEAGDARERVVVTGRQEQFFELEFERPVLDVLSEFGRVPLPPYITHAADAADEGRYQTVYAEHPGAVAAPTAGLHFTEELLARLRAKGVDVDYVTLHVGAGTFQPVRVENLSEHHMHSEWYEMSEATAARINAAKAEGRRVVAVGTTSLRTLESAADRAGHVVPGARDTALFITPGYDFKIVDALITNFHLPKSTLVMLVSALAGRNRMLSAYAHAVAERYRFFSYGDACWIERDPRVPTDPTL

SEQ ID NO: 72869 - protein, 352 aa, Sutterella sp.
  REGION 1..352: note = tr|A0A5B7ZKH0|A0A5B7ZKH0_9BURK S-adenosylmethionine:tRNA ribosyltransferase-isomerase; OS = Sutterella sp. KGMB03119 OX=2584944 GN=queA PE=3 SV=1
MTEQHLSDFDFELPPELIAQYPLADRSSSRLLHITEDVIEDKTFRDIEGFLRPGDLLIANDTKVIKARLLGSKETGGAVEALIERVTGPDTAISMLRASKSPKPGTRIYFRAQTEGAAGKEAEAEVLGREGEFYSLRFQGPVLDILEAFGRVPLPPYIEHAPEKSDESRYQTVYAHHPGAVAAPTAGLHFTEDLLSRIRNKGVDIEYVTLHVGAGTFQPVRVENLSEHHMHSEWFSMPEDVAAKINAAKAEGRRVIAVGTTSLRTLESAADRPGHVEAGARDTRLFIMPGYKFRIVDALITNFHLPKSTLVMLVSALVGRERILEAYAHAVKEKYRFFSYGDACFIEKAKNA

SEQ ID NO: 72870 - protein, 348 aa, Sutterella sp.
  REGION 1..348: note = tr|A0A139JX44|A0A139JX44_9BURK S-adenosylmethionine:tRNA ribosyltransferase-isomerase; OS = Sutterella sp. KLE1602 OX=1574262 GN=queA PE=3 SV=1
MQEQHLSDFDFELPPELIAQYPLENRTASRLLHITKDVIEDCTFTDIEGFLHEGDLLVANNTKVIKARLLGRKATGGNVEALIERVTGERTAISMVRASKSPKPGTVLYFEADGIEEPVMVTGRQGQFFELEFERPVLDVLEAFGRVPLPPYITHAAQKSDESRYQTVYARYPGAVAAPTAGLHFTEDLLGRLAAKGVDIEYVTLHVGAGTFQPVRVENLSEHQMHSEWFNMPEDVAARINRAKAEGRRVIAVGTTSLRTIESAADAVGHVAAGARDTSLFIMPGYRFRIIDALITNFHLPKSTLVMLVSALAGRERILEAYRHAVEEKYRFFSYGDACFIENARLAG

SEQ ID NO: 72871 - protein, 348 aa, Sutterella wadsworthensis
  REGION 1..348: note = tr|K1JVL2|K1JVL2_9BURK S-adenosylmethionine:tRNA ribosyltransferase-isomerase OS=Sutterella wadsworthensis 2_1_59BFAA OX=742823 GN=queA PE=3 SV=1
MQEQHLSDFDFELPPELIAQYPLENRTASRLLHITKDVIEDCTFTDIEGFLHEGDLLVANNTKVIKARLLGRKATGGNVEALIERVTGERTAISMVRASKSPKPGTVLYFEADGIEEPVMVTGRQGQFFELEFERPVLDVLEAFGRVPLPPYITHAAQKSDESRYQTVYARYPGAVAAPTAGLHFTEDLLGRLAAKGVDIEYVTLHVGAGTFQPVRVENLSEHQMHSEWFNMPEDVAARINRAKAEGRRVIAVGTTSLRTIESAADAVGHVAAGARDTSLFIMPDYRFRIIDALITNFHLPKSTLVMLVSALAGRERILEAYRHAVEEKYRFFSYGDACFIENARLAG

SEQ ID NO: 72872 - protein, 349 aa, Sutterella wadsworthensis
  REGION 1..349: note = tr|R5Q5L5|R5Q5L5_9BURK S-adenosylmethionine:tRNA ribosyltransferase-isomerase OS=Sutterella wadsworthensis CAG:135 OX=1263111 GN=queA PE=3 SV=1
MQEQHLSDFDFELPPELIAQYPLADRAASRLLHITEEVIEDCTFRDIEKFLRPGDLLVANNTRVIKARLLGAKATGGAVEALIERVTGEFTAIAMVRASKSPKPGSKLFFAAPGTDLKAEVEVTGRAGEFFELKFAEPVLQVLEAFGRVPLPPYIEHAPEKADESRYQTVYARHPGAVAAPTAGLHFTDDLLNRLKAKGVDIEYVTLHVGAGTFQPVRVENLSEHHMHSEWFSMPEDVAARINEAKAQGRRVIAVGTTSLRTLESAADRIGHVEAGARDTRLFIMPGYKFRIVDALVTNFHLPKSTLVMLVSALVGRERILEAYAHAVREHYRFFSYGDACFIEKARGA

SEQ ID NO: 72873 - protein, 52 aa, unidentified
  source 1..52: note = Sutterellaceae bacterium
  REGION 1..52: note = tr|A0A3D4GA82|A0A3D4GA82_9BURK S-adenosylmethionine:tRNA ribosyltransferase-isomerase (Fragment) OS=Sutterellaceae bacterium OX=2026794; GN = DIU26_05950 PE=3 SV=1
TNFHLPKSTLVMLVSALCGRDEILAAYKHAVDEKYRFFSYGDACFLEKKVNQ

SEQ ID NO: 72874 - protein, 354 aa, unidentified
  source 1..354: note = Sutterellaceae bacterium
  REGION 1..354: note = tr|A0A350CY44|A0A350CY44_9BURK S-adenosylmethionine:tRNA ribosyltransferase-isomerase; OS = Sutterellaceae bacterium OX=2026794 GN=queA PE=3 SV=1
METKEQHLSDFDFELPESLIAQYPLKDRAASRLLHVKPDGSVEDLHFRDILNLLQPGDLLVFNNTKVIKARLNGKKETGGVFEAMTERVTGTYEAISMMRASKAAKPGTILYFDHPEGKEPARAEVLGREGEFFRLKFDRPVLEVLDEYGKVPLPPYIQHAAEKSDESRYQTVYAKYPGAVAAPTAGLHFTDELLQQIRDKGCEEVFVTLHVGAGTFQPVRVENLSEHIMHSEWYSISPEAAEKINKAKAEGRRVVCVGTTSLRTVEASASQNPEGKVRAESADTRLFIKPGYEFKVCDAMVTNFHLPKSTLVMLVSALCGRDEILAAYKHAVDEKYRFFSYGDACFLEKKVNQ

SEQ ID NO: 72875 - protein, 352 aa, Suttonella indologenes
  REGION 1..352: note = tr|A0A380MYR0|A0A380MYR0_9GAMM S-adenosylmethionine:tRNA ribosyltransferase-isomerase; OS = Suttonella indologenes OX=13276 GN=queA PE=3 SV=1
MSPYQKSDFHYELPEKLIARYPLAERSASRLLVAQVQDEQNLMLSDQKVSDLPQFIQPQDLLVFNNTRVLPARLFGEKSSGGKIELLIERLQDTHHVAAYIRASKAPKIGATLHIGGYQVQVQGRNEALFYLYSDSPWAEIMQRLGEMPIPPYLERQADESDDERYQTVYAKHLGAVAAPTAGLHFDSALLAALSAKGIASTEVTLHVGAGTFQPVRHEDLSAHVMHKEWLSVSEENVAAVEACKARGGRVIAIGTTSLRALESAAQSGRLQAFAGDTDLFITPPDYRFRVVDALFTNFHLPESTLLMLVSAFAGMENTRRIYAHAIAQQYRFYSYGDAMFLPQRLDNQRES

SEQ ID NO: 72876 - protein, 347 aa, Suttonella ornithocola
  REGION 1..347: note = tr|A0A380MXY9|A0A380MXY9_9GAMM S-adenosylmethionine:tRNA ribosyltransferase-isomerase; OS = Suttonella ornithocola OX=279832 GN=queA PE=3 SV=1
MYHQTKKSDYQYELPESLIARYPLAKRSDSRLLVATPFKDRVEIIDSGVVNFAEYLRAEDLLVMNNTRVLPARMYGTKASGGKIEIMVERTLDEHHVRAYLRASKSPKVGSELFIHDYVVTVAEKKDGLFTLSSFIPWQEIMQINGEMPIPPYMDRNAEALDSERYQTVYAKTPGAVAAPTAGLHFDGDLLAKIAEKGIARAEVTLHVGAGTFQPVREEDLNAHVMHEEWLSVPEETVEAVKQCRARGGRVIAIGTTSLRALESAAQDGQLLAGSGDTNLFISPGYRFNVVDALFTNFHLPESTLLMLVSAFAGMENIRTIYRHAVEEQYRFYSYGDAMFLTNQLSN

SEQ ID NO: 72877 - protein, 345 aa, Swaminathania salitolerans
  REGION 1..345: note = tr|A0A511BTV2|A0A511BTV2_9PROT S-adenosylmethionine:tRNA ribosyltransferase-isomerase; OS = Swaminathania salitolerans OX=182838 GN=queA PE=3 SV=1
MQISDFDFDLPRENIALEPARPRDSARLLRVAAGQALSEARVSDLPSLLEPGDLLVVNDTAVIRAQLAARRGEAKIGITLDRILSDGSWHALAKNARKLKPGDTLHFGSDPVTAAVVENEGDGAISMRFSAEGEAFDDFLKRAGVLALPPYIDRPTGPTAQDDSDYATIFERYKGAVAAPTAGLHFTPDLLAALDARGVRRHTLTLHVGAGTFLPVRDEIASHKMHAEWGRIDAQTAQLINDTRASGRKIVAVGTTSLRLLESAADERGVVHPWEGETSIFIKPGYRFRAVDRLMTNFHLPRSTLFMLVCALAGTETMREAYRHAIAEGFRFYSYGDACLLDRAP

SEQ ID NO: 72878 - protein, 347 aa, unidentified
  source 1..347: note = Swingsia samuiensis
  REGION 1..347: note = tr|A0A4Y6UKN1|A0A4Y6UKN1_9PROT S-adenosylmethionine:tRNA ribosyltransferase-isomerase; OS = Swingsia samuiensis OX=1293412 GN=queA PE=3 SV=1
MTDELTPFDFDLPHDHIAIEPARPRDSAKLLHVRPGHELQTYTVRDLPSFLREGDLLIANNTEVIRAQLSAKRGEAKIGITLDRILADGSWHALARNSRKLKPDDILHFNDDPVTATIITNEGDGAISLRFSVEGDEFDAFLERVGALALPPYIERPLGPTPQDDNDYRTIFSEKRGAVAAPTAGLHFTPELLEALAQKGIERRTLTLHVGAGTFLPVRSSIAEHKMHAEWGEIDASTADLINQTKARGGRIIAVGTTSLRLLESAAQEDGTVQPWQGETSIFIKPGYRFKAVDLLMTNFHLPRSTLFMLVCAFSGTDTMRNAYHYAISNHLRFYSYGDACLLERRS

SEQ ID NO: 72879 - protein, 367 aa, unidentified
  source 1..367: note = Swingsia sp.
  REGION 1..367: note = tr|A0A4Y6U9Y0|A0A4Y6U9Y0_9PROT S-adenosylmethionine:tRNA ribosyltransferase-isomerase; OS = Swingsia sp. F3b2 OX=2558361 GN=queA PE=3 SV=1
MVAQRTIPPAPSPQAAGDSMAPFDFDLPKARIALSPARPRDQARLLHVQGGQRTFHHVRDLPGLLRPGDLLIVNDTAVLHAKLAALRVAERGTAHIGLTLDRPLADGSWHVLARNARKLRPGDNLRFEGSTATATVLTNEGDGAATLRFSVEGASFDHFLETCGVLALPPYIDRPNGPTADDERDYTTLFAAHKGAVAAPTAGLHFTPELMAALAERGVERHSVTLHVGAGTFLPVRGALADHKMHSEWGHVSAATANAVNKAHQEGRRVVAVGTTSLRLLESACQPDGTLAPWRGETDIFIKPGYRFRCVDALMTNFHLPRSTLFMLVCAFAGTEPMRAAYSSAIEAGMRFYSYGDACLLEKAPEA

SEQ ID NO: 72880 - protein, 341 aa, Symbiobacterium thermophilum
  REGION 1..341: note = sp|Q67Q93|QUEA_SYMTH S-adenosylmethionine:tRNA ribosyltransferase-isomerase OS=Symbiobacterium thermophilum (strain T / IAM 14863) OX=292459 GN=queA PE=3; SV = 1
MRLSDFDYDLPKELIAQKPVEPRDASRLMVVHRASGAIEHRCFRDLPEYLRPGDGLVINETRVMPARLLGSREQTGGAMEVLLLKRLDRDRWETLVKPGKKARPGERIVFGDGLLVGTVVGPTDYGGRVIDFHYEGVFENLLERLGQMPLPPYIHEQLEEPERYQTVYAREWGSAAAPTAGLHFTAELLDRLAARGVEIHRITLHVGLGTFRPVEVEDPTQHKMHSEFYHVSPEAAAGINAVRKGGGRLVAVGTTSVRTLETVADEDGTVRPGEGWTDIFIYPGYRFKAVDALVTNFHLPKSTLLMLVSALAGHDLIMRAYREAVAQRYRFFSFGDAMLIL

SEQ ID NO: 72881 - protein, 234 aa, Symbiobacterium thermophilum
  REGION 1..234: note = tr|A0A1Y2T4N8|A0A1Y2T4N8_SYMTR S-adenosylmethionine:tRNA ribosyltransferase-isomerase (Fragment) OS=Symbiobacterium thermophilum OX=2734; GN = A6D92_07520 PE=3 SV=1
IVFGDGLLVGTVVGPTDYGGRVIDFHYEGVFENLLERLGQMPLPPYIHEQLEEPERYQTVYAREWGSAAAPTAGLHFTAELLDRLAARGVEIHRITLHVGLGTFRPVEVEDPTQHKMHSEFYHVSPEAAAGINAVRKGGGRLVAVGTTSVRTLETVADEDGTVRPGEGWTDIFIYPGYRFKAVDALVTNFHLPKSTLLMLVSALAGHDLIMRAYREAVAQRYRFFSFGDAMLIL

SEQ ID NO: 72882 - protein, 436 aa, unidentified
  source 1..436: note = Synechococcales bacterium
  REGION 1..436: note = tr|A0A354B4Y4|A0A354B4Y4_9CYAN S-adenosylmethionine:tRNA ribosyltransferase-isomerase; OS = Synechococcales bacterium UBA10510 OX=2055795 GN=queA; PE = 3 SV=1
MNTDLAKLDPADLQLSSYHFELPQERIAQRPLEPRHAAKLLVVEPNYRASAGDGVSAAGQASGLGAAVQARHLQVWDLHQELRPGDLLVVNDTRVLRARLQGRRANGGAVELLVLEPWLPAPGQNQPSSQNQPSNQNQPSNQNELAHQNQSVSSAGPGQWLCLAKPAKKLNPGDWIEVQASGQPNLRLQVLAREPETGGRIVQFPSDCLDAPALEPLLVRYGAIPLPPYIHSHREEDNDRYQTCYAARPGAVAAPTAGLHLSEQLLAAIRARGVQIATTTLHVGLGTFRPVETDDLSQLQLHSEWVEVTAALVEAVAACRSRSGRVIAVGTTSVRSLEAVAQLYGGQLAAHTGPVNLVIQPGYRFAVVQGLLTNFHLPKSSLLLLVSALIGRRRLLNLYAEAIEKNYRFFSYGDAMWIPPEAVIESSRPELHFENP

SEQ ID NO: 72883 - protein, 115 aa, unidentified
  source 1..115: note = Synechococcales bacterium
  REGION 1..115: note = tr|A0A3D0P9T2|A0A3D0P9T2_9CYAN S-adenosylmethionine:tRNA ribosyltransferase-isomerase (Fragment) OS=Synechococcales bacterium UBA8647 OX=2055797; GN = DEO90_05635 PE=3SV=1
MIDPRDSLLSSYDYELPEACIAQRPLEPRHAARLLMVEPEAGCRDRQVWDLLEELEPGDLLVVNDTRVLRARLQVRRAGGGLGELLVLEPQGQGQWLCLARPAKRLRPGDSIALV

SEQ ID NO: 72884 - protein, 359 aa, Synechococcus elongatus
  REGION 1..359: note = sp|Q31KP1|QUEA_SYNE7 S-adenosylmethionine:tRNA ribosyltransferase-isomerase OS=Synechococcus elongatus (strain PCC 7942) OX=1140 GN=queA PE=3 SV=1
MNEPSPSDWHLDAYDYELPPDRIAQSAVEPRDHARLLVFPDREQLWHRHFYDLPQLLRPGDLLIVNDTRVIPARLYGQKIETGVPVEVLLVEEHGPGYWLTLVKPGKRLKPGSAIAFGPNPEDPLLVADVEASDPATGGRWLRFRGEAEAFWSQLATLGEMPLPPYIHTTASDPERYQTVYSRELGAVAAPTAGLHFTPELLTTLADMGIATAPVTLHVGIGTFRSVDVEDIRQHEMHSERMMVPAATVEKIQATKAAGGRVIAVGTTSVRAIEGAAASGELKPGSDRVNLFIYPGYRWQIIDGLITNFHLPRSSLMMLVSALIGRDRLLSAYATAIAEQYRFYSFGDAMLILPDAKLP

SEQ ID NO: 72885 - protein, 359 aa, Synechococcus elongatus
  REGION 1..359: note = tr|A0A3G6WZ08|A0A3G6WZ08_SYNEL S-adenosylmethionine:tRNA ribosyltransferase-isomerase; OS = Synechococcus elongatus PCC 11801 OX=2219813 GN=queA; PE = 3 SV=1
MNESSPSDWQLDAYDYELPADRIAQTAVEPRDHARLLVFPDREQLWHRNFYDLPQLLNPGDLLIINDTRVIPARLYGQKIDTGVPVEVLLVEEHGPGYWLTLVKPGKRLKPGAAITFGPNPEDPLLVADVEASDPATGGRWLRFRGEPEAFWSRLATLGEMPLPPYIHTSSSDPERYQTVYSREMGAVAAPTAGLHFTPELLTTLADMGVATAPVTLHVGIGTFRSVDVEDIRQHQMHSERMVVPAATVEKIQATKAAGGRVIAVGTTSVRAIEGAAASGELKPGSDRVNLFIYPGYRWRIIDGLITNFHLPRSSLMMLVSSLIGRDRLLSAYATAIAEQYRFYSFGDAMLILPDAKLS

SEQ ID NO: 72886 - protein, 372 aa, unidentified
  source 1..372: note = Synechococcus lacustris
  REGION 1..372: note = tr|A0A2P7ED65|A0A2P7ED65_9SYNE S-adenosylmethionine:tRNA ribosyltransferase-isomerase; OS = Synechococcus lacustris OX=2116544 GN=queA PE=3 SV=1
MQQLNQDQLLSGYNFELPVEAIAQRPLEPRHRARMLKVEGGGQGCSHLQVWDLAQQLRKGDLLVVNNTRVLRARLKARRATGGLVELLVLEPAALGGGQWICLAKPAKKLKAGDWLELEAPDQPPQRLQVLGCNEASGGRILQFPSECIDAAALEPLLVRYGSMPLPPYIHQQDASDDERYQTRFASRPGAVAAPTAGLHLSDELLDAIRAGGVEIASITLHVGLGTFRPLEIENLSGLQLHSEWVEVTADLVAAVAACRARGGRLIAVGTTSVRSLEAVAQLNGGLLKSHCGPVDLVIQPGYKFKVVEGLLTNFHLPKSSLLLLVSALIGRERLMALYLEAIEKKYRFFSYGDAMWIPPEAVLNSAKSEAC

SEQ ID NO: 72887 - protein, 353 aa, Synechococcus lividus
  REGION 1..353: note = tr|A0A2D2Q4Y0|A0A2D2Q4Y0_SYNLI S-adenosylmethionine:tRNA ribosyltransferase-isomerase; OS = Synechococcus lividus PCC 6715 OX=1917166 GN=queA PE=3; SV = 1
MSLTDFSLDAYDYYLPPERIAQQPATPRDHARLLVVDRETARDHWFYELPQLLQPQDLLVLNDTQVIPARLMGHKVGEPGRSVEVFLLEELSDRQWLALVKPGRKLRPGAVIQLGSLQATVQAIDPATRGRVIEFDLPPGDRLWPYLDEVGDIPLPPYIQTPIQDAQQYQTVYAQRPGAVAAPTAGLHFTPDLLSKLAYCGIDHCFITLHVGIGTFRPVEVNDIRQHRLHHEWIEVSAATVAKIKAVQRAGGRIIAVGTTVIRSLETAAQSGELQPFRGKSDLYIYSGYQPKIVEGFITNFHLPRSSLMMLVSAFIGRDRLLQLYDYAIAQAYRFYSFGDAMLILPTAWQSSA

SEQ ID NO: 72888 - protein, 370 aa, Synechococcus sp.
  REGION 1..370: note = sp|A5GJ95|QUEA_SYNPW S-adenosylmethionine:tRNA ribosyltransferase-isomerase OS=Synechococcus sp. (strain WH7803) OX=32051 GN=queA PE=3 SV=1
MADPRDLQLSAYDYELPEARIAQRPVEPRHAAKLLMVPPLEASSLQGRHGTVWDWQNELRSGDLLVVNDTRVLQARLRVRRSGGGLGELLVLEPRGEGRWLCLARPGKKLRPGDQVWLEALEQDPLPLQVLASDPASGGRIVQFPPAFVDAMAIEALLQRYGEVPLPPYITCHDDSDQERYQTRYASRPGAVAAPTAGLHLSDDLLQAIRARGVQMSSVTLHVGLGTFRPVETEDLSELSLHSEWVEVSTQLVEAVQACRQRGGRVIAVGTTSVRALEGAAAAGGGDLQPLKGPVDLVIQPGYQFRVVDGLLTNFHLPKSSLLLLVSALIGRERLLDLYALAIANDYRFYSYGDAMWIAPGAVLMDARPR

SEQ ID NO: 72889 - protein, 363 aa, Synechococcus sp.
  REGION 1..363: note = sp|A5GUY6|QUEA_SYNR3 S-adenosylmethionine:tRNA ribosyltransferase-isomerase OS=Synechococcus sp. (strain RCC307) OX=316278 GN=queA PE=3 SV=1
MLIDPRDSLLSSYDYELPEACIAQRPLEPRHAARLLMVEPEAGCRDRQVWDLLEELEPGDLLVVNDTRVLRARLQVRRAGGGLGELLVLQPQGQGQWLCLARPAKRLRPGDSIALVADGEPDLPLQVLAVEESSGGRLIQFPPECVDAASLEPLLLRYGVMPLPPYIHQQDESDNARYQTCFASKPGAVAAPTAGLHLSEELLAALTQKGIERASVTLHVGLGTFRPVETEDLSQLELHSEWVEVSEALVQAVAACRKRGGRVIAVGTTSVRSLEGVAALHGGVLQPFRGPVNLVIQPGFRFAVVQGLLTNFHLPKSSLLLLVSALIGRERLLQLYQHAITAGYRFYSYGDAMWIPPECSRQP

SEQ ID NO: 72890 - protein, 366 aa, Synechocystis sp.
  REGION 1..366: note = sp|Q55850|QUEA_SYNY3 S-adenosylmethionine:tRNA ribosyltransferase-isomerase OS=Synechocystis sp. (strain PCC 6803 / Kazusa) OX=1111708 GN=queA PE=3 SV=1
MDQDKYLSSYDYHLPADCIAQTPAVPRDHSRLLVVKDPFTVDHQHFYDLGNYLKPGDLLVLNDTKVMPARLHGQKENGVAVEILLLTECTENQWIALVKPGKRLKLGAKVKFPARDGEKPDLWATILQRDDATGGRLLEFVLEPGQRLWDVLPDYGEIPFPPYIGDRQATNDQYQTIYAEKLGAVAAPTAGLHFTEELFTKLAQQGVQTAKVTLHVGIGTFRPVEAENILDHVMHQEWIDVPPTTVEVIEKTRASGGRIFAVGTTVVRCLEGMAQESDFPRQPLQPFRGQTDLFIYPGYQWRLVDGLITNFHLPKSSLLMLVSALISRPRLMAIYETAIAKGYRFYSFGDAMVILPEACRGQEKIR

SEQ ID NO: 72891 - protein, 385 aa, Synechocystis sp.
  REGION 1..385: note = tr|A0A068MSH7|A0A068MSH7_SYNY4 S-adenosylmethionine:tRNA ribosyltransferase-isomerase; OS = Synechocystis sp. (strain PCC 6714) OX=1147 GN=queA; PE = 3 SV=1
MQLSFSFLAFCPLLIFPMDQDQYLSSYDYQLPPQCIAQSPAVPRDHSRLLVVKDQFTVNHEHFYDLGNYLNSGDLLVLNDTKVMPARLHGKKDNGVAVEILLLTECRENQWIALVKPGKRLKLGAKVKFTARDGEKPDLWATILQRDEATGGRLLEFALEPGQRLWDVLPDYGEIPFPPYIGDRQATDDQYQTIYAEKLGAVAAPTAGLHFTEELFTKLTQQGVQTTKVTLHVGIGTFRPVETENILNHVMHQEWIDVPPTAVEAIAQTKANGGRIFAVGTTVVRCLEGMAQECNFPSQPLQPFRGQTDLFIYPGYQWRLVEGLITNFHLPKSSLLMLVSALISRPRLMAIYETAIAKGYRFYSFGDAMVILPEACQGRETAEKS

SEQ ID NO: 72892 - protein, 349 aa, unidentified
  source 1..349: note = Synergistaceae bacterium
  REGION 1..349: note = tr|A0A3C0QH31|A0A3C0QH31_9BACT S-adenosylmethionine:tRNA ribosyltransferase-isomerase; OS = Synergistaceae bacterium OX=2053624 GN=queA PE=3 SV=1
MTGPDFSKTSTFDYYLPKELIAQDPVEPRDSSRLLVLHKDSGTREHRIFKDIKDHLRKGDLLVLNDTRVLPARVPGIKKNGNAEVEIFFLSPAAEPNKWTALVRPGRKLKEGTHVQLGEDVEIVVGESLEDGVRNVYFAPSADPFAIIHKYGTTPLPHYITETHAEPERYQTVYSRPEKENSVASPTAGLHFTKELLKEIRTMGVDEAFVTLQVGLGTFRPVKTENLSEHIMHSELCEISDITARKIADTKMSGGRVIAVGTTVVRTLESFAIRYGEVRPGMLDTRLFITPGFNFRIIDALITNYHLPKSTLLMLVSAFGGYDRIMEAYREAVDLKYRFFSFGDSMFIC

SEQ ID NO: 72893 - protein, 349 aa, unidentified
  source 1..349: note = Synergistaceae bacterium
  REGION 1..349: note = tr|A0A3B9TRX4|A0A3B9TRX4_9BACT S-adenosylmethionine:tRNA ribosyltransferase-isomerase; OS = Synergistaceae bacterium OX=2053624 GN=queA PE=3 SV=1
MHNNDYFDINAYGYYLPQELIAQNPAEPRDSSRLMVVDRENGRITHSIFSNLHSFLKSGDLLVLNDTKVFRARLKGVKKGGQTEAEILLLRPLDRLEKEWEALVRPGKRLSPGAVVILKDKTEIVIGESAEAGTRRVGFPGGCNVRALMERIGEVPLPPYIKKTSAPSERYQTVYADKSGSAAAPTAGLHFTERVFRRLHESGVEKAFLTLHVGLGTFRPVKENDIRNHKMHEEYCSIDKETAEKINRTKRGGNRVIAVGTTVVRTLESLADERTGEVNPGSLWTKAYIYPGYAFKAVDAMVTNFHLPKSTLLMLVAAFAGRNLILEAYEEAVRMRYRFFSFGDAMLII

SEQ ID NO: 72894 - protein, 365 aa, unidentified
  source 1..365: note = Synergistales bacterium
  REGION 1..365: note = tr|A0A117M7T2|A0A117M7T2_9BACT S-adenosylmethionine:tRNA ribosyltransferase-isomerase; OS = Synergistales bacterium 58_81 OX=1635274 GN=queA PE=3; SV = 1
MEGPFRTDLPGREGDMEGSGSMFDINSYDYYLPESMIAQEPAEPRDSSKLLVLDRFSGTIRHRVFHEIMSLLREKDLLVINDTRVARARLRGVKIGGGASIEVFLLRPLHGDRCALWEVLVRPGRRVRPGQRLVLDGGIEVVIGEMTVHGSRTCSFPEGTDVWKLMEETGEIPFPPYIHNPFIDPERYQTVYGVNRGSVAAPTAGLHFSPELLRNIEGAGIRTARITLNVGLGTFRPVKEEDIRMHRMHSEECTVPEATALAVKETKDFGGRVVAVGTTVVRALESRAAEDGTVTPGSFSTEAFFYPGYRFRTIDAMITNFHLPRSTLLMLVCAFAGNELIMKAYSEAIESGYRFYSFGDAMFIQ

SEQ ID NO: 72895 - protein, 352 aa, unidentified
  source 1..352: note = Synergistales bacterium
  REGION 1..352: note = tr|A0A117MFK6|A0A117MFK6_9BACT S-adenosylmethionine:tRNA ribosyltransferase-isomerase; OS = Synergistales bacterium 54_9 OX=1641385 GN=queA PE=3; SV = 1
MDHMHNNDYFDINAYGYYLPQELIAQNPAEPRDSSRLMVVDRENGRITHSIFSNLHSFLKSGDLLVLNDTKVFRARLKGVKKGGQTEAEILLLRPLDRLEKEWEALVRPGKRLSPGAVVILKDKTEIVIGESAEAGTRRVGFPGGCNVRALMERIGEVPLPPYIKKTSAPSERYQTVYADKSGSAAAPTAGLHFTERVFRRLHESGVEKAFLTLHVGLGTFRPVKENDIRNHKMHEEYCSIDKETAEKINRTKRGGNRVIAVGTTVVRTLESLADERTGEVNPGSLWTKAYIYPGYAFKAVDAMVTNFHLPKSTLLMLVAAFAGRNLILEAYEEAVRMRYRFFSFGDAMLII

SEQ ID NO: 72896 - protein, 354 aa, Synergistes jonesii
  REGION 1..354: note = tr|A0A073J4B5|A0A073J4B5_9BACT S-adenosylmethionine:tRNA ribosyltransferase-isomerase; OS = Synergistes jonesii OX=2754 GN=queA PE=3 SV=1
MSEKTPDLSKTAAYDYFLPKELIAQDPAEPRDSSRLLVLRRATGESEDTIFHNIVNYLREGDLLVMNDTRVLPARVEGRKINESGEGAKVEIFFLNPGARHNEWTALVRPGRKLSEGTKVALSDDFRVAVGARLEDGLRTIIFGESDEPLALIHKFGRTPLPHYITETHADPERYQTVYAKREKENSVAAPTAGLHFTPELLKKLEERGVPHKFVTLQVGLGTFRPVKAENIAEHIMHTEFCEVPGDTADAIKETKERGGRVVAVGTTVVRTLEAFAQRFGEVRGGALSTKLFINPGYSFKAIDALITNFHLPMSTLLMLVSAFGGYETTMRAYREAVEKRYRFFSFGDSMFIE

SEQ ID NO: 72897 - protein, 348 aa, Synergistes sp.
  REGION 1..348: note = tr|G9PX54|G9PX54_9BACT S-adenosylmethionine:tRNA ribosyltransferase-isomerase OS=Synergistes sp. 3_1_syn1; OX = 457415 GN=queA PE=3 SV=1
MERDLTKTAAYDYDLPKELIAQDPAEPRDSSRLLVVHRKDGLTEDRIFRDITEYLRPGDLLVMNDTRVLPARVEGVKINGGAKVEIFFLHPGARRDEWTALVRPGRKLPEGTKVALDAGVEITVGARLEDGLRTVAFADGDDPFTLIHRYGQTPLPHYITDTHAEPERYQTVYAKREKENSVAAPTAGLHFTPGLLRKLTDMGVPHAFVTLQVGLGTFRPVKAENIAEHVMHTEFCEIPPAAAAAINETKEKGGRVVAVGTTVVRTLESFAREYGRIVPGALSTRLFISPGYRFRVIDALITNFHLPMSTLLMLVSAFGGYETMMRVYNEAVEKRYRFFSFGDSMFIE

SEQ ID NO: 72898 - protein, 349 aa, unidentified
  source 1..349: note = Synergistetes bacterium
  REGION 1..349: note = tr|A0A2N1QX53|A0A2N1QX53_9BACT S-adenosylmethionine:tRNA ribosyltransferase-isomerase; OS = Synergistetes bacterium HGW-Synergistetes-1 OX=2013842; GN = queA PE=3 SV=1
MTVPDFSKTSTFDYYLPKELIAQDPVEPRDSSRLLVLHKDSGTREHKIFRDIKDHLRKGDLLVLNDTRVIPARVPGIKKNSKAEVEIFFLSPAAEPNMWTALVRPGRKLKEGTHVQLGEDVEIVVGERLEDGVRNVYFAPSADPFAIIHKYGTTPLPHYITETHAEPERYQTVYSKPEKENSVASPTAGLHFTKELLKEIRTMGVDEAFVTLQVGLGTFRPVKTENLSEHIMHSELCEISNITARKIAETKMSGGRVIAVGTTVVRTLESFAMHYGEIRPGILDTRLFITPGFNFRVIDALITNYHLPKSTLLMLVSAFGGYDRIMEAYNEAVDLKYRFFSFGDSMFIC

SEQ ID NO: 72899 - protein, 322 aa, unidentified
  source 1..322: note = Synergistetes bacterium
  REGION 1..322: note = tr|A0A2N1QL51|A0A2N1QL51_9BACT S-adenosylmethionine:tRNA ribosyltransferase-isomerase (Fragment) OS=Synergistetes bacterium HGW-Synergistetes-2; OX = 2013843 GN=CVV55_0 7785 PE=3 SV=1
MQTVDLFDIESYNYMLPEELIAQNPATPRDSSRMLVLDRCSGKIAHRRFFDLRELLKPSDLLVLNDTRVIPARLRGSKLPGGGKAEVLLLKALNPEWSEWEALVKPGRRLRSGTGIMLSDGTVITVGERFEGTEGVRRVSFPQGVKVLSLLTEIGETPLPPYITRSTAPRSAYQTVFAARDGSAAAPTASLHFTEELLEELRREFGLSVAWVTFHVGLGTFRPVQCSDIRKHVIHEEYCVLPLETKKLVEETKRRGGRVIAAGTTVARTLESMAAKDGEMRWGEMNTQLFIYPGFEYKVVDALVTNFHLPKSSLLMLVAAFA

SEQ ID NO: 72900 - protein, 345 aa, unidentified
  source 1..345: note = Syntrophaceae bacterium
  REGION 1..345: note = tr|A0A1J5IAY1|A0A1J5IAY1_9DELT S-adenosylmethionine:tRNA ribosyltransferase-isomerase; OS = Syntrophaceae bacterium CG2_30_58_14 OX=1805378 GN=queA; PE = 3 SV=1
MRLEEFAYDLPDVLIAQEPAAVRDRSRMMVVHRKTGEIEIRTFRDLPGYFGEGDVFVVNDSRVFPARLIGRKETGGLIEILLLTRQPGDPPGETWEVLLRPAKRVVVGTTVTFAAGCRATIVRRLSEKRWLLEFRTEIPFDDFLARFGRAPLPPYIKRKRDRARSLQDLERYQTVYARVKGSVAAPTAGLHFTQEVLELLRGRAVGIAPVTLHVGYGTFLPIAAENVEDHVMEEEHFTIDGGTAQLINGAKRVIAVGTTSTRVLESVADDEGKIRPVSGSTRLYIYPGSRFRRVDALLTNFHLPKSSLFLLVCAFAGTERMQEAYRIAIENRFRFYSYGDCMLIL

SEQ ID NO: 72901 - protein, 345 aa, unidentified
  source 1..345: note = Syntrophaceae bacterium
  REGION 1..345: note = tr|A0A1J5I2A5|A0A1J5I2A5_9DELT S-adenosylmethionine:tRNA ribosyltransferase-isomerase; OS = Syntrophaceae bacterium CG2_30_49_12 OX=1805377 GN=queA; PE = 3 SV=1
MRLEEFDYHLPEELIAQEPCEVRDQARMMVVSRKTGGIENKVFHDLPEFLNKGDVLVINDSKVISARLIGEKASGGRIEILLLKKHDDASPGETWEVLLRPAKRTRVGTKIFFHDGSQARVEERIGDRKWLITFSTDIAFDQFLHQYGKAPLPPYIKRRGDCVTDRNDIERYQTVYASTPGSVAAPTAGLHFSRNILNTLEGQGVQIASVTLHIGYGTFLSLKSGIVEDQVMEEEFFEIGEEAAKMINDGERVIAVGTTSTRVLETASDEEDRIRAKAAFTRLFIYPGYRFKRVGALLTNFHLPRSSLFLLVCAFAGKNLIQKAYQRAIEDCYRFYSYGDCTLIL

SEQ ID NO: 72902 - protein, 344 aa, Syntrophaceticus schinkii
  REGION 1..344: note = tr|A0A0B7MPF4|A0A0B7MPF4_9FIRM S-adenosylmethionine:tRNA ribosyltransferase-isomerase; OS = Syntrophaceticus schinkii OX=499207 GN=queA PE=3 SV=1
MLVSDFDYDLPTELIAQYPAAQRDASRMMVLNRKSGEINHTHFKNILDYLEEGDLLVFNETKVFPARLFGRRVKTGGKLEVLLLDEKEPCTWEALVRPGRHAREGEEIIFGEALRAVIGERTDSGGRIINFLVEDKQEFWDQLFKIGKMPLPPYIKRPAEEMDRERYQTVYARSLGSAAAPTAGLHFTEEILGQLKDKGVQFAFVVLHVGLGTFRPVHVPKVEDHRMHAEFWRLDAHNASLINEARQNGRRVIAVGTTTVRLLESVAGDDGTVGAGEGWTSIFIYPGFRFRVIDGLVTNFHLPCSTLLMLVCAFAGYNKVLPAYREAVEKSYRFFSYGDAMLIL

SEQ ID NO: 72903 - protein, 357 aa, Syntrophobacter fumaroxidans
  REGION 1..357: note = tr|A0LFR1|A0LFR1_SYNFM S-adenosylmethionine:tRNA ribosyltransferase-isomerase OS=Syntrophobacter fumaroxidans (strain DSM 10017 / MPOB) OX=335543 GN=queA; PE = 3 SV=1
MADERISYRLREYDYDLPPSLIAQSPLSRREESRLLVLDRGRGAMDHVRFRDLPDHLHAEDLLVVNDTRVVPARLIGFKDSGGRIELLVTEPYKSEAEGRRDGYWCLAAAAKRTRPGCLISLPDGTVAEVLEAGDGGRIRVRFPDDRPLMTILSEIGAVPLPPYINRSGTGDFPGDAEAYQTVYARNPGAVAAPTAGLHFSSALLEAVARAGVEVVRITLHVGYGTFAPIRVDDIRDHEMHPEYVRVDEDSTERIRSAIDRKRRIVAVGTTVVRSLEWIAHRRGEIMPAAGACAHYIYPGYRFKVVDAMITNFHLPRSSLLLLVSAFAGRRRILEAYREAIRREYRFFSYGDAMLIL

SEQ ID NO: 72904 - protein, 194 aa, Syntrophobacter sp.
  REGION 1..194: note = tr|A0A0S7XVA8|A0A0S7XVA8_9DELT S-adenosylmethionine:tRNA ribosyltransferase-isomerase (Fragment) OS=Syntrophobacter sp. DG_60 OX=1703361; GN = AMJ45_03950 PE=3 SV=1
YIKRDVIPEDASNYQTIYAEKPGAIAAPTAGLHFSPEIIDTLKKKGIGIVHITIHIGYGTFIPVKVSDIRKHKMESESFEVSEEAAKFINDGINGIKGGKEIIAVGSTTTRALEYLATKYGKVIAKKGICDLFIYPGYRFKVIKGLITNFHLPKSTLIMLVCAFASRELILKAYQEAINMQYRFYSYGDAMLIV

SEQ ID NO: 72905 - protein, 347 aa, Syntrophobacter sp.
  REGION 1..347: note = tr|A0A2U3L3U7|A0A2U3L3U7_9DELT S-adenosylmethionine:tRNA ribosyltransferase-isomerase; OS = Syntrophobacter sp. SbD1 OX=2043167 GN=queA PE=3 SV=1
MNSPAAEQLRLSDFDYDLPEALIAQEPASERDHSRLMVLDRSSSVIEHKIFADLEKYLLPGDLLVLNDTRVFPCRLPSTKQGGGRSEIFLLSELDCNLWIALVKGGVGVGKRLIISTGVEAEIVQEHADGTRTVRFHSLADIHGILNEIGRVPLPPYIRRDPSRKDCERYQTVYASREGAVAAPTAGLHFSRELLATLAAKGVELVTITLHVGPGTFQPVRSDRIVEHRMLPERYSISAAAAAAINKAKAEDRRVIAVGTTSVRTIETASRVFGSVIAGEGTSELFIYPGYEFKVTGGIITNFHLPKSTLLMLVSAFAGRERMLAAYRTAIADQYRFYSYGDAMLIA

SEQ ID NO: 72906 - protein, 306 aa, unidentified
  source 1..306: note = Syntrophobacteraceae bacterium
  REGION 1..306: note = tr|A0A3D0H820|A0A3D0H820_9DELT S-adenosylmethionine:tRNA ribosyltransferase-isomerase (Fragment) OS=Syntrophobacteraceae bacterium OX=2052185; GN = DEO88_15230 PE=3 SV= 1
DVSRYFGPYDVLVINDTQVVRARLSGTKDSGGRVELLILDPYKDSQLAQQEGYTCLIKASKKPRPGSLIHLMDGVEALVLSPVINGQARIRIIGNASMGEIFEQIGEIPLPPYIERRDAKPATNDSISYQTVYARIPGAVAAPTAGLHFSLELLRQLATQGVNIVKITLHVGYGTFSPIRTQDIRYHTMHPEYAEVSVETADRLERARRNGDRIVAVGTTVVRTLEWVAQERGCIEPYSGLCHHYIYPGYEFRVVQAMLTNFHLPKSSLLLLVMAFAGRDRIVAAYQEAIRNGYRFFSYGDAMLIL

SEQ ID NO: 72907 - protein, 356 aa, unidentified
  source 1..356: note = Syntrophobacteraceae bacterium
  REGION 1..356: note = tr|A0A1J5IFH3|A0A1J5IFH3_9DELT S-adenosylmethionine:tRNA ribosyltransferase-isomerase; OS = Syntrophobacteraceae bacterium CG2_30_61_12 OX=1805379; GN = queA PE=3 SV=1
MTTDFLLDAYDYPLPPALIAQAPVPNRCGSRLLVLDRSRNGGLEHRIFSELGRYLDRGDVLVLNDTRVVPSRLRGVKASGGKVELLVLEPCRSEALNAAAGHPCLIKASKPPRAGTRLILNGGVTARVEAPLGEGRYRVRFDDQRPLAALLDAVGEVPLPPYISRTGSDPAPVNDRDSYQTVYADHPGAVAAPTAGLHFTRQLLDQLERQGVELVRITLHVGYGTFAPIRCRDIRDHRMHAEAVEISAAAAAAVNAARRDGRRIVAVGTTAVRTLEWSASDSGTVTAGAGLCDHYIYPGYRFRVVDAMITNFHLPKSTLLLLVSALAGREAILAAYREAITRGYRFYSYGDAMLIR

SEQ ID NO: 72908 - protein, 345 aa, unidentified; identical to SEQ ID NO: 72900
  source 1..345: note = Syntrophobacterales bacterium
  REGION 1..345: note = tr|A0A2M7BJJ6|A0A2M7BJJ6_9DELT S-adenosylmethionine:tRNA ribosyltransferase-isomerase; OS = Syntrophobacterales bacterium CG03_land_8_20_14_0_80_58_14 OX=1974100 GN=que A PE=3 SV=1

SEQ ID NO: 72909 - protein, 345 aa, unidentified; identical to SEQ ID NO: 72901
  source 1..345: note = Syntrophobacterales bacterium
  REGION 1..345: note = tr|A0A2M8GCY9|A0A2M8GCY9_9DELT S-adenosylmethionine:tRNA ribosyltransferase-isomerase; OS = Syntrophobacterales bacterium CG_4_8_14_3_um_filter_49_14 OX=1974097 GN=queAPE=3 SV=1

SEQ ID NO: 72910 - protein, 340 aa, Syntrophobotulus glycolicus
  REGION 1..340: note = tr|F0T265|F0T265_SYNGF S-adenosylmethionine:tRNA ribosyltransferase-isomerase OS=Syntrophobotulus glycolicus (strain DSM 8271 / FlGlyR) OX=645991 GN=queA; PE = 3 SV=1
MRVKDFDYDLPAELIAQHPVEPRDHSRLMVVNKEKGELFHALFKEIVDFFQPGDVLVVNKTKVIPARLFGVKEGTGAKIEILLLNRKETDTWEVLVKPGKRLKIGQRVIFGEGRLIGELLEILPDGNRIIKFLYQGLFENILDQLGQVPLPPYITEKLENQERYQTVYAKESGSAAAPTAGLHFTERLMDQIKAKGADIQEIVLHVGLGTFRPVKAENIEDHLMHTEYYQIGLQAAETINAAKARGSRIIAVGTTVSRSLEAAAVNGKVEAGASWTDIFIYPGYTFQIVDALITNFHFPRSTLLMLVSALAGQELMLKAYETAVREKYRFYSFGDAMFIC

SEQ ID NO: 72911 - protein, 236 aa, Syntrophomonas sp.
  REGION 1..236: note = tr|A0A356UEI5|A0A356UEI5_9FIRM S-adenosylmethionine:tRNA ribosyltransferase-isomerase (Fragment) OS=Syntrophomonas sp. OX=2053627 GN=queA PE=3; SV = 1
MHKNQEKSIYNLQSYQFNLPPELIAQYPVEPRHQSRLLVLERQTGLIKNHIFADIIDYLESGDTLVLNDTRVIPARLYGYKDSGAKVEILLLNQRGRQWEALVRPAKRLKPGSIVRFDDQNGVEVEIMAELNLAGGRLIEFKNCVDQMSFIDQMGQMPLPPYINRPAENSDKQNYQTIYAREKGSAAAPTAGLHFSQELLQHIQDKGVNLATILLHVGLGTFRPVSSNDIREHQMH

SEQ ID NO: 72912 - protein, 353 aa, Syntrophomonas sp.
  REGION 1..353: note = tr|A0A356ZCC2|A0A356ZCC2_9FIRM S-adenosylmethionine:tRNA ribosyltransferase-isomerase; OS = Syntrophomonas sp. OX=2053627 GN=queA PE=3 SV=1
MQQENDQESLYQLQSYMFDLPSRLIAQYPAEPRDSARMLVVNRETGELQDRVFTNLLDYLEEGDTLVLNDTRVIPARLFARKDTGARIEVFLLKPGEDGWEALVKPARRMKPGTIIEFENSDQVQARVMEELDFAGGRLIKFLNCPDINAFINQSGAMPLPPYINRPAREHDKEDYQTVYARYAGSVAAPTAGLHFTDALLDTIKNKGINIAYVLLHVGLGTFRPVSTDDIRRHEMHYEYYQINEKTADLLNQTRQSGHKIIAVGTTVVRTLETVYNVEHGFSAMTGQTNKFIYPGYQFKAIDSLITNFHLPGSSLVMLVAALAGFDFTMKAYRYAVENEYRFFSYGDAMLIV

SEQ ID NO: 72913 - protein, 352 aa, Syntrophomonas wolfei
  REGION 1..352: note = sp|Q0AX18|QUEA_SYNWW S-adenosylmethionine:tRNA ribosyltransferase-isomerase OS=Syntrophomonas wolfei subsp. wolfei (strain DSM 2245B / Goettingen) OX=335541; GN = queAPE=3 SV=1
MQHDKNEDIYRLSTYYYDLPPELIAQYPAEYRDSSRLLVLDRKSGDLNDRAFKDISLYLKKGDALVLNETRVIPARFFAYKESGARVEILLLKKLGDDWEALVKPARRLKAGSRVFLSPDKPLVIEIVEELDFAGGRRVRFQDSVDEDTLLQEQGHIPLPPYINRPDEELDRERYQTVYACKSGSVAAPTAGLHFTPDLLKEITLQGINIVRIVLHVGMGTFRPVKNEDIRQHNMHLEYYEVAEDAAALLNLTRESGGQIVAVGTTVVRTLESVYNKDCGFLAGKGETNKYIFPGYQFRAIDKLLTNFHLPGSSLLMLVAGFAGTESTLAAYRHAVENRYRFFSYGDAMLVI

SEQ ID NO: 72914 - protein, 352 aa, Syntrophomonas wolfei
  REGION 1..352: note = tr|A0A354Z0S0|A0A354Z0S0_9FIRM S-adenosylmethionine:tRNA ribosyltransferase-isomerase; OS = Syntrophomonas wolfei OX=863 GN=queA PE=3 SV=1
MLHDKNDDIYRLSTYHYDLPPELIAQYPAEYRDSSRLLVLDRKSGDLKDRVFKDIGQYLKKGDALVLNETRVIPARFFAYKESGARVEILLLKKLGDDWEALVKPARRLKVGSRVFLSPDQPLLIEIVEELEFAGGRRVRFLNGINEDTLLQEQGHIPLPPYINRPDEELDRERYQTVYASKSGSVAAPTAGLHFTPDLLKDIALQGINIVRIVLHVGMGTFRPVKNKDIRQHTMHLEYFEVAEEAAALLNLTRESGGQIVAVGTTVVRTLESVYNEDCGFVAGKGETNKYIFPGYQFWAIDKLLTNFHLPASSLLMLVAAFAGTESTLAAYRHAVENRYRFFSYGDAMLVI

SEQ ID NO: 72915 - protein, 349 aa, Syntrophomonas zehnderi
  REGION 1..349: note = tr|A0A0E4GD03|A0A0E4GD03_9FIRM S-adenosylmethionine:tRNA ribosyltransferase-isomerase; OS = Syntrophomonas zehnderi OL-4 OX=690567 GN=queA PE=3 SV=1
MKDLNPYLLQSYQFDLPPHLIAQFPAEPRDEARLLVMDRQTGEFEDRIFKDIIEYLEPGDTLVLNNTRVIPARLFARKKTGARIEILLLNQENGHWKALVKPARRMPLGTRVFFETSPQVEAEVVAELEDGARLLTFHNCPNEMEFINGVGQMPLPPYINRPAEEDDKIRYQTVYAQSAGSAAAPTAGLHFTEELLERIAAQGINIAPVLLHVGLGTFRPVSSKDIRNHQMHYEYYQIDAKTAYLLNNTKQNGKNIIAVGTTVVRTLETVYNENHGFTAQSGETNRFIYPGYRYRAVDKIITNFHLPGSSLIMLVAAFAGLDNTLKAYRHAVEKEYRFFSYGDAMLVSK

SEQ ID NO: 72916 - protein, 340 aa, unidentified
  source 1..340: note = Syntrophorhabdaceae bacterium
  REGION 1..340: note = tr|A0A1V5CEL0|A0A1V5CEL0_9DELT S-adenosylmethionine:tRNA ribosyltransferase-isomerase; OS = Syntrophorhabdaceae bacterium PtaU1.Bin034 OX=1811715; GN = queA PE=3 SV=1
MRTEEFDYSLPRHLIAQQPVQDRTSSRLLVLNRSDGVREHRYFRDIKEYLREKDLIVVNDTKVIPARLIGKKKTGGNVGILLTEKLDERKYYCLVNGVKRGIGKAEVHVGETVVQLEAGLPFWTIEFPEDRDAARLMADSGRMPLPHYIKRDKDREEPEDYNHYQTVYARHEGSIAAPTAGLHFSEALLNDIQEMGVKVAKVTLHIGVGTFFLIKSEEVEGHEMHREYYSMPPDSLKAVRETRAAGGRIIAVGTSAVRTLETACACNNGASLSGYSELFIYPGYRFRVVDALITNFHLPRSTPLMLVCAFAGKDAIQTAYKEAIERSYRFYSYGDAMLIS

SEQ ID NO: 72917 - protein, 340 aa, Syntrophorhabdus aromaticivorans
  REGION 1..340: note = tr|A0A351U7U0|A0A351U7U0_9DELT S-adenosylmethionine:tRNA ribosyltransferase-isomerase; OS = Syntrophorhabdus aromaticivorans OX=328301 GN=queA PE=3; SV = 1
MGPNIEDFDYDLPKALIAQYPEKDREASRLLVFDRGEETIAHRSFRDITQYLSKGDVLVLNDSKVLPARLRARKDTGGAVDILLVERISDTRWLCLAKGIKAGNKEQKVSVGPMEARLTKGEDYWVIDFHNDGDTFDVMRRYGTMPLPPYIKRNDGNGAIDDERYQTVYAEMSGSIAAPTAGFHFSVGLLETIKRMGVHVVTITLHIGVGTFFLIKKRNVQDHHMHGEYYHITPEAKAFIGKAKGDGRRIIACGTSAVRTLETVYSESGKPLAGKTDLFVYPGYRFKMVDAMITNFHLPRSTPLLLVSAFAGPERIRRCYKEAMERGYRFYSYGDAMLIL

SEQ ID NO: 72918 - protein, 340 aa, Syntrophorhabdus sp.
  REGION 1..340: note = tr|A0A1V5BUD2|A0A1V5BUD2_9DELT S-adenosylmethionine:tRNA ribosyltransferase-isomerase; OS = Syntrophorhabdus sp. PtaU1.Bin002 OX=1811702 GN=queA; PE = 3 SV=1
MELNIEDFNYDLPKALIAQYPEKDREDSRLLVFDREDETIAHRSFRDITQYLNKGDVLVLNDSKVLPARLRARKATGGAVDILLVERINDTRWLCLAKGIKAGSREQKVSVGPIEAQLTKSEDYWVVDFHNDNDVFDIMRHYGKMPLPPYIKRSDGNGTIDDERYQTVYAEMSGSIAAPTAGFHFSEGLLEAIKRMGVQVVKITLHIGVGTFFLIKKRNVQDHHMHGEYYHITPDAKMFIRKAKDEGHRIIACGTSVVRTLETIYSENGKPLAGKTDLFVYPGYRFKMVDAMITNFHLPRSTPLLLVSAFAGLDRIRKCYKEAMERSYRFYSYGDAMLIL

SEQ ID NO: 72919 - protein, 386 aa, Syntrophorhabdus sp.
  REGION 1..386: note = tr|A0A1V4WXF5|A0A1V4WXF5_9DELT S-adenosylmethionine:tRNA ribosyltransferase-isomerase; OS = Syntrophorhabdus sp. PtaB.Bin184 OX=1811701 GN=queA; PE = 3 SV=1
MGIICYKINLFGEGRAASRGFFALTARVAATKWPDTTHVTTDGAYGIMRVEEFDYDLPRDMIAQHPSAEREASRLLVCDREKGAMEHRRFSDIADYLRQGDVLVINDSKVFPARLKAQKRTGGMLDVLLVRPVEGGTWECLVRGMRRTGEATPVTVGGHGAFLARGDDSWTISFASREEGDEVIRTLGRMPLPPYIKRNGEDGTADYERYQTVYAEKTGSIAAPTAGFHFSGELLGRVAAKGVEIVRITLHVGIGTFSLIHAGSVEDHRMHGERYEIDEMSKDRIRSARQEGRRVVACGTSSVRTLETVFGMNGNGTLSGETELFIYPGYRFRCVDALITNFHLPRSTPLMLVAAFMGAGPLRKAYAEAIQGGYRFYSYGDAMFIS

SEQ ID NO: 72920 - protein, 344 aa, Syntrophothermus lipocalidus
  REGION 1..344: note = tr|D7CLE3|D7CLE3_SYNLT S-adenosylmethionine:tRNA ribosyltransferase-isomerase OS=Syntrophothermus lipocalidus (strain DSM 12680 / TGB-C1) OX=643648 GN=queA; PE = 3 SV=1
MDIYSLETYQYQLPPELVAQYPVQPRDHSRLLVVERETKKFRDRYFFALAEYLGEKHVLVLNETRVIPVRLRGIKETGAHVEILLLRKVGEDWQALVRPARRLKPGAVIQFTCGAKAEIIQELGFAGGRVIRFQGVSDWYGFLENEGEVPLPPYISRPPTEQDKETYQTVYAARPGSAAAPTAGLHFTEQLLTRLTQQGVEVVKLLLHVGLGTFRPVESPDIRQHRMHQEYYELGEQEAERLNDARAAGKRIVAVGTTVVRTLESAYEEKRGYVPRQGFTDCYIYPGYRFRAVDQLITNFHLPKSSLLMLVCAFAGIDLTLAAYRHAVENRYRFFSYGDAMYVI

SEQ ID NO: 72921 - protein, 362 aa, Syntrophus aciditrophicus
  REGION 1..362: note = sp|Q2LVG6|QUEA_SYNAS S-adenosylmethionine:tRNA ribosyltransferase-isomerase OS=Syntrophus aciditrophicus (strain SB) OX=56780 GN=queA PE=3 SV=1
MMKLQDFDYQLPQSRIAQSPCAKRDHARMMVLDRRIGSLEHRHFYDFPDFVRKGDVLVINDSKVIPARLSGRKETGSRIELLLLSRYSDSPAVPETDSTEWPFFRVGVEETWEALLKPGKRIRIGTSIFFDDHSRATVIERINEKKWLLTFNTALPFDLFLQRYGKAPLPPYIKREKKNAQMPEDRDRYQTIYARSPGSIAAPTAGFHFSEALFKTLRELEIVIAPVTLHVGFGTFTPIETEDVEDHVMEVESFSISPESSDKINSAERVIAVGTTSTRVLESAADEQGRVHPMSGQSRLFIYPGYRFKRVQALLTNFHLPKSSLFLLACAFAGKDRIQQAYATAIQEEYRFYSYGDCMLII

SEQ ID NO: 72922 - protein, 361 aa, Syntrophus gentianae
  REGION 1..361: note = tr|A0A1H7WE19|A0A1H7WE19_9DELT S-adenosylmethionine:tRNA ribosyltransferase-isomerase; OS = Syntrophus gentianae OX=43775 GN=queA PE=3 SV=1
MKLSDFHYDLPQSRIAQQPCAQRDHARMMVLDRRGQHLEHRHFYDFPDFLQKGDVLVINDSKVIPARLSGAKETGSRIELLLLSRHPDPLSIRNAEGAESSPLQTGADETWDVLLKPGKRVRIGTKINFDDSNQATVIERISEKKWRVAFSTALPFDLFLQQFGKAPLPPYIKRKREELSRPQDRERYQTIYARHPGSVAAPTAGFHFSEAQFKALQEREVAIAPVTLHVGFGTFTPIETEEVEDHVMDAESFSLSPESAERINSARRVIAVGTTSTRVLESAADDQGRVQPMSASSRLFIYPGYRFKRVDALLTNFHLPQSSLFLLACALAGKDLIFQAYSAAIQEEYRFYSYGDCMLIL

SEQ ID NO: 72923 - protein, 346 aa, Syntrophus sp.
  REGION 1..346: note = tr|A0A349A350|A0A349A350_9DELT S-adenosylmethionine:tRNA ribosyltransferase-isomerase; OS = Syntrophus sp. (in: Bacteria) OX=48412 GN=queA PE=3 SV=1
MDLTDFTYELPNTLIAQRPCPVRDASRMMVLHRQERRIEHRQFFELPDYLEKGDVLVVNDSRVIPARLYALKETGGTVEVLLLKKLQGAVPDAQTWEVLLRPARRAAAGQVLSLPGGARAVIRERVSDKKWTVEFSTGTDFAAYLRRNGEAPLPPYIKRRPGDASHFPDRDRYQTVYARADGSVAAPTAGLHFTPRTFDALRSRGVSIAAVTLHVGYGTFLPVTASRIEDHVMEEESFEIDAEAAEAINAAKRVVAVGTTATRVLESATDERGRIRPTAGATRLFIYPGYRFKRVNRLLTNFHLPASSLLLLVSAFAGRECILDAYRQAVEACYRFYSYGDCMLIL

SEQ ID NO: 72924 - protein, 361 aa, Syntrophus sp.
  REGION 1..361: note = tr|A0A1V4XNV1|A0A1V4XNV1_9DELT S-adenosylmethionine:tRNA ribosyltransferase-isomerase; OS = Syntrophus sp. PtaB.Bin138 OX=1811711 GN=queA_2 PE=3; SV = 1
MKLKDFHYDLPQSRIAQHPCAQRDHARMMVLDRREARLQHRHFFDFPEFLQEGDCLVINDSKVIPARLIGTKETGSRIEVLLLSRRPDPRRPSEDVTAASPPAEPGAEETWEVLLKPGKRVSIGTKIFFGDSNWASVRERVSEKKWRVAFFTALPFDLFLQQFGKAPLPPYIKRKREDGPAPQDRERYQTIYARHPGSVAAPTAGFHFSETQFRALQDLGVAIAPVTLHVGFGTFTPIEAENVEDHVMEKESFSLSPESADRINSARRVIAVGTTSTRVLESASDGHGRVRPMASSSSLFIYPGYRFRRVDALLTNFHLPQSSLFLLVCAFAGRDLIFKAYAEAVQEEYRFYSYGDCMLIL

SEQ ID NO: 72925 - protein, 347 aa, unidentified
  source 1..347: note = Tabrizicola sp.
  REGION 1..347: note = tr|A0A3S8UAZ0|A0A3S8UAZ0_9RHOB S-adenosylmethionine:tRNA ribosyltransferase-isomerase; OS = Tabrizicola sp. K13M18 OX=2494374 GN=queA PE=3 SV=1
MKLADFDFDLPETLIATRPARPRTHARLLLAEGDRISDRHVFDLQDILRPGDRLVLNNTKVIPARLFGTRQRGDAVAKVEITLLEPQPLGWRALAKPLRKVNLGEVIRFSDRLSASVAAKTETDLTLAFDLTGDDFDAALAEAGVMPLPPYIAAKRAADDQDRTDYQTVFARHAGAVAAPTASLHFDEPLLRALAAKGVDFTEVTLHVGAGTFLPVKVEDVTTHKMHAEWGRVSAAAADEINATKRAGGRIIPVGTTALRLIESAASPDGTLHPWEGETDIFIYPGYRFRITDALMTNFHLPKSTLVMLVAALMGETTIRKVYDHAINQGYRFFSYGDSSLLIPAKA

SEQ ID NO: 72926 - protein, 343 aa, unidentified
  source 1..343: note = Tabrizicola sp.
  REGION 1..343: note = tr|A0A411YZ22|A0A411YZ22_9RHOB S-adenosylmethionine:tRNA ribosyltransferase-isomerase; OS = Tabrizicola sp. DJC OX=2305252 GN=queA PE=3 SV=1
MKLSDFDFDLPETLIATRPARPRTAARLLLAEGEAISDLQVSDLLGLLRAGDRLVLNNTRVIPARLTGQRRRGDAVAKIEITLMEPAATGWRAMAKPLRKVMVGEEIVFSPDLSATVAEKSDTDLRLLFNLAGEDFDAALAQAGAMPLPPYIAAKRAPDAQDDDDYQTVFARHKGAVAAPTASLHFDAELLEALRAKGVQFTEVTLHVGAGTFLPVKVEDVATHKMHAEWGQVTPEAAAQINATKAAGGRVIPVGTTALRLIETAARTGRVEPWEGPTDIFIYPGFTFHATDALMTNFHLPKSTLLMLVSALMGKDRMDRIYAHAVAREYRFFSYGDASLLIP

SEQ ID NO: 72927 - protein, 356 aa, unidentified
  source 1..356: note = Tahibacter aquaticus
  REGION 1..356: note = tr|A0A4R6YYL4|A0A4R6YYL4_9GAMM S-adenosylmethionine:tRNA ribosyltransferase-isomerase; OS = Tahibacter aquaticus OX=520092 GN=queA PE=3 SV=1
MVGPPDRESGVKAEKVKKSDFHFDLPPGLIAQQPLPQRSASRLLVLDAAADTLADRRFTDLADYFRAGDLLIFNDTRVLPARLFGRKETGGAVEILIERVSGNHEARAQLGVSKKPRPGGLILLADGTPVRVLGRDGPFFDLRFETDEALEKLLLRLGRMPLPPYIDRAADTADDERYQTVFAREPGAVAAPTAGLHFDEALLDALRARGVEFGHVTLHVGAGTFQPIRSEDVREHNMHREWLNVGAELVEKIRRTRAAGNRVIAVGTTVVRALESATRDGEVFPLAGETQIFIFPGYRITSVDALVTNFHLPESTLLMLVSAFAGREKVLAAYRHAVERGYRFFSYGDAMLVFPG

SEQ ID NO: 72928 - protein, 349 aa, unidentified
  source 1..349: note = Taibaiella chishuiensis
  REGION 1..349: note = tr|A0A2P8DDB3|A0A2P8DDB3_9BACT S-adenosylmethionine:tRNA ribosyltransferase-isomerase; OS = Taibaiella chishuiensis OX=1434707 GN=queA PE=3 SV=1
MKLSQFKFDLPINLIAQHPSKQRDESRLMVVHRDTGKIEHKVFKDIMSYFDDKDVMVVNNTKVFPARLYGRKEKTGARIEVFLLRELSRQNRLWDVIVDPARKIRVGNKLYFGDNDELVAEVIDNTTSRGRTIRFLFDGTETEFKAVLDSMGETPLPKYIKRKPDEEDKERYQTVYAKYEGAVAAPTAGMHFSRELIKRMEIKGVKFAEVTLHTGLGTFRPIEVEDLSKHKMDAEFFEVGEYACDIVNKGIEEKRRICSVGTTTIRALESSVTARGLLKPKDGWTNLFIHPPHNFSIANSLVTNFHLPKTSLLIMVAAFAGYDLTMEAYQVAIKEKYNFFSYGDAMLVI

SEQ ID NO: 72929 - protein, 409 aa, unidentified
  source 1..409: note = Taibaiella chishuiensis
  REGION 1..409: note = tr|A0A2P8CY26|A0A2P8CY26_9BACT S-adenosylmethionine:tRNA ribosyltransferase-isomerase; OS = Taibaiella chishuiensis OX=1434707 GN=queA PE=3 SV=1
MHPSALQIRDFTYDLPEEKIARYPLEQRDQSRLLLYRNQAFTEDTYRNIDRFLPEGALMVFNQTRVIHARLLFRKPTGGRIEVFCLEPDNRYPDVQTAMLQQGEVYWKCMVGGAAKWKEGQVLELEQEHADAPKVFAALHERAEGVYILHLYWPASDTTFAEVLHQAGKVPLPPYLNRDAEQADEHRYQTIFAREEGSVAAPTAALHFTDEVMQSLAEKAIDAAFVTLHVGAGTFKPVKSETMEGHDMHAEWIEVTAPLLETVMNRLALDKPVVAVGTTSCRTLESLYWIGVRLIRKENIDFAGIAMPQWYPYENPSDIPATTAFRALLDYLQSTPLSKLVTRTQIIIAPGYSFRVIAGMVTNFHQPQSTLLLLVAALVGPSWRDIYTYALEHGFRFLSYGDGCLLWKK

SEQ ID NO: 72930 - protein, 408 aa, unidentified
  source 1..408: note = Taibaiella soli
  REGION 1..408: note = tr|A0A2W2BAD6|A0A2W2BAD6_9BACT S-adenosylmethionine:tRNA ribosyltransferase-isomerase; OS = Taibaiella soli OX=1649169 GN=DN068_10670 PE=3 SV=1
MHPQDIRIESFTYDLPNDRIAKYPLAQRDASKLLVYENGGVTEDTYRNIAMHIPEETLLVFNQTKVVHARLLFQKETGGVIEVFCLEPDAQYHGIQNAMLQKGKVYWHCMIGGASKWKHGMVLSIKHEHPDFILSASITDRQPGYFTLELFWDDKDLTFAEVLHYAGKVPLPPYLHREAELSDDSRYQTIYAKNEGSVAAPTAGLHFTDAVMNDLAAKKIDTAFVTLHVGAGTFKPVKSETMAGHEMHAEWIDVDRHCIEKLLAHLDKGIVAVGTTSMRTLESLYWIGAKLLSGIEIDFEGIAISQWDPYEMNINYSADECLNAIIRWMQENEKDRIMTRTQILIAPGYDTKIIKGLVTNFHQPQSTLLLLVSALIGDEWKRLYDYAMQHDFRFLSYGDGNLIWKNQK

SEQ ID NO: 72931 - protein, 349 aa, unidentified
  source 1..349: note = Taibaiella soli
  REGION 1..349: note = tr|A0A2W2B0J8|A0A2W2B0J8_9BACT S-adenosylmethionine:tRNA ribosyltransferase-isomerase; OS = Taibaiella soli OX=1649169 GN=queA PE=3 SV=1
MKLSQFKFDLPLNLIAQHPAKTREESRLMVVHRDTGKIEHKVFKDILTYFDDKDVMVVNNTKVFPARLYGRKEKTGAKIEVFLLRELNKPNRLWDVIVDPARKIRVGNKLYFGDNDELVAEVIDNTTSRGRTIRFLFDGDEAAFKAVLESLGETPLPKYIKRKPEEEDKERYQTVYAKYEGAVAAPTAGLHFSRELIKRLEIVGVKFAEVTLHTGLGTFRPIEVEDLSKHKMDAEYFHVDEYAAQIVNKAKKEQRKICSIGTTTMRALESSVTAQGLLKPEEGWTNLFIHPPYDFNIANSLVTNFHLPKTSLLIMVCAFAGYDLTMEAYQTAIKEKYRFFSYGDAMIVI

SEQ ID NO: 72932 - protein, 408 aa, unidentified
  source 1..408: note = Taibaiella sp.
  REGION 1..408: note = tr|A0A3N7A0K9|A0A3N7A0K9_9BACT S-adenosylmethionine:tRNA ribosyltransferase-isomerase; OS = Taibaiella sp. KBW10 OX=2153357 GN=DBR32_01380 PE=3 SV=1
MHPKALSIAAYRYNLPDARIAKYPLAQRDTSKLLIYKDHTITEDHFGRLAEHLPAQSMMVFNQTKVVHARLPFQKPTGGKIEVFCLEPDGRYADVQTAMTEKGEVYWTCFLGGAGKWKEGQILLLEVNETLTVHAALIHKNTGSYTLRIFWNMPELSFAEILHLAGKVPLPPYLNREAEQEDETSYQTIFAKEEGSVAAPTAALHFTEAILDQLAAKSIATGFVTLHVGAGTFKPVKSDTMEGHEMHAEWIDVSLAFIKGLILQIQTGKPLVAVGTTSCRTLESLYWIGVQLQEGRPVLGQDIAVSQWVPYETNTSLSATEALHILMQYLSDQGLDRLVTKTQIIIAPGYQFKLVDALVTNFHQPESTLLLLVSALIGGDWQKVYDHALDHDFRFLSYGDSSLLWKTS

SEQ ID NO: 72933 - protein, 349 aa, unidentified
  source 1..349: note = Taibaiella sp.
  REGION 1..349: note = tr|A0A3N7CTD1|A0A3N7CTD1_9BACT S-adenosylmethionine:tRNA ribosyltransferase-isomerase; OS = Taibaiella sp. KBW10 OX=2153357 GN=queA PE=3 SV=1
MKLSQFKFDMPIELIAQNPAKERDESRLMVIHRDTGKIEHKIFKDVLNYFEDKDVMVVNNTKVFPARLYGKKEKTGAKIEVFLLRELHKANRLWDVIVDPARKIRVGNKLYFGDNDELVAEVIDNTTSRGRTIRFLFDGDDAAFKQVLDSMGETPLPKLFKRKPEEEDKERYQTVYAKYEGAVAAPTAGLHFSRELIKRLEIEGVKFAEITLHTGLGTFRPIEVEDLSKHKMDAEYFRVDEYACGIVNKALEQKKRICAIGTTTMRALESSVTAQGLLKPEEGWTNLFIHPPHEFSIANSLITNFHLPKTSLLIMACAFGGYDLAMEAYNTAIKEKYNFFSYGDAMLIL

SEQ ID NO: 72934 - protein, 357 aa, unidentified
  source 1..357: note = Tamilnaduibacter salinus
  REGION 1..357: note = tr|A0A2U1CYW8|A0A2U1CYW8_9ALTE S-adenosylmethionine:tRNA ribosyltransferase-isomerase; OS = Tamilnaduibacter salinus OX=1484056 GN=queA PE=3 SV=1
MKISDFHFELPDELIARYPLAQRSASRLLSLDGPSGSVTHRHFVDLPELLAPGDLLVFNNTRVIPARLYGHKESGGRVEVLVERLLDDDELLAHVGASRPPKPDQTVVLEDGTALRMVDRNGPLFRFSRTTDEPLLSLLERVGHMPLPPYVDRPDEDTDRERYQTVYARESGAVAAPTAGLHFDDTIFQALHDKGVETAEVTLHVGAGTFQPVRVERVEDHEMHSEIAEVPEATADAVARTRQRGGRVVAVGTTSVRSLESATVDGELRPFRGETDIFIYPGYAFRCVDAMVTNFHLPESTLIMLVSAFAGREAVLGAYEEAVRERYRFFSYGDAMFVTGQVPSLGAGKQTEEGSAS

SEQ ID NO: 72935 - protein, 357 aa, unidentified
  source 1..357: note = Tamilnaduibacter salinus
  REGION 1..357: note = tr|A0A2A2I4M0|A0A2A2I4M0_9ALTE S-adenosylmethionine:tRNA ribosyltransferase-isomerase; OS = Tamilnaduibacter salinus OX=1484056 GN=queA PE=3 SV=1
MKISDFHFELPDELIARYPLAQRSASRLLSLDGPSGSVTHRHFVDLPELLAPGDLLVFNNTRVIPARLYGHKESGGRVEVLVERLLDDDELLAHVGASRPPKPDQMVVLEDGTALRMVDRDGPLFRFRRTTDEPLLSLLERVGHMPLPPYVDRPDEDTDRERYQTVYARESGAVAAPTAGLHFDDTIFQALRDKGVETAEVTLHVGAGTFQPVRVERVEDHEMHSEIAEVPEATVDAVARTRQRGGRVVAVGTTSVRSLESATVDGELRPFRGETDIFIYPGYAFRCVDAMVTNFHLPESTLIMLVSAFAGREAVLGAYEEAVRERYRFFSYGDAMFVTGQVPSLGAGKQTEEGSAS

SEQ ID NO: 72936 - protein, 349 aa, unidentified
  source 1..349: note = Tamlana nanhaiensis
  REGION 1..349: note = tr|A0A0D7W088|A0A0D7W088_9FLAO S-adenosylmethionine:tRNA ribosyltransferase-isomerase; OS = Tamlana nanhaiensis OX=1382798 GN=queA PE=3 SV=1
MKLSNFGFDLPNELLAEYPAENRDESRLMVLNRKEQTIEHKMFKDLIDYFNEDDVLILNNTKVFPARLYGNKEKTGARIEVFLLRELNEEQRLWDVLVDPARKIRIGNKLYFGDDDTLVAEVIDNTTSRGRTLRFLYDGSYREFRLKLNELGETPLPKYIKRDVEPDDEDRYQTIYAKKEGAVAAPTAGLHFSKHLLKRLEIKGVNFAEVTLHVGLGTFNPVEVEDLSKHKMDSEEISIDKAAVDVVNRGIAEKRRVCAVGTTVMRAVESSVSSSGMLNEMEGWTNKFIFPPYDFSIANCMVTNFHTPKSTLLMMVSAFAGHDFVKRAYEEAVKEKYKFYSYGDAMLIL

SEQ ID NO: 72937 - protein, 349 aa, unidentified
  source 1..349: note = Tamlana sedimentorum
  REGION 1..349: note = tr|A0A0D7W9S3|A0A0D7W9S3_9FLAO S-adenosylmethionine:tRNA ribosyltransferase-isomerase; OS = Tamlana sedimentorum OX=1435349 GN=queA PE=3 SV=1
MKLSNFGFDLPSELLAEYPAENRDESRLMVLNRKDQTIEHKMFKDLIDYFNEDDVLILNNTKVFPARLYGNKEKTGARIEVFLLRELNEEQRLWDVLVDPARKIRIGNKLYFGDDDTLVAEVIDNTTSRGRTLRFLYDGSYREFRLKLNELGETPLPKYIKRGVEPDDEDRYQTIYAKKEGAVAAPTAGLHFSKHLLKRLEIKGVNFAEVTLHVGLGTFNPVEVEDLSKHKMDSEEITIDSQAVNIVNKGINEKRRVCAVGTTVMRAVESSVSSSGMLNEMEGWTNKFIFPPYDFSIANCMVTNFHTPKSTLLMMVSAFAGHDFVKRAYEEAVKEKYKFYSYGDAMLIL

SEQ ID NO: 72938 - protein, 349 aa, Tamlana sp.
  REGION 1..349: note = tr|A0A5C4SQ85|A0A5C4SQ85_9FLAO S-adenosylmethionine:tRNA ribosyltransferase-isomerase; OS = Tamlana sp. CW2-9 OX=2583814 GN=queA PE=3 SV=1
MKLSNFGFNLPNELLAEYPAENRDESRLMVLNRKDQTIEHKMFKDLIDYFNEDDVLILNNTKVFPARLYGNKEKTGARIEVFLLRELNEEQRLWDVLVDPARKIRIGNKLYFGDDDTLVAEVIDNTTSRGRTLRFLYDGSYREFRLKLRELGETPLPKYIKRDVEPEDEDRYQTIFAKNEGAVAAPTAGLHFSKHLLKRLEIKGVNFAEVTLHVGLGTFNPVEVEDLSKHKMDSEEIKIDEKAVEIVNKGIQEKRRVCAVGTTAMRAIESSVSSSGLLNEMEGWTNKFIFPPYDFSIANCMITNFHTPKSTLLMMVSAFAGHDFIKRAYDEAVKEGYKFYSYGDAMLIL

SEQ ID NO: 72939 - protein, 349 aa, Tamlana sp.
  REGION 1..349: note = tr|A0A2I7SIM2|A0A2I7SIM2_9FLAO S-adenosylmethionine:tRNA ribosyltransferase-isomerase; OS = Tamlana sp. UJ94 OX=2069432 GN=queA PE=3 SV=1
MKLSNFGFNLPDELLAEFPAENRDESRLMVLNRKEQTIEHRMFKDLIDYFNEDDVLILNNTKVFPARLYGNKEKTGARIEVFLLRELNEEQRLWDVLVDPARKIRIGNKLYFGDDDTLVAEVIDNTTSRGRTLRFLYDGSYREFRLKLNELGETPLPKYIKREVQPEDEERYQTIFAKNEGAVAAPTAGLHFSKHLLKRLEIKGVNFAEVTLHVGLGTFNPVEVEDLSKHKMDSEELKIDEKAVSIVNKGIDEKRRVCAVGTTAMRAIESAVSSNGRLNEIEGWTNKFIFPPYDFSIANSMITNFHTPKSTLLMMVSAFAGHDFMKRAYDEAVKEGYKFYSYGDAMLII

SEQ ID NO: 72940 - protein, 403 aa, unidentified
  source 1..403: note = Tangfeifania diversioriginum
  REGION 1..403: note = tr|A0A1M6I4U9|A0A1M6I4U9_9BACT S-adenosylmethionine:tRNA ribosyltransferase-isomerase; OS = Tangfeifania diversioriginum OX=1168035 GN=queA PE=3; SV = 1
MHKFQKIKISDFTYQLPEERIAKYPLKERDNSKLLFWQNGKTEQTVFRNITSYLPENSLLVFNNTRVIHARLFFRKATGAKIEIFCLEPVSPSDYQIAFQEKEKVTWKCMVGNSKKWKSEELQREFEINGKPVHLKARKKGQQGNSFLIEFSWEGEFTFAEIIEHAGVLPIPPYLNRETEPEDELTYQTVYAKNDGSVAAPTAGLHFTKNVLKNLAEKNIETAEITLHVGAGTFQPVKSETIDGHTMHHEQVLISKSFIEKLLSHAGKIIAVGTTSVRSLESLYWLGLKLEKAHHPGDIPEVLQWEPYENEATIGVEKALQNILDFLEKTQQKTVRFSTQIIIVPGYEFKIIEGMITNFHQPQSTLLLLISAFLGDDWKKVYDYALKNDFRFLSYGDSNLYLR

SEQ ID NO: 72941 - protein, 349 aa, unidentified
  source 1..349: note = Tangfeifania diversioriginum
  REGION 1..349: note = tr|A0A1M6A6X6|A0A1M6A6X6_9BACT S-adenosylmethionine:tRNA ribosyltransferase-isomerase; OS = Tangfeifania diversioriginum OX=1168035 GN=queA PE=3; SV = 1
MKLSKFKYNLDEKKIALHPAYNRDESRLMVLNRAKRTIEHKSFKDILDYFDDKDVFVFNDTKVFPARLYGNKEKTGAEIEVFLLRELNREMRLWDVLVDPARKIRIGNKLYFGENDALVAEVIDNTTSRGRTLRFLFDGPYDEFKQTLYSLGETPLPKFINRPVVPEDKERYQTIFAKHEGAVAAPTAGLHFSRELLKRLEIKGAEFAFVTLHVGLGNFRSVDVEDLTKHKMDSEQIWIKEEACETVNHAKENRKNVCAVGTTVMRTLESSVSTQGFLKPFEGWTNKFIFPPYEFSVANSMITNFHLPYSTLLMMVAAFGGYDFVMEAYDVAMKENYRFGTYGDAMLII

SEQ ID NO: 72942 - protein, 422 aa, Tannerella forsythia
  REGION 1..422: note = tr|A0A0E4BH23|A0A0E4BH23_TANFO S-adenosylmethionine:tRNA ribosyltransferase-isomerase; OS = Tannerella forsythia KS16 OX=1307833 GN=TFKS16_0935; PE = 3 SV=1
MSFLSFAMNFVLLPPEMMAPQHIHIDDYAYPLPDDRIARYPLPQRDRSKLLVYRGGQIGETVFNRLPDELPSDALLVFNNTRVIRARLLFHKTTGAQIELFCLEPAEPADYAQIFQQTEQCSWHCLIGNLKKWKDGTLTRTVYLGEESVRLTAEREETHGTSHLVTFRWDDSRYTFAEVLEAAGILPIPPYLRRETEPTDLQTYQTVYSRIKGSVAAPTAGLHFTPEVLAELDARGIGREEVTLHVGAGTFKPVKSPTIGSHEMHTEHFAVSRRTIERLITASGPVIAVGTTSVRTLESLYYLGARLSMTRLTDHADLPTVEQWTPYTDEVPCISAREALQHLLDHLDHQGVDRLVAATRIILAPGYEFKIVRGMITNFHQPQSTLLLLVSAFVKGDWKAIYDYALDHDFRFLSYGDSSLLL

SEQ ID NO: 72943 - protein, 349 aa, Tannerella forsythia
  REGION 1..349: note = tr|A0A3P1Z344|A0A3P1Z344_TANFO S-adenosylmethionine:tRNA ribosyltransferase-isomerase; OS = Tannerella forsythia OX=28112 GN=queA PE=3 SV=1
MKLSNFKFNLPTELIAAYPAPHRDESRLMVLHRDTGKIEHKVFKDLIKYFGAGDVFVMNNTRVFPARLYGNKEKTGAKIEVFLLRELNESMRLWDVLVDPARKIRIGNKLYFGKNDSMVAEVIDNTTSRGRTLRFLYDGTHEEFIKALFALGETPLPKYMNRPAEPDDVERYQTIYATEEGAVVAPAAGLHFSRELMKRLEIKDCSFVYLTVHSGLGTYRDIDVEDLSKHKVDSEQMIINSEVVQAVNKAKGDGRKVCAVGTSVMRAIETAVGTDRNLKEYDGWTNKFIFLPYEFSIANAMITNFHMPLSTLLMMTASFGGYDLTMEAYQTAIKEKYRFCAYGDAMLIL

SEQ ID NO: 72944 - protein, 407 aa, Tannerella sp.
  REGION 1..407: note = tr|R7DGR0|R7DGR0_9BACT S-adenosylmethionine:tRNA ribosyltransferase-isomerase OS=Tannerella sp. CAG:51; OX = 1262979 GN=queA PE=3 SV=1
MQKTRDIRIEEFNYPLPDERIAKFPLSQRDRSKLLLYRSGSVSESEFFHLPDLLPENSLLVFNNTKVIQARLHFRKETGALIEIFCLEPLSPNDYLLSFQSNRECVWTCMVGNLKKWKSGTLSRTVIIEGKSVTLNADRLNAYGNSFEIRFSWDNPQISFAALLDAVGELPIPPYLNRETEESDKETYQTVYSKVEGSVAAPTAGLHFTEDVLAALKEKCIPCLELTLHVGAGTFKPVKSETIEGHEMHTEFISVERSLIVSLAETDRRIIAVGTTSVRTLESLYYIGRTLEYNPDAVPEELKVGQWQPYDDTVAEIDYRKALRNIVDYLDRKGLSRLVTATQIIIAPGYTFKIVRGMITNFHQPQSTLLLLVSAFVDGRWREIYDYALSHDFRFLSYGDSSLLLPD

SEQ ID NO: 72945 - protein, 352 aa, Tannerella sp.
  REGION 1..352: note = tr|A0A2N8NFV7|A0A2N8NFV7_9BACT S-adenosylmethionine:tRNA ribosyltransferase-isomerase; OS = Tannerella sp. oral taxon 808 OX=712711 GN=queA PE=3; SV = 1
MKLSRYKFTLPPELIATHPITYRDEARMMVVHRDTGKIEHRVFKDLTKYFGEGDVFVMNNTRVFPARLYGQKEKTGARIEVFLLRELNESLRLWDVLVDPARKIRIGNKLFFGKEANPEELVAEVIDNTTSRGRTLRFLCEGDHDVFKKKLYELGNTPLPRYMNREAEPEDRERYQTIYATEEGAVVAPAAGLHFSRELMRRLEIKDCRFVYLTVHSGLGIYRDIDVEDLSKHKIDSEQMIIGREVIDAVNTAIDTEHRVCAVGTSVMRAIETAVGTDGHLKEFDGWTNKFIFIPYEFTIANSMITNFHLPFSTLLLMTAAFAGYDLTMEAYNVAVKEKYRFCAYGDAMLIL

SEQ ID NO: 72946 - protein, 347 aa, Tanticharoenia sakaeratensis
  REGION 1..347: note = tr|A0A0D6MPG1|A0A0D6MPG1_9PROT S-adenosylmethionine:tRNA ribosyltransferase-isomerase; OS = Tanticharoenia sakaeratensis NBRC 103193 OX=1231623; GN = queA PE=3 SV=1
MTDPIADFDFDLPKDRIATEPARPRDSARLLHVRPGVPPALHIVRDLPTLLRPGDLLVTNDTEVIPAQLTGKRGEAAIGITLDRILPDGSWHALARNARKLKPGDIVTFPRSDVTAEIVVNEGDGAVALRFSVAGDAFDAFLKDVGALALPPYIARPEGPTPQDALDYRTIFSAHPGAVAAPTAGLHFTPELLAALEQAGIGRCALTLHVGAGTFLPVRTDIAHHKMHAESGIVTAETADRINETRARGGRIVAVGTTSLRLLESAAGEDGIVRPWSGETSIFITPGYRFRAVDLLMTNFHLPRSTLFMLVAAFAGTQTMRDAYAFAIAERLRFYSYGDACLLERAA

SEQ ID NO: 72947 - protein, 360 aa, unidentified
  source 1..360: note = Tardiphaga robiniae
  REGION 1..360: note = tr|A0A161R5I8|A0A161R5I8_9BRAD S-adenosylmethionine:tRNA ribosyltransferase-isomerase; OS = Tardiphaga robiniae OX=943830 GN=queA PE=3 SV=1
MRTDIFDFELPVENIALRPASPRDAARLLVVQPGIGVQDHVVSDLPAWLKPGDQLVVNDTRVISAQLSGRRIGRDTEPKIDATLIKRLDGSRWQALVRPARKLVEGDTVRFGNEGRVCLLGHLDAQVEHKGDAGEIIFSFSFHGPALDQAIAELGAPPLPPYIAGKRAPDERDAADYQTMFAANDGAVAAPTAGLHFTPALEAALKARGVGLHRITLHVGAGTFLPVKVDDTAEHKMHSEWGMISRETADALNAAHAAGGRVVAVGTTSMRLLESATSEDGVTHPFADETAIFITPGYRFRAVDIMLTNFHLPRSTLFMLVSAFAGMETMKQAYAHAIATGYRFYSYGDASLLFRDTSNQ

SEQ ID NO: 72948 - protein, 360 aa, unidentified
  source 1..360: note = Tardiphaga sp.
  REGION 1..360: note = tr|A0A420APG7|A0A420APG7_9BRAD S-adenosylmethionine:tRNA ribosyltransferase-isomerase; OS = Tardiphaga sp. YR296 OX=2135488 GN=queA PE=3 SV=1
MRTDIFDFELPAENIALRPASPRDAARLLVVQPGIGVQDHVVSDLPTWLKPGDQLVVNDTRVISAQLSGRRIGRDTEPKIDATLIKRLDGSRWQALVRPAKKLTEGDTVRFGNEGRVCLLGHLDAQVEHKGDAGEIIFSFSFHGPALDQAIAELGAPPLPPYIAGKRAPDERDTADYQTMFAANDGAVAAPTAGLHFTPALEAALKARGVGLHRITLHVGAGTFLPVKVDDTAEHKMHAEWGTISRATADALNAAHAAGGRVVAVGTTSMRLLESATSEDGVIHPFADETAIFITPGYRFRAVDIMLTNFHLPRSTLFMLVSAFAGMDTMKQAYAHAIATGYRFYSYGDASLLFRDTRNQ

SEQ ID NO: 72949 - protein, 360 aa, unidentified
  source 1..360: note = Tardiphaga sp.
  REGION 1..360: note = tr|A0A5A7VVB3|A0A5A7VVB3_9BRAD S-adenosylmethionine:tRNA ribosyltransferase-isomerase; OS = Tardiphaga sp. P9-11 OX=2024614 GN=queA PE=3 SV=1
MRTDIFDFELPAENIALRPASPRDAARLLVVQPGIGVQDHVVSDLPTWLKPGDQLVVNDTRVISAQLSGRRIGRETEPKIDATLIKRLDGSRWQALVRPAKKLAEGDTVRFGNEGRVCLLGHLDAQVEHKGDAGEIIFSFSLHGPALDQAIAELGAPPLPPYIAGKRAPDERDTADYQTMFAANDGAVAAPTAGLHFTPALEAALKARGVGLHRITLHVGAGTFLPVKVDDTAEHKMHSEWGTISRATADELNAAHAAGGRVVAVGTTSMRLLESATSEDGVIHPFADETAIFITPGYRFRAVDIMLTNFHLPRSTLFMLVSAFAGMDTMKQAYAHAIATGYRFYSYGDASLLFRDTSNS

SEQ ID NO: 72950 - protein, 350 aa, Tateyamaria omphalii
  REGION 1..350: note = tr|A0A1P8MT13|A0A1P8MT13_9RHOB S-adenosylmethionine:tRNA ribosyltransferase-isomerase; OS = Tateyamaria omphalii OX=299262 GN=queA PE=3 SV=1
MKLDDFDFDLPEGLIATRPAAPRSSARLLVADGDAIHDQHVTDLVSWLRPGDLLVLNDTRVIPARLFGTRARESAQGLTEARIEVTLLEPRADGNWAALVKPLKKVKPGEVVRFSNDLSATLTGSADGQGHLQFNLTGDDFDAALAEAGAMPLPPYIAAKRPADDKDKTDYQTIWAKKSGAVAAPTASLHFDDALMAALAARGVETTYVTLHVGAGTFLPVKVDDVTQHKMHAEWGQVSERAAGDIAAAKARGNRVIPVGTTALRLIETMARDGGIAPWEGDTDIFIYPGFTFGVADGLMTNFHLPKSTLMMLVSALMGQERIAAIYDHAVRSEYRFFSYGDASLLLPQT

SEQ ID NO: 72951 - protein, 350 aa, Tateyamaria sp.
  REGION 1..350: note = tr|A0A0B4BJZ6|A0A0B4BJZ6_9RHOB S-adenosylmethionine:tRNA ribosyltransferase-isomerase; OS = Tateyamaria sp. ANG-S1 OX=1577905 GN=queA PE=3 SV=1
MKLDDFDFDLPEALIATRPASPRSSARLLVADGDAIHDQRVTDLVTWLRPGDLLVLNDTRVIPARLFGTRARESAQGLTEARIEVTLLEPRADGAWSALVKPLKKVKPGEVVRFSDDLSATLEGSADGQGHLRFNLTGDDFDAALAEAGAMPLPPYIAAKRAADDKDKTDYQTIWARNSGAVAAPTASLHFDEALMAALAERGVQTTYVTLHVGAGTFLPVKVDDVTQHKMHAEWGQVSEQAATHIAEAKARGNRVIPVGTTALRLIETMARDGGIAPWEGETDIFIYPGFTFRVADGLMTNFHLPKSTLMMLVSALMGQDRIKAIYDHAVRSQYRFFSYGDASLLLPQT

SEQ ID NO: 72952 - protein, 337 aa, Tatlockia micdadei
  REGION 1..337: note = tr|A0A098GGI3|A0A098GGI3_TATMI S-adenosylmethionine:tRNA ribosyltransferase-isomerase; OS = Tatlockia micdadei OX=451 GN=queA PE=3 SV=1
MNKQDFYFDLPEELIAQYPLPNRTDSRLLAFDRETGQCTHRQFKDIGEFLQPGDLLVMNNSKVIPARLYGHKASGGKVELLVERLLSEDAFLAHIKASKAPKAGTPIHLDNNWQLKVISKLDDLYHCKVLGNVEIMLEEIGHIPLPLYITRPDESADAERYQTVYARHKGSVAAPTAGLHFDAELIQSLSSRGVNIAYSTLHVGAGTFRPVRCDAIKDHKMHSEYFTVSEELCQTVNETRARGKRVIAVGTTSMRSLESAAENGILKPCSRDTDIFIYPGYQFQICDGLITNFHLPESTLLMLVAAFIGHAQTMMLYKEAIAQGYRFFSYGDASLLL

SEQ ID NO: 72953 - protein, 356 aa, Tatumella citrea
  REGION 1..356: note = tr|A0A1Y0LGN9|A0A1Y0LGN9_TATCI S-adenosylmethionine:tRNA ribosyltransferase-isomerase; OS = Tatumella citrea OX=53336 GN=queA PE=3 SV=1
MRVADFNFDLPESLIAHYPQPDRSGCRLLSLDGPTGEISHGIFTEVLDKLNAGDLLVFNNTRVIPARVFGRKASGGKIEVLVERMLDEHRVLAHVRASKSPKPGSELLLGDDESVKATMVARHDTLFEIEFADERAVLDILNQVGHMPLPPYIDRPDEESDRELYQTVYSARPGAVAAPTAGLHFDEPLLQALRDKGVEMAFVTLHVGAGTFQPVRVDSIEDHKMHSEYAEVPQEVVDAVLACKARGNKVVAVGTTSVRSLESAAQAAKEQLIAPFFDDTQIFIYPGYQYQVIDALITNFHLPESTLIMLVSAFAGYRQTMEAYRQAVNEQYRFFSYGDAMFIHKNPAAAEQTIGE

SEQ ID NO: 72954 - protein, 356 aa, Tatumella morbirosei
  REGION 1..356: note = tr|A0A095TE30|A0A095TE30_9GAMM S-adenosylmethionine:tRNA ribosyltransferase-isomerase; OS = Tatumella morbirosei OX=642227 GN=queA PE=3 SV=1
MRVADFNFDLPESLIAHYPQPDRSSCRLLSLDGPTGEISHGVFTDVLDKLNPGDLLVFNNTRVIPARVFGRKASGGKIEVLVERMLDEHRVLAHVRASKSPKPGSELLLGDDESVKATMVARHDTLFEIEFADQRAVLDILNQVGHMPLPPYIDRPDEESDRELYQTVYSARPGAVAAPTAGLHFDEPLLQALRDKGVEMAFVTLHVGAGTFQPVRVDSIEDHKMHSEYAEVPQDVVDAVLACKARGNRVVAVGTTSVRSLESAAQAAKEHLIAPFFDDTQIFIYPGYQYQVIDALITNFHLPESTLIMLVSAFAGYRQTMEAYRQAVKEQYRFFSYGDAMFIRKNPAAAEQTIRE

SEQ ID NO: 72955 - protein, 356 aa, Tatumella ptyseos
  REGION 1..356: note = tr|A0A2X5NHM6|A0A2X5NHM6_9GAMM S-adenosylmethionine:tRNA ribosyltransferase-isomerase; OS = Tatumella ptyseos OX=82987 GN=queA PE=3 SV=1
MRVADFNFELPESLIAHYPRAERSSCRLLSLDGPTGELTHGVFTDVLEKLHAGDLLVFNNTRVIPARVFGRKASGGKIEMLVERVLDEHRVLAHVRASKAPKPGSDLLLGDDESVKATMVARHDTLFEIAFDDERTVLEILNQVGHMPLPPYIDRPDEESDRELYQTVYSARPGAVAAPTAGLHFDGGLLEALRAKGVEMAFVTLHVGAGTFQPVRVDSIEDHIMHSEYAEVPQDVVDAVLACKARGNKVVAVGTTSVRSLESAAQAAGESLIAPFFDDTQIFIYPGYQYQVIDALITNFHLPESTLIMLVSAFAGYRNTMQAYQQAVAEQYRFFSYGDAMFITKNPQAAEQQVGE

SEQ ID NO: 72956 - protein, 356 aa, Tatumella ptyseos; identical to SEQ ID NO: 72955
  REGION 1..356: note = tr|A0A085JAV4|A0A085JAV4_9GAMM S-adenosylmethionine:tRNA ribosyltransferase-isomerase; OS = Tatumella ptyseos ATCC 33301 OX=1005995 GN=queA PE=3; SV = 1

SEQ ID NO: 72957 - protein, 356 aa, Tatumella sp.
  REGION 1..356: note = tr|A0A2G8C0P4|A0A2G8C0P4_9GAMM S-adenosylmethionine:tRNA ribosyltransferase-isomerase; OS = Tatumella sp. OPLPL6 OX=1928657 GN=queA PE=3 SV=1
MRVADFNFALPESLIAHYPQPERSACRLLSLDGPSGELQHGVFTDVLDKLQPGDLLVFNNTRVIPARVYGQKASGGKLEMLVERMLDDKRVLAHVRASKAPKPGAELLLGDALDVRATMVARHDTLFEIEFHDSREVLDILNHIGHMPLPPYIDRPDEEADRELYQTVYSAKPGAVAAPTAGLHFDQPLLDALRQKGIETAFVTLHVGAGTFQPVRVESIEDHIMHAEYAEVPQEVVDAVLACKARGNKVVAVGTTSVRSLESAAKAAENALIAPFFDDTQIFIYPGYQYQVIDALITNFHLPESTLIMLVSAFAGYKNTMNAYQQAVEQQYRFFSYGDAMFITQNPQAVNEVMSA

SEQ ID NO: 72958 - protein, 350 aa, Taylorella asinigenitalis
  REGION 1..350: note = tr|G4QCB1|G4QCB1_TAYAM S-adenosylmethionine:tRNA ribosyltransferase-isomerase OS=Taylorella asinigenitalis (strain MCE3) OX=1008459 GN=queA PE=3 SV=1
MYKNVYKKEDFFYELPPERIAQRPTKHRTESRLLHVKPDGTWADLAFPQIKSLLRINDLLIFNNTRVIKARLFGQKSTGGKIECLIERVVSPNRAVVHLRFSKRPQNGSNLLFGEGVQALVVEQDSDEFTLEFSEPVMEVLERIGQLPLPPYIKHNPDEFDYERYQTVYASREGAIAAPTAGLHFDDKLLEEIKSLGVQETMVTLHVGSGTFKPVITSDLNDHVMHSEWFEVTSETCDAIAECRKSGGRVIAVGTTSVRAIESAAALAGMTEEGAPKPFTGDTKLFITPGYEPLVIDGMITNFHLPESTLLMLVASWMGFETMHKVYKHAVEAEYRFFSYGDAMYIEPNF

SEQ ID NO: 72959 - protein, 350 aa, Taylorella asinigenitalis
  REGION 1..350: note = tr|I7IC29|I7IC29_9BURK S-adenosylmethionine:tRNA ribosyltransferase-isomerase OS=Taylorella asinigenitalis 14/45 OX=1091495 GN=queA PE=3 SV=1
MYKNVYKKEDFFYELPPERIAQRPTKHRTESRLLHVKPDGTWADLAFPQIKSLLRINDLLIFNNTRVIKARLFGQKSTGGKIECLIERVVSPNRAVVHLRFSKRPQNGSNLLFGEGVQALVVEQDSDEFTLEFSEPVMEVLERIGQLPLPPYIKHNPDEFDYQRYQTVYASREGAIAAPTAGLHFDDKILEEIKSLGVQETMVTLHVGSGTFKPVITSDLKDHVMHSEWFEVTSETCDAIAECRKSGGRVIAVGTTSVRAIESAAALAGMTEEGAPKPFTGDTKLFITPGYEPLVIDGMITNFHLPESTLLMLVASWMGFETMHKVYKHAVEAEYRFFSYGDAMYIEPNF

SEQ ID NO: 72960 - protein, 350 aa, Taylorella equigenitalis
  REGION 1..350: note = tr|I7JNM8|I7JNM8_9BURK S-adenosylmethionine:tRNA ribosyltransferase-isomerase OS=Taylorella equigenitalis 14/56 OX=1091497 GN=queA PE=3 SV=1
MTTKELTKEDFFYELPADRIAQRPTEKRTESKLLHVGADGSWDDLTFPQIKNLLKKDDLLIFNDTRVIKARLFGQKSTGGKIECLIERVIAPKCAIVHLRFSKRPQSGSQLFFNEGITATVIDQSVDEFTLEFSEPVMDVLDHIGQLPLPPYIKHNPDDFDYERYQTVYAKSEGAIAAPTAGLHFDNNLINELTDMGIQKSMVTLHVGSGTFKPVVTSNLKDHIMHSEWFEVTEETCESISRCRRNGGRVIAVGTTSVRAIESAATLAGLSEKGVPLPYTGDTKLFITPGYKPLVIDGMITNFHLPESTLLMLVASWMGFETMHKIYKHAVEANYRFFSYGDAMYIEPKS

SEQ ID NO: 72961 - protein, 347 aa, Telmatospirillum siberiense
  REGION 1..347: note = tr|A0A2N3PPD5|A0A2N3PPD5_9PROT S-adenosylmethionine:tRNA ribosyltransferase-isomerase; OS = Telmatospirillum siberiense OX=382514 GN=queA PE=3 SV=1
MKVDDFDFELPREAIADRPARPRDAARLLRVEPDRLADLIVRDLPTLLEPGDLMVFNDTKVIPARLKGRRGTAGISVTLHQPVEGDSWLAFARPAKKLAAGDRLRFAEDFSAEVAEKGEAGEVLLRFDRGGADLMTALALHGEMPLPPYIKRPNGADDRDRDDYQTVYAREPGAVAAPTAGLHFTPDLLAALDRRGIGRETLTLHVGAGTFLPVKVDDTRDHKMHSERGHISAEAAERINRVRQAGGRVVAVGTTALRLLESASSEEGRLSPFDGSTDIFITPGYRFRMVDLLMTNFHLPRSTLFMLVSAFAGLDRMRSAYAHAIQTGYRFYSYGDTSLLTRQETRR

SEQ ID NO: 72962 - protein, 349 aa, unidentified
  source 1..349: note = Tenacibaculum caenipelagi
  REGION 1..349: note = tr|A0A4R6TMF9|A0A4R6TMF9_9FLAO S-adenosylmethionine:tRNA ribosyltransferase-isomerase; OS = Tenacibaculum caenipelagi OX=1325435 GN=queA PE=3 SV=1
MKLSNFDFELPKELLAEYPSEHRDEARLMVLHRDTQKIEHKLFKDLIDYFDEGDVMMLNNTKVFPARMYGNKEKTGARIEVFLLRELNAENRLWDVLVDPARKIRIGNKLFFGDDDSLVAEVIDNTTSRGRTLRFLFDGSYEEFRKKLIELGETPLPKYIKREVEPEDEERYQTIFAKNEGAVAAPTAGLHFSKHLMKRLEIKGVDFAETTLHVGLGTFNPVEVEDLSKHKMDSEQIVIPQVSADIVNNAIEKRKRVCAVGTTVMRTVESSVSSSKQLNAYEGWTNKFIFPPYDFSIANCMVTNFHTPKSTLLMMVSAFAGHDFMMEAYHEAIKEKYKFYSYGDAMLIL

SEQ ID NO: 72963 - protein, 349 aa, Tenacibaculum dicentrarchi
  REGION 1..349: note = tr|A0A0U3K0E7|A0A0U3K0E7_9FLAO S-adenosylmethionine:tRNA ribosyltransferase-isomerase; OS = Tenacibaculum dicentrarchi OX=669041 GN=queA PE=3 SV=1
MKLSNFSFELPEELLAEYPSEHRDEARLMVLHRDTQKIEHKLFKDLINYFDEGDVLMLNNTKVFPARMYGNKEKTGARIEVFLLRELNAENRLWDVLVDPARKIRIGNKLFFGEDESLVAEVIDNTTSRGRTLRFLYDGPYQEFREKLVKLGETPLPKYIKRDVESSDEDRYQTIYAKHEGAVAAPAAGLHFSKHLMKRLEIKGVDFAETTLHVGLGTFNPVEVEDLSKHKMDSEKIKVTKETAEMVNNAIAKKKRVCAVGTTVMRTVESAITSKRKLKEFDGWTNKFIFPPFDFSVANCMVTNFHSPKSTLMMTVSAFAGHDFMMEAYEEAIKEKYKFHSYGDAMLIL

SEQ ID NO: 72964 - protein, 349 aa, Tenacibaculum dicentrarchi
  REGION 1..349: note = tr|A0A2H1XNR8|A0A2H1XNR8_9FLAO S-adenosylmethionine:tRNA ribosyltransferase-isomerase; OS = Tenacibaculum dicentrarchi OX=669041 GN=queA PE=3 SV=1
MKLSNFSFELPEELLAEYPSEHRDEARLMVLHRDTQKIEHKLFKDLINYFDEGDVLMLNNTKVFPARMYGNKEKTGARIEVFLLRELNAENRLWDVLVDPARKIRIGNKLFFGEDESLVAEVIDNTTSRGRTLRFLYDGPYEEFREKLVKLGETPLPKYIKRDVEISDEDRYQTIYAKHEGAVAAPAAGLHFSKHLMKRLEIKGVDFAETTLHVGLGTFNPVEVEDLSKHKMDSEKIKVTKETAEMVNNAIANKKRVCAVGTTVMRTVESAITSKQKLKEFDGWTNKFIFPPFDFSVANCMVTNFHSPKSTLMMTVSAFAGHDFMMEAYEEAIKEKYKFHSYGDAMLIL

SEQ ID NO: 72965 - protein, 349 aa, Tenacibaculum discolor
  REGION 1..349: note = tr|A0A497ZED5|A0A497ZED5_9FLAO S-adenosylmethionine:tRNA ribosyltransferase-isomerase; OS = Tenacibaculum discolor OX=361581 GN=queA PE=3 SV=1
MKLSNFNFELPKELLAEYPSEHRDEARLMVLHRDTQKIEHKLFKDLIDYFDEGDVMMLNNTKVFPARMYGNKEKTGARIEVFLLRELNAENRLWDVLVDPARKIRIGNKLFFGEDESLVAEVIDNTTSRGRTLRFLFDGPYEEFRKKLIELGETPLPKYIKREVEPEDEDRYQTIFAKHEGAVAAPTAGLHFSKHLMKRLEIKGVDFAETTLHVGLGTFNPVEVEDLSKHKMDSEQIVIPQASADMVNNAIANKKRVCAVGTTVMRTIESSVSSSNQLNAFEGWTNKFIFPPYDFSIANCMVTNFHTPKSTLLMMVSAFAGHDFVMEAYQEAIKEKYKFYSYGDAMLIL

SEQ ID NO: 72966 - protein, 349 aa, unidentified; identical to SEQ ID NO: 72963
  source 1..349: note = Tenacibaculum finnmarkense
  REGION 1..349: note = tr|A0A2I2M8G2|A0A2I2M8G2_9FLAO S-adenosylmethionine:tRNA ribosyltransferase-isomerase; OS = Tenacibaculum finnmarkense OX=1680763 GN=queA PE=3 SV=1

SEQ ID NO: 72967 - protein, 349 aa, unidentified
  source 1..349: note = Tenacibaculum finnmarkense
  REGION 1..349: note = tr|A0A2H1XX31|A0A2H1XX31_9FLAO S-adenosylmethionine:tRNA ribosyltransferase-isomerase; OS = Tenacibaculum finnmarkense OX=1680763 GN=queA PE=3 SV=1
MKLSNFSFELPEELLAEYPSEHRDEARLMVLHRDTQKIEHKLFKDLINYFDEGDVLMLNNTKVFPARMYGNKEKTGARIEVFLLRELNAENRLWDVLVDPARKIRIGNKLFFGEDESLVAEVIDNTTSRGRTLRFLYDGPYEEFREKLVKLGETPLPKYIKRDVESSDEDRYQTIYAKHEGAVAAPAAGLHFSKHLMKRLEIKGVDFAETTLHVGLGTFNPVEVEDLSKHKMDSEKIKVTQETADMVNNAIAKKKRVCAVGTTVMRTVESAITSKRKLKEFEGWTNKFIFPPFDFSVANCMVTNFHSPKSTLMMTVSAFAGHDFMMEAYEEAIKEKYKFHSYGDAMLIL

SEQ ID NO: 72968 - protein, 349 aa, Tenacibaculum gallaicum
  REGION 1..349: note = tr|A0A3E0I6Z8|A0A3E0I6Z8_9FLAO S-adenosylmethionine:tRNA ribosyltransferase-isomerase; OS = Tenacibaculum gallaicum OX=561505 GN=queA PE=3 SV=1
MKLSNFSFELPPELLAEYPSEHRDEARLMVLHRDTQKIEHKLFKDLINYFDEGDVMMLNNTKVFPARMFGNKEKTGARIEVFLLRELNAENRLWDVLVDPARKIRIGNKLFFGEDESLVAEVIDNTTSRGRTLRFLFDGPYEEFRKKLIELGETPLPKYIKREVEPEDEDRYQTIFAKHEGAVAAPTAGLHFSKHLMKRLEIKGVDFAETTLHVGLGTFNPVEVEDLSKHKMDSEQIVIPQVSADMVNNAITKKKRVCAVGTTVMRTIESSVSSSNELNAYEGWTNKFIFPPYDFSIANCMVTNFHTPKSTLLMMVSAFAGHDFMMEAYQEAIKEKYKFYSYGDAMLIL

SEQ ID NO: 72969 - protein, 349 aa, unidentified
  source 1..349: note = Tenacibaculum holothuriorum
  REGION 1..349: note = tr|A0A1Y2PCE8|A0A1Y2PCE8_9FLAO S-adenosylmethionine:tRNA ribosyltransferase-isomerase; OS = Tenacibaculum holothuriorum OX=1635173 GN=queA PE=3 SV=1
MKLSNFNFDLPQELLAEYPSEHRDEARLMVLHRDTQKIEHKLFKDLINYFDEGDVMMLNNTKVFPARMFGNKEKTGARIEVFLLRELNAENRLWDVLVDPARKIRIGNKLFFGEDESLVAEVIDNTTSRGRTLRFLFDGPYEEFRRKLIELGETPLPKYIKRDVEPSDEERYQTIFAKNEGAVAAPTAGLHFSKHLMKRLEIKGIDFAEMTLHVGLGTFNPVEVEDLSKHKMDSEQIIIPQNSCDIVNNAIETKRKICAVGTTVMRTVESSVSASKRLNAYNGWTNKFIFPPYDFSIANCMVTNFHTPKSTLLMMVSAFAGHDFMMEAYEEAVKEKYKFYSYGDAMLIL

SEQ ID NO: 72970 - protein, 349 aa, Tenacibaculum jejuense
  REGION 1..349: note = tr|A0A238UFT0|A0A238UFT0_9FLAO S-adenosylmethionine:tRNA ribosyltransferase-isomerase; OS = Tenacibaculum jejuense OX=584609 GN=queA PE=3 SV=1
MKLSQFNFDLPSELLAEYPSEHRDEARLMVLNRKEQTIEHKLFKDLINYFDEGDVMMLNNTKVFPARMFGNKEKTGARIEVFLLRELNAEHRLWDVLVDPARKIRIGNKLFFGDDESLVAEVIDNTTSRGRTLRFLFDGSYDEFRRKLIELGQTPLPKYIKRDVEPEDEERYQTIFAKHEGAVAAPTAGLHFSKHLMKRLEIKGVDFAEMTLHVGLGTFNPVEVEDLSKHKMDSEKIIIPQEACDVVNNAIEKKRRVCAVGTTVMRTVESSVSASQRLNAYEGWTNKFIFPPYDFSIANCMVTNFHTPKSTLLMMISAFAGHDFVMEAYQEAIKEKYKFYSYGDAMLII

SEQ ID NO: 72971 - protein, 349 aa, Tenacibaculum litoreum
  REGION 1..349: note = tr|A0A427SJB0|A0A427SJB0_9FLAO S-adenosylmethionine:tRNA ribosyltransferase-isomerase; OS = Tenacibaculum litoreum OX=321269 GN=queA PE=3 SV=1
MKLSNFNFELPKELLAEYPSEHRDEARLMVLHRDTQKIEHKLFKDLIDYFDEGDVMMLNNTKVFPARMYGNKEKTGARIEVFLLRELNAENRLWDVLVDPARKIRIGNKLFFGDDESLVAEVIDNTTSRGRTLRFLFDGPYDEFRKKLIELGETPLPKYIKREVEPEDEDRYQTIFAKHEGAVAAPTAGLHFSKHLMKRLEIKGVDFAETTLHVGLGTFNPVEVEDLSKHKMDSEQIIIPQVSADMVNNAIANKKKVCAVGTTVMRTIESSVSSSKQLNAYEGWTNKFIFPPYDFSIANCMVTNFHTPKSTLLMMVSAFAGHDFMMEAYQEAIKEKYKFYSYGDAMLIL

SEQ ID NO: 72972 - protein, 349 aa, Tenacibaculum lutimaris
  REGION 1..349: note = tr|A0A420E2W3|A0A420E2W3_9FLAO S-adenosylmethionine:tRNA ribosyltransferase-isomerase; OS = Tenacibaculum lutimaris OX=285258 GN=queA PE=3 SV=1
MKLSNFDFDLPKELLAEYPSEHRDEARLMVLHRDTQKIEHKLFRDLIDYFDEGDVMMLNNTKVFPARMYGNKEKTGARIEVFLLRELNAENRLWDVLVDPARKIRIGNKLFFGDDDSLVAEVIDNTTSRGRTLRFLFDGSYEEFRQKLIDLGETPLPKYIKREVEPEDEERYQTIFAKNEGAVAAPTAGLHFSKHLMKRLEIKGVDFAETTLHVGLGTFNPVEVEDLSKHKMDSEQIIIPQASADVVNKAIGEKRRVCAVGTTVMRTVESSVSSSKQLNAYEGWTNKFIFPPYDFSIANCMVTNFHTPKSTLLMMVSAFAGHDFMMEAYQEAIKEKYKFYSYGDAMLIL

SEQ ID NO: 72973 - protein, 349 aa, Tenacibaculum maritimum
  REGION 1..349: note = tr|A0A2H1E742|A0A2H1E742_9FLAO S-adenosylmethionine:tRNA ribosyltransferase-isomerase; OS = Tenacibaculum maritimum NCIMB 2154 OX=1349785 GN=queA; PE = 3 SV=1
MKLSHFDFELPNELLAEYPSEHRDESRLMVVHRDTQKIEHKQFKDLIEYFDEGDVMMLNNTKVFPARMYGNKEKTGARIEVFLLRELNAENRLWDVLVDPARKIRIGNKLFFGEDETLVAEVIDNTTSRGRTLRFLFDGSYEEFRQKLLELGETPLPKYINREVEPEDDERYQTIFAKNEGAVAAPTAGLHFSKHLMKRLEIKGVDFAEMTLHVGLGTFNPVEVEDLSKHKMDSEQIIIPKESAGRVNLAKQQRKKVCAVGTTVMRTVESSVSANQELNDFEGWTNKFIFPPYDFSIANCMITNFHTPKSTLLMMTAAFGGYDLIMEAYKEAVKEGYRFYSYGDAMLIL

SEQ ID NO: 72974 - protein, 349 aa, Tenacibaculum mesophilum
  REGION 1..349: note = tr|A0A1M5CS66|A0A1M5CS66_9FLAO S-adenosylmethionine:tRNA ribosyltransferase-isomerase; OS = Tenacibaculum mesophilum OX=104268 GN=queA PE=3 SV=1
MKLSNFNFELPKELLAEYPSEHRDEARLMVLHRDTQKIEHKLFKDLIDYFDEGDVMMLNNTKVFPARMYGNKEKTGARIEVFLLRELNAENRLWDVLVDPARKIRIGNKLFFGDDESLVAEVIDNTTSRGRTLRFLFDGPYDEFRKKLIELGETPLPKYIKREVEPEDEDRYQTIFAKHEGAVAAPTAGLHFSKHLMKRLEIKGVDFAETTLHVGLGTFNPVEVEDLSKHKMDSEQIIIPQASADIVNNAIANKKRVCAIGTTVMRTIESSVSSSNQLNAFEGWTNKFIFPPYDFSIANSMVTNFHTPKSTLLMMVSAFAGHDFIMEAYHEAIKEKYKFYSYGDAMLIL

SEQ ID NO: 72975 - protein, 349 aa, Tenacibaculum skagerrakense
  REGION 1..349: note = tr|A0A4V2SMT8|A0A4V2SMT8_9FLAO S-adenosylmethionine:tRNA ribosyltransferase-isomerase; OS = Tenacibaculum skagerrakense OX=186571 GN=queA PE=3 SV=1
MKLSQFNFDLPKELLAEYPSEHRDEARLMVLNRKEQTIEHKLFKDLINYFDEGDVMMLNNTKVFPARMYGNKEKTGARIEVFLLRELNAEHRLWDVLVDPARKIRIGNKLFFGDDDSLVAEVIDNTTSRGRTLRFLFDGSYEEFRRKLIELGETPLPKYIKREVEPEDEERYQTIYAKHEGAVAAPTAGLHFSKHLMKRLEIKGVEFAEMTLHVGLGTFNPVEVEDLSKHKMDSEQIIIPEEACNVVNNALDRKKRVCAVGTTVMRTVESSVSANHRLNAYDGWTNKFIFPPYDFSIANCMVTNFHTPKSTLLMMIAAFAGYDFVMEAYEQAVKEKYKFYSYGDAMLII

SEQ ID NO: 72976 - protein, 349 aa, Tenacibaculum soleae
  REGION 1..349: note = tr|A0A1B9Y2Q7|A0A1B9Y2Q7_9FLAO S-adenosylmethionine:tRNA ribosyltransferase-isomerase; OS = Tenacibaculum soleae OX=447689 GN=queA PE=3 SV=1
MKLSNFNFELPEELLAEYPSEHRDEARLMVLHRDTQKIEHKMFKDLIDYFDEGDVMMLNNTKVFPARMYGNKEKTGARIEVFLLRELNAENRLWDVLVDPARKIRIGNKLFFGDDESLVAEVIDNTTSRGRTLRFLFDGPYEEFREKLVKLGETPLPKYIKREVEETDEERYQTIYAKHEGAVAAPAAGLHFSKHLMKRLEIKGVDFAEMTLHVGLGTFNPVEVEDLSKHKMDSEKINVPLSSADMVNNALTNKKRVCAVGTTVMRTAESAITSKHKLKEFDGWTNKFIFPPFDFSVANAMITNFHTPKSTLMMMVSAFAGHDFMMEAYQEAIKEKYKFHSYGDAMLIL

SEQ ID NO: 72977 - protein, 349 aa, Tenacibaculum sp.
  REGION 1..349: note = tr|A0A2H1YIM8|A0A2H1YIM8_9FLAO S-adenosylmethionine:tRNA ribosyltransferase-isomerase; OS = Tenacibaculum sp. TNO020 OX=1458515 GN=queA PE=3 SV=1
MKLSNFSFELPEELLAEYPSEHRDEARLMVLHRDTQKIEHKLFKDVINYFDEGDVLMLNNTKVFPARMYGNKEKTGALIEVFLLRELNAENRLWDVLVDPARKIRIGNKLFFGDDESLVAEVIDNTTSRGRTLRFLYDGPYEEFREKLLKLGETPLPKYIKREVEDSDEDRYQTIYAKEEGAVAAPAAGLHFSKHLMKRLEIKGVDFAETTLHVGLGTFNPVEVEDLSKHKMDSEKIKVTKETAEMVNNAIAKKKRVCAVGTTVMRTVESAITSKRKLKEFDGWTNKFIFPPFDFSVANCMVTNFHSPKSTLMMTVSAFAGHDFMMEAYEEAIKEKYKFHSYGDAMLIL

SEQ ID NO: 72978 - protein, 349 aa, Tenacibaculum sp.
  REGION 1..349: note = tr|A0A354GG36|A0A354GG36_9FLAO S-adenosylmethionine:tRNA ribosyltransferase-isomerase; OS = Tenacibaculum sp. OX=1906242 GN=queA PE=3 SV=1
MKLSNFDFDLPKELLAEYPSEHRDEARLMVLNREKQTIEHKLFKDLINYFDEGDVMMLNNTKVFPARMFGNKEKTGARIEVFLLRELNAENRLWDVLVDPARKIRIGNKLFFGNDDSLVAEVIDNTTSRGRTLRFLFDGSYEEFRHKLIELGETPLPKYIKRDVEPEDEERYQTIFAKHEGAVAAPTAGLHFSKHLMKRLEIKGVDFAEMTLHVGLGTFNPVEVEDLSKHKMDSEQIIIPDESVNIVNNALDKKRRVCAVGTTVMRTVESSVSASKRLNPYNGWTNKFIFPPYDFSIANCMVTNFHTPKSTLLMMISAFAGHDFVMDAYNEAIKEKYKFYSYGDAMLIL

SEQ ID NO: 72979 - protein, 349 aa, unidentified
  source 1..349: note = Tenacibaculum todarodis
  REGION 1..349: note = tr|A0A1L3JJN7|A0A1L3JJN7_9FLAO S-adenosylmethionine:tRNA ribosyltransferase-isomerase; OS = Tenacibaculum todarodis OX=1850252 GN=queA PE=3 SV=1
MKLSHFGFELPEELLAEYPTEHRDESRLMVLHRDTQKIEHKLFKDVIDYFDEGDVMMLNNTKVFPARMFGNKEKTGARIEVFLLRELNAENRLWDVLVDPARKIRIGNKLFFGEDDSLVAEVIDNTTSRGRTLRFLFDGDYDEFRVKLQELGQTPLPKTINRELEPEDEERYQTIFAKHEGAVAAPTAGLHFSKHLMKRLEIKGVDFAELTLHVGLGTFNSVEVEDLSKHKMDSEKIIIPQKTSDMINNALKTKKRICAVGTTVMRTVESSVSSSGELNAFEGWTNKFIFPPHDFSIANSMITNLHTPKSTLLMQAAAFGGYDFVMEAYQVAIKEKYRFSTYGDAMLII

SEQ ID NO: 72980 - protein, 338 aa, unidentified
  source 1..338: note = Tenericutes bacterium
  REGION 1..338: note = tr|A0A2K9AJJ4|A0A2K9AJJ4_9BACT S-adenosylmethionine:tRNA ribosyltransferase-isomerase; OS = Tenericutes bacterium MZ-XQ OX=1911683 GN=queA PE=3 SV=1
MRVSDFDFHLPKELIAQHPSEKRDHSRLMVLNRETESIDHKHFYDIVDLLDKNDVLVINDTKVIPARLLGSKAETQAVIEVLLLEELEKDVWQALTKPAKRVKIGTKIHFGDQLTLECVGIHDEGLRDYKLHYEGILIEVLEKLGTMPLPPYITEKLLEQDRYQTVYATNPGSAAAPTAGLHFTKELMEKIEDKGIEIIRVTLNVGLGTFRPVAVDKVENHIMHHETYTITKKSAERLNEVKKQGKKLVCVGTTSLRTVEANYKDGFHEGTYATDIFIYPGYRFKACDKLITNFHLPKSTLIMLVSALAGNDFVKHAYLEAIKEKYRFFSFGDAMFIK

SEQ ID NO: 72981 - protein, 338 aa, unidentified
  source 1..338: note = Tenericutes bacterium
  REGION 1..338: note = tr|A0A2N1PX93|A0A2N1PX93_9BACT S-adenosylmethionine:tRNA ribosyltransferase-isomerase; OS = Tenericutes bacterium HGW-Tenericutes-6 OX=2013849; GN = queA PE=3 SV=1
MKVNDFDFILPKELIAQHPVDQRDHSRLMVIDKHTEEITHKHFYDIKDELHQGDVLVINDTKVMPARLLGLKEKTDATIEVLLLKEIEKDTWEAMTKPARRVKVGTKIRFSDLLIAECTGILEEGMRVFKMHYEGLFIEILERLGTMPLPPYITERLNEKDRYQTVYAKDLGSAAAPTAGLHFTKELLATLEDKGVKICPITLHVGLGTFKPVQVDDVTKHHMHEETYTIRKESAQILNDAVKNNQRIICVGTTSLRTLESNFKDQFIPGTFETDIFIYPGYSFKVVKHLITNFHLPKSTLIMLVSALSSLSLMKKAYLNAVEERYRFFSFGDAMFIK

SEQ ID NO: 72982 - protein, 363 aa, unidentified
  source 1..363: note = Tengunoibacter tsumagoiensis
  REGION 1..363: note = tr|A0A401ZUI7|A0A401ZUI7_9CHLR S-adenosylmethionine:tRNA ribosyltransferase-isomerase; OS = Tengunoibacter tsumagoiensis OX=2014871 GN=queA PE=3; SV = 1
MNEIRISDFDYELPSEYIAQTPLEPRDSSRLLVTHRSTGQMEHRHFRDIGSYLRPGDLLIANQSRVIPARLLGQKAETGGAVEVLLLAERPDLGQDRWETLVRPGRRLRDGARIVFGEDPEQPRLLAEVGERTEAGGRIVHFTVPEGLNEDDPYSVMAVRHRIDEIGNMPLPPYIHERLADPERYQTVYARIRGSAAAPTAGLHFTPQLLDQLRQQGVRTGFVTLHVGLDTFRPVEVDNVSEHKMHSEEIELDAQTAELINETKRAGGRVIAVGTTSVRVLESVASLHEGEIQPYKGSTSLFITPGYTFKAVDVMITNFHLPRSTLLLLVSAFMSKGLMEEAYQTAIKEHYRFFSFGDAMLIL

SEQ ID NO: 72983 - protein, 340 aa, Tenuibacillus multivorans
  REGION 1..340: note = tr|A0A1H0B7D3|A0A1H0B7D3_9BACI S-adenosylmethionine:tRNA ribosyltransferase-isomerase; OS = Tenuibacillus multivorans OX=237069; GN = SAMN05216498_2240 PE=3 SV=1
MALKTFEIPKDLNASLPAEYRNGSRDQVKMMVTEAGETTFTSFKNLSDYVQPGDVLIFNNTRTIPASLKVEWKDKIIEIRLSQQIDNLIWEGIVLKENVNIGDRLIVSSNLTFAVMGQGSEAPLLQLESGLNTQETIMEILSVGEPIRYDYIYQPFPINTYQTVYGSVPGSMEMPSAGRAFTWQIINTLKEKGAKVGFVQLFTGLSYYEKDRWPNPSNHPERFCVSKEVADLVNQAKRKGNRVIAVGTTVVRALESAGKLGDVVEKNNEYTDLYVNERYERKVVDSLLTGLHEPEASHLDMLTSWLSKDEITALYHEAIERQFLWHEFGDLHLILGDDPS

SEQ ID NO: 72984 - protein, 342 aa, Tenuibacillus multivorans
  REGION 1..342: note = tr|A0A1G9ZKE5|A0A1G9ZKE5_9BACI S-adenosylmethionine:tRNA ribosyltransferase-isomerase; OS = Tenuibacillus multivorans OX=237069 GN=queA PE=3 SV=1
MNVNDFDFDLPEEQIAQTPLANRSDSRLMVLNRENQKIDHKYFYHIIDYLQPGDCLVLNNTKVLPARLFGQKEDTGGKVEVLLLTQQEGDDWEVLVKPAKKVKIGTRLSFGDGRLKAVCIGIKEHGGREIRFEYDGIFLEVLDQLGEMPLPPYIKEQLDDRDRYQTVYAEEAGSAAAPTAGLHFTEELLEQIKAKGVHIANITLHVGLGTFRPVQVDNIEEHDMHAEFYQMNQETADLLNQVKSDGHKIVAVGTTSVRTLETIARDENGVFKEKSGWTDIFIYPPYKFKAIDAMITNFHLPKSTLIMLVSAFSTKDFILKAYQEAVVEKYRFFSFGDAMLIL

SEQ ID NO: 72985 - protein, 362 aa, Tepidamorphus gemmatus
  REGION 1..362: note = tr|A0A4R3MDP4|A0A4R3MDP4_9RHIZ S-adenosylmethionine:tRNA ribosyltransferase-isomerase; OS = Tepidamorphus gemmatus OX=747076 GN=queA PE=3 SV=1
MRVDLFDFELPQERIALRPAEPRDAARLLAVRPGAIPELEDCGVLDLPRLLASGDLLVFNDTRVIPARLHGRRIGRGGTKPKIEATLHMRLDGSRWQAFVKPARKLQPGDVVRFGGEGRVCLLGMLDAVVEAKGEGGEVTLSFSFHGPALDQAIAELGELPLPPYIAARRPVDERDAVDYQTIFARVEGSVAAPTAGLHFTDRLLAALDQRGIGRVGVTLHVGAGTFLPVKADDTAAHRMHAEIGSVTPAAAELINRMRAAGGRIVAVGTTSLRLLESAASEDGRVRPFSGPTDIFITPGYRFRAVDVLLTNFHLPRSTLFMLVSAFSGLETMRRAYAHAIESGYRFYSYGDACLLFPGPTE

SEQ ID NO: 72986 - protein, 341 aa, unidentified
  source 1..341: note = Tepidanaerobacter acetatoxydans
  REGION 1..341: note = tr|F4LTJ2|F4LTJ2_TEPAE S-adenosylmethionine:tRNA ribosyltransferase-isomerase OS=Tepidanaerobacter acetatoxydans (strain DSM 21804 / JCM 16047 / Re1); OX = 1209989 GN=q ueA PE=3 SV=1
MKLEDFDFDLPEKLIAQEPIKDRSKSRLLVLNKTTGEIEHKIFEDVVNYFEQGDCLVLNNTKVIPARLIGYRKKTNGKIEVVLLKSIGSDIWEVLVKPGHKARIGDEVIFGDGRLIAKIIDDTDFGGRIVKFLYSDSFEEILNELGQMPTPPYIKKKLQDKNRYQTVYAQVPGSAAAPTAGLHFTEELLKKIKEKGISIAFITLHVGLGTFRPVKVENIEEHKMHAEYYEISKKTAEVINSTRQAGRKVFAVGTTSTRTLETVADVNGQIKPGSGWSDIFIYPGYNFKAIDGLITNFHLPKSTLIMLVSAFAGREKILNAYKEAVSERYKFFSFGDAMLIM

SEQ ID NO: 72987 - protein, 341 aa, Tepidanaerobacter syntrophicus
  REGION 1..341: note = tr|A0A0U9HK50|A0A0U9HK50_9THEO S-adenosylmethionine:tRNA ribosyltransferase-isomerase; OS = Tepidanaerobacter syntrophicus OX=224999 GN=queA PE=3; SV = 1
MKLEEFDFDLPEELIAQEPIENRSKSRLLVLNKSTGEIEHKIFEDVIDYLQKGDCLVLNNTKVIPARLIGRRQRTGGRIEVVLLKPIENDVWEALVKPGSKARKGEEIVFGNGQLTAKVLDNTDYGGRLMQFFYEGSFEEILDKLGQMPTPPYIKKKLEDKDRYQTVYAQIPGSAAAPTAGLHFTEELLNKLRAKGVSIVFITLHVGLGTFRPVKVENVEEHKMHSEYYEVSPEAAETICRTKETGKRVIAVGTTSTRTLETIGDENGMVKPGNGWSDIFIYPGYKFKVVDALITNFHLPKSTLIMLVSAFAGKEKVFKAYEEAIREKYRFFSFGDAMLII

SEQ ID NO: 72988 - protein, 342 aa, unidentified
  source 1..342: note = Tepidibacillus decaturensis
  REGION 1..342: note = tr|A0A135L2A1|A0A135L2A1_9BACI S-adenosylmethionine:tRNA ribosyltransferase-isomerase; OS = Tepidibacillus decaturensis OX=1413211 GN=queA PE=3 SV=1
MNIELFDFYLPEELIAQTPLKNRAESKMLTLNRKTGEIRHHHFKDIVDYLQPGDTLVLNDTKVLPARLFGIKKETGAKIEVLLLKQLENDRWETLVKPGKKLRVGHQIIFGDGLLTGIVEDMTEVGGRIIRFQYQGVFNEILDQLGQMPLPPYIKEQLEDKDRYQTVYAKNLGSAAAPTAGLHFTKELLEQIKEKGIEILYITLHVGLGTFRPVQAQNIEEHHMHSEFYSLSEEVAEKLNQAKSDGRRIIAVGTTSVRTLETVIDQESRRFIAKQGWTDIFIYPGYQFKAIDAMITNFHLPKSSLIMLVSALAGREQVMKAYREAIQHHYRFFSFGDAMFIY

SEQ ID NO: 72989 - protein, 343 aa, unidentified
  source 1..343: note = Tepidibacillus fermentans
  REGION 1..343: note = tr|A0A4R3KJX7|A0A4R3KJX7_9BACI S-adenosylmethionine:tRNA ribosyltransferase-isomerase; OS = Tepidibacillus fermentans OX=1281767 GN=queA PE=3 SV=1
MMNIELFDFDLPEELIAQTPLKNRSDSKLLTLNRRTGEIQHHRFRGIIDFLHKGDTLVLNDTKVLPARLIGQKKETEAKVEVLLLKQLDDNRWETLVKPGKRLRQGHEVVFGDGLLTGVIEDTTEVGGRIIRFHYQGIFNEILDQLGQMPLPPYIKEQLEDKDRYQTVYAKHLGSAAAPTAGLHFTKELLQQIEEKGVQIVYITLHVGLGTFRPVQTENIEEHHMHSEYYQLNEEAAKKLNEAKEEGRRIIAVGTTSVRTLETVVNKETERFEAKDGWTDIFIYPGYEFKAIDAMITNFHLPKSSLVMLVSAFAGRDTIMKAYQEAIDQHYRFFSFGDAMFIY

SEQ ID NO: 72990 - protein, 340 aa, Tepidibacter formicigenes
  REGION 1..340: note = tr|A0A1M6MWC7|A0A1M6MWC7_9FIRM S-adenosylmethionine:tRNA ribosyltransferase-isomerase; OS = Tepidibacter formicigenes DSM 15518 OX=1123349 GN=queA; PE = 3 SV=1
MKTSDFYFNLPEELIAQKPLEKRDESRLMVLDKNTGEIEHKIFKDVLDYLKEGDCLVLNNTRVLPARLIGEKLETKGKMEFLLLKRIDIDTWEVLVKPGKRAKIGAKFSFGNKLIAQVIDIGEEGARIVKFSYDGVFEEILDELGSMPLPPYITEKLEDKERYQTVYSKHEGSAAAPTAGLHFTKELLEKIKQKGVEIAFVTLHVGLGTFRPVKVENILEHKMHSEFYTIEKEEADKINNCKKQGGRIIPVGTTSCRTLESVANEDGVLQAKSGWTDIFIYPGYEFKVVDALITNFHLPESTLIMLVGALTGKENILNAYNTAVDEKYRFFSFGDAMFIK

SEQ ID NO: 72991 - protein, 341 aa, Tepidibacter thalassicus
  REGION 1..341: note = tr|A0A1M5QK40|A0A1M5QK40_9FIRM S-adenosylmethionine:tRNA ribosyltransferase-isomerase; OS = Tepidibacter thalassicus DSM 15285 OX=1123350 GN=queA; PE = 3 SV=1
MKTRDFYFNLPEELIAQRPLEKRDESRLMVLDKNTGEIEHKIFKDILDYLKEGDCLVLNNTRVLPARLIGEKLDTKGKMEFLLLKRIDIDTWEVLVKPGKRAKVGTKFSFGNGKLISEVIDIGEEGSRIVKFSYDGIFEEILDELGSMPLPPYITEKLEDKERYQTVYSRHEGSAAAPTAGLHFTNELLEKIKQKGVEIAFITLHVGLGTFRPVKVENILEHKMHSEFYMIEKSEADKINRCKKQGGRIIPVGTTSCRTLESAVDENGILEAKSGWTDIFIYPGYEFKIVDALITNFHLPESTLIMLVSALTGKENILNAYNVAVNEKYRFFSFGDAMFIK

SEQ ID NO: 72992 - protein, 353 aa, unidentified
  source 1..353: note = Tepidicaulis marinus
  REGION 1..353: note = tr|A0A081B7F2|A0A081B7F2_9RHIZ S-adenosylmethionine:tRNA ribosyltransferase-isomerase; OS = Tepidicaulis marinus OX=1333998 GN=queA PE=3 SV=1
MRVDIFDFELPEERIALRPARPRDAARMLVVGPDKGRLEDAGVRDLPQILKPGDVLVFNDTKVIPARLRGTRKREEAEAQVEIMLHLRLGPDRWKAFARPAKRLRPGDRVDFTAGFHALTESRDGAETVLQFSASGPALDAAIAAAGELPLPPYIASKRKTDEEDKEDYQTLFADRPGAVAAPTAGLHFTPALLDALAGRGVESARVTLHVGAGTFLPVTAEDTDAHKMHAEWGEVSAETAAKLNEARARGGRIVSVGTTSLRLLESAASEDGHLAAWSGETDIFITPGYRFKAVDILMTNFHLPKSTLFMLVSAFRETEEMKAAYAHAIGAQYRFYSYGDACLLMPKEQDDE

SEQ ID NO: 72993 - protein, 393 aa, Tepidicella xavieri
  REGION 1..393: note = tr|A0A4V3D5Q4|A0A4V3D5Q4_9BURK S-adenosylmethionine:tRNA ribosyltransferase-isomerase; OS = Tepidicella xavieri OX=360241 GN=queA PE=3 SV=1
MFHLERARPALKPMTLTAANAPRVFTLSDFDFSLPPELIAQHPAPERSASRLLDGRRAPPADRIFRDLPALLQPGDLLVFNDTQVIKARLFGEKATGGKLELLVERVLPGPGHEVVAHMKVSKKPPIGATLRMHAGGSTEVAFTATLLGRWPHEDGPLFRLAFSDEPHALMAAHGHVPLPPYIEHADTEEDERRYQTVFAKNPGAVAAPTAALHFDEGVLAALDARGVQRASVTLHVGAGTFQPCKTENIAEHVMHSEWYQVPEATQQAIAATRARGGRIVAVGTTTVRTLESWARTGQATGDTDIFITPGFDFRVVDLLITNFHLPKSTLMMLVSAFAGYEPIMALYRHAIEQRYRFFSYGDAMLLAHAACVSSEDGDRCGEREPGTKGDQR

SEQ ID NO: 72994 - protein, 341 aa, Tepidimicrobium xylanilyticum
  REGION 1..341: note = tr|A0A1H3DVN8|A0A1H3DVN8_9FIRM S-adenosylmethionine:tRNA ribosyltransferase-isomerase; OS = Tepidimicrobium xylanilyticum OX=1123352 GN=queA PE=3; SV = 1
MKTEDFYYDLPEELIAQYPIEDREESRLLVLDKKTGKLEDRIFKDIIDYFYPGDCLVLNDTRVIPARLFGSREGKKEKIEFLLLKRVERDTWETLVRPGKKVKPNNRIIFRDGLLIADVLSINEDGTRNVKFIYDGIFEEILDKLGEMPLPPYIKGELKDKERYQTVYSKHEGSAAAPTAGLHFTMELLKRIEEKRVNIAYLTLHVGLGTFRPVKVENIEEHHMHSEYYEVSKEAADIINRTKSEGGRIIAVGTTSTRTLETVANQKGEIIPSKGWTDIFIYPGYEFKIIDGLITNFHLPESTLLMLVCAFAGKDNIFNAYKYAIENKFRFFSFGDAMFIK

SEQ ID NO: 72995 - protein, 368 aa, unidentified
  source 1..368: note = Tepidimonas alkaliphilus
  REGION 1..368: note = tr|A0A554W4C6|A0A554W4C6_9BURK S-adenosylmethionine:tRNA ribosyltransferase-isomerase; OS = Tepidimonas alkaliphilus OX=2588942 GN=queA PE=3 SV=1
MNNVPPSPAATGAARVWTTSDFDFHLPPELIAQHPAPQRSAARLLDGRGWPPEDRIFRELPGLLEPGDLLVFNDTQVIKARLYGEKPTGGRLELLVERVLADGEVVAHMKVSKKPAPGTVLRMAPQADGQPAFTATLLGRWPDADGPLFRLRFSDDPYALMERHGHVPLPPYIDHPDTAEDEQRYQTIFARNPGAVAAPTAALHFDAAVLAALEARGVRRASVTLHVGAGTFQPVKGEDIRAHRMHREWYRIPPETLAALERTRRAGGRVLAVGTTTVRTLESWARSGATEGDTDLFITPGFDFRVVDLLITNFHLPRSTLLMLVSAFAGYEHIMALYRHAIERRYRFFSYGDAMLLARAGPRGAPVA

SEQ ID NO: 72996 - protein, 354 aa, Tepidimonas aquatica
  REGION 1..354: note = tr|A0A554WRP6|A0A554WRP6_9BURK S-adenosylmethionine:tRNA ribosyltransferase-isomerase; OS = Tepidimonas aquatica OX=247482 GN=queA PE=3 SV=1
MSISTPHTWRTTDFDFELPPELIAQHPAPERSASRLLDGRRWPPIDLIFRQLPELLQPGDLMVFNDTQVIKARLFGVKPTGGRLEVLVERVLPDGEVVAHMKVSKKPAVGTELRMAPDAHGTPAFTATLLGRWPEADGPLFRLRFSGDPYTLMQRYGHVPLPPYIQHPDSADDEQRYQTVFAKHPGAVAAPTAALHFDEAVLAALDARGVRRAAVTLHVGAGTFQPVKVDDIAQHRMHSEWYRIPPETLAALEQTRRQGGRIVAVGTTTVRTLESWAATGQTEGDTDIFITPGFSFRVVDGLITNFHLPRSTLMMLVSAFAGYERIMALYRHAVQQRYRFFSYGDAMLLRREGG

SEQ ID NO: 72997 - protein, 365 aa, unidentified
  source 1..365: note = Tepidimonas fonticaldi
  REGION 1..365: note = tr|A0A1A6DWB9|A0A1A6DWB9_9BURK S-adenosylmethionine:tRNA ribosyltransferase-isomerase; OS = Tepidimonas fonticaldi OX=1101373 GN=queA PE=3 SV=1
MTTLPPAAAPARTWTTSDFDFHLPPELIAQHPAPERSASRLLDGRGWPPADRIFRELPALLAPGDLLVFNDTQVIKARLYGEKPTGGRLELLVERMLADGEVVAHMKVSKKPAPGTVLRMAPQADGQPAFTATLLGRWPEADGPLFRLRFSDDPYAMMERHGHVPLPPYIEHPDTAEDEQRYQTVFAKNPGAVAAPTAALHFDEAVLAALAARGVQRASVTLHVGAGTFQPVKGEDIRAHRMHSEWYRIPPQTLAALERTRRAGGRVLAVGTTTVRTLESWARSGATEGDTDIFITPGFDFRVVDLLITNFHLPRSTLMMLVSAFAGYEHVMALYRHAIGRRYRFFSYGDAMLLARAGSAAAAAD

SEQ ID NO: 72998 - protein, 365 aa, unidentified
  source 1..365: note = Tepidimonas fonticaldi
  REGION 1..365: note = tr|A0A554XKE7|A0A554XKE7_9BURK S-adenosylmethionine:tRNA ribosyltransferase-isomerase; OS = Tepidimonas fonticaldi OX=1101373 GN=queA PE=3 SV=1
MTTLPPAATPARAWTTSDFDFDLPPELIAQHPAPERSASRLLDGRGWPPADRIFRELPALLAPGDLLVFNDTQVIKARLYGEKPTGGRLELLVERVLADGEVVAHMKVSKKPAPGTVLRMAPQADGQPAFTATLLGRWPDADGPLFRLRFSDDPYAVMERHGHVPLPPYIEHPDTAEDEQRYQTVFAKNPGAVAAPTAALHFDEAVLAALAARGVQRASVTLHVGAGTFQPVKGEDIRAHRMHSEWYRIPPQTLAALERTRRAGGRVLAVGTTTVRTLESWARSGATEGDTDIFITPGFDFRVVDLLITNFHLPRSTLMMLVSAFAGYEHVMALYRHAIGRRYRFFSYGDAMLLARAGSAAAAAD

SEQ ID NO: 72999 - protein, 354 aa, Tepidimonas ignava
  REGION 1..354: note = tr|A0A4R3LHZ2|A0A4R3LHZ2_9BURK S-adenosylmethionine:tRNA ribosyltransferase-isomerase; OS = Tepidimonas ignava OX=114249 GN=queA PE=3 SV=1
MTNPTPPTWRTADFDFELPAELIAQHPAPERSASRLLDGRGWPPADRIFRQLPELLQPGDLLVFNDTQVIKARLFGAKPTGGRLEVLVERVLPDGEVVAHMKVSKKPAVGTVLRMAPQPDGQPAFTATLLGRWPEADGPLFRLRFSDDPYTLMQRHGHVPLPPYIDHPDTADDEQRYQTVFAKHPGAVAAPTAALHFDEAVLAALEARGVRRAAVTLHVGAGTFQPVKVDDITQHRMHSEWYRIPPETLAALEQTRRQGGRIVAVGTTTVRTLESWAATGQTEGDTDIFITPGFSFRVVDLLITNFHLPRSTLMMLVSAFAGYERIMALYRHAVQQRYRFFSYGDAMLLQRAQR

SEQ ID NO: 73000 - protein, 365 aa, unidentified
  source 1..365: note = Tepidimonas sediminis
  REGION 1..365: note = tr|A0A554WQT5|A0A554WQT5_9BURK S-adenosylmethionine:tRNA ribosyltransferase-isomerase; OS = Tepidimonas sediminis OX=2588941 GN=queA PE=3 SV=1
MTTPPPAAAPGRTWTTSDFDFHLPPELIAQHPAPERSAARLLDGRGWPPADRIFRELPGLLEPGDLLVFNDTRVIKARLYGEKPTGGRLELLVERVLADGEVVAHMKVSKKPAPGTVLRMAPQADGQPAFTATLLGRWPEADGPLFRLRFSDDPYALMERHGHVPLPPYIEHPDTAEDEQRYQTVFARNPGAVAAPTAALHFDEAVLAALEARGVRRASVTLHVGAGTFQPVKGEDIRAHRMHREWYRIPPETLAALERTRRAGGRVLAVGTTTVRTLESWARSGATEGDTDLFITPGFDFRVVDLMVTNFHLPRSTLLMLVSAFAGYEHVMALYRHAVERRYRFFSYGDAMLLARAGCCGTPAA

SEQ ID NO: 73001 - protein, 365 aa, Tepidimonas sp.
  REGION 1..365: note = tr|A0A554XIE1|A0A554XIE1_9BURK S-adenosylmethionine:tRNA ribosyltransferase-isomerase; OS = Tepidimonas sp. SPSP-6 OX=2267262 GN=queA PE=3 SV=1
MTASSSHPSAPAPAQTRRSYTVDDFDFALPPELIAQHPAPERSASRLLDGRQCPPTDRVFRELPNLLQAGDLLVFNDTQVIKARLFGVKPSGGRLELLVERVLADGEVVAHMKVSKKPAAGTVLHMALDDGGQPAFTATLLGRWPDADGPLFRLRFSDDPYALMARHGHVPLPPYIAHADTAEDERRYQTVFAKHPGAVAAPTAALHFDEGILAALQARGVHRASVTLHVGAGTFQPVKVRDLHAHRMHSEWYRIPPETLAAVERTRRSGGRIVAVGTTTVRTLESWATSGRTEGDTTLFITPGFAFRVVDLLITNFHLPRSTLLMLVSAFAGYDHIRALYQHAIAQRYRFFSYGDAMLLQRAAR

SEQ ID NO: 73002 - protein, 360 aa, Tepidimonas taiwanensis
  REGION 1..360: note = tr|A0A554X7H8|A0A554X7H8_9BURK S-adenosylmethionine:tRNA ribosyltransferase-isomerase; OS = Tepidimonas taiwanensis OX=307486 GN=queA PE=3 SV=1
MTTSPPPAPARTWTTGDFDFPLPPELIAQHPAPERSASRLLDGRTWPPVDRVFRELPGLLEPGDLLVFNDTQVIKARLFGEKPTGGRLELLVERVLADGEVVAHMKVSKKPTPGTVLRMAIGADGQPGFTATLLGRWPDVDGPLFRLRFSDDPYTLMARHGHVPLPPYIEHADTAEDERRYQTIFAKNPGAVAAPTAALHFDESVLAALDARGVQRASVTLHVGAGTFQPVKVDDIRQHRMHSEWYRIPPETLAALERTRRAGGRVLAVGTTTVRTLESWARTGATEGDTDIFITPGFDFRVVDGMITNFHLPRSTLMMLVSAFAGYDHIMALYRHAIAQRYRFFSYGDAMLLQRSTGSP

SEQ ID NO: 73003 - protein, 359 aa, Tepidimonas thermarum
  REGION 1..359: note = tr|A0A554X3Q1|A0A554X3Q1_9BURK S-adenosylmethionine:tRNA ribosyltransferase-isomerase; OS = Tepidimonas thermarum OX=335431 GN=queA PE=3 SV=1
MTHPAPTGAPTRTWTTSDFDFALPPELIAQHPAPERSAARLLDGRTWPPADRIFRDLPALLQPGDLLVFNDTQVIKARLYGEKPTGGRLELLVERVLGNHEVVAHMKVSKKPSAGTVLRMAPGPDGQPAFSATLLGRWPDADGPLFHLRFSDDPYVLMARHGHVPLPPYIEHGDTEEDERRYQTVFAQTPGAVAAPTAALHFDAAVLAALQARGVPRANVTLHVGAGTFAPVKGEDIRAHRMHSEWYRIPPQTLAALERTRRAGGRIVAVGTTTVRTLESWARTGQTEGDTDIFITPGFDFRVVDLLITNFHLPRSTLLMLVSAFAGYEHIMALYRHAIAQHYRFFSYGDAMLLQRGQP

SEQ ID NO: 73004 - protein, 353 aa, unidentified
  source 1..353: note = Tepidiphilus thermophilus
  REGION 1..353: note = tr|A0A0K6IWA5|A0A0K6IWA5_9PROT S-adenosylmethionine:tRNA ribosyltransferase-isomerase; OS = Tepidiphilus thermophilus OX=876478 GN=queA PE=3 SV=1
MQEPSLRKAPSLTVHDFDFSLPPELIAQAPLPERSASRLLVLEGEALHDRLFRDLPGFLEEGDLLVFNDSRVIHARLFGRKESGGAVEVLVERLVGTQEALAQVRASKPPRPGMRLRLEEAFDVEVVGRDGEFYHLRLVGEGDLPQLVERHGRLPLPPYIARPAEPEDEARYQTVYARTPGSVAAPTAGLHFDESLLRQLAEHGVDTAWVTLHVGAGTFQPVRVERLDEHRMHRERYWIPEETVARVARAKARGRRVIAVGTTSLRALEGAAQGGALRPGSGETELFITPGYDFRVVDALVTNFHLPRSTLLMLVSALAGLDRIRRAYAHAIERRYRFFSYGDAMFIPRRFAR

SEQ ID NO: 73005 - protein, 358 aa, unidentified
  source 1..358: note = Terasakiispira papahanaumokuakeensis
  REGION 1..358: note = tr|A0A1E2V6Q5|A0A1E2V6Q5_9GAMM S-adenosylmethionine:tRNA ribosyltransferase-isomerase; OS = Terasakiispira papahanaumokuakeensis OX=197479 GN=queA; PE = 3 SV=1
MQRSDFDFDLPDELIARQPAPERTGSRLLVVEGSSGELAHQQFPDILDHLQPGDLMVFNDTRVIPARLFGQKASGGKVEILIERPLDEHRALAHVRASKAPKAGARLYLEGGIEATCEGREETLFLLRFESPTPLIELLEQHGHMPLPPYIDRPDAGSDRERYQTVYNRTPGAVAAPTAGLHFDEALLNQIRAKGVNTAFVTLHVGAGTFQPVRVDNIQEHQMHKEWLQVSAETAELVRSTRASGGRVIAVGTTSVRSLETAASSGQVQPFSGDTSIFIYPGYQWQVVDALITNFHLPESTLLMLVSSFAGYDTVMKAYHEAVAQRYRFFSYGDAMFLTRRPSSADDMAPETRDHHAF

SEQ ID NO: 73006 - protein, 353 aa, Teredinibacter sp.
  REGION 1..353: note = tr|A0A509E4W7|A0A509E4W7_9GAMM S-adenosylmethionine:tRNA ribosyltransferase-isomerase; OS = Teredinibacter sp. ISS155 OX=2584524 GN=queA PE=3 SV=1
MHRQDFFYDLPEDLIAHYPMPQRSGSRLLVLDGVTGECQHHQFAQLIDHLEPGDLMVFNDTRVIPARLFGQKETGGKLEILVERVLSASQVLAHVRASKSPKAGSLIQLDQGITVRVTGRQDSLFELQFLGELTAIEVMEKIGHMPLPPYIEREDEINDRERYQTVYGKHQGAVAAPTAGLHFDDALLQAIKDKGVNQAFVTLHVGAGTFQPVRVDDIREHQMHSEVMAVSQDVCDLVAATKGAGKRVIAVGTTSVRCLETAAQSDAGDGIIHPYQGETNIFIYPSYQYKVVDALVTNFHLPESTLLMLVSAFAGYQHTMKAYSEAVKRRYRFFSYGDAMFISHKNTIEKHEV

SEQ ID NO: 73007 - protein, 359 aa, Teredinibacter turnerae
  REGION 1..359: note = tr|C5BLY2|C5BLY2_TERTT S-adenosylmethionine:tRNA ribosyltransferase-isomerase OS=Teredinibacter turnerae (strain ATCC 39867 / T7901) OX=377629 GN=queA PE=3 SV=1
MRRQDFFYSLPDELIARYPTQDRTASRLLVLDGASGEVEHSQFASLLERVNSGDLLVFNDTRVIPARLFGKKSTGGQIEILVERVLDSHRVYAHVRSSKSPKAGAILVLEDGTEVTMTAREGALFTLEFPRHASALEVMERIGHMPLPPYIDRADEAQDKERYQTVYGKNKGAVAAPTAGLHFDDALLEALKAKGVEVAFVTLHVGAGTFQPVRADNIRDHEMHSEVMWVDQAVCDSVAATKVRGGRVIAVGTTSVRCLESAAASGHLQPYQGDTNIFIYPSYEFRVVDALVTNFHLPESTLLMLISAFAGYTNTMNAYAQAVQEKYRFFSYGDAMFVTRNPAASQEKIRPLTEENPHG

SEQ ID NO: 73008 - protein, 364 aa, Terrabacter sp.
  REGION 1..364: note = tr|A0A543LG92|A0A543LG92_9MICO S-adenosylmethionine:tRNA ribosyltransferase-isomerase; OS = Terrabacter sp. 3211 OX=2587050 GN=FHW49_2161 PE=3 SV=1
MSASLAHAPHTLFRVTDDLTADAPPEARGLGRDGVRLLVASEPSSGEVRIEHTTFAAIGEHLAPGDLLLVNNSATVAGEVDGRVSGRGAVVVHVGTGLDDGTWVLELRTAPDAAHPLLDALEGDVVELVSGGPRLRLESPYPGPDSSPTGRGNRLWRATPLDDRSLAEHLGTHGRPIAYGYLRSRFSLDAYQTVFARVPGSAEMASAARPFTADLVTRLVSSGVLVAPVTLHTGLSSQEAGEAPQAERFAVPRETADLVNLTRSRGGRAVAVGTTATRAIESATRPDGRVQAAAGWTDVVISPDRPARVVDGLVTGWHDPDASHLLLVEAVAGADLTQQAYDAAVAHRYAWHEFGDAGLFLPHR

SEQ ID NO: 73009 - protein, 364 aa, Terrabacter sp.
  REGION 1..364: note = tr|A0A0Q8Y8P8|A0A0Q8Y8P8_9MICO S-adenosylmethionine:tRNA ribosyltransferase-isomerase; OS = Terrabacter sp. Root85 OX=1736603 GN=ASE25_09925 PE=3; SV = 1
MTAALAHVPHTVFRATDDLTADAPPERRGLDRDGVRLLVASEPSSGTVRVEHTTFAAIGDHLSPGDLLLVNNSATVAGEIDGRVAGRGAVVVHVASELDDCTWVVELRTAPDAGHPVLDALEGDVVDLAAGGPRLRLEAPYPRPDSSPTGHGNRLWRATQLDDCTLAEHLATHGRPVAYGYLRSRFPLEDYQTVFARLPGSAEMASAARPFTADLVTGLVSSGVLVAPVTLHTGLSSQEAGEAPQPERFAVSGETAALVNLVRERGRRVVAVGTTATRAIESATGPDGRVRAAAGWTEVVISPDRPARVVDGLVTGWHNPDASHLLLVESVAGADLAQQAYDEAVACRYAWHEFGDAGLFLPHR

SEQ ID NO: 73010 - protein, 332 aa, unidentified
  source 1..332: note = Terrabacteria group
  REGION 1..332: note = tr|A0A537LH86|A0A537LH86_9BACT S-adenosylmethionine:tRNA ribosyltransferase-isomerase (Fragment) OS=Terrabacteria group bacterium ANGP1; OX = 2569760 GN=queA PE=3 SV=1
RLLVVDRSTGRLEHRVFRDLPEYLQPADVMVVNNTRVIPARLRARKPTGGAVEVLLLRPAREQESATARPFGSQPLAQGRPRDGQIWEVLLRPGRRVRIGTRLHLSPRLSGEVIAAQDEGIHLVAFAGDRPVLEAAREIGEMPVPPYIHEPLRRPEDYQTVYASAEGAVAAPTAGLHFTPELLDRIRAAGVRIITLTLHIGLGTFRPVGAADVRSHRMDAEWYEVGEDAATALTQRRGRRVVVGTSAVRTLETVTAGDGAVRPGRGWSELFIYPGFRFKATDALITNFHLPKTTLLMLVCAFAGRELILRAYQEAIAHSYRFYSFGDAMLIL

SEQ ID NO: 73011 - protein, 341 aa, unidentified
  source 1..341: note = Terrabacteria group
  REGION 1..341: note = tr|A0A537LXJ5|A0A537LXJ5_9BACT S-adenosylmethionine:tRNA ribosyltransferase-isomerase; OS = Terrabacteria group bacterium ANGP1 OX=2569760; GN = E6G98_02275 PE=3 SV=1
MSPASTTTIDFTLPPKLEAHEPPEARGLTRDAVRLLVSSLSSDRIVHARFTDLPSFLRRDDLLVVNISATVPAALAARRGDGTEVMMHVSTRLPAGLVVVEFRKVDVSAGEVIALPGGGSAVALVPYPGSARLWVARLDLPEPMLSYLERWGRPIAYPYVRGGWPIEMYQNVYASVPGSAEMPSAGRPFTPQIIDQLTLDGVRLASVILHAGVASLERDEPPYEEYFEVPHETAVAVQRAKEAAGRLVAVGTTVVRALESSVDAAGRPVASRGWTDLIITAQRGVKVVDGLLTGFHEPKATHLVLLEAIAGRAHVERVYRAALDAGYLWHEFGDLHLILPD

SEQ ID NO: 73012 - protein, 342 aa, Terribacillus aidingensis
  REGION 1..342: note = tr|A0A285NTR6|A0A285NTR6_9BACI S-adenosylmethionine:tRNA ribosyltransferase-isomerase; OS = Terribacillus aidingensis OX=586416 GN=queA PE=3 SV=1
MDIQDYDFHLPEELIAQTPLQDRTSSRLLVLNKEAQSMEHRHFANIGDYLHPGDCLVLNDTRVLPARLYGIKSDTGAKCEILLLKQVEGDCWEVLVKPAKKVKVGTELSFGDGKLTAVCKELLEHGGRIVEFHYEGIFYEVLDQLGEMPLPPYIKEQLPDQERYQTVYAKEQGSAAAPTAGLHFTKELLASLQEKGVEIAFITLHVGLGTFRPVSVESIEEHEMHAEFYQMSQETADQLTRIRENGGRIISVGTTSTRTLETIARDNEGKFAAASGWTDIFIYPGFTYRAIDGLITNFHLPKSTLIMLVSAFAGRDFVLDAYRTAVEERYRFFSFGDAMLLV

SEQ ID NO: 73013 - protein, 342 aa, Terribacillus goriensis
  REGION 1..342: note = tr|A0A075LR12|A0A075LR12_9BACI S-adenosylmethionine:tRNA ribosyltransferase-isomerase; OS = Terribacillus goriensis OX=386490 GN=queA PE=3 SV=1
MDIQEYDFHLPEELIAQTPLLDRTASRLLVLNKEEKTMEHRHFADIGDYLKSGDCLVLNDTRVLPARLYGIKKDTQAKVEILLLKQVEGDSWEVLVKPAKKVKVGTELSFGDGKLTAVCKELLEHGGRIVEFQYDGIFYEVLEQLGEMPLPPYIKEQLPDQERYQTVYAKEQGSAAAPTAGLHFTKELLASLQEKGVEIAFITLHVGLGTFRPVSVDSIEEHEMHAEFYQMSQETADQLTRIRENGGRIISVGTTSTRTLETITRDHDGKFVAASGWTDIFIYPGFTYRAIDGLITNFHLPKSTLIMLVSAFAGRDFILDAYRTAVEERYRFFSFGDAMLLV

SEQ ID NO: 73014 - protein, 342 aa, Terribacillus halophilus
  REGION 1..342: note = tr|A0A1G6SID9|A0A1G6SID9_9BACI S-adenosylmethionine:tRNA ribosyltransferase-isomerase; OS = Terribacillus halophilus OX=361279 GN=queA PE=3 SV=1
MDIQDYDFHLPEELIAQTPLQDRTASRLLVLNKEAGTMEHRHFADIGDYLNAGDCLVLNDTRVLPARLYGIKKDTQAKVEILLLKQVEGDSWEVLVKPAKKVKVGTELSFGDGKLTAVCKELLEHGGRIIEFHYDGIFYEVLEQLGEMPLPPYIKEQLPDQERYQTVYAKEKGSAAAPTAGLHFTKELLADLQEKGVEIAFITLHVGLGTFRPVSVESIEEHEMHSEFYQMSQETADQLTRIREAGGRIISVGTTSTRTLETIARDHNGKFVAASGWTDIFIYPGFTYRAIDGLITNFHLPKSTLIMLVSAFAGRDFILDAYRTAVKERYRFFSFGDAMLLV

SEQ ID NO: 73015 - protein, 342 aa, Terribacillus saccharophilus
  REGION 1..342: note = tr|A0A268ACS6|A0A268ACS6_9BACI S-adenosylmethionine:tRNA ribosyltransferase-isomerase; OS = Terribacillus saccharophilus OX=361277 GN=queA PE=3 SV=1
MDIQDYDFHLPEELIAQTPLQDRTASRLLVLNKEEKTMEHRHFADIGDYFKSGDCLVLNDTRVLPARLYGIKKDTQAKVEILLLKQVDGDSWEVLVKPAKKVKVGTELSFGDGKLTAVCKELLEHGGRIVEFRYNGIFYEVLDQLGEMPLPPYIKEQLPDQERYQTVYAKEQGSAAAPTAGLHFTKELLASLQEKGVEIAFITLHVGLGTFRPVSVDSIEEHEMHAEFYQMSQDTADQLTRIRENGGRIISVGTTSTRTLETITRDHDGKFVAASGWTDIFIYPGFTYRAIDGLITNFHLPKSTLIMLVSAFAGRDFILDAYRTAVEERYRFFSFGDAMLLV

SEQ ID NO: 73016 - protein, 342 aa, Terribacillus saccharophilus
  REGION 1..342: note = tr|A0A268HG59|A0A268HG59_9BACI S-adenosylmethionine:tRNA ribosyltransferase-isomerase; OS = Terribacillus saccharophilus OX=361277 GN=queA PE=3 SV=1
MDIQDYDFHLPEELIAQTPLQDRTASRLLVLNKEEKTMEHRHFADIGDYFKSGDCLVLNDTRVLPARLYGIKKDTQAKVEILLLKQVEGDSWEVLVKPAKKVKVGTELSFGDGKLTAVCKELLEHGGRIVEFRYDGIFYEVLEQLGEMPLPPYIKEQLPDQERYQTVYAKEQGSAAAPTAGLHFTKELLASLQEKGVEIAFITLHVGLGTFRPVSVDSIEEHEMHAEFYQMSQETADQLTRIRENGGRIISVGTTSTRTLETITRDHDGKFVAASGWTDIFIYPGFTYRAIDGLITNFHLPKSTLIMLVSAFAGRDFILDAYRTAVEERYRFFSFGDAMLLV

SEQ ID NO: 73017 - protein, 342 aa, Terribacillus sp.
  REGION 1..342: note = tr|A0A268BS51|A0A268BS51_9BACI S-adenosylmethionine:tRNA ribosyltransferase-isomerase; OS = Terribacillus sp. 7520-G OX=2025389 GN=queA PE=3 SV=1
MDIKDYDFHLPEELIAQTPLQDRTASRLLVLNREARTMEHRHFADIGDYLKPGDCLVLNDTRVLPARLYGIKKDTQAKVEILLLKQMEGDSWEVLVKPAKKVKVGTELSFGDGKLTAVCKELLEHGGRIIEFKYDGIFYEVLEELGEMPLPPYIKEQLPDQERYQTVYAKEKGSAAAPTAGLHFTKELLADLQEKGVEIAFITLHVGLGTFRPVSVESIEEHEMHAEFYQMSQETADQLTRIRENGGRIISVGTTSTRTLETIARDHDGKFVAASGWTDIFIYPGFTYRAIDGLITNFHLPKSTLIMLVSAFAGRDFILDAYRTAVEERYRFFSFGDAMLIV

SEQ ID NO: 73018 - protein, 340 aa, unidentified
  source 1..340: note = Terriglobus albidus
  REGION 1..340: note = tr|A0A5B9EC84|A0A5B9EC84_9BACT S-adenosylmethionine:tRNA ribosyltransferase-isomerase; OS = Terriglobus albidus OX=1592106 GN=queA PE=3 SV=1
MLVSDFDFHLPEELIAQQPLPERDASRMLVLDRHTGAFRDDSFRSLPSLLRPGDLLVLNNSRVIPARLYATRYGFIGQIEVLLTQQTAPLEWTALVRPGKKVRVGTTLLFADQLQAEVIAAGEFGERTLRFAPVDDFFARLDRIGHIPLPPYMHRPDDEADRERYQTVYNQQPGSAAAPTAGLHFTPRVLDEVKARGVQIATITLHVGLGTFQPVRVERLDEIRLHTEHYTLPEETARAIQSAQREGRRIVAAGTTTVRTLEHCVRTSLEPHSGETNIFLSPGAEFKLVQALLTNFHLPQSTLLMLVSAFAGRENVLRAYNHAVVERYRFFSYGDCMFIA

SEQ ID NO: 73019 - protein, 376 aa, Terriglobus roseus
  REGION 1..376: note = tr|A0A1H4T9P9|A0A1H4T9P9_9BACT S-adenosylmethionine:tRNA ribosyltransferase-isomerase; OS = Terriglobus roseus OX=392734 GN=queA PE=3 SV=1
MRVTDFDFDLPPELIAQHPPAERGDSRMMTVDRTSGALADRHFRDFPSMLRPGDLLVMNDSRVIPARLFARRAGLRTQHNSPAPTGHVEVLLTQPLGEGRWRALVKPGRKVPVGERLLFEQASESGAPHLASETQDRQPAAHLEADVIEAGDFGERTLQFAPAADFFGTLDRLGHMPLPPYIRRSDDEPEDRDRYQTVYAGADTHGSAAAPTAGLHFTPEILQQIKQRGVETAHVTLHVGLGTFQPVRADTLADIRLHEEHYTLPGVTADAILRAKAEGRRIVSVGTTTTRTLEHVAATNQVHAHSGSTSIFLQPGHRFALVDALLTNFHLPKSTLLMLVSAFAGTGGREKVLAAYEHAVHKHYRFFSYGDCMFLS

SEQ ID NO: 73020 - protein, 375 aa, Terriglobus roseus
  REGION 1..375: note = tr|A0A1G7H3H3|A0A1G7H3H3_9BACT S-adenosylmethionine:tRNA ribosyltransferase-isomerase; OS = Terriglobus roseus OX=392734 GN=queA PE=3 SV=1
MLTYCPAVSIKNVRVSDFDFHLPPELIAQHPPAERGNSRMLLIDRNTGNYTDAHFRDFPSQLNEGDLLILNNSRVIPARLFARRAGLRTQHNSPAPTGQVEVLLTQPLGNDRWRALVKPGRKVPTGEHLIFGDNVLEAEVIESGDFGERTLQYAPTQDFFGALEQLGHMPLPPYIHRSEEDEEEDRTRYQTVYAGANTHGSAAAPTAGLHFTPEILEQIKARGVQIEHITLHVGLGTFQPVRVEDLADIRLHEEPYTLPAATADAINKAKSEGRRIIAVGTTTTRTLEHIAAINRIEPHSGTTSIFLQPGHRFQLVNALLTNFHLPKSTLLMLVSALAETEDQTITGREKILRAYAHAVGGKYRFFSYGDCMFLS

SEQ ID NO: 73021 - protein, 356 aa, Terriglobus saanensis
  REGION 1..356: note = tr|E8UZ76|E8UZ76_TERSS S-adenosylmethionine:tRNA ribosyltransferase-isomerase OS=Terriglobus saanensis (strain ATCC BAA-1853 / DSM 23119 / SP1PR4) OX=401053; GN = queAPE=3 SV=1
MRVSDFHFDLPPELIAQKPPVERDAARMLTVDRSTGHLEDKNFLDLPDLLRKGDLLVLNNSRVIPARLFARRAGLRTQSSSPAPSGQIEVLLTQPFGGGRWRALVKPGRKVQVGERLVFGEDELQAEVMETGEFGERTLRFAPNPDFFATLERIGHMPLPPYIHRADSAEDRSRYQTVFSDLELKGSAAAPTAGLHFTPETLNKIQSKGVQVQQITLHVGLGTFQPLRVEDLSEIRLHEEPYTLPESTAEAINRAKAEGRRVVAVGTTTVRTLEHCASQDPGQPLAPHSGTTSIFLSPGYEFRVVDALLTNFHLPQSTLLMLVSAFAGREQVLAAYRHAVESRYRFFSYGDCMFLS

SEQ ID NO: 73022 - protein, 322 aa, unidentified
  source 1..322: note = Terrimicrobium sacchariphilum
  REGION 1..322: note = tr|A0A146GDF3|A0A146GDF3_TERSA S-adenosylmethionine:tRNA ribosyltransferase-isomerase; OS = Terrimicrobium sacchariphilum OX=690879 GN=queA PE=3; SV = 1
MLVSDFDFDLPPELIASRPLPDRDGSRMMVVDRSTGEITHRSFRDFPSYLAPGDLVVLNDSRVIKARLRTPDQRTELLLLEPVDSSAWKCLGKPGRRLRIGMSMEIAGTVATVRDILPDGERVVEFASPPDLQTHGAMPIPPYFRREADAEDDVRYQTVFADEPGSVAAPTAGLHFTPELLSTLPHAFLTLHVGIGTFLPVKVDRVADHVMHEERYSISPEAAQAINAAKRIVAIGTTASRVLESQPAGPIQPHSGSTAIFIHPGYHFKHVGALLTNFHLPKSTLIMLVSALAGTDLIRRAYEEAVRERYRFFSYGDCMLVV

SEQ ID NO: 73023 - protein, 349 aa, Terrimonas sp.
  REGION 1..349: note = tr|A0A2T7QDX5|A0A2T7QDX5_9BACT S-adenosylmethionine:tRNA ribosyltransferase-isomerase; OS = Terrimonas sp. NS-102 OX=2171976 GN=queA PE=3 SV=1
MKLSQFRFDLPLNLIAQHPAKKREDARMMVVHRDTGNIENKHFRDVLDYFDDKDVFVVNNTKVFPARMYGRKEKTGAKIEVFLLRELNHQNKLWDVIVDPARKIRVGNKLYFGESEDLVAEVIDNTTSRGRTIRFLFDGTDEEFKTVLNTLGETPLPKYIKRKPDEEDRERYQTVYAKHEGAVAAPTAGLHFSIELIKRLEIKGIRFAEVTLHTGLGTFRPIEVEDLSKHKMDAEYYRIEDKACAIVNKARTSGKRICSVGTTTMRALESSFTAEKLLKPSEGWTNTFIHPPYNFSIADSLITNFHLPKTSLLIMTCAFAGYDLAMEAYKKAIKDKYRFFSYGDAMLVL

SEQ ID NO: 73024 - protein, 408 aa, Terrimonas sp.
  REGION 1..408: note = tr|A0A2T7QD87|A0A2T7QD87_9BACT S-adenosylmethionine:tRNA ribosyltransferase-isomerase; OS = Terrimonas sp. NS-102 OX=2171976 GN=DC498_05150 PE=3; SV = 1
MHPKYLSIQDFTYHLPDNRIAQHPLADRDASKLLVYKDGNIAEDIYRNIAAHIPAGSLLVFNNTKVVEARLKFKKPSGGSIEIFCLSPHSQYHDVTAAMLQKEKVWWNCLIGGASKWKPGMQLEKIISAPAGDIVLKAAIVERNPENFVVELSWQPGDLSFAEILHYTGEIPLPPYMKRGVEKEDEERYQTIYAEHHGSVAAPTAGLHFTDEIFASFTERNINTGFVTLHVGAGTFKPVKAAHMHEHAMHAEFIEVAAATIEQLSEYADNIICVGTTSLRTIESLYWAGVKIIQQPGITEDDIGINQWEVYDALNAMHIPVKDALNALLKWLRQNNLQKLVTQTQILIAPGYDFRMIKGLITNFHQPQSTLLLLVAAIIGDDWRGVYEYALENNFRFLSYGDGCLLFI

SEQ ID NO: 73025 - protein, 341 aa, unidentified
  source 1..341: note = Terrisporobacter glycolicus
  REGION 1..341: note = tr|A0A1I3STS3|A0A1I3STS3_9FIRM S-adenosylmethionine:tRNA ribosyltransferase-isomerase; OS = Terrisporobacter glycolicus OX=36841 GN=queA PE=3 SV=1
MKTSDFYFDLPEELIAQVPILDRSSSKLMVVDKETGEVSHKIFKDIIDYLNPGDCLVLNDTRVIPARLIGSKEGTGGKIEFLLLKRNEDDTWETLVKPGKRAKIGTRFSFGEGKLIAEVVGMGDDGARIVKFEYEGIFEEVLDELGNMPLPPYITERLEERERYQTVYSKHNGSAAAPTAGLHFTDELLQKMKDKGIDLAFVTLHVGLGTFRPVKVDDVLEHDMHSEYYMVTQEAADKINRAKENGKKVITVGTTSTRTIESVADENGKMKAASGWTKIFIYPGYKFKVVDKLITNFHLPESTLIMLVSALAGKENVLNAYNSAVENHYRFFSFGDAMFIK

SEQ ID NO: 73026 - protein, 343 aa, unidentified
  source 1..343: note = Terrisporobacter glycolicus
  REGION 1..343: note = tr|A0A354KMI5|A0A354KMI5_9FIRM S-adenosylmethionine:tRNA ribosyltransferase-isomerase; OS = Terrisporobacter glycolicus OX=36841 GN=queA PE=3 SV=1
  VARIANT 181..182: note = Xaa can be any naturally occurring amino acid
MKTSDFYFDLPEELIAQVPILDRSSSKLMVLDKETGEVSHKIFKDIIDYLNPGDCLVLNDTRVIPARLIGSKEGTGGKIEFLLLKRNEDDTWETLVKPGKRAKIGTRFSFGEGKLIAEVVGMGDDGARIVKFEYEGIFEEVLDELGNMPLPPYITKRLEERERYQTVYSKHNGSAAAPTAXXGLHFTDELLQKMKDKGIDLAFVTLHVGLGTFRPVKVDDVLEHDMHSEYYMVTQEAADKINRAKENGKKVITVGTTSTRTIESVADENGKMKAASGWTKIFIYPGYKFKVVDNLITNFHLPESTLIMLVSALAGKENVLNAYNCAVENHYRFFSFGDAMFIK

SEQ ID NO: 73027 - protein, 341 aa, unidentified
  source 1..341: note = Terrisporobacter othiniensis
  REGION 1..341: note = tr|A0A0B3VXR8|A0A0B3VXR8_9FIRM S-adenosylmethionine:tRNA ribosyltransferase-isomerase; OS = Terrisporobacter othiniensis OX=1577792 GN=queA PE=3; SV = 1
MKTSDFYFDLPEELIAQVPILDRSSSKLMVLDKETGEVSHKIFKDIIDYLNPGDCLVLNDTRVIPARLIGSKEGTGGKIEFLLLKRNEDDTWETLVKPGKRAKIGTRFSFGEGKLIAEVVGMGDDGARIVKFEYEGIFEEVLDELGNMPLPPYITERLEERERYQTVYSKHNGSAAAPTAGLHFTDELLQKIKDKGVDLAFVTLHVGLGTFRPVKVDDVLEHDMHSEYYMVTQEAADKINKAKENGNRVITVGTTSTRTIESVADENGRMKAASGWTKIFIYPGYKFKVVDNLITNFHLPESTLIMLVSALAGKENVLNAYKCAVENHYRFFSFGDAMFIK

SEQ ID NO: 73028 - protein, 362 aa, unidentified
  source 1..362: note = Testudinibacter aquarius
  REGION 1..362: note = tr|A0A4V2W2F4|A0A4V2W2F4_9PAST S-adenosylmethionine:tRNA ribosyltransferase-isomerase; OS = Testudinibacter aquarius OX=1524974 GN=queA PE=3 SV=1
MQVSDFYFELPDELIARYPKAQRSSSRLLCLNGETGELQHRQFADVLDLVNAGDLLVFNNTRVIPARMFGRKSSGGKLEVLVERVLGEKSCLAHVRASKAPQAGSQIILGEDKLGADNGIPFVMKARHDTLFELEVVGDIPLLAVLQQIGHIPLPPYIDRPDEEMDQERYQTVYNQVPGAVAAPTAGLHFDQALLQQLTEKGVNFAFVTLHVGAGTFQPVRVEKVEDHHMHAEYVEVDEQTVQAVLDTKAAGKRVIAVGTTSVRSIESAALAAAETAQPHLLAPYFSDTTIFLYPGKPFRVVDALITNFHLPESTLVMLVSAFAGYRNTMCAYKSAVAEQYRFFSYGDAMFISKNPMVKGLE

SEQ ID NO: 73029 - protein, 343 aa, Tetragenococcus halophilus
  REGION 1..343: note = tr|A0A424XR47|A0A424XR47_TETHA S-adenosylmethionine:tRNA ribosyltransferase-isomerase; OS = Tetragenococcus halophilus subsp. halophilus DSM 20339; OX = 1123358 GN=queA PE =3 SV=1
MLTTEDFDFDLPEELIAQTPLEDRTSSRLLVLDSKTGKLQDKHFYNIIDELHPGDALVMNDTRVLPARLYGEKEETGAHLEVLLLNNTEGDVWETLVKPAKRAKVGTQITFGDGRIKAVVEEELDHGGRMIRFSYEGIFLENLEALGEMPLPPYIKEKLDDPERYQTVYAKENGSAAAPTAGLHFTQELLDKIQQKGIELVYLTLHVGLGTFRPVSVENIEDHDMHSEFYRLTDNAADRLNQVKAQGGKIVAVGTTSIRTLETIGTKFNGEIKADSGWTDIFITPGYQFKVVDAFSTNFHLPKSTLVMMVSAFAGRDNILNAYQHAVDERYRFFSFGDAMFIK

SEQ ID NO: 73030 - protein, 343 aa, Tetragenococcus halophilus
  REGION 1..343: note = tr|A0A3G5FGM4|A0A3G5FGM4_TETHA S-adenosylmethionine:tRNA ribosyltransferase-isomerase; OS = Tetragenococcus halophilus OX=51669 GN=queA PE=3 SV=1
MLTTEDFDFDLPEELIAQTPLEDRTSSRLLVLDSKTGKLQDKHFYDIIDELHPGDALVMNDTRVLPARLYGEKEETGAHLEVLLLNNTEGDVWETLVKPAKRAKVGTQITFGDGRIKAVVEEELDHGGRMIRFSYEGIFLENLEALGEMPLPPYIKEKLDDPERYQTVYAKENGSAAAPTAGLHFTQELLDKIQQKGIELVYLTLHVGLGTFRPVSVENIEDHDMHSEFYRLTDNAADRLNQVKAQGGKIVAVGTTSIRTLETIGTKFNGEIKADSGWTDIFITPGYQFKVVDAFSTNFHLPKSTLVMMVSAFAGRDNILNAYQHAVDERYRFFSFGDAMFIK

SEQ ID NO: 73031 - protein, 343 aa, Tetragenococcus koreensis
  REGION 1..343: note = tr|A0A3G5F792|A0A3G5F792_9ENTE S-adenosylmethionine:tRNA ribosyltransferase-isomerase; OS = Tetragenococcus koreensis OX=290335 GN=queA PE=3 SV=1
MLTTEDFDFDLPEELIAQTPLTDRSSSRLLVLDSKTGKMQDKHFYDIIDELHPGDALVMNDTRVLPARLYGQKEDTGGHLEVLLLNNTEGDVWETLVKPAKRAKAGTKISFGDGRLKAVVEEELEHGGRMIRFSYEGIFLENLEALGEMPLPPYIKKKLDDPERYQTVYAKENGSAAAPTAGLHFTEELLNKIQEKGIELVYLTLHVGLGTFRPVSVENIEDHDMHSEFYRLTEDSAERLNQVKNEGGRIVAVGTTSIRTLETIGTKFEGKIKADSGWTDIFITPGYQWKIVDAFSTNFHLPKSTLVMMVSAFAGRDNILTAYQHAVEERYRFFSFGDAMFVK

SEQ ID NO: 73032 - protein, 343 aa, Tetragenococcus muriaticus
  REGION 1..343: note = tr|A0A091C7T7|A0A091C7T7_9ENTE S-adenosylmethionine:tRNA ribosyltransferase-isomerase; OS = Tetragenococcus muriaticus 3MR10-3 OX=1302648 GN=queA; PE = 3 SV=1
MLTTEDFDFDLPEELIAQTPLNDRSSSRLLVLDSKTGKTQDKHFYDIIDELSPGDALVMNDTRVLPARLYGEKEDTGGHLEVLLLNNPEGDVWETLVKPAKRAKVGTQISFGDGRLHAVVEEELDHGGRMIRFSYEGIFLENLEALGEMPLPPYIKTKLEDPERYQTVYAKENGSAAAPTAGLHFTEELLNKIQEKGIELVYLTLHVGLGTFRPVSVENIEDHDMHSEFYRLTEESADRLNQVKSNGGKIVAVGTTTIRTLESIGTKFDGQIKADSGWTDIFITPGYQWKIVDAFSTNFHLPKSTLVMMVSAFAGRDNILSAYQHAVEERYRFFSFGDAMFIK

SEQ ID NO: 73033 - protein, 343 aa, Tetragenococcus muriaticus; identical to SEQ ID NO: 73032
  REGION 1..343: note = tr|A0A091C975|A0A091C975_9ENTE S-adenosylmethionine:tRNA ribosyltransferase-isomerase; OS = Tetragenococcus muriaticus PMC-11-5 OX=1302649 GN=queA; PE = 3 SV=1

SEQ ID NO: 73034 - protein, 343 aa, Tetragenococcus osmophilus
  REGION 1..343: note = tr|A0A3G5FB61|A0A3G5FB61_9ENTE S-adenosylmethionine:tRNA ribosyltransferase-isomerase; OS = Tetragenococcus osmophilus OX=526944 GN=queA PE=3 SV=1
MLTTEDFDFDLPEELIAQTPLTDRASSRLLVLDSKTGNTQDKHFYDIIDELNPGDALVMNDTRVLPARLYGEKEDTGGHLEVLLLNNPEGDTWETLVKPAKRAKVGTQISFGDGRLRAVVEEELDHGGRMIRFSYEGIFLENLEALGEMPLPPYIKTKLDDPERYQTVYAKENGSAAAPTAGLHFTEDLLNKIQEKGIELVYLTLHVGLGTFRPVSVENIEDHDMHSEFYRLTEDSADRLNQVRDNGGKIVAVGTTSIRTLETIGTKFDGQIKADSGWTDIFITPGYQWKVVDTFSTNFHLPKSTLVMMVSAFAGRDNILNAYQHAVEERYRFFSFGDAMFIK

SEQ ID NO: 73035 - protein, 347 aa, unidentified
  source 1..347: note = Tetzosporium hominis
  REGION 1..347: note = tr|A0A264W0K2|A0A264W0K2_9BACL S-adenosylmethionine:tRNA ribosyltransferase-isomerase; OS = Tetzosporium hominis OX=2020506 GN=queA PE=3 SV=1
MKVEDFDFHLPEELIAQTPLADRTSSKLLVADYPNNELHHTTFQHILDELREGDCLILNDTKVMPARLMGVKEETGASVEVLLLTQLADDEWETLVKPAKRVKIGTVISFGDGLLTATCTAIKDHGGRVFKMNYDGVFFEVLDQLGEMPLPPYIHEKLEDRDRYQTVYAKEQGSAAAPTAGLHFTSELLEAMEKKGVKIGYVTLHVGLGTFRPVSVDTIESHEMHAEFYRMPQVTADLINETKAAGGRVVAVGTTSTRTLESVAKKFDGEVKEDSDWTSIFIFPGFEFKVIDAMITNFHLPKSTLVMLVSALTSRDFILDAYQEAIDQRYRFFSFGDAMLIKGKDFK

SEQ ID NO: 73036 - protein, 341 aa, Thalassobacillus cyri
  REGION 1..341: note = tr|A0A1H4FCG0|A0A1H4FCG0_9BACI S-adenosylmethionine:tRNA ribosyltransferase-isomerase; OS = Thalassobacillus cyri OX=571932 GN=queA PE=3 SV=1
MDIKQYDFDLPEELIAQTPLLDRAASRLMVLDKENKTINHRRFSDIREYLRPGDCLVLNDTRVLPARLYGVKEDTGAKVEVLLLHQTEEDEWEVLVKPAKKIKVGTRIIFGEGKLIAQCTAAQEHGGRMLRFEYEGIFLEVLETLGEMPLPPYIKEQLSDSERYQTVYAKEEGSAAAPTAGLHFTKELLKEIEQSGVELAYITLHVGLGTFRPVSVDNIEDHDMHAEFYQVSQETADKLNHVRENGGRIISVGTTSTRTLETIMRDYGKFTEASGWTDIFIYPPYELQAIDGLITNFHLPQSTLIMLVSALAGRAFILDAYQQAVEERYRFFSFGDAMLIL

SEQ ID NO: 73037 - protein, 358 aa, Thalassobacter sp.
  REGION 1..358: note = tr|A0A099T7V6|A0A099T7V6_9RHOB S-adenosylmethionine:tRNA ribosyltransferase-isomerase; OS = Thalassobacter sp. 16PALIMAR09 OX=1225651 GN=queA PE=3; SV = 1
MQLSDFDFDLPEGRIATRPARPRSSARLLVSHGETLHDQRVTDLPKWLRPGDRLVLNNTKVLPARLNGLRPRNSAQGPVEAKVEITLLEPTPEGHWSALAKPLRKLVDGDRVVFSDALEAQVVSRRESDVVLQFNCTGDDFDAALNAAGAMPLPPYIAAKRPADAQDMDDYQTVFARHSGAVAAPTASLHFDAALLQTLRDHGVTFTEVTLHVGAGTFLPVKVDDVTTHKMHAERGNITPEAADQINETRAAGGRIIPVGTTALRLLESAAAEDGTLSAWEGATDIFIYPGYQWKITDALMTNFHLPKSTLMMLVAALMGHEHIMRIYDHALAEQYRFFSYGDSSLLIPPRTAAKGGA

SEQ ID NO: 73038 - protein, 358 aa, unidentified
  source 1..358: note = Thalassobacter stenotrophicus
  REGION 1..358: note = tr|A0A0P1EZ06|A0A0P1EZ06_9RHOB S-adenosylmethionine:tRNA ribosyltransferase-isomerase; OS = Thalassobacter stenotrophicus OX=266809 GN=queA PE=3; SV = 1
MQLSDFDFDLPEGRIATRPARPRSSARLLVSHGETLHDQRVTDLPKWLRPGDRLVLNNTKVLPARLNGLRPRNSAQGPVEAKVEITLLEPTPEGHWSALAKPLRKLVDGDRVVFSDALEAEVVSRRESDVVLQFNCAGDDFDAALNAAGAMPLPPYIAAKRPADAQDMDDYQTVFARHSGAVAAPTASLHFDAALLQKLRDHGVTFTEVTLHVGAGTFLPVKVDDVTTHKMHAERGNITPEAAAQINETRAAGGRIIPVGTTALRLLESAAAEDGTLSAWEGATEIFIYPGYQWKITDALMTNFHLPRSTLMMLVAALMGHEHIMRIYDHALAEQYRFFSYGDSSLLIPPRTAAKGGA

SEQ ID NO: 73039 - protein, 345 aa, Thalassobaculum litoreum
  REGION 1..345: note = tr|A0A1G7Q292|A0A1G7Q292_9PROT S-adenosylmethionine:tRNA ribosyltransferase-isomerase; OS = Thalassobaculum litoreum DSM 18839 OX=1123362 GN=queA; PE = 3 SV=1
MRVDLFDYTLPEERIARFPARPRESARLLDLTGGRMADRVVRDLPDLLRPGDLLLSNDTRVIPARLKGRRGAAGVEVTLHKRDGDAVWRAFARPAKKLRPGDRIVFAEDLAADVTDKGEAGEVTLAFSCGGPALMAALEAHGSMPLPPYIKRAAGEGAEDSQDYQTVFAARDGAVAAPTAGLHFTPALLQAVEAKGVKRALVTLHVGAGTFLPVKADDTDDHVMHTEWGEVSAETARAIAETRATGGRIVATGTTTLRVLEAAANDDGTVPAWSGDTDLFITPGYRFKAVDMLLTNFHLPKSTLLMLVSAFAGRERILAAYDHAIAQGYRFFSYGDACLLERTTP

SEQ ID NO: 73040 - protein, 348 aa, unidentified
  source 1..348: note = Thalassobium sp.
  REGION 1..348: note = tr|C7D7A1|C7D7A1_9RHOB S-adenosylmethionine:tRNA ribosyltransferase-isomerase OS=Thalassobium sp. R2A62; OX = 633131 GN=queA PE=3 SV=1
MKLSDFDFDLPDDRIAVRPTQPRSSARLLLARGDDILDRVVTDLIDILQPGDRLVLNDTRVIPARLSGQRHRNSAQGPVSAAIDVTLLTPQADGAWTALIKPLKKVTEGEDIVFSDDLSATLIGKEDGQGRLKFNLTGDDFDAALAAAGAMPLPPYIAAKRAADAQDHTDYQTVWARHQGAVAAPTASLHFDQPLLEALNAKGIQFTYVTLHVGAGTFLPVKVDNIADHKMHSEWGQITHAAADAINSTTGRVIPVGTTALRLIESAAQNGRLAAWEGPTDIFITPGFKFQIADGLMTNFHLPKSTLMMLVSALMGTQNIKDIYAHALRHEYRFFSYGDSSLLLPQGE

SEQ ID NO: 73041 - protein, 352 aa, unidentified
  source 1..352: note = Thalassobium sp.
  REGION 1..352: note = tr|A0A2G2AGR2|A0A2G2AGR2_9RHOB S-adenosylmethionine:tRNA ribosyltransferase-isomerase; OS = Thalassobium sp. OX=2030825 GN=queA PE=3 SV=1
MKTSDFHFDLPDELIARYSMPERSSSRLLVLNPANGQCSDHIFRDLEQMLNPGDLLVFNNTRVIPARLFGEKASGGKLEALIERVLNEHEALAHVRSSRSPKPGQIIILGGVEVEIVGREGALFHLRFLDERPLFEILDAVGHMPLPPYMERADTEEDRERYQTVYAKAPGAVAAPTAGLHFDEPLLERLRNKGVQFAYVTLHVGAGTFQPVKVDNVLEHEMHAEYIEVTQEVVDAVKATRAAGKRVVAVGTTSVRSLESASQNGEIAPYAADSRIFIYPGYRFRSVDAMITNFHLPESTLIMLVSAFAGRDNTMGAYAHAVANKYRFYSYGDAMFLPCSAPVPAEFQQDAQ

SEQ ID NO: 73042 - protein, 348 aa, unidentified
  source 1..348: note = Thalassobius activus
  REGION 1..348: note = tr|A0A0P1IU21|A0A0P1IU21_9RHOB S-adenosylmethionine:tRNA ribosyltransferase-isomerase; OS = Thalassobius activus OX=1715691 GN=queA PE=3 SV=1
MQLSDFDFDLPDRLIATRPAKPRTSAKLLVATPDRFIDARVSDIAQFFRPGDRLVLNDTKVIPARLTGYRHRDSAQGAVKAKIEVTLLEPKGEGQWSALLKPLKKINEGEVIHFAQDFTATLESKEDGQAILQFEADGDAFEAALQSAGAMPLPPYIAAKRAADDQDKTDYQTVFARHSGAVAAPTASLHFDEALLASLVEMGVQFSHVTLHVGAGTFLPVKVEDVTTHKMHAEWGRVSAEAAAEIKATKAAGGRVIPVGTTALRLIESAARDGEIAPWEGETDIFIYPGFEFHVADALMTNFHLPKSTLMMLVSALMGQERVREIYAHAVENDYRFFSYGDSSLLLP

SEQ ID NO: 73043 - protein, 350 aa, unidentified
  source 1..350: note = Thalassobius autumnalis
  REGION 1..350: note = tr|A0A0N7LX03|A0A0N7LX03_9RHOB S-adenosylmethionine:tRNA ribosyltransferase-isomerase; OS = Thalassobius autumnalis OX=2072972 GN=queA PE=3 SV=1
MKLSDFDFDLPETLIATRPAKPRSSARMLVCDSGAIHDQVAIDLPDWLRPGDRLVLNDTKVIPARLFGERPRLGAEGPTRAKMDVTLLEPRADGTWAALLKPLKKIREGEVIEFSAALSATLEAKEDGQAHLRFNLTGDDFDAALAEAGAMPLPPYIAAKRAADEQDKEDYQTLWAKNAGAVAAPTASLHFDEALMAALEARGVRFTHVTLHVGAGTFLPVKVEDVTTHKMHAEWGQVSEAAAEEMRATKAAGGRVIPVGTTALRLIESAARGGQIAAWEGETDIFIYPGFQFNVTDALMTNFHLPKSTLLMLVSALMGKEVMDQVYAHAVAEGYRFFSYGDASLLIPKG

SEQ ID NO: 73044 - protein, 352 aa, Thalassobius gelatinovorus
  REGION 1..352: note = tr|A0A0P1F620|A0A0P1F620_THAGE S-adenosylmethionine:tRNA ribosyltransferase-isomerase; OS = Thalassobius gelatinovorus OX=53501 GN=queA PE=3 SV=1
MKLSDFDFELPDHLIATRPAKPRPSARLLVSEGDRISDAHVYDLPDWLRPGDRLVLNDTKVIPARLSGERRRQGAEGETRARIEVTLLEPRADGTWAALLKPLKKVREGEDIHFSAALSARLEAKEDGQGLLRFNLAGDDFDAALTAAGMMPLPPYIAAKRASDEQDKQDYQTVFARHPGAVAAPTASLHFDENLLAAIRAKGVETTHVTLHVGAGTFLPVKVEDVTSHKMHAEWGEVSEAAAAEIAATKAAGGRVIPVGTTALRLIESAARGGHIEAWCGETDIFIYPGFEFHVADALMTNFHLPKSTLMMLVSALIGHDRIKQIYDHAVRERYRFFSYGDASLLVPPNRD

SEQ ID NO: 73045 - protein, 349 aa, Thalassobius mediterraneus
  REGION 1..349: note = tr|A0A0N7M284|A0A0N7M284_9RHOB S-adenosylmethionine:tRNA ribosyltransferase-isomerase; OS = Thalassobius mediterraneus OX=340021 GN=queA PE=3 SV=1
MKLSDFDFDLPEDLIATRPAKPRSSARMLVCQGGAISDHQAINLPDFLRPGDRLVLNDTKVIPARLFGERPRMGELGETRAKMDVTLLEPRADGTWAALLKPLKKIREGEVIEFSPALSATLEGKADGQAHLRFNLTGDDFDAALTDAGAMPLPPYIAAKRPADQQDKEDYQTLWAKNTGAVAAPTASLHFDEVLMAALAERGVEFTHVTLHVGAGTFLPVKVEDVTTHKMHAEWGQVTPEAAAEIAATKAAGGRVIPVGTTALRLIESAARSGAIEPWEGETDIFIYPGFQFNVTDALMTNFHLPKSTLLMLVSALMGKAVMDQVYAHAVSNGYRFFSYGDASLLMPK

SEQ ID NO: 73046 - protein, 412 aa, Thalassobius sp.
  REGION 1..412: note = tr|A0A2E9G3R9|A0A2E9G3R9_9RHOB S-adenosylmethionine:tRNA ribosyltransferase-isomerase; OS = Thalassobius sp. OX=1979401 GN=queA PE=3 SV=1
MSVKEIDVKLEDYQYELPKEKIAAYPLKERDSAKLLVYKDGEISHDTFKHLGSFLDKNYSLFFNNTKVLPARMHFRKDTGAIIEVFLLHPEQPTRIVQEAMLVKNDAVWACTIGNLKRWKDDQVLSRQLVVDGKAVELQVQIVDREKRWVKFSWNLFNEPNSDLNFVDVVEAAGNTPLPPYLNRAAEDIDETEYQTVYGKKEGAVAAPTAGLHFTDNMLEAFKTEGRLLDELTLHVGAGTFQPVKVNDIKEHEMHCEQIVVYKYNIENLLQSEKILAVGTTSMRTMESIYWYGVQLIKGDTEQQNLFIKKLYPYQYDDAGLPSRKEALQAVLDFMETNQLEEITGETEILIMPGYDFKICDALITNFHLPESTLILLIAAFIGEDWRKVYEVALNENYRFLSYGDGSLLIRN

SEQ ID NO: 73047 - protein, 351 aa, Thalassococcus halodurans
  REGION 1..351: note = tr|A0A1H5WDX3|A0A1H5WDX3_9RHOB S-adenosylmethionine:tRNA ribosyltransferase-isomerase; OS = Thalassococcus halodurans OX=373675 GN=queA PE=3 SV=1
MKLDDFDFHLPDDLIATRPANPRSSARLLVSDPDGITDAVVTDICKWLRPGDRLVLNDTKVLPARLFGARHREGPEGATQAKMEVTLLEPQADGTWMALVKPLKKVRDGEDIVFSDDLAATVVSRADGQAALKFNLSGDDFDAALGKAGAMPLPPYIAQKRPADEQDKKDYQTVWARVPGAVAAPTASLHFDDALLARLKEHGVSFTHVTLHVGAGTFLPVKVDDVTKHKMHAEWGEVTEQAAAEIAETKAKGGRVIPVGTTALRLIETAARDTGAIVPWCGETDIFIYPGFTFHVADGLMTNFHLPKSTLMMLVSAFAGTQRIRDIYDHAVAEKYRFFSYGDASLLLPNG

SEQ ID NO: 73048 - protein, 349 aa, unidentified
  source 1..349: note = Thalassococcus profundi
  REGION 1..349: note = tr|A0A369TQB0|A0A369TQB0_9RHOB S-adenosylmethionine:tRNA ribosyltransferase-isomerase; OS = Thalassococcus profundi OX=2282382 GN=queA PE=3 SV=1
MKLSDFDFDLPERLIATRPARPRSSARLLVAQGDRIADAVVRDLGDWLRPGDRLVLNDTKVIPARLSGLRRRDGAEGPTEARIEVTLLEPQADGSWSALVKPLKKVRDGEEITFSSDLAAVLETRDDGRARLRFNLAGDDFDAALAKAGAMPLPPYIAAKRPADARDHEDYQTVWARNAGAVAAPTASLHFDTDLLDRLAAQGIGFTHVTLHVGAGTFLPVKVEDVTAHRMHAEWGEVSATAAAEIAATKAAGHRVIPVGTTALRLIETAARDTGAIAPWEGETDIFIYPGFDFRVTDALMTNFHLPKSTLMMLVSALMGQQRVRDIYAHAIAREYRFFSYGDASLLIP

SEQ ID NO: 73049 - protein, 348 aa, Thalassococcus sp.
  REGION 1..348: note = tr|A0A4P6MI27|A0A4P6MI27_9RHOB S-adenosylmethionine:tRNA ribosyltransferase-isomerase; OS = Thalassococcus sp. S3 OX=2017482 GN=queA PE=3 SV=1
MKLSDFDFHLPEHLIATRPAKPRSSARLLVAQGDQISDARVFELPKWLRPGDRLVLNDTRVIPARLTGQRHRAGAQGATSAKIEATLLEPQPDGTWVALIKPLKKLRVGEDVVFSADLSARLTSVRDGQGMLAFNLSGPDFDAALAEAGAMPLPPYIAAKRPADVQDKTDYQTIWARRAGAVAAPTASLHFDEALMQALADAGVLFSFVTLHVGAGTFLPVKVDDVTTHKMHAEWGHVGPAAAAEIAATKVSGGRIIPVGTTALRLIESAGRSGEIRPWEGETDIFIYPGFRFQITDALMTNFHLPKSTLMMLVSALMGQDRVRRIYDHAIAEEYRFFSYGDSSLLIP

SEQ ID NO: 73050 - protein, 304 aa, Thalassolituus oleivorans
  REGION 1..304: note = tr|M5DP62|M5DP62_9GAMM S-adenosylmethionine:tRNA ribosyltransferase-isomerase OS=Thalassolituus oleivorans MIL-1 OX=1298593 GN=queA PE=3 SV=1
MLNPSDLLVFNNTRVIPARLFGEKVSGGKLEALIERVLNEHEALAHVRSSRSPKPGQIIILGGVKVEIVGREGALFHLRFLDDRPLFEILDAVGHMPLPPYMERADTEEDRERYQTVYAKAPGAVAAPTAGLHFDEPLLERLRNKGVQFAYVTLHVGAGTFQPVKVDNVLEHEMHAEYIEVTQEVVDAVKATRAAGKRVVAVGTTSVRSLESASQNGEIAPYAADSRIFIYPGYRFRSVDAMITNFHLPESTLIMLVSAFAGRDNTMGAYAHAVANKYRFYSYGDAMFLPCSAPVPAEFQQDAQ

SEQ ID NO: 73051 - protein, 352 aa, Thalassolituus oleivorans
  REGION 1..352: note = tr|W8G224|W8G224_9GAMM S-adenosylmethionine:tRNA ribosyltransferase-isomerase OS=Thalassolituus oleivorans R6-15 OX=1208320 GN=queA PE=3 SV=1
MKTRDFHFDLPDELIARYSMPERSSSRLLVLNPTDGQCSDYIFRDLEQMLNPSDLLVFNNTRVIPARLFGEKVSGGKLEALIERVLNEHEALAHVRSSRSPKPGQIIILGGVKVEIVGREGALFHLRFLDDRPLFEILDAVGHMPLPPYMERADTEEDRERYQTVYAKAPGAVAAPTAGLHFDEPLLERLRNKGVEFAYVTLHVGAGTFQPVKVDNVLEHEMHAEYIEVTQDVVDAVKSTRAAGKRVVAVGTTSVRSLESASQNGEIAPYAADSRIFIYPGYRFRSVDAIITNFHLPESTLIMLVSAFAGRDNTMGAYAHAVANRYRFYSYGDAMFLPCSAPVPAEFQQDAQ

SEQ ID NO: 73052 - protein, 350 aa, Thalassolituus sp.
  REGION 1..350: note = tr|A0A558NAH4|A0A558NAH4_9GAMM S-adenosylmethionine:tRNA ribosyltransferase-isomerase; OS = Thalassolituus sp. C2-1 OX=2597518 GN=queA PE=3 SV=1
MKTSDFHFDLPDELIARYPMAERSASRLLCLNGATGERAHHTFKDLASMLEPGDLLVFNNTKVIPARLFGEKLSGGKLEALIERVTGEHEALAHLRSSRSPKPGSRILLGGVEVEVVGREGALFQLRFLDERPLLSILDEVGHMPLPPYMERDDAEEDRERYQTVYAEKPGAVAAPTAGLHFDEPLLQVLKEKGVNFAYVTLHVGAGTFQPVKVDNIHDHEMHAEYIEVSQDVVDAVNATRAAGKRVVAVGTTSVRSLESASQSGEIAPFYDESRIFIYPGYRFRSVDAMITNFHLPESTLIMLVSAFAGRDNTMAAYAEAVAQRYRFYSYGDAMFLSRPQPVLNDAQPE

SEQ ID NO: 73053 - protein, 347 aa, Thalassomonas actiniarum
  REGION 1..347: note = tr|A0A0D8CSC5|A0A0D8CSC5_9GAMM S-adenosylmethionine:tRNA ribosyltransferase-isomerase; OS = Thalassomonas actiniarum OX=485447 GN=queA PE=3 SV=1
MRVADFSFDLPEELIARYPKTDRSASRLMALDGASGNIQDLVFTDLVDKLESGDLLVFNNTRVIPARMFGQKASGGKVEVLVERLLDERRVLAHIRASKSPKVGTELLLENQVNATMVARHDALFELEFHGDKSVLTVLDEIGHMPLPPYIDRPDEDSDRERYQTVYNEKPGAVAAPTAGLHFDEALMEKIRAKGVNFAFVTLHVGAGTFQPVRVEEISEHVMHAEYVEVPPEVVQQITDTKKAGGRVVAVGTTSVRSLESAARDALDKGTELKAFYGDTDIFITPGFEFQLVDALVTNFHLSESTLLMLVSAFAGYEHIMQAYRQAVEKEYRFFSYGDAMFLTRKD

SEQ ID NO: 73054 - protein, 349 aa, Thalassomonas sp.
  REGION 1..349: note = tr|A0A553FJG3|A0A553FJG3_9GAMM S-adenosylmethionine:tRNA ribosyltransferase-isomerase; OS = Thalassomonas sp. M1454 OX=2594477 GN=queA PE=3 SV=1
MLVSDFSFDLPTELIARYPQAERSASRLLSLDGNSGELEHLQFNQIIDKLVPGDLLVFNNTRVIPARVFGVKSTGGKIEVLVERVIDDSRVLAHVKASKALKVGNEVQLEGKVNATMVARHGALFELQFHSEQTVLEVLEEIGHMPLPPYIDRPDENSDRERYQTVYNEKPGAVAAPTAGLHFETQLLEKIKDKGVNLAFVTLHVGAGTFQPVKVDQISEHVMHSEYVEVSDEVVEQIKATKAAGHRVVAVGTTSVRSLESAAKKSAEQGKELSAFYGDTDIFITPGYEFKLIDALVTNFHLSESTLLMLVSAFSGYDHIMHAYKQAIADKYRFFSYGDAMFLTRQTTK

SEQ ID NO: 73055 - protein, 347 aa, Thalassomonas viridans
  REGION 1..347: note = tr|A0A0D8DF02|A0A0D8DF02_9GAMM S-adenosylmethionine:tRNA ribosyltransferase-isomerase; OS = Thalassomonas viridans OX=137584 GN=queA PE=3 SV=1
MRVADFSFDLPEELIARYPKTDRSASRLMALDGVSGDIQDLVFTDLVDKLTAGDLLVFNNTRVIPARMFGQKASGGKVEVLVERLLDDRRALAHIRASKAPKEGSELLLENQVKATMVARHDALFELEFHGEKSVLEVLDAIGHMPLPPYIDRPDEDSDRERYQTVYNEKPGAVAAPTAGLHFDEVLMEKLRAKGVNFAFVTLHVGAGTFQPVRVEEISEHVMHAEYVEVPQEVVEQIAETKKAGGRVVAVGTTSVRSLESAARDALDKGTELKAFYGDTDIFITPGFEFQLVDALVTNFHLSESTLLMLVSAFAGYEHIMQAYRQAVEKEYRFFSYGDAMFLTRKA

SEQ ID NO: 73056 - protein, 355 aa, unidentified
  source 1..355: note = Thalassospira alkalitolerans
  REGION 1..355: note = tr|A0A1Y2LEY0|A0A1Y2LEY0_9PROT S-adenosylmethionine:tRNA ribosyltransferase-isomerase; OS = Thalassospira alkalitolerans OX=1293890 GN=queA PE=3; SV = 1
MKVDLFDFELPRDCIAEHPANPRDSARMLDLTGGETPAGMMDRIVRELPDILRPGDLLISNDTRVIPARLFGKRGDAGIEVTLHKQEGLAQWRAFAKPARKLRIGEIFKVTDDFEAEVIEKKDGGEVLLRFNVAGADLIAGLEKYGVMPLPPYIRRDKGGDNQDRSDYQTIFARHDGAVAAPTAGLHFTPELLANLDARGIKRRTITLHVGAGTFLPVKVDDTNDHKMHAEWGSISPEIATLINETRANGGRVIAVGTTSLRLLESAAREDGVVEPFENDTDIFITPGYKFRAVDMLLTNFHLPRSTLFMLVSAFAGYDRMKTAYGHAIENKYRFYSYGDCSLLECASKIEKADD

SEQ ID NO: 73057 - protein, 350 aa, unidentified
  source 1..350: note = Thalassospira lohafexi
  REGION 1..350: note = tr|A0A2N3LBW4|A0A2N3LBW4_9PROT S-adenosylmethionine:tRNA ribosyltransferase-isomerase; OS = Thalassospira lohafexi OX=744227 GN=queA PE=3 SV=1
MKVDLFDFELPRERIAEHPASPRDAARMLDLSSADIQDRIVRELPDILRPGDLLISNDTRVIPARLFGKRGEAKVEVTLHKQEGLGTWVAFAKPAKKLRIGETFWVNDEFEAEVLDKKDGGEVVLRFNKSGADLIAALEKYGVMPLPPYIRRETGGDDQDKSDYQTIFAQKDGAVAAPTAGLHFTPDLLANLDARGIKRRTITLHVGAGTFLPVKVDDTENHKMHAEWGSISPEIANLINETRANGGRVVAVGTTSLRLLESAAREDGVVEPFEAETDIFITPGYKFRAVDMLLTNFHLPRSTLFMLVSAFAGFDRMKAAYAHAIENEYRFYSYGDCSLLECASKIDART

SEQ ID NO: 73058 - protein, 350 aa, Thalassospira lucentensis
  REGION 1..350: note = tr|A0A367V481|A0A367V481_9PROT S-adenosylmethionine:tRNA ribosyltransferase-isomerase; OS = Thalassospira lucentensis MCCC 1A00383 = DSM 14000; OX = 1123365 GN=queA PE=3 S V=1
MKVDLFDFELPRERIAEHPASPRDAARMLDLSAADIQDRIVRELPDILRPGDLLISNDTRVIPARLFGKRGEAKVEVTLHKQEGLGTWVAFAKPAKKLRIGETFFVNDEFEAEVLDKKDGGEVVLRFNKSGADLIAALEEYGVMPLPPYIRRETGGDDQDKSDYQTIFAQKDGAVAAPTAGLHFTPELLANLDARGIKRRTITLHVGAGTFLPVKVDDTENHKMHAEWGSISPEIANLINETRANGGRVVAVGTTSLRLLESAAREDGVVEPFEAETDIFITPGYKFRAVDMLLTNFHLPRSTLFMLVSAFAGFDRMKAAYAHAIENEYRFYSYGDCSLLECANKIDART

SEQ ID NO: 73059 - protein, 347 aa, Thalassospira lucentensis
  REGION 1..347: note = tr|A0A3D5NAF1|A0A3D5NAF1_9PROT S-adenosylmethionine:tRNA ribosyltransferase-isomerase (Fragment) OS=Thalassospira lucentensis OX=168935; GN = DHR80_12200 PE=3 SV=1
MKVDLFDFELPRERIAEHPASPRDAARMLDLSAADIQDRIVRELPDILRPGDLLISNDTRVIPARLFGKRGEAKVEVTLHKQEGLGTWVAFAKPAKKLRIGETFWVNDEFEAEVLDKKDGGEVVLRFNKSGADLIAALEKYGVMPLPPYIRRETGGDDQDKSDYQTIFAQKDGAVAAPTAGLHFTPELLANLDARGINRRTITLHVGAGTFLPVKVDDTENHKMHSEWGSISPEIADLINETRANGGRVVAVGTTSLRLLESAAREDGVVEPFEAETDIFITPGYKFRAVDMLLTNFHLPRSTLFMLVSAFAGFERMKAAYAHAIENEYRFYSYGDCSLLECASKID

SEQ ID NO: 73060 - protein, 352 aa, unidentified
  source 1..352: note = Thalassospira marina
  REGION 1..352: note = tr|A0A2N3KWN3|A0A2N3KWN3_9PROT S-adenosylmethionine:tRNA ribosyltransferase-isomerase; OS = Thalassospira marina OX=2048283 GN=queA PE=3 SV=1
MKVDLFDFELPRECIAEHPADPRDSARMLDLSAGQMNDRIVRELPDILRPGDLLISNDTRVIPARLFGKRGDAKIEVTLHKQEGLAQWRAFAKPAKKLRVGEIFKVNDSFEAEVMDKKDGGEVLLRFNVAGADLIAALEKYGVMPLPPYIRREAGGDDKDRHDYQTIFAQHDGAVAAPTAGLHFTPELLANLDARGVLRRTITLHVGAGTFLPVKVDDTDDHKMHAEWGSISPEIAALVNETRAKGGRVVAVGTTSLRLLESAANEDGIVQPFENETSIFITPGYKFRGVDLLLTNFHLPRSTLFMLVSAFAGFERMKAAYDHAIAQKYRFYSYGDCSLLECANKVEALKKS

SEQ ID NO: 73061 - protein, 352 aa, unidentified
  source 1..352: note = Thalassospira mesophila
  REGION 1..352: note = tr|A0A1Y2L0L9|A0A1Y2L0L9_9PROT S-adenosylmethionine:tRNA ribosyltransferase-isomerase; OS = Thalassospira mesophila OX=1293891 GN=queA PE=3 SV=1
MKVDLFDFDLPRECIAEHPADPRDSARMLDLTGGQMSDRIVRELPDMLRPGDLLISNDTRVIPARLFGKRGEAKIEVTLHKQEGLGQWRAFAKPAKKLRIGEIFKVNEAFEAEVMDKKDGGEVLLRFNVSGADLIAALEKYGVMPLPPYIRRDAGGDDQDRHDYQTIFARHDGAVAAPTAGLHFTPELLANLDARGIARRTITLHVGAGTFLPVKVDDTDDHKMHAEWGSISPEIAALINETRARGGRIVAVGTTSLRLLESAAREDGIVEPFENETSIFITPGYKFRGVDLLLTNFHLPRSTLFMLVSAFAGYDRMKAAYNHAIAQKYRFYSYGDCSLLECANQVEALKKS

SEQ ID NO: 73062 - protein, 349 aa, unidentified
  source 1..349: note = Thalassospira permensis
  REGION 1..349: note = tr|A0A074J997|A0A074J997_9PROT S-adenosylmethionine:tRNA ribosyltransferase-isomerase; OS = Thalassospira permensis NBRC 106175 OX=1353532 GN=queA; PE = 3 SV=1
MKVDLFDFDLPRECIAEHPANPRDSARMLDLTGGQTHDRIVRELPEILRPGDLLISNDTRVIPARLFGKRGDAGIEVTLHKQEGLAQWRAFAKPAKKLRVGETFKVADDFEAEVMEKKDGGEVLLRFNVAGADLIAALEKYGVMPLPPYIRRDKGGDHQDRSDYQTIFAQHDGAVAAPTAGLHFTPELLAAIDARGIARRTITLHVGAGTFLPVKVDDTEDHKMHAEWGSISPEIASLINETRAKGGRVVAVGTTSLRLLESAAREDGVVEPFENETDIFITPGYKFRAVDMLLTNFHLPRSTLFMLVSAFAGFERMKAAYGHAIENKYRFYSYGDCSLLECASKIEKS

SEQ ID NO: 73063 - protein, 350 aa, unidentified
  source 1..350: note = Thalassospira povalilytica
  REGION 1..350: note = tr|A0A2N3KQ00|A0A2N3KQ00_9PROT S-adenosylmethionine:tRNA ribosyltransferase-isomerase; OS = Thalassospira povalilytica OX=732237 GN=queA PE=3 SV=1
MKVDLFDFELPRERIAEHPANPRDAARMLDLSAGGMTDRIVRELPDILRPGDLLISNDTRVIPARLFGKRGDAKVEVTLHKQEGLAEWVAFAKPAKKLRIGETFKVNDEFEAEVLDKKDGGEVTLKFNRSGADLIAALEKYGVMPLPPYIRREAGGSDQDKSDYQTIFAQKDGAVAAPTAGLHFTPELLANLDARGINRRTITLHVGAGTFLPVKVDDTDDHKMHAEWGSISKEIADLINETRANGGRVVAVGTTSLRLLESAAREDGVVEPFEAETDIFITPGYKFRAVDMLLTNFHLPRSTLFMLVSAFAGFERMKAAYNHAIENEYRFYSYGDCSLLECASKIDART

SEQ ID NO: 73064 - protein, 350 aa, Thalassospira profundimaris
  REGION 1..350: note = tr|A0A367VC45|A0A367VC45_9PROT S-adenosylmethionine:tRNA ribosyltransferase-isomerase; OS = Thalassospira profundimaris OX=502049 GN=queA PE=3 SV=1
MKVDLFDFELPRERIAEHPANPRDAARMLDLSAGGMTDRIVRELPDILRPGDLLISNDTRVIPARLFGKRGDAKVEVTLHKQEGLAEWVAFAKPAKKLRIGETFKVNDEFEAEVLDKKDGGEVTLKFNRSGADLIAALEKYGVMPLPPYIRREAGGSDQDKSDYQTIFAQKDGAVAAPTAGLHFTPELLANLDARGINRRTITLHVGAGTFLPVKVDDTDDHKMHAEWGSISKEIADLINETRARGGRVVAVGTTSLRLLESAAREDGVVEPFEAETDIFITPGYKFRAVDMLLTNFHLPRSTLFMLVSAFAGFERMKAAYNHAIENEYRFYSYGDCSLLECASKIDART

SEQ ID NO: 73065 - protein, 350 aa, Thalassospira profundimaris
  REGION 1..350: note = tr|K2MBM1|K2MBM1_9PROT S-adenosylmethionine:tRNA ribosyltransferase-isomerase OS=Thalassospira profundimaris WP0211 OX=1177928 GN=queA PE=3 SV=1
MKVDLFDFELPRDRIAEHPANPRDAARMLDLSGDGTQDRIVRELPDVLRPGDLLISNDTRVIPARLFGKRGEAKVEVTLHKQEGLGTWVAFAKPAKKLRIGETFKVNDEFEAEVLAKKDGGEVTLRFNKTGADLIAALEEFGVMPLPPYIRRDAGGDDQDKSDYQTIFAQKDGAVAAPTAGLHFTPELLANLDARGINRRTITLHVGAGTFLPVKVDDTDDHKMHAEWGSISKEIADLINETRANGGRVVAVGTTSLRLLESAAREDGVVEPFEAETDIFITPGYKFRAVDMLLTNFHLPRSTLFMLVSAFAGFERMKAAYQHAIDNEYRFYSYGDCSLLECANKIDART

SEQ ID NO: 73066 - protein, 349 aa, Thalassospira sp.
  REGION 1..349: note = tr|A0A2E2SYM3|A0A2E2SYM3_9PROT S-adenosylmethionine:tRNA ribosyltransferase-isomerase; OS = Thalassospira sp. OX=1912094 GN=queA PE=3 SV=1
MKVDLFDFDLPRECIAEHPANPRDSARMLDLTGGETHDRIVRELPDILQPGDLLISNDTRVIPARLFGKRGDAGIEVTLHKQEGLAQWRAFAKPAKKLRVGETFRVADDFEAEVMEKKDGGEVLLRFNVAGADLIAALEKYGVMPLPPYIRRDKGGDDQDRSDYQTIFAQHDGAVAAPTAGLHFTPELLAAIDARGIERRTITLHVGAGTFLPVKVDDTDDHKMHAEWGSISPEIANLINDTRARGGRVIAVGTTSLRLLESAAREDGVVEPFENETDIFITPGYKFRAVDMLLTNFHLPRSTLFMLVSAFAGFDRMKAAYGHAIENRYRFYSYGDCSLLECASKIEKS

SEQ ID NO: 73067 - protein, 350 aa, Thalassospira sp.
  REGION 1..350: note = tr|A0A2E4M204|A0A2E4M204_9PROT S-adenosylmethionine:tRNA ribosyltransferase-isomerase; OS = Thalassospira sp. OX=1912094 GN=queA PE=3 SV=1
MKVDLFDFELPRERIAEHPANPRDAARMLDLSGEGMQDRIVRELPDILRSGDLLISNDTRVIPARLFGKRGDAKVEVTLHKQEGLGTWVAFAKPAKKLRIGETFKVNDEFEAEVLAKKDGGEVTLRFNKSGADLIAALEKYGVMPLPPYIRRDAGGDDQDKSDYQTIFAQKDGAVAAPTAGLHFTPELLANLDARGINRRTITLHVGAGTFLPVKVDDTDDHKMHAEWGSISKEIADLINETHANGGRVVAVGTTSLRLLESAAREDGVVEPFEAETDIFITPGYKFRAVDMLLTNFHLPRSTLFMLVSAFAGFERMKAAYQHAIDNEYRFYSYGDCSLLECANKIDART

SEQ ID NO: 73068 - protein, 349 aa, Thalassospira xiamenensis
  REGION 1..349: note = tr|A0A367W464|A0A367W464_9PROT S-adenosylmethionine:tRNA ribosyltransferase-isomerase; OS = Thalassospira xiamenensis OX=220697 GN=queA PE=3 SV=1
MKVDLFDFDLPRECIAEHPANPRDSARMLDLTGGKTHDRIVRELPEILRPGDLLISNDTRVIPARLFGKRGEAGIEVTLHKQEGLAQWRAFAKPAKKLRVGETFKVADDFEAEVMEKKDGGEVLLRFNVAGADLIAALEKYGVMPLPPYIRRDKGGDHQDRSDYQTIFAQHDGAVAAPTAGLHFTPELLAAIDARGIARRTITLHVGAGTFLPVKVDDTEDHKMHAEWGSISPEIASLINETRARGGRVVAVGTTSLRLLESAAREDGVVEPFENETDIFITPGYKFRAVDMLLTNFHLPRSTLFMLVSAFAGFERMKAAYGHAIENKYRFYSYGDCSLLECASKIEKS

SEQ ID NO: 73069 - protein, 349 aa, Thalassospira xiamenensis
  REGION 1..349: note = tr|A0A0B4Y1X5|A0A0B4Y1X5_9PROT S-adenosylmethionine:tRNA ribosyltransferase-isomerase; OS = Thalassospira xiamenensis M-5 = DSM 17429 OX=1123366; GN = queA PE=3 SV=1
MKVDLFDFDLPRECIAEHPANPRDSARMLDLTGGKTHDRIVRELPEILRPGDLLISNDTRVIPARLFGKRGDAGIEVTLHKQEGLAQWRAFAKPAKKLRVGETFKVADDFEAEVMEKKDGGEVLLRFNVAGADLIAALEKYGVMPLPPYIRRDKGGDDQDRSDYQTIFAQHDGAVAAPTAGLHFTPELLAAIDARGIARRTITLHVGAGTFLPVKVDDTEDHKMHAEWGSISPEIASLINETRAKGGRVVAVGTTSLRLLESAAREDGVVEPFENETDIFITPGYRFRAVDMLLTNFHLPRSTLFMLVSAFAGFERMKAAYGHAIENRYRFYSYGDCSLLECASKIEKS

SEQ ID NO: 73070 - protein, 349 aa, Thalassospira xianhensis
  REGION 1..349: note = tr|A0A367U730|A0A367U730_9PROT S-adenosylmethionine:tRNA ribosyltransferase-isomerase; OS = Thalassospira xianhensis MCCC 1A02616 OX=1177929; GN = queA PE=3 SV=1
MKVDLFDFDLPRECIAEHPANPRDSARMLDLTGGETHDRIVRELPDILQPGDLLISNDTRVIPARLFGKRGDAGIEVTLHKQEGLAQWRAFAKPAKKLRVGETFRVADDFEAEVMEKKDGGEVLLRFNVAGADLIAALEKYGVMPLPPYIRRDKGGDDQDRSDYQTIFAQHDGAVAAPTAGLHFTPELLAAIDARGIERRTITLHVGAGTFLPVKVDDTDDHKMHAEWGSISPEIANLINEARAKGGRVIAVGTTSLRLLESAAREDGVVEPFENETDIFITPGYKFRAVDMLLTNFHLPRSTLFMLVSAFAGFDRMKAAYGHAIENRYRFYSYGDCSLLECASKIEKS

SEQ ID NO: 73071 - protein, 349 aa, unidentified
  source 1..349: note = Thalassotalea agarivorans
  REGION 1..349: note = tr|A0A1I0AGZ5|A0A1I0AGZ5_THASX S-adenosylmethionine:tRNA ribosyltransferase-isomerase; OS = Thalassotalea agarivorans OX=349064 GN=queA PE=3 SV=1
MRVSDFAFELPEELIARYPKAERTQSRLMTLDGDSGQRQDLAFTDIINQLNAGDLLVFNNTRVIPARMFGQKESGGKIEVLVERMLDDKRVLAHVRSSKAPKPGAKLILEGTVNATMVARHDALFEIAFDSDKNVLNILEDIGHMPLPPYIDRPDEDSDKERYQTVYNEKPGAVAAPTAGLHFDETLLQQLKDKGVELAFITLHVGAGTFQPVRVDEIADHIMHAEYVEVPQAVVDQINQTKASGGRVVAVGTTSVRSLESAAKVSAEKGQPLTEFYGDTDIFITPGFEFKVVDALVTNFHLSESTLLMLVSAFAGYDNIMSAYQHAVTEKYRFFSYGDAMLLNKKTSK

SEQ ID NO: 73072 - protein, 348 aa, unidentified
  source 1..348: note = Thalassotalea euphylliae
  REGION 1..348: note = tr|A0A3E0UI28|A0A3E0UI28_9GAMM S-adenosylmethionine:tRNA ribosyltransferase-isomerase; OS = Thalassotalea euphylliae OX=1655234 GN=queA PE=3 SV=1
MRVSDFAFDLPEELIARYPKQDRTASRLMTVEGNSGDITDGTFVDVLAQLNDGDLLIFNNTRVIPARMFGKKASGGKLEVLVERVLDEHRVLAHIRCSKSPKPGTEIILEESVSAKMVARHDALFELSFEGEEKVLDILERIGHMPLPPYIDRPDEDSDRERYQTVYNEKPGAVAAPTAGLHFDDDLLAKIQAKGVELAFVTLHVGAGTFQPVKVEEIADHVMHAEYVEVSEDVVAKIEQTKANGGRVVAVGTTSMRSLESAAKAADEQGELIAPFYQDTDIFITPGFNFKVVDALITNFHLSESTLLMLVSAFAGYDNMMRAYQHAVEEKYRFFSYGDAMFLTRQSR

SEQ ID NO: 73073 - protein, 348 aa, unidentified
  source 1..348: note = Thalassotalea euphylliae
  REGION 1..348: note = tr|A0A3E0U7F8|A0A3E0U7F8_9GAMM S-adenosylmethionine:tRNA ribosyltransferase-isomerase; OS = Thalassotalea euphylliae OX=1655234 GN=queA PE=3 SV=1
MRVSDFAFDLPEELIARYPKQDRTASRLMTVEGSSGDITDGTFVDVLAQLNDGDLLIFNNTRVIPARMFGKKASGGKLEVLVERVLDEHRVLAHIRCSKSPKPGTEIILEESVSATMVARHDALFELAFEGEEKVLDILERIGHMPLPPYIDRPDEDSDRERYQTVYNEKPGAVAAPTAGLHFDDDLLAKIQAKGVDLAFVTLHVGAGTFQPVKVEEIADHVMHAEYVEVSEDVVAKIEQTKANGGRVVAVGTTSMRSLESAAKAADEQGKLIAPFYQDTDIFITPGFNFKVVDALITNFHLSESTLLMLVSAFTGYDNMMRAYQHAVEEKYRFFSYGDAMFLTRQSR

SEQ ID NO: 73074 - protein, 351 aa, unidentified
  source 1..351: note = Thalassotalea sp.
  REGION 1..351: note = tr|A0A516HAF2|A0A516HAF2_9GAMM S-adenosylmethionine:tRNA ribosyltransferase-isomerase; OS = Thalassotalea sp. PS06 OX=2594005 GN=queA PE=3 SV=1
MTRRVSDYAFDLPDELIARYPQPERTASRLMVLDGNSGAIEHNTFTNVIDKLNPGDLLVFNNTRVIPARMFGTKASGGKIEVLVERILDQHRFLAHVRSSKSPKPGAELLLEDKVNATMVGRHDALFELEVQGEQSVLEVLEEIGHMPLPPYIDRPDEDSDKERYQTVYSEKPGAVAAPTAGLHFDEPLLEKIKAKGVQLAFVTLHVGAGTFQPVRVDNVDDHVMHSEYVEVSPEVIEQIRQTKAAGNRVVAVGTTSMRSLESAAKHHSDKKQPLAEFYGDTDIFITPGFNFQIVDCLITNFHLSESTLLMLVSAFSGYEHIMNAYQQAIDEQYRFFSYGDAMFLSKQNKD

SEQ ID NO: 73075 - protein, 348 aa, unidentified
  source 1..348: note = Thalassotalea sp.
  REGION 1..348: note = tr|A0A1Q6CMP0|A0A1Q6CMP0_9GAMM S-adenosylmethionine:tRNA ribosyltransferase-isomerase; OS = Thalassotalea sp. PP2-459 OX=1742724 GN=queA PE=3 SV=1
MRVADFSFDLPEELIARYPKADRTASRLMVLDGCSGALQDAHFVNVIEQLNTGDLLVFNNTRVIPARMFGQKKTGGKLEVLVERILDDKRFLAHVRASKSPKPGTELVLENKVSAIMVARHDALFEIEISHQDNVLTVLEDIGHMPLPPYIDRPDEESDKERYQTVYNEKPGAVAAPTAGLHFDDTLLKRIKEKGVNTAFVTLHVGAGTFQPVRVEQIEDHIMHAEYAEVPQDVVELIQQTKANGGRVIAVGTTSVRSLESAAKAAKEKGQTLTPFYGDTDIFITPGYEFEIIDALITNFHLSESTLLMLVSAFAGYDNIMAAYNHAISERYRFFSYGDAMFLTRRQS

SEQ ID NO: 73076 - protein, 275 aa, Thauera aminoaromatica
  REGION 1..275: note = tr|A0A5C7SFU3|A0A5C7SFU3_9RHOO S-adenosylmethionine:tRNA ribosyltransferase-isomerase (Fragment) OS=Thauera aminoaromatica OX=164330 GN=queA; PE = 3 SV=1
MAWTLDDFDYLLPQELIAQAPLARRTDSRLLQVAPTLADLHFSDLPSLLAPGDLLVFNDTRVIHARLFGTKDTGGQVEVMIERPLGPHEALAQIRASKSPKPGTRLRLEDALDVEVLGRAGEFFHLRFPEGDELIALLERHGRLPLPPYIERAAGDTDESRYQTVYARNPGSVAAPTAGLHFDEPLLARLTEHGVHTAYVTLNVGAGTFQPVRVHDLSEHKMHTEAYFVPQATVDAIAATKAAGKRVVCVGTTSMRALESAARGGNLEAGEAESD

SEQ ID NO: 73077 - protein, 358 aa, Thauera aminoaromatica
  REGION 1..358: note = tr|A0A5C7SC24|A0A5C7SC24_9RHOO S-adenosylmethionine:tRNA ribosyltransferase-isomerase; OS = Thauera aminoaromatica OX=164330 GN=queA PE=3 SV=1
MSLTLADFDYTLPPELIAQAPLAERSASRLLVLEPQEGAAPRLTDAVFSALAERVNPGDLLVFNDTRVIHARLHGVKDSGGQVEVLIERPVGPHEALAQVRASKSPKTGSRLRLADAFEVEVLGRVGEFFHLRFPSGENLLALLERHGKLPLPPYIQRAAGEADESRYQTVYARAPGSVAAPTAGLHFDDALLARIAARGAQCAWLTLHVGAGTFQPVRVDDLGEHRMHRERYVIPQETVDAIAATRAAGGRVIAVGTTSMRALEAAAQEGALEAGSGETEIFILPGFRFQVVDALVTNFHLPRSTLMMLVSAFAGMDSIRRAYAHAVEQRYRFFSYGDAMFITRRNESENDKNDDAV

SEQ ID NO: 73078 - protein, 354 aa, Thauera aromatica
  REGION 1..354: note = tr|A0A2R4BL21|A0A2R4BL21_THAAR S-adenosylmethionine:tRNA ribosyltransferase-isomerase; OS = Thauera aromatica K172 OX=44139 GN=queA PE=3 SV=1
MSLTLDDFDYLLPPERIAQAPLPERSASRLLVVTPTPGAEPLLVDASIADLPALVRPGDLLVFNDTRVIHARLHGIKDSGGQVEVLIERAVGPHEALAQVRASKSPKTDSRLRLADAFDVEVLGRVGEFYHLRFPAGENLFALLERHGKLPLPPYIQRAAGDADESRYQTVFARDPGSVAAPTAGLHFDEALLSRLAERGANCAWLTLHVGAGTFQPVRVDDLGEHRMHRERYVIPQETVDAIAATRTAGGRVIAVGTTSLRALEAAAQDGALEAGSSETEIFILPGFRFQVVDALLTNFHLPKSTLLMLVSAFAGMDTIRRAYAHAIARRYRFFSYGDAMFLTRKNEAEDDAL

SEQ ID NO: 73079 - protein, 354 aa, Thauera chlorobenzoica
  REGION 1..354: note = tr|A0A1H5U918|A0A1H5U918_9RHOO S-adenosylmethionine:tRNA ribosyltransferase-isomerase; OS = Thauera chlorobenzoica OX=96773 GN=queA PE=3 SV=1
MSLTLDDFDYLLPPELIAQAPLAERSASRLLVVTPACGTSPLLADASIADLPALVRPGDLLVFNDTRVIHARLHGVKDSGGQVEVLIERAVGPHEALAQVRASKSPKTGSRLRLADAFDVEVLGRVGEFYHLHFPAGENLFALLERHGRLPLPPYIQRAAGDADESRYQTVYARDPGSVAAPTAGLHFDEALLARLAERGANCAWLTLHVGAGTFQPVRVDDLGEHRMHRERYVIPQETVDAIAATRAAGGRVIAVGTTSMRALEAAAQDGTLEAGSSETEIFILPGFRFQVVDALITNFHLPKSTLLMLVSAFAGMDTIRHAYAHAIARRYRFFSYGDAMFLTRKKDTEDDAI

SEQ ID NO: 73080 - protein, 354 aa, unidentified
  source 1..354: note = Thauera humireducens
  REGION 1..354: note = tr|A0A127KA37|A0A127KA37_9RHOO S-adenosylmethionine:tRNA ribosyltransferase-isomerase; OS = Thauera humireducens OX=1134435 GN=queA PE=3 SV=1
MPLTLNDFDYPLPPDLIAQAPLAERSASRLLVVQPAEGGADALLDRSFADLPEFVGPNDLLVFNDTRVIHARLFGVKASGGQVEVLIERAVGPHEALAQVRASKSPRTGGILRLADAFDVEVLGRVGEFYHLRFPAGQNLFELLERHGKLPLPPYIQRAAGAEDESRYQTVFAREPGSVAAPTAGLHFDEGVLARIAERGAKCAWLTLHVGAGTFQPVRVDDLGEHRMHRERYVIPQETVDAIAATRAAGGRVIAVGTTSMRALEAAAQDGPLEAGSGETEIFILPGFHFQVVDALVTNFHLPKSTLLMLVSAFAGMDSIRGAYAHAIAQRYRFFSYGDAMFLTRRNEAENDAV

SEQ ID NO: 73081 - protein, 353 aa, Thauera linaloolentis
  REGION 1..353: note = tr|N6YYV2|N6YYV2_9RHOO S-adenosylmethionine:tRNA ribosyltransferase-isomerase OS=Thauera linaloolentis 47Lol = DSM 12138 OX=1123367 GN=queA PE=3 SV=1
MHLTLNDFDYPLPPELIAQAPLAERSASRLLIVQAMDGADALLDGHIADLPRLLGPNDLLVFNDTRVIHARLHGTKASGGQIEVLIERAVGPHEALAQVRASKSPGTGSTLRLADAFEVEVLGRVGEFYHLRFPPGENLFGLLERHGKLPLPPYIQRAAGEDDESRYQTVFAREPGSVAAPTAGLHFDEAILARIAERGARCAWLTLHVGAGTFQPVRVDDLGEHRMHRERYVIPRETVDAIAATRAAGGRVIAVGTTSMRALEAAAQDGPLSAGSGETEIFILPGFHFQVVDALVTNFHLPKSTLLMLVSAFAGMDDIRRAYAHAIDRRYRFFSYGDAMFLTRKQDAEHDAV

SEQ ID NO: 73082 - protein, 358 aa, Thauera phenylacetica
  REGION 1..358: note = tr|N6YSS9|N6YSS9_9RHOO S-adenosylmethionine:tRNA ribosyltransferase-isomerase OS=Thauera phenylacetica B4P; OX = 1234382 GN=queA PE=3 SV=1
MSLTLADFDYTLPAELIAQAPLPERSASRLLVVEPQQGAAPRLGDSVFNALAERVNPGDLLVFNDTRVIHARLHGVKDSGGQVEVLIERAIGPHEALAQVRASKSPKTGSRLRLADAFEVEVLGRVGEFFHLRFPAGEDLLALLERHGKLPLPPYIQRAAGEADESRYQTVYAREPGSVAAPTAGLHFDQALLERIAERGAKCAWLTLHVGAGTFQPVRVDDLGEHQMHRERYVIPQETVDAIAATRAAGGRVIAVGTTSMRALEAAAQDGPLEAGSGETEIFILPGFRFQVADALVTNFHLPKSTLMMLVSAFAGMDSIRRAYAHAVAQRYRFFSYGDAMFITRKNESENDNNDDAV

SEQ ID NO: 73083 - protein, 358 aa, unidentified
  source 1..358: note = Thauera propionica
  REGION 1..358: note = tr|A0A235EUZ6|A0A235EUZ6_9RHOO S-adenosylmethionine:tRNA ribosyltransferase-isomerase; OS = Thauera propionica OX=2019431 GN=queA PE=3 SV=1
MSLTLNDFDYFLPPELIAQAPLPERSASRLLVVQPDEHGVDALLDRRFTDLPDLVGPDDLLVFNDTRVIHARLHGVKDSGGQIEVLIERAVGPHEALAQVRASKSPRTGTTLRLADAFDVEVLGRVGEFYHLRFPAGEDLFALLERHGKLPLPPYIQRAAGDDDESRYQTVFAREPGSVAAPTAGLHFDEGVLARIAARGAKCAWLTLHVGAGTFQPVRVDDLGEHRMHRERYVIPQETVDAIDATRAAGGRVIAVGTTSMRALEAAAQDGPLEAGSGETEIFILPGFRFQVVDALITNFHLPKSTLMMLVSAFAGMDGIRRAYAHAVAQRYRFFSYGDAMFLTRTDNSENDKPSDAI

SEQ ID NO: 73084 - protein, 345 aa, Thauera sp.
  REGION 1..345: note = tr|A0A290ZTT2|A0A290ZTT2_9RHOO S-adenosylmethionine:tRNA ribosyltransferase-isomerase; OS = Thauera sp. K11 OX=2005884 GN=queA PE=3 SV=1
MSLTLDDFDYTLPPELIAQAPLPERSASRLLVVDDGRLADRRFADLPEFVRPGDLLVFNDTRVIHARLHGVKESGGQIEVLVERAIGPHEALAQVRASKPPKAGSRLRLADAFDATVLGRVGEFYHLRFPDGDEVHALLERHGKLPLPPYIQRAAGDDDESRYQTVFAREPGSVAAPTAGLHFDDAILARLAGCGARCAWLTLHVGAGTFQPVRVDDLGEHRMHRERYVIPQETADAIAATRAAGGRVIAVGTTSLRALEAAAQDGPLEAGSEETEIFILPGFRFQVADALVTNFHLPRSTLLMLVSAFAGLETIRHAYAHAVAGRYRFFSYGDAMFLIRNDDAV

SEQ ID NO: 73085 - protein, 358 aa, Thauera sp.
  REGION 1..358: note = tr|A0A3B9PKN7|A0A3B9PKN7_9RHOO S-adenosylmethionine:tRNA ribosyltransferase-isomerase; OS = Thauera sp. OX=1905334 GN=queA PE=3 SV=1
MPLTLSDFDYTLPAELIAQSPLSERSASRLLVVTPGEHGTPVMADAVFADLPDLVRPGDLFVFNDTRVIHARIHGVKDSGGQVEVLIERAIGPHEALAQVRASKSPRTGSRLHLADAFEVEVLGRVGEFFHLRFPDGEDLLTLLERHGKLPLPPYIQRAAGEADESRYQTVYAREPGSVAAPTAGLHFDEALLARLTAAGAKSAWLTLHVGAGTFQPVRVDDLGEHRMHRERYVIPQETVDAIAATRAAGGRVIAVGTTSMRALEAAAQEGPLEAGSGETEIFILPGFRFQVVDALVTNFHLPKSTLMMLVSAFAGMDSIRRAYAHAVEARYRFFSYGDAMFITRRNEAENDDLNDAI

SEQ ID NO: 73086 - protein, 354 aa, Thauera terpenica
  REGION 1..354: note = tr|S9ZNX2|S9ZNX2_9RHOO S-adenosylmethionine:tRNA ribosyltransferase-isomerase OS=Thauera terpenica 58Eu; OX = 1348657 GN=queA PE=3 SV=1
MPLTLNDFDYTLPPDLIAQAPLAQRSASRLLVVHPPMEGAEVLVDRNFADLPALIGPQDLLVFNDTRVIHARVHGSKASGGQIEVLIERAIGPHEALAQVRASKSPRSGSTLRLADAFDVEVLGRVGEFYHLRFPAHENLFELLERHGKLPLPPYIQRAAGDDDESRYQTVFARSPGSVAAPTAGLHFDEATLAQVRARGAQCAWLTLHVGAGTFQPVRVDNLDEHRMHRERYFIPPQTVDAIARTRAAGGRVIAVGTTSLRALEAAAHNGALGAGEGETEIFILPGFKFQVADALLTNFHLPKSTLLMLVSAFAGREPIRRAYAHAIAARYRFFSYGDAMLLTRNQDAQHDAV

SEQ ID NO: 73087 - protein, 264 aa, Thermacetogenium phaeum
  REGION 1..264: note = tr|K4LHA8|K4LHA8_THEPS S-adenosylmethionine:tRNA ribosyltransferase-isomerase OS=Thermacetogenium phaeum (strain ATCC BAA-254 / DSM 12270 / PB) OX=1089553 GN=queA; PE = 3 SV=1
MHISDFDYYLPDELIAQYPAARREGSRLLVLPKKGGAIIHTSFSEIGDFLVPGDLLVLNETKVFPARLLGARERTGGQVELLLLEEKASLVWEALVRPGKKARIGETLIFGNGSLSCVIEGKTPDGGRLVRFTGVSEQEFWDEVFKIGKVPLPPYIKRDEEQIDRERYQTVYARIPGSAAAPTAGLHFTEEILRRLQEKGVRIAFVLLHVGLGTFRPVRVADVEKHQMHAEYWKLEPVAADLINRTKQEGGRVVAVGTTTVRVL

SEQ ID NO: 73088 - protein, 353 aa, Thermaerobacter marianensis
  REGION 1..353: note = tr|E6SIX2|E6SIX2_THEM7 S-adenosylmethionine:tRNA ribosyltransferase-isomerase OS=Thermaerobacter marianensis (strain ATCC 700841 / DSM 12885 / JCM 10246 / 7p75a) OX= 644966 GN=queA PE=3 SV=1
MRVDEFDYELPPELIAQEPLPRRDASRLMVVDRDSGRWIHAHFRDLPRFLRAGDCLVLNDTRVRPARLYGRRTTGGHVEFLLLQPLDDGRWLALARPGRRLRPGTEVVCGEERPLRVRVEEVRDSGERVIRLEPPQGETVDETLHRLGRVPLPPYIRTELKDPERYQTVYAREEGSVAAPTAGLHFTPELLEELQDQGVRIAYLTLHVGVGTFRPVTAQRVEEHRMHAEFFRVEPEAAAAINAARSAGGRVIAVGTTVTRTLETVAADDGTVRPGSGWTDLFIYPGYRFKAIDGLITNFHLPRSTLIMLVAALLGKERTLAAYREAVARRYRFFSFGDAMLILPGAVPAGHAP

SEQ ID NO: 73089 - protein, 354 aa, Thermaerobacter sp.
  REGION 1..354: note = tr|A0A4P7GU26|A0A4P7GU26_9FIRM S-adenosylmethionine:tRNA ribosyltransferase-isomerase; OS = Thermaerobacter sp. FW80 OX=2546351 GN=queA PE=3 SV=1
MRVDEFDYDLPPELIAQEPLPERDASRLMVVDRDSGRWIHARFRDLPRFLRPGDCLVLNDTRVRPARLFGRRATGGQVEFLLLDPLGDGRWLALGRPGRRLRAGTVAICGDDRPLRVHVEEVRDGGERVIRLEPPSGETVDETLQRLGRVPLPPYIRKELDDPERYQTVYAREEGSVAAPTAGLHFTPELLARLEAQGVRIAYLTLHVGVGTFRPVTVDRVEEHRMHAEFYRVEPATAAAINATRAQGGRVVAVGTTVTRTLETVAADDGTVRPGSGWTDLFIYPGYRFKAIDGLITNFHLPRSTLIMLVAALLGKERTLAAYREAVARRYRFFSFGDAMLILPGVAPHAGEPA

SEQ ID NO: 73090 - protein, 358 aa, Thermaerobacter sp.
  REGION 1..358: note = tr|A0A371Z7Z0|A0A371Z7Z0_9FIRM S-adenosylmethionine:tRNA ribosyltransferase-isomerase; OS = Thermaerobacter sp. PB12/4term OX=2293838 GN=queA PE=3; SV = 1
MRVDEFDYELPPELIAQQPLARRDASRLMVVDRDTGRWLHARFRDLPRFLRAGDCLVLNDTRVRPARLYGRRPTGGQVEFLLLQPLDGDRWLALARPGRRVRPGTEVVCGEERPLRVYVEEARDSGERVICLEPPPGETVDETLHRLGRVPLPPYIRAELEDPERYQTVYAREEGSVAAPTAGLHFTPELLKRLQDQGVRIAYLTLHVGVGTFRPVTAERVEEHQMHAEFYRVEPAAAEAINAARAAGARVIAVGTTVTRTLETVAAAGGTVRPGSGWTDLFIYPGYRFKAIDGLITNFHLPRSTLIMLVAALLGKEQTLAAYREAVAQRYRFFSFGDAMLILPGAVPAGREEPALPE

SEQ ID NO: 73091 - protein, 358 aa, Thermaerobacter subterraneus
  REGION 1..358: note = tr|K6NYK9|K6NYK9_9FIRM S-adenosylmethionine:tRNA ribosyltransferase-isomerase OS=Thermaerobacter subterraneus DSM 13965 OX=867903 GN=queA PE=3 SV=1
MRVDEFDYDLPPELIAQQPLARRDASRLMVVDRDTGRWLHARFRDLPRFLRAGDCLVLNDTRVRPARLYGRRPTGGQVEFLLLQPLDGGRWLALARPGRRVRPGTEVVCGEERPLRVYVEEARDSGERVIRLEPPPGETVDETLHRLGRVPLPPYIRAELEDPERYQTVYAREEGSVAAPTAGLHFTPELLKRLQDQGVRIAYLTLHVGVGTFRPVTAERVEEHQMHAEFYRVEPAAAEAINAARAAGGRVIAVGTTVTRTLETVAAAGGTVRPGSGWTDLFIYPGYRFKAIDGLITNFHLPRSTLIMLVAALLGKEQTLAAYREAVARRYRFFSFGDAMLILPGAVPAGREEPALPE

SEQ ID NO: 73092 - protein, 341 aa, Thermanaeromonas toyohensis
  REGION 1..341: note = tr|A0A1W1VZS6|A0A1W1VZS6_9THEO S-adenosylmethionine:tRNA ribosyltransferase-isomerase; OS = Thermanaeromonas toyohensis ToBE OX=698762 GN=queA PE=3; SV = 1
MRVEDFDYYLPPELIAQHPVEPRDASRLLVLHRKAGMLEHRRFYELPLYLKPGDILVLNDTRVIPARLLGKKAETGGQVELLLLRPLRRDCWEALVRPGRRIPPGTELLFGQGELRAKVLERTPQGGRLVEFKYEGEWEEILGRLGEVPLPPYIKEKLPDPERYQTVYASRPGSVAAPTAGLHFTPRLLKELKEKGVKIVYILLHVGLGTFRPVKEEVVEKHRMHAEYFCVDPEAARTINEARRQGGRVIAVGTTVVRTLETAATPEGEIKPREGLTELFIYPGYRFKAVDGLITNFHLPRSTLLMLVCAFAGRERVLEAYQVAIKERYRFYSFGDAMLIL

SEQ ID NO: 73093 - protein, 344 aa, unidentified
  source 1..344: note = Thermanaerothrix daxensis
  REGION 1..344: note = tr|A0A0P6XQ67|A0A0P6XQ67_9CHLR S-adenosylmethionine:tRNA ribosyltransferase-isomerase; OS = Thermanaerothrix daxensis OX=869279 GN=queA PE=3 SV=1
MSKSPLKTSDFDYDLPPERIAQTPVEPRHNARLLVMWRDRPDLEHARFWDIGRYLAPGDLLVVNETRVIPARIWARKPSGGRVELLLLKKMNEEAWEALVGGKRIRPFLSLRVEGGPTAEVVADLGGSRRLIRFSEPIEPYLPHIGLMPLPPYIHEPLRDPERYQTVFARQPGSAAAPTAGLHFTPELIEHLKQQGIRFAGLILHIGLDTFAPVTEEDPTQHHIHTEWCELPPETARLVNETKRAGKRVVAVGTTSVRALETAARHGAPGDWVAPFAGPTDLFILPGFEFRVVDALVTNFHLPRSTLLMLVSAFAGRERILEVYREAIRLNYRFYSFGDAMLIL

SEQ ID NO: 73094 - protein, 348 aa, Thermanaerovibrio acidaminovorans
  REGION 1..348: note = tr|D1BA48|D1BA48_THEAS S-adenosylmethionine:tRNA ribosyltransferase-isomerase OS=Thermanaerovibrio acidaminovorans (strain ATCC 49978 / DSM 6589 / Su883); OX = 525903 G N=queA PE=3 SV=1
MVDLDLDLVDSYDYHLPEESIAQSPVEPRDSSRLMVIRRSDGSVCHRIFRDLVDFLRPGDLLVMNDTRVMRARLLGRKESGGSVEVFLLSPLDESRSAWTGMVRPGRKVRPGTVVRFSEDPGHLAVIQERLPDGLRLVHFPGESGWEIARTLGEVPLPPYIENRQVDGERYQTVYSDPSKELSVASPTAGLHFTRELLSELESRGVGRTFVTLNVGLGTFRPVKAQRASDHVMHLETCLVSADSARMIREVKARGNRVVAVGTTVVRTLESYAINPLEGEPFETDLFIRPGFRFRVVDAMITNFHLPRSTLLMLVAAFGGYDTVMGAYREAVARGYRFFSFGDAMLLI

SEQ ID NO: 73095 - protein, 346 aa, Thermanaerovibrio velox
  REGION 1..346: note = tr|H0URV8|H0URV8_9BACT S-adenosylmethionine:tRNA ribosyltransferase-isomerase OS=Thermanaerovibrio velox DSM 12556 OX=926567 GN=queA PE=3 SV=1
MLDLDLMDSYDYQLPEELIAQSPVEPRDSSRLMVLPRTGGSIDHRIFRDVKDYLLPGDLLVLNDTRVMKSRLLGRKPSSGKVEVFLLSPLDEEGTLWQALVKPGRKVPHGTCVLFSDSEADMAIVEDRIGDGLRLVRFPNCNGRDIANRLGDVPLPPYIENDAVDENRYQTIYCDPCKERSVAAPTAGLHFTEELIRSLNDKGVRTSFVTLDVGIGTFRPVKTERASAHIMHQEVCSVPESTAELIAATKSKGGRVIAVGTTVVRTLESFGLNGIKGRSFSTNLFIRPGFQFKVVDGLVTNFHLPRSTLLMLVVAFAGYHNVMNAYKEAVSKRYRFFSFGDAMLIL

SEQ ID NO: 73096 - protein, 341 aa, Thermincola ferriacetica
  REGION 1..341: note = tr|A0A0L6W6C2|A0A0L6W6C2_9FIRM S-adenosylmethionine:tRNA ribosyltransferase-isomerase; OS = Thermincola ferriacetica OX=281456 GN=queA PE=3 SV=1
MKVADFDFELPEELIAQEPVEPRDHSRLLVVNRDNGNIEHKRFYNCIDYIEPGDVLVVNNTRVLPARLFGEKKGSGAKIEFVLLKRIDRDKWEVLVKPGKRVKPGTVIFFGGGLLEAFVLQTTESGGRLVEFRYEGIFEELLDRFGQMPLPPYIKKQLDDRERYQTVYARASGSAAAPTAGLHFTEELLKKMHEKGVVIAEVMLHVGLGTFRPVKVDNVEDHRMHAEYYEINEETANLINRQRDRGHKIIAVGTTSCRALETAADSSGNLKPGCGWTDIFIYPGYRFKAVDRLITNFHLPRSTLIMLVSAFAGKDLIMRAYQEAIAEKYRFFSFGDAMMIL

SEQ ID NO: 73097 - protein, 341 aa, unidentified
  source 1..341: note = Thermincola potens
  REGION 1..341: note = tr|D5XEI1|D5XEI1_THEPJ S-adenosylmethionine:tRNA ribosyltransferase-isomerase OS=Thermincola potens (strain JR) OX=635013 GN=queA PE=3 SV=1
MKVADFDFELPEELIAQEPVEPRDHSRLLVVNRDNGNIEHKRFYNCIDYIEPGDVLVVNNTRVLPARLFGEKKGSGAKIEFVLLKRIDRDKWEVLVKPGKRVKPGTVILFGGGLLEAFVLQTTESGGRLVEFRYEGIFEELLDRFGQMPLPPYIKKQLDDRERYQTVYAKASGSAAAPTAGLHFTEELLKKMHEKGVVIAEVMLHVGLGTFRPVKVDNVEDHRMHAEYYEINEETANLINRQRDRGHKIIAVGTTSCRALETAADSSGNLKPGCGWTDIFIFPGYRFKAVDRLITNFHLPKSTLVMLVSAFAGKDLIMKAYQEAIAEKYRFFSFGDAMMIL

SEQ ID NO: 73098 - protein, 344 aa, Thermoactinomyces sp.
  REGION 1..344: note = tr|A0A151Z1N0|A0A151Z1N0_9BACL S-adenosylmethionine:tRNA ribosyltransferase-isomerase; OS = Thermoactinomyces sp. AS95 OX=1811386 GN=queA PE=3 SV=1
MDVSLYDYHLPKELIAQTPAERRDASRLMVVDRKTSQIRHAKFTNILDYLNPGDVLVLNDSRVRPARLIGVKEETGAKIELLLLNPLGNDRWEALVRPAKRVKQGTVIQFGEGRLKAVAQEQTEVAGGRVFALQYEEEDLEKLFEQLGQMPLPPYIHEQLDDPERYQTVFSRVVGSAAAPTAGLHFTEELLAQIREKGVKVVFITLHVGLGTFRPVTSKRIEDHQMHAEYYEISGETAREINAAKQRGNKVVAVGTTCVRTLETVYRKLNGEIKKDQGWTDIFIYPGFQFGVVDGLLTNFHLPQSTLLMLVSAFASRELILSAYEEAVNQRYRFFSFGDAMLIL

SEQ ID NO: 73099 - protein, 344 aa, Thermoactinomyces sp.
  REGION 1..344: note = tr|A0A1K1U726|A0A1K1U726_9BACL S-adenosylmethionine:tRNA ribosyltransferase-isomerase; OS = Thermoactinomyces sp. DSM 45891 OX=1761907 GN=queA PE=3; SV = 1
MNVADFSFELPKELIAQTPLTDRTASRLMIVNRKSGELTHTQFPEVVGYLEAGDVLVLNDSRVRPARLIGTKADTGAKIELLLLQPMGGDRWEALVKPAKRVKQGSVIQFGNGELRAVAEESTEVAGGRVFRLEYQTDDIEALFTQLGEMPLPPYIHEQLDDPERYQTVFSRSIGSAAAPTAGLHFTDEILTAIRQKGVQVAFITLHVGLGTFRPVTVDKIEEHQMHAEYYEMSEETASTIREAKKAGKRVVAVGTTSIRTLETIARRFVSEVQACSGWTDIFIYPGYEFQIVDGLLTNFHLPQSTLLMLGSAFSSRDILLHAYEEAVQERYRFFSFGDAMLLI

SEQ ID NO: 73100 - protein, 344 aa, Thermoactinomyces vulgaris
  REGION 1..344: note = tr|A0A0N0YD71|A0A0N0YD71_THEVU S-adenosylmethionine:tRNA ribosyltransferase-isomerase; OS = Thermoactinomyces vulgaris OX=2026 GN=queA PE=3 SV=1
MDVAQYHFELPQELIAQTPIKDRTGSRLMVVDRKRQTWEHTRFPHLLDYLEAGDVLVLNDSRVRPARLIGVKEETGAKIELLLLKPLGEARWEALVKPAKRVKEGTVVSFGGGRLRAVAEASTEVAGGRVFRLEYEVDDVESLFQELGQMPLPPYIHEQLDDPERYQTVFSRVIGSAAAPTAGLHFTPELLEQAQQKGVKLAFVTLHVGLGTFRPVTVERVEDHHMHAEYYELSQETADLINEAKRQGKRVIAVGTTSVRTLETVASRHGGEVRADSGWTDIFIYPGYVYQVVDGLVTNFHLPQSTLLMLVSAFATRELIMKAYEEAVKERYRFFSFGDAMLII

SEQ ID NO: 73101 - protein, 99 aa, Thermoactinomyces vulgaris
  REGION 1..99: note = tr|A0A0N0HG63|A0A0N0HG63_THEVU S-adenosylmethionine:tRNA ribosyltransferase-isomerase (Fragment) OS=Thermoactinomyces vulgaris OX=2026; GN = ADL26_02685 PE=3 SV=1
LEAVQPAEVRGTARSDVRLLASDKATGEIRHHHFDDLPALVRPGDLLVVNNSATLPAAVPTRQGLRVHFSSTRPDGSWLVELRDRDKPYTGDVPGAVVD

SEQ ID NO: 73102 - protein, 341 aa, Thermoanaerobacter brockii
  REGION 1..341: note = tr|E8US89|E8US89_THEBF S-adenosylmethionine:tRNA ribosyltransferase-isomerase OS=Thermoanaerobacter brockii subsp. finnii (strain ATCC 43586 / DSM 3389 / AKO-1) OX=5 09193 GN=queA PE=3 SV=1
MKRSEFYFELPEELIAQEPLEDRASSRLMILNKKTGEIEHDIFKNITKYLKPGDCLVLNNTKVIPARLIGRREDSGGKIEFVLLKRISNNEWEILVKPGRRAKIGSKFVFGNGELIAEILDTTDVGGRIVRFYYEGVFEEVLDKLGEMPVPPYIKKKLKNKDRYQTVYAKYEGSAAAPTAGLHFTEELLEKIRQMGVKTVFITLHVGLGTFRPVKEEVIENHKMHEEFYIVTKEAAEEINETRKSGGRIIAVGTTSTRTLETVADEDGYIKEKSGWTDIFIYPGYKFKAIDGMITNFHLPESTLIMMVSAFAGKENIMRAYKIAVEKKYRFFSFGDAMLII

SEQ ID NO: 73103 - protein, 341 aa, Thermoanaerobacter ethanolicus; identical to SEQ ID NO: 73102
  REGION 1..341: note = tr|C7IUL8|C7IUL8_THEET S-adenosylmethionine:tRNA ribosyltransferase-isomerase OS=Thermoanaerobacter ethanolicus CCSD1 OX=589861 GN=queA PE=3 SV=1

SEQ ID NO: 73104 - protein, 341 aa, Thermoanaerobacter italicus
  REGION 1..341: note = tr|D3T8J7|D3T8J7_THEIA S-adenosylmethionine:tRNA ribosyltransferase-isomerase OS=Thermoanaerobacter italicus (strain DSM 9252 / Ab9) OX=580331 GN=queA PE=3; SV = 1
MKRSEFYFELPKELIAQEPLEDRSSSRLMVLNKKTGEIEHDIFKNITKYLKAGDCLVLNDTKVIPARLIGRREDSGGKIEFVLIKRISSNEWETLVKPGRRAKIGSRFVFGTGELIAEVLDTTEAGGRIVRFYYEGVFEEVLDKLGEMPVPPYIKKKLKNKDRYQTVYAKYEGSAAAPTAGLHFTKELLEKIKQMGVKTVFITLHVGLGTFRPVKEEEIENHKMHEEFYIVTKEAANEINETRKSGGRIIAVGTTSTRTLETVADENGYVKEKSGWTDIFIYPGYKFKAIDGMITNFHLPESTLIMMVSAFAGRENIMRAYQVAIEHKYRFFSFGDAMLII

SEQ ID NO: 73105 - protein, 341 aa, Thermoanaerobacter kivui
  REGION 1..341: note = tr|A0A097AR60|A0A097AR60_THEKI S-adenosylmethionine:tRNA ribosyltransferase-isomerase; OS = Thermoanaerobacter kivui OX=2325 GN=queA PE=3 SV=1
MRRSDFYFELPEELIAQEPLEDRSSARLMVLNRKTGEIQHDIFKNITKYLKAGDCLVLNDTKVIPARLIGRRQDSGGKIEFVLLKRISNNEWETLVKPGRRAKIGSKFVFGNGELIAEIFDTTEVGGRIVRFYYEGVFEEVLDKLGEMPVPPYIKKKLKNKDRYQTVYAKYEGSAAAPTAGLHFTEELLKQIRDMGVKTVFITLHVGLGTFRPVKEEIIENHKMHEEFYIVTKEAADEINATKERGGRVIAVGTTSTRTLETVADENGYIKEKSGWTDIFIYPGYKFKAIDGMITNFHLPESTLIMMVSAFAGKENIMKAYKIAIEHRYRFFSFGDAMLII

SEQ ID NO: 73106 - protein, 341 aa, Thermoanaerobacter mathranii
  REGION 1..341: note = tr|D7ANM0|D7ANM0_THEM3 S-adenosylmethionine:tRNA ribosyltransferase-isomerase OS=Thermoanaerobacter mathranii subsp. mathranii (strain DSM 11426 / CIP 108742 / A3) O X=583358 GN=queA PE=3 SV=1
MKRSEFYFELPKELIAQEPLEDRSSSRLMVLNKKTGEIEHDIFKNITKYLKAGDCLVLNDTKVIPARLIGRREDSGGKIEFVLIKRISSNEWETLVKPGRRAKIGSRFVFGTGELIAEVLDATEAGGRIVRFYYEGVFEEVLDKLGEMPVPPYIKKKLKNKDRYQTVYAKYEGSAAAPTAGLHFTKELLEKIKQMGVKTVFITLHVGLGTFRPVKEEEIENHKMHEEFYIVTKEAANEINETRKSGGRIIAVGTTSTRTLETVADENGYVKEKSGWTDIFIYPGYKFKAIDGMITNFHLPESTLIMMVSAFAGRENIMRAYQVAIEHKYRFFSFGDAMLII

SEQ ID NO: 73107 - protein, 341 aa, Thermoanaerobacter pseudethanolicus; identical to SEQ ID NO: 73102
  REGION 1..341: note = sp|B0K958|QUEA_THEP3 S-adenosylmethionine:tRNA ribosyltransferase-isomerase OS=Thermoanaerobacter pseudethanolicus (strain ATCC 33223 / 39E) OX=340099; GN = queA PE=3 S V=1

SEQ ID NO: 73108 - protein, 341 aa, Thermoanaerobacter siderophilus
  REGION 1..341: note = tr|I9KWB6|I9KWB6_9THEO S-adenosylmethionine:tRNA ribosyltransferase-isomerase OS=Thermoanaerobacter siderophilus SR4 OX=880478 GN=queA PE=3 SV=1
MKRSEFYFELPEELIAQEPLEDRSSSRLMVLNRKTGEVQHDIFKNITKYLKAGDCLVLNDTKVIPARLIGRRQDSGGKIEFVLLKRLSVNEWETLVKPGRRAKVGTRVVFGNGELVAEILDNTEVGGRVVRFYYEGLFEEVLDKLGEMPVPPYIKKKLKDKERYQTVYAKYEGSAAAPTAGLHFTEELLEKIRQMGVKTVFITLHVGLGTFRPVKEEIIENHKMHEEFYIVTKEAAEEINATREKGGRVIAVGTTSTRTLETVADENGYIREKSGWTDIFIYPGYKFKAIDGMITNFHLPESTLIMMVSAFAGKENIMRAYQVAIEERYRFFSFGDAMLII

SEQ ID NO: 73109 - protein, 341 aa, Thermoanaerobacter sp.
  REGION 1..341: note = tr|A0A0B3BS53|A0A0B3BS53_9THEO S-adenosylmethionine:tRNA ribosyltransferase-isomerase; OS = Thermoanaerobacter sp. YS13 OX=1511746 GN=queA PE=3 SV=1
MKRSEFYFELPEELIAQEPLEDRSSSRLMVLNKKTGEIQHDIFKNIIKYLKAGDCLVLNDTKVIPARLIGRREDSGGKIEFVLLKRLSVNEWETLVKPGRRAKVGTRVVFGNGELVAEILDNTEVGGRVVRFYYEGVFEEVLDKLGEMPVPPYIKKKLKNKDRYQTVYAKYEGSAAAPTAGLHFTQELLEKIRQMGVKTVFITLHVGLGTFRPVKEEIIENHKMHEEFYIVTKEAAEEINATREKGGRVIAVGTTSTRTLETVADENGYIREKSGWTNIFIYPGYKFKAIDGMITNFHLPESTLIMMVSAFTGKENIMRAYKIAIEERYRFFSFGDAMLII

SEQ ID NO: 73110 - protein, 341 aa, Thermoanaerobacter sp.; identical to SEQ ID NO: 64589
  REGION 1..341: note = sp|B0K0M0|QUEA_THEPX S-adenosylmethionine:tRNA ribosyltransferase-isomerase OS=Thermoanaerobacter sp. (strain X514) OX=399726 GN=queA PE=3 SV=1

SEQ ID NO: 73111 - protein, 341 aa, Thermoanaerobacter thermocopriae; identical to SEQ ID NO: 64589
  REGION 1..341: note = tr|A0A101D7P6|A0A101D7P6_9THEO S-adenosylmethionine:tRNA ribosyltransferase-isomerase; OS = Thermoanaerobacter thermocopriae OX=29350 GN=queA PE=3; SV = 1

SEQ ID NO: 73112 - protein, 341 aa, Thermoanaerobacter thermohydrosulfuricus; identical to SEQ ID NO: 73108
  REGION 1..341: note = tr|A0A1I1YVT6|A0A1I1YVT6_THETY S-adenosylmethionine:tRNA ribosyltransferase-isomerase; OS = Thermoanaerobacter thermohydrosulfuricus OX=1516; GN = queA PE=3 SV=1

SEQ ID NO: 73113 - protein, 341 aa, Thermoanaerobacter thermohydrosulfuricus; identical to SEQ ID NO: 73108
  REGION 1..341: note = tr|M8CW71|M8CW71_THETY S-adenosylmethionine:tRNA ribosyltransferase-isomerase OS=Thermoanaerobacter thermohydrosulfuricus WC1 OX=1198630 GN=queA PE=3 SV=1

SEQ ID NO: 73114 - protein, 341 aa, Thermoanaerobacter uzonensis
  REGION 1..341: note = tr|A0A1M5A1M7|A0A1M5A1M7_9THEO S-adenosylmethionine:tRNA ribosyltransferase-isomerase; OS = Thermoanaerobacter uzonensis DSM 18761 OX=1123369; GN = queA PE=3 SV=1
MKRSEFYFELPEELIAQEPLEDRSSSRLMFLNKKTGEIQHDIFKNIIKYLKAGDCLVLNDTKVIPARLIGRRQDSGGKIEFVLLKRLSVNEWETLVKPGRRAKVGTRVVFGNGELVAEILDNTEVGGRVVRFYYEGVFEEVLDKLGEMPVPPYIKKKLKNKDRYQTVYAKYEGSAAAPTAGLHFTQELLEKIRQMGVKTVFITLHVGLGTFRPVKEEIIENHKMHEEFYIVTKEAAEEINATREKGGRVIAVGTTSTRTLETVADENGYIREKSGWTDIFIYPGYKFKAIDGMITNFHLPESTLIMMVSAFAGKENIMRAYKIAIEERYRFFSFGDAMLII

SEQ ID NO: 73115 - protein, 341 aa, Thermoanaerobacter wiegelii
  REGION 1..341: note = tr|G2MSZ6|G2MSZ6_9THEO S-adenosylmethionine:tRNA ribosyltransferase-isomerase OS=Thermoanaerobacter wiegelii Rt8.B1 OX=697303 GN=queA PE=3 SV=1
MKRSEFYFELPEELIAQEPLEDRSSSRLMVLNRKTGEVQHDIFKNITKYLKAGDCLVLNDTKVIPARLIGRRQDSGGKIEFVLLKRLSVNEWETLVKPGRRAKVGTRVVFGNGELVAEILDNTEVGGRVVRFYYEGVFEEVLDKLGEMPVPPYIKKKLKDKERYQTVYAKYEGSAAAPTAGLHFTEELLEKIRQMGVKTVFITLHVGLGTFRPVKEEIIENHKMHEEFYIVTKEAAEEINATREKGGRVIAVGTTSTRTLETVADENGYIREKSGWTDIFIYPGYKFKAIDGMITNFHLPESTLIMMVSAFAGKENIMRAYQVAIEERYRFFSFGDAMLII

SEQ ID NO: 73116 - protein, 341 aa, unidentified
  source 1..341: note = Thermoanaerobacteraceae bacterium
  REGION 1..341: note = tr|A0A3A9K246|A0A3A9K246_9THEO S-adenosylmethionine:tRNA ribosyltransferase-isomerase; OS = Thermoanaerobacteraceae bacterium SP2 OX=2292448; GN = queA PE=3 SV=1
MDLKEFYYYLPQELIAQEPLKDRAKSRLLVLDRETGHIEHRIFEDIVDYLNPGDCLVLNDTRVIPARLIGSRQDTGGKIEFVLLKKTGINIWEVLVKPGKRAKIGSEFVFGDGRLKAKVLGYTDAGGRVVEFFYEGIFEQVLDELGQMPVPPYIKKKLKDRECYQTVYAREPGSAAAPTAGLHFTKELLEKIRQKRVRIVFITLHVGLGTFRPVKVQKIEEHRMHEEYYEVSPETAEIINNTKENGHRIIAVGTTSTRTLETVGSGDGRVKPQSGWSGIFIYPGYKFKVIDGLITNFHLPESTLIMLVSAFAGKDKVFKAYEEAIKKRYRFYSFGDAMFIK

SEQ ID NO: 73117 - protein, 341 aa, unidentified
  source 1..341: note = Thermoanaerobacteraceae bacterium
  REGION 1..341: note = tr|A0A5D8QH53|A0A5D8QH53_9THEO S-adenosylmethionine:tRNA ribosyltransferase-isomerase; OS = Thermoanaerobacteraceae bacterium A05MB OX=2606906; GN = queA PE=3 SV=1
MNVHDFYFELPEELIAQRPLVERDLAKLMVLHKDTGEIEHKIFKDVIEYLESGDCLVLNDTRVIPARLLGRKADTMGKMEFVLLTNKGDNVWEVLVKPGRRAKIGSRFVFGEGELTAKVLDVTKDGTRIVRFYYDGLFEEVLDKLGRMPLPPYIKKQLDDNEMYQTVYSKHEGSAAAPTAGLHFTNELLKDIEAKGVNLVYITLHVGLGTFRPVKVENVEEHEMHSEFFIVNKEAADTVNQAKRRGKKIVSVGTTSTRTLEASCDEDGNVIPQSGWTDIFIYPGYKFKVIDALITNFHLPESTLIMLVSALAGRENILNAYRIAVENRYRFFSFGDAMLIV

SEQ ID NO: 73118 - protein, 345 aa, unidentified
  source 1..345: note = Thermoanaerobacterales bacterium
  REGION 1..345: note = tr|A0A101F8Y9|A0A101F8Y9_9FIRM S-adenosylmethionine:tRNA ribosyltransferase-isomerase; OS = Thermoanaerobacterales bacterium 50_218 OX=1635288; GN = queA PE=3 SV=1
MKVSDFDYHLPPELIAQYPAPRREQSRLLVLHRDSGEIEHRLFPAVVEYLEPGDVLVLNETKVFPARLRGRRKDTGGKIEILLLEEKEPLVWEALVRPGRRFREGARITFGDGELEAEVGQKTREGARILRFRENNVTDFWEKVFRIGEVPLPPYIKRKVEDLDKERYQTVYARCLGSVAAPTAGLHFSSELLEQIQAKGVRIVFLVLHVGLGTFRPVKVDEVEKHKMHPEFWRVGSQAALVINEARKSGKRIIAVGTTVVRALESAADESGYLKPGEGWTRLFIYPGYRFRIIDGLITNFHLPRSTLLMLVCAFAGKETVLRAYQEAVALRYRFFSYGDAMLII

SEQ ID NO: 73119 - protein, 341 aa, unidentified; identical to SEQ ID NO: 73116
  source 1..341: note = Thermoanaerobacterales bacterium
  REGION 1..341: note = tr|A0A3G2R5T3|A0A3G2R5T3_9FIRM S-adenosylmethionine:tRNA ribosyltransferase-isomerase; OS = Thermoanaerobacterales bacterium SK-G1 OX=2316383; GN = queA PE=3 SV=1

SEQ ID NO: 73120 - protein, 341 aa, Thermoanaerobacterium aotearoense
  REGION 1..341: note = tr|W9EEX6|W9EEX6_9FIRM S-adenosylmethionine:tRNA ribosyltransferase-isomerase OS=Thermoanaerobacterium aotearoense SCUT27 OX=1421016 GN=queA PE=3 SV=1
MNLHEFYYDLPEELIAQEPLQNRDESRLMVLNKATGEIKHDIFKNILNYLRPNDVLVLNDTKVIPARLYGVREDTGGKIEFVLLKRLGINEWEILVKPGRRAKIGSKFIFGNGELKALILSDTDAGGRIVRFSYEGVFEEVLDKLGEMPVPPYIKKKLKDKNMYQTVYAKHEGSAAAPTAGLHFTNELLDKIREFGVKTVFITLHVGLGTFRPVKEEVIENHKMHSEFYIVNEDAADAINAARKSGGRIISVGTTSTRTLETVADDDGIIHAGSGWTDIFIYPGYKYKAIDGIITNFHLPESTLIMMISAFAGKENVMNAYKTAIDNKYRFYSFGDAMLII

SEQ ID NO: 73121 - protein, 341 aa, Thermoanaerobacterium saccharolyticum; identical to SEQ ID NO: 73120
  REGION 1..341: note = tr|I3VVZ6|I3VVZ6_THESW S-adenosylmethionine:tRNA ribosyltransferase-isomerase OS=Thermoanaerobacterium saccharolyticum (strain DSM 8691 / JW/SL-YS485) OX=1094508; GN = queA PE=3 SV=1

SEQ ID NO: 73122 - protein, 341 aa, Thermoanaerobacterium sp.
  REGION 1..341: note = tr|A0A1X2FZX0|A0A1X2FZX0_9FIRM S-adenosylmethionine:tRNA ribosyltransferase-isomerase; OS = Thermoanaerobacterium sp. PSU-2 OX=1930849 GN=queA PE=3; SV = 1
MNLHEFYYDLPEELIAQEPLQNRDESRLMVLNKATGEIKHDIFKNILTYLKPNDVLVLNDTKVIPARLYGVREDTGGKIEFVLLKRLGIDEWEILVKPGRRAKIGSKFIFGNGELKALILSDTDAGGRIVRFSYEGVFEEVLDKLGEMPIPPYIKKKLKDKNMYQTVYAKHEGSAAAPTAGLHFTNELLDKIREFGVKTVFITLHVGLGTFRPVKEEVIENHKMHSEFYIVNEDAADAINAARKAGGRIISVGTTSTRTLETVADDDGIIHAGSGWTDIYIYPGYKYKAIDGIITNFHLPESTLIMMISAFAGKENVMNAYKTAIENKYRFYSFGDAMLII

SEQ ID NO: 73123 - protein, 341 aa, Thermoanaerobacterium sp.
  REGION 1..341: note = tr|A0A285BCI5|A0A285BCI5_9FIRM S-adenosylmethionine:tRNA ribosyltransferase-isomerase; OS = Thermoanaerobacterium sp. RBIITD OX=1550240 GN=queA; PE = 3 SV=1
MNLHEFYYDLPEELIAQEPLLNRDESRIMILNRRTGEIKHDIFKNIINYLNHNDCLVLNDTKVIPARLIGVREDTGGKIEFVLLRRLKNNEWEILVKPGRRAKIGSTFLFGNGELKAEVLSTTEVGGRIVRFSYEGIFEEVLDKLGEMPVPPYIKKKLKDKNMYQTVYAKHEGSAAAPTAGLHFTNELLEKIKEKGVKIVFVTLHVGLGTFRPVKEEIIEEHKMHSEFYVVKEDAAETINNVKKNGGRIISVGTTSTRTLESVADENGVIKPGSGWTDIFIYPGYKYKAIDGLITNFHLPESTLIMMISAFAGRDNVMNAYKVAIENKYRFYSFGDAMLII

SEQ ID NO: 73124 - protein, 341 aa, Thermoanaerobacterium thermosaccharolyticum
  REGION 1..341: note = tr|D9TP93|D9TP93_THETC S-adenosylmethionine:tRNA ribosyltransferase-isomerase OS=Thermoanaerobacterium thermosaccharolyticum (strain ATCC 7956 / DSM 571 / NCIB 9385/ NCA 3814) OX=580327 GN=queA PE=3 SV=1
MNLHEFYYDLPEELIAQEPLKNRDESRLMILNRLTGEIKHDIFKNIISYLNPNDVLVLNDTKVIPARLIGVREDTGGKIEFVLLKRLSSDEWEILVKPGRRAKIGSKFIFGNGELKAEVISNTDVGGRIVRFSYEGIFEEVLDKLGEMPVPPYIKKKLEDKNMYQTVYAKHEGSAAAPTAGLHFTNKLLDDIRKYGVKTVFVTLHVGLGTFRPVKEEVIEKHKMHSEFYTVTEEAAQAINTARESGGRIISVGTTSTRTLETVADENGIIHAGSGWTDIFIYPGYKYKAIDGIITNFHLPESTLIMMISAFAGKENVMNAYKTAIDNKYRFYSFGDAMLII

SEQ ID NO: 73125 - protein, 341 aa, Thermoanaerobacterium thermosaccharolyticum
  REGION 1..341: note = tr|A0A231VE46|A0A231VE46_THETR S-adenosylmethionine:tRNA ribosyltransferase-isomerase; OS = Thermoanaerobacterium thermosaccharolyticum OX=1517; GN = queA PE=3 SV=1
MNLHEFYYDLPEELIAQEPLKNRDESRLMILNRLTGEIKHDIFKNIISYLNPNDVLVLNDTKVIPARLIGVREDTGGKIEFVLLKRLSSDEWEILVKPGRRAKIGSKFIFGNGELKAEVISNTDVGGRIVRFSYEGIFEEVLDKLGEMPVPPYIKKKLEDKNMYQTVYAKHEGSAAAPTAGLHFTNKLLDDIRKYGVKTVFVTLHVGLGTFRPVKEEIIEKHKMHSEFYTVTEEAAQAINTARESGGRIISVGTTSTRTLETVADENGIIHAGSGWTDIFIYPGYKYKAIDGIITNFHLPESTLIMMISAFAGKENVMNAYKTAIDNKYRFYSFGDAMLII

SEQ ID NO: 73126 - protein, 341 aa, Thermoanaerobacterium xylanolyticum
  REGION 1..341: note = tr|F6BGK1|F6BGK1_THEXL S-adenosylmethionine:tRNA ribosyltransferase-isomerase OS=Thermoanaerobacterium xylanolyticum (strain ATCC 49914 / DSM 7097 / LX-11); OX = 858215GN=queA PE=3 SV=1
MNLHEFYYDLPEELIAQEPLQNRDESRLMVLNKDTGEIKHDIFKNILTYLKPNDVLVLNDTKVIPARLYGVREDTGGKIEFVLLKRLGIDEWEILVKPGRRAKIGSKFIFGNGELKALILSDTDAGGRIVRFSYEGVFEEVLDKLGEMPIPPYIKKKLKDKNMYQTVYAKHEGSAAAPTAGLHFTNELLDKIREFGVKTVFITLHVGLGTFRPVKEEVIENHKMHSEFYIVNEDAADAINAARKAGGRIISVGTTSTRTLETVADDDGIIHAGSGWTDIFIYPGYKYKAIDGIITNFHLPESTLIMMISAFAGKENVMNAYKTAIENKYRFYSFGDAMLII

SEQ ID NO: 73127 - protein, 340 aa, unidentified
  source 1..340: note = Thermoanaerobaculum aquaticum
  REGION 1..340: note = tr|A0A062XT77|A0A062XT77_9BACT S-adenosylmethionine:tRNA ribosyltransferase-isomerase; OS = Thermoanaerobaculum aquaticum OX=1312852 GN=queA PE=3; SV = 1
MRTEDFAYELPPELIAAFPRPRGTSRLLVLPRQGSPWEANIRDIPALLTPGDLLLLNDVRVIPARLFGRRPGGGVCELLLLRPAGEGVWEAMGRPAARLREGTVVSFPWGRGVIQGRQGEGKLLVAFQPPLDASALEALGEVPLPPYIEKKRRAQPEDRRRYQTVFARRGLAVAAPTAGLHLTAELLAACEARGVEVVSLTLHVGPGTFKPVKSEDPRQHRLDPELYEISPETAGALNRALAFGRRIVAVGTTSVRALEDALKRGGGRVLPGVAHADTYILPGFVFRGTGALLTNFHLPRSTLLMLVSALAGRERVLAAYEMAKARGFGFYSYGDAMLIL

SEQ ID NO: 73128 - protein, 353 aa, Thermobacillus composti
  REGION 1..353: note = tr|L0EHI3|L0EHI3_THECK S-adenosylmethionine:tRNA ribosyltransferase-isomerase OS=Thermobacillus composti (strain DSM 18247 / JCM 13945 / KWC4) OX=717605 GN=queA; PE = 3SV=1
MFAHEFDFELPEELIAQTPLPERTASRLLALDRETGRIDHGTFTDLKRYLMPGDTLVLNDTRVLPARLHGIKPETGARVELLLLKQLEGDRWETLAKPAKRMRPGTELVFGEDENGAPLLRAVVLEAGESGFRTVEFRYDGIFQELLDRLGEMPLPPYIRERLDDRERYQTVYARREGSAAAPTAGLHFTPAFLDELRAAGVRTAFLTLHVGLGTFRPMTAERVEDHVMHAEYYEIGAETAALLNETRERGGRIVAVGTTSARTLETAAARFGPGKIEACSGWTDIFIYPGYNFLMVDALLTNFHLPKSTLVMLVSAFAGRDKIMEAYREAIERKYRFFSFGDAMFIYSNGKR

SEQ ID NO: 73129 - protein, 353 aa, Thermobacillus sp.; identical to SEQ ID NO: 73128
  REGION 1..353: note = tr|A0A3E0QQT8|A0A3E0QQT8_9BACL S-adenosylmethionine:tRNA ribosyltransferase-isomerase; OS = Thermobacillus sp. OX=2108467 GN=queA PE=3 SV=1

SEQ ID NO: 73130 - protein, 364 aa, Thermobacillus sp.
  REGION 1..364: note = tr|A0A1Y3QC56|A0A1Y3QC56_9BACL S-adenosylmethionine:tRNA ribosyltransferase-isomerase; OS = Thermobacillus sp. ZCTH02-B1 OX=1858795 GN=queA PE=3; SV = 1
MSRSKRKDNAVFAHEFDFELPEELIAQTPLPERTASRLLALDRTTGTIEHGTFTDLRRYLKPGDLLVLNDTRVLPARLRGIKPETGARVELLLLRRLEGDRWEVLAKPAKRLKPGTVLAFGEDETGAPLLHAVVQAEGEAGLRTVEFRYRGIFQELLDRLGEMPLPPYIRRRLEDRERYQTVYAKHDGSAAAPTAGLHFTNEFLDELRASGVRTAFLTLHVGLGTFRPMTVERVEDHVMHAEYYEVSAETAAMLNETREKGGRIVAVGTTSARTLETAAARFGPGKIEACSGWTDLFIYPGYRFLLVDALLTNFHLPRSTLVMLVSAFAGRELILKAYREAIERRYRFFSFGDAMFIYGTDGKR

SEQ ID NO: 73131 - protein, 336 aa, unidentified
  source 1..336: note = Thermobaculum terrenum
  REGION 1..336: note = tr|D1CFZ1|D1CFZ1_THET1 S-adenosylmethionine:tRNA ribosyltransferase-isomerase OS=Thermobaculum terrenum (strain ATCC BAA-798 / YNP1) OX=525904 GN=queA PE=3 SV=1
MRLQDFDYYLPPELIAQTPAEPRDSSRLLVLNKRTGEIQHAIFRDLPNYLSPGDVLVFNDTRVIPARLHGRRKQTGGNVEFLLVRHVKDTEWEAMGRPARRLKTGERVTIAEDLDAQVLEKLPEGLLLIRLPQEVHENLDKYGEIPLPPYIHDFHGDASRYQTVYARDPGAVAAPTAGLHFTEELISRLRDYGVDLRFITLHVGPGTFQPIKTERIEEHKMHSERYYIPEGLLEYLEEKRSAGNRVVAVGTTSVRALEDAAVRRQAGTWVETDLFIKPGYQFKIVDALITNFHLPKSTLMMLVAATGGYEHIMNAYRIAVENRYRFYSFGDAMLII

SEQ ID NO: 73132 - protein, 341 aa, Thermobrachium celere
  REGION 1..341: note = tr|R7RQH1|R7RQH1_9CLOT S-adenosylmethionine:tRNA ribosyltransferase-isomerase OS=Thermobrachium celere DSM 8682 OX=941824 GN=queA PE=3 SV=1
MNVKDFYFDLPEELIAQHPIEPRDMSRLMVLDKKTGEIEHRIFRDILEYLNEGDCLVLNNSRVIPARLFGVKEDTGANVEFVLLKRIDKNRWETLVKPGKKAKIGTKFVFGDGELRCTVLENTDSGGRIIEFEYEGVFEEILDRLGNMPLPPYIKEELKDKERYQTVYSKVEGSAAAPTAGLHFTHELLEKIQNKGVKIAYLTLHVGLGTFRPVKVENIEEHKMHSEFYMIDEENAEIINSVKRSGKRIIAVGTTSCRTLETASDENGYVKAQSGWTDIFIYPGYKFKCIDGLITNFHLPESTLIMLVSALAGRENILNAYNTAVKERYRFFSFGDAMFIK

SEQ ID NO: 73133 - protein, 341 aa, unidentified
  source 1..341: note = Thermoclostridium caenicola
  REGION 1..341: note = tr|A0A1M6G8Y2|A0A1M6G8Y2_9FIRM S-adenosylmethionine:tRNA ribosyltransferase-isomerase; OS = Thermoclostridium caenicola OX=659425 GN=queA PE=3 SV=1
MNLKDFWYPLPKELIAQHPLERRDQSRLLVLDREKQTMTHRVFRDIQEYLRKGDCLVINNTRVIPARLLGEKEGTGGKIEFVLLKRLENDVWEVILKPGRRAKPGSRFAFGDGRLMAEILRIADEGNRIVRFYYDGVFEEVLDQVGIMPLPPYIIENLEDRERYQTVYSKVDGSAAAPTAGLHFTEELLELLKARGVEVAEVTLHVGLGTFRPVKVENILEHHMHKEFYSVSEKAAEMINRARESHNRVIAVGTTSVRVLETVADDRGMVSPGQGETDIFIYPGYKFKAVDALITNFHLPESTLMMLVCAFAGRDFIMRAYQEAIEQKYRFFSFGDAMFVY

SEQ ID NO: 73134 - protein, 341 aa, unidentified
  source 1..341: note = Thermoclostridium stercorarium
  REGION 1..341: note = tr|A0A1B1YPE9|A0A1B1YPE9_THEST S-adenosylmethionine:tRNA ribosyltransferase-isomerase; OS = Thermoclostridium stercorarium subsp. leptospartum DSM 9219 OX=1346611 GN=qu eA PE=3 SV=1
MQLKDFYYELPKELIAQSPLEKRDMSRLLVLDRKTGKTTHLHFRDIKDYLNPGDCLVINNTRVIPARLLGVREDTGGKIEFVLLKKHDKDIWEVMLKPGRRAKVGTRFVFGDNLLKAEVLEIVEGGNRIVKFTYDGIFEEVLDKVGIIPLPPYITQKLKDRERYQTVYSKYNGSAAAPTAGLHFTEELIEELKNKGVRFAEVTLHVGIGTFRPVKTENIEDHKMHSEYFKIDAEACNIINKTRNDKGRVIAVGTTSCRVLESVADENGFVRPTEGETDIFIYPGYKFKAIDGLITNFHLPESTLLMLVSAFAGREKVLNAYKEAIELKYRFYSFGDAMFII

SEQ ID NO: 73135 - protein, 381 aa, unidentified
  source 1..381: note = Thermoclostridium stercorarium
  REGION 1..381: note = tr|L7VRV4|L7VRV4_THES1 S-adenosylmethionine:tRNA ribosyltransferase-isomerase OS=Thermoclostridium stercorarium (strain ATCC 35414 / DSM 8532 / NCIMB 11754); OX = 11213 35 GN=queA PE=3 SV=1
MLPLVSAEKFLYYSIWHHGERCLRKPHEQVRIFIQKEMINMQLKDFYYELPKELIAQSPLEKRDMSRLLVLDRKTGKTTHLHFRDIKDYLNPGDCLVINNTRVIPARLLGVREDTGGKIEFVLLKKHDKDIWEVMLKPGRRAKVGTRFVFGDNLLKAEVLEIVEGGNRIVKFTYDGIFEEVLDKVGIIPLPPYITQKLKDRERYQTVYSKYNGSAAAPTAGLHFTEELIEELKNKGVRFAEVTLHVGIGTFRPVKTENIEDHKMHSEYFKIDAEACNIINKTRNDKGRVIAVGTTSCRVLESVADENGFVRPTEGETDIFIYPGYKFKAIDGLITNFHLPESTLLMLVSAFAGREKVLNAYKEAIELKYRFYSFGDAMFII

SEQ ID NO: 73136 - protein, 341 aa, Thermocrinis albus
  REGION 1..341: note = tr|D3SLS2|D3SLS2_THEAH S-adenosylmethionine:tRNA ribosyltransferase-isomerase OS=Thermocrinis albus (strain DSM 14484 / JCM 11386 / HI 11/12) OX=638303 GN=queA; PE = 3SV=1
MIIFLKDMRTEEFDYYLPKELIAKYPVEPRHAARLMVINRKDGSIKHDIFWNLPLYLQEGDLVIFNNSKVLPARLFGHKPTGGRVEILLTDYVDKHVWRALIGGKNIREGMVIEVGEDLKVEVRRHLEGGKFEVFLISSDPARALDRYGHIPIPPYLEREDEPIDRVYYQTVFAQEEGSVAAPTASLHFSQELLDRLEEFGIKKAFITLHVSYGTFKPVKVSEVEEHRVDPEYIKVPQETIELIKRTKEKGKRVVAVGTTVVRALETAVDKPYEGWTDLYIYPGYQFKVVDALVTNFHLPRSSLLFLVCAFGGKDLIMHAYNVAVKERYRFYSYGDGMLIL

SEQ ID NO: 73137 - protein, 334 aa, Thermocrinis minervae
  REGION 1..334: note = tr|A0A1M6TDJ7|A0A1M6TDJ7_9AQUI S-adenosylmethionine:tRNA ribosyltransferase-isomerase; OS = Thermocrinis minervae OX=381751 GN=queA PE=3 SV=1
MRVEEFDYYLPLELIAKYPVEPRHAARLMVVRRDTGDITHSTFWNLDEFLEEGDLLVFNNSKVLPARLKAFKSTGGKVEVLLTDYITKDTWQALVGGKNIKEGMTLKVSEDFKVEVLKHIEGPKFLVKLVAEDPLKALDKYGRIPIPPYLEREDEPIDRIYYQTVFAREEGSVAAPTASLHFSEELLQKLQNKGIKMAFITLHVSYGTFKPVKVERVEEHRVDPEYIKVPQETVEAILQTKQKGKRVVAVGTTTVRALETAGFKPYEGWTDLYIYPGYSFRVVDALITNFHLPKSSLLFLVCSFGGKDLIMKAYKIAVENRYRFYSYGDGMLIL

SEQ ID NO: 73138 - protein, 334 aa, Thermocrinis ruber
  REGION 1..334: note = tr|W0DBM6|W0DBM6_9AQUI S-adenosylmethionine:tRNA ribosyltransferase-isomerase OS=Thermocrinis ruber; OX = 75906 GN=queA PE=3 SV=1
MNLKDFDYYLPPELIAKYPAVPRHSARLMVLNRKDKSIKHDIFWNLPQYLEEGDLLVFNNSKVLPARLYGRKPTGGKVEILLTDYIDKHTWDALIGGKGIREGIKILVAEDFEVEVLEHIEGGKFRVRLLTEDPAKALDKYGKIPIPPYLEREEEEIDRVYYQTVFAQEEGSVAAPTASLHFSEELLQRLKDFGIKMAFITLHVSYGTFKPVKVERIEEHRVDPEYVKVPKETVDLIMETKEKGKRVIAVGTTVVRALETKPFEPFEGWTDLYIYPGFQFKVVDGLITNFHLPRSSLLFLVCAFGGREFILSAYREAVEKRYRFYSYGDGMLIL

SEQ ID NO: 73139 - protein, 350 aa, Thermocrispum agreste
  REGION 1..350: note = tr|A0A2W4ITT8|A0A2W4ITT8_9PSEU S-adenosylmethionine:tRNA ribosyltransferase-isomerase; OS = Thermocrispum agreste OX=37925 GN=DIU77_18470 PE=3 SV=1
MLPEEAAAAAPPEAEGRPRDDVRLLVIDRAEGRWRHARFTELPALLQAGDLLVFNVSQTLPAALRAERADTGEPVRLHFSNRLDGYDTPTTTLPEHWVVEVRRADGTPSPHGETRPGDSFIIGDVARVEVLEPFARSRRYWVAAVSASAFELMARLGEPVRYGYVSKPWPLAAYQTEVGEVPGSAEMPSAARPFTGRIRWALRQAGVEFTSVLLHTGLSSDEVEGDHVGLDSVYPEWFSVPPAAAAQVNRALREGRRVIAVGTTVVRALESAAIGPREVAPVEGWTNLFVGPDRPPQVVRGLVTGLHAPRSTHLAMLAAFVPPEILRTAYADAQRSGYRWHEFGDLCLIV

SEQ ID NO: 73140 - protein, 145 aa, Thermocrispum agreste
  REGION 1..145: note = tr|A0A2W4JAH2|A0A2W4JAH2_9PSEU S-adenosylmethionine:tRNA ribosyltransferase-isomerase (Fragment) OS=Thermocrispum agreste OX=37925; GN = DIU77_12995 PE=3 SV=1
VAAGVLVVPLVLHTGVASPEAHERPYPEWFSVPATTARVVTRARRDGGRVIAVGTTVVRAMESAATPDGAVAPAEGWTDLVVTPEREVRVVDGLLTGLHEPRASHLDMLAAIAGPDLLARCYAEALAGGYLWHEFGDVNLLLPHR

SEQ ID NO: 73141 - protein, 351 aa, unidentified
  source 1..351: note = Thermodesulfatator autotrophicus
  REGION 1..351: note = tr|A0A177E9A3|A0A177E9A3_9BACT S-adenosylmethionine:tRNA ribosyltransferase-isomerase; OS = Thermodesulfatator autotrophicus OX=1795632 GN=queA; PE = 3 SV=1
MSEEVIPSIYDLETYTYPLPQELIAQYPSQKREESRLLVLDRRKQKIVHHEKFSEIEQYFERGDLLVINDTKVFPARIYGHKETGGQVEILLLRLPEKEKPVPALYRGKRIRPGTIIRFDKGLVARVLENLGEGKVLLSFESPDDPLVLIHEIGKVPLPPYIKRSPEIEDLFRYQTVYAKKPGSVAAPTAGFHFTNELLRRLKEKGVKILSITLHVGYGTFAPIKTRDIRKHQIHEEYVEISPEVAEIINLSRKAGHGLFAVGTTTMRALEFAACQTGKVEPVSGWCDLYIYPGFEFKVVDHLITNFHLPKSSLLVLVAAFAGLDLIKKAYNEAISRKYRFFSYGDAMLIW

SEQ ID NO: 73142 - protein, 351 aa, Thermodesulfatator indicus
  REGION 1..351: note = tr|F8ADY0|F8ADY0_THEID S-adenosylmethionine:tRNA ribosyltransferase-isomerase OS=Thermodesulfatator indicus (strain DSM 15286 / JCM 11887 / CIR29812) OX=667014 GN=qu eA PE=3 SV=1
MSEEKIPPIYDLETYTYELPEELIAQYPSQQREESRLLVIDRGKKEIIHHDKFAEIEKYFREGDLLVANDTRVFPARLYGQKETGGKVEVLLLRLPEKGKPVPALHRGKKIKKGSLIKFEKGLVARVLENLGEGKILISLEGVDDVLGVLYEIGNVPLPPYIKREPKKEDFSRYQTVYAKKLGSVAAPTAGLHFSEELLNRLQEKSVKFITITLHVGYGTFEPVKVRDIRKFQIHEEYVEISPEVAELINTSREEGRRLFAIGTTTMRTLEFAARRTGKIEPISGWCDLYIYPGFEFKAVDHLITNFHLPKSSLLVLVAAFAGLELTKKAYQEAVAKRYRFFSYGDATLIL

SEQ ID NO: 73143 - protein, 363 aa, Thermodesulfatator sp.
  REGION 1..363: note = tr|A0A432UD62|A0A432UD62_9BACT S-adenosylmethionine:tRNA ribosyltransferase-isomerase; OS = Thermodesulfatator sp. OX=1874629 GN=queA PE=3 SV=1
MRKSPEKIENFYANTSSEIPEDFRLEAYSYHLPEELIAYRPVERREASRLLVLHRKSGCLEHRKSFSAIQEYLRPGDLLVLNDTRVFPARLPGRKETGGRVEILLLRLPEPGRPVPALYRGKKLFPGYRVIFSEELAARVLSMSPEGELQLLLEGPADLLSAIRKVGKAPLPPYIKREPEAKDLLRYQTVYARKEGSVAAPTAGFHFSESLLARLEEKGVRRAFITLHVGYGTFAPVKTPDIRRHRLHEEFVEVPEETVKAVEETRQSGGRVVAVGTTTVRALEWAALSGKLRPRRGWCDLYIYPGFVFRVVEALVTNFHLPRSSLLILVSAFAGRRLILSAYQEAIRRRYRFYSYGDAMLIL

SEQ ID NO: 73144 - protein, 341 aa, unidentified
  source 1..341: note = Thermodesulfitimonas autotrophica
  REGION 1..341: note = tr|A0A3N5APQ7|A0A3N5APQ7_9THEO S-adenosylmethionine:tRNA ribosyltransferase-isomerase; OS = Thermodesulfitimonas autotrophica OX=1894989 GN=queA; PE = 3 SV=1
MLKPSDFDYELPPELIAQEPLPQRDASRLLVVHRDREDFEHRVFREIVAYLVPGDLLVVNETKVLPVRLHGVKETGGRVEVLLLRAVGQDLWEALVRPGRRVPPGTRLVFGGGWLTGEVVARTETGGRFIRFHYAGSFEEVLRRVGEVPLPPYIKQKLSAPERYQTVYAREAGSAAAPTAGFHFTPELLATLRAMGVGVVPVVLHIGLDTFRPVREENIAAHRMHREEYFVPEATATAVNQAKAEGRRVIAVGTTVVRCLETVAGEGSRVRAGAGMTDLFIYPGYRFKVVDALITNFHLPRSTLLMLVAAFAGREKILRAYREAVRLRYRFCSFGDAMLIL

SEQ ID NO: 73145 - protein, 350 aa, unidentified
  source 1..350: note = Thermodesulfobacteria bacterium
  REGION 1..350: note = tr|A0A496QKC6|A0A496QKC6_9BACT S-adenosylmethionine:tRNA ribosyltransferase-isomerase; OS = Thermodesulfobacteria bacterium OX=2202153 GN=queA PE=3; SV = 1
MIADFSLVEYDYHLPPHLIAQYPLDDRSSSRLMVLDRNTGKVSHRTFRDLLDYTEQGDCLVLNDSKVFPARLNCIKSTGGKTEFFLLHFPRESGNGVAFAKALCRSSKPVRPSQKIRCKGLLEIEVLEVSSAGQVDVKLVYQGELLLALESCGDIPLPPYIKRSPVPSDVEQYQTTYAKKIGSVAAPTAGFHFTEEQLRLAEKKNINIAWITLHVGYGTFAPVRISDIREHRIHHEWISVPESTAEKIISTRKTGGRVIAVGTTTARALEATANGTGEINAFQGLCDLYILPGHPFQVVDCLITNFHLPKSSLLILVSAFAGRSKIFSAYKEAMNAGYRFFSYGDAMLIL

SEQ ID NO: 73146 - protein, 335 aa, unidentified
  source 1..335: note = Thermodesulfobacteriales bacterium
  REGION 1..335: note = tr|A0A524JTA1|A0A524JTA1_9BACT S-adenosylmethionine:tRNA ribosyltransferase-isomerase; OS = Thermodesulfobacteriales bacterium OX=2528040 GN=queA; PE = 3 SV=1
MKASDFDYHLAEEQIAYHPKAQRHNSRLLLLNKNSGEIDHRNFYELPTFLNPGDVLVLNNTKVIPARLYGKRKSGKEVEILLVHKLGEKIWECLVKNPKNNDELEFAHGLKGKLSKDEINSWFIEFDEPVDDYIELYGKMPLPPYINREAQESDRVSYQTVYADKKGAIAAPTAGLHFTAELLDEIKNKGVEIEYVTLHVGIGTFKPVKVENIEDHKMHGEFRSISTTTASAINKAKAQGRRVVAVGTTVVRTLESSVNENGEVVPQMGKTDLFIVPGFEFKVVDALITNFHLPRSTLLMLVSAFSDYKYIFNAYDEAREKGYRFLSYGDAMFIN

SEQ ID NO: 73147 - protein, 347 aa, Thermodesulfobacterium commune
  REGION 1..347: note = tr|A0A101FHY7|A0A101FHY7_9BACT S-adenosylmethionine:tRNA ribosyltransferase-isomerase; OS = Thermodesulfobacterium commune OX=1741 GN=queA PE=3 SV=1
MSVIPKEFRLDYYDYPLPEELIAYFPVEDRKSSHLLVIDRKTQKLFFHQTFAEIERYFQKGDLLVLNNTKVFPARLKGIKPTGGEVELLLFQKPQGLSFQTLALIKGKRIRKGTEIMANEITIKVLESLEGGRFLVELKANQPLEILIYKHGKAPLPPYIKREPEELDLLRYQTVYAQKEGSIAAPTAGFHFDSYLLDLLKQKGVSINFITLHVGYGTFAPIKVQDIRKHRVEPEYIEVESEVIEEIKKALKEKRRIFAVGTTTVRTLEFIAQKGFIPYKGLCDLYIYPGFTFQVVSAMITNFHLPKSSLLLLVCAFAGRDLILKAYQEAIAQKYRFYSYGDATLIL

SEQ ID NO: 73148 - protein, 347 aa, Thermodesulfobacterium commune; identical to SEQ ID NO: 73147
  REGION 1..347: note = tr|A0A075WRE0|A0A075WRE0_9BACT S-adenosylmethionine:tRNA ribosyltransferase-isomerase; OS = Thermodesulfobacterium commune DSM 2178 OX=289377; GN = queA PE=3 SV=1

SEQ ID NO: 73149 - protein, 349 aa, unidentified
  source 1..349: note = Thermodesulfobacterium geofontis
  REGION 1..349: note = tr|F8C4G5|F8C4G5_THEGP S-adenosylmethionine:tRNA ribosyltransferase-isomerase OS=Thermodesulfobacterium geofontis (strain OPF15) OX=795359 GN=queA PE=3 SV=1
MVLIPKEFDIETYNYKLPEDLIAYYPPKERTESKLLVIDRKKEEFYFHEKFSEIENYLKEGDLLILNNTKVFPARIKGKKATGGEVELLLFQKPEGFIFTTSALIKGKRIKKGQEFKVNDAIKIKVLEKYEGGKFLVELKSKEYKLEELIYKYGKAPLPPYIKREPEDIDLERYQTVYAEKEGSIAAPTAGFHFDEILLTKLKEKGVIIKYITLHIGYGTFAPIKVKDIRKHKIEPEYVEVDEEVISEIKLAQAEKRRIIAVGTTVVRTLEFIARKGFIPYKGFCDLYIYPGFNFQVVSAMITNFHLPKSSLLLLVCAFAGRSLIFKAYEEAIKRKYRFYSYGDATFII

SEQ ID NO: 73150 - protein, 162 aa, unidentified
  source 1..162: note = Thermodesulfobacterium geofontis
  REGION 1..162: note = tr|A0A2N7PN67|A0A2N7PN67_9BACT S-adenosylmethionine:tRNA ribosyltransferase-isomerase (Fragment) OS=Thermodesulfobacterium geofontis OX=1295609; GN = C0190_04725 PE=3 S V=1
PTAGFHFDKNLLARLEERGVIIKYITLHIGYGTFAPIKVRDIRKHKLDPEYIEVEEDVILEIKSALSEKRRIIAVGTTVVRTLEFVAKKGLIPYKGLCDLYIYPGFKFQIISAMITNFHLPKSSLLLLVCAFAGRDLIFRAYKEAIKRRFKFYSYGDATFII

SEQ ID NO: 73151 - protein, 336 aa, unidentified
  source 1..336: note = Thermodesulfobium acidiphilum
  REGION 1..336: note = tr|A0A2R4VZQ5|A0A2R4VZQ5_9FIRM S-adenosylmethionine:tRNA ribosyltransferase-isomerase; OS = Thermodesulfobium acidiphilum OX=1794699 GN=queA PE=3; SV = 1
MFLDKELMNDLCYFLPNERIAQSPIEPRDNANLLVVNREKLSFEDCIVRDLPNFLYKGDLIILNNTKVIKARLYAITDTSAKVEILLIKKIDIKTGLFMTKPGKRLKKGKEIIINNKKIGIVKDVDSQGRRIIEFYEEIDTILEEFGMIPIPPYVKKFSKDFNEKYQTKFANVPGSVAAPTAGLHFTDNLLEELREKGVLIKFITLHVGPGTFKSLSNEGEVLLEPEWVDISQDVCDSIKKAKGNNNKILVVGTTTMRTVESTNLEPYSGYIDTIILPGYNFKVPDMFMTNFHLPKTSLLALTMAFGGIELIKKAYSYAIENDYRFYSFGDAMLII

SEQ ID NO: 73152 - protein, 336 aa, Thermodesulfobium narugense; identical to SEQ ID NO: 73151
  REGION 1..336: note = tr|A0A2J6XEE1|A0A2J6XEE1_9FIRM S-adenosylmethionine:tRNA ribosyltransferase-isomerase; OS = Thermodesulfobium narugense OX=184064 GN=queA PE=3 SV=1

SEQ ID NO: 73153 - protein, 335 aa, Thermodesulfobium narugense
  REGION 1..335: note = tr|M1E4L8|M1E4L8_9FIRM S-adenosylmethionine:tRNA ribosyltransferase-isomerase OS=Thermodesulfobium narugense DSM 14796 OX=747365 GN=queA PE=3 SV=1
MILEKKLMNDLNYFLPNEKIAQNPIEPRDNAKLLVVDRKKLSFEDCIVRDLPNFLNEGDLIILNNTKVIKARLYAITDTSAKVEMLLIKKLDNKTGLFMTKPGKRLKKGKEIIINSKKMGIVRDIDLQGRRIIELYDEIDKVIEEFGMIPIPPYVKKFSKDFNEKYQTKFANVPGSVAAPTAGLHFTESLLESLREKGVLIKFITLHVGPGTFKSISNEGEVLLEPEWVDISQDVCDSIKKAKGNNKILVVGTTTMRTVESTNLEPYSGYIDTVILPGYNFKVPDMFMTNFHLPMTSLLALTMAFGGIELIKKAYKYAIENDYRFYSFGDAMLIL

SEQ ID NO: 73154 - protein, 369 aa, Thermodesulforhabdus norvegica
  REGION 1..369: note = tr|A0A1I4SAZ1|A0A1I4SAZ1_9DELT S-adenosylmethionine:tRNA ribosyltransferase-isomerase; OS = Thermodesulforhabdus norvegica OX=39841 GN=queA PE=3; SV = 1
MNTQRTLEERAISYRLDDYDYDLPPELIAQMPADRRDESRLMVLDRRSRTWEHRVFSEIVHLLRPGDVLVLNNTRVVRARLTARKPSGGKVELLILNPFEGRESQKGKEYGCITRSSKPLKPGMILTLENASEDIQIEIAEVPEPGKAHIRLRTDLPLLSVLERFGSVPLPPYIRRNEANRKKLLSLDLSRYQTVYALKPGAVAAPTAGFHFTENLLEELRNKGIFLAYLTLHVGYGTFAPVRSEDIRHHVMHSEWCEIDDSCVNTIEEARRSGGRVIAVGTTCVRALEWVMTNLGKLQPHAGWCDHYIYPGYRFKIVDAMVTNFHLPRSTLLLLVAAFAGKDFILAAYREAVRERYRFFSYGDAMLIT

SEQ ID NO: 73155 - protein, 344 aa, Thermodesulfovibrio aggregans
  REGION 1..344: note = tr|A0A0U9HSH3|A0A0U9HSH3_9BACT S-adenosylmethionine:tRNA ribosyltransferase-isomerase; OS = Thermodesulfovibrio aggregans OX=86166 GN=queA PE=3 SV=1
MKITELDYPLPADLIAQEPILERDKARLLVLHKKTGQIEHKIFYEITNYFQEGDMLIINNTKVIPARLVGRKPTGGKIEILLIKQKKALSNEVEWEIMTKGKYEGDVFIDDIKAEIRINCDGKKIIFSMSPQDVKKLLDEKGFMPLPPYIKRQPSQSDRQYYQTVYAKANGSIAAPTAGLHFTDELLKNIANRGVKLREITLHVGVGTFKPIKVKNLEEHKMDSEYFEIEKSLIEEIYLVKKEGKKIFSVGTTTTRALEGYASEEYEDMGTDDFKIRGLTDIFIYPGYEFKIVDALITNFHLPKSTPLALVYAFCDSEKVKKAYMEAVEKRYRFFSYGDAMLIL

SEQ ID NO: 73156 - protein, 344 aa, Thermodesulfovibrio sp.
  REGION 1..344: note = tr|A0A1C3FFR1|A0A1C3FFR1_9BACT S-adenosylmethionine:tRNA ribosyltransferase-isomerase; OS = Thermodesulfovibrio sp. N1 OX=1871110 GN=queA PE=3 SV=1
MKIIELDYPLPADLIAQKPLEQRDQSRLLVLHKDSGEIEHKIFSEIVEYFHEEDIIIINNTKVIPARLIATKPTGGKIEILLIRQKEASSHYVVWEVIKKGEYEGEIFIDEISAELRKSEGWQIVFKNMNAEDVQNLINEKGFMPLPPYIKRKPDQSDKQHYQTVYAKKSGSIAAPTAGLHFTKELLEKIVNKGVKLLEITLHVGVGTFKPIKVENLKEHKMDSEYFEIEKTVIEEIYSAKKKGKRIFSVGTTTTRALEGYASQIYEDMGSDNEKIKGNTDIFIYPGYKFKIIDALITNFHLPKSTPLALVSALCDIEKVKKAYMEAIEKRYRFFSYGDAMLII

SEQ ID NO: 73157 - protein, 335 aa, Thermodesulfovibrio sp.
  REGION 1..335: note = tr|A0A1G3XSL9|A0A1G3XSL9_9BACT S-adenosylmethionine:tRNA ribosyltransferase-isomerase; OS = Thermodesulfovibrio sp. RBG_19FT_COMBO_41_18 OX=1802372; GN = queA PE=3 SV=1
MKVADFDFFLPEYLVAKRPLKERSNSRLLVLHKDGIVEHKRFSDLPSYLDKGDLLITNNTRVFPARLTGLKKSGGRLEILLVRKKEGNAWEVLSKGRFTGTLKISEGLQLELHNGDTAYFKYSGDFMDIIWKYGNMPLPPYIKRSPDESDKETYQTIYAKKEGSIAAPTAGLHFTNRLLNKITSKGILLRELTLHVGIGTFSPIRTKNVEEHSMGIEYFEIDNELISEIKEVKASGKRVISVGTTTTRAIEGYMSSNCNVFSQNGRLKGTTDIFIYPGYRFSIVDSLVTNFHLPRSTPLMLASAMYGWENLIKAYKEAIAEGYRFLSYGDAMLIL

SEQ ID NO: 73158 - protein, 345 aa, Thermodesulfovibrio yellowstonii
  REGION 1..345: note = sp|B5YKE5|QUEA_THEYD S-adenosylmethionine:tRNA ribosyltransferase-isomerase OS=Thermodesulfovibrio yellowstonii (strain ATCC 51303 / DSM 11347 / YP87); OX = 289376 GN=q ueA PE=3 SV=1
MKITELNYTLPTDLIAQKPLSERDKSRLLVLHKNTGEIEHRIFYEIVEYLNEGDILIINNTKVIPARLIAEKPSGGKIEILLIKEKKCSSQNVVWEVMTKGSYEGEVFIDEFIAELRNNCDGRYIVFKNMTSPKVRNLINEKGFMPLPPYIKRKPIQSDRQDYQTVYAKMNGSIAAPTAGLHFTKELLETIISKGVKLREITLHVGVGTFKPIKVDKLQEHKMDPEYFEIDKTLIEEIYAIKKAGKRIFSVGTTTTRALEGYASGKYEDRGSDNYKIKGSTDIFIYPEFSFKIVDALITNFHLPKSTPLAMVYAFCEMQKVKKAYREAIEKGYRFFSYGDAMLII

SEQ ID NO: 73159 - protein, 349 aa, unidentified; identical to SEQ ID NO: 65613
  source 1..349: note = Thermoflavifilum aggregans
  REGION 1..349: note = tr|A0A2M9CWU8|A0A2M9CWU8_9BACT S-adenosylmethionine:tRNA ribosyltransferase-isomerase; OS = Thermoflavifilum aggregans OX=454188 GN=queA PE=3 SV=1

SEQ ID NO: 73160 - protein, 345 aa, Thermoflavimicrobium dichotomicum
  REGION 1..345: note = tr|A0A1I3MDR5|A0A1I3MDR5_9BACL S-adenosylmethionine:tRNA ribosyltransferase-isomerase; OS = Thermoflavimicrobium dichotomicum OX=46223; GN = SAMN05421852_1037 PE=3 SV=1
MSITFHLPTALHASTPPERRGIRRDQVRLMVSDKHTGESIHTSFHQLPQFLRSGDVLVLNASRTIPALLYGKWYRQGQLLSDKVEIRLAHRLDERIWQALVITEGVKKGDFFYFSTKLFAEVIRVRSGFALIEMRFSLSGAFLFEQIYALGQPIRYEYVQNPWQLEYYQTVYGSFPGSVELPSAGRAFTWEMLFRLKQKGISIAFLLLHTGLSYFLGNQVNPEENGEEYMIPDRTATLVNQAKQSGGRVIAVGTTVVRALESAVSPTGQCMSTKGWTRLYIHSHYSLQLVDGLLTGFHEPEASHLDLLTAFVESHQLKQMYDEAIQQQYLWHEFGDLHLILPIST

SEQ ID NO: 73161 - protein, 344 aa, Thermoflavimicrobium dichotomicum
  REGION 1..344: note = tr|A0A1I3R7B4|A0A1I3R7B4_9BACL S-adenosylmethionine:tRNA ribosyltransferase-isomerase; OS = Thermoflavimicrobium dichotomicum OX=46223 GN=queA PE=3; SV = 1
MDVSLFDFDLPKELIAQKPNKDRASSRLMIVNRAAEEITHTQFPEIVHQLKPGDVLVLNDSRVRPARLIGIKEQTGAKIELLLLKPLGEDRWEALVKPAKRVQEGTVITFGNGQLQAIAEEKTEVAGGRIFRLQYEGNDIEALFHELGQMPLPPYIHEQLDDPERYQTVFSRVIGSAAAPTAGLHFTEEILEEIRNKGVHVVFITLHVGLGTFRPVTVERVEEHQMHAEYYEVSEETARTIQEAKQCGGRVIAVGTTSVRTLETVAGRFGGEIRASSGWTDIFIYPGYQFQVIDGLLTNFHLPQSTLLMLVSAFSSRELILHAYQEAIKHRYRFFSFGDCMLIL

SEQ ID NO: 73162 - protein, 344 aa, Thermoflavimicrobium sp.
  REGION 1..344: note = tr|A0A364K8S7|A0A364K8S7_9BACL S-adenosylmethionine:tRNA ribosyltransferase-isomerase; OS = Thermoflavimicrobium sp. FBKL4.011 OX=2137476 GN=queA; PE = 3 SV=1
MDVSLFDFELPKELIAQTPNLKRSSSRLLIMDRKTGDMNHTYFPSIVDQLQTGDVLVLNDSRVRPARLIGVKEETGAKIELLLLKPLGNDRWEALVKPAKRVKEGTVISFGDGQLQAVAKESTEVAGERIFQLLYEESDLDQLLIKLGQMPLPPYIHEQLDDPERYQTVYSKVVGSAAAPTAGLHFTEEILDQIRKKGVHVVFITLHVGLGTFRPVTSEQVEEHQMHAEYYEMNQETARIINTAKKQGGRVIAVGTTSIRTLETVASLNKGEAASCNGWTDIFIYPGYQFKMVDGLLTNFHLPQSTLLMLVSAFSSREHILKAYHEAIKQRYRFFSFGDCMLII

SEQ ID NO: 73163 - protein, 314 aa, unidentified
  source 1..314: note = Thermoflexia bacterium
  REGION 1..314: note = tr|A0A3M1DIH6|A0A3M1DIH6_9CHLR S-adenosylmethionine:tRNA ribosyltransferase-isomerase (Fragment) OS=Thermoflexia bacterium OX=2420334 GN=queA; PE = 3 SV=1
MFPIRMDDFDYYLPESLIAQEPVEPRDAARLMVLDRATGSISHHHVRDLPDLLRPGDLLVFNESRVLRARLFARKPTGGKVEILLLRPRGEHIWEALTRGRRIQTGLKLEILRRPEGEPTGATAQVIGIGDQGVRILSFDRPVLDLAEGVGQIPLPPYIHRPLQDPERYQTVFARTPGSVAAPTAGLHFTPGLLLRLRERGIAFAFVTLHVGMDTFRPVKEEWAEEHRMHQEYCRLTADVAEQVNRAKLEGRRVIAVGTTSVRVLETAALAAVGGCPEAEACPWRVLAPYEGWTDLYIYPGFRFRVVDGLMTNF

SEQ ID NO: 73164 - protein, 413 aa, unidentified
  source 1..413: note = Thermoflexibacter ruber
  REGION 1..413: note = tr|A0A1I2AB28|A0A1I2AB28_9BACT S-adenosylmethionine:tRNA ribosyltransferase-isomerase; OS = Thermoflexibacter ruber OX=1003 GN=queA PE=3 SV=1
MKPDLEAINLADYYYELPEERIAKFPLEKRDESKLLIYNQQAQIVHDQFKNISTYLSQEDTLFFNDTKVTPARLYFQKHTGAVVEIFLLNPITPLEVHSAMLTTDQCTWACAVGNLKRLKNEPVLERIVSINGQEITLKAELEDYEKQIINFEWDSPHISFAELLTYIGEVPLPHYLKREAQESDKTNYQTIYAKNEGAVAAPTAGLHFTENLLEKIQKQGVKLDYLTLHVAGGTFQPIRHEKIIDHPMHAEQMIVSRQNLENLLSSKKIIAVGTTSMRTLESLYWYGVKLMSLPDAPFKIAKLMPYRYEVEILPSRQEAFQEVLSYMKRHKLEKISGETEIMIVPTYPFQVCDALITNFHLPSTTLILLVAAFVGEAWKQIYQAALENNYRFLSFGDSSLLFRQSNINKISV

SEQ ID NO: 73165 - protein, 350 aa, unidentified
  source 1..350: note = Thermoflexibacter ruber
  REGION 1..350: note = tr|A0A1I2A3X0|A0A1I2A3X0_9BACT S-adenosylmethionine:tRNA ribosyltransferase-isomerase; OS = Thermoflexibacter ruber OX=1003 GN=queA PE=3 SV=1
MKLSAFKFDLPDDAIALHPTPNRDESRLMVVHRSTGKIEHRMFKDILDYFDEGDVMVINNTKVFPARLYGKKEKTGAKIEVFLLRELSKDARLWDVLVDPARKIRVGNKLYFGDGELVAEVIDNTTSRGRTIRFLFDGNDEEFTKMINELGEPPIPNDIKKLRPADAEDRERYQTIFAQHVGAVAAPTAGLHFTPHLVRRLQLKGVEIEPITLHVGLGTFREVDVEDLTKHKTDSENYNVPLKTAERVNEALDANKRVCAIGTTVMRTLETSVTAGGRLKDSSGWTDKFIFPPYDFKICKALVTNFHKPMSTLLMMVCAFGGYDLTMKAYDIAIKERYRFFTYGDAMLIL

SEQ ID NO: 73166 - protein, 358 aa, unidentified
  source 1..358: note = Thermoflexus hugenholtzii
  REGION 1..358: note = tr|A0A212QS97|A0A212QS97_9CHLR S-adenosylmethionine:tRNA ribosyltransferase-isomerase; OS = Thermoflexus hugenholtzii JAD2 OX=877466 GN=queA PE=3; SV = 1
MEPKDLLSLEAYDYELPPDRIAQEPVEPRDASRLMVVDRATGRIEHRIFREIVAYLRPGDLLVFNDTRVIPARLFAMKPTGGRVELLLVRRVAADRWWAMVRGRGVRPGLRLQLLSGNQPIDLHAEVEAEGEGPLRLLRFSVPPEGWLERLGVIPLPPYIRKPLHDPERYQTVYARAPGSVAAPTAGLHFTPELLARLREHGVRFAFVTLHISLDTFRPIETPDVREHKLHREWCILSPETAEQINRTRLEGGRIVAVGTTVVRVLETAARYGLGCSPEDVCPWRTVGPFEGETDLYIYPGFTFRAVDALITNFHLPRSTLLLLVAAFMGYDLMRRAYQTAIAEGYRFYSFGDAMLIL

SEQ ID NO: 73167 - protein, 338 aa, unidentified
  source 1..338: note = Thermoflexus hugenholtzii
  REGION 1..338: note = tr|A0A2A9HGT0|A0A2A9HGT0_9CHLR S-adenosylmethionine:tRNA ribosyltransferase-isomerase; OS = Thermoflexus hugenholtzii OX=1495650 GN=queA PE=3 SV=1
MRTDDFAYDLPDELIAQEPAEPRDSARLMVVDRAAGTIVHRVVRDLPELLRPGDLLVVNDTRVMAARLFGRREDTGGQVEILLVRPLTDTRWEVLMKPARRAAEGRRFVFDSHEGALAAVCAGRSGEAVVLEFERPFDPARVGEVPLPPYIRSFRGDPERYQTVYAREAKSAAAPTAGLHFTPELLERLRERGIERTAVTLEVGPGTFKPVNVDDPREFDLHAEHVTVPEEAAAAIQRARAEGRRVVAIGTTVVRTLEHVARECGEIRAYAGWTSLKILPGDAFLAVDVLMTNFHLPRSTLLMLVCAFAGYDLVMEAYRTAVRERYRFYSFGDAMLIL

SEQ ID NO: 73168 - protein, 391 aa, unidentified
  source 1..391: note = Thermogemmatispora argillosa
  REGION 1..391: note = tr|A0A455T502|A0A455T502_9CHLR S-adenosylmethionine:tRNA ribosyltransferase-isomerase; OS = Thermogemmatispora argillosa OX=2045280 GN=queA PE=3; SV = 1
MENNQQDFQRQKSGEEELQEKEGVSYRISDYDYELPQELIAQQPVEPRDASRLLVVHRATGALEHRHFRDIGDYLREGDLLIANQSRVIPARLLGKREGTGGAVEVLLLAQRADLGADTWEALVRPGRRLREGARILFGEDQAAGLPPRLQGEILGRTEAGGRFVRFTLTPQYLALLAQTKAEPPAVAQVIEEIGRMPLPPYIREPLANPERYQTVYARIAGSAAAPTAGLHFTPELLDRLRAQGVRIGFVTLHVGLDTFRPVDVEDVRDHKMHSEEIDIDEATAELVNETRRAGKRVVAVGTTSVRVLESVANLFNGQVRAYHGHTNLFITPGYRFKVVDALITNFHLPRSTLILLVSAFAGKALIEKAYQEAIRQRYRFYSFGDAMLLL

SEQ ID NO: 73169 - protein, 387 aa, unidentified
  source 1..387: note = Thermogemmatispora argillosa
  REGION 1..387: note = tr|A0A455T4I3|A0A455T4I3_9CHLR S-adenosylmethionine:tRNA ribosyltransferase-isomerase; OS = Thermogemmatispora argillosa OX=2045280 GN=KTA_29250; PE = 3 SV=1
MSILSQNRQDYGADEQEGKRDAYLKTIRTLRTLTDEDKLQPLRFELPDWLEAKGPPEARGLARDEVRLLVSYCHANRLVHTQFRALPTFLRRGDVLVINTSGTMKAALHAERADGELLELHLSTRLPAELWVVEVRQPLPAGSRLFLTMRAGEVLTLPAGGRLELHRPYVQSGRTGEVRLWVATLDLPEPPDLYLEHHGFPIRYSYVEREWPIEYYQSVFVTEIGSAEMPSASRPFTAELVTRLVAEGVQFAPVLLHTGVASLETHEPPYEEYYRVPVESAELVNAARRQGRRVIAVGTTSMRAIETVADQYGVVHAGEGWTDLVITPRRGLRVVNGLLTGFHEPQASHLALLEALAQREHLEAAYAAALQEGYLWHEFGDVHLILP

SEQ ID NO: 73170 - protein, 364 aa, unidentified
  source 1..364: note = Thermogemmatispora tikiterensis
  REGION 1..364: note = tr|A0A328VL42|A0A328VL42_9CHLR S-adenosylmethionine:tRNA ribosyltransferase-isomerase; OS = Thermogemmatispora tikiterensis OX=1825093 GN=queA PE=3; SV = 1
MSDYDYELPPELIAQQPIEPRDASRLLVVHRTTGALEHRHFRDIGDYLRAGDLLIANQSRVIPARLLGKREGTGGAVEVLLLAHRADLGADTWEALVRPGRRLREGARILFGEDREAGLPARLQGEILGRTEAGGRFIRFALTPEYLAVHNQAQTRPPAVAQVIEEIGRMPLPPYIREPLANPERYQTVYARIAGSAAAPTAGLHFTPELLDRLRAQGVRVGFVTLHVGLDTFRPVDVEDVRDHKMHSEEIDIDETTAALVNETRRAGGRVVAVGTTSVRVLESVASLFNGQVRAYHGHTNLFITPGYRFKVVDALITNFHLPRSTLILLVSAFAGKALIEKAYQEAIRQRYRFYSFGDAMLLL

SEQ ID NO: 73171 - protein, 352 aa, unidentified
  source 1..352: note = Thermogemmatispora tikiterensis
  REGION 1..352: note = tr|A0A328VPH7|A0A328VPH7_9CHLR S-adenosylmethionine:tRNA ribosyltransferase-isomerase; OS = Thermogemmatispora tikiterensis OX=1825093; GN = A4R35_11170 PE=3 SV=1
MTALSFELPSQLEAGEPPEARGLARDEVRLLVSYRSDNRLVHARFRELPAFLRRGDVLVINTSGTMKAALPAERAGGEPLELHLSTCLPAGLWVVEVRLPLSRGSQPFFGLEPGEVLGLPQGGRAVLHTPYGRNSPPKAAGQLRLWVATLELPAPLETYLEHYGFPIRYGYVRQEWPIDYYRSVFVTEVGSAEMPSASRPFTPELVTRLVAEGVQFAPLLLHTGVASLEAHEPPYEEYYRVPAESAELVNAALRQGRRVIAIGTTPMRALETVADQYGVVHPGEGWTDLVITPQRGLRVVGGLLTGFHEPRASHLALLEALAGREHLERAYAAALQEGYLWHEFGDVHLILP

SEQ ID NO: 73172 - protein, 372 aa, unidentified
  source 1..372: note = Thermogutta terrifontis
  REGION 1..372: note = tr|A0A286RIG3|A0A286RIG3_9PLAN S-adenosylmethionine:tRNA ribosyltransferase-isomerase; OS = Thermogutta terrifontis OX=1331910 GN=queA PE=3 SV=1
MNRTRGLLVGAPVATQIATIQGDSMIDINEYDYELPKHLIAQRPLPNRADARLMVVDRRSQTIEHRHVRDLPEILQPGDILVLNNTRVVPARLVGYRTETRGRWEGLFVEADPSGVWQVIGKTRGKLRPGETITLVNREGRDDIKLFVIGKIADGGWLVSPDTSEDTWQTLERLGRVPLPPYIRGGQMMEEDRTRYQTVYAQVPGSVAAPTAGLHFTPQLLNSLRTQGVKIVFVTLHVGLGTFVPIKTSQIEEHKMHSEWGEIAPEVAEEINAARKEGGRVVAVGTTVTRLLETAAASGELKPFAGRTDLYIRPPYQFKIVDALMTNFHLPKTTLLVLVRTFGGDELIKRAYDEAIREEYRFYSYGDAMLIL

SEQ ID NO: 73173 - protein, 342 aa, Thermohalobacter berrensis
  REGION 1..342: note = tr|A0A419TB21|A0A419TB21_9CLOT S-adenosylmethionine:tRNA ribosyltransferase-isomerase; OS = Thermohalobacter berrensis OX=99594 GN=queA PE=3 SV=1
MKKQDFYFELPEELIAQHPLKNREESRLMILDKENGEIEHRKFKDIINYLNPGDCLVLNDTRVIPARLFGKRKDTGGKIEFLLLTRLEDDKWEILVKPGKRAKIGTEFVFGDGLLEAKILGINRESGTRIAEFKYDGIFEEILDRLGKMPLPPYIKKELDDKERYQTVYSKNEGSAAAPTAGLHFTHELLEKIEKKGIEIVYITLHVGLGTFRPVKVENIKEHKMHSEYYEVSKKAAETINRIKESGGRIISVGTTTTRTLESVADDNGKVKAQKGWTDIFIYPGYKFKVVDNLITNFHLPESTLIMLVSALTGRKNILNAYNVAVKENYRFFSFGDAMFIK

SEQ ID NO: 73174 - protein, 341 aa, Thermohydrogenium kirishiense
  REGION 1..341: note = tr|A0A4V2W9H7|A0A4V2W9H7_9FIRM S-adenosylmethionine:tRNA ribosyltransferase-isomerase; OS = Thermohydrogenium kirishiense OX=937254 GN=queA PE=3; SV = 1
MNLHEFYYDLPEELIAQEPLKNRDESRLMILNRLTGEIKHDIFKNIISYLNPNDVLVLNDTKVIPARLIGVREDTGGKIEFVLLKRLSSDEWEILVKPGRRAKIGSKFIFGNGELKAEVISNTDVGGRIVRFSYEGIFEEVLDKLGEMPVPPYIKKKLEDKNMYQTVYAKHEGSAAAPTAGLHFTNKLLDDIRKYGVKTVFVTLHVGLGTFRPVKEEVIEKHKMHSEFYTVTEEAAQAINTARESGGRIISVGTTSTRTLETVADENGIIHAGSGWTDIFIYPGYKYKAIDGIITNFHLPESTLIMMISAFAGKENVMNAYKTAIDHKYRFYSFGDAMLII

SEQ ID NO: 73175 - protein, 333 aa, unidentified
  source 1..333: note = Thermoleophilia bacterium
  REGION 1..333: note = tr|A0A2G4H4L4|A0A2G4H4L4_9ACTN S-adenosylmethionine:tRNA ribosyltransferase-isomerase; OS = Thermoleophilia bacterium OX=2026888 GN=queA PE=3 SV=1
MRLSELDYELPEELIAQAPLEPRDASRLLIVDRATATLEDAVFSDLPGLLRADDLVVLNSTRVRAARLSVTRATGGAAEVLLLEPQGDAWQALVRPARKLKPGARLAGNGLEVEIVEVGEAGEAIVRLHAEGSIDAAIEQAGVMPLPPYIRATVDDAERYQTVYARTIGSAAAPTAGLHFTPALLERVRATCEVVDVDLHVGLDTFRPVTVDSLEQHEMHSEWYSVDPSVRRSIASALTEGRRVVAIGTTTTRVLETIADPLAPDAGRTSILLQPGVSFRTVGALVTNFHLPRSTLLALVMGLAGESLIRDAYAHAVNTRYRFYSFGDAMVIL

SEQ ID NO: 73176 - protein, 343 aa, unidentified
  source 1..343: note = Thermolongibacillus altinsuensis
  REGION 1..343: note = tr|A0A4R1QG66|A0A4R1QG66_9BACI S-adenosylmethionine:tRNA ribosyltransferase-isomerase; OS = Thermolongibacillus altinsuensis OX=575256 GN=queA PE=3; SV = 1
MKVDLFDFHLPEELIAQTPLPNREASRLMVLNKRTGETKHEETFRAILSYLNEGDCLVLNDTRVLPARLYGEKEDTGAHIEVLLLKQLEGDRWETLVKPAKRVKVGTTLSFGDGRLKATCVEALEHGGRVLEFAYDGIFYEVLEALGEMPLPPYIKEQLDDRERYQTVYARELGSAAAPTAGLHFTEQLLDDIRAKGVHIAFITLHVGLGTFRPVSAENVEEHDMHAEFYQMTEGTARLLNEVKQRGGRIIAVGTTSTRTLETIASKHNGTFVAESGWTDIFIYPGYEFKAIDGMVTNFHLPKSTLIMLVSALAGRENVLRAYEEAVKERYRFFSFGDAMLII

SEQ ID NO: 73177 - protein, 353 aa, Thermomicrobium roseum
  REGION 1..353: note = tr|B9KZ08|B9KZ08_THERP S-adenosylmethionine:tRNA ribosyltransferase-isomerase OS=Thermomicrobium roseum (strain ATCC 27502 / DSM 5159 / P-2) OX=309801 GN=queA; PE = 3 S V=1
MLEEAALSLHEYDYELPEELIAQEPIEPRDAARLMVVRRATHSIEHRIFRELPSLLDPGDLLIVNDSRVLPARLLGHRLTGGKVEILLVQPLEGTTVWLALARPARKLRPGETITIQPRDPQFAQPAPLRIRERRSGGQVIVELDPGIAERLDAFGHVPLPPYIHRPLSDPERYQTVYARHPGSVAAPTAGLHFTERLLDELRQRGIRIAPLTLHVGIGTFKPIEVTDVRLHKMHAEWYAVPAETVSLIRETRAANRRIVAVGTTAARTLESIADALTGDTEGPITGWTDLYIYPGYHWRVVDALITNFHLPRSTLILLVASFAGRELILEAYREAVQQRYRFYSFGDAMLIL

SEQ ID NO: 73178 - protein, 348 aa, Thermomonas haemolytica
  REGION 1..348: note = tr|A0A4R3MYT8|A0A4R3MYT8_9GAMM S-adenosylmethionine:tRNA ribosyltransferase-isomerase; OS = Thermomonas haemolytica OX=141949 GN=queA PE=3 SV=1
MPLKTSDFHYDLPPELIAQAPLAERSASRLLHVPPGAAPFADLHVRDLPSLLQPGDLLVFNDTRVIPARLFGAKATGGRVEILIERLLPDNAARAQLGVSKPPQVGSRIALDAGGEAEVVARFDDGFWELRFHVDGALADWLQHAGQLPLPPYIERQPNRADAERYQTVFAREAGAVAAPTAGLHFDAPLLEALHTRGIGIGHITLHVGAGTFQPVRVHDVHAHRMHSEWINVGAELVEKVRRTRAAGGRVIAVGTTVVRALETAMVGDALQPFAGDTSIFIFPGYRIRSIDALLTNFHLPESTLLMLVSAFAGKARIFAAYEHAVRQRYRFFSYGDAMLLWPQEAGA

SEQ ID NO: 73179 - protein, 346 aa, Thermomonas hydrothermalis
  REGION 1..346: note = tr|A0A1M4UDA7|A0A1M4UDA7_9GAMM S-adenosylmethionine:tRNA ribosyltransferase-isomerase; OS = Thermomonas hydrothermalis OX=213588 GN=queA PE=3 SV=1
MKTTDFHYHLPPELIAQAPLPERSASRLLHVPPGTAPLQDLHVRDLPALLRPGDLLVFNDTRVIPARLFGTKPTGGRVEILIERLLPGDEARVQLGVSKPPKPGSRILLQAGGEAEVLAREDDGFWQLRFHVEGRLEDWLQRAGQMPLPPYIQRAPEPADHERYQTVFAREAGAVAAPTAGLHFDAPLLAALRAHGIETGQITLHVGAGTFQPVRVEDVRQHHMHSEWINVSAELVAQWQRTRAAGGRVIAVGTTVVRALESAMVAGELRPFSGDTDIFIYPGYHIRSIDALMTNFHLPESTLLMLVSAFAGKARVFAAYEHAVRQRYRFFSYGDAMLLWPQEAGA

SEQ ID NO: 73180 - protein, 385 aa, Thermomonas sp.
  REGION 1..385: note = tr|A0A5B7ZSV5|A0A5B7ZSV5_9GAMM S-adenosylmethionine:tRNA ribosyltransferase-isomerase; OS = Thermomonas sp. SY21 OX=2202149 GN=queA PE=3 SV=1
MRSARSTGWSAPLPRSSSRPSSSVDAGRYNARPACVSLPLKKSDFHFELPAELIAQAPLPERSASRLLLVPPGDAAFADLGVRDLPTLLQPGDLLVFNDTRVIPARLFGNKATGGRVEILIERLLPGNEARAQLGVSKSPQLGSRIALDAGGVAEVLSRDEAGFWQLRFHVAEPLENWLLHAGRLPLPPYIQREPGADDAERYQTVFAREIGAVAAPTAGLHFDDALLDAFRARGVQFGHVTLHVGAGTFQPMRVDDIREHRMHSEWINVGAELVQQVRRTRAAGGRVVAVGTTVLRALESALVDGELQPFAGETNIFIFPGYRIRSIDALMTNFHLPESTLLMLVSAFAGKERVFAAYEHAVRERYRFFSYGDAMLLFPAQGQA

SEQ ID NO: 73181 - protein, 401 aa, unidentified
  source 1..401: note = Thermophagus xiamenensis
  REGION 1..401: note = tr|A0A1I2AYM9|A0A1I2AYM9_9BACT S-adenosylmethionine:tRNA ribosyltransferase-isomerase; OS = Thermophagus xiamenensis OX=385682 GN=queA PE=3 SV=1
MDISIKNFDYDLPEERIAKYPLPERDQSKLLYYKEGKISDHVFSQLPELLPANTMMIFNNTKVIRARLPFKKSTGARIEIFCLEPIEPFELTSAFAQNKEVVWNCMVGNLKKWKEGPLETIIQNGQAPIHLSAEKVNKTQEGFAIRFKWNNPNFTFSELMDYMGKTPIPPYLNRDSEEIDTVRYQTVYSKEKGSVAAPTAGLHFTDNVINRMKKNGVSIQTLTLHVGAGTFRPVKSENVADHEMHTEHFRISLETLKNIQRHKGIRIAVGTTSLRTLESLYWAGVLCHLNQPFHHIGQWTPYHLKSNLRFEEALENLIESTERSGKTHFEGSTAIIIAPGYQIKSIDAIVTNFHQPKSTLLLLIAALVGDEWKRIYSHALKNNYRFLSYGDSSLLWKSSLL

SEQ ID NO: 73182 - protein, 349 aa, unidentified
  source 1..349: note = Thermophagus xiamenensis
  REGION 1..349: note = tr|A0A1I2D0T3|A0A1I2D0T3_9BACT S-adenosylmethionine:tRNA ribosyltransferase-isomerase; OS = Thermophagus xiamenensis OX=385682 GN=queA PE=3 SV=1
MKLSKFKYKLPEELIALHPAPNRDESRLMVVHKSTGKIEHKIFKDIIDYFDEKDVLIFNDTKVFPARLYGKKEKTGAEIEVFLLRELNKDQRLWDVLVDPARKIRIGNKLYFGDNDALVAEVIDNTTSRGRTLRFLFDGSYDEFKKTLYSLGETPLPKFIKRKVEPEDRERYQTIFAKHEGAVAAPTAGMHFSRELLKRFEIKGIDFAFITLHVGLGSFRSVDVEDLTKHKMDSEQIFISEEAAKIINNAKDQRKRICAVGTTVMRTIESSVSTNGHVNPFEGWTNKFIFPPYDFNVADAMVSNFHLPYSTLLMMVAAFGGYDLVMKAYKTAVKEKYRFGTYGDAMLII

SEQ ID NO: 73183 - protein, 341 aa, Thermosediminibacter oceani
  REGION 1..341: note = tr|D9RXQ8|D9RXQ8_THEOJ S-adenosylmethionine:tRNA ribosyltransferase-isomerase OS=Thermosediminibacter oceani (strain ATCC BAA-1034 / DSM 16646 / JW/IW-1228P); OX = 5550 79 GN=queA PE=3 SV=1
MDVKDFYYELPEELIAQEPLEKRDTSRLMVVKRDTRIFEHRIFENITEYLEEGDCLVLNDTRVMPARLLGVKEDTGGKIEFVLLKRIKENTWEVLVKPGRRARIGSVFVFGDGRLRAKVLDFTDAGGRIVEFYYDGIFEQVLDELGQMPVPPYIKKELKDKERYQTVYARNPGSAAAPTAGLHFTEELLRKIEQNGVKICYITLHVGLGTFRPVKVRNIEEHKMHHEYFEVGSHAAETINRAKESGKRVIAVGTTSTRTLETVADQNGFVKSGSGWTDLFIYPGYRFKVVDGMVTNFHLPESTLLMLVSAFAGRDLIMAAYREAIDKRYRFYSFGDAMLII

SEQ ID NO: 73184 - protein, 339 aa, Thermosinus carboxydivorans
  REGION 1..339: note = tr|A1HT79|A1HT79_9FIRM S-adenosylmethionine:tRNA ribosyltransferase-isomerase OS=Thermosinus carboxydivorans Nor1 OX=401526 GN=queA PE=3 SV=1
MLVTDFDYYLPEELIAQQPCEPRDHSRLLVLDRRTGNIEHRRFYNLPDYLQPGDTLVFNNTKVIPARLIGAKAGTGGKIEVFLLNRLTSDEWETLVKPGKRARPGTQVVFGDELSCEILASTDYGGRIVRFNYSGVFEDILDRLGETPLPPYIKTRLADKDRYQTVYAKERGSAAAPTAGLHFTPELLDRIKAKGINLAFITLHVGLGTFRPVTVSNITQHTMHREYYSVSPETAALINQTKQAGGRIIAVGTTAVRTLETVGAGGFVESGSGWTDIFIYPGYRFKIVDALVTNFHLPQSTLLMLVSALAGRENIMNAYHVAVREKYRFFSFGDAMLIL

SEQ ID NO: 73185 - protein, 335 aa, Thermosipho africanus
  REGION 1..335: note = tr|A0A3D1PYY9|A0A3D1PYY9_9BACT S-adenosylmethionine:tRNA ribosyltransferase-isomerase; OS = Thermosipho africanus OX=2421 GN=queA PE=3 SV=1
MKLSDFDYYLPEELIAQTPADPRDSSRLMVLNRKEKTIEHRIFRDIVEYLSPGDLLVRNITKVIPARLHGVKETGARVEILLLEKISEGVWEALVKPGSKVKKGTKIILSEGIEVICKDYSQQGARILEFNCSDDKLFELGNAPLPPYIKNQKVPFERYQTVYSKETGSVAAPTAGLHFTEELLERLRNKGVEFADLILHVGLGTFRPVKVEDIREHKMHSERYYVPAETVKKIRETRKNKGRIIAVGTTSVRTLETIARLPNQESYHGKTDIFIYPPFEFKLTDAIITNFHLPKSTLLMLVSAFAGKDFILEAYNTAVKMKYRFFSLGDACFIY

SEQ ID NO: 73186 - protein, 335 aa, Thermosipho africanus
  REGION 1..335: note = sp|B7IFB4|QUEA_THEAB S-adenosylmethionine:tRNA ribosyltransferase-isomerase OS=Thermosipho africanus (strain TCF52B) OX=484019 GN=queA PE=3 SV=1
MKLSDFDYYLPEELIAQTPAEPRDSSRLMVLNRKEKTIEHRIFRDIVEYLKPGDLLVRNITKVIPARLYGVKETGARVEILLLEKISEGVWEALVKPGSKVKKGTKIILSEGVEVICKDYSQQGARILEFNCSDDKLFELGNAPLPPYIKNQKVPFERYQTVYSKETGSVAAPTAGLHFTEELLERLRNKGLEFADLILHVGLGTFRPVKVEDIREHKMHSERYYVPAETVKKIRETRKNKGRIIAVGTTSVRTLETIARLPNQESYHGKTDIFIYPPFEFKLTDAIITNFHLPKSTLLMLVAAFAGKDFILEAYNTAVKMKYRFFSLGDACFIY

SEQ ID NO: 73187 - protein, 336 aa, Thermosipho atlanticus
  REGION 1..336: note = tr|A0A1M5SDR2|A0A1M5SDR2_9BACT S-adenosylmethionine:tRNA ribosyltransferase-isomerase; OS = Thermosipho atlanticus DSM 15807 OX=1123380 GN=queA; PE = 3 SV=1
MNIKDFDYLLPEELIAQKPIEPRDSSRLMVLNREKRVIEHKIFRDIINYLGEGDLLIRNVTKVIPARLYGRKITGAKIELLLLEKIDKGIWEALVKPGSKVKKGTKIIFGEDLEAICRGWGEEGSRIIEFNTDNEEDIFKYGKAPFPHYIKNENISFERYQTVYSKEIGSVAAPTAGLHFTKGLLQKLKSKGVVFADVVLHVGLGTFRPVKVENIENHKMHSETYYVPKETVKKIKEFKKNKGRIIAVGTTSVRTLETIARLPEQEHYHGKTDIFIYPPFEFRLTDAIITNFHLPKSTLLMLVSAFAGREFILEAYKIAVQEKYRFFSFGDACFIY

SEQ ID NO: 73188 - protein, 334 aa, Thermosipho melanesiensis
  REGION 1..334: note = sp|A6LJ38|QUEA_THEM4 S-adenosylmethionine:tRNA ribosyltransferase-isomerase OS=Thermosipho melanesiensis (strain DSM 12029 / CIP 104789 / BI429) OX=391009 GN=queA; PE = 3 SV=1
MKLSDFDYYLPEELIAQKPVEPRDASRLMVLNRKEKKIEHKIFRNIVEYLHEGDLLVRNVTKVIPARIYGRKETGAKIEVLLLEKISENVWEALVKPGSKVKKGTKIYFDDESYCVCLDWGDEGSRILEFNITEEELFKLGEAPLPPYVKNKVSFERYQTIYSRETGSVAAPTAGLHFTEDLLKKLEEKGVEFADLVLHVGLGTFRPVKVENITEHKMHSESYYVPNETVKKIFETKKNGGRIVAVGTTSVRTLETIVRLERKESYHGKTDIFIYPPFEFKLVDALITNFHLPKSTLLMLVSAFAGREFIMEAYNIAVKMKYRFFSFGNACFIY

SEQ ID NO: 73189 - protein, 334 aa, Thermosipho sp.
  REGION 1..334: note = tr|A0A1L7BDI5|A0A1L7BDI5_9BACT S-adenosylmethionine:tRNA ribosyltransferase-isomerase; OS = Thermosipho sp. 1063 OX=1462747 GN=queA PE=3 SV=1
MNVSNFDYFLPEELIAQSPVEPRDSSRLMVLNRRTREIEHKIFRDIIEYLKEGDLLVRNVTKVIPARLYGKKATGAKIEILLLEKISEGVWEALVKPGSKVKKGTKIYFDDDRYCICKDWAQEGARILEFNFSDDDLFRLGMAPLPPYIKNQIPFERYQTIYSREKGSVAAPTAGLHFTDELLEKIKENGVEFADLVLHVGLGTFRPVKVEDVREHKMHSERYYVPKETVKKINDTRKNGGRIIAVGTTSVRTLETIARLDKKESYHGKTDIFIYPPFEFKLTDAIITNFHLPKSTLLMLVSAFAGREFILDAYNIAVKMKYRFFSLGDACFIY

SEQ ID NO: 73190 - protein, 368 aa, Thermosporothrix hazakensis
  REGION 1..368: note = tr|A0A326U4T8|A0A326U4T8_9CHLR S-adenosylmethionine:tRNA ribosyltransferase-isomerase; OS = Thermosporothrix hazakensis OX=644383 GN=queA PE=3 SV=1
MDNNLDLKISDFDYDLPPELIAQTPVEPRDSSRLLVVNRETRALAHRHFRDIGEFLRPGDLLIANQSRVIPARLLGKRAETGGAVEILLLTERPDRGRDVWEALVRPGRRLREGARVLFEDEKQTTRLEAEILERTETGGRIVRLFIPNQTELQSDDPYRLLDVKQAIEALGHMPLPPYIHETLQDPERYQTVYARIRGSAAAPTAGLHFTPQLLERLQAQGVRVGFVTLHVGLDTFRPVETESVKDHKMHSEEIDLDEATAALINETQKAGGRVVAVGTTSVRVLESVAAVGDGKIVPYHGHTNLFITPGYRFKAVDAMITNFHLPRSTLLLLISAFMGKDLMETVYQEAIQERYRFFSFGDAMLIL

SEQ ID NO: 73191 - protein, 357 aa, Thermosporothrix hazakensis
  REGION 1..357: note = tr|A0A326UN15|A0A326UN15_9CHLR S-adenosylmethionine:tRNA ribosyltransferase-isomerase; OS = Thermosporothrix hazakensis OX=644383 GN=EI42_02342; PE = 3 SV=1
MLTSHVRPLDFLLPEELEAGEPPEARGLARDEVRLLVSSYTDNRIEHAQFRQIPQFLAPGDVVVINTSGTMNAALEAIGADGTRYELHLSTHLPADLWVVEVRIPDEHGTKPYYGMREGEVLRLAENGTAALLLPYLPEQRVQDRSQKRLWIATLHLPMSWQEYLKSYGFPIRYRYVRNAWPIEYYQTVYATEVGSAEMPSAGRAFTPELITRLVALGVQVLPLLLHTGVASLEAHEPPYEEYYRVPEETAQGVNAARQAGRRVIAVGTTVVRALETVTTPDGVTHPGEGWTQTIITPERGVRAVHGLLTGLHEPQASHLLMLEAFAPREHLKLVYAEALQKKYLWHEFGDLHLLLP

SEQ ID NO: 73192 - protein, 368 aa, Thermosporothrix sp.; identical to SEQ ID NO: 73190
  REGION 1..368: note = tr|A0A455SMT2|A0A455SMT2_9CHLR S-adenosylmethionine:tRNA ribosyltransferase-isomerase; OS = Thermosporothrix sp. COM3 OX=2490863 GN=queA PE=3 SV=1

SEQ ID NO: 73193 - protein, 357 aa, Thermosporothrix sp.; identical to SEQ ID NO: 73191
  REGION 1..357: note = tr|A0A455SDK8|A0A455SDK8_9CHLR S-adenosylmethionine:tRNA ribosyltransferase-isomerase; OS = Thermosporothrix sp. COM3 OX=2490863 GN=KTC_12840 PE=3; SV = 1

SEQ ID NO: 73194 - protein, 334 aa, unidentified
  source 1..334: note = Thermostaphylospora chromogena
  REGION 1..334: note = tr|A0A1H1DDD7|A0A1H1DDD7_9ACTN S-adenosylmethionine:tRNA ribosyltransferase-isomerase; OS = Thermostaphylospora chromogena OX=35622; GN = SAMN04489764_1950 PE=3 SV=1
MSIDFALPPTREAHEPPEARGLARDGVRLLVTRGKTGEISHHRFTDLPDLLDPGDLLVVNNSATLPAAIHLDRLAVHFSTAREDGSWLVELRRLTPAGTEPYAGAVAGEWLPLPGRATLRLEGRETPRLWRARLDREVEPYLRRYGRPIRYSYVPREWPLSDYQTVFATVPGSAEMPSAGRPFSAELVTALVARGVGIAPITLHTGVASLENDEPPYSERYVVPAATARQVNLARESGARVVAVGTTVVRALETVATGRGVVPGEGWTSHVVTPETGVRAVTGLLTGLHEPRSSHLSMLAAIIGQEAVSSSYAEALHAGYLWHEFGDVHLLLAS

SEQ ID NO: 73195 - protein, 341 aa, Thermosulfidibacter takaii
  REGION 1..341: note = tr|A0A0S3QUD0|A0A0S3QUD0_THET7 S-adenosylmethionine:tRNA ribosyltransferase-isomerase; OS = Thermosulfidibacter takaii (strain DSM 17441 / JCM 13301 / NBRC 103674 / ABI 70S6) OX=1298851 GN=queA PE=3; SV = 1
MKVQEFDYPLPEDLIAQYPVEPRDASRMMVLYRNEKRIKHRIFREIVDILDDSYVLILNNTKVIPARLLGQKETGAKIEVFLSKRLENDVWECLARPAKRLKVGTRIDFGQGLFGVVEEVKEEGKRIIRFFPEGLLSERLPKIGQVPLPPYIRRSPTHRDLFRYQTVFAEKNGSIAAPTAGLHFTKEVLEALKSKGVEIVYVTLHVGLGTFRPVKVENVEDHRMDEEYFEISKEAADKINRAKEKGKKILACGTTVVRTLETASDERGLVKATSGWTNLFIYPGYKFKVIDALLTNFHLPRSTLLMLVCAFAGKDFVMEAYNEAIKERYRFYSYGDCMLIL

SEQ ID NO: 73196 - protein, 353 aa, unidentified
  source 1..353: note = Thermosulfurimonas dismutans
  REGION 1..353: note = tr|A0A179D3Q5|A0A179D3Q5_9BACT S-adenosylmethionine:tRNA ribosyltransferase-isomerase; OS = Thermosulfurimonas dismutans OX=999894 GN=queA PE=3 SV=1
MKPTSIEEIPEDFRLKAYHYDLPEELIAYYPSPKREESRLLVLHRQSKKIEHRKRFSEIVEYLRPGDLLVLNDTRVFPARLLGRKESGGRVEILLLRLPEAGKPVPALYRGKKLFPGYRVIFSERLSGRVLSKDPDGKIEILLEGPDDLLSALKEVGKVPLPPYIKRDPQAEDLFRYQTVYARKNGSVAAPTAGFHFSEALLAKLEAQGVRLAFITLHVGYGTFSPVKTPDIRDHRIHEEYVEIPEETVIAVEETKKHGRRVIAVGTTTVRALEWGALSGKLEPRSGWCDLYIYPGFEFRVISSMVTNFHLPGSSLLILVSAFAGRKLILSAYQEAIRRRYRFFSYGDAMFIL

SEQ ID NO: 73197 - protein, 354 aa, unidentified
  source 1..354: note = Thermosynechococcus elongatus
  REGION 1..354: note = sp|Q8DKD7|QUEA_THEEB S-adenosylmethionine:tRNA ribosyltransferase-isomerase OS=Thermosynechococcus elongatus (strain BP-1) OX=197221 GN=queA PE=3 SV=1
MPHPDDFSLDAYDYQLPPERIAQQPVSPRDRSRLMVVTRDTAADHYFYELPQLLAPGDLLVLNDTRVIPARLIGQKVGAAGRTVEVFLLEELSDRQWLALVKPGRKLRPGAVIQIGPLQATVQTIDEETRGRVIEFDLPPGDRLWSYLDHLGEVPLPPYIDHPLADTEQYQTVYARRPGAVAAPTAGLHFTPELFSKLADRGIDHCFLTLHVGIGTFRPVEAKDIRHHHLHEEWLEVSAATVERIQAAKAAGGRIIAVGTTVIRALETAAHSGTLQPFCGKSDLYIYPGYQPKIVEGFITNFHLPRSSLMMLVSAFIGRERLLQLYQQAIDRQYRFYSFGDAMLILPSACHNTL

SEQ ID NO: 73198 - protein, 354 aa, unidentified
  source 1..354: note = Thermosynechococcus sp.
  REGION 1..354: note = tr|A0A5C2MA36|A0A5C2MA36_9CYAN S-adenosylmethionine:tRNA ribosyltransferase-isomerase; OS = Thermosynechococcus sp. CL-1 OX=2583530 GN=queA PE=3; SV = 1
MPSSDDFSLDAYDYHLPPERIAQQPVSPRDHSRLMVVARDTATDHYFYELPQLLQPGDLLVLNDTRVIPARLIGQKIGGSGRTVEVFLLEELSDRQWLALVKPGRKLRPGAVIQIGTLQATVQAIDEETRGRVIEFDLPAGDRLWSYLDHLGEVPLPPYIDNPIEDTEQYQTVYARRPGAVAAPTAGLHFTPELLSKLAYHGIDHCFLTLHVGIGTFRPVEASDIRHHHLHEEWIEVPAATVERIQAAKAAGGRIIAVGTTVIRSLETAAQSGTLQPFCGKSDLYIYPGYQPKIVEGFITNFHLPRSSLMMLVSAFIGRKRLLQLYQQAIDRQYRFYSFGDAMLILPSACHNTV

SEQ ID NO: 73199 - protein, 354 aa, unidentified
  source 1..354: note = Thermosynechococcus sp.
  REGION 1..354: note = tr|V5V7Y3|V5V7Y3_9CYAN S-adenosylmethionine:tRNA ribosyltransferase-isomerase OS=Thermosynechococcus sp. NK55a OX=1394889 GN=queA PE=3 SV=1
MPNPADFSLDAYDYSLPAERIAQQPVSPRDRSRLMVVTRNTAADHYFYELPQLLEPGDLLVLNDTRVIPARLMGQKVGGAGGTVEVFLLEELSDRQWLALVKPGRKLRPGAVIQIGSLQATVQAIDEETRGRVIEFDLPPGDRLWSYLDHLGEVPLPPYIDHPIADTEQYQTVYARRPGAVAAPTAGLHFTPELFSKLAYRGIDHCFLTLHVGIGTFRPVEAKDIRHHHLHEEWIEVPAATVERIQAAKAAGGRIIAVGTTVIRSLETAAQSGTLQPFCGKSDLYIYPGYQPKIVEGFITNFHLPRSSLMMLVSAFIGRERLLQLYQQAIDRQYRFYSFGDAMLILPSACHNTV

SEQ ID NO: 73200 - protein, 351 aa, Thermosyntropha lipolytica
  REGION 1..351: note = tr|A0A1M5P9J8|A0A1M5P9J8_9FIRM S-adenosylmethionine:tRNA ribosyltransferase-isomerase; OS = Thermosyntropha lipolytica DSM 11003 OX=1123382 GN=queA; PE = 3 SV=1
MNDKSYDIYHLKSYDYYLPEDLIAKFPVEPRDASRLLVLDRRTGRVEDKIFRDIIEYLKPGDTLVVNKTRVIPARLHGYKESGGKVEILLLKKRDEGWEALVRPAKRLRPGETVFFGEGVKVTAEIVDVSEVEGGRIIRFNNCPDDYQFIEEMGEMPLPPYIRRSAEESDKRRYQTVYAQETGSAAAPTAGLHFTEKLLYDLQAKGVNIAGIVLHVGIGTFRPVTCENIREHKMHREWYRIDEETARLLNNTRQEGRSIVAVGTTVVRTLETVYNDDYGFRAESGETEKFIYPGYKFKAVDKLITNFHLPGSSLLMLVAAFAGYENTMAAYRYAVENRYRFFSYGDAMFIK

SEQ ID NO: 73201 - protein, 341 aa, Thermotalea metallivorans
  REGION 1..341: note = tr|A0A140L8Z0|A0A140L8Z0_9CLOT S-adenosylmethionine:tRNA ribosyltransferase-isomerase; OS = Thermotalea metallivorans OX=520762 GN=queA PE=3 SV=1
MKTKDFYFDLPEELIAQKPLADREQSRLMVVHRKNGGIEHRIFKEIVEYFQEGDCLVLNNTKVIPARLFGVKDHSGGKVEFLLLKRIEGDRWETLVKPGKKARIGDMIVFGDGILKAKIVGYGDEGSRIVDFVYEGVFEQILDQIGMMPLPHYIKERLEDKERYQTVYAKYEGSAAAPTAGLHFTHELLNKLQERGVKIAYITLHVGLGTFRPVKTENISEHKMHAEYFEVSAETADLVNTTKKNGGRVIAVGTTSTRTLESIADDRGMIRPCADWTDIFIYPGYRFKTVDGLITNFHLPESTLVMLVSAFSSREIILHAYEEAVKNRYRFYSFGDAMLIV

SEQ ID NO: 73202 - protein, 335 aa, Thermotoga maritima
  REGION 1..335: note = sp|Q9WZ44|QUEA_THEMA S-adenosylmethionine:tRNA ribosyltransferase-isomerase OS=Thermotoga maritima (strain ATCC 43589 / MSB8 / DSM 3109 / JCM 10099); OX = 243274 GN=que A PE=1 SV=1
MKVSEFDYELPPELIAQEPVEPRDASRLMVLHRKTQRIEHRIFREIIEYLEPGDLLVLNVSKVIPARLYARKKTGASIEILLIERLEEGIWKCLVRPGQKVKKGTELVIDEDLSAVCLGRGEDGTRILKFQPQDDRLIFEKGRTPLPPYIKNEVPLERYQTVYAKEEGSVAAPTAGLHFTPELIEKLKKKGVQFAEVVLHVGIGTFRPVKVEEVEKHKMHEEFYQVPKETVRKLRETRERGNRIVAVGTTTVRTLETIARLPEQEEYVGKTDLFIYPPFEFKLVDALVTNFHLPRSTLLMLVAAFAGKDFVMEAYREAVKRRYRFFSFGDAMLIL

SEQ ID NO: 73203 - protein, 335 aa, Thermotoga maritima; identical to SEQ ID NO: 73202
  REGION 1..335: note = tr|G4FDP6|G4FDP6_THEMA S-adenosylmethionine:tRNA ribosyltransferase-isomerase OS=Thermotoga maritima (strain ATCC 43589 / MSB8 / DSM 3109 / JCM 10099); OX = 243274 GN=q ueA PE=3 SV=1

SEQ ID NO: 73204 - protein, 335 aa, Thermotoga naphthophila
  REGION 1..335: note = tr|A0A117L2N7|A0A117L2N7_9THEM S-adenosylmethionine:tRNA ribosyltransferase-isomerase; OS = Thermotoga naphthophila OX=93930 GN=queA PE=3 SV=1
MKVSEFDYELPSELIAQEPVEPRDASRLMVLHRKTQRIEHRIFREIIEYLEPGDLLVLNVSKVIPARLYARKKTGASIEILLIERLEEGIWKCLVRPGQKVKKGTELVIDEDLSAVCLGRGEDGTRILKFQPQDDRLIFEKGRTPLPPYIKNEVPLERYQTVYAKEEGSVAAPTAGLHFTPELIEKLKKKGVQFAEVVLHVGIGTFRPVKVEEVEKHKMHEEFYQVTKETIKKLRETRERGNRIVAVGTTTVRTLETIARLPEQEEYVGKTDLFIYPPFEFKLVDALITNFHLPRSTLLMLVAAFAGKDFVMEAYREAVKRRYRFFSFGDAMLIL

SEQ ID NO: 73205 - protein, 335 aa, Thermotoga naphthophila
  REGION 1..335: note = tr|A0A3B8MYT8|A0A3B8MYT8_9THEM S-adenosylmethionine:tRNA ribosyltransferase-isomerase; OS = Thermotoga naphthophila OX=93930 GN=queA PE=3 SV=1
MKVSEFDYELPPELIAQEPVEPRDASRLMVLHRKTQRIEHRIFREIIEYLEPGDLLVLNVSKVIPARLYARKKTGASIEILLIERLEEGIWKCLVRPGQKVKKGTELVIDEDLSAVCLGRGEDGTRILKFQPQDDRLIFEKGRTPLPPYIKNEVPLERYQTVYAKEEGSVAAPTAGLHFTPELIEKLKKKGVQFAEVVLHVGIGTFRPVKVEEVEKHKMHEEFYQVTKETIKKLRETRERGNRIVAVGTTTVRTLETIARLPEQEEYVGKTDLFIYPPFEFKLVDALITNFHLPRSTLLMLVAAFAGKDFVMEAYREAVKRRYRFFSFGDAMLIL

SEQ ID NO: 73206 - protein, 337 aa, Thermotoga neapolitana
  REGION 1..337: note = tr|B9KB71|B9KB71_THENN S-adenosylmethionine:tRNA ribosyltransferase-isomerase OS=Thermotoga neapolitana (strain ATCC 49049 / DSM 4359 / NS-E) OX=309803 GN=queA; PE = 3SV=1
MIMKVSEFDYELPPELIAQEPVEPRDASRLMVLHRKTKKIEHRIFREIVEYLEPGDLLVLNVSKVIPARLYAKKKTGAHIEILLLDRLEEGIWRCLVKPGQKVKKGTELLIDNNLSAVCLDRSEDGTRILEFRPKNDDLILKKGKAPLPPYIKKEVPLDRYQTVYAKENGSVAAPTAGLHFTPELIEKLKEKGVEFAEIVLHVGIGTFRPVKVEEVEKHRMHEEYYRVPREAVRKIRETKEKGKRVVAVGTTTVRTLETIARLPEQEEYAGKTDLFIYPPFEFKMVDALITNFHLPRSTLLMLVAAFAGKDFIMEAYREAVKRRYRFFSFGDAMLIL

SEQ ID NO: 73207 - protein, 335 aa, Thermotoga petrophila; identical to SEQ ID NO: 73204
  REGION 1..335: note = sp|A5IJK0|QUEA_THEP1 S-adenosylmethionine:tRNA ribosyltransferase-isomerase OS=Thermotoga petrophila (strain RKU-1 / ATCC BAA-488 / DSM 13995) OX=390874; GN = queA PE=3SV=1

SEQ ID NO: 73208 - protein, 330 aa, Thermotoga sp.; identical to SEQ ID NO: 71131
  REGION 1..330: note = tr|A0A101ESK4|A0A101ESK4_9THEM S-adenosylmethionine:tRNA ribosyltransferase-isomerase; OS = Thermotoga sp. 50_1627 OX=1635260 GN=queA PE=3 SV=1

SEQ ID NO: 73209 - protein, 335 aa, Thermotoga sp.; identical to SEQ ID NO: 73204
  REGION 1..335: note = sp|B1L8S0|QUEA_THESQ S-adenosylmethionine:tRNA ribosyltransferase-isomerase OS=Thermotoga sp. (strain RQ2) OX=126740 GN=queA PE=3 SV=1

SEQ ID NO: 73210 - protein, 334 aa, unidentified
  source 1..334: note = Thermotogae bacterium
  REGION 1..334: note = tr|A0A3D6DAJ7|A0A3D6DAJ7_9BACT S-adenosylmethionine:tRNA ribosyltransferase-isomerase; OS = Thermotogae bacterium OX=2053689 GN=queA PE=3 SV=1
MKLEEFDYDLPEELIAQKPVEPRDLSRLMVVHRKTGEIEHRVFRDIVEYLEPGDLLVFNVTRVIPARLFVRKPTGAKIEILLLEKIDARKWKCLVKPGNKVKVGNELLGETFRARCLERAEEGSRILEFDDDVEEIVDREGRTPLPPYIHEEIELERYQTVYAKVEGSVAAPTAGLHFTRELLDKLKTRGVEFAEVVLHVGIGTFRPIKSENVEEHRMHSERYFVDHKNASRIWNARKEGRRIVAVGTTSVRVLETMGIEGEKTEYEGETSLFIHPPFDFKLTDALITNFHLPRSTLLLLVSAFAGRDLVMRAYAEAVKKRYRFFSFGDACFFI

SEQ ID NO: 73211 - protein, 363 aa, unidentified
  source 1..363: note = Thermotogae bacterium
  REGION 1..363: note = tr|A0A1V6H0E6|A0A1V6H0E6_9BACT S-adenosylmethionine:tRNA ribosyltransferase-isomerase; OS = Thermotogae bacterium ADurb.Bin062 OX=1852923 GN=queA; PE = 3 SV=1
MNLSDFDYTLPVEKIAQSPVEPRDHSRLMVINRTTRTLEHRRFYHLLDYLLPSDLLVINNTRVIPARLLGAREGGGKAEVFLLKPLRAENEKEALWNALVKPGKRIRKGTVLSFLNHRLIGQCVEHHPDGSRDILFKKNSTDEETDSGEYGSIPLKDLIFRAGSVPLPPYIHRPLSDKERYQTVYSEEEGAVAAPTAGLHFTESLIADIKGQGIEFCTLTLHVGLGTFRPLEDDGGPFAIEGHVMHAETFYVSGEEARKIERARLEKRRIIGVGTTSVRVLESLPYYEKRADGSYAGDTRLFIYPPFPFVYTDAMITNFHLPKSSLLLMVSAFASRDLMMSAYQEAIESEYRFFSFGDACLIL

SEQ ID NO: 73212 - protein, 341 aa, Thermovenabulum gondwanense
  REGION 1..341: note = tr|A0A161PSJ0|A0A161PSJ0_9FIRM S-adenosylmethionine:tRNA ribosyltransferase-isomerase; OS = Thermovenabulum gondwanense OX=520767 GN=queA PE=3 SV=1
MDLKEFYYDLPEELIAQEPLKERDKSRLLVLKKETGEMEHKIFYEIINYMNEGDCLVLNNTKVIPARLIGEREDTRGTIEFVLLNRIKGNIWEVLVKPGRRAKLGKNFIFGDGLLKARVIDYTEAGGRIVEFSYEGIFEEILDQLGEMPVPPYIKKKLEEKDRYQTVYAKFPGSAAAPTAGLHFTAELLEKIKEKGVKIAYITLHVGLGTFRPVKVREIEKHKMHAEYYEISQETADIINNTKKEGKRLFAVGTTTTRTLETVSDPKGFVTAKKGFTDLFIYPGYKFKAIDALITNFHLPESTLIMLVCAFAGKEKVMRSYEEAVKNRYRFFSFGDAMLIV

SEQ ID NO: 73213 - protein, 343 aa, Thermovibrio ammonificans
  REGION 1..343: note = tr|E8T5V9|E8T5V9_THEA1 S-adenosylmethionine:tRNA ribosyltransferase-isomerase OS=Thermovibrio ammonificans (strain DSM 15698 / JCM 12110 / HB-1) OX=648996 GN=queA PE =3 SV=1
MKVSDFDYHLPKELIAKFPAEPRDSARLMVLHRDTGEIEHRIFRDIVDYLVPGDVLVLNDTKVIPARLLGRLSTGAKVELLLLRQVEPDLWEVMAKPAKKLKTGKELVFEGGLRGTVEGYAGEGRRLVRFRVPEGVSFMELLEQVGHVPLPPYIEREERPEDRKLYQTVFASRPGAVAAPTAGLHFTEELLERLRDKGIIIKTVTLHVGPGTFKPVKVEEVEKHQMDYEVYSVPQETALEVNRAKQEGRRIVAVGTTVVRTLESAAGEDGTVKAGEGSTNLFIYPGYRFKVVDALVTNFHLPRSTLIMLVSAFAGREKVLNAYREAVKEGYRFYSYGDAMFIV

SEQ ID NO: 73214 - protein, 343 aa, Thermovibrio guaymasensis
  REGION 1..343: note = tr|A0A420W5N9|A0A420W5N9_9BACT S-adenosylmethionine:tRNA ribosyltransferase-isomerase; OS = Thermovibrio guaymasensis OX=240167 GN=queA PE=3 SV=1
MKVSEFDYTLPKELIAKFPAEPRDSSRLMVLNRRTGEIEHRIFRDIKGYLKEGDVLVLNNTKVIPARLYGELPTGGKVEILLIRQVEPSVWEVMSKPARKLRPGRKVIFSPELTAEVVGYLGEGRRLLRFSYPESMDFMEILSRIGHVPLPPYVEREERPEDREKYQTVFAKEEGSVAAPTAGLHFTPELLKELEERGVIIKTVTLHVGPGTFKPVKVERVEEHKMDYETYTVPEETAEEINRAKEEGRRVIAVGTTVVRTLESVASEGGTVKSGEGITNLFIYPGYRFKVIDALITNFHLPRSTLLMLVCAFAGKEKVLNAYREAIKEGYRFYSFGDAMFIY

SEQ ID NO: 73215 - protein, 350 aa, Thermovirga lienii
  REGION 1..350: note = tr|G7VA61|G7VA61_THELD S-adenosylmethionine:tRNA ribosyltransferase-isomerase OS=Thermovirga lienii (strain ATCC BAA-1197 / DSM 17291 / Cas60314) OX=580340 GN=queA P; E = 3 SV=1
MDISNCNLYDLSKYDYHLPEELIAQSPAEPRDSSRLLVLHRNSGEINHAVFRDLPSYLREGDVIVLNNTKVMAARLFGKKEGGTAEIEVLLLCPLSHDNLAWEALVRPGKRVKPGRKVVFPGGEKIEIAESLPSGTRRVLFEQGTDPFKMMETYGRVPLPPYIRSTDAEPDRYQTIFAERLGSAAAPTAGLHFTPKLLDELERKGVKIAHVTLHVGIGTFKPIAAKDVRQHKMHAEFCSLPDETAKLINETKRKGGKIVAVGTTVVRTLETMVDDMGAAISGSGWTQKFIYPGYTFRIIDALITNFHLPKSTLMLLVSAFAGYENIMNAYQEAIKLRYRFYSFGDAMLII

SEQ ID NO: 73216 - protein, 345 aa, Thermus aquaticus
  REGION 1..345: note = tr|A0A0M9AGS3|A0A0M9AGS3_THEAQ S-adenosylmethionine:tRNA ribosyltransferase-isomerase; OS = Thermus aquaticus OX=271 GN=queA PE=3 SV=1
MAGLEAYDYHLPPELIAQEGVEPRDLARMMVVYREGPFRVAHRRVRDLPEFLRPGDLLVFNESKVIPARLLARKPTGGRVEVLLVRERAPGLWEALLGPARRAPVGTELSFLSPRDWRPVPGLKAEVVGVEADGVRLLQIQGDLLAHLEEVGEVPLPPYIKAQIPLERYQTVYAKRPGSVAAPTAGLHFTPELLERLREMGVELHFLTLHVGPGTFRPVKGDPEKHAMHPEPYEIPEAAALAVNRAKAEGRRVIAVGTTVVRALESAYREGKGVAAGAGETRLFIRPPYAFKVIDGLFTNFHLPRSTLLMLVAAFLGYERTMEAYRLAVEEGYRFYSLGDAMLIL

SEQ ID NO: 73217 - protein, 345 aa, Thermus aquaticus
  REGION 1..345: note = tr|B7A7I9|B7A7I9_THEAQ S-adenosylmethionine:tRNA ribosyltransferase-isomerase OS=Thermus aquaticus Y51MC23; OX = 498848 GN=queA PE=3 SV=1
MAGLEAYDYHLPPERIAQEGVEPRDLARMMVVYREGPFRVAHRRVRDLPEFLRPGDLLVFNESKVIPARLLARKPTGGRVEVLLVQERAPGLWEALLGPARRAPVGTELFFLSPRDWRPVPGLKAEVVGVEADGVRLLQIQGDLLAHLEEVGEVPLPPYIKAQIPLERYQTVYAKRPGSVAAPTAGLHFTPELMERLRGMGVELHFLTLHVGPGTFRPVKGDPEKHAMHAEPYEIPEATALAVNRAKAEGRRVIAVGTTVVRALESAYREGEGVAAGAGETRLFIRPPYAFKVIDGLFTNFHLPRSTLLMLVAAFLGYERTMEAYRLAVEEGYRFYSLGDAMLIL

SEQ ID NO: 73218 - protein, 345 aa, Thermus arciformis
  REGION 1..345: note = tr|A0A1G7KBT9|A0A1G7KBT9_9DEIN S-adenosylmethionine:tRNA ribosyltransferase-isomerase; OS = Thermus arciformis OX=482827 GN=queA PE=3 SV=1
MEGLEAYDYHLPPERIAQEGVEPRDMARLMVVYREGPFRVAHKRVRDLPEFLRRGDVLVFNESKVIPARLLARKPTGGKVEVLLVRERSPGLWEALLGPARKAPPGTRLLLLSPKDLAPVPGLEAEVVGVEEDGVRLLRFQGDLIAHLEEVGEVPLPPYIKAKIPMERYQTVYAKRPGSVAAPTAGLHFTPELLERLRGMGVELRFLTLHVGPGTFRPVKGDPERHAMHAEPYAIPEEVAEAVNRAKAEGRRVVAVGTTVVRALESAYREGEGVVAGEGETRLFIRPPYAFKVVDALFTNFHLPRSTLLMLVAAFLGRERTLKAYRLAVEEGYRFYSLGDAMLIL

SEQ ID NO: 73219 - protein, 349 aa, Thermus brockianus
  REGION 1..349: note = tr|A0A1J0LSP6|A0A1J0LSP6_THEBO S-adenosylmethionine:tRNA ribosyltransferase-isomerase; OS = Thermus brockianus OX=56956 GN=queA PE=3 SV=1
MTELDLYDYHLPPEQIAQAGAEPRDAARMMVVYREGPFRVEHRQVRDLPEFLRPGDVLVFNESKVIPARLLAQKPTGGRVEVLLVREKAPGLWEALLGPARRAPVGTRLRLLSPKDLRPVEGLEAEVVGVEPDGVRLLRFQGDLSAHLQAVGEVPLPPYIKAQIPLERYQTVYAKRPGSVAAPTAGLHFTPELLARLEAMGVELRFLTLHVGPGTFRPVKGDVEKHEMHAEPFEIPEATALAVNRARAEGRRVVAVGTTVVRALESAFREGEGVVPGEGETRLFIRPPYTFRAIDALFTNFHLPRSTLLMLVAAFLGRERTLAAYRLAVAEGYRFYSLGDAMLILPKAP

SEQ ID NO: 73220 - protein, 342 aa, Thermus filiformis
  REGION 1..342: note = tr|A0A0D6XB34|A0A0D6XB34_THEFI S-adenosylmethionine:tRNA ribosyltransferase-isomerase; OS = Thermus filiformis OX=276 GN=queA PE=3 SV=1
MAEYHYELPPELIAQEGVEPRDLARMLVVPREGPFRPLHRKVRDLPDFLRPGDVLVFNESKVIPARLLARKPTGGRVEVLLVREKAPGLWEALLGPARKAPVGTRLALLSPKDLSPVPGLSAEVVGVEPDGVRLLRFQGDLLAHLEAVGEVPLPPYIKARVPLERYQTVYARRPGSVAAPTAGLHFTPELLERLRGMGVELHFLTLHVGPGTFRPVKGDPEKHEMHAEPYEVPEGTARAVNRAKEEGRRVIAVGTTVVRALESAYREGEGVLAGAGETRLFIRPPYAFRVIDGLFTNFHLPGSTLLMLVAAFLGRERTLEAYRLAVQERYRFYSLGDAMLIL

SEQ ID NO: 73221 - protein, 344 aa, Thermus oshimai
  REGION 1..344: note = tr|K7RHS3|K7RHS3_THEOS S-adenosylmethionine:tRNA ribosyltransferase-isomerase OS=Thermus oshimai JL-2; OX = 751945 GN=queA PE=3 SV=1
MSLEAYDYPLPPELIAQEGAEPRDMARMMVLFREGPFRAEHRRVRDLPLYLRPGDVLVFNESKVIPARLLAQKPTGGRVEVLLVRERAPGLWEALLGPARKAPPGTRLRFLSPRDLAPVEGLFAEVVGVEGDGVRLLRFQGDLQAHLEEVGEVPLPPYIKAKVPLERYQTVYAKRPGSVAAPTAGLHFTPGLLERLKGMGVELHFLTLHVGPGTFRPVKGDPERHEMHAEPYEIPEATAEAIHRAKREGRRVVAVGTTVVRALESAWREGEGVVPGAGETRLFIRPPYAFKAIDALFTNFHLPRSTLLMLVAAFLGYERTMAAYRLAVAERYRFYSLGDAMLIL

SEQ ID NO: 73222 - protein, 345 aa, unidentified
  source 1..345: note = Thermus parvatiensis
  REGION 1..345: note = tr|A0A0X8D808|A0A0X8D808_9DEIN S-adenosylmethionine:tRNA ribosyltransferase-isomerase; OS = Thermus parvatiensis OX=456163 GN=queA PE=3 SV=1
MEGLEAYDYHLPPEQIAQEGVEPRDMARMMVVYREGPFRVAHKRVRDLPEFLRPGDVLVFNESKVIPARLLARKPTGGKVEILLVRERSPGLWEALLGPARKAPPGTRLLLLSPKDLAPVPGLQAEVVAVEEDGVRLLRFQGDLVAHLEEVGEVPLPPYIKAKIPMERYQTVYARRPGSVAAPTAGLHFTPELLERLREMGVELRFLTLHVGPGTFRPVKGDPEKHEMHAEPYAIPEEVAEAVNRAKAEGRRVVAVGTTVVRALESAYREGVGVVAGEGETRLFIRPPYTFKVVDALFTNFHLPRSTLLMLVAAFLGRERTLEAYRLAVAEGYRFYSLGDAMLIL

SEQ ID NO: 73223 - protein, 344 aa, Thermus scotoductus
  REGION 1..344: note = tr|E8PJQ7|E8PJQ7_THESS S-adenosylmethionine:tRNA ribosyltransferase-isomerase OS=Thermus scotoductus (strain ATCC 700910 / SA-01) OX=743525 GN=queA PE=3 SV=1
MSLEAYDYFLPQELIAQEGVEPRDRARMLVVHRKGPFRAEHRQVRDLPEYLHPGDVLVFNESKVIPARLLAQRPMGGRVEVLLVRERAPGLWEALVGPGRKAKPGTRLRFLSPRDLRVVPDLEAEVVGVEEDGVRLLRFQGDLMAHLEEVGEVPLPPYIKAKIPPERYQTVYARRPGSVAAPTAGLHFTPELLARLRGMGVELRFLTLHVGPGTFRPVKGDPEKHEMHPEPYEIPEETAEAINRAKKEGRRVVAVGTTVVRALESAFREGIGVVPGMGETRLFIRPPYAFQVIDALFTNFHLPRSTLLMLVAAFLGYEKTMEAYRLAVAERYRFYSLGDAMLIL

SEQ ID NO: 73224 - protein, 74 aa, Thermus scotoductus
  REGION 1..74: note = tr|A0A430UXM4|A0A430UXM4_THESC S-adenosylmethionine:tRNA ribosyltransferase-isomerase (Fragment) OS=Thermus scotoductus OX=37636 GN=CSW23_11625; PE = 3 SV=1
IGVVPGMGETRLFIRPPYAFQVIDALFTNFHLPRSTLLMLVAAFLGYEKTMEAYRLAVAERYRFYSLGDAMLIL

SEQ ID NO: 73225 - protein, 344 aa, Thermus sp.
  REGION 1..344: note = tr|W2U3M1|W2U3M1_9DEIN S-adenosylmethionine:tRNA ribosyltransferase-isomerase OS=Thermus sp. NMX2.A1; OX = 570924 GN=queA PE=3 SV=1
MSLEAYDYFLPEELIAQEGVEPRDRARMLVVHREGPFRAEHRQVRDLPEYLRPGDVLVFNESKVIPARLLAQRPTGGRVEVLLVRERTPGLWEALVGPGRKAKPGTRLRFLSPRDLRVVPDLEAEVVGVEEDGVRLLRFQGDLMAHLEEVGEVPLPPYIKARIPPERYQTVYARRPGSVAAPTAGLHFTPELLARLRGMGVELRFLTLHVGPGTFRPVKGDPEKHEMHPEPYEIPEETAEAINRAKKEGRRVVAVGTTVVRALESAFREGIGVVPGMGETRLFIRPPYAFQVIDALFTNFHLPRSTLLMLVAAFLGYEKTMEAYRLAVAERYRFYSLGDAMLIL

SEQ ID NO: 73226 - protein, 351 aa, Thermus sp.
  REGION 1..351: note = tr|A0A0B0SCP8|A0A0B0SCP8_9DEIN S-adenosylmethionine:tRNA ribosyltransferase-isomerase; OS = Thermus sp. 2.9 OX=1577051 GN=queA PE=3 SV=1
MSELDLYDYHLPPEQIAQAGVEPRDAARMMVVYREGPFRVDHRRVRDLPAFLRPGDVLVFNESKVIPARLLAQKPTGGRVEILLVREKAPGLWEALLGPARRAPVGTRLALLSPKDLGPVEGLEAEVVGVEPDGVRLLRFQGDLAAHLEAVGEVPLPPYIKAQIPLERYQTVYAKRPGSVAAPTAGLHFTPELLDRLAAMGVELCFLTLHVGPGTFRPIKGEVEKHEMHAEPFEIPEATAVAVNRARAEGRRVVAVGTTVVRALESAWHEGEGVVPGAGETRLFIRPPYTFRAIDALFTNFHLPRSTLLMLVAAFLGRERTLEAYRLAVAEGYRFYSLGDAMLILPRPEGA

SEQ ID NO: 73227 - protein, 344 aa, unidentified
  source 1..344: note = Thermus tengchongensis
  REGION 1..344: note = tr|A0A4Y9F8P6|A0A4Y9F8P6_9DEIN S-adenosylmethionine:tRNA ribosyltransferase-isomerase; OS = Thermus tengchongensis OX=1214928 GN=queA PE=3 SV=1
MSLEAYDYFLPEELIAQEGVEPRDAARMLVVYREGLFRAEHRQVRDLPEYLRPGDVLVFNESKVIPARLLAQRPTGGRVEVLLVRERTPGLWEALVGPGRKAKPGTRLRFLSPRDLRVVPDLEAEVVGVEEGGVRLLRFQGDLMAHLEEVGEVPLPPYIKTKIPPERYQTVYAKRPGSVAAPTAGLHFTPELLSRLRGMGVELRFLSLHVGPGTFRPVKGDPEEHEMHPEPYEIPEETAEAINRAKEEARRVVAVGTTVVRALESAYREGVGVVAGGGETRLFIRPPYTFRVIDGLFTNFHLPRSTLIMLVAAFLGYERTMEAYRLAVAERYRFYSLGDAMLIL

SEQ ID NO: 73228 - protein, 344 aa, unidentified
  source 1..344: note = Thermus tengchongensis
  REGION 1..344: note = tr|A0A4Y9EYM5|A0A4Y9EYM5_9DEIN S-adenosylmethionine:tRNA ribosyltransferase-isomerase; OS = Thermus tengchongensis OX=1214928 GN=queA PE=3 SV=1
MSLEAYDYFLPEELIAQEGVEPRDAARMLVVYREGLFRAEHRQVRDLPEYLRPGDVLVFNESKVIPARLLAQRPTGGRVEVLLVRERTPGLWEALVGPGRKAKPGTRLRFLSPRDLRVVPHLEAEVVGVEEGGVRVLRFQGDLMAHLEEVGEVPLPPYIKTKIPPERYQTVYAKRPGSVAAPTAGLHFTPELLSRLRGMGVELRFLSLHVGPGTFRPVKGDPEEHEMHPEPYEIPEETAEAINRAKEEGRRVVAVGTTVVRALESAFREGMGVVPGMGETRLFIRPPYAFRVIDGLFTNFHLPRSTLIMLVAAFLGYERTMEAYRLAVAERYRFYSLGDAMLIL

SEQ ID NO: 73229 - protein, 345 aa, Thermus thermophilus
  REGION 1..345: note = sp|Q72JS5|QUEA_THET2 S-adenosylmethionine:tRNA ribosyltransferase-isomerase OS=Thermus thermophilus (strain HB27 / ATCC BAA-163 / DSM 7039) OX=262724 GN=queA; PE = 1 SV =1
MEGLEAYDYHLPPEQIAQEGVEPRDMARLMVVYREGPFRVAHKRVRDLPEFLRPGDVLVFNESKVIPARLLARKPTGGKVEILLVRERSPGLWEALLGPARKAPPGTRLLLLSPKDLAPVPGLQAEVVAVEEDGVRLLRFQGDLVAHLEEVGEVPLPPYIKAKIPMERYQTVYARRPGSVAAPTAGLHFTPELLERLREMGVELRFLTLHVGPGTFRPVKGDPEKHEMHAEPYAIPEEVAEAVNRAKAEGRRVVAVGTTVVRALESAYREGVGVVAGEGETRLFIRPPYTFKVVDALFTNFHLPRSTLLMLVAAFLGRERTLEAYRLAVAEGYRFYSLGDAMLIL

SEQ ID NO: 73230 - protein, 345 aa, Thermus thermophilus
  REGION 1..345: note = tr|F6DGX0|F6DGX0_THETG S-adenosylmethionine:tRNA ribosyltransferase-isomerase OS=Thermus thermophilus (strain SG0.5JP17-16) OX=762633 GN=queA PE=3 SV=1
MEGLEAYDYHLPPEQIAQEGVEPRDMARLMVVYREGPFRVAHRRVRDLPEFLRPGDVLVFNESKVIPARLLARKPTGGKVEILLVRERSPGLWEALLGPARKAPPGTRLLLLSPKNLAPVPGLQAEVVAVEEDGVRLLRFQGDLAAHLEEVGEVPLPPYIKAKIPMERYQTVYARRPGSVAAPTAGLHFTPELLERLREMGVELRFLTLHVGPGTFRPVKGDPEKHEMHAEPYAIPEEVAEAVNRAKAEGRRVVAVGTTVVRALESAYREGVGVVAGEGETRLFIRPPYTFKVIDALFTNFHLPRSTLLMLVAAFLGRERTLEAYRLAVAEGYRFYSLGDAMLIL

SEQ ID NO: 73231 - protein, 350 aa, Thioalbus denitrificans
  REGION 1..350: note = tr|A0A369CH57|A0A369CH57_9GAMM S-adenosylmethionine:tRNA ribosyltransferase-isomerase; OS = Thioalbus denitrificans OX=547122 GN=queA PE=3 SV=1
MLSSEFHFELPDDLIARYPADLRSASRLLCLEGETGSLQDRMFTDLVELLHPGDLLVFNDTRVIPARLLGEKSSGGRVEVLVERIIDARHALAHVRASKAPRPGTLLRLEGEVEVEVLGRDGALFLLYFDADRPLLELLEAVGRIPLPPYIDREVEALDRERYQTVFARRHGAVAAPTAGLHFDAALLERLAARGVESTFVTLHVGAGTFQPVRVDRIEEHVMHAEYVEVGEETCERVRAVRAHGGRVVAVGTTSVRSLETAARNGELEPFQGDTDIFIYPGYRFRAVDALITNFHLPGSTLLMLVAAFAGHDNVMTAYRHAVEQRYRFFSYGDAMFLTPQRFDDEPEPD

SEQ ID NO: 73232 - protein, 263 aa, Thioalkalivibrio denitrificans
  REGION 1..263: note = tr|A0A1V3NAZ3|A0A1V3NAZ3_9GAMM S-adenosylmethionine:tRNA ribosyltransferase-isomerase (Fragment) OS=Thioalkalivibrio denitrificans OX=108003; GN = B1C78_15375 PE=3 SV=1
ASKAPGEGVVLRLEEAFDARVEGREGDLFRLAFEGDLPVLDLLERHGHMPLPPYIERADGPEDRSRYQTVYASRPGAVAAPTAGLHFDEAMMERLRARGVESAHVTLHVGAGTFQPVRTQDLDAHRMHAEWLEVNARVCEQVDACRARGGRVVAVGTTAVRSLEAAAQSGALRPMTGETRLFIRPGYRFRVVDALITNFHLPESTLLMLVCAFAGYAPVMDAYRHAVAKRYRFFSYGDAMWIGAGASGKELHGNGAGKAWNSI

SEQ ID NO: 73233 - protein, 361 aa, Thioalkalivibrio halophilus
  REGION 1..361: note = tr|A0A1V2ZZQ0|A0A1V2ZZQ0_9GAMM S-adenosylmethionine:tRNA ribosyltransferase-isomerase; OS = Thioalkalivibrio halophilus OX=252474 GN=queA PE=3 SV=1
MRVADFDYALPSELIAQDPLPERTGSRLLVLEGEEPEDAVFADIGRWLRPGDLLVLNDTRVIPARVFGQKASGGRVEVLFERVLEGGREALAMVRASRAPGIGVRLWLADGAFEVEVTRREGPFFRLSLCGEGKAGEQDLPALLHAHGQVPLPPYIERAPEQEDATRYQTVFARREGAVAAPTAGLHFDDTLLRGLRDSGVETATVTLHVGAGTFQPVKVEDTTDHEMHAEWLEVSPELCAAVARCRERGGRVVAVGTTCVRALESAAAGGELEPFTGDTRLFIQPGYPFRVVDRMITNFHLPQSTLLMLVSAFAGYRRLFAAYAHAVSQRYRFFSYGDAMWLAPGDPDDQPPSAETSDAV

SEQ ID NO: 73234 - protein, 355 aa, Thioalkalivibrio nitratireducens
  REGION 1..355: note = tr|L0DZX5|L0DZX5_THIND S-adenosylmethionine:tRNA ribosyltransferase-isomerase OS=Thioalkalivibrio nitratireducens (strain DSM 14787 / UNIQEM 213 / ALEN2); OX = 1255043GN=queA [H] PE=3 SV=1
MRVADFDYSLPPELIAQQPLPERTGARLLVLEGGQPEDAALRDVARWLRVGDLLVLNDTRVIPARLLGFKATGGRVEVLIERIESADTALAMVRASKPPPVGTRLRLEDALDVEVLGREGMFFRLRLSNQGDFLQALQRHGHVPLPPYIQRVDRAEDRERYQTVFAARDGAVAAPTAGLHFDDAMLQNLKQRGVRISTVTLHVGAGTFQPVKVEDTDDHEMHAEYAEVGAEVCAEVAACKARGGRVVAVGTTVLRSLESAAAGGELQPFAGETRLFITPGYRFRAVDRLLTNFHLPQSTLLMLVTAFGGYRRVLDAYRHAVAQRYRFFSYGDAMWLAPGDPGDLPPSVDTNRHEV

SEQ ID NO: 73235 - protein, 355 aa, Thioalkalivibrio paradoxus
  REGION 1..355: note = tr|W0DKX4|W0DKX4_9GAMM S-adenosylmethionine:tRNA ribosyltransferase-isomerase OS=Thioalkalivibrio paradoxus ARh 1 OX=713585 GN=queA PE=3 SV=1
MRVADFDYSLPPELIAQQPLPERTGARLLVLEGGQPEDAQLRDIARWLRAGDLLVLNDTRVIPARLLGFKATGGRVEVLVERIESADTVLAMVRASKSPPVGTRLRLEDALDVEVLGREGMFFRLRLSNQGDFLQALQRHGHVPLPPYIQRADRAEDRERYQTVFAARDGAVAAPTAGLHFDDAMLQDLRQRGVRISTVTLHVGAGTFQPVKVEDTDDHEMHAEYAEVGAEICADVAACKARGGRVAAVGTTVLRSLESAAAGGELQPFAGETRLFITPGYRFRVVDRLLTNFHLPQSTLLMLVTAFGGYRRVLEAYRHAVAQHYRFFSYGDAMWLAPGDPGDLPPSMDANRHEV

SEQ ID NO: 73236 - protein, 355 aa, Thioalkalivibrio sp.
  REGION 1..355: note = tr|D3S9V9|D3S9V9_THISK S-adenosylmethionine:tRNA ribosyltransferase-isomerase OS=Thioalkalivibrio sp. (strain K90mix) OX=396595 GN=queA PE=3 SV=1
MRVSDFDYELPQELIAQYPLPERGSSRLLVLEDKQAEDATFGAIESLLRPGDLLVLNDTRVIPARVFGQKASGGQVEVLVERIESPTQVLAMVRASRAPKPGTRLHLADAFTVEVTDRQGPFFRLRLVDGADMLALLKQHGHIPLPPYIERADEGSDAERYQTVFARKEGAVAAPTAGLHFDDALLGRLRAQGVETATVTLHVGAGTFQPVKVDDTSRHEMHAEWLEVGPEACAAVAACKVRGGRVVAVGTTCVRSLETAAAEGELTPFQGETRLFIQPGYRFRVVDRMVTNFHLPQSTLLMLVAAFAGYRRILDAYAHAVANRYRFFSYGDAMWLAPGDPADLPPSVREEHDGV

SEQ ID NO: 73237 - protein, 361 aa, Thioalkalivibrio sp.
  REGION 1..361: note = tr|A0A318VNW7|A0A318VNW7_9GAMM S-adenosylmethionine:tRNA ribosyltransferase-isomerase; OS = Thioalkalivibrio sp. ALE21 OX=1158175 GN=queA PE=3 SV=1
MRVADFDYALPSELIAQDPLPERTGSRLLVLEGEEPEDAVFADIGRWLRPGDLLVLNDTRVIPARVFGQKASGGRVEVLFERVLEGGREALAMVRASRAPGIGVRLWLADGAFEVEVTRREGPFFRLSLCGEGKAGEQDLPALLHAHGQVPLPPYIERAPEQEDTTRYQTVFARREGAVAAPTAGLHFDDTLLRGLRDSGVETATVTLHVGAGTFQPVKVEDTTDHEMHAEWLEVSPELCAAVARCRERGGRVVAVGTTCVRALESAAAGGELEPFTGDTRLFIQPGYPFRVVDRMITNFHLPQSTLLMLVSAFAGYRRLFAAYAHAVSQRYRFFSYGDAMWLAPGDPDDQPPSAEASDAV

SEQ ID NO: 73238 - protein, 364 aa, unidentified
  source 1..364: note = Thioalkalivibrio sulfidiphilus
  REGION 1..364: note = sp|B8GTQ5|QUEA_THISH S-adenosylmethionine:tRNA ribosyltransferase-isomerase OS=Thioalkalivibrio sulfidiphilus (strain HL-EbGR7) OX=396588 GN=queA PE=3 SV=1
MRLSDFHYELPPELIAQRPLAERSASRLLCLDRDTGALADRRFRDLPDLLNPGDLLVFNDTRVIPARLLGVKRDTGGRVEVLVERVLDEHRVLAHVRASKSPGEGVVLWLEEALEAVVEGREGDLFCLWFAGDLPVIELLERHGHMPLPPYIERPDAAEDRDRYQTVFASRPGAVAAPTAGLHFDADIMARMRARGVETAAVTLHVGAGTFQPVRVEDVSRHVMHAEWTEVSTQVCDQVAACRARGGRVVAVGTTAVRSLESAAADGELKPFSGDTRLFITPGYTFRVVDALVTNFHLPESTLLMLVSAFAGYEPVMQAYRHAVAERYRFFSYGDAMFIGPQEASDKMQETSGRGERPRFDHEI

SEQ ID NO: 73239 - protein, 358 aa, Thioalkalivibrio versutus
  REGION 1..358: note = tr|A0A0G3G0Y0|A0A0G3G0Y0_9GAMM S-adenosylmethionine:tRNA ribosyltransferase-isomerase; OS = Thioalkalivibrio versutus OX=106634 GN=queA PE=3 SV=1
MRVADFDYELPPELIAQYPLPDRAGSRLLILEEERPRDARFAEIEDLLRPGDLLVLNDTRVIPARVFGCKESGGQVEVLVERIESPGQVLAMVRASRAPKVGARLRLADAFTVEVTGREGPFFRLALVDADDVLALLREHGHIPLPPYIERADEAHDADRYQTVFAAREGAVAAPTAGLHFDDALLGRLRSAGVETATVTLHVGAGTFQPVKVEDTAAHEMHAEWLEVSPEACAAVAACKARGGRVVAVGTTCVRSLETAAAGGELAPFQGETRLFIQPGDRFRVVDRMVTNFHLPQSTLLMLVAAFAGYRRILDAYAHAVAQRYRFFSYGDAMWLAPGQGDDLPPSMTTAAGESDGV

SEQ ID NO: 73240 - protein, 358 aa, Thioalkalivibrio versutus
  REGION 1..358: note = tr|A0A1V3BTJ7|A0A1V3BTJ7_9GAMM S-adenosylmethionine:tRNA ribosyltransferase-isomerase; OS = Thioalkalivibrio versutus OX=106634 GN=queA PE=3 SV=1
MRVADFDYELPPELIAQYPLPDRAGSRLLVLEEERPRDARFAEIEDLLRPGDLLVLNDTRVIPARVFGRKESGGQVEVLVERIESPGQVLAMVRASRAPKVGARLRLADAFTVEVTGREGPFFRLALVDADDVLALLREHGHIPLPPYIERADEAHDADRYQTVFAAREGAVAAPTAGLHFDDALLGRLRSAGVETATVTLHVGAGTFQPVKVEDTSAHEMHAEWLEVSPEACAAVAACKARGGRVVAVGTTCVRSLETAAAGGELAPFQGETRLFIQPGDRFRVVDRMVTNFHLPQSTLLMLVAAFAGYRRILDAYAHAVAQRYRFFSYGDAMWLAPGQGDDLPPSMTTAAGESDGV

SEQ ID NO: 73241 - protein, 343 aa, Thiobaca trueperi
  REGION 1..343: note = tr|A0A4R3N1M3|A0A4R3N1M3_9GAMM S-adenosylmethionine:tRNA ribosyltransferase-isomerase; OS = Thiobaca trueperi OX=127458 GN=queA PE=3 SV=1
MQRSDFYYDLPPELIAQRPLAERGGARMLVLDGTEDSPRDGIFSDLPRLLRPNDLLVFNNTRVMRARLFGQKATGGRVEILIERLLAPDEALAHVRASKSPRSGSIIQLADGARLMLTGREGDLFRLHAVEATFADIMSRQGHIPLPPYIQRPDDEADDSRYQTLYASREGAVAAPTAGLHFDAPMLQRLAELGVGRAEVTLHVGAGTFQPVRVDDLDRHIMHAEWLEVSEDTCERIRLTRQSGGRIIAVGTTSVRSLETAAADGELKPFRGDSRLFIRPGYRFRIVDVMLTNFHLPESTLLMLVSAFAGHDRIMHAYHHAVAKGYRFFSYGDAMFLVRRPDA

SEQ ID NO: 73242 - protein, 344 aa, Thiobacillus denitrificans
  REGION 1..344: note = sp|Q3SH62|QUEA_THIDA S-adenosylmethionine:tRNA ribosyltransferase-isomerase OS=Thiobacillus denitrificans (strain ATCC 25259) OX=292415 GN=queA PE=3 SV=1
MRVADFDFELPPDLIAQFPPDVRGASRLLHVTAAGALHDRMFRELPTLLGADDLLVMNDTRVIKARLFGEKDSGGRVELLVERVTGEFEALAFIRASHAPKPGARIRLADDVALDVLDKQHDLTRLHFPAPVLDVLDRCGRLPLPPYIEHAPTEEDEARYQTVYANEPGAVAAPTAGLHFDAAMLGTLQTQGVRTARVTLHVGAGTFQPVRVAEVADHVMHSERYTVPAATVAAIAETRARGGRVVAVGTTSLRALEAASASGSVEAGVGETAIFITPGYRFRTVDALVTNFHLPRSTLLMLVSAFSGIETIRRAYAHAIAERYRFFSYGDAMFLEKASLETPA

SEQ ID NO: 73243 - protein, 346 aa, Thiobacillus denitrificans
  REGION 1..346: note = tr|A0A106BW66|A0A106BW66_THIDE S-adenosylmethionine:tRNA ribosyltransferase-isomerase; OS = Thiobacillus denitrificans OX=36861 GN=queA PE=3 SV=1
MQVADFDFDLPDELIAQLPPAVRGGSRLLHVEASGTLHDRWFSKLPTLLRPNDLLVMNDTRVIKARLFGTKDSGGKVELLVERVTGEFDALAFIRASHAPKPGSSIHLSDNVAVEVLARQDDLTQLRFPRPVLEVLQQLGQLPLPPYIAHTPTADDEARYQTVYANEPGAVAAPTAGLHFDDAMLDALREQGIRTAQVTLHVGAGTFQPVRVDDIAEHRMHSERYTIPQATVDAIRETRARGGRVVAVGTTSLRALEAAALEAATQSGDLRAGASETDIFITPGYRFQVVDALITNFHLPKSTLLMLVSAFAGLDTIRAAYAHAIAERYRFFSYGDAMFLEKRPPA

SEQ ID NO: 73244 - protein, 341 aa, Thiobacillus sp.
  REGION 1..341: note = tr|A0A1M3HD50|A0A1M3HD50_9PROT S-adenosylmethionine:tRNA ribosyltransferase-isomerase; OS = Thiobacillus sp. 65-1059 OX=1895860 GN=queA PE=3 SV=1
MHVADFDFDLPDELIAQFPPALRGGSRLLHVEASGTLHDRRFCDLPALLRPDDLLVMNDTRVIKARLFGHKESGGKVELLVERVLDERDALAFIRASHAPRPGSRIRLADDVAAEVLARQDDLTRLRFSRPVLDVLDRLGQLPLPPYIEHTPTADDEARYQTVYANAPGAVAAPTAGLHFDAAMLDALRAQGVRTAQVTLHVGAGTFQPVRVDAIADHKMHSERYTIPDAAVAAIAETRARGGRVVAVGTTSLRALEAAAQAGKLHAGSGETDIFITPGYRFRVVDALITNFHLPKSTLLMLVSAFAGLDAIRAAYAHAVREHYRFFSYGDAMFLEKRPSE

SEQ ID NO: 73245 - protein, 341 aa, Thiobacillus sp.
  REGION 1..341: note = tr|A0A1E4P231|A0A1E4P231_9PROT S-adenosylmethionine:tRNA ribosyltransferase-isomerase; OS = Thiobacillus sp. SCN 63-57 OX=1660145 GN=queA PE=3 SV=1
MRVADFDFDLPADLIAQFPPAVRGGSRLLHVEASGTLHDRWFSELPALLRPDDLLVMNDTRVIKARLFGQKDSGGKVELLVERVTGEFEALAFIRASHAPKPGSHIHLSDDTLLEVLARQDDLTQLRFPRPVLDVLDQFGRLPLPPYIEHTPTADDEARYQTVYANEPGAVAAPTAGLHFDDAMLDTLQQQGIRTARVTLHVGAGTFQPVRVDDVAEHKMHSERYTIPPATVDAIRETHARGGRVVAVGTTSLRALEAAAQSGKLHAGSGETDIFITPGYRFKVVDTLITNFHLPKSTLLMLVSAFAGVDTIRVAYAHAIAERYRFFSYGDAMFLEKSPPA

SEQ ID NO: 73246 - protein, 351 aa, Thiocapsa marina
  REGION 1..351: note = tr|F9U8J8|F9U8J8_9GAMM S-adenosylmethionine:tRNA ribosyltransferase-isomerase OS=Thiocapsa marina 5811; OX = 768671 GN=queA PE=3 SV=1
MRLRDFHYDLPSDLIAQRPLPDRGASRLLALDPAGDGRRDLCFRDLPSLLRPGDLLVFNNTRVMRARLFGCKDTGGRVEILIERVLEAGEALAQIRASKSLKPGRWIDLDGGSRLVVRQREGDLYRLGLIEGSFPELMSKQGHIPLPPYIQRPDDASDDARYQTVYARHSGAVAAPTAGLHFDEAMLVHLREMGVGFAEVTLHVGAGTFQPVRVDDLDRHEMHAEWIDVNDDVCRRVHSARAAGGRIVAVGTTSVRSLESAAAEGELVPFRGDSRLFIRPGYRFRVVDALITNFHLPESTLLMLVSAFAGHRPVMDAYRHAVDARYRFFSYGDAMFLSRNEDGSPDDSSSR

SEQ ID NO: 73247 - protein, 352 aa, Thiocapsa rosea
  REGION 1..352: note = tr|A0A495V515|A0A495V515_9GAMM S-adenosylmethionine:tRNA ribosyltransferase-isomerase; OS = Thiocapsa rosea OX=69360 GN=queA PE=3 SV=1
MHLRDFHYDLPADLIAQRPLPDRGASRLLALDPEGEGCRDLLFSDLPRLLRPGDLLVFNNTRVMRARLFGRKDTGGRVEILIERLVDARAALAQVRASKSPKPGGWIELDGGARLLVVQREGDLYRLGLVEGTFADLMSEQGHIPLPPYIQRPDDVSDEARYQTVYARHSGAVAAPTAGLHFDEAMLVRLRAMGVGLAEVTLHVGAGTFQPVRVDDIDRHEMHAEWIEVNEEVCRAVHSTRASGGRIVAVGTTSVRSLETAAADGALKPFRGDSRLFIRPGYRFRVVNAMITNFHLPESTLLMLVSAFAGYRPVMDAYRHAVDARYRFFSYGDAMFLNRNEEDTALHHSSSR

SEQ ID NO: 73248 - protein, 352 aa, Thiocapsa roseopersicina
  REGION 1..352: note = tr|A0A1H2YKC8|A0A1H2YKC8_THIRO S-adenosylmethionine:tRNA ribosyltransferase-isomerase; OS = Thiocapsa roseopersicina OX=1058 GN=queA PE=3 SV=1
MHLRDFHYDLPADLVAQRPLPDRGASRLLALDPTGEGCRDLLFSDLPRLLRPGDLLVFNNTRVMRARLFGRKGTGGRVEILIERVLDARAALAQVRASKSPKPGCSIDLDGGAQLIVGQREGDLYRLGLIEGTFADLMSEQGHIPLPPYIQRPDDASDEARYQTVYARHSGAVAAPTAGLHFDEAMLVRLREMGVGFAEVTLHVGAGTFQPVRVADIDRHEMHAEWIDVNEDVCRAVHSTRARGGRVVAVGTTSVRSLETAAADGELKPFRGDSRLFIRPGYRFRVVDAMITNFHLPESTLLMLVSAFSGYRLVMDAYCHAVDARYRFFSYGDAMFLIRNEEDAALNQASSR

SEQ ID NO: 73249 - protein, 349 aa, Thiocapsa sp.
  REGION 1..349: note = tr|A0A0U5IHK7|A0A0U5IHK7_9GAMM S-adenosylmethionine:tRNA ribosyltransferase-isomerase; OS = Thiocapsa sp. KS1 OX=610332 GN=queA PE=3 SV=1
MRLRDFHYDLPAELIAQRPLPDRGASRLLALDAAADQGCRDLRFSDLPQLLRPGDLLVFNNTRVMRARLFGRKDTGGQVEILVERVLDACEALAQVRASKSPKPGRRIELASGVRLLVTGCEAGFYRLRLEGTTFAQVMSTQGHIPLPPYIQRPDDVLDESRYQTLYARHSGAVAAPTAGLHFDDAMLARLPEMGVGRAEVTLHVGAGTFQPVRVQDLDRHEMHAEWIEVNEEVCRQVNSAREQGGRIVAVGTTSVRSLETAAADGDLKPFRGDSRLFIRPGYRFRVVDAMITNFHLPESTLLMLVSAFAGYRAVMDAYRHAVDARYRFFSYGDAMFLSRNEDSPPPST

SEQ ID NO: 73250 - protein, 348 aa, unidentified
  source 1..348: note = Thioclava arenosa
  REGION 1..348: note = tr|A0A2A4CUA4|A0A2A4CUA4_9RHOB S-adenosylmethionine:tRNA ribosyltransferase-isomerase; OS = Thioclava arenosa OX=1795308 GN=queA PE=3 SV=1
MKLDDFDFHLPEGLIATRPARPRDAARLLLAEGDAITDRHVHDLVDILRPGDRLVLNNTKVIPARLAGTRTRQSAQGEVVAKVEVTLLEPAPGGEWSALAKPLRKLREGEEIVFSPALSAEVRAIEAGQMRIAFNLAGEDFDVALAEAGAMPLPPYIAALRAPDEADKSDYQTVFARHSGAVAAPTASLHFTPELLEKLHEKGVTFTEVTLHVGAGTFLPVKVEDVTTHNMHAEWGEVSAAAAAEIAATKAAGGRVIPVGTTALRLIETAARSGQIAPFEGTTDIFIYPGFTFHVADALMTNFHLPKSTLLMLVSALMGQDRIRRIYSHAVANGYRFFSYGDASLLIP

SEQ ID NO: 73251 - protein, 353 aa, unidentified
  source 1..353: note = Thioclava atlantica
  REGION 1..353: note = tr|A0A085TW98|A0A085TW98_9RHOB S-adenosylmethionine:tRNA ribosyltransferase-isomerase; OS = Thioclava atlantica OX=1317124 GN=queA PE=3 SV=1
MKLEDFDFDLPEGLIATRPARPRDSARLLLAEGDTITDRHVYDLLEIFRPGDRLVLNNTKVIPARLMGTRTRQSAQGEVVAKIEVTLLEPAPGGEWTALAKPLRKVKEGEEIVFSEALSARVAAIENGQMRVAFNLEGEDFDAALAEAGAMPLPPYIAALRAPDEEDKRDYQTVFARHSGAVAAPTASLHFTRELLEALAAKGVEFTEVTLHVGAGTFLPVKVEDVTQHKMHAEWGEVSEAAAAAINATKAAGGRVIPVGTTALRLIESAARAPGGAKGHIVPYRDATDIFIYPGFEFRITDALMTNFHLPKSTLMMLVSALMGPERIRRIYAHAVENGYRFFSYGDASLLIP

SEQ ID NO: 73252 - protein, 353 aa, unidentified
  source 1..353: note = Thioclava dalianensis
  REGION 1..353: note = tr|A0A074U3W2|A0A074U3W2_9RHOB S-adenosylmethionine:tRNA ribosyltransferase-isomerase; OS = Thioclava dalianensis OX=1185766 GN=queA PE=3 SV=1
MKLDDFDFDLPEGLIATRPARPRDSARLLVAQGDAIRDLHVRDLIDLFGPGDRLVLNNTKVIPARLSGLRHRDSAQGAVSAKIEVTLLEPAANGDWSALAKPLRKVKAGEEIIFSDALSAKVTAIEAGQMRIAFNLTGDDFDAALAEAGAMPLPPYIAALRAPDDADKSDYQTVFARHSGAVAAPTASLHFTRELLEGLAAKGVSFTEVTLHVGAGTFLPVKVEDVTTHKMHAEWGEVSAQAAAEINATKEAGGRVIPVGTTALRLIESAARSEGGAPGHIVPFRDATDIFIYPGFEFRITDALMTNFHLPKSTLLMLVSGLMGRERIQNIYDHAVKNDYRFFSYGDASLLIP

SEQ ID NO: 73253 - protein, 353 aa, unidentified
  source 1..353: note = Thioclava electrotropha
  REGION 1..353: note = tr|A0A1W9XUQ1|A0A1W9XUQ1_9RHOB S-adenosylmethionine:tRNA ribosyltransferase-isomerase; OS = Thioclava electrotropha OX=1549850 GN=queA PE=3 SV=1
MKLDDFDFELPEGLIATRPARPRDAARLLLAEGDAIHDRHVRDLIDIFRPGDRLVLNNTKVIPARLAGTRTRQSAQGEVVAKVEVTLLEPAPGGEWSALAKPLRKVKEGEEIVFSDALSARVEAIEIGQLRLSFNLSGEDFDAALAEAGAMPLPPYIAALRAPDDEDKRDYQTVFARHSGAVAAPTASLHFTRELLEALAAKGVEFTEVTLHVGAGTFLPVKVEDVTTHKMHAEWGEVSEQAAAEINATKQAGGRVIPVGTTALRLIESAARAEGGAKGHIVPFRDATDIFIYPGFEFRITDALMTNFHLPKSTLLMLVSALMGQDRIREIYDHAVKTGYRFFSYGDASLLIP

SEQ ID NO: 73254 - protein, 353 aa, unidentified
  source 1..353: note = Thioclava indica
  REGION 1..353: note = tr|A0A074JUJ9|A0A074JUJ9_9RHOB S-adenosylmethionine:tRNA ribosyltransferase-isomerase; OS = Thioclava indica OX=1353528 GN=queA PE=3 SV=1
MQLADFDFDLPEGLIATRPARPRDSARLLLAQGDAISDRHVFDLVDIFRPGDRLVLNNTKVIPARLSGTRTRQSAQGEVTAKVEVTLLEPLPGGQWEALAKPLRKVKPGERIVFSDALSADVMAIENGQMRLAFNLAGEDFDAALAQAGAMPLPPYIAALRAPDEADKSDYQTVFARHSGAVAAPTASLHFTPELLEKLAAKGVEFTEVTLHVGAGTFLPVKVDDVTTHKMHSEWGEVSAQAAAEINATKAAGGRVIPVGTTALRLIESAARAPGGAAGHIVAFRDATDIFIYPGFAFRITDALMTNFHLPKSTLLMLVSALMGQERIHEIYDHAVKNGYRFFSYGDSSLLIP

SEQ ID NO: 73255 - protein, 353 aa, Thioclava pacifica
  REGION 1..353: note = tr|A0A074J3H3|A0A074J3H3_9RHOB S-adenosylmethionine:tRNA ribosyltransferase-isomerase; OS = Thioclava pacifica DSM 10166 OX=1353537 GN=queA PE=3; SV = 1
MKLEDFDFDLPEGLIATRPARPRDAARLLLAQGDTITDLHVRDLIDIFRPGDRLVLNNTKVIPARLSGMRTRQSAQGEVTAKVEVTLLEPAPGGEWTALAKPLRKVKQGEVIVFSDALSAQVVAIEQGQLRVAFNLTGEDFDAALAEAGAMPLPPYIAALRAPDEDDKRDYQTVFARHSGAVAAPTASLHFTRELLEALAAKGVEFTEVTLHVGAGTFLPVKVEDVTTHKMHAEWGEVSEAAAAEINATKAAGGRVIPVGTTALRLIESAARAPGGAMGQIVPFRDATDIFIYPGFEFRITDALMTNFHLPKSTLLMLVSALMGHERIQKIYAHAVENRYRFFSYGDASLLIP

SEQ ID NO: 73256 - protein, 353 aa, Thioclava sp.
  REGION 1..353: note = tr|A0A4R7KL94|A0A4R7KL94_9RHOB S-adenosylmethionine:tRNA ribosyltransferase-isomerase; OS = Thioclava sp. ES.032 OX=1798206 GN=queA PE=3 SV=1
MKLDDFDFDLPEGLIATRPARPRDAARLLLAEGDAIHDRHVRDLIDIFRPGDRLVLNNTKVIPARLAGTRTRQSTQGEVVAKVEVTLLEPAPGGEWSALAKPLRKVKEGEEVVFSDALSAKVEAIENGQLRLGFNLSGEDFDAALAEAGAMPLPPYIAALRAPDDADKRDYQTVFARHSGAVAAPTASLHFTRELLEALAAKGVEFTEVTLHVGAGTFLPVKVEDVTTHKMHAEWGEVSEQAAADINATKQAGGRVIPVGTTALRLIESAARAEGGAKGHIVPFRDATDIFIYPGFEFRITDALMTNFHLPKSTLLMLVSALMGQDRIREIYDHAVKTGYRFFSYGDASLLIP

SEQ ID NO: 73257 - protein, 353 aa, Thioclava sp.
  REGION 1..353: note = tr|A0A1T2A769|A0A1T2A769_9RHOB S-adenosylmethionine:tRNA ribosyltransferase-isomerase; OS = Thioclava sp. F28-4 OX=1915315 GN=queA PE=3 SV=1
MKLDDFDFELPEGLIATRPARPRDAARLLLAEGDAIHDRHVRDLIDIFRPGDRLVLNNTKVIPARLAGTRTRQSAQGEVVAKVEVTLLEPAPGGEWSALAKPLRKVKESEEIVFSDALSARVEAIENGQLRLSFNLSGEDFDAALAEAGAMPLPPYIAALRAPDDEDKRDYQTVFARHSGAVAAPTASLHFTRELLEALAAKGVEFTEVTLHVGAGTFLPVKVEDVTTHKMHAEWGEVSEQAAAEINATKQAGGRVIPVGTTALRLIESAARAEGGAKGHIVPFRDATDIFIYPGFEFRITDALMTNFHLPKSTLLMLVSALMGQDRIREIYDHAVKTGYRFFSYGDASLLIP

SEQ ID NO: 73258 - protein, 364 aa, Thiocystis violascens
  REGION 1..364: note = tr|I3Y6W5|I3Y6W5_THIV6 S-adenosylmethionine:tRNA ribosyltransferase-isomerase OS=Thiocystis violascens (strain ATCC 17096 / DSM 198 / 6111) OX=765911 GN=queA; PE = 3 SV =1
MGLGESEPKRIPRLPRRALDPMRRSDFHYDLPPDLIAQRPLAERAGARMLMLEEPAFAPRDRMFADLPRLLRPNDLLVFNNTRVMRARLYGRKETGGQVEILVERLLEPDEALAHVRASKSPKPGSRIDLAAGIGLRVMLREGALYRLRALGATFAEIMSTQGHIPLPPYIQRPDEFADEARYQTLYARREGAVAAPTAGLHFDAAMLQRLDDLGVGRAEVTLHVGAGTFQPVRVDDLDRHEMHAEWLDVDAEACARIETARRRGGRIVAVGTTSVRSLETAAADGQLKPYRGDSRLFIRPGYRFRVVDAMVTNFHLPESTLLMLVAAFVGYQPMMNAYRHAVAERYRFFSYGDAMFLARQGRD

SEQ ID NO: 73259 - protein, 341 aa, Thioflavicoccus mobilis
  REGION 1..341: note = tr|L0GV44|L0GV44_9GAMM S-adenosylmethionine:tRNA ribosyltransferase-isomerase OS=Thioflavicoccus mobilis 8321 OX=765912 GN=queA PE=3 SV=1
MYRTDFHYELPPELIAQRPLAERGASRLLNLDGPSGALRDLSFADLPQLLRPGDLLVLNDTSVMRARLLGRKPTGGCVEILIERLLGPDAALAHCRPGRSLRTATEIEIDGGGKVVVAGREGELFRLVAPDGDLSALMARRGHVPLPPYIQRPDDGADTERYQTVYAAREGAIAAPTAGLHFEEAMLARLSALGVGQARVTLHVGAGTFQPVRAERIDAHRMHAEWVEVGDDVCAQVSATRAAGGRVVAVGTTSVRSLETAAADGALRPYCGDSRLFIRPGYRFRVVDALLTNFHLPESTLLMLVSAFAGHAQVMAAYRHAVEARYRFFSYGDAMFLTRWN

SEQ ID NO: 73260 - protein, 345 aa, unidentified
  source 1..345: note = Thioflexothrix psekupsii
  REGION 1..345: note = tr|A0A251X5J5|A0A251X5J5_9GAMM S-adenosylmethionine:tRNA ribosyltransferase-isomerase; OS = Thioflexothrix psekupsii OX=1570016 GN=queA PE=3 SV=1
MQRSDFNFTLPDELIAQYPTEQRTASRLLYVPSPSGIALIDLQFSELPDYLTSGDLLIFNNTQVIPARLFARKKTTGGQVELLIERLLENQHALVQLKASKTPAINSELVLENGLIVRIKARQEQFFKVQFETQESLLDLLQSIGHIPLPPYIRRDDTRVDSERYQTVYASRPGAVAAPTAGLHFDQPLLQRLQAQGVAFGYVTLHVGAGTFTPLRVNDLSQHQMHSEWLQVTEEVCQQIQSTKANGGRVIAVGTTSVRALETAAATGKIQPYEGETRLFITPGYRFKSVDGLITNFHLPESTLFMLVCAFGGYDRILSAYHHAVEKRYRFFSYGDAMFIAAKHE

SEQ ID NO: 73261 - protein, 344 aa, unidentified
  source 1..344: note = Thiogranum longum
  REGION 1..344: note = tr|A0A4R1HNG0|A0A4R1HNG0_9GAMM S-adenosylmethionine:tRNA ribosyltransferase-isomerase; OS = Thiogranum longum OX=1537524 GN=queA PE=3 SV=1
MKTRDFHYNLPPERIASHPARPRHSSRLLDLAPDGSINDHTMADFPGLVGADDLLVFNNTRVIPARLYGQKASGGKVEVLIERVLDERRALAHVRCSKSPKAGSRLQLADGKLDVEVTGREGELFSLYFEGDVPLLELLERWGHVPLPPYIERADERVDRDDYQTLFARHPGAVAAPTAGLHFDRELLDALAARNIRTAYVTLHVGAGTFQPVRVENPEQHIMHAEQVTVDAAVCQAVEQTRARGGRVIAVGTTVVRSLESAVQAGVLKPFSGDTRLFITPGYRFTAVDAMLTNFHLPESTLLMLVCAFAGFEPVMAAYRHAVEQNYRFFSYGDAMFLQHSAVE

SEQ ID NO: 73262 - protein, 350 aa, Thiohalobacter thiocyanaticus
  REGION 1..350: note = tr|A0A1Z4VQJ1|A0A1Z4VQJ1_9GAMM S-adenosylmethionine:tRNA ribosyltransferase-isomerase; OS = Thiohalobacter thiocyanaticus OX=585455 GN=queA PE=3; SV = 1
MQRSDFHYLLPSQLIAQSPLAERGGSRLLVLDGASGRCRDAGFAGLPDYLRPGDLLVINDTRVIPARLHGTKASGGRVEVLIERVVDARTALAHVRASKSPKPGGRLQLEAGLEVEVLDREGELFRLRFPTGRTVMEWLEVHGHVPLPPYIQRPDAAEDRERYQTLFARVPGAVAAPTAGLHFDAAMLERLARAGVETARVTLHVGAGTFQPVRVDDLSRHHMHAEYVEVGQEAVDQVRAAHARGARVLAVGTTVVRSLEAAAASGQLQPFAGDTRLFITPGYEFKVVDLLLTNFHLPESTLLMLVCAFAGYEPVMQAYRHAVEQEYRFFSYGDAMLLSREGLALEHSKR

SEQ ID NO: 73263 - protein, 350 aa, Thiohalobacter thiocyanaticus
  REGION 1..350: note = tr|A0A426QGL4|A0A426QGL4_9GAMM S-adenosylmethionine:tRNA ribosyltransferase-isomerase; OS = Thiohalobacter thiocyanaticus OX=585455 GN=queA PE=3; SV = 1
MQRSDFHYLLPEHLIAQMPLARRDASRMLTVDGASGDWRDARFAELPDYLRPGDLLVINDTRVIPARLHGLKASGGRVEVLIERVLDARTALAHVRASKSPKPGARLYLEEVLEVEVAGREGELFRLCFPPERTVTEWLEAHGHVPLPPYIQRPDQAEDRERYQTLFARVPGAVAAPTAGLHFDAAMLERLAGAGVETARVTLHVGAGTFQPVRVDDLNAHRMHAEYVEVGEAAVARIEATRARGGRVLAVGTTVVRSLEAAAADGALRPFAGETRLFITPGYEFRVVDLLLTNFHLPESTLLMLVCAFAGCEPVMQAYRHAVEAEYRFFSYGDAMLLSRAGLALEHFKR

SEQ ID NO: 73264 - protein, 340 aa, Thiohalomonas denitrificans
  REGION 1..340: note = tr|A0A1G5Q0J2|A0A1G5Q0J2_9GAMM S-adenosylmethionine:tRNA ribosyltransferase-isomerase; OS = Thiohalomonas denitrificans OX=415747 GN=queA PE=3 SV=1
MQRTDFHFDLPGELIAQRPAEQRTGSRLLLLDGRDGRLEDRYFPDIEALLSPGDLLVFNDTRVIPARLFGRKASGGRVEVLVERVVDDRRVFAHVRSSKSPRPGSMLRLEEAVDVTVTGRDGALFELSFPESALAVLETYGRMPLPPYIEREAGEADAERYQTVFARKKGAVAAPTAGLHFDEPLLERLRSKGIEFAHVTLHVGAGTFQPVRVDNIHEHHMHSEYLEVPESVCRAVARTRERGGRVVAVGTTVVRSLESAARDGLAPFTGETDIFIYPGYRFRVVDALLTNFHLPESTLLMLVSAFAGRDQVLAAYRHAVEERYRFFSYGDAMFILPQRD

SEQ ID NO: 73265 - protein, 345 aa, Thiohalophilus thiocyanatoxydans
  REGION 1..345: note = tr|A0A4R8IVI9|A0A4R8IVI9_9GAMM S-adenosylmethionine:tRNA ribosyltransferase-isomerase; OS = Thiohalophilus thiocyanatoxydans OX=381308 GN=queA PE=3; SV = 1
MRCQDFHFDLPEELIAQVPAAQRRDSRLLCLGVTGEIADRQFVDLPELLQAGDLLVMNDTRVIPARLFGHKASGGQIEVLVERLLDDTDLLAHVRASKSPKAGTTLHLSDSVSATVLGREGELFRLRLTDRDDPERTLLAILDELGHMPLPPYIRRADEQADRERYQTVFARRPGAVAAPTAGLHFDEALLAQLARQGIETAWVTLHVGAGTFQPVRVENIREHHMHAEWVEVNETVCQQVEQTRQRGGRVIAVGTTSVRCLESAVRDGQLQPFTGDTDIFIYPGYEFQIVDGLITNFHLPESTLLMLVCAFAGYDNVMRAYRHAVEQRYRFFSYGDAMYLTRSE

SEQ ID NO: 73266 - protein, 344 aa, Thiohalorhabdus denitrificans
  REGION 1..344: note = tr|A0A0P9CXE7|A0A0P9CXE7_9GAMM S-adenosylmethionine:tRNA ribosyltransferase-isomerase; OS = Thiohalorhabdus denitrificans OX=381306 GN=queA PE=3; SV = 1
MRIDEFDFQLPEDRIAQHPARPADAARLLEVRPDGLGDYGVRDLPRLLRPGDLLVFNDTQVIPARLVGHRDAVRVELTLHKPLGGPRWAAFARPAKRLKPGQTVRIAEDFAAEVAEKRDGGEVVLEFDREGAALMAALDAHGHMPLPPYIRGGEDEAADRADYQTRFAAKPGAVAAPTAALHFTDRLMAELEAAGIEWTTVTLHVGAGTFLPVKVEDTRDHIMHAEYGVVEAATAERVNAVRAAGGRIVPVGTTSLRLLETAAGEDGVLRPWSGETDIFITPGYRFRAADLMVTNFHLPKSTLLMLVAAFSGLERIKAAYAHAVEAEYRFYSYGDACLLHPEKD

SEQ ID NO: 73267 - protein, 351 aa, Thiohalospira halophila
  REGION 1..351: note = tr|A0A1I1QPR3|A0A1I1QPR3_9GAMM S-adenosylmethionine:tRNA ribosyltransferase-isomerase; OS = Thiohalospira halophila DSM 15071 OX=1123397 GN=queA; PE = 3 SV=1
MRRQDFHYDLPTELIAQEPAAERSASRLLDLSGEAPVDRAFRELPDLLRAGDCLVFNDTRVVPARLLGQKASGGRVEVLVERIRDDGRVRALVRASRTPGEGALLELEGGVTARVEGREAGHFLLAFDDPRPPLAILEAHGRVPLPPYIEREPGEPDRERYQTAFARRPGAVAAPTAGLHFDEPLLAALEAAGVTTATVTLHVGAGTFEPVRVDDLAEHRMHSEFAEIDRNTAERLNRVRAAGGRVVAVGTTSLRVLESAGEGGRLHPFCGETDLFITPGYHFRATDALVTNFHLPESSLLMLVCAMGGYQRVMAAYHHAVAECYRFFSYGDAMYLEPTADVAPPTLQGET

SEQ ID NO: 73268 - protein, 338 aa, unidentified
  source 1..338: note = Thiolapillus brandeum
  REGION 1..338: note = tr|W0TLA1|W0TLA1_9GAMM S-adenosylmethionine:tRNA ribosyltransferase-isomerase OS=Thiolapillus brandeum; OX = 1076588 GN=queA PE=3 SV=1
MQTSDFSYELPEELIAQYPARNRTDSRLLVLDPSRGVLDSVFAGFPDLLREGDLLVFNDTRVMAARMYGRKETGGRVELLLERLLAEDRALAQIRASKAPKAGTRIRVGDRWLIVEGREDDMFVLALETGRFTRLMDAHGHMPLPPYIRREDESFDESRYQTVYAQREGSVAAPTAGLHFDKALLDALSRKGVDTARVTLHVGAGTFQPVRVKNLDEHVMHAEWVEVSEQVCRRIEQTRQRGGRVIAVGTTSVRSLETAAADGICRPYRGDTRLFITPGYSFKVVDALLTNFHLPESTLLMLVCAFAGYEPVMSAYRHAVEKGYRFFSYGDAMFLTRA

SEQ ID NO: 73269 - protein, 345 aa, unidentified
  source 1..345: note = Thiomicrorhabdus sp.
  REGION 1..345: note = tr|A0A4P9K5Q8|A0A4P9K5Q8_9GAMM S-adenosylmethionine:tRNA ribosyltransferase-isomerase; OS = Thiomicrorhabdus sp. G1 OX=2580412 GN=queA PE=3 SV=1
MKRQDFYFDLPEHLIAQQPAAQRRDSRLLVMAQQGIIDANFPDLLDFLEPNDLLVFNNTRVIPARLFGHKASGGKVELLIERVIDSKTILTHIRSSRSPKPGTILSIENAFDVEVIGRQDALFIVKVVDNNCSALELIESHGHMPLPPYIERQQDQETDKERYQTVYGEKPGAVAAPTAGLHFDEQIMQDIKAKGVDIGFVTLHVGAGTFKPVQVDDISEHVMHSEYLEVSPELVAQVKAARAKGGRVIAVGTTSVRCLESAASFSDDGHVAPYQGETDIFITPGYQFKEVDVLLTNFHLPESTLIMLVSALAGYERTMSAYKHAVEQEYRFFSYGDAMLVFPPK

SEQ ID NO: 73270 - protein, 345 aa, unidentified
  source 1..345: note = Thiomicrospira aerophila
  REGION 1..345: note = tr|W0DRH3|W0DRH3_9GAMM S-adenosylmethionine:tRNA ribosyltransferase-isomerase OS=Thiomicrospira aerophila AL3 OX=717772 GN=queA PE=3 SV=1
MKRQDFYFELPEELIAQQPTSQRRASRLLVVQGTGLQDKQFVDILDFIEPHDLLVFNNTKVIPARLFGQKATGGQIELLIERIINDSQALCHIRSSKSPKPGAKLWIENAFEVEVLGREGALFSVAFDPAKTPLEWVEAHGHMPLPPYIERADTDNDKNRYQTVYATRPGAVAAPTAGLHFDEAMLAAIKAKGADIGFVTLHVGAGTFKPVQVDDISQHTMHSEWLEVEAGLVEQVKAARAKGGRIIAVGTTSVRCLESASKDGQLRPYTGDTDIFISPGYQFQQVDVLLTNFHLPESTLIMLVSALAGYQETMAAYRHAVEQRYRFFSYGDAMLVFNKALSREE

SEQ ID NO: 73271 - protein, 343 aa, unidentified
  source 1..343: note = Thiomicrospira cyclica
  REGION 1..343: note = tr|F6DD21|F6DD21_THICA S-adenosylmethionine:tRNA ribosyltransferase-isomerase OS=Thiomicrospira cyclica (strain DSM 14477 / JCM 11371 / ALM1) OX=717773 GN=queA; PE = 3SV=1
MKRQDFYFDLPEALIAQQPTSERRASRLLVLQGTALHDKQFVDILDFIQPNDLLVFNNTKVIPARLFGKKMTGGQVELLIERIISDHQALCHIRSSKSPKPGTKLVIEDAFEVEVTGRQGALFLVTFDPTKTPLEWVEAYGHMPLPPYIERADTDADKNRYQTVYASRPGAVAAPTAGLHFDEDILAAIKAKGTDIGFVTLHVGAGTFKPVQVDDINQHTMHSEWLEVQPGLVEQVKAARAKGGRVIAVGTTSVRCLESASQHGELRPYTGDTDIFITPGYQFQQVDVLLTNFHLPESTLIMLVSALAGYDNTMNAYRHAVEQRYRFFSYGDAMLVFNQASLS

SEQ ID NO: 73272 - protein, 349 aa, Thiomicrospira sp.
  REGION 1..349: note = tr|A0A0X3T8M5|A0A0X3T8M5_9GAMM S-adenosylmethionine:tRNA ribosyltransferase-isomerase; OS = Thiomicrospira sp. WB1 OX=1685380 GN=queA PE=3 SV=1
MRRQDFYFDLPQALIAQHPVAERSASRLLVMQGKTLSDASFVDVLDYMTPDDCLIFNNTRVIPARLHGQKATGGQVEVLVERILSDTDVWAHIRASRAPKAGSRLTLEGRIPVTVTGREGALFKLVFAPEETDHATALEVIEAFGHMPLPPYIEREDDQADQERYQTVYASEPGAVAAPTAGLHFDEPLMAKLNDRGVATGFVTLHVGAGTFKPVQVDNIAEHTMHSEVIDVPDETVALIRRTREKGGRVIAVGTTCIRALESAAAASDDGELSAFQGETDIFITPGYHFRVIDGLITNFHLPESTLIMLVSALGGYDNTMRAYRHAVNSEYRFFSYGDAMLVLPDRRP

SEQ ID NO: 73273 - protein, 354 aa, Thiomicrospira sp.
  REGION 1..354: note = tr|A0A0X3TK47|A0A0X3TK47_9GAMM S-adenosylmethionine:tRNA ribosyltransferase-isomerase; OS = Thiomicrospira sp. XS5 OX=1775636 GN=queA PE=3 SV=1
MRRQDFYFDLPEELIAQQPTEERTQSRLLVMETDGGVSDKHFPGLLSYLNENDCLIFNDTKVIPARLFGQKSTGGQVELLIERVLDNERVLSHVRSSRAPKAGAVLHIADAFEAEVLGREGALFELKLSQKESDLSALELIEAHGHMPLPPYIEREDELEDKERYQTVYSAKPGAVAAPTAGLHFDEALLERIRDKGVSTGFVTLHVGAGTFKPVQVDDIAEHVMHSEVIEVLPETVALIEETKRKGGRVIAVGTTSVRCLESAARFSGDGPLQPYQGETDIFITPGYEFQVVDVLLTNFHLPESTLIMLVSALAGYERTMQAYAHAVAQGYRFFSYGDAMLVHPAQKTAAKPE

SEQ ID NO: 73274 - protein, 391 aa, Thiomonas arsenitoxydans
  REGION 1..391: note = tr|D6CR09|D6CR09_THIA3 S-adenosylmethionine:tRNA ribosyltransferase-isomerase OS=Thiomonas arsenitoxydans (strain DSM 22701 / CIP 110005 / 3As) OX=426114 GN=queA; PE = 3 SV=1
MSPGLTADDFDFHLPPELIAQHPPARRSDSRLLDAGNPPALIDRGFRDLPGLLRAGDLVVFNDTRVIPARLWGFKAAGEAGAALGGAVEVLVERVRADNRVWAHVRASKSPKPGQVLWLGAARPDAAAGDEPHASAPLFAVTTVGRAGPDGGLFELEFPAEPLALLQQYGAVPLPPYITHAPGGDDVQRYQTVYAQHPGSVAAPTAGLHFDEAILAKIDAMGAQRAAVTLHVGAGTFQPVRVNDLRQHQMHSEWYTVPEATAQAIAKVRMRQAQARAAGQMHAAPRVVAVGTTAMRALESAALAAEAAGAPDGAVLPGARDTALFVTPGYRFRVVDALLTNFHLPKSTLLMLVSAFAGMDTIRAAYAHAIAQRYRFFSYGDAMWLTRQDLR

SEQ ID NO: 73275 - protein, 419 aa, Thiomonas bhubaneswarensis
  REGION 1..419: note = tr|A0A0K6HXI5|A0A0K6HXI5_9BURK S-adenosylmethionine:tRNA ribosyltransferase-isomerase; OS = Thiomonas bhubaneswarensis OX=339866 GN=queA PE=3 SV=1
MTSPHSNLPSASVDAPALTADDFDFHLPPELIAQHPAARRSASRLLDASEPQVLHDRVFTDLPGLLRAGDLVVFNDTRVIPARLWGYKAANEGSGARGNHASALGGAVEVLVERVLGEHQVWAHVRASKPPKAGQVLWLGASRPDGAGPTAASPPPGADALFAVQTLGRAGPGDSLFLLQFPSEPLALLQRHGAVPLPPYITHAPGSEDAERYQTVYARHPGSVAAPTAGLHFDDDILARIDALGAQRASVTLHVGAGTFQPVRVADLRQHQMHSEWYTVPEATARAIAAVRQQQVQARAEGRLDAAPRVVAVGTTAMRALESAALAAEAAGQPFGSVLPGARDTALFITPGYRFRVVDALLTNFHLPKSTLLMLVSAFAGMETVRATYAHAIAQKYRFFSYGDAMWLARQERADVNLR

SEQ ID NO: 73276 - protein, 364 aa, Thiomonas delicata
  REGION 1..364: note = tr|A0A238D0P6|A0A238D0P6_THIDL S-adenosylmethionine:tRNA ribosyltransferase-isomerase; OS = Thiomonas delicata OX=364030 GN=queA PE=3 SV=1
MTFDHTMSDTLSGGGLRLADFDFHLPPELIAQHPAAERSASRLLDARSQPPTDRVFRDLPELLQSGDLLVFNDTQVIKARLFGAKPTGGAVELLVERVLDGNEVLAHLRASKKPAPGTVLDMQGGFHAEVLGRWPDAGGALFRLRLSGDPYALMQAHGHVPLPPYIHHADDADDARRYQTVFARVPGSVAAPTAALHFDEALLAALDARGVTRAHVTLHVGAGTFQPVKVADIARHRMHSERFEVPGETLAAIDRARARGGRVIAVGTTTVRTLETVAQRLDSGAQMGRDWPTLRGETDIFITPGHRFALVDLLITNFHLPRSTLLMLVSAFAGTETIRTAYAHAIAERYRFFSYGDAMLLARM

SEQ ID NO: 73277 - protein, 406 aa, Thiomonas intermedia
  REGION 1..406: note = tr|D5X3U3|D5X3U3_THIK1 S-adenosylmethionine:tRNA ribosyltransferase-isomerase OS=Thiomonas intermedia (strain K12) OX=75379 GN=queA PE=3 SV=1
MTVSLSRGSAVESGAMSPGLTADDFDFHLPPELIAQHPPARRSDSRLLDAGSPPTLIDRGFRDLPGLLRADDLVVFNDTRVIPARLWGFKAAGEAGAALGGAVEVLVERVRADNRVWAHVRASKSPKPGQVLWLGAARPDAAAGDEPHGSAPLFAVTTVGRAGPDGGLFELEFPAEPLALLQQYGAVPLPPYITHAPGSDDVQRYQTVYAQHPGSVAAPTAGLHFDEAILEAIDAIGAQRAAVTLHVGAGTFQPVRVNDLRQHQMHSEWYTVPEATSQAIAKVRMRQAQARAAGQLHAAPRVVAVGTTAMRALESAALAAEAAGAPDGTVIPGARDTALFVTPGYRFRVVDALLTNFHLPKSTLLMLVSAFAGMDTIRAAYAHAIAQRYRFFSYGDAMWLTRQDLR

SEQ ID NO: 73278 - protein, 358 aa, Thiomonas sp.
  REGION 1..358: note = tr|A0A259P9B0|A0A259P9B0_9BURK S-adenosylmethionine:tRNA ribosyltransferase-isomerase; OS = Thiomonas sp. 15-66-11 OX=1970452 GN=queA PE=3 SV=1
MSDTPSGGGLRLADFDFHLPSELIAQHPAAERSASRLLDARSQPPTDRVFRDLPELLQPGDLLVFNDTQVIKARLFGAKPTGGAVELLVERVLDGNEVLAHLRASKKPAPGTVLDMQGGFHAEVLGRWPDAGGALFRLRLSGDPYALMQAHGHVPLPPYIHHADDADDARRYQTVFARVPGSVAAPTAALHFDEALLAALDARGVTRAHVTLHVGAGTFQPVKVADIARHRMHSERFEVPGETLAAIDRARARGGRVIAVGTTTVRTLETVAQRLDSGAQMGRDWPTLRGETDIFITPGHRFALVDLLITNFHLPRSTLLMLVSAFAGTETIRTAYAHAIAERYRFFSYGDAMLLTRA

SEQ ID NO: 73279 - protein, 406 aa, Thiomonas sp.
  REGION 1..406: note = tr|A0A078BEM2|A0A078BEM2_9BURK S-adenosylmethionine:tRNA ribosyltransferase-isomerase; OS = Thiomonas sp. CB2 OX=554131 GN=queA PE=3 SV=1
MTVSLSRGSAVESGAMSPGLTADDFDFHLPPELIAQHPPPRRSDSRLLDAGSPPALIDRGFRDLPGLLRAGDLVVFNDTRVIPARLWGFKAAREAGAALGGAVEVLVERVRADNRVWAHVRASKSPKPGQVLSLGAARPDAAAGDEPHASAPLFAVTTVGRAGPDGGLFELEFPAEPLALLQQYGAVPLPPYITHAPGSDDVRRYQTVYAQHPGSVAAPTAGLHFDEAILAKIDAMGAQRAAVTLHVGAGTFQPVRVNDLRQHQMHSEWYTVPEATAQAIAKVRMRQAQARAAGQMHAAPRVVAVGTTAMRALESAALAAEAAGAPDGAVLPGARDTALFVTPGYRFRVVDALLTNFHLPKSTLLMLVSAFAGMETIRAAYAHAIAQRYRFFSYGDAMWLTRQDLR

SEQ ID NO: 73280 - protein, 344 aa, Thioploca ingrica
  REGION 1..344: note = tr|A0A090AG69|A0A090AG69_9GAMM S-adenosylmethionine:tRNA ribosyltransferase-isomerase; OS = Thioploca ingrica OX=40754 GN=queA PE=3 SV=1
MQRTDFYFYLPPHLIAQQPNRSRTSSRLLWANSILEPFQDLRFTDLPHLLMPGDLLVFNDTRVIPARLLGRKQSGGKIEILVERILDNNQILAQIRASQPPKPGMWLYLEGGIAIQVLQRIEHFFQLQFDDPRSVDEILHTIGQIPLPPYIRRTPTEVDSIRYQTVYARQPGAVAAPTAGLHFDEGILEQLQTKGIAMAFITLHVGAGTFAPIRVDNIHQHTMHTEYMQVSPQVCEQIQTTRARGGRVIAVGTTCVRALETASAGGNIKPYAGETRLFITPGYRFQSVDALLTNFHLPESTLLMLVCAFAGQDLVLAAYRHAVEQEYRFFSYGDAMLVSHNPNE

SEQ ID NO: 73281 - protein, 347 aa, unidentified
  source 1..347: note = Thiopseudomonas denitrificans
  REGION 1..347: note = tr|A0A4R6TX37|A0A4R6TX37_9GAMM S-adenosylmethionine:tRNA ribosyltransferase-isomerase; OS = Thiopseudomonas denitrificans OX=1501432 GN=queA PE=3; SV = 1
MRVADFQFDLPDELIARYPLAERSASRLLVLDGADGSLQHEHFATLPDYLRAGDLLVFNNTRVIPARLFAQKESGGKAEVLVERVLDEHRVLAHVRASKAPKPGSRLLLERGSALMLARHDALFELEFDQPVLPLLEQIGHMPLPPYIDRADELSDRERYQTVYAEHAGAVAAPTAGLHFDRSMLEQLAGMGVDTAFVTLHVGAGTFQPVRVEQLEDHQMHREWLEVSQAVVDAVQRCRARGGRVVAVGTTSVRSLETAAKSGELKPYSGDTNIFIYPGCRFNVVDALVTNFHLPESTLLMLVSAFAGYSATMHAYQQAVAGQYRFFSYGDAMFITRNPQPDVPGES

SEQ ID NO: 73282 - protein, 313 aa, unidentified
  source 1..313: note = Thiorhodococcus drewsii
  REGION 1..313: note = tr|G2DZZ6|G2DZZ6_9GAMM S-adenosylmethionine:tRNA ribosyltransferase-isomerase OS=Thiorhodococcus drewsii AZ1 OX=765913 GN=queA PE=3 SV=1
MLPCDRLFRDLPQLLRPNDLLVFNNTRVMRARLFGHKESGGRVEVLIERLIAPDEALAHVRASKSPREGSRIRLAEGACLQVLGREGALFRLRACDLGYAELMDAYGHLPLPPYIQRPDDTTDDARYQTLFARHEGAVAAPTAGLHFDEAMLARLADMGIERAEVTLHVGAGTFQPVRTDDLDQHQMHAEWLEVSEAVCAQVERTRSRGGRVIAVGTTCVRSLETAAAGGSLVPFRGESRLFIRPGYRFRVVDAMVTNFHLPESTLLMLVAAFSGYASIMNAYRHAIAEGYRFFSYGDAMFLTRAEVEGDLSG

SEQ ID NO: 73283 - protein, 342 aa, Thiorhodospira sibirica
  REGION 1..342: note = tr|G4E423|G4E423_9GAMM S-adenosylmethionine:tRNA ribosyltransferase-isomerase OS=Thiorhodospira sibirica ATCC 700588 OX=765914 GN=queA PE=3 SV=1
MQLTDFSYDLPPELIAQFPLKTRTASRLLCLDGASGALSDRTFTDLPQLLRKHDLLVFNNTRVIPARLHGHKLDSRGQVEVLIERITGLHDALAHVKASKAPRKGQRLWLEDAIEAVVKGREGDLFQLNFVDSKPLLELLESHGHVPLPPYIKRADEAADQRRYQTVYADIPGAVAAPTAGLHFDEGILETLKQQGVAQGFLTLHVGAGTFQPVRTAQIEEHIMHPEWVEVSADLLAQIEHCKAQGGRVIAVGTTVVRALEAASQHGTLQPLSGDTRLFITPGFEFHVVDAMLTNFHLPESTLLMLVCAFGGYTNVMHAYRHAVTQGYRFYSYGDCMLLTPA

SEQ ID NO: 73284 - protein, 378 aa, Thiorhodovibrio sp.
  REGION 1..378: note = tr|H8YXY8|H8YXY8_9GAMM S-adenosylmethionine:tRNA ribosyltransferase-isomerase OS=Thiorhodovibrio sp. 970; OX = 631362 GN=queA PE=3 SV=1
MSSPLAIEPDAEFGEQPVVAGPWDRPATESETRQRPLQRSDFHFDLPPELIAQRPLPERGASRLLALDGQTGALRDLHFGDLPSLLRAGDLLVFNNTRVIPARLYGQKETGGKVEVLIERLTGVRDAIAQVRASKPPRPGTRIRLADGQTLIVSARQDSFYQLQAEQEDLTTLLARHGHVPLPPYIERADDTSDLERYQTVYASRAGAVAAPTAGLHFDDGMLKQLEAMGVDFAELTLHVGAGTFQPVRVDNLDEHQMHAEWLEVSSEVVDAITRTKAKGGRVVAVGTTSVRSLETAAADGQLKPFCGDSRLFIRPGYRFRVIDAMVTNFHLPESTLLMLVSAFAGYRNILAAYRHAVAERYRFFSYGDAMFLTPTER

SEQ ID NO: 73285 - protein, 344 aa, Thiothrix caldifontis
  REGION 1..344: note = tr|A0A1H4GM83|A0A1H4GM83_9GAMM S-adenosylmethionine:tRNA ribosyltransferase-isomerase; OS = Thiothrix caldifontis OX=525918 GN=queA PE=3 SV=1
MKLSAFHYDLPPALIASEPLAERTASRLLILNGASGECRDGQFTDVLDLIQPEDLLVFNNTRVIPARLHGEKTTGGKVEVLVERITGEHTALAHIRASKAPKPSTRLRLEQAIDAQVTGRQDDLFEVQFLHTDSALNLLEQYGHIPLPPYIERADTPADRERYQTVFAQRPGAVAAPTAGLHFDQPLLEALRQKGVQTAAVTLHVGAGTFQPVRVQDLSQHVMHAEYADVSQEVCDAVAACRERGGRVVAVGTTSVRSLESAARDGTLKPFQGDTRLFITPGYEFRVVDLMITNFHLPESTLLMLVSAFAGYENIMQAYQHAVHQEYRFFSYGDAMFITYKQNK

SEQ ID NO: 73286 - protein, 355 aa, Thiothrix eikelboomii
  REGION 1..355: note = tr|A0A1T4XQQ4|A0A1T4XQQ4_9GAMM S-adenosylmethionine:tRNA ribosyltransferase-isomerase; OS = Thiothrix eikelboomii OX=92487 GN=queA PE=3 SV=1
MQCYHTDMKLSDFDYQLPPELIAYQPLAERTESRLLVLDPCSPQPKDQYFYQLTQFLQAGDLLVFNNTKVIPARLYGKKASGGKLEVLIERIQTPQRALAHIRASKSPKAGTVLELEGAFQAIILEREGELFQLQLTEPANFFELLDQYGHIPLPPYIERPDLATDRERYQTVYAEKLGAVAAPTAGLHFDHRLLTQLAEQGIASTTVTLHVGAGTFQPIRTEDLSQHKMHAEYVEVSAATCEAIRACKARGGRVVAVGTTSVRSLETAAQAGSLQPYTGDTRLFIKLGYEFKVVDVLITNFHLPQSSLLILVSAFAGYESIKAAYQHAIKQAYRFFSYGDAMLLFRRENNRSAV

SEQ ID NO: 73287 - protein, 344 aa, Thiothrix lacustris
  REGION 1..344: note = tr|A0A1Y1QGZ4|A0A1Y1QGZ4_9GAMM S-adenosylmethionine:tRNA ribosyltransferase-isomerase; OS = Thiothrix lacustris OX=525917 GN=queA PE=3 SV=1
MQLSDFYYDLPPELIASEPLSERTASRLLQVGADGACRDGKFTDVLELIQPNDLLVFNNTRVIPARLHGQKASGGKVEVLIERVLDAHTALAHVRASKSPKPGTRLRLESAVDAEVVGRQGELFELRFLHETTVLDLLDQYGHVPLPPYIERQDTAADRERYQTVFAQTPGAVAAPTAGLHFDEALLAALRAKGVATAAVTLHVGAGTFQPVRVQDLSQHIMHAEYADVSLETCEAVAACKARGGRVVAVGTTSVRSLESAAQQGTLQPFQADTRLFITPGYRFKVVDAMITNFHLPESTLLMLVSAFSGYDAIMKAYQHAVCRGYRFFSYGDAMFLVPSCNNC

SEQ ID NO: 73288 - protein, 344 aa, Thiothrix lacustris
  REGION 1..344: note = tr|A0A1Y1QXA8|A0A1Y1QXA8_9GAMM S-adenosylmethionine:tRNA ribosyltransferase-isomerase; OS = Thiothrix lacustris OX=525917 GN=queA PE=3 SV=1
MKLSDFHYDLPPALIASEPLAERTASRLLILNGDSGECRDGQFTDVLDLIQPEDLLVFNNTRVIPARLHGEKATGGKVEVLVERVTGEHTALAHIRASKAPKPGTRLRLEQAIDAQVTGRQDDLFAVEFLHADSALRLLEQYGHIPLPPYIERADTPADRERYQTVFAQHLGAVAAPTAGLHFDQPLLAALRQKGVQTAAVTLHVGAGTFQPVRAQDLSQHVMHAEYADVSQDVCDAVAACRARGGRVVAVGTTSVRSLESAARDGTLKPFQGDTRLFITPGYQFRAVDVMITNFHLPESTLLMLVSAFAGYENIKHAYQHAVHREYRFFSYGDAMFITYKQNK

SEQ ID NO: 73289 - protein, 348 aa, Thiothrix sp.
  REGION 1..348: note = tr|A0A5C7R8M6|A0A5C7R8M6_9GAMM S-adenosylmethionine:tRNA ribosyltransferase-isomerase; OS = Thiothrix sp. OX=1032 GN=queA PE=3 SV=1
MKLSDFNYQLPPELIAYQPLTERSSSRLLVVDEANHTFQDQYFYELSQFLTAGDLLVFNNTKVIPARLYGQKASGGKVEVLIERVQNPQQALAHIRASKAPKAGTILELAGAFPAKLLGREGDLFQLEVSGEQTWFELLDQYGHIPLPPYIERPDLASDRERYQTVYAQKLGAVAAPTAGLHFDQNLLNQLAAQGIETTSVTLHVGAGTFQPVRTEDLSKHIMHAEYVEVSAEACAAIRACKARGGRVIAVGTTSVRSLETAAQTGELQPYMGDTRLFIQLGYEFKVVDLLITNFHLPQSTLLILVSAFAGYATIQQAYQHAIKQGYRFFSYGDAMLLTRQKNSRLAL

SEQ ID NO: 73290 - protein, 64 aa, Thiothrix sp.
  REGION 1..64: note = tr|A0A432UUS0|A0A432UUS0_9GAMM S-adenosylmethionine:tRNA ribosyltransferase-isomerase (Fragment) OS=Thiothrix sp. OX=1032 GN=DSZ28_07350 PE=3; SV = 1
MLTKDFSYDLPANLIAQRPLQQRSASRMLVLDGQGGWQDQKFQDFRQHLSAGDLLVVNNTRVMA

SEQ ID NO: 73291 - protein, 342 aa, unidentified
  source 1..342: note = Thiotrichaceae bacterium
  REGION 1..342: note = tr|A0A2A5G5X1|A0A2A5G5X1_9GAMM S-adenosylmethionine:tRNA ribosyltransferase-isomerase; OS = Thiotrichaceae bacterium OX=2030882 GN=queA PE=3 SV=1
MKTSEFQYHLPERLIAQKPCEVRSQSRLLHYSRFTKNINHLRFSEIVDLIEPGDLLVFNNTRVIPARMYGHKETGGKVEVLVERLTGSQTCLAHIRASKTPKAGGIIVLANNENSYTVTVDGREGDLYTLSANTQHTMAEIIEEIGHMPLPPYIERSDTVEDVTRYQTIYADKPGAVAAPTAGLHFDDALIKKLTDKGINTAYVTLHIGAGTFQPVRSDHIEDHEMHFEYLEVGQATVYKCQQTRHNGGRIIAVGTTTVRSLETASQNGSLEAYAGETDIFIYPGYEFKSIDALITNFHLPESTLLMLISAFAGKDEMMSCYAQAIAEEYRFFSYGDAMFIS

SEQ ID NO: 73292 - protein, 349 aa, unidentified
  source 1..349: note = Thiotrichaceae bacterium
  REGION 1..349: note = tr|A0A2A4WER1|A0A2A4WER1_9GAMM S-adenosylmethionine:tRNA ribosyltransferase-isomerase; OS = Thiotrichaceae bacterium OX=2030882 GN=queA PE=3 SV=1
MQLSDFNFDLPIDLIAQQPLAERTQSRLLCLNGVTGDYQDQQFAQLPSLLNENDLLVLNNTRVIPARLLGKKASGGGIEVMLERVLSDSDMLVQIRASKAPKVGGQLFLGDEAVDATVISRENGFYQLRLNDARSAIDVLQAIGHVPLPPYIERPDDELDQQRYQTVFAEHPGAVAAPTAGLHFDQAILNEISAKGVRQVTVTLHVGAGTFQPVRVDDVAMHEMHYEYVEVSQATCDAIAETRRRGGRVIAVGTTVVRSLETAVQNGVVAPYSGETNIFIYPGYRFSVIDRLITNFHMPESTLLMLVSAFCGRDHMMAAYQHAIEQRYRFYSYGDAMFIAPSIAAKFEE

SEQ ID NO: 73293 - protein, 348 aa, unidentified
  source 1..348: note = Thiotrichales bacterium
  REGION 1..348: note = tr|A0A259DWS3|A0A259DWS3_9GAMM S-adenosylmethionine:tRNA ribosyltransferase-isomerase; OS = Thiotrichales bacterium 17-46-47 OX=1970602 GN=queA; PE = 3 SV=1
MSGKLVSDYDYHLPESLIAQYPLADRAASRLLGVGCDGSLTDGVFSDVLHALKANDLLVLNNTRVIPARLYGHKASGGRFEMLIERLLPEQQALVHLRVSKKPAMHSILELEGGVQARFLGREGELFKVEWLTDEPVLEMLDRIGHLPLPPYIARPDGEADAERYQTVFAQEAGAVAAPTAGLHFTDELLKAIQAKGVETATLTLHVGAGTFQPVRVERVEDHHMHFERINVSQALVDKIAQTRANGGRVIAVGTTVVRALESAARSGELIAYSGETDIFITPGFEFRVVDALITNFHLPQSTLLMLVSAFAGYQRIMSAYAHAVQQQYRFFSYGDAMLLSRCTQENA

SEQ ID NO: 73294 - protein, 348 aa, unidentified
  source 1..348: note = Thiotrichales bacterium
  REGION 1..348: note = tr|A0A259KB35|A0A259KB35_9GAMM S-adenosylmethionine:tRNA ribosyltransferase-isomerase; OS = Thiotrichales bacterium 34-46-19 OX=1970605 GN=queA; PE = 3 SV=1
MSGKLVSDYDYHLPESLIAQYPLADRAASRLLGVGCDGSLTDGVFSDVLHALKANDLLVLNNTRVIPARLYGQKASGGRFEMLIERLLPEQQALVHLRVSKKPAMHSILELEGGVQARFLGREGELFKVEWLTDEPVLEMLDRIGHLPLPPYIARPDGEADAERYQTVFAQEAGAVAAPTAGLHFTDELLKAIQAKGVETATLTLHVGAGTFQPVRVERVEDHHMHFERINVSQALVDKIAQTRANGGRVIAVGTTVVRALESAARSGELIAYSGETDIFITPGFEFRVVDALITNFHLPQSTLLMLVSAFAGYQRIMSAYAHAVQQQYRFFSYGDAMLLSRCTQENA

SEQ ID NO: 73295 - protein, 342 aa, unidentified
  source 1..342: note = Bathymodiolus puteoserpentis
  REGION 1..342: note = tr|A0A483AMR0|A0A483AMR0_9BACT S-adenosylmethionine:tRNA ribosyltransferase-isomerase; OS = thiotrophic endosymbiont of Bathymodiolus puteoserpentis (Logatchev) OX=3432 40 GN=queA PE=3 SV=1
MQLSDFDFDLPKSLIAQHPSKNRTDSRLLIGQSNLIDAQFHQIGDFVQSGDLLVMNNTKVIPARLFGHKDSGGKVEIMIERLLNDKQVLAMIRASRAPQIGSKITLENSEKATVLNKQDGFYTLEFATDSLLALLDNVGHIPLPPYIERTDDEQDLSRYQTVYAKHDGAVAAPTAGLHFDDALLNALKDKGINSAFVTLHVGAGTFQPVKTDNIKDHTMHSEYYEISQDTVDKIHQTKKSGGRVIAIGTTAVRSLESAAKSGTLKATREETDIFIYPGYEFKVVDMMVTNFHLPKSSLLMLVSAFIGRDRMMEMYQYAIEQKYRFFSYGDAMLLTGKNSNGR

SEQ ID NO: 73296 - protein, 339 aa, Thiovulum sp.
  REGION 1..339: note = tr|J1F8B7|J1F8B7_9HELI S-adenosylmethionine:tRNA ribosyltransferase-isomerase OS=Thiovulum sp. ES; OX = 1177931 GN=queA PE=3 SV=1
MNKDFLLSSYDYPFDDSLIAKTPVYPRENARLLIYFKESGEIKHTTFSDLIEHIPKDYSVILNNTKVVRARVFGKKESGGKVEILLNRHMKKNLYSVFIRGKVRVGSEIFVDSLTAKVEELISDGSRIVSFWQNSDEVEFSKLLEVFERVGEMPLPPYINRKATEKDEKDYQPIFAKNLGAVASPTASLHFSENMLKELKGRNRVEYLTLHVGAGTFKPVEVSDIREHKLHKEVFEISESAKEVLNSKSKILAVGTTVTRTIEYFAKTGETFGDADIFLHPNNRPQRVDALLTNFHLPKSTLLMLVSSFIGIDEMQKIYAEAVKEKYRFYSYGDGMLII

SEQ ID NO: 73297 - protein, 380 aa, Thorsellia anophelis
  REGION 1..380: note = tr|A0A1I0BZV3|A0A1I0BZV3_9GAMM S-adenosylmethionine:tRNA ribosyltransferase-isomerase; OS = Thorsellia anophelis DSM 18579 OX=1123402 GN=queA PE=3; SV = 1
MNLSNFSFDLPTELIAKYPSKQRTDCRLLELDGNTGEVNDKTFIDVLQLLCTNDLLIFNNTKVIPARLFGYKQSGGKIEILIERIVDAHTALAHIRSSKSPKNGTKLLVCEQNDSTLEALSTEQNTSIFELQMTSRHDTLFEIQSLSIPIIDILNKIGHMPLPPYIDRADDKEDKDRYQTVYARDEGAVAAPTAGLHFDESLIEQIRNKGIETAFVTLHVGAGTFQPVRVTDIKTHTMHSEFAIVPQETIDAIKLCKQRGGRVIAVGTTSIRSLESAANAVIFPEFQSMALSDAPKVNFDFEKLTAFMGDTNIFIYPGYQFKIVDSLITNFHLPESTLIMLVSAFAGYENTMNAYKHAVDEQYKFFSYGDAMFIHKRNDF

SEQ ID NO: 73298 - protein, 368 aa, unidentified
  source 1..368: note = Tibeticola sediminis
  REGION 1..368: note = tr|A0A3N4UEA8|A0A3N4UEA8_9BURK S-adenosylmethionine:tRNA ribosyltransferase-isomerase; OS = Tibeticola sediminis OX=1917811 GN=queA PE=3 SV=1
MTVISASGASPRRYTLSDFDFALPEALIAQHPAPERSASRLLDGTRPTPVDRIFRDLSSLLAPGDLLVFNDTQVVKARLFGEKASGGKLELLIERVLGGHEVVAHMKVSKKPPLGAVLHMAGGIEGGGFTATLLGRWPDAEGALFHLRFSDDPWTLMQRHGHVPLPPYITHADSAEDERRYQTVFARTPGAVAAPTAALHFDEPLLAALEARSVARAAVTLHVGAGTFQPVKTEDLAQHRMHAEWYDVPEATQAAIAACRARGGRVVAVGTTTVRTLESWAASGQARGDTTIFITPGFRFRVVDRLITNFHLPKSTLMMLVSAFAGYEHIRALYRHAIAERYRFFSYGDAMLLERARPPEPAAAHADV

SEQ ID NO: 73299 - protein, 343 aa, Tindallia californiensis
  REGION 1..343: note = tr|A0A1H3NE42|A0A1H3NE42_9CLOT S-adenosylmethionine:tRNA ribosyltransferase-isomerase; OS = Tindallia californiensis OX=159292 GN=queA PE=3 SV=1
MKTSDFYYKLPEELIAQKPLEIRDQSRLMIVNKSEQSIQHKKFCDVVSKLNPGDGLVINTSRVIPARLTGRKRFTNGKTELLLLKQEVPNTWEVMVKPAKRIRKDTQIIFGKNELKATVLEERNDGLRLVKFQSESDQSVDLLIHKLGEMPLPPYIHEKLEDKERYQTVYSEAPGSAAAPTAGLHFTEEILSTIKRKGIHIIPITLHVGLGTFRPVQSDNLDEHKMHEEFFEISQESAATMNKIKEKGGRIVAVGTTSCRALESSVGLDGQIIAAKKWTNIFIKPGYEFRFIDILVTNFHLPESTLLMLVSALAGKEFMLRAYEEAVNEKYRFFSFGDAMWIE

SEQ ID NO: 73300 - protein, 343 aa, Tindallia magadiensis
  REGION 1..343: note = tr|A0A1I3AAB5|A0A1I3AAB5_9CLOT S-adenosylmethionine:tRNA ribosyltransferase-isomerase; OS = Tindallia magadiensis OX=69895 GN=queA PE=3 SV=1
MKTSDFYYKLPEDLIAQKPLEKRDESRLMIVNKSEHSIQHKKFCDVVSKLKPGDGLVVNTSRVIPARLTGRKRFTNGKTELLLLKQEFFNTWEVMAKPAKRIRKDTQIIFGNNELKATVLEERNEGLRLVKFQSESDQTVDLLIHKLGEMPLPPYIHEKLEDKERYQTVYSETPGSAAAPTAGLHFTEEILSTIKRKGIHIIPITLHVGLGTFRPVQSDNLDEHKMHEEFFEISQESAATMNKIKEKGGRIVAVGTTSCRALESSVGLDGQIIAAKKWTNIFIKPGYKFRFIDILVTNFHLPESTLLMLVSALAGKDFMLRAYEEAVNEKYRFFSFGDAMWIE

SEQ ID NO: 73301 - protein, 341 aa, Tindallia sp.
  REGION 1..341: note = tr|A0A424Y6D1|A0A424Y6D1_9CLOT S-adenosylmethionine:tRNA ribosyltransferase-isomerase; OS = Tindallia sp. MSAO_Bac2 OX=2293856 GN=queA PE=3 SV=1
MKTSDFLYQLPEELIAQKPLEQRDRSRLMALNRENNTIDHLMFTDIISKLNAGDALIINTSRVIPARLKGRKRYTNGKTEFLLLKEEDENLWEVMAKPAKRVRKGTQIIFGNHQLIATVLEERDEGLRLVKLESDEPLDKAIHQLGEMPLPPYIHEKLEDQERYQTVYSQSPGSAAAPTAGLHFTEELMANIKEKGISIIPITLHVGMGTFRPVQAENLDEHEMHEEFFEISQESASKMNEIKKNKGRIVAVGTTSCRAIESAADEKGEIKATKKWTDIFIKPGYQFRFMDALITNFHLPESTLLMLVSAFAGRTFMLNAYEEAVKEKYRFFSFGDAMLIE

SEQ ID NO: 73302 - protein, 340 aa, Tissierella creatinini
  REGION 1..340: note = tr|A0A4T9WIG7|A0A4T9WIG7_9FIRM S-adenosylmethionine:tRNA ribosyltransferase-isomerase; OS = Tissierella creatinini OX=43143 GN=queA PE=3 SV=1
MKTKDFYFDLPQELIAQHPIENRTDSRLMVLDKRTGEIEHRHFRDILDYLNNGDTLVLNDTRVIPARLFGNRPGKEEKIEILLLKHQGDTWETLVKPGKKCKVGNTIEFGGGLLKAHILSIGEDGTRIIRFIYNGIFEEILDKLGEMPLPPYITERLDDRERYQTVYSKNPGSAAAPTAGLHFTKDLLKKIENKGVNIAYLTLHVGLGTFRPVKVEDVLDHHMHSEYYELSKESAEIINRTKKNGNRVISVGTTSTRTLETIGDEKGMVRESSGWTDIFIYPGYNFKVVDCIITNFHLPESTLLMLVSALSSREKILNAYEIAVMGKYRFFSFGDAMFIK

SEQ ID NO: 73303 - protein, 341 aa, Tissierella creatinophila
  REGION 1..341: note = tr|A0A1U7M2X8|A0A1U7M2X8_TISCR S-adenosylmethionine:tRNA ribosyltransferase-isomerase; OS = Tissierella creatinophila DSM 6911 OX=1123403 GN=queA; PE = 3 SV=1
METKDFFYNLPEELIAQVPLKDRTTSRLLVLDKESGEVEHKKFKDVIDYLNEGDTLILNNTRVLPARLFGNRQNKEERIEFLLLKRNEEDIWQSLVKPGKKAKIGSIVEFGNGLLKGEVIGIDEEGIRQVKFHYDGIFEEVLDSLGEMPLPPYIKEKLSDKERYQTVYSKHLGSAAAPTAGLHFTNELLEKISKKGINIGFITLHVGLGTFRPVKVDDILKHHMHSEFFTLSKETAELINKTKQNGKKIIAVGTTSVRTLETLGNENGLIEAGSGWTDIFIYPGYKFKLVDSLITNFHLPESTLLMLISAFTSRDMILKTYDIAIDEKYRFFSFGDAMIIK

SEQ ID NO: 73304 - protein, 341 aa, Tissierella praeacuta
  REGION 1..341: note = tr|A0A3F3S461|A0A3F3S461_9FIRM S-adenosylmethionine:tRNA ribosyltransferase-isomerase; OS = Tissierella praeacuta OX=43131 GN=queA PE=3 SV=1
MKRENFSYFLPEKLIAQHPLKNREESRLLVLDKKTGKIEHKKFKDIIDYLNKGDCLVLNDTKVIPARLFGNRVGKEESIEILLLKRMEDNLWETLVKPGKKARPGHIIEFGGGVLKGEVLSIGEDGTRIIKFEYKGIFEEILDSLGEMPLPPYITEVLEDKDRYQTVYSKHKGSAAAPTAGLHFTNELLNEIRDKGVNIAYITLHVGLGTFRPVKVDNILEHHMHSEYYNIPEEAANIINKSRENGGKIISVGTTSTRTLETVSDENGKIIPKSGWTDIFIYPGYRFKIIDRLITNFHLPESTLLMLVSALATQERILDAYKIAVEEEYRFFSFGDAMFIK

SEQ ID NO: 73305 - protein, 341 aa, Tissierella praeacuta; identical to SEQ ID NO: 73304
  REGION 1..341: note = tr|A0A1M4ZEX1|A0A1M4ZEX1_9FIRM S-adenosylmethionine:tRNA ribosyltransferase-isomerase; OS = Tissierella praeacuta DSM 18095 OX=1123404 GN=queA PE=3; SV = 1

SEQ ID NO: 73306 - protein, 341 aa, Tissierella sp.
  REGION 1..341: note = tr|A0A265Q3J6|A0A265Q3J6_9FIRM S-adenosylmethionine:tRNA ribosyltransferase-isomerase; OS = Tissierella sp. P1 OX=1280483 GN=queA PE=3 SV=1
MKREDFNYFLPENLIAQHPLENREESRLLILDKKTGEIEHKTFKHIIEYLDKGDCLVLNDTRVIPARLFGNRIGKEESIEILLLKRIENNVWESLVKPGKKARPGHIIEFGGGILKGEVLSIEEDGTRIIRFEYKGIFEEILDKLGEMPLPPYITEVLDDRERYQTVYSKNKGSAAAPTAGLHFTNKLLDEIKDKGVNIAYITLHVGLGTFRPVKVDNILDHHMHSEYYNISEEAAAIINNSKHNGGKVISVGTTSTRTLETVADENGKIISKSGWTDIFIYPGYRFKIIDRLITNFHLPESTLLMLVSALATQENVLNAYRIAVEKEYRFFSFGDAMFIK

SEQ ID NO: 73307 - protein, 341 aa, unidentified
  source 1..341: note = Tissierellales bacterium
  REGION 1..341: note = tr|A0A3D3QU60|A0A3D3QU60_9FIRM S-adenosylmethionine:tRNA ribosyltransferase-isomerase; OS = Tissierellales bacterium OX=2053631 GN=queA PE=3 SV=1
MKTSDFYYDLPKELIAQHPLENRTSSRLLILDRKTGEMNHKIFSELLDELNSGDVLVMNDSRVIPARLFGNRPGKEEKIETLLLKRVSGRIWECLVRPGKKMKPGGRIEYGDGLLTGIVKGIGEDGTRFIEFKFEGIFEEVLDKLGEMPLPTYITERLENSERYQTVYSKNNGSAAAPTAGLHFDKILLDKIRDKGVHTLYLTLHVGLGTFRPVKVEDINEHIMHSEYYDISHETAEEINRAKLRGSKIIAVGTTSTRTLETAADENGMIKPSSGWTDIFIYPGYKFKAVDVMLTNFHLPESTLLMLVSAFSSKELMLTAYNEAIKERYRFFSFGDAMLIK

SEQ ID NO: 73308 - protein, 350 aa, unidentified
  source 1..350: note = Tissierellia bacterium
  REGION 1..350: note = tr|A0A133YUY9|A0A133YUY9_9FIRM S-adenosylmethionine:tRNA ribosyltransferase-isomerase; OS = Tissierellia bacterium KA00581 OX=1588751 GN=queA PE=3; SV = 1
MENLRTDDFDFDLDESLIAQFPLEDRASSRLLVANRDSFELEHRTFRDIVDYIKEGEVLVINDTKVIPARLFGNRLGKDEAIEVLLLKKHEGNIWETLVKPGKKMKIGTKILFGNGKLEGEVIDISDDGERFIKFSFDGIFEEILDELGTMPLPPYIHEKLKDKDRYQTVYAKHKGSAAAPTAGLHFTKELLEKLKEKGVKIAKVTLHVGLGTFRPVKVENVKEHKMHEEYYEVSQQACDIINEAKKNGKRIFAVGTTSIRTLESVYKRFGKVVSCKGNTDIFIYPGFKFGVVDCLITNFHLPKSTLVMLVSAFASKDIIMNAYKVATKERYRFFSFGDAMLIKREEKKC

SEQ ID NO: 73309 - protein, 340 aa, unidentified
  source 1..340: note = Tissierellia bacterium
  REGION 1..340: note = tr|A0A095XBW8|A0A095XBW8_9FIRM S-adenosylmethionine:tRNA ribosyltransferase-isomerase; OS = Tissierellia bacterium S7-1-4 OX=1284708 GN=queA PE=3; SV = 1
MRVDDYDFDLPEELIAQTPLKERDKSRLMVVDKKGSEPKDYVFSDLVDLLDEGDILVFNDSRVIPARLFGHRKDKEEKVEFLLLKELGDDRWQCLSKPGKKAKVGTEFFFGDELSLVVDEVDEEGLRYVTLKYDGILYEILDRLGTMPLPPYIHEKLEDQEMYQTVYAKDPGSAAAPTAGLHFTDELLEKLKNKGIEELFITLNVGLGTFRPVTSEFIEDHKMHEELYTVSEEVAAKINAAKKAGKKVVAVGTTTIRTLESAADENGEVRAGSRWTNIFIYPGYKFKVVDKLITNFHLPKSTLLMLISAIMGRENALHAYKIAVDRKYRFFSFGDAMFIE

SEQ ID NO: 73310 - protein, 351 aa, Tistlia consotensis
  REGION 1..351: note = tr|A0A1Y6CFK6|A0A1Y6CFK6_9PROT S-adenosylmethionine:tRNA ribosyltransferase-isomerase; OS = Tistlia consotensis USBA 355 OX=560819 GN=queA PE=3 SV=1
MLLSDFDFELPQSLIAQQPVEPRDSARLLQVGRDGLADRRVRDLPELLRAGDLLVVNDTRVLPARLTGKRGEAGVEVTLHKAEGPARWRAFARPAKRLKPGDRIVFASDAEGAFAAEVAEKHEGGELALVFERSGPALIEALERHGAMPLPPYIKRPSGAEAADRRAYQTVFAQRSGAVAAPTAGLHFTEPLLEALAARGIERTTLTLHVGAGTFLPVKHERVEEHRMHAEWASLSAETAAAVARTRARGGRVVAVGTTALRTLESAARPGAGAGLVEPFEGETSLFILPGYRFKAVDLLMTNFHLPRSTLFMLVAAFSGLETMRTAYAHAIAEGYRFFSYGDACLLERQA

SEQ ID NO: 73311 - protein, 353 aa, Tistrella mobilis
  REGION 1..353: note = tr|A0A3B9IK08|A0A3B9IK08_9PROT S-adenosylmethionine:tRNA ribosyltransferase-isomerase; OS = Tistrella mobilis OX=171437 GN=queA PE=3 SV=1
MKVDLFDFDLPRELIAQRPAEPRESARLLRIKADGLSDHRVADLPDLLRPDDLLVVNDTRVIPSRLFGRRGDAKVEVTLHKAEGLDVWAAFARPARKLRLGDRFEAEAGGRVLGAEVIERRDAGEVVLRFDLAGGELIQALEEVGRLPLPPYIERPEGADARDTDDYQTIFARDKGAVAAPTAGLHFTDRLLAALDARGIERLALTLHVGAGTFLPVKAEDTVDHHMHAEWGRLTAETADRLNAARAAGRRIIAVGTTAMRLLETAAGEDRRFRPFEGETRIFITPGGRPIRGTDVLMTNFHLPRSTLFMLVSAFAGLNRMHAAYAHAIAGGYRFFSYGDACLIDHCPDDVAS

SEQ ID NO: 73312 - protein, 353 aa, Tistrella mobilis
  REGION 1..353: note = tr|I3TKX3|I3TKX3_TISMK S-adenosylmethionine:tRNA ribosyltransferase-isomerase OS=Tistrella mobilis (strain KA081020-065) OX=1110502 GN=queA PE=3 SV=1
MKVDLFDFDLPRELIAQRPAEPRESARLLRIKADGLSDHRVADLPDLLRPDDLLVVNDTRVIPSRLFGRRGEAKVEVTLHKAEGLDVWAAFARPARKLRLGDRFEAEAGGRVLGAEVIERRDAGEVVLRFDLAGGELIQALEEVGRLPLPPYIERPEGADARDTDDYQTIFARDKGAVAAPTAGLHFTDRLLAALDARGIERLALTLHVGAGTFLPVKAEDTVDHHMHAEWGRLTAETADRLNAARAAGRRIIAVGTTAMRLLETAAGEDRRFRPFEGETRIFITPGGRPTRGTDVLMTNFHLPRSTLFMLVSAFAGLNRMHAAYAHAIAGGYRFFSYGDACLIDHCPDDVAS

SEQ ID NO: 73313 - protein, 353 aa, Tistrella sp.; identical to SEQ ID NO: 73311
  REGION 1..353: note = tr|A0A2E3ENK5|A0A2E3ENK5_9PROT S-adenosylmethionine:tRNA ribosyltransferase-isomerase; OS = Tistrella sp. OX=2024861 GN=queA PE=3 SV=1

SEQ ID NO: 73314 - protein, 186 aa, unidentified
  source 1..186: note = Unknown
  REGION 1..186: note = tr|A0A563D3D6|A0A563D3D6_9BACT S-adenosylmethionine:tRNA ribosyltransferase-isomerase (Fragment) OS=TM7 phylum sp. oral taxon 346 OX=713049; GN = EUA59_01670 PE=3 SV=1
MSAILRIMQLSDFHYDIPDELIAATPPAVRGTSRLLVLDRQTGTITDRHYPDVVDYLQAGDVLVINDTKVIKARLITRKPSGGERELVLVEQHGAHDDWFRHKVIYRRKLIAGDILTIGDDTLMVEKIIGNGIALIRSERNLLDIAAEHGTVPLPPYLGRDATAADIERYQTVFARETGSVAAPTA

SEQ ID NO: 73315 - protein, 275 aa, unidentified
  source 1..275: note = Unknown
  REGION 1..275: note = tr|A0A563CSG0|A0A563CSG0_9BACT S-adenosylmethionine:tRNA ribosyltransferase-isomerase (Fragment) OS=TM7 phylum sp. oral taxon 349 OX=713051; GN = queA PE=3 SV=1
LRARKPSGGERELVLVEQHGSHDDWFRHKVIYRRKLHAGDTLFVSDDELVVEEILGGGVAVVRSQRSLLDIAEEYGSVPLPPYMNRDATPTDIERYQTVFAHKIGSVAAPTASLNMTDEILARLRAKGVVIVHATLHVGLGTFLPIRVDDITKHTMHQEYFSIPAATIAAIQTAKASDNRVIALGTTMTRTLEYAHQQILHESPHDITGEADIFIYPGYKFQVIDALITNFHLPESTVLMLTAAFADWNVLRPAYKHAVAERYQFFSYGDSMLIT

SEQ ID NO: 73316 - protein, 348 aa, Tolumonas auensis
  REGION 1..348: note = sp|C4L7L4|QUEA_TOLAT S-adenosylmethionine:tRNA ribosyltransferase-isomerase OS=Tolumonas auensis (strain DSM 9187 / TA4) OX=595494 GN=queA PE=3 SV=1
MLVSDFQFDLPDELIARYPMPERSASRLLMLDGNSGETRHGQFRDVLDLLQPGDLLVFNNTRVIPARMFGQKASGGKLEILVERILDDHSVLAHVRASKAPKPGTQILLDNGFSAKMVARHDTLFELHFAGDLPVLDILNQIGHMPLPPYIDRPDENSDKERYQTVYNQRPGAVAAPTAGLHFDEPLLAALREKGVDFAYVTLHVGAGTFQPVRVERLEDHQMHSEYAEVPAEVIAKINATRERGGRVVAVGTTSVRSLETAAQASLKAGKPLSPFFGDTSIFIFPGYQYQLVDVLITNFHLPGSTLIMLVSAFAGYEHVMNAYQEAITSGYRFFSYGDAMFITRQSL

SEQ ID NO: 73317 - protein, 396 aa, unidentified
  source 1..396: note = Tolypothrix bouteillei
  REGION 1..396: note = tr|A0A0C1NJV2|A0A0C1NJV2_9CYAN S-adenosylmethionine:tRNA ribosyltransferase-isomerase; OS = Tolypothrix bouteillei VB521301 OX=1479485 GN=queA PE=3; SV = 1
MQEPSTRNNYDAAFNANKEDTELDTCLAGYDYELPQELIAQNPVVPRDRSRLLVVDPKTGLEAAPQHHIFCDLPELLQSGDLLIMNNTRVIPARLYGYKQTGAEIEVLLLEERQHNCWLTLVKPGKRFKPGTKIVFEPRIKSGDKGWEIGNNKDFSQVPRQIAATVVDKDETTGGRLLQFDLPEGTSLVQLLDVFGEVPLPPYITASEAKSEQYQTVYAQHPGAVAAPTAGLHFTPELLDRLQQRGIEQAFVTLHVGVGTFRPVEVEDIKTHKMHEEWIEVPSATVEKIRMTQASGGRIIAVGTTVVRALEGAASQGELKPFCGKTDMFIYPGYQWRVVEGLITNFHLPRSSLLMLVSALIGRQKLLSVYQEAIASGYRFYSFGDAMLILPQMVSG

SEQ ID NO: 73318 - protein, 411 aa, unidentified
  source 1..411: note = Tolypothrix campylonemoides
  REGION 1..411: note = tr|A0A0C2PXN3|A0A0C2PXN3_9CYAN S-adenosylmethionine:tRNA ribosyltransferase-isomerase; OS = Tolypothrix campylonemoides VB511288 OX=1245935 GN=queA; PE = 3 SV=1
MQQQRTKSNLNTISSPKKEDVEFESCLSGYDYELPQELIAQNPVVPRDSSRLLVVNSPSTGTDTAPLHHIFRDLPELLHSGDLLVMNNTKVMPARLYGCKSTGAEIEVLLLEEQKHNCWLALVKPGKRFKTGAKIFFEARGEGTREGESERGRDSHIPSLPQSLTPSSSSFPPELTATVLETDEATGGRLLQFDLPEGMSLVQLLDVFGEVPLPPYITASDAENKQYQTVYAKTPGAVAAPTAGLHFTTELLERLGDRGIHQAFVTLHVGVGTFRPVEVEDIKTHKMHEEWIEVPSSTVEQIRATQASGGRIIAVGTTVVRALEGAAAKGELQPFCGKTDLFIYPGYKWRVVEGLITNFHLPRSSLLMLVSALIGRQRLLNIYQQAIASRYRFYSFGDAMLILPEATTPGE

SEQ ID NO: 73319 - protein, 348 aa, unidentified
  source 1..348: note = Tolypothrix campylonemoides
  REGION 1..348: note = tr|A0A0C2L7N5|A0A0C2L7N5_9CYAN S-adenosylmethionine:tRNA ribosyltransferase-isomerase; OS = Tolypothrix campylonemoides VB511288 OX=1245935; GN = SD81_07735 PE=3 SV=1
MLTKPFTFTLPAELSAKEPPERRGIARDQVRLMVINRNDYRVEHTYFNSIGEFLRPGDLLVFNTSRTLPASLDGCERPKGQCMEIRLAQHLPDDSWLALPLCQQQPTCSLQTGIDIDFGHGLTATVENRDTHIPQLWKIRFSKSGTELMDTLYRLGRPIRYEYVSEPWDLDYYQTVYAKEPGSAEMPSAGRAFTWKLLFDLKRCGVETAHIVLHTGLSSYMDDELDAQHLASEEEYFISEAAAQKINHTHEKGGRVIAVGTTVVRALESVADANALVQPQHGYTRLRITAEHKLKIVDGLLTGLHEPEASHLDLLTAFLPAQQIKQAYEDAVQRGYLWHEFGDLNLIL

SEQ ID NO: 73320 - protein, 384 aa, Tolypothrix sp.; identical to SEQ ID NO: 66772
  REGION 1..384: note = tr|A0A0D6KZP1|A0A0D6KZP1_9CYAN S-adenosylmethionine:tRNA ribosyltransferase-isomerase; OS = Tolypothrix sp. PCC 7601 OX=1188 GN=queA PE=3 SV=1

SEQ ID NO: 73321 - protein, 409 aa, Tolypothrix sp.
  REGION 1..409: note = tr|A0A218QS32|A0A218QS32_9CYAN S-adenosylmethionine:tRNA ribosyltransferase-isomerase; OS = Tolypothrix sp. NIES-4075 OX=2005459 GN=queA PE=3 SV=1
MYQQPTLTNMNSTFSQEGENIELDRSLAGYDYELPQELIAQNPALPRDTSRLLLVNSPSTGKYSAPLDHIFRDLPELLHSGDLLVMNNTRVLAARLYGRKSTGAEIEVLLLEERKNNCWLALVKPGKRFKVGASIVFEARGVGEWGSGGVERQGRQEEISSPAPPAFHPPLSPSSLTATVLETDEATGGRLLQFDLPEGVSLVELLDVFGEVPLPPYITQSKAESEQYQTVYAQHPGAIAAPTAGLHFTPELLQRLRDRGINQAFVTLHVGVGTFRPVEVENVSTHKMHEEWISVPPETVEQIRATKASGGRIIAVGTTVTRALEGAAKSGNLQPFSGKTDLFIYPGYSFRVVDGLITNFHLPRSSLLMLVSALIGRERLLNIYQQAIASQYRFYSFGDAMLILPEARD

SEQ ID NO: 73322 - protein, 384 aa, Tolypothrix tenuis; identical to SEQ ID NO: 63591
  REGION 1..384: note = tr|A0A1Z4N8P7|A0A1Z4N8P7_9CYAN S-adenosylmethionine:tRNA ribosyltransferase-isomerase; OS = Tolypothrix tenuis PCC 7101 OX=231146 GN=queA PE=3 SV=1

SEQ ID NO: 73323 - protein, 356 aa, Trabulsiella guamensis
  REGION 1..356: note = tr|A0A085AE95|A0A085AE95_9ENTR S-adenosylmethionine:tRNA ribosyltransferase-isomerase; OS = Trabulsiella guamensis ATCC 49490 OX=1005994 GN=queA; PE = 3 SV=1
MRVADFSFELPESLIAHYPQPERSSCRLLSLDGPTGALTHGTFTDLLDKLNPGDLLVFNNTRVIPARLFGRKASGGKIEVLVERMLDDKRILAHIRASKAPKPGAELLLGDDESIAATMVARHGALFEVQFNDPRPVLDILNSIGHMPLPPYIDRPDEDADRELYQTVYSEKPGAVAAPTAGLHFDEPLLARLREKGIEMAFVTLHVGAGTFQPVRVDSIEEHIMHSEYAEVPQDVVDAVLAAKSRGNRVVAVGTTSVRSLESAAQAAKDALIAPFFGDTQIFIYPGYQYQVIDALVTNFHLPESTLIMLVSAFAGYQHTMKAYQEAVKTKYRFFSYGDAMFITYNPQAINERVGE

SEQ ID NO: 73324 - protein, 356 aa, Trabulsiella odontotermitis
  REGION 1..356: note = tr|A0A0L0H299|A0A0L0H299_9ENTR S-adenosylmethionine:tRNA ribosyltransferase-isomerase; OS = Trabulsiella odontotermitis OX=379893 GN=queA PE=3 SV=1
MRVADFAFELPESLIAHYPQPERSSCRLLSLDGPTGALTHGTFTDLLDKLNPGDLLVFNNTRVIPARLFGRKASGGKIEVLVERMLDDKRILAHIRASKAPKPGAELLLGDDESINATMVARHDALFEVQFNDERPVLDILNSIGHMPLPPYIDRPDEDADRELYQTVYSEKPGAVAAPTAGLHFDEPLLARLREKGIEMAFVTLHVGAGTFQPVRVDSIEEHIMHSEYAEVPQDVVDAVLAAKARGNRVVAVGTTSVRSLESAAQAAKEALIAPFFGDTQIFIYPGYQYQVIDALVTNFHLPESTLIMLVSAFAGYQHTMNAYQEAVKTKYRFFSYGDAMFITYNPQAITERVGE

SEQ ID NO: 73325 - protein, 350 aa, Tranquillimonas alkanivorans
  REGION 1..350: note = tr|A0A1I5NYI4|A0A1I5NYI4_9RHOB S-adenosylmethionine:tRNA ribosyltransferase-isomerase; OS = Tranquillimonas alkanivorans OX=441119 GN=queA PE=3 SV=1
MKLSDFDFDLPERLIATRPARPRSSARLLVAEGDRITDAVVRDLGRWLRPGDRLVLNDTKVIPARLSGQRFRDGAEGRTAARIEVTLLEPRADGAWSALVKPLKKIRDGEVIVFSDALTGTLDSRGEGQAAIRFNLAGEDFDAALAEAGAMPLPPYIAAKRPADERDREDYQTVWARHSGAVAAPTASLHFDAPLLAELRAMGVEFTHVTLHVGAGTFLPVKVDDITQHKMHAEWGEVTKQAAGEINATRAAGGRVIPVGTTALRLIESAAIEDGIAPWRGDTDIFITPGFRFRVAGGLMTNFHLPKSTLMMLVSALMGPERIRRIYAHALHEEYRFFSYGDASLLLPAA

SEQ ID NO: 73326 - protein, 355 aa, Tranquillimonas sp.
  REGION 1..355: note = tr|A0A438AKU2|A0A438AKU2_9RHOB S-adenosylmethionine:tRNA ribosyltransferase-isomerase; OS = Tranquillimonas sp. M0103 OX=2486419 GN=queA PE=3 SV=1
MKLSEFDFDLPETLIATRPARPRSSARLLVADGPRTQDARVGDLPDWLRPGDRLVLNDTRVIPARLSGIRRRSGEAGETEARIEVTLLEPLAEGWRALLKPLKKVRDGEVITFRGGLSARVASRAEGTATLVFDRGGADFDAALDAAGDMPLPPYIAGRRAADAADREDYQTVWARHAGAVAAPTASLHFDAPLLDRIRARGVAITYVTLHVGAGTFLPVKVEDIADHKMHAERGEVTQAAADDINATKAAGGRIIPVGTTALRLIESAAAGHGRIAPWQGDTDIFITPGFRFALTDALMTNFHLPKSTLMMLVSALMGAERIREIYAHAICEEYRFFSYGDASLLIPAATGDRG

SEQ ID NO: 73327 - protein, 349 aa, Treponema azotonutricium
  REGION 1..349: note = tr|F5YC93|F5YC93_TREAZ S-adenosylmethionine:tRNA ribosyltransferase-isomerase OS=Treponema azotonutricium (strain ATCC BAA-888 / DSM 13862 / ZAS-9) OX=545695; GN = queAPE=3 SV=1
MKTSDFFFDLPENLIAQYPPEKRGMSRLVVLDRKSGLREHRMTAELPQILSAWDKRPLLVFNNSKVRKARLLGTSAETGAKAEFLLLNKIDEYTWKAMAQRAKRRHPGSRYVFGDFAKGEILAEDEEFRILRFDRPIDDSWLDIHGHIPLPPYIKRDDTKTDSDRYQTVYAQNTGSAAAPTAGLHFTREILADLEKHGMDTAFVTLHVGLGTFLPVRASNIEDHTMHEESFSIDEETAAKIEKAKSEKRPVLAVGTTSVRTLESAWICDAGSPSGGYLKRGDGATSIFIYPGYQFKVIDAMFTNFHTPGSTLLMLVSAFAGRELILETYREAVEKEYRFFSYGDAMLIK

SEQ ID NO: 73328 - protein, 351 aa, Treponema berlinense
  REGION 1..351: note = tr|A0A1T4P7V9|A0A1T4P7V9_9SPIO S-adenosylmethionine:tRNA ribosyltransferase-isomerase; OS = Treponema berlinense OX=225004 GN=queA PE=3 SV=1
MKLSDFKFDLPEELIAQKPSGIRGQDKLMLLNRETGEVQHLKMEDLPDLISPDTLMIFNNSKVRRSRCYGIKMSEKEGQGGREQEFMFLNQMTPDLKTWHTMVKGAKKVKPGNKYSFFDGTVGTIIENEGDEGSEFRTVKFEIPLDDSWFEKNGHIPLPPYIRREDDDTDSERYQTIYAKETGSSACPTAGLHFTQEMFEKLDAKKIERCFVTLHVGLGTFLPVRSENIEEHKMHKEVYSIPFDVAEKINRAKKEGRPILAVGTTSVRTLESASDENGFVKSGSGATSIFMYPGYKFKCVNQMFTNFHTPESTLIMLVSAFAGRENILNAYKKAVEQKYRFFSYGDCMFIK

SEQ ID NO: 73329 - protein, 345 aa, Treponema brennaborense
  REGION 1..345: note = tr|F4LNS0|F4LNS0_TREBD S-adenosylmethionine:tRNA ribosyltransferase-isomerase OS=Treponema brennaborense (strain DSM 12168 / CIP 105900 / DD5/3) OX=906968 GN=queA; PE = 3 SV=1
MRTKDFYFDLPEELIAQHPSGIRGQDKLMVLDKATGDVRHQLMDDLPDLVPQNALMVFNNSRVRRSRVYGIKENTGRETEFLFLTPLAPTLWKTMVKNAKKQRPGNRYRFPDGSVGVITENPADAGTEFRTLSFTQPIEEQWFERNGHIPLPPYIKRKDTEEDSERYQNIYARETGSAACPTAGLHFTERMLEKLDSRGIRRTFVTLHVGLGTFLPVRAERIEDHTMHEETYSVSRETAELVNTAKKEGRPVLAVGTTSVRTLESAWDPVKSELIPGINSTRIFMYPGYRFNVVDKMFTNFHTPESTLLMLVSAFAGKEHIMDAYRNAVAHRYRFFSYGDAMLIL

SEQ ID NO: 73330 - protein, 357 aa, Treponema bryantii
  REGION 1..357: note = tr|A0A1I3K2B8|A0A1I3K2B8_9SPIO S-adenosylmethionine:tRNA ribosyltransferase-isomerase; OS = Treponema bryantii OX=163 GN=queA PE=3 SV=1
MLTSDFNFDLPEDLIAQHPSGVRGQDKLMLLNRATGEVEHHMMDDLPDLIEPGTLMIFNNSRVRRARVYGIKETTGRETEFMFLNTIDKDCCIWNTMVKSAKKQKPGMHYKFPDGTVAEIVEHEGNAGTEFRALKFDFAIDEDWFERNGHIPLPPYIKRGDTEEDSERYQNVYATNTGSAACPTAGLHFTEDMLARLDAKGIERRFVTLHVGLGTFLPVREENIENHKMHEEWYTVPKETADAINKAKAEGRPILAVGTTSVRTLESVAQKIEQDGGVVGANNEWVRAGTNSTSIFMYPGFKFKVVDKMFTNFHTPESTLIMLVSAFAGREHILNAYKTAVENRYRFFSYGDCMFIR

SEQ ID NO: 73331 - protein, 357 aa, Treponema bryantii
  REGION 1..357: note = tr|A0A1H9A711|A0A1H9A711_9SPIO S-adenosylmethionine:tRNA ribosyltransferase-isomerase; OS = Treponema bryantii OX=163 GN=queA PE=3 SV=1
MLTSDFNFDLPEDLIAQHPSGVRGQDKLMLLNRATGEVEHHMMDDLPDLIEPGTLMIFNNSRVRRARVYGIKETTGRETEFMFLNTIDKDCCIWNTMVKSAKKQKPGMHYKFPDGTVAEIVEHEGNAGTEFRALKFDFAIDEDWFERNGHIPLPPYIKRGDTEEDSERYQNVYATDTGSAACPTAGLHFTEDMLARLDAKGIERRFVTLHVGLGTFLPVREENIENHKMHEEWYTVPKETADAINKAKTEGRPILAVGTTSVRTLESVAQKIEQDGGVVGANNEWVRAGTNSTSIFMYPGFKFKVVDKMFTNFHTPESTLIMLVSAFAGRDHILSAYKTAVENRYRFFSYGDCMFIR

SEQ ID NO: 73332 - protein, 339 aa, unidentified
  source 1..339: note = Treponema caldarium
  REGION 1..339: note = tr|F8F2U5|F8F2U5_TRECH S-adenosylmethionine:tRNA ribosyltransferase-isomerase OS=Treponema caldarium (strain ATCC 51460 / DSM 7334 / H1) OX=744872 GN=queA PE=3; SV = 1
METTDFSFELPPELIAQHPPAERGKSRLLVLDRRTGRRRHLMVADLPDLVPEGALMVFNDSRVRKARLFARSLDTGAEVEFLLTRFIGGSRWEVMVKRAKRRRPGSRYQFPDGTTVLIEAEAGELRIINFDHPIDDAWLDTYGHIPLPPYIKRSDEAEDSERYQTVYARTPGSSAAPTAGLHFTDEILTRLDARGIERVFVTLHVGLGTFMPVRTSRIEDHVMHEETYSVSEETAAAVERAKREKRPVLAVGTTSVRTLESAWKGDHLERGSSSTSIFIYPPYRFKVVDQLFTNFHTPESTLLMLVSAFAGRELILESYAEAVRERYRFFSYGDAMYIQ

SEQ ID NO: 73333 - protein, 347 aa, Treponema denticola
  REGION 1..347: note = sp|Q73JQ7|QUEA_TREDE S-adenosylmethionine:tRNA ribosyltransferase-isomerase OS=Treponema denticola (strain ATCC 35405 / CIP 103919 / DSM 14222) OX=243275; GN = queA PE= 3 SV=1
MLTKEFNFDLPEELIAQSPSEKRGGDRLLILDKQSGKLEDRLFTELPEILPKNALMVFNNSKVRHARIYAKSKTNAVCEFLMINPMRDSDGSLWQVMAKKAKRQKPGKTFLFEDGTEAEIIESEIPLESEFRCMKFNRVIDDEWLDKYGHMPLPPYIHRKDTQEDADRYQTVYAEIYGSIAAPTAGLHFTQEVLSKIRDKGIDIEYVTLHVGLGTFLPVRAEKIEDHKMHTEHFFISEKTAQAVEKAKKEGRPIIAVGTTTVRTLESAWDEKRKELKWGNQSTDIFIYPSYKFKLIDKLFTNFHTPESSLVMLVSALAGKENIFKAYRHAVEEKYKFFSYGDAMLIL

SEQ ID NO: 73334 - protein, 347 aa, Treponema denticola
  REGION 1..347: note = tr|A0A0E2EMK8|A0A0E2EMK8_TREDN S-adenosylmethionine:tRNA ribosyltransferase-isomerase; OS = Treponema denticola AL-2 OX=999426 GN=queA PE=3 SV=1
MLTKEFNFDLPEELIAQSPSEKRGGDRLLILDKQSGKLEDKLFTELPEILPKNALMVFNNSKVRHARIYAKSKTNAICEFLMINPMKDSDGSLWQVMAKKAKRQKPGKIFLFEDGTEAEIIESEIPLESEFRCMKFNRVIDDEWLDKYGHMPLPPYIHRKDTSEDADRYQTVYAEIYGSIAAPTAGLHFTQEVLSKIRDKGIDIEYVTLHVGLGTFLPVRAEKIEDHKMHREHFFISEKTAQAVEKAKKEGRPIIAVGTTTVRTLESAWDEKRKELKRGNQSTNIFIYPSYKFKLIDKLFTNFHTPESSLVMLVSALAGKENIFKAYRHAVEEKYKFFSYGDAMLIL

SEQ ID NO: 73335 - protein, 406 aa, Treponema lecithinolyticum
  REGION 1..406: note = tr|U2KJZ6|U2KJZ6_TRELE S-adenosylmethionine:tRNA ribosyltransferase-isomerase OS=Treponema lecithinolyticum ATCC 700332 OX=1321815 GN=queA PE=3 SV=1
MLTKDFYFDLPEKLIAQYPSAVRGNDRLMVLNRCDKSIKHCHMQNLVDLIGKDTLMVFNDSKVRRSRCYAQKENAPLSKKTEFLLLDEVDAEDAQVPAADGGAGQQGTGSAGSQPNGGQKRLWRAMVKQAKKKRIGDRFVFADGTVGTIAGCPEGENSAFRTLFFEKPQPPLSASQSVSQRHCAPSNGTNRFANEEKHFMLDEAWFERNGHIPLPPYIKRNDTEKDAQRYQTVYAKNIGSAACPTAGLHFTQSMLDAFKEKGVELCTVTLHVGLGTFLPVRTDTVEAHVMHEEVYTVSPETAQAVNQAKKEGKSVLAVGTTSVRTLEAAWKDGALQSGTGSTRIFLYPPCTFHAVDRMFTNFHTPESTLLMLVSAFAGREYILEAYRQAVEQEYRFFSYGDAMLIM

SEQ ID NO: 73336 - protein, 365 aa, Treponema maltophilum
  REGION 1..365: note = tr|S3K1T8|S3K1T8_TREMA S-adenosylmethionine:tRNA ribosyltransferase-isomerase OS=Treponema maltophilum ATCC 51939 OX=1125699 GN=queA PE=3 SV=1
MLTKDFYFDLPEQLIAQHPSAVRGEDRLMVLNKADGKTADYMIEDLPDLIEEGSLMVFNNSKVRPSRCFARKIDSLSVKPVEFLLIEKIGGRSVQTHAEPSKYRLNDEPKELWRAMVKNAKKQRTGNRYRFSDGTIGIIVESAEDEGTEFRVLEFSRPELDEAWFERNGHMPLPPYIKRADTSEDAERYQNVYAAVSGSIACPTAGLHFTEKILQRLKEKGVHMCSLTLHVGLGTFLPVRTERIEDHAMHGENYTVSEQTAAAVNSAKKEGRPVIAVGTTSVRTLESAWKDGLLKSGSGSTHIFLYPGCTFNVVDRLITNFHTPESTLLMLVSAFAGKERILNAYAQAVEKRYRFFSYGDAMYIR

SEQ ID NO: 73337 - protein, 346 aa, Treponema medium
  REGION 1..346: note = tr|S3JSX8|S3JSX8_TREMD S-adenosylmethionine:tRNA ribosyltransferase-isomerase OS=Treponema medium ATCC 700293 OX=1125700 GN=queA PE=3 SV=1
MFTKDFDFDLPKELIAQYPSAERGNDRLLVLHRRTGALTDAMFSDLPDFLPPDCLMVFNNTKVRHARLYAHTASGEAEFLLIEPLDEGFVWKTIVKRAKRQREGKEYTFNDGTRAVLIPPPSSNAAEPDCKYVRFDRCIDDRWLEANGHIPLPPYIKRGDTNEDAARYQTVYAQNTGSVAAPTAGLHFTEPILQELDKRHIARTAVTLHVGLGTFLPVRTEVVEEHTMHSEKFFISNETAETVENAHRSGKTILAVGTTSVRTLESAWKSDTQQLSCGMQATNIFIYPGFQFGLTGALLTNFHTPQSSLVMLVSAFAGRDNIFAAYRHAIEKKYRFFSYGDAMLIL

SEQ ID NO: 73338 - protein, 347 aa, Treponema pedis
  REGION 1..347: note = tr|S5ZYT9|S5ZYT9_9SPIO S-adenosylmethionine:tRNA ribosyltransferase-isomerase OS=Treponema pedis str. T A4; OX = 1291379 GN=queA PE=3 SV=1
MLTKEFNFELPQELIAQTPSKMRGNDKLLILNKKTGNLEDKVFCELPDILPKDALMVFNNSKVRRARIYAESSSGAQTEFLLINPIPEFGGFVWQVMVKKAKRQKAGKVFVFRDGTKAEIIETEKELGNEFRCLKFDKIIDDDWLDLNGHIPLPPYIRRDDTEEDAERYQTVYAKAYGSIAAPTAGLHFTEEVLNRIKNLGIGIEYVTLHVGLGTFLPVRSENVEEHKMHTEYFSISEIAAYNISKAKKDGRPIIAVGTTSVRTLESAWNEKTLSLKTGNQSTDIFIYPPYKFKVVDKLFTNFHTPESSLVMLVSALAGKENIFNAYRHAIERRYRFFSYGDAMLII

SEQ ID NO: 73339 - protein, 348 aa, unidentified
  source 1..348: note = Treponema phagedenis
  REGION 1..348: note = tr|A0A5D5BUZ1|A0A5D5BUZ1_TREPH S-adenosylmethionine:tRNA ribosyltransferase-isomerase; OS = Treponema phagedenis OX=162 GN=queA PE=3 SV=1
MNTKDFDFYLPEHLIAQKPSGKRGEDKLLLLDKKTGAFSDRQFSELPDILPPNALMVFNNSKVRRARVYAKSKDSGAQTEFLLIDSLDDGRLWQAMTKKAKRQRIGKTFLFDEGVEAMVVEPPANTDTSAEFRWLQFNTPITDSWLETHGHIPLPPYIRREDTEEDASRYQTVYAQTTGSIAAPTAGLHFTDEILQRIDARGIERTAITLHVGLGTFLPVRTEKIEEHRMHTEKFFITDTTATAIEKAKREGRPIIAVGTTSVRSLESAWNPDTQRLMRGSQSTNIFIYPPYQFKLVDMLFTNFHTPESTLLMLVSALAGKDQILAAYAHAVEQEYRFFSYGDAMFIR

SEQ ID NO: 73340 - protein, 348 aa, unidentified; identical to SEQ ID NO: 73339
  source 1..348: note = Treponema phagedenis
  REGION 1..348: note = tr|E7NV38|E7NV38_TREPH S-adenosylmethionine:tRNA ribosyltransferase-isomerase OS=Treponema phagedenis F0421; OX = 754027 GN=queA PE=3 SV=1

SEQ ID NO: 73341 - protein, 346 aa, Treponema porcinum
  REGION 1..346: note = tr|A0A1T4JXN1|A0A1T4JXN1_9SPIO S-adenosylmethionine:tRNA ribosyltransferase-isomerase; OS = Treponema porcinum OX=261392 GN=queA PE=3 SV=1
MKTSDFYFDLPEELIAQHPSGIRGQDKLMRLGKNDGAVTHFAMDNLPELISPDTLMVFNNSRVRRARCYGIKETTGRETEFMFLNQIDKDCRVWNTMVKNAKKQKPGMRYTFPDGTVGTIIECPGNEGTEFRALQFDFIISEDWFEKNGHIPLPPYIKREDTEEDSERYQNVYAVNTGSAACPTAGLHFTEEMLSRLDAKGIERAFVTLHVGLGTFLPVREEMIENHKMHEEVFTVPPETAQKINEAKKQGRPVLAVGTTSVRTLESACDENGLVRSGTGSTRIFMYPGYKFKVVDQMFTNFHTPESTLIMLVSAFAGRENILNAYRTAVENRYRFFSYGDCMLIQ

SEQ ID NO: 73342 - protein, 340 aa, Treponema primitia
  REGION 1..340: note = tr|F5YLY6|F5YLY6_TREPZ S-adenosylmethionine:tRNA ribosyltransferase-isomerase OS=Treponema primitia (strain ATCC BAA-887 / DSM 12427 / ZAS-2) OX=545694 GN=queA; PE = 3SV=1
MKLTDFSFDLPQNLIAQFPPEQRGQSRLLVLDRMQRSRSHHHIADLPSLLEPGDLLVFNNSKVRKARIYGTGAGGGRVEFLLLKQQDPQTWTVMAQRTKRRRMGTRYIFDDALEAEIIGEEGELRLLRFDRPIDEAWLDRHGHIPLPPYIRREDSPADSERYQTVYAAVPGSAAAPTAGLHFTEELLAHLTERGIESAFVTLHVGLGTFLPVRSETIEDHLMHEENYSIDEENAARIERAKAEKRRVIAVGTTSVRTLESAWDSNAGKLCRGEGATSIFIYPGYTFKVVDALFTNFHTPESTLLMLVSAFADRNFILDSYREAADQGYRFFSYGDAMLIV

SEQ ID NO: 73343 - protein, 347 aa, Treponema putidum
  REGION 1..347: note = tr|A0A562S6U6|A0A562S6U6_9SPIO S-adenosylmethionine:tRNA ribosyltransferase-isomerase; OS = Treponema putidum OX=221027 GN=queA PE=3 SV=1
MLTKEFNFDLPEELIAQSPSEKRGGDRLLILDKQSGKLEDRLFTELPELLPKKALMVFNNSKVRHARIYAKSKTNAVCEFLMINPMKDSDGTLWQVMAKKAKRQKPGKSFLFEDGTEAEIIESEIPLESEFRCMKFNRIIDDEWLDKYGHMPLPPYIHRKDTQEDADRYQTVYAEIYGSIAAPTAGLHFTQEVLSKIRDKGIDIEYVTLHVGLGTFLPVRAEKIEDHKMHTEHFFISEKTAQAVEKAKKEGRPIIAVGTTTVRTLESAWDEKRKELKRGNQSTDIFIYPSYKFKLIDKLFTNFHTPESSLVMLVSALAGKENIFKAYRHAVEEKYKFFSYGDAMLIL

SEQ ID NO: 73344 - protein, 351 aa, Treponema saccharophilum
  REGION 1..351: note = tr|H7EMK4|H7EMK4_9SPIO S-adenosylmethionine:tRNA ribosyltransferase-isomerase OS=Treponema saccharophilum DSM 2985 OX=907348 GN=queA PE=3 SV=1
MKLSDFYFDLPEELIAQKPSGIRGEDKLMFLDRATGAVRHFAMRDLPDLIEPGTLMVFNNSKVRRSRCYGIKEANEKGQGGREQEFMFLNQMSASGDVWHTMVKGAKKVKAGSRYRFPDGSVGEIVDSEGDAGSEFRTVRFPFALDDGWFSRNGHIPLPPYIKREDDDTDSERYQTVYAKETGSSACPTAGLHFTEEMFRRLDEKGIDRTFVTLHVGLGTFLPVRSENIEEHKMHEEVYTIPFDAAEKINRAKREGRPILAVGTTSVRTLESAAGDDGLVRSGSSATRIFMYPGYRFKCVSQMFTNFHTPESTLIMLVSAFAGRENILGAYRTAVENRYRFFSYGDAMLIK

SEQ ID NO: 73345 - protein, 344 aa, Treponema socranskii
  REGION 1..344: note = tr|U1F6T5|U1F6T5_TRESO S-adenosylmethionine:tRNA ribosyltransferase-isomerase OS=Treponema socranskii subsp. socranskii VPI DR56BR1116 = ATCC 35536 OX=1125725; GN = que A PE=3 SV=1
MKTTDFYFDLPEELVAQHPSGIRGEDKLMRLDKKSGSVSHFDMRDLPDLLEPGTLAVFNDSRVRRARVFGVKETTGRECEFMFLHQIDEKGSLWRTMVKGAKKQKRGMRYAFPDGFFGVIEGEDAGTEFRNLKFDNPISESWFEKNGHIPLPPYIKRGDTASDAERYQNVYAKTTGSAACPTAGLHFTEDMLSRLKEKGIDIAWVTLHVGLGTFLPVRESEIEKHKMHEEAYTVPDLTAQKINDAKRSGRRVLAVGTTSVRTLESSCDENGFVKAGAGSTHIFMYPGFRFKVADELFTNFHTPESTLIMLVSAFAGREHILNAYKIAVEKRYRFFSYGDAMLIR

SEQ ID NO: 73346 - protein, 344 aa, Treponema socranskii
  REGION 1..344: note = tr|S3KSE1|S3KSE1_TRESO S-adenosylmethionine:tRNA ribosyltransferase-isomerase OS=Treponema socranskii subsp. paredis ATCC 35535 OX=1125701 GN=queA PE=3 SV=1
MKTMDFYFDLPEELVAQHPSGIRGEDKLMLLDKKSGSVSHFDMRDLPDLLEPGTLAVFNDSRVRRARVFGVKETTGRECEFMFLHQIDEKGSLWRTMVKGAKKQKRGMRYAFPDGLFGVIEGEDTGTEFRNLKFDHPISESWFEKNGHIPLPPYIKRGDTASDAERYQNVYAKTTGSAACPTAGLHFTEDMLSRLKEKGIDIAWVTLHVGLGTFLPVRESEIEKHKMHEEAYTVPDITAQKINDAKRSGRRVLAVGTTSVRTLESSCDENGFVKAGSGSTHIFMYPGFRFKVADELFTNFHTPESTLIMLVSAFAGREHILNAYKIAVEKRYRFFSYGDAMLIR

SEQ ID NO: 73347 - protein, 358 aa, Treponema sp.
  REGION 1..358: note = tr|A0A2G6QPN4|A0A2G6QPN4_9SPIO S-adenosylmethionine:tRNA ribosyltransferase-isomerase; OS = Treponema sp. OX=166 GN=queA PE=3 SV=1
MHTDDFDFDLPENLIAQEPAKTRGQDRLLVLDARSGNYFDRQFSDLVDLIPENALMVFNNSRVRKARVFAANKKTGGQAEFLFLHPYEAGRVWQVMAKRNKRQKAGNRYLFEDGMEAELVLHNTIDFDNCTQNTPALNEDLTQAKFLRFAKPLSDDWFDINGHIPLPPYIRRADCPEDADRYQTVFAEKTGSVAAPTAGLHFTKDILSKLDAKGIKRAEITLHVGRGTFLPVRTGNLEDHKMHIENFFISDETAALVENQKQTGNPIIAVGTTSVRALETAYQNAGLQKGWQSSDIFIYPGYKFKIVNHLLTNFHTPKSTLLMLVSALAGRENILKAYNHAVQKEYRFFSYGDAMLIM

SEQ ID NO: 73348 - protein, 346 aa, Treponema sp.
  REGION 1..346: note = tr|A0A352B997|A0A352B997_9SPIO S-adenosylmethionine:tRNA ribosyltransferase-isomerase; OS = Treponema sp. OX=166 GN=queA PE=3 SV=1
MKTSDFYFDLPQELIAQKPAGKRGDDRLMLLSRSNGSVQHYMMESLPDLVEEGTLMIFNNSRVRRSRCYGIKVATGREQEFMFLNQMGPEGNRWNTMVRGAKKVKVGGVYRFSDGSEGTIVENPCDTGTEFRTIEFSQRIDEDWFERNGHIPLPPYIKREDTEIDSERYQTIYAKETGSAACPTAGLHFTEPLLARLREKKIDLEWITLHVGLGTFLPVRSEQIEDHKMHEEVYTVPYDVAEKINLAKKEGRPVLAVGTTSVRTLESAADENGIVHGGTGSTHIFMYPGYKFKVVDQMFTNFHTPESTLIMLVSAFASREYILNAYSEAVKEKYHFFSYGDAMLIK

SEQ ID NO: 73349 - protein, 346 aa, Treponema succinifaciens
  REGION 1..346: note = tr|F2NVJ7|F2NVJ7_TRES6 S-adenosylmethionine:tRNA ribosyltransferase-isomerase OS=Treponema succinifaciens (strain ATCC 33096 / DSM 2489 / 6091) OX=869209 GN=queA; PE = 3 SV=1
MKTSDFNFDLPEELIAQKPSGIRGNDKLMFLDKSTGKVFHYAMKDLVDLVEPGTLMVFNNSKVRRSRCYGIKTDTGREQEFMFLNQTSPEGNIWNTMVKGAKKVKPGNVYKFPDGSEGKIVSDSKNDGTEFRFIEFPFRLTEVWFEKNGHIPLPPYIRREDDDTDSERYQTIYAKETGSAACPTAGLHFTEFVLEKLKEKNVDLEWITLHVGLGTFLPVRADNIEEHKMHEEFYTVPYDVAEKINSAKKEGRPVLAVGTTSVRTLESASDENGIVHGGTRSTNIFMYPGYKFKVVDQMFTNFHTPESTLIMLVSAFAGRENILNAYKIAVENRYRFFSYGDAMLIK

SEQ ID NO: 73350 - protein, 346 aa, unidentified
  source 1..346: note = Treponema vincentii
  REGION 1..346: note = tr|S3MF79|S3MF79_9SPIO S-adenosylmethionine:tRNA ribosyltransferase-isomerase OS=Treponema vincentii F0403; OX = 1125702 GN=queA PE=3 SV=1
MFTKDFDFDLPKELIAQYPSAERGNDRLLVLNRRTGALTDAVFSDLPDFLPPDCLMVFNNTKVRHARLYARTGSGEAEFLLIEPLDEGFVWKTIVKRAKRQREGKEYIFDDGTRAVLIPPPSPNAAETDCKYIRFDRCIDDRWLEANGHIPLPPYIKRGDTDEDAERYQTVYAKNTGSVAAPTAGLHFTEPILQELDKRHIARTAVTLHVGLGTFLPVRTEVVEEHTMHSEKFFISDETAAAVEEAHRAGKTILAVGTTSVRTLESAWKSDTQQLSRGMHATDIFIYPGFRFGLTGALLTNFHTPQSSLVMLVSAFAGRDNIFAAYRHAIEKKYRFFSYGDAMLIL

SEQ ID NO: 73351 - protein, 354 aa, unidentified
  source 1..354: note = Treponema vincentii
  REGION 1..354: note = tr|C8PRN2|C8PRN2_9SPIO S-adenosylmethionine:tRNA ribosyltransferase-isomerase OS=Treponema vincentii ATCC 35580 OX=596324 GN=queA PE=3 SV=1
MFTKDFDFDLPKELIAQYPSAERGNDRLLVLNRRTGALTDAVFSDLPDFLPPDCLMVFNNTKVRHARLYARTGSGEAEFLLIEPLDEGFVWKTIVKRAKRQREGKEYIFDDGTRAVLIPPPSPNAAEADCKYIRFDRCIDDRWLEANGHIPLPPYIKRGDTDEDAERYQTVYAKNTGSVAAPTAGLHFTEPILQELDKRHIARTAVTLHVGLGTFLPVRTEVVEEHTMHSEKFFISDETAAAVEEAHRTEKTILAVGTTSVRTLESAWKSDTQQLSRGMHATDIFIYPGFRFGLTGALLTNFHTPQSSLVMLVSAFAGRDNIFAAYRHAIEKNTGSSLTATPCLSCKDCLLCEI

SEQ ID NO: 73352 - protein, 342 aa, Trichococcus collinsii
  REGION 1..342: note = tr|A0A143YAC1|A0A143YAC1_9LACT S-adenosylmethionine:tRNA ribosyltransferase-isomerase; OS = Trichococcus collinsii OX=157076 GN=queA PE=3 SV=1
MRTSDFDFYLPEELIAQTPLLDRSSSRLLALNSKTGEITDKHFTDMVEELQEGDALVLNNTRVLPARLHGVKPDTGGHIEVLLLNNIQGDEWETLVKPGKRVKVGTVISFGDGRLTAEVTQSLDHGGRILNFKYDGVFLEILESLGEMPLPPYIKETLDDQERYQTVYAKEVGSAAAPTAGLHFTAELLEEVANKGVKIVYLTLHVGLGTFRPVSVDDIASHEMHSEFYQLTDEAAQTLNEVRSNGGKIVAVGTTSVRTLETIGTKFDGEIKADSGWTKIFISPGYSFKVVQGIITNFHLPKSTLVMLVSAFAGRDNVLAAYEHAVKEKYRFFSFGDAMFIK

SEQ ID NO: 73353 - protein, 342 aa, Trichococcus flocculiformis
  REGION 1..342: note = tr|A0A143YGU2|A0A143YGU2_9LACT S-adenosylmethionine:tRNA ribosyltransferase-isomerase; OS = Trichococcus flocculiformis OX=82803 GN=queA PE=3 SV=1
MRTSDFDFYLPEELIAQTPLLDRSSSRLLSLDSKTGAITDKHFTDMVAELQEGDALVLNNTRVLPARLHGVKPDTGGHIEVLLLNNIQGDEWETLVKPGKRVKVGTVISFGDGRLTAEVTQSLEHGGRILNFKYDGVFLEILESLGEMPLPPYINETLDDQERYQTVYAKEVGSAAAPTAGLHFTADLLEEVANKGVKIVYLTLHVGLGTFRPVSVDDIASHEMHSEFYQLTDEAAQALNQVRSNGGKIVAVGTTSVRTLETIGTKFDGEIKADSGWTKIFISPGYSFKVVQGIITNFHLPKSTLVMLVSAFAGRDNVLAAYEYAVKEKYRFFSFGDAMFIK

SEQ ID NO: 73354 - protein, 342 aa, unidentified
  source 1..342: note = Trichococcus ilyis
  REGION 1..342: note = tr|A0A143YB22|A0A143YB22_9LACT S-adenosylmethionine:tRNA ribosyltransferase-isomerase; OS = Trichococcus ilyis OX=640938 GN=queA PE=3 SV=1
MRTSDFDFNLPEELIAQTPLLDRSSSRLLALDSKTGEIMDKHFTDIVAELQEGDALVLNNTRVLPARLHGVKPDTGGHIEVLLLNNIQGDEWETLVKPGKRVKVGTVISFGDGRLTAEVTQSLEHGGRILNFKYDGVFLEILESLGEMPLPPYIKETLDDQERYQTVYAKEVGSAAAPTAGLHFTAELLQEVANKGVKIVYLTLHVGLGTFRPVSVDDIASHEMHSEFYQLTDEAAQTLNDVRSNGGKIVAVGTTSVRTLETIGTKFDGEIKADSGWTKIFISPGYSFKVVQGIITNFHLPKSTLVMLVSAFAGRDNVLAAYEHAVKEKYRFFSFGDAMFIK

SEQ ID NO: 73355 - protein, 342 aa, Trichococcus palustris
  REGION 1..342: note = tr|A0A143Y944|A0A143Y944_9LACT S-adenosylmethionine:tRNA ribosyltransferase-isomerase; OS = Trichococcus palustris OX=140314 GN=queA PE=3 SV=1
MKTSDFDFYLPEELIAQTPLLDRSSSRLLVLDAETGGLEDKHFTAILDELNEGDALVLNNTRVLPARLHGVKPDTGGHIEVLLLNNTNGDEWETLVKPGKRVKVGTVISFGDGRLTAEVTKVLEHGGRMITFKYDGVFLEILESLGEMPLPPYIKEKLEDQGRYQTVYAKENGSAAAPTAGLHFTDELLKQIEAKGVQIVYVTLHVGLGTFRPVSVDNLDEHEMHSEFYQLTEESAAALNSVREHGGKIYAVGTTSVRTLETIGSKFDGNIVADSGWTSIFISPGYTFKVVEGFITNFHLPKSTLVMLVSAFAGREHVLGAYEHAVQEKYRFFSFGDAMFIK

SEQ ID NO: 73356 - protein, 342 aa, Trichococcus pasteurii
  REGION 1..342: note = tr|A0A1W1ICF8|A0A1W1ICF8_9LACT S-adenosylmethionine:tRNA ribosyltransferase-isomerase; OS = Trichococcus pasteurii OX=43064 GN=queA PE=3 SV=1
MRTSDFDFYLPEELIAQTPLLDRSSSRLLALDSKTGEITDKHFTDMVEELQEGDALVLNNTRVLPARLHGVKPDTGGHIEVLLLNNIQGDEWETLVKPGKRVKVGTVISFGDGRLTAEVTQSLEHGGRILNFKYDGVFLEILESLGEMPLPPYIKETLDDQERYQTVYAKEVGSAAAPTAGLHFTADLLKEVSNKGVKIVYLTLHVGLGTFRPVSVDDIASHEMHSEFYQLTNEAAQTLNQVRSNGGKIVAVGTTSVRTLETIGTKFDGKIKADSGWTKIFISPGYSFKVVQGIITNFHLPKSTLVMLVSAFAGRENVLSAYEHAVKEKYRFFSFGDAMFIK

SEQ ID NO: 73357 - protein, 342 aa, Trichococcus patagoniensis
  REGION 1..342: note = tr|A0A2T5ILH0|A0A2T5ILH0_9LACT S-adenosylmethionine:tRNA ribosyltransferase-isomerase; OS = Trichococcus patagoniensis OX=382641 GN=queA PE=3 SV=1
MRTSDFDFYLPEELIAQTPLLDRSSSRLLALDSKTGEITDKHFTDMVEELQDGDALVLNNTRVLPARLHGIKPDTGGHIEVLLLNNIQGDEWETLVKPGKRVKVGTVISFGDGRLTAEVTQSLDHGGRILNFKYDGVFLEILESLGEMPLPPYIKETLDDQERYQTVYAKEVGSAAAPTAGLHFTAELLADVAKKGVKIVYLTLHVGLGTFRPVSVDDIASHEMHSEFYQLTDEAAQALNQVRSNGGKIVAVGTTSVRTLETIGTKFDGEIKADSGWTKIFISPGYSFKVVQGIITNFHLPKSTLVMLVSAFAGRDNVLAAYEHAVKEKYRFFSFGDAMFIK

SEQ ID NO: 73358 - protein, 342 aa, Trichococcus sp.
  REGION 1..342: note = tr|A0A5C5E959|A0A5C5E959_9LACT S-adenosylmethionine:tRNA ribosyltransferase-isomerase; OS = Trichococcus sp. SKBG OX=2585775 GN=queA PE=3 SV=1
MRTSDFDFYLPEELIAQTPLLDRSSSRLLSLDSKTGEITDKHFTDMVEELQEGDALVLNNTRVLPARLHGVKPDTGGHIEVLLLNNIQGDEWETLVKPGKRVKVGTVISFGDGRLTAEVTQSLDHGGRILNFKYDGVFLEILESLGEMPLPPYIKETLDDQERYQTVYAKEVGSAAAPTAGLHFTAELLEGVANKGVKIVYLTLHVGLGTFRPVSVDDIASHEMHSEFYQLTEEAAQTLNEVRSNGGKIVAVGTTSVRTLETIGTKFDGEIKADSGWTKIFISPGYSFKVVQGIITNFHLPKSTLVMLVSAFAGRDSVLSAYEHAVKEKYRFFSFGDAMFIK

SEQ ID NO: 73359 - protein, 342 aa, Trichococcus sp.
  REGION 1..342: note = tr|A0A143YMA4|A0A143YMA4_9LACT S-adenosylmethionine:tRNA ribosyltransferase-isomerase; OS = Trichococcus sp. ES5 OX=872292 GN=queA PE=3 SV=1
MRTSDFDFYLPEELIAQTPLLDRSSSRLLSLDSKTGAITDKHFTDMVAELQAGDALVLNNTRVLPARLHGVKPDTGGHIEVLLLNNIQGDEWETLVKPGKRVKVGTVISFGDGRLTAEVTQSLDHGGRILNFKYDGVFLEILESLGEMPLPPYIKETLDDQERYQTVYAKEVGSAAAPTAGLHFTADLLEEVANKGVEIVYLTLHVGLGTFRPVSVDDIASHEMHSEFYQLTDEAAQALNQVRSNGGKIVAVGTTSVRTLETIGTKFDGEIKADSGWTKIFISPGYSFKVVQGIITNFHLPKSTLVMLVSAFAGRDNVLAAYEYAVKEKYRFFSFGDAMFIK

SEQ ID NO: 73360 - protein, 369 aa, unidentified
  source 1..369: note = Trichodesmium erythraeum
  REGION 1..369: note = tr|Q118B2|Q118B2_TRIEI S-adenosylmethionine:tRNA ribosyltransferase-isomerase OS=Trichodesmium erythraeum (strain IMS101) OX=203124 GN=queA PE=3 SV=1
MTDLDWSIEAYDYELPQELIAQNPVVPRDSSRLMVIESLTHNHRIFRDLPDLLQPEDLLVLNNTRVIPARLYGQKTSGAQVEILLLKQITNDSWLALVKPGKHFSAGTRIEFEPNSSFTCDYKLQATVLAIDQETGGRVLQFYWPQEVSWLDLLKQFGHIPFPPYVTGSQALTEQYQTVYSKIAGAIAAPTAGLHFTDELLYKLEQGNIGRAFITLHVGIGTFRPVEVKDITTHNIHSEWVEVSSLSVDKIHQTKAKGGRIIAVGTTVVRAIEAAALANDNYSTQESLIPLIRPFSDYTDIFIYPGYKWRVVDGLITNFHLPRSSLLMLVSAMIGRKRLLSLYQDAIDQKYRFYSFGDAMFILPSARVN

SEQ ID NO: 73361 - protein, 397 aa, unidentified; identical to SEQ ID NO: 69452
  source 1..397: note = Trichormus variabilis
  REGION 1..397: note = tr|A0A1Z4KEM2|A0A1Z4KEM2_ANAVA S-adenosylmethionine:tRNA ribosyltransferase-isomerase; OS = Trichormus variabilis NIES-23 OX=1973479 GN=queA PE=3; SV = 1

SEQ ID NO: 73362 - protein, 408 aa, unidentified
  source 1..408: note = Trichormus variabilis
  REGION 1..408: note = sp|Q3M3N7|QUEA_TRIV2 S-adenosylmethionine:tRNA ribosyltransferase-isomerase OS=Trichormus variabilis (strain ATCC 29413 / PCC 7937) OX=240292 GN=queA PE=3 SV=1
MKKQILQLNLEQTSSAAAEDTNLDCSLAGYDYVLPPERIAQNPAVPRDSSRLLVVNSQTTGKETPPLHQIFRDLPDILRPGDLLIMNNTKVIPARLYGRKSSGAEVEILLLEERKFNCWLALVKPGKRFKKGTQIIFEGLGIRNLGIKNSPHYPLSPEGFPPSPVPNPHQLTATVLETDKATGGRLLQFDLPEGESLVQLLDKFGEIPLPPYITASQAADEQYQTVYAEQPGAIAAPTAGLHFTPELLEKLRDRNINQAFITLHVGVGTFRPVEVEDVATHQMHEEWIEIPAATVAQIKATKAAGGRIIAVGTTVVRALEGAAASGDLQEFCGKTNLFIYPGYKWQVVEGLITNFHLPRSSLLMLVSALIGRERLLNIYQEAIASQYRFYSFGDAMLILPEARGVNSH

SEQ ID NO: 73363 - protein, 349 aa, unidentified
  source 1..349: note = Trinickia caryophylli
  REGION 1..349: note = tr|A0A1X7CCA8|A0A1X7CCA8_TRICW S-adenosylmethionine:tRNA ribosyltransferase-isomerase; OS = Trinickia caryophylli OX=28094 GN=queA PE=3 SV=1
MFTLSDFDFNLPPELIAQEALPERSASRLLEVDAAHAPARLVDRRFAELPDCLAPGDLLVFNDTKVIKARFFGTKASGGKIEVLIERLTGERTALAQIRASKSPAPGTTLRLADAFDVSVGERVEPFYTLHFPAPCLALIERHGRLPLPPYIEHDPDSTDEARYQTVFARNPGAVAAPTAGLHFDDAVLARLEARGIERATLTLHVGAGTFQPVRVENIAEHKMHSEWYQLPQALVDKIAATRARGGRVVAVGTTSLRALEAAARDAEAAGGPLAAATAETDIFITPGYRFRLVDRLVTNFHLPKSTLLMLVSAFAGMDTIRAAYRHAVEAHYRFFSYGDAMLLTRRDG

SEQ ID NO: 73364 - protein, 349 aa, unidentified
  source 1..349: note = Trinickia soli
  REGION 1..349: note = tr|A0A2N7W8G2|A0A2N7W8G2_9BURK S-adenosylmethionine:tRNA ribosyltransferase-isomerase; OS = Trinickia soli OX=380675 GN=queA PE=3 SV=1
MFTLSDFDFNLPPELIAQTALPERSASRLLEVDGATAPARLVDRRFAELPECVAPGDLLVFNDTKVLKARFFGQKASGGKIEVLVERLTGERTALAQIRASKSPAPGTTLMLADAFEVTVGERVEPFYTLHFPDDCLSLIERHGRLPLPPYIEHDADATDETRYQTVFAQNPGAVAAPTAGLHFDEALLARLDAHGVERATLTLHVGAGTFQPVRVENIAEHKMHSEWYRLPQTLVDKIAATRARGGRVIAVGTTSMRALESAARDAEDAGRPLAATSAETDIFITPGYRFRIVDRLVTNFHLPKSTLLMLVSAFAGMETIRDAYRHAIEQRYRFFSYGDAMLLTRAER

SEQ ID NO: 73365 - protein, 351 aa, unidentified
  source 1..351: note = Trinickia sp.
  REGION 1..351: note = tr|A0A4U1IBW7|A0A4U1IBW7_9BURK S-adenosylmethionine:tRNA ribosyltransferase-isomerase; OS = Trinickia sp. 7GSK02 OX=2571161 GN=queA PE=3 SV=1
MFTLSDFDFNLPPELIAQTALKERSASRLLEVDNSSDPARLVDRQFAELPECIAPGDLLVFNDTKVLKARFFGQKASGGKVEVLVERLTGERTALAQIRASKSPAAGTTIKLAGAFDVTVGERVEPFYTLHFPDDCLTLIEQYGRLPLPPYIEHDPDATDETRYQTVFAQNPGAVAAPTAGLHFDDALIARLDARGVERATLTLHVGAGTFQPVRVENIAEHKMHSEWYRLPQTLVDKIAATRARGGRVIAVGTTSMRALEAAARGAEAAGRQLAATTAETDIFITPGYRFRVVDRLVTNFHLPKSTLLMLVSAFAGVETIRGAYQHAIEERYRFFSYGDAMLLTRREDRA

SEQ ID NO: 73366 - protein, 357 aa, unidentified
  source 1..357: note = Trinickia symbiotica
  REGION 1..357: note = tr|A0A2N7WZ29|A0A2N7WZ29_9BURK S-adenosylmethionine:tRNA ribosyltransferase-isomerase; OS = Trinickia symbiotica OX=863227 GN=queA PE=3 SV=1
MFTLSDFDFNLPPELIAQEALPQRSASRLLEVVAPRPGGDPQTATDTMRLVDRRFAELPDCLTAGDLLVFNDTKVLKARFFGVKASGGRIEVLIERLTGERTALAQIRASKSPTLGTTLRLADAFDVTVGERVEPFYTLHFPEACLDLIERFGRLPLPPYIEHDPDATDEARYQTVYARNPGAVAAPTAGLHFDDALLAELDRRGIERATLTLHVGAGTFQPVRVENIAEHKMHSEWYHLPQTLADKIAATRARGGRVVAVGTTSLRALEAAARDAEAAGRPLAATSAETDIFITPGYRFRVVDRLITNFHLPKSTLMMLVSAFAGMATIREAYRHAIEARYRFFSYGDAMLLTRSH

SEQ ID NO: 73367 - protein, 364 aa, unidentified
  source 1..364: note = Trinickia symbiotica
  REGION 1..364: note = tr|A0A2N7X677|A0A2N7X677_9BURK S-adenosylmethionine:tRNA ribosyltransferase-isomerase; OS = Trinickia symbiotica OX=863227 GN=C0Z20_08055 PE=3 SV=1
MRTEDFYFTLEPALVPEFPVELRGHQRDSGRMIVLDRECGTIAHEVFSSICDHVRGGDLLVLNDSYVLPNMLLFQNGNHAAWVIICGHEPEATAIVAIRPIDVPESGLVLVSADDDRLRCTLTAPLPRGLWRATFDPMDRLTQTLEQYGQRFYRSALPAERGMVDTSPVPSSWRSTPAAYRSVYAKTPGSLHIPSAGLHFSEALLGRLAGKGVEIAYITLHVGATELLSVRAIGEPEIEQHQVRPEFFSVGPIAAAQINRAMDEGRRVVAVGTTVLRTLETLAVGNTSKAAIEPQTGWTGLYIYPGFRFNVADALLTNLHRPRSTHLVLTAAFGGYDLVMKSYAEMIAAGGYEFDMFGDSMLIV

SEQ ID NO: 73368 - protein, 367 aa, unidentified
  source 1..367: note = Tritonibacter horizontis
  REGION 1..367: note = tr|A0A132BST9|A0A132BST9_9RHOB S-adenosylmethionine:tRNA ribosyltransferase-isomerase; OS = Tritonibacter horizontis OX=1768241 GN=queA PE=3 SV=1
MGNREPWTFVLHRSIARFMKLSDFDFDLPEDLIATRPAVPRSSARLLVAEQDRLSDARVSDLTQWLRPGDRLVLNDTRVIPARLSGQRHRLSAQGPVAARIEVTLLEPQADGAWTALLKPLKKIKPGEEIVFGADLRAELVAVIDGQVRLQFNLTGEDFDAALSEAGAMPLPPYIAAKRPADAQDKTDYQTVWAKHAGAVAAPTASLHFDAPLLEALADMGVAFTYVTLHVGAGTFLPVKVEDVTTHKMHAEWGQVSQTAAEEISETRAAGHRVIPVGTTALRLIESAARATGAIAPWEGETDIFIYPGFTFRVADALMTNFHLPKSTLMMLVSALMGQERMRQVYAHAVQERYRFFSYGDASLLFP

SEQ ID NO: 73369 - protein, 352 aa, Tropicibacter naphthalenivorans
  REGION 1..352: note = tr|A0A0P1G570|A0A0P1G570_9RHOB S-adenosylmethionine:tRNA ribosyltransferase-isomerase; OS = Tropicibacter naphthalenivorans OX=441103 GN=queA PE=3; SV = 1
MKLSDFDFDLPDRLIATRPAKPRPSARLLVAEGDQITDARVYDILGWLRPGDRLVLNDTKVIPARLSGTRARDTAQGPMQAKIEVTLLEPRADGLWSALVKPLKKVKEGEEIKFSNDLSAILEVKDEGQGLLRFNLSGDDFDAALNAAGAMPLPPYIAAKRPADAQDRTDYQTVWARNTGAVAAPTASLHFDQDLLQKLADHGVSFTHVTLHVGAGTFLPVKVEDVTTHKMHGEWGEVSPEAAAQIQATKQAGGRVIPVGTTALRLIETAARAGQIAPFQGVTDIFIYPGFDFHVTDALMTNFHLPKSTLLMLVSALMGQDRIRKIYDHALSEEYRFFSYGDASLLIPPSAD

SEQ ID NO: 73370 - protein, 352 aa, unidentified
  source 1..352: note = Tropicibacter phthalicicus
  REGION 1..352: note = tr|A0A238JG94|A0A238JG94_9RHOB S-adenosylmethionine:tRNA ribosyltransferase-isomerase; OS = Tropicibacter phthalicicus OX=1037362 GN=queA PE=3 SV=1
MQLSDFDFDLPETLIATRPARPRSSAKLLVAEGDKIHDRVVTDLLDWLRPGDRLVLNDTRVIPARLSGTRHRVSAQGETEARIEVTLLEPRADGCWSGLVKPLKKIKEGEEVVFSPELSAVLEAKEDGQGVLRFNLTGEDFDTALNAAGAMPLPPYIAAKRAADEQDHEDYQTVWAKNTGAVAAPTASLHFDDALLKALREKGVTFTHVTLHVGAGTFLPVKVDDITTHKMHGEWGEVSDQAVAEIKATQEAGGRVIPVGTTALRLIETAARSGDIAPFKGVTDIFIYPGFTFHVADALMTNFHLPKSTLMMLVSALIGKDRIMDIYAHAIENQYRFFSYGDASLLIPDRSL

SEQ ID NO: 73371 - protein, 348 aa, Tropicimonas isoalkanivorans
  REGION 1..348: note = tr|A0A1I1E7X5|A0A1I1E7X5_9RHOB S-adenosylmethionine:tRNA ribosyltransferase-isomerase; OS = Tropicimonas isoalkanivorans OX=441112 GN=queA PE=3 SV=1
MRLSDFDFALPDELIATRPASPRSSARLLVARPDRLTDAHVRDLPDFLRPGDRLVLNNTRVIPARLSGVRRRAGVEGETEARIEITLLEPRSDGTWSALAKPAKKVRDGEEIHFGPGFSARVLSRAEGQLALAFALEGDAFQAALESAGAMPLPPYISARRPADDRDRTDYQTVFARHSGAVAAPTASLHFDRPLLQRIAEMGVDFTEVTLHVGAGTFLPVKTDDVSRHRMHAEWGEVSEQAADEVNATRAAGGRIIPVGTTACRLLETAATDDGLAAFRGDTDIFIRPGHRFRATDALMTNFHLPKSTLMMLVSALMGRERMMQVYAHAVAQRYRFFSYGDASLLLP

SEQ ID NO: 73372 - protein, 348 aa, unidentified
  source 1..348: note = Tropicimonas sediminicola
  REGION 1..348: note = tr|A0A239GP23|A0A239GP23_9RHOB S-adenosylmethionine:tRNA ribosyltransferase-isomerase; OS = Tropicimonas sediminicola OX=1031541 GN=queA PE=3 SV=1
MRLSDFDFTLPEDLVATRPANPRTSARLLVAGPDTITDARVSNLPDFLRPGDRLVLNNTKVIPARLSGIRRRDGGEGVTEARIEVTLLDPRGDGSWQALAKPAKKVRDGEEIHFGPGFSARVLGRSEGQLTLGFTLKGDDFDAALDAAGAMPLPPYIAAKRAADAQDRTDYQTVFARHSGAVAAPTASLHFDRPLLERIAAMGVDFTEVTLHVGAGTFLPVKVDDVSEHKMHAEWGEVTGAAAAEINATRAAGGRIIPVGTTACRLIESAATDAGLAPWRGETDIFIRPGFRFRATDALMTNFHLPKSTLMMLISALMGRERVMEIYDHAISERYRFFSYGDASLLIP

SEQ ID NO: 73373 - protein, 351 aa, Tropicimonas sp.
  REGION 1..351: note = tr|A0A4Q3ZNR9|A0A4Q3ZNR9_9RHOB S-adenosylmethionine:tRNA ribosyltransferase-isomerase; OS = Tropicimonas sp. IMCC6043 OX=2510645 GN=queA PE=3 SV=1
MRLSDFDFDLPEELIATRPASPRPSARLLVAPGPVAIEDAHVFDLPRFLRPGDRLILNNTKVIPARLSGVRRRVSAQGATEARIEVTLLEPRGDGSWQVLAKPAKKLRDGEEIHFAPGFSARVLARAEGQLTLAFSLAGTEFDAALDAAGAMPLPPYIAARRAADARDRVDYQTIFARHSGAVAAPTASLHFDQALLEEIAAMGVAFTEVTLHVGAGTFLPVKVDDVRHHRMHAEWGEVTEAAAAEINATRAAGGRIIPVGTTACRLIESAAGASGVEPWRGETDIFIRPGFDFRITDGLMTNFHLPKSTLMMLVSALMGRERMMGIYAHAIAGRYRFFSYGDASLLLPGE

SEQ ID NO: 73374 - protein, 364 aa, Truepera radiovictrix
  REGION 1..364: note = tr|D7CTT7|D7CTT7_TRURR S-adenosylmethionine:tRNA ribosyltransferase-isomerase OS=Truepera radiovictrix (strain DSM 17093 / CIP 108686 / LMG 22925 / RQ-24); OX = 649638GN=Trad_2528 PE=3 SV=1
MSLTLSDLTFERPEHLQATEPPEQRGVPRDAVRLLVSTPEGHHGSCFANLANFLEPGDLLVVNRSATLPASLPAEGGFGSFVLNLATRYGRGPNAETWLAEPRWSFAEPGPLPLALGDVVTAGGLRATLVHPYPGLPRLWFVRFDGDVGAAMQRLGAPIRYGYVARAYPLATYQTLFADAPGSAEMPSAARPFSKRVLRCLAARGVGVARITLHTGVSSLEVTEYKAARHPLPPEPFEVPPETADAVRETKAAGGRVIAVGTTVVRALESAWDGTMKPARGFTRLYLHPGRAVNVVDGLLTGFHDPKASHLAMLYAVAGQALVRGAYAEAVREGYLWHEFGDSHLILPRSGEHPSMLRPSEGPA

SEQ ID NO: 73375 - protein, 341 aa, unidentified
  source 1..341: note = Tumebacillus algifaecis
  REGION 1..341: note = tr|A0A223CZE9|A0A223CZE9_9BACL S-adenosylmethionine:tRNA ribosyltransferase-isomerase; OS = Tumebacillus algifaecis OX=1214604 GN=queA PE=3 SV=1
MRVEEFDFHLPEELIAQHPLEERTASRLMTLNKRTGEIGHHRFSDLLDFLQPGDALILNNTRVLPARLYGVKSDTGAKVEFLLLKELEPNVWEVLVRPGKKLRIGAQVTFGDGLLTAEVLEKTEEGGRIVRFSFEGIFYEILDQLGQMPLPPYITEQLEDQERYQTVFSKHRGSAAAPTAGLHFTEDLLKQIEAKGIKIGFVTLHVGLGTFRPVSAETLDEHKMHAEWYHLPQETADLINATKAGGHRVVAVGTTACRTLETAGQKEGDLREASGWTDIFIYPGVEFKVVDALITNFHLPKSSLVMLVSALAGRESVLHAYAEAVREEYRFFSFGDAMFIY

SEQ ID NO: 73376 - protein, 340 aa, unidentified
  source 1..340: note = Tumebacillus avium
  REGION 1..340: note = tr|A0A1Y0IVA0|A0A1Y0IVA0_9BACL S-adenosylmethionine:tRNA ribosyltransferase-isomerase; OS = Tumebacillus avium OX=1903704 GN=queA PE=3 SV=1
MRVEEFDFHLPDELIAQHPLLERTASRLMTLNKRTGEIGHRRFSDLIEFLEPGDALILNDTRVLPARLYGVKSDTGAKVEFLLLKEMEPNVWEVLVRPGKKLRVGTQVTFGDGLLTAEVLDTTEEGGRIVRFSYEGMFYEILDQLGQMPLPPYITEQLDDQERYQTVFSKHRGSAAAPTAGLHFTKEFLEQIQAKGIQIGFVTLHVGLGTFRPVSADTLDEHKMHAEWYHLPQETADLIRETKAGGHRVIAVGTTACRTLETAGQKGEIREASGWTDIFIYPGVAFTVVDALVTNFHLPKSSLVMLVSALAGREAVLRAYAEAVREEYRFFSFGDAMFIY

SEQ ID NO: 73377 - protein, 343 aa, unidentified
  source 1..343: note = Tumebacillus flagellatus
  REGION 1..343: note = tr|A0A074LV00|A0A074LV00_9BACL S-adenosylmethionine:tRNA ribosyltransferase-isomerase; OS = Tumebacillus flagellatus OX=1157490 GN=EL26_05005 PE=3; SV = 1
MEARRLHHFQLPEALNATTPPERRGLRRDHVRMMVLDRKTGATAHAKFFQLDQFLKKDDLLLLNASRTVPAVLQAVRLRSGEEVEIRLAHRLDDSVWQALVVAEGVAVGERFIFSPSLTADVVKEQGSGPFVTLQFSREGAALYDEIYQLGEPVRYEYIHTDWSLDYYQTVYASVPGSVEMPSAGRAFSWEMLFRLQRKGVKIAYMQLHTGLSYLLDDSWRHDPRENHEQYMIPQETVEAVEQCKAAGGRVIAVGTTVVRSLETAVDAEGVLRAQSGWTNLYIHEGFPLRVVDGLITGFHEPEASHLDLLSAFVDPSLLYTAYQEAIDREYLWHEFGDMNLIL

SEQ ID NO: 73378 - protein, 342 aa, unidentified
  source 1..342: note = Tumebacillus flagellatus
  REGION 1..342: note = tr|A0A074LR03|A0A074LR03_9BACL S-adenosylmethionine:tRNA ribosyltransferase-isomerase; OS = Tumebacillus flagellatus OX=1157490 GN=queA PE=3 SV=1
MRLDQFDFQLPEELIAQHPLEERTASRLMTLNKRTGETGNHMFSDLIDYLEEGDTLILNDTRVIPARLYGMKPDTGAKVEFLLLKEKESAPDTWEVLVRPGKKVRPGTTVSFGDGLLTAEVLDSTEEGGRIVRFSYDGIFYEVLERLGEMPLPPYITEQLEDDERYQTVFSKHRGSVAAPTAGLHFTQDYLAKIQAKGIRIGYVTLHVGLGTFRPVSVEDINEHKMHSEWYDMPQSTADLIRETKANGKRVVCVGTTACRTVETVGNKGEIAASSGWTDIFIYPGYEFKVVDALLTNFHLPKSSLMMLISALAGLENVMRAYEEAVRERYRFFSFGDAMFIY

SEQ ID NO: 73379 - protein, 343 aa, Tumebacillus permanentifrigoris
  REGION 1..343: note = tr|A0A316DA31|A0A316DA31_9BACL S-adenosylmethionine:tRNA ribosyltransferase-isomerase; OS = Tumebacillus permanentifrigoris OX=378543; GN = C7459_105101 PE=3 SV=1
MEARHLHQFHLPDALNATTPPERRGVRRDHVQMMVLDRATGQTQHETFFQLDRFLKPGDLLILNASRTVPAVLKATRLAGAEHVEVRLAHRLDESVWQALVVAQGVCIGERLRFSPTLEAEVVAQQTGRPFVTLQFSREGAALYDEIYQLGEPVRYEYIHTDWGLDYYQTVYASVPGSVEMPSAGRAFSWELLFKLQRKGVRLAYMQLHTGLSYLLDDRWHQDPRENIEQYMIPQETVEAVEQCKAAGGRVIAVGTTVVRSLETAVDTDGILRAQSGWTNLYIHDRYPLRVVDGLITGFHEPEASHLDLLSAFVKPELLYAAYQEAIDRQYLWHEFGDMNLIL

SEQ ID NO: 73380 - protein, 340 aa, Tumebacillus permanentifrigoris
  REGION 1..340: note = tr|A0A316D5F2|A0A316D5F2_9BACL S-adenosylmethionine:tRNA ribosyltransferase-isomerase; OS = Tumebacillus permanentifrigoris OX=378543 GN=queA PE=3; SV = 1
MRLDQFDFELPEELIAQHPLAERTASRLMTLNKRTGETGNHKFADLIEYLQAGDTLILNDTRVIPARLYGVKPDTGAKVEFLLLKETGIDTWEVLVRPGKKVRPGTTVSFGDGLLTAEVLDSTEEGGRIVRFSYDGIFYEVLDRLGEMPLPPYITAQLDDNERYQTVFNKHRGSVAAPTAGLHFTTEFLDRLAFKGIRIGFVTLHVGLGTFRPVAAEDILDHKMHAEYYDMPAETADLISATKAAGGRVICVGTTACRTVESVGMKGEVTASSGWTDIFIHPGYEFKLVDALLTNFHLPKSSLMMLISALAGHENVMRAYEEAVRERYRFFSFGDAMFIY

SEQ ID NO: 73381 - protein, 340 aa, Tumebacillus sp.
  REGION 1..340: note = tr|A0A4R2QZ76|A0A4R2QZ76_9BACL S-adenosylmethionine:tRNA ribosyltransferase-isomerase; OS = Tumebacillus sp. BK434 OX=2512169 GN=queA PE=3 SV=1
MRVEEFDFHLPEKLIAQHPLLERTASRLMALNKRTGEIGHHRFSDLIEFLQPGDALILNDTRVLPARLYGVKSDTGAKVEFLLLKELEPNVWEVLVRPGKKLRVGAQVSFGDGLLTADVLDTTEEGGRIVRFSYEGMFYEILDRLGQMPLPPYITEQLEDQERYQTVFSKHRGSAAAPTAGLHFTSEFLEQIAAKGVRIGFVTLHVGLGTFRPVSADTLDEHKMHAEWYHLPQVTADLIRETKAAGHRVIAVGTTACRTLETAGQKGEIREASGWTDIFIYPGVEFTVVDALVTNFHLPKSSLVMLVSALAGREAVLRAYAEAVREEYRFFSFGDAMFIY

SEQ ID NO: 73382 - protein, 342 aa, Turicibacter sanguinis
  REGION 1..342: note = tr|D4W4J2|D4W4J2_9FIRM S-adenosylmethionine:tRNA ribosyltransferase-isomerase OS=Turicibacter sanguinis PC909 OX=702450 GN=queA PE=3 SV=1
MRVDQFDFELPDELIAQTPLKDRDTSRLMVLNKKTGEVKHEVFHDVLNYLRPNDTLVLNNTKVMPARLMGQKPDTGASIEVLLLKQEQQDCWETLVKPAKRVKVGTIVEFGDGRLKAECISTGDMGKRVFKFMYDGIFYEVLDSLGEMPLPPYITEKLDDRDRYQTVFAKEIGSAAAPTAGLHFTPELLEEIQAKGVKIAYVTLHVGLGTFRPVSVDSVEEHDMHAEFYQMSQETADILNQTHELGGRIITVGTTSTRTLETIARDHGKFVACEGWTDIFIYPPYQFKGIDGMITNFHLPKSTLIMLISSLAGQDAVMNAYKIAVEEKYRFFSFGDAMLIIE

SEQ ID NO: 73383 - protein, 342 aa, Turicibacter sanguinis; identical to SEQ ID NO: 73382
  REGION 1..342: note = tr|A0A173QUW0|A0A173QUW0_9FIRM S-adenosylmethionine:tRNA ribosyltransferase-isomerase; OS = Turicibacter sanguinis OX=154288 GN=queA PE=3 SV=1

SEQ ID NO: 73384 - protein, 343 aa, Turicibacter sp.
  REGION 1..343: note = tr|A0A0X8G2I5|A0A0X8G2I5_9FIRM S-adenosylmethionine:tRNA ribosyltransferase-isomerase; OS = Turicibacter sp. H121 OX=1712675 GN=queA PE=3 SV=1
MRVEQFDFELPEELIAQTPLKDRDTSRLMVLNKKTGEVNHEVFHDIINHLRPNDTLVLNNTKVMPARLIGQKPDTGASIEVLLLKQEEQDCWETLVKPAKRVKIGTIVEFGDGRLKAECIGTGDMGKRIFKFVYEGIFYEVLDSLGEMPLPPYITEKLDDRDRYQTVFAKEIGSAAAPTAGLHFTTELLDQIKAKGINITYVTLHVGLGTFRPVSVDSVEEHDMHAEFYQMSQETADVLNATHEKGGRIITVGTTSTRTLETIARDHGKFIACEGWTDIFIYPPYQFKGIDGMITNFHLPKSTLIMLISALAGQESVMNAYRIAVEEKYRFFSFGDAMLIIEE

SEQ ID NO: 73385 - protein, 353 aa, unidentified
  source 1..353: note = Turicimonas muris
  REGION 1..353: note = tr|A0A227KPE2|A0A227KPE2_9BURK S-adenosylmethionine:tRNA ribosyltransferase-isomerase; OS = Turicimonas muris OX=1796652 GN=queA PE=3 SV=1
METEQYLSDFDFELPEELIAQFPLADRTASRLLHVSKDGKIEDLTFRDILKLLRKDDLLVFNNTKVIKARLNGNKESGGAVEAMLERILGEYEVLTMLRSSKSPKPGTKLFFVKDGVEGRAEAEVTGRQGEFFLLQFTEPVLDVLEKFGKVPLPPYITHAASKSDESRYQTVYAKEPGAVAAPTAGLHFTDELLKDIKALGCEEVFVTLHVGAGTFQPVRSEKLSEHKMHSEWYHIDQKTADAINKALKEGRRVVCVGTTSLRAVESAAALEEDNQVKAGIHETRLFIKPGYKFKVCGAMVTNFHLPKSTLVMLVSALSGKDEIFKAYKHAVEEKYRFFSYGDACFLEKKETV

SEQ ID NO: 73386 - protein, 363 aa, Turneriella parva
  REGION 1..363: note = tr|I4B2F9|I4B2F9_TURPD S-adenosylmethionine:tRNA ribosyltransferase-isomerase OS=Turneriella parva (strain ATCC BAA-1111 / DSM 21527 / NCTC 11395 / H) OX=869212 GN=T urpa_0815 PE=3 SV=1
MKDFWPEEYADLNFDLPEELIATHPVEPADHARLMIIDRVRGTITHSRFDKLSEILRAGDAIFYNATQVEARRVYLKKPDAEKTFECVFLKSVPPPDLPPLAGGGAEGRGGTWQVLMRGIRRLKDGQVLQAVKDPAFEFLLHRADDKIFVTTHRPLGAADFARIGEMPIPPYMRRAATADEADTYQNFFKHQIAEKEKVQGSAASPTAALHFTTGLHMKLREQGVDLYPLCLDIGYGTFAPLTAENFSQGELHAEHYYIPPLTAEKFAGAVTGRKIALGTTSLRCLISYQRSGKAEGETALFVTPRDNVSGIDGLITNFHLPQSSLLLLTAAVCRRELLAQAYRAAIRERYRFYSYGDAMLII

SEQ ID NO: 73387 - protein, 384 aa, unidentified
  source 1..384: note = Tychonema bourrellyi
  REGION 1..384: note = tr|A0A2G4EWV9|A0A2G4EWV9_9CYAN S-adenosylmethionine:tRNA ribosyltransferase-isomerase; OS = Tychonema bourrellyi FEM_GT703 OX=2040638 GN=queA PE=3; SV = 1
MTEIDWSLDGYDYELPPDRIAQNPVVPRDSSRLLVVDSPSSQQHRIFRDLPDLLNPGDLLVLNNTRVIPARLYGHKPNGPAVEILLMEERQHNCWLALVKPGKRLKLGAKIEFDPICNEESAGPCCCLSQATATLSDRLTATVIERDDATGGRLLEFNLPTEMSLIPFLDEYGHVPLPPYIDNSQAAPEQYQTVYADRLGAIAAPTAGLHFTKELFSRLEQRGIETTFVTLHVGVGTFRPVEVEDVTTHKMHGEWVEVSPATVEKIRETKARGGRIIAVGTTAVRALEGAAAATETPIGDFPLQPFSGQTNLFIYPGYKWRVVDGMITNFHLPRSTLLMMLSAMIGRSRVLDLYLEAIAQQYRFYSFGDAMLILPEAVFDQIGD

SEQ ID NO: 73388 - protein, 353 aa, unidentified
  source 1..353: note = Tyzzerella nexilis
  REGION 1..353: note = tr|B6FSR3|B6FSR3_9FIRM S-adenosylmethionine:tRNA ribosyltransferase-isomerase OS=Tyzzerella nexilis DSM 1787 OX=500632 GN=queA PE=3 SV=1
MAALDKKGSFKKMRKEDFYFDLPEELIAQDPLEDRSSSRLLVLDKETGKVEHHVFREIIDYLQEGDCLVINDTKVIPARLIGSKIGTDAKIEVLLLKRKENDVWETLVKPGKKAKVGTRISFGDGLLVGEVVDIVEEGNRLIHFEYEGIFEEILDQLGQMPLPPYITHQLEDKNRYQTVYAKHSGSAAAPTAGLHFTPELLKEIEEKGVQIARVTLHVGLGTFRPVKVDNILEHHMHSEFYQIDEEAAEKINRAKESGHRVICVGTTSCRTIESAADKNGKLHATNGWTEIFIYPGYEFKVLDCLITNFHLPESTLVMLVSALAGREQVLSAYEEAVKEKYRFFSFGDAMFIK

SEQ ID NO: 73389 - protein, 341 aa, unidentified; identical to SEQ ID NO: 65445
  source 1..341: note = Tyzzerella nexilis
  REGION 1..341: note = tr|A0A413J5J8|A0A413J5J8_9FIRM S-adenosylmethionine:tRNA ribosyltransferase-isomerase; OS = Tyzzerella nexilis OX=29361 GN=queA PE=3 SV=1

SEQ ID NO: 73390 - protein, 345 aa, unidentified
  source 1..345: note = Tyzzerella sp.
  REGION 1..345: note = tr|A0A1Y4URI2|A0A1Y4URI2_9FIRM S-adenosylmethionine:tRNA ribosyltransferase-isomerase; OS = Tyzzerella sp. An114 OX=1965545 GN=queA PE=3 SV=1
MKTSDFYYDLPEELIAQEPLKDRSSSRLLVLDNETGEIEHRIFKDITEYLQEGDCLVINDTKVLPARLIGERVGTGARIEILLLVRKNIDTWEVLVKPGKKARPGDKVSFGGGKLVAEILETIEGGNRIIKFHYDGVFENILEELGEMPLPPYITHKLEDKNRYQTVYAEHDGSAAAPTAGLHFTPELLEKIKNMGVKIAHVTLHVGLGTFRPVKVDDVTNHEMHSEYYVVEKSQADIINDTKKNGGRVIAVGTTSTRTLESVTDENGVVHEGNGWTKIFIYPGYKFKAIDCLITNFHLPESTLVMLVSALAGKENIFKAYEIAVKEKYRFFSFGDAMFIKVGKK

SEQ ID NO: 73391 - protein, 345 aa, unidentified
  source 1..345: note = Tyzzerella sp.
  REGION 1..345: note = tr|A0A352URU4|A0A352URU4_9FIRM S-adenosylmethionine:tRNA ribosyltransferase-isomerase; OS = Tyzzerella sp. OX=2053632 GN=queA PE=3 SV=1
MKTSDFYFDLPEELIAQEPLADRASSRLMVVHKDSGKREHRHFRDIKEYLRAGDCLVINNTKVLPARLYGERVGTGAAIEILLLVRKDMDTWEVLVRPGKKARPGDRISFGGGKLIAEVLEVIEGGNRIIKFEYEGVFENILEELGEMPLPPYITHKLEDKNRYQTVYAEHEGSAAAPTAGLHFTPELLKEIEDMGVRIAHVTLHVGLGTFRPVKVEDVLEHEMHSEYYVVEPEQAAIMNETKKNGGRIIAVGTTSTRTLESVTDENGVIQPKSGWTKIFIYPGYTFKAVDCLVTNFHLPESTLIMLVSALMGKDLVMESYAEAVKERYRFFSFGDACLFLAKEK

SEQ ID NO: 73392 - protein, 345 aa, Uliginosibacterium sp.
  REGION 1..345: note = tr|A0A2N4XT26|A0A2N4XT26_9RHOO S-adenosylmethionine:tRNA ribosyltransferase-isomerase; OS = Uliginosibacterium sp. TH139 OX=2067453 GN=queA PE=3; SV = 1
MMLTLDDFDYFLPPELIAQTALPDRSASRLLVAGPDSLEDRVFRDLPGLLRAHDLLVLNDSRVLHARLFGHKESGGQVEVMVERPIGDHEVLAMIRASKSPKPGGRIRLMEAFDVEVIGRAGANQEFFQLRFPTDASAVDYIERYGKLPLPPYIEHSADSGDETRYQTVYSRELGSVAAPTAGLHFDDELFAALDAKSVRRAFVTLHVGAGTFQPVREHDLSKHQMHREYYSIPQDTVDAIATTRAAGGRVICVGTTALRALESAAQHGEVRAGSDETGIFIMPGYEFRVADALITNFHLPKSTLLMLVSALAGVDTIRQAYAHAIANRYRFFSYGDAMFLNRAR

SEQ ID NO: 73393 - protein, 351 aa, Ulvibacter antarcticus
  REGION 1..351: note = tr|A0A3L9YGE7|A0A3L9YGE7_9FLAO S-adenosylmethionine:tRNA ribosyltransferase-isomerase; OS = Ulvibacter antarcticus OX=442714 GN=queA PE=3 SV=1
MGMKLSNFQFNLPEELLAEYPADNRDESRLMVLNRKEKTIEHKMFKDLIDYFEEDDVLVLNNTKVFPARLFGNKEKTGARIEVFLLRELNSETRLWDVLVDPARKIRIGNKLYFGEDETLVAEVIDNTTSRGRTLRFLFDGSYEEFRSKLTELGETPLPKYIKRDVEPEDAERYQTIFAKNEGAVAAPTAGLHFSKHLLKRLEIKGVDFAEVTLHVGLGTFSAVEVEDLSKHKMDSEEMIIDEPTAKIINRGIERKKRVCAVGTTAMRALESSVSSGHTLNAYSGWTNKFIFPPYDFSIANAMVTNFHTPKSTLLMMVAAFAGHEFIKEAYAEAIKEKYRFYTYGDAMLII

SEQ ID NO: 73394 - protein, 351 aa, Ulvibacter litoralis
  REGION 1..351: note = tr|A0A1G7C4U5|A0A1G7C4U5_9FLAO S-adenosylmethionine:tRNA ribosyltransferase-isomerase; OS = Ulvibacter litoralis OX=227084 GN=queA PE=3 SV=1
MGMKLSAFQFNLPDELLAEYPADNRDEARLMVLNRKEQTIEHKMFKDLIDYFEEDDVLVLNNTKVFPARLFGNKEKTGARIEVFLLRELNPETRLWDVLVDPARKIRIGNKLYFGDDETLVAEVIDNTTSRGRTLRFLFDGSYEEFRNKLTELGETPLPKYIKREVEPEDAERYQTIFAKNEGAVAAPTAGLHFSKHLLKRLEIKGIDFAEVTLHVGLGTFSSVEVEDLSKHKMDSEEMIIDEAAAKIINNGIERKKRVCAVGTTAMRALESSVSSGYRLNAYSGWTNKFIFPPYDFSIANAMITNFHTPKSTLLMMVSAFAGHDFIKKAYDEAIKEKYRFYTYGDAMLII

SEQ ID NO: 73395 - protein, 349 aa, Ulvibacter sp.
  REGION 1..349: note = tr|A0A167F5V9|A0A167F5V9_9FLAO S-adenosylmethionine:tRNA ribosyltransferase-isomerase; OS = Ulvibacter sp. LPB0005 OX=1763537 GN=queA PE=3 SV=1
MKLSNFNFELPEELLAEYPAPNRDEARLMVLNRKEKTIEHKMFKDLIDYFNEDDVLVLNNTKVFPARLFGNKEKTGARIEVFLLRELNPETRLWDVLVDPARKIRIGNKLYFGDDESLVAEVIDNTTSRGRTLRFLFDGSYEEFRNKLTELGETPLPKYIKREVEPEDADRYQTIFAKNEGAVAAPTAGLHFSKHLLKRLEIKGVNFAEVTLHVGLGTFSPVEVEDLSKHKMDSEEMSVNDAAAEIINTGINRKKRVCAVGTTAMRALESSVSSDHMLNPYSGWTNKFIFPPYDFSIANAMVTNFHTPKSTLLMMISAFAGHDFIKEAYAEAIKEKYRFYTYGDAMLII

SEQ ID NO: 73396 - protein, 351 aa, Ulvibacter sp.
  REGION 1..351: note = tr|A0A2N0EQS4|A0A2N0EQS4_9FLAO S-adenosylmethionine:tRNA ribosyltransferase-isomerase; OS = Ulvibacter sp. MAR_2010_11 OX=1250229 GN=queA PE=3 SV=1
MGMKLSNFSFNLPPELLAEYPAPNRDESRLMVLNRKEKTIEHKMFKDLINYFNEDDVLVLNNTKVFPARLFGNKEKTGARIEVFLLRELNSETRLWDVLVDPARKIRIGNKLYFGDDESLVAEVIDNTTSRGRTLRFLFDGSYEEFRSKLTELGETPLPKYIKREVEPEDAERYQTIFAKTEGAVAAPTAGLHFSKHLLKRLEIKGINFAEVTLHVGLGTFSPVEVEDLSKHKMDSEEIIIGEDAVGVINNGIAKKRRVCAVGTTVMRALESSVSSDHTLNAYSGWTNKFIFPPYDFSIANTMVTNFHTPKSTLLMMVAAFAGHEFIKEAYAEAIKEKYRFYTYGDAMLII

SEQ ID NO: 73397 - protein, 352 aa, Umboniibacter marinipuniceus
  REGION 1..352: note = tr|A0A3M0A5M7|A0A3M0A5M7_9GAMM S-adenosylmethionine:tRNA ribosyltransferase-isomerase; OS = Umboniibacter marinipuniceus OX=569599 GN=queA PE=3 SV=1
MKRSSFSFELPPHLIADMPMSERTNSRLLKLDGETGDTEDLGFRDILSLINAGDLLVFNDTRVIPARLFAQKATGGKLEVLVERVLSEDSVLAHIRSSKSPKEGSIIKFPDDANAQAEMVGRDGALFKLVFNQPVLPLLDRIGHMPLPPYIERSDNDEDKERYQTVYNRAPGAVAAPTAGLHFDEALLAELREKGVETAFVTLHVGAGTFQPVRADDIESHEMHSEWVEVNDSVVEAVKQTKARGGRVIAVGTTSVRSLESAAQSGQLEPMSDDTSIFIYPGKSFNVVDALITNFHLSESTLIMLVSAFAGYHHTMSAYQHAIAEEYRFFSYGDAMFITRNNAANAEEVPNA

SEQ ID NO: 73398 - protein, 355 aa, unidentified
  source 1..355: note = Unknown
  REGION 1..355: note = tr|E0XYT8|E0XYT8_9BACT S-adenosylmethionine:tRNA ribosyltransferase-isomerase OS=uncultured Acidobacteria bacterium HF0770_27F21 OX=710730 GN=queA PE=3 SV=1
MRIELFDYHLPADLIAQSPPERRDESRLLSLIRGVTDKPSEYRFAEVPELLREGDVLIVNDAMVAPQRLYAQRTTGGAVEILLLDDAGASVGSQGSVWEAMIRGGKRLRPGEILYLDDCATHLVIHGETKKGRHLVELPANYRAEEVLDRWGQMPLPPYIRRYRGDEHGTIDRERYQTVYAREPGAVAAPTAGLHFTQALLEKIERDGVKIETLTLKVGTGTFQPVRVGQVAEHRMESESYVLPDQCVSAIVAAKAKQGRVIGVGTTVVRTLEHAARASDGIENAAGAGKADIFIYPGFRFHVVDAMLTNFHLPRSTPILMAAAFAGRERLLQAYEFAVRQRFRFYSYGDAMLIT

SEQ ID NO: 73399 - protein, 347 aa, unidentified
  source 1..347: note = Acidobacteriales bacterium
  REGION 1..347: note = tr|E0XUI5|E0XUI5_9BACT S-adenosylmethionine:tRNA ribosyltransferase-isomerase OS=uncultured Acidobacteriales bacterium HF0200_23L05 OX=710732 GN=queA; PE = 3 SV=1
MDLSEFGFHLPDELIAQEAEPTRDAARLMRLDRKTGEIEHHCVSDLADLLKPGDLIVVNDSRVIPARLLGRRDPGGGKAECLLLSRLDETRWNALVHPGQKLRQGARAVFEAGEHYLELEVLDCHFHGRRTIRLVSSGDDIETAIDAIGHTPLPPYIKREVQSVDRERYQTIFARKPGSVAAPTAGLHFTPELLARLITRGISRQAITLHVGYGTFEPVRTEKVEDHRVAAEHYYVSEGTAEAVNCALDEGRRIIAVGTTTTRTLEAVARLNGGRLRPGEGQTDLYIHGSFDFEVVGGLLTNFHLPRSSLLLLAAAFAGHERLLEAYGQAIARCYRFYSYGDAMLIL

SEQ ID NO: 73400 - protein, 350 aa, unidentified
  source 1..350: note = Alphaproteobacteria bacterium
  REGION 1..350: note = tr|A0A212JUK7|A0A212JUK7_9PROT S-adenosylmethionine:tRNA ribosyltransferase-isomerase; OS = uncultured Alphaproteobacteria bacterium OX=91750; GN = queA PE=3 SV=1
MRVDAFDFDLPRERIAERPASPRDAARLLHVRADALGDLHVRDLPDLVAPGDVIVVNDSRVIPARLYGLRMRPGVDPLRVEILLHKAEGGPDWRAFARPGKRLKAGDALDFGGGFRAEVTGKSPEGDVGVRFDRHGADLIAALEAHGEMPLPPYIHRDHGADDRDKVDYQTVYARAEGSVAAPTAGLHFTPELLARLDAKGAKRVAVTLHVGAGTFLPVKAEDTENHKMHAEWGTIAPEVAEAINAARAGGGRLLAVGTTATRILETAADGAGIVHPFAGETAIFLTPGYRFRAVDRLMTNFHLPKSTLFMLVSAFAGLERMQSAYAHAIATGYRFYSYGDSSLLEGAPR

SEQ ID NO: 73401 - protein, 347 aa, Anaerotruncus sp.
  REGION 1..347: note = tr|A0A1C6GP39|A0A1C6GP39_9FIRM S-adenosylmethionine:tRNA ribosyltransferase-isomerase; OS = uncultured Anaerotruncus sp. OX=905011 GN=queA PE=3 SV=1
MSQPLLKKDFYFDLPQELIAQHPIYPRDHSRLLQLDRTTGEIAHKHFYDIVDVLQPGDTLVVNDSKVLPARLYGHKEDTGAKAEVLLLKKQATEDLWECLVKPGRKIREGTKLVFGEGLLTGEVCKVCDDGNRIIRFACKGRSFYDVIDQIGQMPLPHYITAELEDKDRYQTVYAHERGSAAAPTAGLHFTEELLERLRQKGVVIARVTLHVGLGTFRPVKEENVLDHKMHTEHYVIPQETADAIALAKKNGKRVIAVGTTSCRTLESCYQKNGAVVPFEDDTSIFIYPGYTFGVIDGMITNFHLPESTLIMLVSALAGREPILNAYRVAVLEKYRFYSFGDAMLIL

SEQ ID NO: 73402 - protein, 363 aa, Avibacterium sp.
  REGION 1..363: note = tr|A0A486XER8|A0A486XER8_9PAST S-adenosylmethionine:tRNA ribosyltransferase-isomerase; OS = uncultured Avibacterium sp. OX=1936169 GN=queA PE=3 SV=1
MRVSDFYFDLPDALIARYPKADRSASRLLQLNGENGELFHRTFADVVDLINEGDLLIFNNTRVIPARMYGRKASGGKVEVLVERILSEDRFLAHIRSSKAPKEGAELFLGEDKLGEGKGIKMIMKARHDTLFELEMAEKSTALLDVLQQIGHMPLPPYIDRPDEDADKERYQTVYNKVPGAVAAPTAGLHFDNELLEKLKAKGVNFAFVTLHVGAGTFQPVRVENIEDHKMHAEYVEVPQETVDAILRTKANGKRVIAVGTTSVRSIESAALFSQENQSEQLLAPYFSDTSIFLYPGKKFLVVDALITNFHLPESTLIMLVSAFAGYKHTMQAYESAVQNGYRFFSYGDAMFITKNPNVTGLD

SEQ ID NO: 73403 - protein, 347 aa, unidentified
  source 1..347: note = Unknown
  REGION 1..347: note = tr|A0A126SXW4|A0A126SXW4_9BACT S-adenosylmethionine:tRNA ribosyltransferase-isomerase; OS = uncultured bacterium UPO42 OX=1776967 GN=queA PE=3 SV=1
MVSVAASLTLAAFDYELPPALIAQAPLPQRSASRLLVVNDCLHDRHIGDLPEQLQTGDLLVLNDSRVLHARLYGRKDSGGQVEVLVERIVGENEVLAQVRASKPPRPGSRLRLEDALEVEVGERGGEFYRLRLPGEALTLIERHGRLPLPPYITRAATAPDEARYQTVYARETGSVAAPTAGLHFDEALFDRLRARGVDLAHVTLHVGAGTFQPVRTDNLAAHRMHTERYTIPSATVAAIAQTRARGGRVVAVGTTTLRALEAAADDAGNVKVGAGETALFITPGFAFRVVDRLLTNFHLPRSTLLMLVSAFAGVEEIRAAYRHAIAERYRFFSYGDAMLLTRQDNA

SEQ ID NO: 73404 - protein, 149 aa, unidentified
  source 1..149: note = Unknown
  REGION 1..149: note = tr|A0A141RHL8|A0A141RHL8_9BACT S-adenosylmethionine:tRNA ribosyltransferase-isomerase (Fragment) OS=uncultured bacterium OX=77133 PE=3 SV=1
MRVADFSFELPESLIAHYPMPERSSCRLLSLDGPTGALTHGTFTDLLDKLNPGDLLVFNNTRVIPARLFGRKASGGKIEVLVERMLDDKRILAHIRASKAPKPGAELLLGDDESIKATMTARHDALFEVEFNDERTVLDILNAIGHMPL

SEQ ID NO: 73405 - protein, 352 aa, Bacteroides sp.; identical to SEQ ID NO: 64050
  REGION 1..352: note = tr|A0A1C5X885|A0A1C5X885_9BACE S-adenosylmethionine:tRNA ribosyltransferase-isomerase; OS = uncultured Bacteroides sp. OX=162156 GN=queA_1 PE=3 SV=1

SEQ ID NO: 73406 - protein, 405 aa, Bacteroides sp.
  REGION 1..405: note = tr|A0A1C5VPE9|A0A1C5VPE9_9BACE S-adenosylmethionine:tRNA ribosyltransferase-isomerase; OS = uncultured Bacteroides sp. OX=162156 GN=queA_2 PE=3 SV=1
MEDTKHIKISDYNYPLPDDRIAKFPLPVRDQSKLLVYRHGQISETHFTSLPDYLEPGTLMIFNNTKVIQARLHFRKETGALIEIFCLEPIEPNDYALNFQQTQHAAWLCMIGNLKKWKEGPLHKEMTVKGKTLTLTATRGACHGTSHWIDFTWDNPEVTFADILEFFGELPIPPYLNRETQESDKETYQTVYSKIKGSVAAPTAGLHFTERVLNALKEKGVDLEEVTLHVGAGTFKPVKSEEIEGHEMHTEYISVNRSTIEKLLAHGGEAVAVGTTSVRTLESLYYIGVTLSQHPDASQEELHVQQWQPYETHPALSTLEALQHILDYMDRHGLEALHTSTQIIIAPGYEYHIVKKMVTNFHQPQSTLLLLVSAFVKGNWRPIYDYALAHDFRFLSYGDSSLLIP

SEQ ID NO: 73407 - protein, 103 aa, unidentified
  source 1..103: note = Bacteroidetes bacterium
  REGION 1..103: note = tr|H5SMT8|H5SMT8_9BACT S-adenosylmethionine:tRNA ribosyltransferase-isomerase OS=uncultured Bacteroidetes bacterium OX=152509 GN=HGMM_F50F04C37 PE=3 SV=1
MQGKPSSSLPPLVWKEAESLPPPSEALATLAPFTGSTALYILPGYPFQLAQALVTNFHLPGSTLLALVEAFIGREGIEKVYTYALTEGFRFLSYGDTSLLWRI

SEQ ID NO: 73408 - protein, 364 aa, unidentified
  source 1..364: note = Unknown
  REGION 1..364: note = tr|E0XST0|E0XST0_9PROT S-adenosylmethionine:tRNA ribosyltransferase-isomerase OS=uncultured beta proteobacterium HF0130_04F21 OX=710819 GN=queA PE=3 SV=1
MKRNFRLEDFDYELPDNLIAQYPAKTRSESRLLNVDLSDKKNLNFEELSFVDLASKLKKDDLLIFNNSRVIPAKLNCVKSTGGSVEILITNKLQTEKENIFLCNAMLKPSKKIFLGQKLKIKGSSETLTIIENNLKSENNFVIEFKNPIDHILKNFGIVPLPPYIKRHPEKQDYTDYQNIFATTPGSIAVPTAGLHFDNLVFKKLAEKGVKYEFVTLHVGIGTFQPIRVVDISRHEMHSEFCSVSNNCAKAINKATRENRRIIAVGTTSLRVLESLASIEIQEKSHIKSVSPRSWRTNLFVKPGFKFQMVSGLITNFHLPKSTLLILVSTFLGHETCMRVYKEAIKKEFKFFSFGDAMMAIKPQ

SEQ ID NO: 73409 - protein, 341 aa, Blautia sp.; identical to SEQ ID NO: 64236
  REGION 1..341: note = tr|A0A1C5XEV6|A0A1C5XEV6_9FIRM S-adenosylmethionine:tRNA ribosyltransferase-isomerase; OS = uncultured Blautia sp. OX=765821 GN=queA PE=3 SV=1

SEQ ID NO: 73410 - protein, 341 aa, Blautia sp.
  REGION 1..341: note = tr|A0A1C5UY24|A0A1C5UY24_9FIRM S-adenosylmethionine:tRNA ribosyltransferase-isomerase; OS = uncultured Blautia sp. OX=765821 GN=queA PE=3 SV=1
MRTSDFYYELPQELIAQDPLEDRSSSRLMHLSMADGSIEHRHFRDILDYLNKGDTLVINDTKVIPARLYGHKEETGAVIEILLLKRRENDIWECLVKPGKKARPGAKITFGDGILKGEIIDVVDEGNRLIQFHYEGIFEEILDQLGEMPLPPYITHKLKDKNRYQTVYAKHEGSAAAPTAGLHFTKELLEQVKAKGVNIAHVTLHVGLGTFRPVKVDDVEQHHMHSEFYIVEEDQAKLINDTKKNGGRVIAVGTTSCRTLESATGEDGILKAGSGWTEIFIYPGYKFKMIGGLITNFHLPESTLVMLVSALAGKENIMHAYEVAVQERYRFFSFGDAMLIL

SEQ ID NO: 73411 - protein, 341 aa, Butyricicoccus sp.
  REGION 1..341: note = tr|A0A1C6GWG7|A0A1C6GWG7_9CLOT S-adenosylmethionine:tRNA ribosyltransferase-isomerase; OS = uncultured Butyricicoccus sp. OX=1193532 GN=queA PE=3; SV = 1
MKKSDFYFDLPERLIAQHPLEQRDASRLMVLDRRDGSVTHRHFRDLLEYVQPGDCMVFNNSRVIPARLMGHAVGHVTPIEVLLLTDKGDGLWECLTRPGKKTRTGVELTFGDGLLTATVEAVQPDGNRLIRFHYEGIFLEILDKLGTMPLPPYIKEKLDDPERYQTVYSKTPGSAAAPTAGLHFTTELLDALKAKGVKLAFVTLHVGLGTFRPVKEDEITDHIMHSEYYVMDEMTAGIINDTRAAGGKIWAVGTTATRTLETIAADDGTVRAQSGWTDIFIYPGYKFKAVDHLVTNFHLPESTLMMLISAFATREMVMNAYQEAIKEEYRFFSFGDSMLLY

SEQ ID NO: 73412 - protein, 342 aa, Butyricicoccus sp.
  REGION 1..342: note = tr|A0A1C5Y897|A0A1C5Y897_9CLOT S-adenosylmethionine:tRNA ribosyltransferase-isomerase; OS = uncultured Butyricicoccus sp. OX=1193532 GN=queA PE=3; SV = 1
MMKKSDFYFDLPERLIAQHPLEQRDASRLLVLDRTDGSVSHRHFRDLLAYVEPGDCMVFNNSRVIPARLMGHAVGHTTPIEVLLLTDKGEGLWECLTRPGRKTRTGVELTFGDGMLTATVEAVQPDGNRLIRFHHEGIFLEILDQLGTMPLPPYIKEQLDDPERYQTVYSKTPGSAAAPTAGLHFTPELLEALRKKGVKLAFVTLHVGLGTFRPVKEEEITDHVMHAEYYIMDAETAGLINGTRAAGGKIWAVGTTACRTLETIADESGQVRPQSGWTDIFIYPGYQFKAVDHLVTNFHLPESTLMMLISAFATREMVMNAYRQAIGEEYRFFSFGDSMLLY

SEQ ID NO: 73413 - protein, 340 aa, unidentified
  source 1..340: note = Atribacteria sp.
  REGION 1..340: note = tr|G3BMR7|G3BMR7_9BACT S-adenosylmethionine:tRNA ribosyltransferase-isomerase OS=uncultured Candidatus Atribacteria bacterium OX=263865 GN=queA PE=3 SV=1
MDITLFDYHLPQQYIAQEPLTKRDESRLMILDRKQKVIKHRKFYQLIDFLGPGDLLVLNDSKVIPARLLGYKKRTGGKVSALLINSISGCCWQALLKPGRKTPPGTELVFPPQLEAEVISKDQKEGIYLLKLKYKGKVDEILQEIGKIPTPPYIKKELKNPSSYQTVYARKDGSIAAPTAGIHFTYELLTKLKEKRIEIIYITLHIGRGTFELVKVDQVEKHQMKEELYTISSENAKIINQALIQKRRIIAVGTSVTRALESAFVKDKIAEGTSETKLFIYPGYNFKVIKALITNFHLPRSTPLMLAAAFAGKDFLMKAYHEAIHTKYRFYSFGDAMFII

SEQ ID NO: 73414 - protein, 340 aa, unidentified
  source 1..340: note = Atribacteria sp.
  REGION 1..340: note = tr|G3BMH0|G3BMH0_9BACT S-adenosylmethionine:tRNA ribosyltransferase-isomerase OS=uncultured Candidatus Atribacteria bacterium OX=263865 GN=queA PE=3 SV=1
MDITLFDFELPPSYIAQEPLKKRDDSKLMILDRKTGLVEHKKFFQIIDYLKPDDLLVLNDSKVVPVRLVGYKKKTGGKVEVLLIKSVSGYLWQVLLKPGRRTPPGTEIIFSSQLKGMVIGKDEKEGVYLLEIQIKGNFREILGKIGKMPTPPYIKKELQNPSSYQTIYANQEGSLAAPTAGIHFSKELLTEIERKGIEIIYLTLHIGRGTFELVRDNQVENHQMKEEWYSISSENARIINQAILDKRRIVGVGTSVTRTLESAFVQDRVSEGTRWTNLFIYPGYQFQVLGALVTNFHLPRSTPLLLAAAFAGKDLLLKAYREAIHKHYRFYSFGDAMFII

SEQ ID NO: 73415 - protein, 356 aa, Citrobacter sp.; identical to SEQ ID NO: 65347
  REGION 1..356: note = tr|A0A212ICF3|A0A212ICF3_9ENTR S-adenosylmethionine:tRNA ribosyltransferase-isomerase; OS = uncultured Citrobacter sp. OX=200446 GN=queA PE=3 SV=1

SEQ ID NO: 73416 - protein, 341 aa, unidentified
  source 1..341: note = Clostridiales bacterium
  REGION 1..341: note = tr|A0A212JWE8|A0A212JWE8_9FIRM S-adenosylmethionine:tRNA ribosyltransferase-isomerase; OS = uncultured Clostridiales bacterium OX=172733 GN=queA; PE = 3 SV=1
MRTSDFYYDLPPELIAQTPLDRRDDSRLLTLNKGTGETEHLHFYDLPGLLQPGDCLVLNDSRVLPARLLGHREPTGGAVEVLLLIDRGDKVWECLVRPGRKVKPGTKLSFGDSLLTGDVLEEVEGGNRLIRFHYEGIFLELLERLGKMPLPPYIKEELNDPERYQTVYSREVGSAAAPTAGLHFTKELLAQVEAVGVDLAYVTLHVGLGTFRPVKEEEITDHEMHAEYCMVSADAAEKINRAKKGGGRVICVGTTSCRTIESWAAEDGTLKESAGWTSIYIYPGYHFKALDCLITNFHLPESTLVMLVSALAGREHILSAYQEAVEQKYRFFSFGDAMFIY

SEQ ID NO: 73417 - protein, 341 aa, Clostridium sp.
  REGION 1..341: note = tr|A0A1C6A3A0|A0A1C6A3A0_9CLOT S-adenosylmethionine:tRNA ribosyltransferase-isomerase; OS = uncultured Clostridium sp. OX=59620 GN=queA PE=3 SV=1
MKTSDFYYDLPQELVAQTPLERRDGSRLMVLDKKTGATAHRHFYDIPTLLRPGDCLVLNDSRVLPARLLGHREPTGGAVEVLLLTDRGDKVWECLVRPGKKVRPGVRLSFGDGLLTAEVVETLEGGNRLIRFDYDGIFLEILERLGKMPLPPYIKEELSDPERYQTVYSKEVGSAAAPTAGLHFTRELLEQIQTMGVNLAYVTLHVGLGTFRPVKEEEITDHEMHAEYCAISRETADLINRTKKNGGRIICVGTTSCRTIESWAAEDGTLREAAGWTSIYIYPGYRFKVLDGLITNFHLPESTLVMLVSALAGREHILAAYEEAVREKYRFFSFGDAMFIG

SEQ ID NO: 73418 - protein, 341 aa, Clostridium sp.; identical to SEQ ID NO: 65419
  REGION 1..341: note = tr|A0A1C6HN25|A0A1C6HN25_9CLOT S-adenosylmethionine:tRNA ribosyltransferase-isomerase; OS = uncultured Clostridium sp. OX=59620 GN=queA PE=3 SV=1

SEQ ID NO: 73419 - protein, 406 aa, Collinsella sp.
  REGION 1..406: note = tr|A0A1C5S1X5|A0A1C5S1X5_9ACTN S-adenosylmethionine:tRNA ribosyltransferase-isomerase; OS = uncultured Collinsella sp. OX=165190 GN=queA PE=3 SV=1
MRTDDFDYNLPEELIAQAPAEPRDSCRLLVLHRGEPLATTGETVPLAHGGSVEHRHFYDIIDYLEPGDLLVANETRVMPARLIGRKAKTGGMAETLLLTRREDQDSLGHVWECLVSPGKRLKPGAVIEYRAGGPHAPESAPVVLVGEVLDFVSDSRGGRLVRFTPQGENASGAPRTLDEAIHAAGHVPLPPYITDYEGDPEKYQTVYAMSEEHSAAAPTAGLHFTPELIERIKQKGVGWATVELEVGIDTFRLVEEDDPTEHVMHTERYHVPQSVVDAVHATKAAGHRVIAVGTTAVRSLESAWDAQAAASEPPVVARRFENAPGSAVEGMGDIVARENATTNLYLMPGSTYHVVDALITNFHVPRSTLMMLVSALATREEIMDAYGEAVRERYRFFSFGDAMLIE

SEQ ID NO: 73420 - protein, 341 aa, Coprococcus sp.; identical to SEQ ID NO: 65574
  REGION 1..341: note = tr|A0A1C5SP68|A0A1C5SP68_9FIRM S-adenosylmethionine:tRNA ribosyltransferase-isomerase; OS = uncultured Coprococcus sp. OX=458253 GN=queA PE=3 SV=1

SEQ ID NO: 73421 - protein, 341 aa, Coprococcus sp.
  REGION 1..341: note = tr|A0A1C5S9C7|A0A1C5S9C7_9FIRM S-adenosylmethionine:tRNA ribosyltransferase-isomerase; OS = uncultured Coprococcus sp. OX=458253 GN=queA PE=3 SV=1
MQLSDFYYDLPQELIAQDPLLKRDNSRLMVLNRAEETIEHKHFYDVISYLKEGDCLVINDTKVIPARLIGEKEGTGAAIEVLLLKRLDDCTWETLVKPGKKARVGARIIFGGGKLVGEVIDIVEEGNRIVRFEYEGIFEEILDELGQMPLPPYITHKLEDKNRYQTVYAEHEGSAAAPTAGLHFTKELLEEIKAKGIKIAHVTLHVGLGTFRPVKEDNILDHHMHSEFYVIDEKAAETINETKKNGGRIIAVGTTSTRTLETVADENGMLRACSGWTDIFIYPGYKFKAIDGLITNFHLPESTLLMLVSALYSREKILEAYKVAVEERYRFFSFGDAMLIL

SEQ ID NO: 73422 - protein, 370 aa, unidentified
  source 1..370: note = Unknown
  REGION 1..370: note = tr|A0A212JZ54|A0A212JZ54_9DELT S-adenosylmethionine:tRNA ribosyltransferase-isomerase; OS = uncultured delta proteobacterium OX=34034 GN=queA PE=3; SV = 1
MTRFMPETGPEDVLLSSYRFALPEELIAQEPSRRRDASRLMVLDRAANTLTDAVFADLAAYLTPGVIVVNNSRVVPARVLGSRPSGGRVEFLLTTPLPHIVPEAVPHTAGEDLWQATVSCLLKSSKKVPVNETITLGKSFSATVLERGEYGQCLAKLIWRGSLPDRLLSEGVMPLPPYIKRPQSADDAERYQTVYAQPEKAGSIAAPTAGLHFTPAVKQALIDAGFTWAEVTLYVGYGTFSPVRCDDIRDHQMHKEYCEVPEETAKIIAEARRQGRPITAVGTTAARTLEGVARQHGSVVPFKGWTDIFLYPGKTMKVVDHLLTNFHLPESTLLMLISAFAGRERVLEAYAKAVAERYRFFSYGDAMLIL

SEQ ID NO: 73423 - protein, 354 aa, unidentified
  source 1..354: note = Desulfobacteraceae bacterium
  REGION 1..354: note = tr|A0A484HN92|A0A484HN92_9DELT S-adenosylmethionine:tRNA ribosyltransferase-isomerase; OS = uncultured Desulfobacteraceae bacterium OX=218296; GN = queA PE=3 SV=1
MHSLKDYHYDLPEDLIALKPAAQRDRSRLLAVSRAQKTFSHREFYEIPDFLSPGDVLVINDTRVIRARLMGKKETGGKVEALIVNYPEAVRTAFQSGDLTFQCMVKASKKPGVGTWIFFENGLKARVEKHGENGVCDLVFPGAADLETIERAGRVPLPPYIESRREKDDGVDHPSAYQTIYASKKGAVAAPTAGLHFSTDIFKRLNSRGVKIAPVTLHVGHGTFLPVRARDIRKHRMHPEWSHIPDASADVINHARENGGRIVSVGTTCVRTLEHAAGADGKIRPGSAKCDLFIYPGHRFKAVDALVTNFHLPESTLLMLVSAFAGRDLILSAYQAAIDERYRFYSYGDAMYIE

SEQ ID NO: 73424 - protein, 357 aa, Desulfobacterium sp.
  REGION 1..357: note = tr|E1YFS9|E1YFS9_9DELT S-adenosylmethionine:tRNA ribosyltransferase-isomerase OS=uncultured Desulfobacterium sp. OX=201089 GN=queA PE=3 SV=1
MGVFLLSDYDYELSEDQIAQKPASCRDASRLMVLDKNTGSTFHNKFSEICDFISPKDIIVINNTKVIPGRLFGKKETGGKAEILILDFTGGIREQDKTGDFICECLVKTSKPAKQGSLILFEENLTAKVLNDVKDGICLLKFSSSENFEEILLRIGKMPLPPYIKRDKDNNKSIDDKTSYQTVYASYSGAVAAPTAGLHFTRELLEKIKAKGTKTAEITLHVGYGTFLPVRVSDIREHEIHSERYDISFEAAEAINTVRADGGKIIAVGTTCIRTLEYASDHKGRVLSGSGKCDLFIYPGYSFKVVDSIITNFHLPRSTLLMLVSAFAGRERILSAYKEAISQGYRFYSYGDAMFIQ

SEQ ID NO: 73425 - protein, 351 aa, Desulfobacterium sp.
  REGION 1..351: note = tr|A0A445MVA2|A0A445MVA2_9DELT S-adenosylmethionine:tRNA ribosyltransferase-isomerase; OS = uncultured Desulfobacterium sp. OX=201089 GN=queA PE=3; SV = 1
MFDTEDYDYDLPADLIAHAPAHKRDHSRLLVIDRKTGAFRDKFFFDLPVLLASGDLIVVNDTRVVPARLYGRKESGGLIEILVLDHPDGAGNNTLTRSCLLKSSKRPRPGSKLFFDSGVLGRVDDVLDNGLVSITFSGDCSVDSLMEEKGQMPLPPYIKRQHHDPHSGLDRERYQTVYSRNRGAVAAPTAGLHFTQDLIARLAESEISLTYITLHVGYGTFRPVRTKDIRKHDLDSEQYRIGPETASAIERTKKKGGRVIAVGTTVVRTLETAANPEGGVSAGEGRTNLLITPGFTFKVVDALITNFHLPKSSLLFLVSAFAGLGLVKEAYIRAIENGYRFYSYGDAMLAL

SEQ ID NO: 73426 - protein, 368 aa, Desulfofustis sp.; identical to SEQ ID NO: 65880
  REGION 1..368: note = tr|V4IMK2|V4IMK2_9DELT S-adenosylmethionine:tRNA ribosyltransferase-isomerase OS=uncultured Desulfofustis sp. PB-SRB1 OX=1385624 GN=queA PE=3 SV=1

SEQ ID NO: 73427 - protein, 365 aa, Desulfovibrio sp.
  REGION 1..365: note = tr|A0A212JPF2|A0A212JPF2_9DELT S-adenosylmethionine:tRNA ribosyltransferase-isomerase; OS = uncultured Desulfovibrio sp. OX=167968 GN=queA PE=3 SV=1
MPTAEADFFLESYNFALPEAQIAQFPPEERGNSRLLVMPRQGALELEHHQFSDLPDCLPEGALLVANNSRVLQARLLGTRSTGGKVEFLLLTPLPLVLERARPDKLGGSSAEVEGLIRSGGSIRDGEKLEFGAGISVTVLESGEFGHRRVRLAWDGDLSKAFAATGHIPLPPYIKRTDAEEDLSRYQTIYSREDKTGSVAAPTAGLHFTPEMRETLKARGFQWADVTLYVGYGTFSPVRSADIRGHRMHREYVEIPEATALAIAEAKREGRPVIAVGTTSLRSMEGVAELCGRVQPFTGWTDIFLYPGRPFRVVDGLLTNFHLPESSLIMLVSALAGRERVLAAYAEAVSRGYRFFSYGDAMLIR

SEQ ID NO: 73428 - protein, 365 aa, Desulfovibrio sp.
  REGION 1..365: note = tr|A0A212L4V1|A0A212L4V1_9DELT S-adenosylmethionine:tRNA ribosyltransferase-isomerase; OS = uncultured Desulfovibrio sp. OX=167968 GN=queA PE=3 SV=1
MHIEEADFLLENYNFDLPQEQIAQFPPEERGSSRLLVMPRTGALDLHHKMFSDLPDCLPEGALLIANNSRVLQARLLGTRSTGGKVEFLLLTPLPLVVERAKADKSGGFFAEAEGLVRSGGSIREGETFEFGAGIGVTVLASGPFGQRRVRLGWKGDLAAAFAATGHIPLPPYIRRPDGEEDLSRYQTVYARQDKTGSVAAPTAGLHFTPPLREKLAERGFQWAEVTLYVGYGTFSPVRTPDIRSHRMHREYVEVPESTALAIAEARAQKRPVIAVGTTSLRTLEGVAELCGRVQAYTGWTDIFLYPGRPFRVVEGLVTNFHLPESSLLMLVAAFAGRKRMLDAYAEAIAKGYRFFSYGDAMLIR

SEQ ID NO: 73429 - protein, 341 aa, Dorea sp.
  REGION 1..341: note = tr|A0A1C5QS90|A0A1C5QS90_9FIRM S-adenosylmethionine:tRNA ribosyltransferase-isomerase; OS = uncultured Dorea sp. OX=286138 GN=queA PE=3 SV=1
MKRQDFYYDLPEELIAQDPLEDRSSSRLLVLDKETGATSHHIFKEITGYLKEGDCLVINDTKVIPARLIGAKEGTGAKIEILLLKRKENNIWETLVKPGKKAKVGTRIVFGEGILVGEVVGIVEEGNRLVKFEYEGIFEEILDQLGQMPLPPYITHQLEDKNRYQTVYAKHTGSAAAPTAGLHFTPELLKEIEEKGIDIARVTLHVGLGTFRPVKVDEITDHHMHSEFYQVDEEAAEKINRAKDSGHRVICVGTTSCRTIESAADETGHLKPTSGWTEIFIYPGYKFKILDGLITNFHLPESTLIMLVSALAGREHVLAAYEEAVQERYRFFSFGDAMLIV

SEQ ID NO: 73430 - protein, 407 aa, Dysgonomonas sp.
  REGION 1..407: note = tr|A0A212JT40|A0A212JT40_9BACT S-adenosylmethionine:tRNA ribosyltransferase-isomerase; OS = uncultured Dysgonomonas sp. OX=206096 GN=queA PE=3 SV=1
MEISSPQKIHIQDYNYNLPDDRIAKYPLTKRDNSKLLVYKNEKITDTVFSNINNFLPENCLMVFNNTKVIQARLHFQKTTGAQIEIFCLEPCIPNDYQLNFQQTEKCSWICLIGNLKKWKEGSLTRQINVNEQIVNFTATRTRSHGDAHVIDFEWDNQGVTFSELLDAVGELPIPPYLNRATEEQDKQTYQTVYSKIDGSVAAPTAGLHFTPEVMKSLKEQGMKLAEVTLHVGAGTFRPVKSDEIGDHVMHSEFISVQKSFIEELIRFEGKVIAVGTTSVRTLESLYYIGVSLENQKQSHLHVSQWMPYNDSNNRLSKKDALKNILAYLEANSLSTLIADTQIIIAPGYDFKIVDGIVTNFHQPQSTLLLLVSAFLGNNNWKNIYEHALSSDYRFLSYGDSSLLLKD

SEQ ID NO: 73431 - protein, 409 aa, Dysgonomonas sp.
  REGION 1..409: note = tr|A0A212JH85|A0A212JH85_9BACT S-adenosylmethionine:tRNA ribosyltransferase-isomerase; OS = uncultured Dysgonomonas sp. OX=206096 GN=queA PE=3 SV=1
MEVSIFRDIRINDYDYGLPDSRIAKYPLVKRDESKLLVYKGGKITDARFSNLPEYLPDDSLMIFNNTKVIQARLHFQKITGAQIEIFCLEPHFPNDYQLNFQQTQRCSWVCLVGNLKKWKEGDLIKELVVNGEPVIFSARRIQTNGDSHIIEFEWDNTGVTFSELLEVAGELPIPPYLNRDTEEQDKETYQTIYSKIDGSVAAPTAGLHFTPEVFESLGKNGVKTAEVTLHVGAGTFRPVKTEEVKDHVMHSEFISVKRDVIEQLLNHKGKVIAVGTTSVRTLESLYYIGELLEKDNSSGELKVTQWQPYKASGEKELPVKESLTNILTYLDKNNLTSLIAETQIIIAPGYIYKIVDGIITNFHQPKSTLLLLVSAFTGGDNWKAIYKHALDNGYRFLSYGDSSLLLKE

SEQ ID NO: 73432 - protein, 347 aa, Eubacterium sp.
  REGION 1..347: note = tr|A0A1C6J8K7|A0A1C6J8K7_9FIRM S-adenosylmethionine:tRNA ribosyltransferase-isomerase; OS = uncultured Eubacterium sp. OX=165185 GN=queA PE=3 SV=1
MKIDEFDYELPKELIAQKPSEKRDVCRMMVLDRQKGTITHQHFFDVIDYLNAGDCLVLNNSKVLPARLFGEKEGTGAKIEFLLIKRIEGDRWETMVKPGKRLKPGDSVTFSDHFRADILDYGPDGTRIAEFRYDGIFMERLEELGKMPLPPYIERESTLEDKDMYQTVYCKEEGSVAAPTAGLHFTEELLQKAQDKGVRLAYVTLHVGIGTFRPVKCENVEDHHMHFEEYFVDEETAKIINETILAGGRIISVGTTSTRTLESAAYHDEGSGKNLIRAGEGSTGIFIYPGYEYKVVDALITNFHLPKSTLLMLISALYDREKILEAYQAAVEEKYRFFSYGDAMLIQ

SEQ ID NO: 73433 - protein, 342 aa, Eubacterium sp.
  REGION 1..342: note = tr|A0A1C6F8L2|A0A1C6F8L2_9FIRM S-adenosylmethionine:tRNA ribosyltransferase-isomerase; OS = uncultured Eubacterium sp. OX=165185 GN=queA PE=3 SV=1
MMKTSDFNFDLPQELIAQDPLEDRSSSRLMVLNKESGEIAHRIFHDITEYLHPGDCLVINDTKVIPARLIGTKEDTGAHIEILLLKRKENDVWETLVKPGKKCRPGARVVFGNGELKAEIVDVLEDGNRLVHFEYEGIFEEVLDRLGQMPLPPYITHKLQDKNRYQTVYAKYEGSAAAPTAGLHFTKELLKQIEDMGVNIARVTLHVGLGTFRPVKVENVLEHHMHSEYYNVTETAAKMINDTKKNGGRIIAVGTTSTRTLESVADENGIIHPGCGNTEIFIYPGYKFKAIDCLITNFHLPESTLLMLVSALAGKEHIMAAYKEAVKERYRFFSFGDAMFIQ

SEQ ID NO: 73434 - protein, 342 aa, Faecalibacterium sp.
  REGION 1..342: note = tr|A0A1C5LYV7|A0A1C5LYV7_9FIRM S-adenosylmethionine:tRNA ribosyltransferase-isomerase; OS = uncultured Faecalibacterium sp. OX=259315 GN=queA PE=3; SV = 1
MLKKDFWYDLPKELIAQEPADPRDSARLMVLSQKDDSIQHKIFHDLPEFLEPGDLLVVNNSKVLPARIVGVKQPTGAVCELLLLRQVKGDQWECLAKPGKRMQPGTKVSFGDGSLTAVVDETMEDGNKYVTFYYDTETLYEKLDEFGKMPLPPYITKQLEDQSQYQTVYAKELGSAAAPTAGLHFTPELMDTIRAKGVNIAEVTLHVGLGTFRPVQEDEISDHKMHSEWYCIDEKTAQMIRDTKAAGHRVIAVGTTSCRTLEAVAAKYGEIRACSGNTSIFLYPGVKFNCIDGLITNFHLPESTLIMLVSALYGYEKTMAAYKVAVEERYRFFSFGDAMLIL

SEQ ID NO: 73435 - protein, 345 aa, Faecalibacterium sp.
  REGION 1..345: note = tr|A0A1C5MQD0|A0A1C5MQD0_9FIRM S-adenosylmethionine:tRNA ribosyltransferase-isomerase; OS = uncultured Faecalibacterium sp. OX=259315 GN=queA PE=3; SV = 1
MQSMLKKDFWYDLPKELIAQEPADPRDSARLMVLSQKDDSIQHRIFRDLPEYLEPGDLLVVNNSKVLPARIVGVKQPTGAVCELLLLRQVKGDQWECLAKPGKRMQPGTKVSFGDGTLTAVVDETLEDGNKFVTFYYDTETLYEKLDEFGKMPLPPYITKQLEDQSQYQTVYAKELGSAAAPTAGLHFTPELMDTIRSKGVGIAEVTLHVGLGTFRPVQEDEISDHKMHSEWYSISEETAQRIRETKAAGHRVIAVGTTSCRTLEAAAAKYGEIKACSGNTSIFLYPGVKFNCIDGLITNFHLPESTLIMLVSALYGYEKTMAAYKVAVEEKYRFFSFGDAMLIL

SEQ ID NO: 73436 - protein, 349 aa, unidentified
  source 1..349: note = Flavobacteriia bacterium
  REGION 1..349: note = tr|H6RI11|H6RI11_9BACT S-adenosylmethionine:tRNA ribosyltransferase-isomerase OS=uncultured Flavobacteriia bacterium OX=212695 GN=queA PE=3 SV=1
MKLSHFEFELPEELLAIYPAEHRDESRLMVLNKAEGTIEHKQFKDVINYFEEGDVMMLNNTKVFPARMFGNKEKTGARIEVFLLRELNAENRLWDVLVDPARKIRIGNKLFFGEDDSLVAEVIDNTTSRGRTLRFLFDGSYEEFRAKLLELGQTPLPKAIAREVEASDKERYQTIFAEDEGAVAAPSAGLHFSKHLLKRLEIKGVDFAKMTLHVGLGTFSAVEVEDLSKHKMDSEQIVIPEASATMINKAKKEKRRICAVGTTVMRTVESSVSSKQELKEFEGWTNKFIFPPHEFNIANAMITNFHTPKSTLLMQAAAFGGYDFVMDAYKVAIKEGYRFSTYGDAMLII

SEQ ID NO: 73437 - protein, 349 aa, unidentified
  source 1..349: note = Flavobacteriia bacterium
  REGION 1..349: note = tr|H6RG64|H6RG64_9BACT S-adenosylmethionine:tRNA ribosyltransferase-isomerase OS=uncultured Flavobacteriia bacterium OX=212695 GN=queA PE=3 SV=1
MKLSHFNFELPDELLAEYPSEHRDESRLMVLNREKQTIEHKQFKDLIDYFNEDDVMILNDTKVFPARLFGNKEKTGARIEVFLLRELNAEQRLWDVLVDPARKIRIGNKLYFGEDEMLVAEVIDNTTSRGRTLRFLYDGSYEEFRKKLTQLGQTPLPKYINREVEPEDEERYQTIYAKNEGAVAAPTAGLHFSKHLLKRLEIKGINFAEVTLHVGLGTFNPVEVEDLSKHKMDSEEIIIPIQTADKINTALKEKRRICAVGTTAMRAIESSVSSKGNLNDYSGWTNKFIFPPYEFSIANCMITNFHTPKSTLLMMTAAFGGHDFVKKAYEEAVKEKYKFYSYGDAMLII

SEQ ID NO: 73438 - protein, 344 aa, Flavonifractor sp.
  REGION 1..344: note = tr|A0A1C6F530|A0A1C6F530_9FIRM S-adenosylmethionine:tRNA ribosyltransferase-isomerase; OS = uncultured Flavonifractor sp. OX=1193534 GN=queA PE=3; SV = 1
MIFMKTSDFYYDLPPELIAQTPLERRDGSRLLTLDKRTGETGHGHFYDLPRLLRPGDCLVMNDSRVLPARLLGRREPTGGAAEVLLLVDRGDQVWECLVRPGRKVKPGTRLSFGEGALTAEVLETLEGGNRLIRFDYEGIFLETLERLGKMPLPPYIKEELNDPERYQTVYSRQVGSAAAPTAGLHFTRELLDQIQAMGVSLCYVTLHVGLGTFRPVKEDEITDHEMHAEYCMIPQETADIINRTKQTGGRVVCVGTTSCRTIESWAGEDGTLKASAGWTDIFIYPGYRFKVLDALVTNFHLPESTLVMLVSALAGREHILAAYEEAVRERYRFFSFGDAMFIY

SEQ ID NO: 73439 - protein, 341 aa, Flavonifractor sp.
  REGION 1..341: note = tr|A0A1C6BFD5|A0A1C6BFD5_9FIRM S-adenosylmethionine:tRNA ribosyltransferase-isomerase; OS = uncultured Flavonifractor sp. OX=1193534 GN=queA PE=3; SV = 1
MKTSDFDFYLPEELIAQTPLERRDSSRLLTLDKCTGEIAHRHFYELPQLLRPGDCLVLNNSRVLPARLIGHRLPGGGACEVLLLTDKGDGLWECLVRPGRKLKPGAQVSFGEGHLTATVEAEASGGNRLVRFHYQGIFLEVLEELGKMPLPPYIKEELQDNERYQTVYSKINGSAAAPTAGLHFTPELLRQIQEMGVKLCYVTLHVGLGTFRPVKAEDISEHEMHSEYCMIPEETARTINETKRNGGRVICVGTTSCRTVESFGAEDGTLKESAGWTSIFIYPGYRFKVLDALVTNFHLPQSTLIMLVSALAGREHVLSAYEEAVKERYRFFSFGDAMFIS

SEQ ID NO: 73440 - protein, 342 aa, unidentified; identical to SEQ ID NO: 73295
  source 1..342: note = Gammaproteobacteria bacterium
  REGION 1..342: note = tr|A0A5E5PQQ7|A0A5E5PQQ7_9GAMM S-adenosylmethionine:tRNA ribosyltransferase-isomerase; OS = uncultured Gammaproteobacteria bacterium OX=86473; GN = queA PE=3 SV=1

SEQ ID NO: 73441 - protein, 338 aa, unidentified
  source 1..338: note = Gammaproteobacteria bacterium
  REGION 1..338: note = tr|A0A5E6NAE1|A0A5E6NAE1_9GAMM S-adenosylmethionine:tRNA ribosyltransferase-isomerase; OS = uncultured Gammaproteobacteria bacterium OX=86473; GN = queA PE=3 SV=1
MQLSDFDFDLPKSLIAQHPSKNRTDSRLLIAQSNLIDAQFHQIGDFIQSGDLLVMNNTKVIPARLFGHKDSGGKVEIMIERLLNDKQVLAMIRASRAPQIGSKITLENSEKASVLNKQDGFYTLEFATDSLLALLDNIGHIPLPPYIERTDDEQDLSRYQTVYAKHDGAVAAPTAGLHFDDALLNSLKDQGIDSAFVTLHVGAGTFQPVKTDNIKDHTMHSEYYEISQDSVDKINQTKANGGRIIAIGTTAVRSLESAAKSGILKATREETDIFIYPGYEFKVVDMMVTNFHLPKSSLLMLVSAFIGRERMMEIYQHAITQKYRFFSYGDAMLLTGKK

SEQ ID NO: 73442 - protein, 364 aa, Lachnospira sp.
  REGION 1..364: note = tr|A0A1C6FWP8|A0A1C6FWP8_9FIRM S-adenosylmethionine:tRNA ribosyltransferase-isomerase; OS = uncultured Lachnospira sp. OX=446043 GN=queA PE=3 SV=1
METMETKVNTTNETESAAHQTGMMDINDFDYDLPEELIAQDPIEDRSSSRLLLLDKKTGKTQDKIFRDIIDELNPGDCLVINNTKVIPARLLGVKEDTGAHIEVLLLKREQDDVWEVLVKPGKKAKPGTIITFGDGRLKAEVLEVVEDGNRKIRFSYQGIFEEILDELGQMPLPPYITHQLKDKNRYQTVYAKYEGSAAAPTAGLHFTKDLLKKIEEKGVVIASVTLHVGLGTFRPVKVENVLEHHMHSEFYRIEPEEAEKINAAKKAGKRVIAVGTTSCRTLESASTEDGILKAQSGWTDIFIYPGYHFKMVDALITNFHLPKSTLVMLVSALAGREHILAAYKEAVEKKYRFFSFGDAMFIH

SEQ ID NO: 73443 - protein, 341 aa, unidentified
  source 1..341: note = Unknown
  REGION 1..341: note = tr|A4GHV0|A4GHV0_9BACT S-adenosylmethionine:tRNA ribosyltransferase-isomerase OS=uncultured marine bacterium EB0_39H12 OX=415437 GN=queA PE=3 SV=1
MDIEDYNFELPEALIAKEPKSERSSSRLLIAEDRLIDKKFSDLIDSLGNGDLLVINDTKVFKARLEAQKVSGGKVELLIERKIDANNALALTKSNRPLRESERLQVTNTNIFADIIKKDGYLSLIQFSEDIDDILDGFGTVPLPPYIDRKPDDNDEARYQTVYADANNMNSVAAPTAGLHFDNELLERIKDKGVNIASITLNIGIGTFKPIKQNDVRKHIMHSEKIYLSESNANIINEALLSNSRIFCVGTTSLRCLESIYSKFDEIKSYEGETDIFIYPGFKFKVADYLITNFHLPKTTLLLLVSAFSGLDRIQAAYKHAIEKEYRFFSYGDAMLLKRQD

SEQ ID NO: 73444 - protein, 339 aa, Megasphaera sp.; identical to SEQ ID NO: 68741
  REGION 1..339: note = tr|A0A1C5L822|A0A1C5L822_9FIRM S-adenosylmethionine:tRNA ribosyltransferase-isomerase; OS = uncultured Megasphaera sp. OX=165188 GN=queA PE=3 SV=1

SEQ ID NO: 73445 - protein, 349 aa, unidentified
  source 1..349: note = Unknown
  REGION 1..349: note = tr|E7C7P2|E7C7P2_9BACT S-adenosylmethionine:tRNA ribosyltransferase-isomerase OS=uncultured nuHF1 cluster bacterium HF0770_35I22 OX=723586 GN=queA PE=3 SV=1
MKTSNFDFSLPPELIAQKPARPRESAKLLQVFSDGNFRDVYIKDLPALLKAGDLLVVNNTRVIPAQLSGKIFSTEKKVRVNLHKQKSNGVWLAFAKPAKKLLLNDKIFFSSTFFALITDKQPFGQITLKFNLVGATFLKALKKFGSMPLPPYIKRSGKVHPSDKTDYQTTFASRDGAVASPTAGLHFSMNLINDLKRCGIRVAPITLHVGAGTFLPIKTDTINHHRMHSEWVEINARTANLINKTRKAGGKIIAVGTTVLRTLETAVDTEGNIHPFKGKTDIFIAPGHQFKTVDLLITNFHLPKSTLFVLVSAFCGLNRMKNAYKYAIKKKYRFFSYGDASLLELRKKS

SEQ ID NO: 73446 - protein, 341 aa, Oscillibacter sp.; identical to SEQ ID NO: 66133
  REGION 1..341: note = tr|A0A1C5NRI1|A0A1C5NRI1_9FIRM S-adenosylmethionine:tRNA ribosyltransferase-isomerase; OS = uncultured Oscillibacter sp. OX=876091 GN=queA PE=3 SV=1

SEQ ID NO: 73447 - protein, 364 aa, Pleomorphomonas sp.
  REGION 1..364: note = tr|A0A212L9D2|A0A212L9D2_9RHIZ S-adenosylmethionine:tRNA ribosyltransferase-isomerase; OS = uncultured Pleomorphomonas sp. OX=442121 GN=queA PE=3; SV = 1
MQVSAFDFDLPPERIALRPAVPRDASRLLVVKPGQPFEDRQARDLADLLLPGDALVFNDTKVIPAQLEGRRDRNGAEPVRFSATLHMREAPDRWRAFVKGARKLRAGDRVRFSGADPAAAALGAVVAEKGEDGEITLVFDRAGPDLDVALMTVGHIPLPPYIAARRAEDEHDRADYQTVYARESGAVAAPTAGLHFTPDLFERLDARGIGRHFVTLHVGAGTFLPMKVDDTEAHKMHAEIGHVSPETAEALNAVRARGGRVVAVGTTSLRLLESAAGEDGLVRPFAGATDIFITPGYRFRAVDLLMTNFHLPKSTLFMLVSAFCGLDTMRDAYAHAIAGGYRFYSYGDTSLLHPSEESRLMKNS

SEQ ID NO: 73448 - protein, 374 aa, Prochlorococcus marinus
  REGION 1..374: note = tr|Q1PJX4|Q1PJX4_PROMR S-adenosylmethionine:tRNA ribosyltransferase-isomerase OS=uncultured Prochlorococcus marinus clone HF10-88F10 OX=379378 GN=queA PE=3 SV=1
MISQINNEERDYKLEAYDYLLDPSLIASKPSAIRHESRLMIVRNSFLEEDCLTNKFTKNLLDEFREGDLVIVNNTKVMKARLKVELENKTLVELLVLERSHECVWLCLAKPAKKLKINRKLKLKSPLAQDINLIVDGVDEETGGRFIKFPENITCLNSMNELLDKYGEIPLPPYIKNSEEESFHEKSYQTEYATNPGAVAAPTAGLHLSKSLIFNLKKKGVIILPITLHVGYGTFKPIDQEDLSNLKLHKEWVSVNKEVVEEIKRIKKTDRKIIAIGTTSVRALESCYSYEIDDFIPIAKYVDLVIKPGYKFKVVDGLLTNFHLPKSSLLLLVSAMIGRERLLNLYKKAIKEKFRFFSYGDAMYISPDSLLEKK

SEQ ID NO: 73449 - protein, 341 aa, Roseburia sp.
  REGION 1..341: note = tr|A0A1C5SJU4|A0A1C5SJU4_9FIRM S-adenosylmethionine:tRNA ribosyltransferase-isomerase; OS = uncultured Roseburia sp. OX=512314 GN=queA PE=3 SV=1
MDVKDFDYDLPEELIAQDPLEDRSSSRLMVLDKKTGDIEHKIFRDVVDYLQPGDCLVLNNTKVIPARLFGVKEGTEAKIEILLLKRKENDIWETLVKPGKKCKPGVKISFGEGLLTGEVLEVVEDGNRLIQFHYDGIFEEILDQLGQMPLPPYITHQLKDKNRYQTVYAKYDGSAAAPTAGLHFTPELLQQIRDMGIDIAEVTLHVGLGTFRPVKVDTIEEHHMHSEFYRIEQSEADKINRAKANGHRVVAVGTTSTRTLESAAEEDGTLREKSGWTDIFIYPGYKFKVIDALITNFHLPQSTLVMLVSALAGREHILAAYKKAVEEKYRFFSFGDAMLIK

SEQ ID NO: 73450 - protein, 341 aa, Roseburia sp.
  REGION 1..341: note = tr|A0A1C5WBD0|A0A1C5WBD0_9FIRM S-adenosylmethionine:tRNA ribosyltransferase-isomerase; OS = uncultured Roseburia sp. OX=512314 GN=queA PE=3 SV=1
MDVKDFYFELPKEQIAQDPLEDRSASRLLVLDRETGAYEHKIFKNITEYLKPGDCLVLNNTKVIPARLFGEKEGTQAKIEILLLKRKENDIWETLVKPGKKARPGTRISFGGGLLTGEVLDVVEEGNRLIQFTYDGIFEEILDELGQMPLPPYITHQLEDKNRYQTVYAKYNGSAAAPTAGLHFTPELLDEVRGAGVEIAEVTLHVGLGTFRPVKVDDITRHHMHSEFYMISQEAAEKINTAKENGGKIICVGTTSCRTIESAADENGRLKESSGWTEIFIYPGYQFKVLDGLITNFHLPESTLLMLVSALAGREHVLAAYEEAVKQGYRFFSFGDAMLIR

SEQ ID NO: 73451 - protein, 341 aa, Ruminococcus sp.
  REGION 1..341: note = tr|A0A1C6CVI7|A0A1C6CVI7_9FIRM S-adenosylmethionine:tRNA ribosyltransferase-isomerase; OS = uncultured Ruminococcus sp. OX=165186 GN=queA PE=3 SV=1
MKTSDFYYDLPKELIAQTPLEPRDSSRLLVLDREKQTLEHKHFYDIIDYLNEGDLLVANDSRVLPARIYGIKDETGAKVEFLLLKQVANNRWETLCKPGKKAKVGTKFSFGNGILRATVVDVKDDGNRIVDFDCEENFFTTLDKIGQMPLPPYITAELKDKERYQTVYSHELGSAAAPTAGLHFTTELMDRIKAKGVKIAYVTLHVGLGTFRPVKVDDVTKHKMHSEHYEVPEETAKLINETKKNGGRVIAVGTTSCRTLESVAAMYGEIKPCEGFTDIFIYPGFEFKVLDGLITNFHLPESTLIMLVSAFAGYDFIMNAYKEAVKEKYRFFSFGDAMFIS

SEQ ID NO: 73452 - protein, 350 aa, Ruminococcus sp.
  REGION 1..350: note = tr|A0A1C6H807|A0A1C6H807_9FIRM S-adenosylmethionine:tRNA ribosyltransferase-isomerase; OS = uncultured Ruminococcus sp. OX=165186 GN=queA PE=3 SV=1
MLDINNMKRSDFYYDLPQELIAQTPVEPRNASRMMKINRQTGEVVHDHFYNLCNYLKKGDLLVLNDSKVLPARIYGEREDTGSFIEFLLVEQKENMVWEILCRPGKKAKIGTRFVFGGGKLKAEIIDVLEDGNRIARFECEENFFATLDEIGQMPLPPYITEKLKDKDRYQTVYAHELGSSAAPTAGLHFTEQQLEDLKAMGVNIAYVTLHVGLGTFRPVKEDKVLDHKMHREHYELSRQTADMINETKKNGGRVIAVGTTSCRTLESVAAFNDGKIVPCDGYTEIFIYPGFEFKVLDGLVTNFHLPESTLIMLVSAFMGYENTMNAYKIAVEEKYRFFSFGDCMLIISE

SEQ ID NO: 73453 - protein, 344 aa, Sphingopyxis sp.
  REGION 1..344: note = tr|A0A1Y5PNU9|A0A1Y5PNU9_9SPHN S-adenosylmethionine:tRNA ribosyltransferase-isomerase; OS = uncultured Sphingopyxis sp. OX=310581 GN=queA PE=3 SV=1
MRVDAFDFDLPNERIALRPARPRDAARMLVVDGGEMIDAGVRDLSSWLRPGDCLVFNDTRVIPAQLEGQRGDAKISATLHKRVDLRRWQAFVRNAKRLRVGETVDFGSGVEAVAEERLADGSFILAFAGDEPVELLLERAGTMPLPPYIAGKRATDADDRSDYQTIFARRDGAVAAPTAALHFTPELLDALAAAGIGTETLTLHVGAGTFLPVKADDTDDHVMHAEWGRIEPETAARLNAVRAKGGRVIAVGTTSLRLLESAAADDGTIAPFAGDTAIFITPGYRFKAIDGLMTNFHLPRSTLFMLVSALMGLETMQAAYAHAIGKEYRFYSYGDASLLLPARP

SEQ ID NO: 73454 - protein, 376 aa, unidentified
  source 1..376: note = Unknown
  REGION 1..376: note = tr|A0A3P3XFW2|A0A3P3XFW2_9SPIR S-adenosylmethionine:tRNA ribosyltransferase-isomerase; OS = uncultured spirochete OX=156406 GN=queA PE=3 SV=1
MKTDDFNFELPERLIAQYPPEHRGESRLMVLDRATEKTFDAMVADIASFIEPGTLMIFNDSRVRKARLYGICEQTGSHVEFVFLSPADEAEFDEQQFRGSDHAAQALNMPGSDKPVVPKHKLPSSSQRWLVVCSKAKRQKIGRKYLFPGELAGTIISDRVDEKIIEFSAPIGDEYFDRYGHVPLPPYIKREDTKADEQRYQTVYAKRTGSAASPTAGLHFTPEILSSLRDRGIEIAHVTLHVGLGTFLPVRTENIEDHRMHEEWFEISPEIANRVNAAKKEGRAILAVGTTSLRALESAWYDGALHSGSYSTRIFIYPGFEFHVVDQLFTNFHTPKSTLLMLVSAFAGRERILEAYRSAIEKQYRFFSYGDAMLIR

SEQ ID NO: 73455 - protein, 370 aa, unidentified
  source 1..370: note = Unknown
  REGION 1..370: note = tr|A0A3P3XU22|A0A3P3XU22_9SPIR S-adenosylmethionine:tRNA ribosyltransferase-isomerase; OS = uncultured spirochete OX=156406 GN=queA PE=3 SV=1
MKTDDFNFELPETLIAQYPPQRRGESRLMVLDRAEGKTVDSMVSDIASFIEPGTLMVFNDSKVRKARVYGICEQTGARVEFVFLTPVEQESLIKIEELILHKGDQENVLVAPAQRIPSVSRLWRAVCSKAKRQKAGRSYAFPGDIRGILAEDIHDEKIIEFSAAIGDDYFDRYGHVPLPPYIKREDTKADEQRYQTVYARRTGSAASPTAGLHFTPEILSSLRSKGIGIEYITLHVGLGTFLPVRTENIEDHRMHEEWFEITEDVAKKINAAKSNGRKVLAVGTTSLRALESAWYGGAIHSGSFSTRIFIYPGFEFHVADRLFTNFHTPKSTLLMLVSAFAGRETIMEVYRSAIEKRYRFFSYGDAMLIL

SEQ ID NO: 73456 - protein, 339 aa, Sporomusa sp.
  REGION 1..339: note = tr|A0A212LRY1|A0A212LRY1_9FIRM S-adenosylmethionine:tRNA ribosyltransferase-isomerase; OS = uncultured Sporomusa sp. OX=307249 GN=queA PE=3 SV=1
MLVSDFDYYLPEELIAQQPVEPRDHSRLLVLDRKTGTITHNAFYNLPQLLQPGDTLVFNDTRVIPARLLGIKPETGGKVEVFLLNRTTKDDWEVLVKPGKRARPGTVIEFGENLRCEVLDTTDFGGRIVRFTYQGIFEEILDVLGETPLPPYIKAQLSDKERYQTVYARERGSAAAPTAGLHFTRELMETIANMGVSLAYITLHVGLGTFRPVVAENINEHVMHREYYSVPPATAEIVNKTLAAGNRVIAVGTTAVRTLESAGSSGCLEAKSGWTEIFIYPGYEFKIVKALITNFHLPKSTLLMLISALAGREFIFDAYREAVDKRYRFFSFGDAMFIR

SEQ ID NO: 73457 - protein, 360 aa, Stenotrophomonas sp.
  REGION 1..360: note = tr|A0A1Y5Q4G4|A0A1Y5Q4G4_9GAMM S-adenosylmethionine:tRNA ribosyltransferase-isomerase; OS = uncultured Stenotrophomonas sp. OX=165438 GN=queA PE=3; SV = 1
MPDAPALKKSDFNYDLPAELIAQAPLPERSASRLLLVPPAPAAFADRHVRDLPDLLQPGDLLVFNDTRVIPARLFGQKATGGRVEILIERLLGGQQARAQVGASKSPKPGSRIALDAGGEAEVLGRDGEFYLLRFDIPEPLESWLVHAGRLPLPPYIQREPGADDRERYQTVFARQVGAVAAPTAGLHFDELLLERLRARGVQFGHITLHVGAGTFQPVRVDDLSQHVMHREWLNVGAELVQQVRRIRAAGGRVVGVGTTVVRALESAMRDGELHPYAGETQIFITPGYRIRSVDAMVTNFHLPESTLLMMISAFAGRERVFEAYAHAIAERYRFFSYGDAMLLWSREGAGALTDAPSHS

SEQ ID NO: 73458 - protein, 343 aa, unidentified
  source 1..343: note = Unknown
  REGION 1..343: note = tr|A0A482ZKS0|A0A482ZKS0_9GAMM S-adenosylmethionine:tRNA ribosyltransferase-isomerase; OS = uncultured SUP05 cluster bacterium OX=655186 GN=queA; PE = 3 SV=1
MMQLDDFDFDLPKSLIAQHPTKNRTDSRLLVPQSENINTIDTNFSKIGDFFQSGDLLVMNNTRVIPARLFGHKASGGKVEIMIERLINEHQVLAMMRASRAPQIGSKIILENGKKVIVLAKEKFYTLEFQTDSLLSLLDEVGHIPLPPYIERTDDEQDLSRYQTVYAEHDGAVAAPTAGLHFDDKLLAALKDKGVNSAFVTLHVGAGTFQPVKVDNIIEHKMHSEYFEISQQTVDKINQTKANGGRIIAVGTTAVRSLESAVKNGQLQATKQETDIFIYPGYQFKIVDKMVTNFHLPKSSLLMLVSAFIGHEQMQRIYQYAIDEKYRFFSYGDAMLLERNDDL

SEQ ID NO: 73459 - protein, 340 aa, unidentified
  source 1..340: note = Unknown
  REGION 1..340: note = tr|D1KBG3|D1KBG3_9GAMM S-adenosylmethionine:tRNA ribosyltransferase-isomerase OS=uncultured SUP05 cluster bacterium OX=655186 GN=queA PE=3 SV=1
MLLSDFDFNLPNELIAQHPPKKRTDSNLLVAQSTIIDTKFHKIEDFISPGDLLVMNNTRVIPARLFGHKESGGKVEIMIERLLNDHQVLAMMKASRAPKIDSFITIENGEKAQVISKKNGFYTLNFITNSLLDLLDNVGHIPLPPYIERGDEQADLERYQTVFAKHEGAVAAPTAGLHFDDELLLSLKTKGVDHCFVTLHVGAGTFQPVKADKITDHKMHSEYFEIDQITVDKINQTKSNGGRIIAVGTTAVRSVESAAKSGTLKAIKGETDIFIYPGYEFKIVDKLITNFHLPKSSLLMLVSAFIGRDKMMEIYQHAIDKKYRFFSYGDAMLLEKHSDK

SEQ ID NO: 73460 - protein, 342 aa, Thiohalocapsa sp.; identical to SEQ ID NO: 65213
  REGION 1..342: note = tr|V4JYR0|V4JYR0_9GAMM S-adenosylmethionine:tRNA ribosyltransferase-isomerase OS=uncultured Thiohalocapsa sp. PB-PSB1 OX=1385625 GN=queA PE=3 SV=1

SEQ ID NO: 73461 - protein, 359 aa, Undibacterium parvum
  REGION 1..359: note = tr|A0A3Q9BRS9|A0A3Q9BRS9_9BURK S-adenosylmethionine:tRNA ribosyltransferase-isomerase; OS = Undibacterium parvum OX=401471 GN=queA PE=3 SV=1
MTYSLSDFDFVLPEALIAQLPLPQRSASRLLHVGTDTLSDQSFADVLEHLTAGDLLVFNDTRVLKARFFGVKESGGKVEVLVERVLANTDEQRAVLAQVRASKSPPAGTKIRLADQFDVIVGERAGEFYTLNFPSDVFELIEAHGRLPLPPYITHDADDFDEQRYQTVYSRVPGAVAAPTAGLHFDEALLERCRAKGINFAYVTLHVGAGTFQPVRTENLADHNMHSEWYTISEESVAAVRATKASGKAVVAVGTTSMRALESASQSGQLQAGSADTRLFITPGYVFKTVDRLITNFHLPKSSLLMLVSAFAGYDRIRAAYRHAIKQQYRFFSYGDAMLLSNASSSAFSSTDNSPEHKE

SEQ ID NO: 73462 - protein, 349 aa, Undibacterium pigrum
  REGION 1..349: note = tr|A0A318JTR0|A0A318JTR0_9BURK S-adenosylmethionine:tRNA ribosyltransferase-isomerase; OS = Undibacterium pigrum OX=401470 GN=queA PE=3 SV=1
MSYSLSDFDFELPEALIAQTPLPDRTASRLLHVDGDTLVDRHFADIINQLNAGDLLVFNDTRVLKARFFGVKESGGKIQMLVERVLSNNDKERSVLAQMRASKSPLPGSKIRLADSFDVIVGERVGEFFTLYFPSDIFTLLETYGRLPLPPYIEHDADDFDEQRYQTVYNRVPGAVAAPTAGLHFDEALLQRCQDKGIKLAYVTLHVGAGTFQPVRTENLADHQMHSEWYTVPDETVAAVQATKAAGGKVVAVGTTSMRALESASQTGSLQTGSDDTRLFITPGYVFKTVDRLITNFHLPKSTLMMLVSAFAGYDRVRAAYAHAIAQQYRFFSYGDAMLLTNSSGEDHA

SEQ ID NO: 73463 - protein, 363 aa, Undibacterium sp.
  REGION 1..363: note = tr|A0A3S0GNM8|A0A3S0GNM8_9BURK S-adenosylmethionine:tRNA ribosyltransferase-isomerase; OS = Undibacterium sp. S11R28 OX=2495591 GN=queA PE=3 SV=1
MTYSLSDFDFVLPEALIAQMPLPQRSASRLLLVDGDNLCDQHFCDVLEQLSAGDLLVFNDTRVLKARFFGVKESGGKVEVLVERVLANTSEQHAVLAQVRASKSPPAGTRIRLADQFDVIVGARVGEFYTLNFPSDVFELIEAHGRLPLPPYITHDADGFDEQRYQTVYSRVPGAVAAPTAGLHFDEALLERCRAKGVNFAYVTLHVGAGTFQPVRTENLADHAMHSEWYTISPETVAAVRATKLDGKNVVAVGTTSMRALESASQSGTLEAGSADTKLFITPGYVFKTVDRLITNFHLPKSTLLMLVSAFAGYDRIRAAYAHAIAGQYRFFSYGDAMFLSNATASVIANTSLSTDNSPEAKE

SEQ ID NO: 73464 - protein, 349 aa, unidentified
  source 1..349: note = Unknown
  REGION 1..349: note = tr|A6ER93|A6ER93_9BACT S-adenosylmethionine:tRNA ribosyltransferase-isomerase OS=unidentified eubacterium SCB49 OX=50743 GN=queA PE=3 SV=1
MKLSNFGFELPDELLAEYPSENRDESRLMVLNRKEQTIEHKKFKDLIDYFEEDDILCLNNTKVFPARLFGNKEKTGARIEVFLLRELNSETRLWDVLVDPARKIRIGNKLYFGDDETLVAEVIDNTTSRGRTLRFLFDGSYEEFRNKLKELGETPLPKYIKRDVEEDDAERYQTIYAKEEGAVAAPTAGLHFSKHLLKRFEIKGVNVAEVTLHVGLGTFSAVEVEDLSKHKMDSEEMHIGKETVDLINQGLIDKRRICAVGTTVMRSLESSVSSNHTLNEFSGWTNKFIFPPYDFSIANCMITNFHTPKSTLLMMVSAFAGHDFTQRAYEEAIKEKYNFYSYGDAMLII

SEQ ID NO: 73465 - protein, 347 aa, Ureibacillus terrenus
  REGION 1..347: note = tr|A0A540V017|A0A540V017_9BACL S-adenosylmethionine:tRNA ribosyltransferase-isomerase; OS = Ureibacillus terrenus OX=118246 GN=queA PE=3 SV=1
MKIDEFDFDLPEELIAQTPLKDRAASRLLVVNPFTKEIEHHQFPHIVEELNPGDCLVLNDTRVMPARLFGVKEETGAHIEVLLLKQIGENRWETLVRPAKRVKVGTTVSFGDGLMTATCTNTLEHGGRVFEFHYDGIFYEVLDKLGEMPLPPYIHEKLEDKERYQTVYAKEIGSAAAPTAGLHFTEELLEKIRNKGVEIVFITLHVGLGTFRPVTSDTIEEHKMHSEFYSISDSAAETINRVKARGGKVVAVGTTTTRTLETVASKYDGKIKGEQGWTDIFIYPGYEFKCIDGLITNFHLPKSTLVMLVCALAGKETIFHAYSEAIKERYRFFSFGDAMYIRPKKSN

SEQ ID NO: 73466 - protein, 345 aa, Ureibacillus thermophilus
  REGION 1..345: note = tr|A0A4P6UU94|A0A4P6UU94_9BACL S-adenosylmethionine:tRNA ribosyltransferase-isomerase; OS = Ureibacillus thermophilus OX=367743 GN=queA PE=3 SV=1
MKIEEFDFDLPEELIAQTPLKDRAASRLLVVTPYTKEIEHHQFSHIVEELNPGDCLVLNDTRVMPARLFGIKEETGAHVEVLLLKQLDNNRWETLVKPAKRVKIGTKITFGDGRMTATCTDILEHGGRIFEFHYDGIFYEVLDELGEMPLPPYIHEKLEDKERYQTVYAKEIGSAAAPTAGLHFTEELLEQIRNKGVEIVFITLHVGLGTFRPVTSDTIEEHKMHSEFYSISESAAETLNRVKANGGKVIAVGTTSTRTLETVASKYDGKIKAEQGWTDIFIYPGYEFKCIDGLVTNFHLPKSTLVMLVSALAGKETIFYAYEEAIKERYRFFSFGDAMFIRPKR

SEQ ID NO: 73467 - protein, 342 aa, Uruburuella suis
  REGION 1..342: note = tr|A0A4R2ME06|A0A4R2ME06_9NEIS S-adenosylmethionine:tRNA ribosyltransferase-isomerase; OS = Uruburuella suis OX=252130 GN=queA PE=3 SV=1
MQLADFDFNLPEPLIAQHPPAVRGSSRLLAALPDTPIADKMFADLPDWVQPGDVLVFNNTKVMKARLFGQKESGGKIEALIERVVDAHTALAHVRSSKSPKPGTQLVFEGGIEATMLERQGELFCLRFAGSESVYELLARHGHLPLPPYIERAADDEDDSRYQTVYAKHQGAVAAPTAGLHFTDELLAQLKDKGVHMAEVTLHVGAGTFQPVRVDNIAEHKMHSEWYEVPPQVVALIEAAKARGNKVWAVGTTSMRALESAARASGRLQAGGGDTDIFITPGYRFKVVDRLITNFHLPKSTLLMLVSAFSGTAHIRAVYNHAIEQQYRFFSYGDAMILGLSE

SEQ ID NO: 73468 - protein, 344 aa, Vagococcus acidifermentans
  REGION 1..344: note = tr|A0A430B2Y2|A0A430B2Y2_9ENTE S-adenosylmethionine:tRNA ribosyltransferase-isomerase; OS = Vagococcus acidifermentans OX=564710 GN=queA PE=3 SV=1
MTLTTSDFDFDLPEELIAQTPLADRAASRLLVLDKATGNIADKQFSDILDELNPGDALVMNDTRVLPARLHGEKPDTGGHLEVLLLMNTSGDRWETLIKPARRAKAGTRISFGDGRLQAVVVEELAHGGRIIEFSYSGVFLEILESLGEMPLPPYIKERLADQERYQTVYAKENGSAAAPTAGLHFTEDLLTAIQEKGVKLVYLTLHVGLGTFRPVSVENIDEHQMHSEFYRLTEEAAAILNDVKDQGGRIIAVGTTSIRTLETIGSKYDGKLCADSGWTDIFIKPGYTFKVVDAFSTNFHLPMSTLIMLVSAFAGREQVMAAYEHAVAERYRFFSFGDAMFVK

SEQ ID NO: 73469 - protein, 344 aa, Vagococcus carniphilus
  REGION 1..344: note = tr|A0A430B3P0|A0A430B3P0_9ENTE S-adenosylmethionine:tRNA ribosyltransferase-isomerase; OS = Vagococcus carniphilus OX=218144 GN=queA PE=3 SV=1
MTLQTSDFDFDLPEELIAQTPLKNRAASKLLILDKETGKVEDKHFNDILDELNEGDALVMNDTRVLPARLHGEKPETGGHLEVLLLNNIEGDRWETLIKPAKRAKVGTAISFGDGRLKAIVKEELEHGGRIIDFTYEGVFLENLESLGEMPLPPYIKETLDDQERYQTVYAKENGSAAAPTAGLHFTQELLEKIEAKGVKLVYLTLHVGLGTFRPVSVEDLDNHHMHSEFYRLTEEAAEVLREVKASGGRVVAVGTTSIRTLETIGSKFEGDIQADSGWTEIFIKPGYEFKVVDAFSTNFHLPMSTLIMLVSAFAGREHVLHAYEHAVEEKYRFFSFGDAMFVK

SEQ ID NO: 73470 - protein, 345 aa, Vagococcus elongatus
  REGION 1..345: note = tr|A0A430B156|A0A430B156_9ENTE S-adenosylmethionine:tRNA ribosyltransferase-isomerase; OS = Vagococcus elongatus OX=180344 GN=queA PE=3 SV=1
MKTYTTDDFDFELPETLIAQTPLENREASRLLMLDHKTGKIHDKHFTDIIDELDAGDALVMNDTRVLPARIYGIKPATGGQLEVLLLKNIQGDRWETLIKPAKRAKVGTVISFGDGHLQATVIEELEHGGRVIDFQYQGVFLEILETLGEMPLPPYIKTRLEDPNRYQTVYAKENGSAAAPTAGLHFTEELLKKIEKKGIKLVYLTLHVGLGTFRPVSVVNIAEHHMHSEFYQLTDEAAAVLNDVKHQGGKIVAVGTTSIRTLETIGSKFSGEIQGDSGWTEIFITPGYEFKVVDAFVTNFHLPKSTLVMLVSAFAGRDQVLSAYKHAVSEKYRFFSFGDAMFIK

SEQ ID NO: 73471 - protein, 344 aa, unidentified
  source 1..344: note = Vagococcus entomophilus
  REGION 1..344: note = tr|A0A430AH67|A0A430AH67_9ENTE S-adenosylmethionine:tRNA ribosyltransferase-isomerase; OS = Vagococcus entomophilus OX=1160095 GN=queA PE=3 SV=1
MGLTTEDFDFILPDELIAQIPLKNRETSRLLILDHHTGEMEDRHFYDIVEELNPGDALVMNNTRVLPARLYGEKPDTGGHLEVLLLNNRQGNEWETLIKPAKRAKVGTIISFGDGRLKAEVKKELEHGGRMIEFQYEGVFLEILESLGEMPLPPYIKERLEDPDRYQTVYAKENGSAAAPTAGLHFTTELLEKIQEKGVKLVYLTLHVGLGTFRPVSVENIEEHTMHSEFYKLTQEAADQLNAVKKNGGKIVAVGTTSIRTLETIGTKFEGEIQADSGWTDIFITPGYNFKIVDAFSTNFHLPKSTLVMLVSAFAGRDNTLAAYAHAVEERYRFFSFGDAMFVK

SEQ ID NO: 73472 - protein, 344 aa, Vagococcus fessus
  REGION 1..344: note = tr|A0A430A8Z5|A0A430A8Z5_9ENTE S-adenosylmethionine:tRNA ribosyltransferase-isomerase; OS = Vagococcus fessus OX=120370 GN=queA PE=3 SV=1
MTFTTNDFDFDLPEELIAQTPLADRQSSRLLVVDKETGELQDKHFYDILDELNEGDALVMNNTRVLPARLYGEKPDTGGHLEVLLLTNTEGNQWETLIKPAKRAKKGTVISFGDGRLKAEVIEELEHGGRIIEFQYEGVFLEIIESLGEMPLPPYIKERLEDPNRYQTVYAEENGSAAAPTAGLHFTEELLEKIKAKGVKLVYLTLHVGLGTFRPVNVESIEDHEMHSEFYKLTEESAAALREVKANGGRIVAVGTTSIRTLETIGTKFNGDIKADSGWTDIFITPGYEFKLVDAFSTNFHLPKSTLVMLVSAFATRDTVMSAYHHAIEEKYRFFSFGDAMFVK

SEQ ID NO: 73473 - protein, 344 aa, Vagococcus fluvialis
  REGION 1..344: note = tr|A0A369B2T2|A0A369B2T2_9ENTE S-adenosylmethionine:tRNA ribosyltransferase-isomerase; OS = Vagococcus fluvialis OX=2738 GN=queA PE=3 SV=1
MTLQTSDFDFYLPEELIAQTPLKDRASSKLLILDKETGDIKDKHFEDIIDELNEGDALVMNNTRVLPARLHGEKPDTGGHLEVLLLNNTEGDTWETLIKPAKRAKVGTNISFGDGRLTAVVKEELEHGGRIIEFSYEGIFIENLEALGEMPLPPYIKEKLDDQERYQTVYAKENGSAAAPTAGLHFTKELLEKIEAKGVKLVYLTLHVGLGTFRPVSVEDLESHHMHSEFYSLSEESAASLREIKAQGGRIVAVGTTSIRTLETIGTKFNGEIQADSGWTDIFIKPGYEFKLVDAFSTNFHLPMSTLVMLVSAFAGREEVLHAYNHAVKEEYRFFSFGDAMFVK

SEQ ID NO: 73474 - protein, 344 aa, Vagococcus fluvialis
  REGION 1..344: note = tr|A0A1X6WMI9|A0A1X6WMI9_9ENTE S-adenosylmethionine:tRNA ribosyltransferase-isomerase; OS = Vagococcus fluvialis bH819 OX=1255619 GN=queA PE=3 SV=1
MTLQTSDFDFHLPEELIAQTPLKDRTASKLLILDKKTGDIQDKHFHDILDELHPGDALVMNNTRVLPARLYGEKPETGGHLEVLLLNNIENDTWETLIKPAKRAKVGTEISFGDGRLKAVVKEELEHGGRIIDFAYEGVFLENLEALGEMPLPPYIKETLEDQERYQTVYAKENGSAAAPTAGLHFTQELMEKIEAKGIKIVYLTLHVGLGTFRPVNVEDLDNHHMHSEFYALSEESAESLRQIKATGGRIVAVGTTSIRTLETIGTKFNGDIQADSGWTEIFIKPGYEFKLVDAFTTNFHLPMSTLIMLVSAFSTRENVLNAYEHAVAEEYRFFSFGDAMFVK

SEQ ID NO: 73475 - protein, 344 aa, unidentified
  source 1..344: note = Vagococcus humatus
  REGION 1..344: note = tr|A0A429Z6E0|A0A429Z6E0_9ENTE S-adenosylmethionine:tRNA ribosyltransferase-isomerase; OS = Vagococcus humatus OX=1889241 GN=queA PE=3 SV=1
MTLTTEDFDFDLPEELIAQTPIEHREESRLLVLDSKSGEIEDRHFYDIIDELNPGDALVMNNTRVLPARLYGEKPETGGHLEVLLLTNTEGNTWETLIKPARRAKVGTEITFGDGRLTAVVKEELEHGGRIVEFSYDGVFLEILESLGEMPLPPYIKERLDDPDRYQTVYAKENGSAAAPTAGLHFTQDLLKQIEAKGVKLVYLTLHVGLGTFRPVSVDNIEEHTMHSEFYKLSEEAAQTLNQVRQAGGRIIAVGTTSIRTLETIGSKFDGDIQADSGWTDIFIKPGYTFKVVDAFSTNFHLPKSTLVMLVSAFASRELVLEAYQHAIEEKYRFFSFGDAMFIK

SEQ ID NO: 73476 - protein, 344 aa, Vagococcus lutrae
  REGION 1..344: note = tr|A0A429ZDB2|A0A429ZDB2_9ENTE S-adenosylmethionine:tRNA ribosyltransferase-isomerase; OS = Vagococcus lutrae OX=81947 GN=queA PE=3 SV=1
MVMSTEDFDFDLPEKLIAQTPLKNRETSRLLVVEQATGKMADKHFTDILDELHPGDALVMNDTRVLPARLHGVKPDTGGQLEVLLLVNQEGNRWETLIKPARRAKVGTEIYFGDGRLKAKVVEELDHGGRIIDFMYEGVFLEILESLGEMPLPPYIKEQLEDPERYQTVYAKENGSAAAPTAGLHFTKELLQKIEEKGVKLVYLTLHVGLGTFRPVSVENVDEHEMHREFYRLTEEAAETLKEVKASGGRIVAVGTTSIRTLETIGTKFDGQLQADSGWTDIFIYPGYEFKIVDAFSTNFHLPKSTLVMLVSAFLGKELTMEAYAHAVSEEYRFFSFGDAMFVK

SEQ ID NO: 73477 - protein, 344 aa, Vagococcus lutrae
  REGION 1..344: note = tr|V6Q4B6|V6Q4B6_9ENTE S-adenosylmethionine:tRNA ribosyltransferase-isomerase OS=Vagococcus lutrae LBD1; OX = 1408226 GN=queA PE=3 SV=1
MVMSTEDFDFDLPEKLIAQTPLKNRETSRLLVVEQATGKMADKHFTDILDELHPGDALVMNDTRVLPARLHGVKPDTGGQLEVLLLVNQEGNRWETLIKPARRAKVGTEIHFGDGRLKAKVVEELDHGGRIIDFMYEGVFLEILESLGEMPLPPYIKEQLEDPERYQTVYAKENGSAAAPTAGLHFTKELLQKIEEKGVKLVYLTLHVGLGTFRPVSVENVDEHEMHREFYRLTEEAAETLREVKASGGRIVAVGTTSIRTLETIGTKFEGQLQADSGWTDIFIYPGYEFKIVDAFSTNFHLPKSTLVMLVSAFLGKELTMEAYAHAVSEEYRFFSFGDAMFVK

SEQ ID NO: 73478 - protein, 344 aa, unidentified
  source 1..344: note = Vagococcus martis
  REGION 1..344: note = tr|A0A1V4DIC3|A0A1V4DIC3_9ENTE S-adenosylmethionine:tRNA ribosyltransferase-isomerase; OS = Vagococcus martis OX=1768210 GN=queA PE=3 SV=1
MTLKTSDFDFDLPEELIAQTPLENRASSKLLILDSKTGAIEDTQFPAIIDELNEGDALVMNDTRVLPARLHGEKPDTGGHLEVLLLTNTTGDTWETLIKPAKRAKKGTVISFGDGALKAVVDEELEHGGRMITFSYDGVFLEILESLGEMPLPPYIKERLSDNDRYQTVYAKENGSAAAPTAGLHFTPDVLKKIEDKGVKLVYLTLHVGLGTFRPVSVDDVENHKMHSEFYRLTKDAADTLNAVKENGGKVVAVGTTSIRTLETIGTKFDGKLQEDNGWTDIFIKPGYEFKIVDAFLTNFHLPMSTLIMLVSAFAGKENVLHAYEHAVKERYRFFSFGDAMFVK

SEQ ID NO: 73479 - protein, 344 aa, Vagococcus penaei
  REGION 1..344: note = tr|A0A1Q2D6S7|A0A1Q2D6S7_9ENTE S-adenosylmethionine:tRNA ribosyltransferase-isomerase; OS = Vagococcus penaei OX=633807 GN=queA PE=3 SV=1
MTLSTSDFDFYLPEELIAQTPLKNRVSSRLLVLDSKTGQMQDKHFSDIIDELHPGDALVMNNTRVLPARLHGEKPDTGGHLEVLLLTNTEGDTWETLIKPAKRAKKGTVISFGDGRLMATVTEELEHGGRMIDFTYDGVFLETLESLGEMPLPPYIKEKLEDNDRYQTVYAKENGSAAAPTAGLHFTKDLLEKIAAKGVKLVYLTLHVGLGTFRPVSVDDVENHTMHSEFYRLTEEAATELRAIKAAGGRIVAVGTTSIRTLETIGIKFNGEIHADSGWTDIFIKPGYTFKLVDAFSTNFHLPKSTLIMLVSAFAGRETTLAAYAHAVTERYRFFSFGDAMFVK

SEQ ID NO: 73480 - protein, 344 aa, Vagococcus salmoninarum
  REGION 1..344: note = tr|A0A429ZGF8|A0A429ZGF8_9ENTE S-adenosylmethionine:tRNA ribosyltransferase-isomerase; OS = Vagococcus salmoninarum OX=2739 GN=queA PE=3 SV=1
MTLSTEDFDFDLPEELIAQTPLANRETSKLLTLDKETGKLTDGHFSDILDELNPGDALVLNNTRVLPARLYGEKPETGGHVEVLLLTNIEGNKWETLIKPAKRAKKGTLISFGDGRLQAEVMEEIEHGGRIIEFKYEGVFLEIIESLGEMPLPPYIKERLEDPERYQTVYAEENGSAAAPTAGLHFTKELLDKIAAKGVELVYLTLHVGLGTFRPVSVDNIAEHQMHSEFYKLTPAAAEKLQQVKAQGGRIVAVGTTSIRTLETIGTKFAGEIQADSGWTDIFITPGYQFKIVDAFSTNFHLPKSTLVMLVSAFATRDYTLAAYHHAIEERYRFFSFGDAMFVK

SEQ ID NO: 73481 - protein, 344 aa, Vagococcus sp.
  REGION 1..344: note = tr|A0A4D7CXH6|A0A4D7CXH6_9ENTE S-adenosylmethionine:tRNA ribosyltransferase-isomerase; OS = Vagococcus sp. MN-17 OX=2571750 GN=queA PE=3 SV=1
MTYTTEDFDFALPEELIAQTPLENRATSRLLILNKETGEMEDKHFTDIIDELNAGDALVMNDTRVLPARIYGVKPDTGGQLEILLLNNTTGDRWETLIKPAKRAKVGTVIDFGEGKLQATVVEELEHGGRVIEFNYEGVFLEILESLGEMPLPPYIKERLEDPDRYQTVYAKENGSAAAPTAGLHFTKELLEKIEAKGIRLVYLTLHVGLGTFRPVSVDNIAEHKMHSEFYRLTEEAAQALNEVKAQGGRIVAVGTTSIRTLETIGQKFDGEIKADSGWTDIFITPGFDFKVVDAFSTNFHLPKSTLVMLVSAFAGRDNVLNAYNHAVQERYRFFSFGDAMFVK

SEQ ID NO: 73482 - protein, 344 aa, Vagococcus sp.
  REGION 1..344: note = tr|A0A429ZY62|A0A429ZY62_9ENTE S-adenosylmethionine:tRNA ribosyltransferase-isomerase; OS = Vagococcus sp. SS1995 OX=1977869 GN=queA PE=3 SV=1
MTLSTSDFDFDLPEELIAQTPLKDRVSSRLLVLDSKTGQMQDKHFSEIIDELNPGDALVMNNTRVLPARLYGEKPETGGHLEVLLLTNTDGDTWETLIKPAKRAKVGTVISFGDGRLKATVTKELDHGGRIIDFDYDGVFLEILESLGEMPLPPYIKEKLTDNERYQTVYAEENGSAAAPTAGLHFTKELLDEIKAKGVNLVYLTLHVGLGTFRPVSVEDVENHTMHSEFYRLTENAAVELNRIRQAGGRIIAVGTTSIRTLETIGTKFNGELKADSGWTDIFIKPGYEFKVVDAFSTNFHLPKSTLIMLVSAFAGRDTTLAAYEHAVKERYRFFSFGDAMFVK

SEQ ID NO: 73483 - protein, 344 aa, unidentified
  source 1..344: note = Vagococcus teuberi
  REGION 1..344: note = tr|A0A1J0A7M4|A0A1J0A7M4_9ENTE S-adenosylmethionine:tRNA ribosyltransferase-isomerase; OS = Vagococcus teuberi OX=519472 GN=queA PE=3 SV=1
MTLKTSDFDFDLPEELIAQTPLENRASSKLLILDSKTGAIEDTQFPAIIDELNEGDALVMNDTRVLPARLHGEKPDTGGHLEVLLLTNTTGDTWETLIKPAKRAKKGTVISFGNGALKAVVDEELEHGGRMITFSYDGVFLEILESLGEMPLPPYIKERLSDNDRYQTVYAKENGSAAAPTAGLHFTPVVLKKIEDKGVKLVYLTLHVGLGTFRPVSVDDVENHKMHSEFYRLTKDAADTLNAVKENGGKVVAVGTTSIRTLETIGTKFDGKLQEDNGWTDIFIKPGYEFKIVDAFLTNFHLPMSTLIMLVSAFAGKENVLHAYEHAVKERYRFFSFGDAMFVK

SEQ ID NO: 73484 - protein, 349 aa, unidentified
  source 1..349: note = Vampirococcus sp.
  REGION 1..349: note = tr|A0A410P2S2|A0A410P2S2_9BACT S-adenosylmethionine:tRNA ribosyltransferase-isomerase; OS = Vampirococcus sp. LiM OX=1930593 GN=queA PE=3 SV=1
MHHLSDYDYELPVDRIAQTPAAQRDASRLLVMERAGGRLRDKRFFQLAEDLAAGDLLVFNDTRVVPARLLGRRATGGCVEILLLGPASKRCHRPARFTYQALIKPLGRLKEGEKIFLDKGLVCRLLDPKNRIVDFDGRPAEDVMKKAGVLPLPPYVRRPPQKEDQTRYQTIFARHPGAVAAPTAGLHFTRRLLEVLRTKGVGTAFLTLHVGYGTFSPVRSDDIRRHQVHEEDFYIPAAAVKAIRRLKEGRRGRVIAVGTTVVRALEDAASEILQGDRAVDIRRSSRLFIYPPYAFRVVDGLITNFHLPRTSLLMLVAAFGGQRSILEAYRHAIEHSYRFYSYGDAMLIV

SEQ ID NO: 73485 - protein, 358 aa, unidentified
  source 1..358: note = Variibacter gotjawalensis
  REGION 1..358: note = tr|A0A0S3PXK6|A0A0S3PXK6_9BRAD S-adenosylmethionine:tRNA ribosyltransferase-isomerase; OS = Variibacter gotjawalensis OX=1333996 GN=queA PE=3 SV=1
MRTDLFDFDLPPERIALRPASPRDSARLLEVTPGASTELADRSVGDLPSLLRAGDAIVFNNTRVIPAQLFGHRLVPEGPGARISATLHKRVDGARWRAFVKNAKRLSPGDVVRFGDEGRVCFLGSLDATVEAKGDNGEVTFAFQFHGAVLDQAIAERGAMPLPPYIASKRPADERDRDDYQTMFAREEGSVAAPTAALHFTPALVERLRDAGVSVHFVTLHVGAGTFLPVKADDIEDHAMHAEFGTVSAEVAEALNAVKARGGRVLAVGSTALRLLESAASEDGTLAPFAGDTAIFITPGYRFRVADLMLTNFHLPRSTLFMLVAAFSGLDVMQRAYAHAIKDGYRFYSYGDACLLHR

SEQ ID NO: 73486 - protein, 353 aa, Variovorax boronicumulans
  REGION 1..353: note = tr|A0A1E7TXY1|A0A1E7TXY1_9BURK S-adenosylmethionine:tRNA ribosyltransferase-isomerase; OS = Variovorax boronicumulans OX=436515 GN=queA PE=3 SV=1
MRAFTLSDFDFHLPPELVAQHPATERTASRLLDGTGPAPADRIFKELPSLLRAGDLLVFNDTRVVKARLFGEKPTGGKLELLVERVLQGHEVVAHMKVSKKPPVGTTLEMVGGFRATLLGRWPEEDGALFRFGFESDAGEDPYALMQRCGHVPLPPYITHTDSADDESRYQTVFARVPGAVAAPTAALHFDEGLLAELEARGVQRANVTLHVGAGTFQPVKTENIAEHTMHAERYEVPEATQRAIAECKARGGRVVAVGTTTVRTLESWAKSGEATGDTRIFITPGFAFAHVDVLVTNFHLPKSTLMMLVSAFAGYERVMALYAHAIASGYRFFSYGDAMLLERTLHPVVQSK

SEQ ID NO: 73487 - protein, 347 aa, Variovorax boronicumulans
  REGION 1..347: note = tr|A0A250DTP9|A0A250DTP9_9BURK S-adenosylmethionine:tRNA ribosyltransferase-isomerase; OS = Variovorax boronicumulans OX=436515 GN=queA PE=3 SV=1
MRAFTLSDFDFHLPPELVAQHPATERTASRLLDGTGPAPADRIFKELPSLLRAGDLLVFNDTRVVKARLFGEKPTGGKLELLVERVLQGHEVVAHMKVSKKPPVGTTLEMVGGFRATLLGRWPEEDGALFRFGFESDAGEDPYALMQRCGHVPLPPYITHTDSADDESRYQTVFARVPGAVAAPTAALHFDEGLLAELEARGVQRANVTLHVGAGTFQPVKTENIAEHTMHAERYEVPEATQRAIAECKARGGRVVAVGTTTVRTLESWAKSGEATGDTRIFITPGFAFAHVDVLVTNFHLPKSTLMMLVSAFAGYERVMALYAHAIANGYRFFSYGDAMLLARTQD

SEQ ID NO: 73488 - protein, 349 aa, unidentified
  source 1..349: note = Variovorax guangxiensis
  REGION 1..349: note = tr|A0A3S0Z886|A0A3S0Z886_9BURK S-adenosylmethionine:tRNA ribosyltransferase-isomerase; OS = Variovorax guangxiensis OX=1775474 GN=queA PE=3 SV=1
MRAFTLSDFDFALPPELVAQHPAPERTSSRLLDGTGPAPVDRIFRNLPSLLRPGDLLVFNDTRVVKARLFGEKPTGGKLELLVERVLQGQEVVAHMKVSKKPTVGTTLEMVGGFRATLLGRWPDENGALFRFAFESDTGENPYMLMERCGHVPLPPYITHTDSAEDESRYQTVFARVPGAVAAPTAALHFDEGLLAELEANGVQRANVTLHVGAGTFQPVKTENISEHTMHAERYEVPEATQRAIAECKARGGRIVAVGTTTVRTLESWARSGEAAGDTRIFITPGFVFEHVDLLVTNFHLPKSTLMMLVSAFAGYERVMGLYAHAIAERYRFFSYGDSMLLARTNTPI

SEQ ID NO: 73489 - protein, 351 aa, unidentified
  source 1..351: note = Variovorax guangxiensis
  REGION 1..351: note = tr|A0A502DU95|A0A502DU95_9BURK S-adenosylmethionine:tRNA ribosyltransferase-isomerase; OS = Variovorax guangxiensis OX=1775474 GN=queA PE=3 SV=1
MRAFTLSDFDFVLPPDLVAQHPATERTSSRLLDGTDDTPVDRIFRDLPSLLRSGDLLVFNDTRVVKARLFGEKPTGGKLELLVERVLTSQEVVCHMKVSKKPPVGTTLRMVGGFTATLLGRWPEEDGALFRFAFASPAGEDPYALMARCGHVPLPPYIDHTDSADDESRYQTVFARVPGAVAAPTAALHFDQSLLAQLEARGVQRASVTLHVGAGTFQPVKTENIAEHTMHAERYEVPEATQRAIADCKARGGRVVAVGTTTVRTLESWAKSGEASGDTRIFITPGFAFAHIDLLITNFHLPKSTLMMLVSALAGYERVMALYAHAIERRYRFFSYGDAMLLARQPDGTTC

SEQ ID NO: 73490 - protein, 347 aa, Variovorax paradoxus
  REGION 1..347: note = tr|E6UWL1|E6UWL1_VARPE S-adenosylmethionine:tRNA ribosyltransferase-isomerase OS=Variovorax paradoxus (strain EPS) OX=595537 GN=queA PE=3 SV=1
MRAFTLSDFDFDLPPELVAQHPASERTSSRLLDGTGDAPVDRIFKDLPSLLREGDLLVFNDTRVVKARLFGEKPTGGKLELLVERVLQGQEVVAHMKVSKKPPVGTTLEMVGGFRATLLGRWPEEDGALFRFAFESDAGENPYMLMERCGHVPLPPYITHTDSVDDESRYQTVFARVPGAVAAPTAALHFDEGLLAALEARGVQRANVTLHVGAGTFQPVKTENIAEHTMHAERYEVPEATRRAIAECKARGGRVIAVGTTTVRTLESWAKSGEATGDTRIFITPGFAFAHVDVLVTNFHLPKSTLMMLVSAFAGYERVMALYANAIAHQYRFFSYGDAMLLARTQD

SEQ ID NO: 73491 - protein, 350 aa, Variovorax paradoxus
  REGION 1..350: note = tr|A0A0P9B1H5|A0A0P9B1H5_VARPD S-adenosylmethionine:tRNA ribosyltransferase-isomerase; OS = Variovorax paradoxus OX=34073 GN=queA PE=3 SV=1
MRAFTLSDFDFALPPELVAQHPATERTASRLLDGTGPAPADRIFRDLPSLLREGDLLVFNDTRVVKARLFGEKPTGGKLELLVERVLQGQEVVAHMKVSKKPPVGTTLQMVGGFRATLLGRWPEEDGALFRFAFESDSGENPYLLMERCGHVPLPPYITHDDSAEDERRYQTVFARVPGAVAAPTAALHFDEGLLAALEARGVRRANVTLHVGAGTFQPVKTENIAEHTMHAERYEVPEATQRAIAECKARGGRIVAVGTTTVRTLESWAKSGEAAGDTRIFITPGFAFAHVDLLITNFHLPKSTLMMLVSALAGYERVMALYAHAIAQRYRFFSYGDAMLLARQPRTED

SEQ ID NO: 73492 - protein, 347 aa, Variovorax sp.
  REGION 1..347: note = tr|A0A0Q6MSK0|A0A0Q6MSK0_9BURK S-adenosylmethionine:tRNA ribosyltransferase-isomerase; OS = Variovorax sp. Root318D1 OX=1736513 GN=queA PE=3 SV=1
MRAFTLSDFDFALPPELVAQHPASERTSSRLLDGTGSEPVDRIFKNLPSLLREGDLLVFNDTRVVKARLFGEKPTGGKLELLIERVLQGHEVVAHMKVSKKPPVGTTLQMVGGFRATLLGRWPDEQGALFRFGFESDAGEDPYALMARCGHVPLPPYITHTDSADDESRYQTVFARVPGAVAAPTAALHFDEALLDELDARGVQRANVTLHVGAGTFQPVKTENIAEHTMHAERYEVPETTRRAIAECKARGGRVVAVGTTTVRTLESWAKSGEATGDTRIFITPGFAFEHVDQLVTNFHLPKSTLMMLVSAFAGYEHVMALYSHAIAHRYRFFSYGDAMLLARAAL

SEQ ID NO: 73493 - protein, 347 aa, Variovorax sp.
  REGION 1..347: note = tr|A0A561CIH0|A0A561CIH0_9BURK S-adenosylmethionine:tRNA ribosyltransferase-isomerase; OS = Variovorax sp. T529 OX=2491343 GN=queA PE=3 SV=1
MRAFTLSDFDFDLPPELVAQHPAPERTSSRLLDGTGDAPADRIFKDLPSLLRAGDLLVFNDTRVVKARLFGEKPTGGKLELLVERVLQGHEVVAHMKVSKKPPVGTTLQMVGGFRATLLGRWPDEQGALFHFGFESDAGEDPYALMARCGHVPLPPYITHTDSADDESRYQTVFARVPGAVAAPTAALHFDEALLAELEARGVQRANVTLHVGAGTFQPVKTENISEHTMHAERYEVPEATQRAIADCKARGGRVVAVGTTTVRTLESWARSGEAAGDTRIFITPGFVFEHVDLLVTNFHLPKSTLMMLVSAFAGYEHVMALYAHAIAQHYRFFSYGDAMLLARAPT

SEQ ID NO: 73494 - protein, 352 aa, unidentified
  source 1..352: note = Varunaivibrio sulfuroxidans
  REGION 1..352: note = tr|A0A4R3J8R8|A0A4R3J8R8_9PROT S-adenosylmethionine:tRNA ribosyltransferase-isomerase; OS = Varunaivibrio sulfuroxidans OX=1773489 GN=queA PE=3 SV=1
MKVNAFDFELPTSAIAQHPAEPRDRARLLYLPTGDRHDGHCITDLPRLLRAGDVMVFNDTRVIPARMHAARASGGRTELTLHKQDGPALWRAFARPAKRLGAGEVLTIADGFALRVEEKHDGGELLVRFDREGAELLAALERHAIMPLPPYIKRGPEGDSADRERYQTLFADRPGAVAAPTAGLHFTPALMDAIAAAGIHSARVTLHVGAGTFLPVKADDTQNHVMHSEWGEVSPETAAAINAARAKGGRVVCVGTTSLRLLESATGDDGVVRPFCGDTDIFITPGYRFKAADVLITNFHLPKSTLFMLVCAFSGLARMKTAYAHAIAAGYRFYSYGDACLLERAAEEKDPT

SEQ ID NO: 73495 - protein, 341 aa, Veillonella atypica
  REGION 1..341: note = tr|A0A133S2E6|A0A133S2E6_9FIRM S-adenosylmethionine:tRNA ribosyltransferase-isomerase; OS = Veillonella atypica OX=39777 GN=queA PE=3 SV=1
MKVTDFDYDLPEELIAQHPVEPRDTSRLLTLDKITGEYTHKAHFYDLLDELQAGDVLVFNNTKVIPARLYGQREGSGGKVEVLLLTPCGENRWECLVKPGKKCPIGQVIVFDERLKATVLDKTDFGGRIVKFTCDGVFDDIIQEIGEMPLPPYIHEKLEDKDRYQTVYAKEKGSAAAPTAGLHFTPELLEKIKAKGVELEFVTLHVGLGTFRPVSVETIEDHDMHSEFYSVSEDTARRINEAKSKGKRIIAVGTTSIRTLESASTDDGILHATSGWTKIFIYPGYKFKMVDALVTNFHLPQSTLLMLISALAGREHCLAAYKAAVKERYRFFSFGDAMFIR

SEQ ID NO: 73496 - protein, 341 aa, Veillonella atypica
  REGION 1..341: note = tr|A0A380N3T2|A0A380N3T2_9FIRM S-adenosylmethionine:tRNA ribosyltransferase-isomerase; OS = Veillonella atypica OX=39777 GN=queA PE=3 SV=1
MKVTDFDYDLPEELIAQHPVEPRDTSRLLTLDKITGEYTHKAHFYDLLDELQAGDVLVFNNTKVIPARLYGQREGSGGKVEVLLLTPCGENRWECLVKPGKKCPIGQVIVFDERLKATVLDKTDFGGRIVEFTCDGVFDDIIQEIGEMPLPPYIHEKLEDKDRYQTVYAKEKGSAAAPTAGLHFTPELLEKIKAKSVELEFVTLHVGLGTFRPVSVETIEDHDMHSEFYSVSEDTARRINEAKSKGKRIIAVGTTSIRTLESASTDDGILHATSGWTKIFIYPGYKFKMVDALVTNFHLPQSTLLMLISALAGREHCLAAYKAAVKERYRFFSFGDAMFIR

SEQ ID NO: 73497 - protein, 340 aa, Veillonella criceti
  REGION 1..340: note = tr|A0A380NJ74|A0A380NJ74_9FIRM S-adenosylmethionine:tRNA ribosyltransferase-isomerase; OS = Veillonella criceti OX=103891 GN=queA PE=3 SV=1
MQVTDFDYELPEELIAQHPVEPRDTSRLMTLDKVTGALSHKEHFYDILDELTDNDVLVFNDTKVIPARLYGHRKGSGGKVEVLLLTPCGDNKWECLVKPGKKCPVGQELVFDDRLTGLVVDKTSFGGRIIQFEAQGVFDDIIQEIGEMPLPPYIHEKLADKDRYQTVYAREKGSAAAPTAGLHFTPELLERIKAKGVTLAFVTLHVGLGTFRPVSVDTIEDHEMHSEYYVVTAETAKTINEARQAGKRIIAVGTTSVRTLESATKNGVLQAGHDWTQIFIYPGYEYKMVDALITNFHLPQSTLLMLISALAGREHCLKAYEEAVKERYRFFSFGDAMFIR

SEQ ID NO: 73498 - protein, 341 aa, Veillonella denticariosi
  REGION 1..341: note = tr|A0A2S7ZBB0|A0A2S7ZBB0_9FIRM S-adenosylmethionine:tRNA ribosyltransferase-isomerase; OS = Veillonella denticariosi JCM 15641 OX=1298594 GN=queA; PE = 3 SV=1
MKVTDFDYELPEELIAQHPVEPRDTARLLILDKVTGAVEHKAHFYDLLDELHEGDVLVFNNTKVIPARLYGHRRESGGKVEVLLLTPCGENRWECLVKPGKKCPVGQVVEFDDRLRGTVLDKTEFGGRIIEFTCDGVFDDIIQEIGEMPLPPYIHEKLEDKDRYQTVYAKEKGSAAAPTAGLHFTPQLLDAIKAKGVSLEFVTLHVGLGTFRPVSAEIIEDHEMHSEFFVVPKDTADRINAAKRNGSRIIAVGTTSVRTLESATDDDGILQGMSGWTQIFIYPGYQFKMIDALVTNFHLPQSTLLMLISALAGREHCLAAYEEAVRERYRFFSFGDAMFIR

SEQ ID NO: 73499 - protein, 57 aa, Veillonella dispar
  REGION 1..57: note = tr|W1V1G6|W1V1G6_9FIRM S-adenosylmethionine:tRNA ribosyltransferase-isomerase (Fragment) OS=Veillonella dispar DORA_11 OX=1403949 GN=Q619_VDC00459G0001 PE=3 SV=1
YKFKMIDALVTNFHLPQSTLLMLISALAGREHCLAAYEEAVKERYRFFSFGDAMFIR

SEQ ID NO: 73500 - protein, 341 aa, Veillonella dispar
  REGION 1..341: note = tr|C4FRS0|C4FRS0_9FIRM S-adenosylmethionine:tRNA ribosyltransferase-isomerase OS=Veillonella dispar ATCC 17748 OX=546273 GN=queA PE=3 SV=1
MKVTDFDYELPEELIAQHPVEPRDTARLLTLDKVTGEVAHKEHFYDLLDELHEGDVLVFNNTKVIPARLYGQRQGSGGKVEVLLLTPCGENRWECLVKPGKKCPIGQVIEFDDRLSGTVIDKTEFGGRIIEFTCDGVFDDVIQEIGEMPLPPYIHEKLEDKDRYQTVYAKEKGSAAAPTAGLHFTPELLEKIKAKGVELEFVTLHVGLGTFRPVSAETIEDHEMHSEFFVVSQDTADRINAAKRNGRRIIAVGTTSVRTLESATNDDGVLQGISGWTQIFIYPGYKFKMIDALVTNFHLPQSTLLMLISALAGREHCLAAYEEAVRERYRFFSFGDAMFIR

SEQ ID NO: 73501 - protein, 341 aa, Veillonella montpellierensis
  REGION 1..341: note = tr|A0A096AN89|A0A096AN89_9FIRM S-adenosylmethionine:tRNA ribosyltransferase-isomerase; OS = Veillonella montpellierensis DNF00314 OX=1401067; GN = queA PE=3 SV=1
MKVTDFDYNLPEELIAQTPVYPRDSSRLMILDKLTGNIEHKHAFTDIIDELSEGDVIVFNNTKVIPARLFGHRKESGGKVEVLLLTPCGSNRWECLVKPGKKCPIGQEIIFDHRLTATVIDKTDFGGRIVEFSCEGVFDDIIEELGQMPLPPYIHETLKDQDRYQTVYAEHKGSAAAPTAGLHFTPELLKRIQDKGVTEVFITLHVGLGTFRPVSVDNVENHVMHSEFYSVSEDAAAIINQAKKAGKRIIAVGTTSVRTLESATNEAGILQAGSGNTEIFIYPGYTYKMVDALITNFHLPQSTLLMLISALAGRDHCLNAYHEAVKEKYRFFSFGDAMFIR

SEQ ID NO: 73502 - protein, 341 aa, Veillonella parvula
  REGION 1..341: note = tr|D1BLM0|D1BLM0_VEIPT S-adenosylmethionine:tRNA ribosyltransferase-isomerase OS=Veillonella parvula (strain ATCC 10790 / DSM 2008 / JCM 12972 / Te3) OX=479436; GN = qu eA PE=3 SV=1
MKVTDFDYELPEELIAQHPIEPRDTARLLTLDKVSGKVSHKEHFYDLLEELHEGDVLVFNNTKVIPARLYGHRQGSGGKVEVLLLTPCGENRWECLVKPGKKCPVGQVIEFDDRLRGIVIDKTEFGGRIIEFTCNGVFDDVIQEIGEMPLPPYIHEKLEDKDRYQTVYAKEKGSAAAPTAGLHFTPDLLEKIKAKGVELEFVTLHVGLGTFRPVSAETIEDHEMHSEFFVVSQETADRINAAKRNGRRIIAVGTTSVRTLESATNDDGVLQGMSGWTQIFIYPGYKFKMIDALVTNFHLPQSTLLMLISALAGREHCLAAYEEAVKERYRFFSFGDAMFIR

SEQ ID NO: 73503 - protein, 341 aa, Veillonella parvula
  REGION 1..341: note = tr|D1YQU5|D1YQU5_9FIRM S-adenosylmethionine:tRNA ribosyltransferase-isomerase OS=Veillonella parvula ATCC 17745 OX=686660 GN=queA PE=3 SV=1
MKVTDFDYELPEELIAQHPVEPRDTARLLTLDKVSGEVKHKGHFYDLLEELHEGDVLVFNNTKVIPARLYGHRQGSGGKVEVLLLTPCGENRWECLVKPGKKCPIGQVIEFDDRLSGVIIDKTNFGGRIIQFTCNGVFDDVIQEIGEMPLPPYIHEKLEDKDRYQTVYAKEKGSAAAPTAGLHFTPDLLEKIKAKGVELEFVTLHVGLGTFRPVSAETIEDHEMHSEFFVVPQDTANRINAAKQKGSRIIAVGTTSVRTLESATNDDGVLQGMSGWTQIFIYPGYKFKMIDALVTNFHLPQSTLLMLISALASREHCLAAYEEAVRERYRFFSFGDAMFIR

SEQ ID NO: 73504 - protein, 341 aa, Veillonella rodentium
  REGION 1..341: note = tr|A0A239YPU4|A0A239YPU4_9FIRM S-adenosylmethionine:tRNA ribosyltransferase-isomerase; OS = Veillonella rodentium OX=248315 GN=queA PE=3 SV=1
MKVTDFDYELPEELIAQHPVELRDTARLLVLDKVTGAVEHKAHFYDLLEELHEGDVLVFNNTKVIPARLYGHRRESGGKVEVLLLTPCGESRWECLVKPGKKCPIGQVIEFDDRLRGTVLDKTEFGGRIIEFTCDGVFDDIIQEIGEMPLPPYIHEKLKDKDRYQTVYAKEKGSAAAPTAGLHFTPQLLDAIKAKGVSLEFVTLHVGIGTFRPVSAESIEDHEMHSEFFVVPKDVADRINAAKRNGSRIIAVGTTSVRTLESATDDDGILQGMSGWTQIFIYPGYQFKMIDALVTNFHLPQSTLLMLISALAGREHCLAAYEEAVRERYRFFSFGDAMFIR

SEQ ID NO: 73505 - protein, 341 aa, Veillonella rogosae
  REGION 1..341: note = tr|A0A2S7Z0X7|A0A2S7Z0X7_9FIRM S-adenosylmethionine:tRNA ribosyltransferase-isomerase; OS = Veillonella rogosae JCM 15642 OX=1298595 GN=queA PE=3; SV = 1
MKVTDFDYELPEELIAQHPVEPRDTARLLTLDKVTGEVVHKEHFYDLLEELYEGDVLVFNNTKVIPARLYGHRQGSGGKVEVLLLTPCGENRWECLVKPGKKCPVGQVIEFDDRLSGTVIDKTEFGGRIIEFTCNGVFDDVIQEIGEMPLPPYIHEKLEDKDRYQTVYAKEKGSAAAPTAGLHFTPELLEKIKAKGVELEFVTLHVGLGTFRPVSAETIEDHEMHSEFFVVSQDTADRINAAKQKGSRIIAVGTTSVRTLESATNDEGILQGISGTTQIFIYPGYKFKMIDALVTNFHLPQSTLLMLISALAGREHCLAAYEEAVKERYRFFSFGDAMFIR

SEQ ID NO: 73506 - protein, 340 aa, unidentified
  source 1..340: note = Veillonella seminalis
  REGION 1..340: note = tr|K9D0D1|K9D0D1_9FIRM S-adenosylmethionine:tRNA ribosyltransferase-isomerase OS=Veillonella seminalis ACS-216-V-Col6b OX=883156 GN=queA PE=3 SV=1
MKVTDFDYELPEELIAQYPVEPRDTSRLMLLDKVTGEVAHKEHFYDIVDELTDNDVLVFNDTKVIPARLYGHRRGSGGKVEVLLLTPCGENKWECLVKPGKKCPIGQELVFDDRLTGKVIDKTSFGGRIIEFTAQGVFDDIIQEIGEMPLPPYIHEKLEDKDRYQTVYAREKGSAAAPTAGLHFTSELLERIKAKGVTLAFVTLHVGLGTFRPVSEETIEDHEMHSEYYVVTAETAKIINDAKAAGKRIVAVGTTSVRTLESATKNGVLKAGHDWTQIFIYPGYEYKMVDALITNFHLPQSTLLMLISALAGRDHCLAAYQEAVKERYRFFSFGDAMFIR

SEQ ID NO: 73507 - protein, 345 aa, Veillonella sp.
  REGION 1..345: note = tr|A0A134C8F8|A0A134C8F8_9FIRM S-adenosylmethionine:tRNA ribosyltransferase-isomerase; OS = Veillonella sp. DNF00869 OX=1384081 GN=queA PE=3 SV=1
MRNSMKVSDFNYDLPEELIAQHPVEPRDTSRLMTLDKVSGEICHKASFHSILDELSEGDVLIFNNTKVIPARLYGERKGTGGKVEALLLTPKGEHLWECLVKPGKKCLKGQLLSFGPNLEAEVIDHTDFGGRLIQFKPNGNFDEIINDIGEMPLPPYIHEKLEDKDRYQTVYAKEKGSAAAPTAGLHFTPELLDEIQRKGVQVGFVTLHVGLGTFRPVSAESIEDHDMHKEFYHVSEETAELVNRAKAEGRRVIAVGTTSVRTLESAATEVGHVRSGSDWTQIFIYPGYEYKMVDALITNFHLPQSTLLMLISALAGREHCLEAYEEAVREKYRFFSFGDAMFIR

SEQ ID NO: 73508 - protein, 142 aa, Veillonella sp.
  REGION 1..142: note = tr|R5BKQ1|R5BKQ1_9FIRM S-adenosylmethionine:tRNA ribosyltransferase-isomerase OS=Veillonella sp. CAG:933; OX = 1262980 GN=BN814_00973 PE=3 SV=1
MAFVTLHVGLGTFRPVSEETIEDHEMHSEYYVVTAETAKIINDAKAAGKRIVAVGTTSVRTLESATKDGVLQAGHDWTQIFIYPGYEYKMVDALITNFHLPQSTLLMLISALAGREHCLAAYKEAVKERYRFFSFGDAMFIR

SEQ ID NO: 73509 - protein, 341 aa, unidentified
  source 1..341: note = Veillonella tobetsuensis
  REGION 1..341: note = tr|A0A480B2X4|A0A480B2X4_9FIRM S-adenosylmethionine:tRNA ribosyltransferase-isomerase; OS = Veillonella tobetsuensis OX=1110546 GN=queA PE=3 SV=1
MKVTDFDYDLPEELIAQHPVEPRDTSRLLTLDKITGEYTHKEHFYELLDELQDGDVLVFNNTKVIPARLYGYREGSGGKVEVLLLTPCGENRWECLVKPGKKCPIGQVIVFDERLKATVIDKTDFGGRIVEFACDGVFDDIIQDIGEMPLPPYIHEKLEDKDRYQTVYAKEKGSAAAPTAGLHFTPELLEKIKAKGVELEFVTLHVGLGTFRPVSVDNIENHDMHSEFYSVSEDTARRINEAKEKGKRIIAVGTTSIRTLESASTDDGVLHATSGWTKIFIYPGYKFKMVDALVTNFHLPQSTLLMLISALAGREHCLAAYEAAVKERYRFFSFGDAMFIR

SEQ ID NO: 73510 - protein, 341 aa, unidentified
  source 1..341: note = Veillonella tobetsuensis
  REGION 1..341: note = tr|A0A480B8Q6|A0A480B8Q6_9FIRM S-adenosylmethionine:tRNA ribosyltransferase-isomerase; OS = Veillonella tobetsuensis OX=1110546 GN=queA PE=3 SV=1
MKVTDFDYDLPEELIAQHPVEPRDTSRLLTLDKITGEYTHKEHFYELLDELQDGDVLVFNNTKVIPARLYGYREGSGGKIEVLLLTPCGENRWECLVKPGKKCPIGQVIVFDKRLKATVIDKTDFGGRIVEFACDGVFDDIIQDIGEMPLPPYIHEKLEDKDRYQTVYAKEKGSAAAPTAGLHFTPELLEKIKAKGVELEFVTLHVGLGTFRPVSVDTIENHDMHSEFYSVSEDTARRINEAKEKGKRIIAVGTTSIRTLESASTDDGVLHATSGWTKIFIYPGYKFKMVDALVTNFHLPQSTLLMLISALAGREHCLAAYEAAVKERYRFFSFGDAMFIR

SEQ ID NO: 73511 - protein, 339 aa, unidentified
  source 1..339: note = Veillonellaceae bacterium
  REGION 1..339: note = tr|A0A134C9W8|A0A134C9W8_9FIRM S-adenosylmethionine:tRNA ribosyltransferase-isomerase; OS = Veillonellaceae bacterium DNF00626 OX=1588754 GN=queA; PE = 3 SV=1
MKLEEFNYDLPKELIAQEPVEPRDSCRLLYLDKQTGAWEHHHFRDILDEVHKGDVFVFNNTKVIPARLHGNRKDTGGKVEVLLLTPKGDDVWEVLVNPGRKALPGQEIVFSEHFSCTVLEKTEFGGRKVVFHYDGDFDESLDKIGEMPTPPYIHKKLENKDEYQTVYAKYKGSAAAPTAGLHFTPELLDALRKKGAELLFVTLHVGIGTFRPVSEENIEDHEMHKEWYTIDEETANKINKARSEKRRIIAVGTTSVRTLESAGQSGIVQAGHNWTQLYIYPGYQWHIVDAIVTNFHLPESTLIMMMASFAGREHVLAAYEEAVKEKYRFFSFGDAMFIK

SEQ ID NO: 73512 - protein, 339 aa, unidentified; identical to SEQ ID NO: 63201
  source 1..339: note = Veillonellaceae bacterium
  REGION 1..339: note = tr|A0A316M015|A0A316M015_9FIRM S-adenosylmethionine:tRNA ribosyltransferase-isomerase; OS = Veillonellaceae bacterium OX=2049049 GN=queA PE=3 SV=1

SEQ ID NO: 73513 - protein, 347 aa, unidentified
  source 1..347: note = Ventosimonas gracilis
  REGION 1..347: note = tr|A0A139SJG5|A0A139SJG5_9GAMM S-adenosylmethionine:tRNA ribosyltransferase-isomerase; OS = Ventosimonas gracilis OX=1680762 GN=queA PE=3 SV=1
MRVADFYFDLPKSLIARYPLKRRTDSRLLLLDGRSGAVQHQRFTELPQQLKAGDLLVLNDTKVIAARLFGHKTSGGRVEILLERLLDDRRALVQLRSSKTPKAGSLIRLGGGTEARLLSRHNALFELEFNQAILPLLEQAGQIPLPPYLEREAEVLDGERYQTVYATHPGAVAAPTAGLHFDQALLAKLKSQGVESARVTLHVGAGTFSPVRSEQVEQHQMHSERFEVSQALVDAVAACRARGGRVIAVGTTCARALESAALSGKLRAQQGETDIFLYPGRRFHVVDKLLTNFHLPGSTLLMLVAAFAGYRNCMQAYQVAIAEQYRFFSYGDAMLISRNPNADAPAD

SEQ ID NO: 73514 - protein, 384 aa, Verminephrobacter eiseniae
  REGION 1..384: note = tr|A1WKC6|A1WKC6_VEREI S-adenosylmethionine:tRNA ribosyltransferase-isomerase OS=Verminephrobacter eiseniae (strain EF01-2) OX=391735 GN=queA PE=3 SV=1
MTDLPRSGAARAHTLSDFDFTLPPELIAQHPAPERSAARLLDGRTAPPVDRIFRELPGLLRAGDLLVSNDTRVLNARLFGAKASGGKLELLIERVLPAAAGSAGNEVAAHMKVGKKPQPGSTVQIAGGRQAGGFDATLLGRWPTADGPLYRFALHGPANESPWELMQRHGHLPLPPYIVRRQNTGHDPHGAEDSQRYQTLFARHPGAVAAPTAALHFDQSVLSALAARGIEHASITLHVGAGTFLPVKTENLEQHRMHSEWYRLPPSTLTALERCRQRGARVVAVGTTTVRTLESWARSGLATGETSIFITPGFPFQVVDLLITNFHLPKSTLMMLVSAFAGHAHVMALYRHAMAQRYRFFSYGDAMLLARQHDGPNRPALDAI

SEQ ID NO: 73515 - protein, 384 aa, Verminephrobacter sp.
  REGION 1..384: note = tr|A0A4Q2LA57|A0A4Q2LA57_9BURK S-adenosylmethionine:tRNA ribosyltransferase-isomerase; OS = Verminephrobacter sp. Larva24 OX=2509434 GN=queA PE=3; SV = 1
MTDLPRSGAARAHTLSDFDFTLPPELIAQHPAPERSAARLLDGRTAPPVDRIFRELPGLLRAGDLLVSNDTRVLNARLFGAKASGGKLELLIERVLPAAAGSAGNEVAAHMKVGKKPQPGSTVQIAGGRQAGGFDATLLGRWPMADGPLYRFALHGPANESPWELMQRHGHLPLPPYIVRRQNTGHDPHEAEDSQRYQTLFARHPGAVAAPTAALHFDPSVLSALAARGIEHASITLHVGAGTFLPVKTENLEQHRMHSEWYRLPPSTLTALERCRQRGARVVAVGTTTVRTLESWARSGLATGETSIFITPGFPFQVVDLLITNFHLPKSTLMMLVSAFAGHAHVMALYRHAMAQRYRFFSYGDAMLLARQHDGPSHLALDAI

SEQ ID NO: 73516 - protein, 326 aa, unidentified
  source 1..326: note = Verrucomicrobia bacterium
  REGION 1..326: note = tr|A0A1Q6V5Q2|A0A1Q6V5Q2_9BACT S-adenosylmethionine:tRNA ribosyltransferase-isomerase; OS = Verrucomicrobia bacterium 13_2_20CM_55_10 OX=1805420; GN = queA PE=3 SV=1
MTARLSDYDYDLPRELIAQRPLQRREDSRMMVLHRDRQTIDHCQFHELKKFLRAGDLLVLNDTRVLPARRFSDDGVVEFLFLEHLGPKRWKCLVKPGRKMRVGAAARINGVTLRVEEITDGGARIVTLDEDIDPYAGGSMPLPPYINRLSDEKDAARYQTVFANAAGAIAAPTAGLHFTPEILSELPHTFVTLHVGPGTFLPVQSDNIAEHRMHSEHFSISPEVARRINDARRIIAVGTTTVRTLESARGADGKVQAQEGATDLFIYPPYEFRMVDVLLTNFHLPRSTLVMLVSAFASREFLLRAYEEAIRQRYRFYSYGDCMLIL

SEQ ID NO: 73517 - protein, 367 aa, unidentified
  source 1..367: note = Verrucomicrobia bacterium
  REGION 1..367: note = tr|A0A3R7QBG0|A0A3R7QBG0_9BACT S-adenosylmethionine:tRNA ribosyltransferase-isomerase; OS = Verrucomicrobia bacterium TMED71 OX=1986878 GN=queA; PE = 3 SV=1
  VARIANT 13: note = Xaa can be any naturally occurring amino acid
  VARIANT 48: note = Xaa can be any naturally occurring amino acid
  VARIANT 50: note = Xaa can be any naturally occurring amino acid
  VARIANT 169: note = Xaa can be any naturally occurring amino acid
  VARIANT 171: note = Xaa can be any naturally occurring amino acid
  VARIANT 177: note = Xaa can be any naturally occurring amino acid
  VARIANT 215: note = Xaa can be any naturally occurring amino acid
  VARIANT 241: note = Xaa can be any naturally occurring amino acid
  VARIANT 245: note = Xaa can be any naturally occurring amino acid
  VARIANT 249: note = Xaa can be any naturally occurring amino acid
  VARIANT 253: note = Xaa can be any naturally occurring amino acid
  VARIANT 282: note = Xaa can be any naturally occurring amino acid
  VARIANT 285: note = Xaa can be any naturally occurring amino acid
  VARIANT 289: note = Xaa can be any naturally occurring amino acid
  VARIANT 294: note = Xaa can be any naturally occurring amino acid
  VARIANT 303: note = Xaa can be any naturally occurring amino acid
  VARIANT 306: note = Xaa can be any naturally occurring amino acid
  VARIANT 328: note = Xaa can be any naturally occurring amino acid
  VARIANT 331: note = Xaa can be any naturally occurring amino acid
  VARIANT 341: note = Xaa can be any naturally occurring amino acid
  VARIANT 343: note = Xaa can be any naturally occurring amino acid
MDAALFDYELPPXRIAQEPLPARDESRLLVVHRSSQTIEHRKFRDLLXYXKPTDLFFRNTAKVLPARIFARRPTGGRVECLLLRPAGKASSDSNKTSNEQWWCLLKPGKKLPEGAVFSVENELDATVLEKNAQAEYRVSFSMKNEGSVASMAENLGKMPLPPYIDREKXDXRDRSDXDRYQTVYAKSEKTVAAAAPTAGLHFTPALVKSIEGLGXQFHDLTLHVGMGTFKPLDEGSVESHXIHRXIYEXPESXQKALREAPEGGERRICIGTTSVRSVEDYXRKXGTVXSPVFXGEAALFLYXPCXFLGVDALITNFHLPKSTLLCLXSAXLKPGSTEGIXWXKDIYKEALAHDYRFLSYGDAMLIL

SEQ ID NO: 73518 - protein, 323 aa, unidentified
  source 1..323: note = Verrucomicrobia subdivision
  REGION 1..323: note = tr|A0A0R2RGE0|A0A0R2RGE0_9BACT S-adenosylmethionine:tRNA ribosyltransferase-isomerase (Fragment) OS=Verrucomicrobia subdivision 6 bacterium BACL9 MAG-120507-bin52 OX =1655590 GN=ABR82_09070 PE=3 SV=1
TTPAHPRDSARLLHIDRATGVMSDLTIRDLPSLLSPADLLVLNNSKVIPARLICSENRTELLLLEETSPGWWTALGTPSKRLQPGTIVSPDPIPGSTPARPAPQLRVEKHIPGGQLVLKVLGDSLNLEQYGLPPLPPYILKTRKVQGQPDFQPSDPIDYQTTYAQPSGSVAAPTAGLHFTPELLAQFSHAFVTLHVGLGTFRPIKTADFRDHPMHEEKYEIPLGLAEKVAAATRTIAVGTTSARVLESAPNLNPHHGTTSAFFYPPYQFQRISGLLTNFHLAHSTLLLLVAAFAGPELTLRAYRHALEKKYRFFSFGDAMLIL

SEQ ID NO: 73519 - protein, 361 aa, unidentified
  source 1..361: note = Verrucomicrobia subdivision
  REGION 1..361: note = tr|A0A520RT48|A0A520RT48_9BACT S-adenosylmethionine:tRNA ribosyltransferase-isomerase; OS = Verrucomicrobia subdivision 3 bacterium OX=2052186; GN = queA PE=3 SV=1
MKTDAFDFELPQELIAQHPIEGARDQSRLFCYHRSKQSIKHQGFQEIVSHLHAGDLLVMNNTKVIPSRLRGEKAQSGGKIELLLIEATGHQEWLAMLKPGKRAHPGTLIDLHDRHGEKSGILAKVIDKTESGHFHLRFSDGIDIMELLEKYGEIPLPPYIHREHAPSSNDSVRYQTVYAENEGSVAAPTAGLHFTPALMEALEKKGIQIAYVTLHVGLGTFNPVKAEWVNDHKMHKERYMVSAQTLKMIRDTRKRKGKITAVGTTSLRVLESLALTWKPSDPIQAMHASTDIFIYPPHTFQYTDRLITNFHLPMSSLIMLISAFVSPGDTNGVEQIKRIYNEAIKYQYRFFSYGDAMLIDS

SEQ ID NO: 73520 - protein, 323 aa, unidentified
  source 1..323: note = Verrucomicrobiaceae bacterium
  REGION 1..323: note = tr|A0A1Z9FKK1|A0A1Z9FKK1_9BACT S-adenosylmethionine:tRNA ribosyltransferase-isomerase; OS = Verrucomicrobiaceae bacterium TMED137 OX=1986879; GN = queA PE=3 SV=1
  VARIANT 110: note = Xaa can be any naturally occurring amino acid
  VARIANT 114: note = Xaa can be any naturally occurring amino acid
  VARIANT 118: note = Xaa can be any naturally occurring amino acid
MRTTDFHYELPPELIASRPLVDRESSRMMLVNRATSEISHHRFSDFPDLLPPDHLLVLNDTKVIPARLFSNDGKVELVRTDAPDPNHWWCLVRPGKKMRDGRSVEVGKSXGTVXQTNXKGERLIKWDTPPDLEVHGHLALPHYMEREPDKSDRDRYQTVYAKEEGAIAAPTAGLHFTPELLSKLDHTFLTLHVGVGTFRPVKTDDPREHDMHSERYVLGQEAAGKIQTAKKIAAVGTTVTRVLEHLARDRKLEACDGETDIFIYPSYEFKVISALQTNFHLPCSTLMMLVSAFATRDLIMEAYAKAVEEKYRFYSYGDCMLII

SEQ ID NO: 73521 - protein, 327 aa, unidentified
  source 1..327: note = Verrucomicrobiaceae bacterium
  REGION 1..327: note = tr|A0A4Q3BAH1|A0A4Q3BAH1_9BACT S-adenosylmethionine:tRNA ribosyltransferase-isomerase; OS = Verrucomicrobiaceae bacterium OX=2026800 GN=queA PE=3; SV = 1
MVSSLTRDYDYQLPEGLIARYPLPQREASRMMVLHRAEQRIEHRLFSDFPEFLRQGDLVVLNDTRVIPARVFSDDRRIELLFLEAVGENAWKCLVKPGRKMRIGATVTVLGVPGQVFEIHPEGERSIQFAGPVDLDRCGELPLPPYFERSPEVSDSERYQTVFAKERGAVAAPTAGLHFTPEILAGVPHAFLTLHVGVGTFRPVQVEDVTEHRMHSERFHLPQETASAINGASRVVAVGTTTTRVLESCAREGLPLKETTGSTDIFIYPPYQFRAIGALLTNFHLPKSTLLMLVSAFAGREFVLRAYEEAVREQYRFYSYGDCMLIL

SEQ ID NO: 73522 - protein, 330 aa, unidentified
  source 1..330: note = Verrucomicrobiae bacterium
  REGION 1..330: note = tr|A0A2A2Q910|A0A2A2Q910_9BACT S-adenosylmethionine:tRNA ribosyltransferase-isomerase; OS = Verrucomicrobiae bacterium Tous-C5FEB OX=1982331; GN = queA PE=3 SV=1
MRTKDFDYHLPEELIAARPLADRAASRMLVVHRDSGRIEHRMFRDIAEYLRPDDLLVLNNTRVIPARVFSDDGSIELLCLDRLGELEWRCLVRPGKRMKLGREVSVGGIRGVVTEVFENGDRLIRWDLPLDLEKHGQLALPHYMGRVEDEADRERYQTVYAQKDGAIAAPTAGLHFTHEMLERISHAFLTLHVGVGTFRPVSAEVVTDHVMHSEKFIVTEETAKRVNSAGRVLAVGTTVTRVLEALAKQNPSAATRIAEIHHAGETDIFIHPPHEFRAIDALLTNFHLPQSTLLMLVSALAGRGLILEAYREAVAQRYRFFSYGDCMLIL

SEQ ID NO: 73523 - protein, 358 aa, unidentified
  source 1..358: note = Verrucomicrobiae bacterium
  REGION 1..358: note = tr|A0A2A2YDK3|A0A2A2YDK3_9BACT S-adenosylmethionine:tRNA ribosyltransferase-isomerase; OS = Verrucomicrobiae bacterium AMD-G2 OX=1982328 GN=queA; PE = 3 SV=1
MRLSEKNPAFTLDFNCQATPLPFSITCVSLTTKDFDYHLPEELIASRPLDDRAASRMMVIHRDSGLIEHKMFRDFPSYIHAGDQLVLNDTKVIPARLFSTDGKSEILCLDRPSPTLWRCLVKPGKKMRVGATVQVADAIGSVIEVYENGDRLIEWDREIDLNVHGHLALPHYMNREDELSDRERYQTVYAREEGAIAAPTAGLHFTPEILQSLPHTFLTLHVGVGTFRPVKAERPEDHEMHSENYAISADAARAINDASRVIAIGTTVTRVLEHLAQSAADGLLIPSETQSGSTNIFLYPPYQLRVIGALLTNFHLPQSTLLMLVSAFAGRDLMLEAYRQAVEEKYRFYSYGDCMLIL

SEQ ID NO: 73524 - protein, 333 aa, unidentified
  source 1..333: note = Verrucomicrobiales bacterium
  REGION 1..333: note = tr|A0A3D0YNG8|A0A3D0YNG8_9BACT S-adenosylmethionine:tRNA ribosyltransferase-isomerase; OS = Verrucomicrobiales bacterium OX=2026801 GN=queA PE=3; SV = 1
MLKTTDFDYHLPEKLIASRPLVERAASRMMVIDRNTGEIEHHMFTDFSSYLKPYDLLILNDTKVTPARFFSNDGNIEIVCTHKLGELEWECLVRPGKKMKPGRSIKIGEATGTVESVLENGNRIIRWDQPVDEEAHGRLALPHYMNRESDPADRDRYQTTFAREEGAIAAPTAGLHFTPEILSEINHTFLTLHVGVGTFRPIKAEYVKDHNMHSERYSLSAETADRINTTRELGGRIVSTGTTCTRVLESIAQSQMTNLGHISSTRGETDIFINPPHDFKIVDSLLTNFHLPQSTLIMLVSAFANRELILEAYAKAVEAKYRFFSYGDCMLIV

SEQ ID NO: 73525 - protein, 324 aa, unidentified
  source 1..324: note = Verrucomicrobiales bacterium
  REGION 1..324: note = tr|A0A2D5AIJ7|A0A2D5AIJ7_9BACT S-adenosylmethionine:tRNA ribosyltransferase-isomerase; OS = Verrucomicrobiales bacterium OX=2026801 GN=queA PE=3; SV = 1
  VARIANT 5: note = Xaa can be any naturally occurring amino acid
MQTSXFDYKLPNELIAQRPPEKRGESRMMVIDRKSGEISHQRFLDFPNFIHSDDRLVLNDTRVVAARYFSNDSRKEVLRVDVLGPNRWKCLVRPGKKFRIGQTVEIGDGTGTVVEICEEGGERIIEFDREPDEESHGHLALPPYIDRPDTADDQARYQTVYAREEGAIAAPTAGLHFSDEMLASLPHCFVTLHVGIGTFRPVSDDDINKHHMHSERFELSPETVSQIESANRTVAVGTTVVRVLESCVRDGKLQSDSGETDIFIYPPYEFHAVDALLTNFHLPKSTLLMLVSALAGRELVMEAYHKAVEERYRFFSYGDCMLII

SEQ ID NO: 73526 - protein, 351 aa, Verrucomicrobium sp.
  REGION 1..351: note = tr|A0A1H2DYR1|A0A1H2DYR1_9BACT S-adenosylmethionine:tRNA ribosyltransferase-isomerase; OS = Verrucomicrobium sp. GAS474 OX=1882831 GN=queA PE=3 SV=1
MTTPSRTDLLTDDFSFDLPTERIAAWPTPDRAASRLMVLDRAARTITHAQFSDLPTFLRPDDLLVLNNSRVMPASLDSADGALSILLLKETSPRHWMALVKPAKRAMPGMRHTFRSRDGKRTIEAEVLKTLESGERVFRFFDDLPLDEYGDMPIPPYILKRRKALEAEASAIPSIDDRVRYQTVYADAAQAGSVAAPTAGLHFTPEMLAKFDHAFVTLHVGLGTFRPVKVEKLADHVMHREEFEIPAGLAEKVKREDGTKRRIVAVGTTSARVLESVESLRPRRGETEIFLYPPYRFKHVGALLTNFHLPKSTLLMLVSAFAGREFILEAYREAVAKEYRFFSYGDAMLIL

SEQ ID NO: 73527 - protein, 340 aa, unidentified
  source 1..340: note = Vesicomyosocius okutanii
  REGION 1..340: note = sp|A5CXQ6|QUEA_VESOH S-adenosylmethionine:tRNA ribosyltransferase-isomerase OS=Vesicomyosocius okutanii subsp. Calyptogena okutanii (strain HA) OX=412965 GN=queA; PE = 3 SV=1
MQLKDFDFDLPASLIAQHPIKNRTDSRLLIKRSSIIDIQFNQIGDFFQSGDLLIMNNTKVIPARLFGTKETGGKVEIMIERILDENQVLAMIKASRAPKIGSCIFLENDVNIIVYQKDNGFYTLIFETDSLFDLLNNIGHTPLPPYIKRTNNVQDLSRYQTVYAQKDGAVAAPTAGLHFDDSLLAQLKIQGIDHLFVTLHIGSGTFTPIRTDNIKNHVMHSEIFEISQVTVDRINLTKANGGRIIAVGTTTVRVLESSLKNGKLIAQNGETDIFIYPSYQFRIVDSLITNFHLPKSSLLMLVSAFIGRDKMLELYKHAIEQKYKFLSYGDAMFLEKNNDL

SEQ ID NO: 73528 - protein, 361 aa, unidentified
  source 1..361: note = Vespertiliibacter pulmonis
  REGION 1..361: note = tr|A0A3N4W3Y6|A0A3N4W3Y6_9PAST S-adenosylmethionine:tRNA ribosyltransferase-isomerase; OS = Vespertiliibacter pulmonis OX=1443036 GN=queA PE=3 SV=1
MLVTDFHFELPDSLIARYPMPNRTASRLLYLDGPTGEYHDQQFTDLLSYINSGDLLIFNNTRVIPARVYGRKISGGKLEILVERIIDSHRCLAHIRASKALKEGAEIILGEDKLGEGNGLHATMIARHNTLFELQFNEQQPLLELLQQAGHMPLPPYIDRPDEDADQERYQTVYNKVPGAVAAPTAGLHFDNALLQALKEKGVNTAFVTLHVGAGTFQPVRVETIEDHTMHAEYAEVSQEVVDQILATKAKGKRVICVGTTSVRSIESAAQAAEKNGELIAPFYSDTTIFLYPGKTFRVVDALVTNFHLPESTLIMLVSAFAGYQNCMQAYQHAISAQYRFFSYGDAMFITKNPNALHDIP

SEQ ID NO: 73529 - protein, 400 aa, Vibrio aerogenes
  REGION 1..400: note = tr|A0A1M5YY27|A0A1M5YY27_9VIBR S-adenosylmethionine:tRNA ribosyltransferase-isomerase; OS = Vibrio aerogenes CECT 7868 OX=1216006 GN=queA PE=3 SV=1
MCSSVSLFFLKNRHPLLMNLLNLLPLRKISVYTTALQMSQSNSMKTRTMQVSDFYFDLPDELIARYPKPERSASRLLQLNGNTGEVVDRTFKDVLDLVSPGDLLVFNNTRVIPARMFGRKSSGGKIEVLVERILDEQHILAHVRSSKAPKPGAALFLGEHDEFQATMVSRQDALFEIRFESELPVLDILDSIGHMPLPPYIDRPDEEADKERYQTVYNEKPGAVAAPTAGLHFDDELLEQISAKGVEMAYVTLHVGAGTFQPVRVDNISEHHMHSEYVEVSQDVVDAIQATKARGGSVIAVGTTSVRSLESAAQNALKNSEALASFFGDTSIFIYPGYEYQVVDCLITNFHLPESTLIMLVSAFAGYTHVMEAYQHAVKEKYRFFSYGDAMFINKRTDKS

SEQ ID NO: 73530 - protein, 350 aa, Vibrio agarivorans
  REGION 1..350: note = tr|A0A2K1CJZ3|A0A2K1CJZ3_9VIBR S-adenosylmethionine:tRNA ribosyltransferase-isomerase; OS = Vibrio agarivorans OX=153622 GN=queA PE=3 SV=1
MQVSDFHFDLPDELIARYPQPERTASRLLQMDGNTGELVDGTFTDVLIQVQEGDLVVFNNTRVIPARMFGRKASGGKLEVLVERMLDDKSILAHVRCSKSPKPGSTVLLGENDEYSAEMVARHDALFELKFESDKTVLDILEEIGHMPLPPYIDRPDEDSDKERYQTVYNQKPGAVAAPTAGLHFDDELLENIKAKGAEFAYVTLHVGAGTFQPVKVDNINDHHMHAEYVEVSQEVIDAIRATKARGGRIIAVGTTSVRSLESAAQSALKNGTELVPFFDDTEIFIFPGYEYQLVDCLITNFHLPESTLIMLVSAFAGYDNTMNAYQHAVKNKYRFFSYGDSMFIKKKIS

SEQ ID NO: 73531 - protein, 350 aa, unidentified
  source 1..350: note = Vibrio alfacsensis
  REGION 1..350: note = tr|A0A347USI8|A0A347USI8_9VIBR S-adenosylmethionine:tRNA ribosyltransferase-isomerase; OS = Vibrio alfacsensis OX=1074311 GN=queA PE=3 SV=1
MQVSDFHFDLPDELIARYPQPERTASRLLQMDGNTGELVDGTFTDVLDHIQAGDLVVFNNTRVIPARMFGRKESGGKLEVLVERMLDEKSILAHVRCSKSPKPGSRVIVGENDEYSAEMVARHDALFELKFNSDKTVLEILEEIGHMPLPPYIDRPDEDADKERYQTVYNQKPGAVAAPTAGLHFDDVLLEKIKAKGAEFAYVTLHVGAGTFQPVKVDNINDHHMHAEYVEVPQEVVDAVTATKARGGRVIAVGTTSVRSLESAAQDALKKGTELVPFFGDTEIFIFPGYEYQLVDCLITNFHLPESTLIMLVSAFAGYENTMNAYKHAVENHYRFFSYGDSMFIKKKTN

SEQ ID NO: 73532 - protein, 350 aa, Vibrio alginolyticus
  REGION 1..350: note = tr|D0WU66|D0WU66_VIBAL S-adenosylmethionine:tRNA ribosyltransferase-isomerase OS=Vibrio alginolyticus 40B; OX = 674977 GN=queA PE=3 SV=1
MQVSDFHFDLPDELIARYPQPERTASRLLQMDGNTGELIDGTFTDVLGQVQPGDLVVFNNTRVIPARLFGRKESGGKLEVLVERMLDEKSILAHVRCSKSPKPGTTIIVGENDEYSAEMVARHDALFELKFSSDKTVLEILEEIGHMPLPPYIDRPDEDADKERYQTVYNQKPGAVAAPTAGLHFDDVLLEKIKAKGAEFAYVTLHVGAGTFQPVKVENINDHHMHAEYVEVPQEVVEAIKATKARGGRIIAVGTTSVRSLESAAQDALQKGTELAPFFGDTEIFIFPGYEYQLVDCLITNFHLPESTLIMLVSAFAGYENTMNAYKHAVENKYRFFSYGDSMFIKKKTA

SEQ ID NO: 73533 - protein, 350 aa, Vibrio alginolyticus; identical to SEQ ID NO: 73532
  REGION 1..350: note = tr|A0A0P7F9Q7|A0A0P7F9Q7_VIBAL S-adenosylmethionine:tRNA ribosyltransferase-isomerase; OS = Vibrio alginolyticus OX=663 GN=queA PE=3 SV=1

SEQ ID NO: 73534 - protein, 349 aa, unidentified
  source 1..349: note = Vibrio algivorus
  REGION 1..349: note = tr|A0A557P6H0|A0A557P6H0_9VIBR S-adenosylmethionine:tRNA ribosyltransferase-isomerase; OS = Vibrio algivorus OX=1667024 GN=queA PE=3 SV=1
MQVSDFDFDLPDELIARYPQPQRTASRLLQLDGNSGELTDGKFTDVLDLVQPGDLVVFNNTRVIPARVFGRKESGGKIEILVERVLDEHSILAHVRASKSPKPGNALFLGENDEYQATMVARHEALFEIHFEHEKGVFDILNEIGHMPLPPYIDRPDEDTDKERYQTVYNQKPGAVAAPTAGLHFDNELLDEIKAKGVEFAYVTLHVGAGTFQPVRVDDINDHHMHSEYVEVPQEVVDAIADTKARGGRVVAVGTTSVRSLESAAQDAKQKGTELAPFFGDTEIFIYPGYEYQLVDVLITNFHLPESTLIMLVSAFAGYEHVMNAYQHAVQQQYRFFSYGDAMFVTKKQ

SEQ ID NO: 73535 - protein, 350 aa, Vibrio anguillarum
  REGION 1..350: note = tr|A0A378MQT5|A0A378MQT5_VIBAN S-adenosylmethionine:tRNA ribosyltransferase-isomerase; OS = Vibrio anguillarum OX=55601 GN=queA PE=3 SV=1
MQVSDFHFELPDELIARYPTAERTASRLLQLDGNSGELADGSFKDVLDRVQPGDLLVFNNTRVIPARMFGRKASGGKLEVLVERMLDEQTILAHVRSSKPPKPGSELYLGEHDEYHAHMVARHDALFEIRFTASKTVLEILNEIGHMPLPPYIDRPDEDADKERYQTVYNQKPGAVAAPTAGLHFDEALLEQIKAKGVEFAYVTLHVGAGTFQPVRVDNIHDHHMHAEYVEVPQEVVDAVNATKARGGRVIAVGTTSVRSLESAAQDALKKGTELVPFFGDTEIFIFPGYEYQLVDCLITNFHLPESTLIMLVSAFAGYEHTMAAYAHAVKHQYRFFSYGDAMFITKNTN

SEQ ID NO: 73536 - protein, 373 aa, Vibrio anguillarum
  REGION 1..373: note = tr|F7YNL0|F7YNL0_VIBA7 S-adenosylmethionine:tRNA ribosyltransferase-isomerase OS=Vibrio anguillarum (strain ATCC 68554 / 775) OX=882102 GN=queA PE=3 SV=1
MFTYILRRLKKLRHPLKTNKIRTMQVSDFHFELPDELIARYPTAERTASRLLQLDGNSGELADGSFKDVLDRVQPGDLLVFNNTRVIPARMFGRKASGGKLEVLVERMLDEQTILAHVRSSKPPKPGSELYLGEHDEYHAHMVARHDALFEIRFTASNTVLEILNEIGHMPLPPYIDRPDEDADKERYQTVYNQKPGAVAAPTAGLHFDEALLEQIKAKGVEFAYVTLHVGAGTFQPVRVDNIHDHHMHAEYVEVPQEVVDAVNATKARGGRVIAVGTTSVRSLESAAQDALKKGTELVPFFGDTEIFIFPGYEYQLVDCLITNFHLPESTLIMLVSAFAGYEHTMAAYAYAVKHQYRFFSYGDAMFITKNTN

SEQ ID NO: 73537 - protein, 350 aa, unidentified
  source 1..350: note = Vibrio antiquarius
  REGION 1..350: note = tr|A7K197|A7K197_VIBAE S-adenosylmethionine:tRNA ribosyltransferase-isomerase OS=Vibrio antiquarius (strain Ex25) OX=150340 GN=queA PE=3 SV=1
MQVSDFHFDLPDELIARYPQPERTASRLLQMDGNTGELIDGTFTDVLGQVQPGDLVVFNNTRVIPARLFGRKESGGKLEVLVERMLDEKSILAHVRCSKSPKPGTTIIVGENDEYSAEMVARHDALFELKFNADKTVLEILEEIGHMPLPPYIDRPDEDADKERYQTVYNQKPGAVAAPTAGLHFDDVLLEKIKAKGAEFAYVTLHVGAGTFQPVKVENINDHHMHAEYVEVPQEVVEAIKATKARGGRIIAVGTTSVRSLESAAQDALKKGTELAPFFGDTEIFIFPGYEYQLVDCLITNFHLPESTLIMLVSAFAGYENTMNAYKHAVENKYRFFSYGDSMFIKKKTI

SEQ ID NO: 73538 - protein, 350 aa, Vibrio atlanticus
  REGION 1..350: note = tr|A0A558GP34|A0A558GP34_9VIBR S-adenosylmethionine:tRNA ribosyltransferase-isomerase; OS = Vibrio atlanticus OX=693153 GN=queA PE=3 SV=1
MQVSDFHFDLPDELIARYPQEERTASRLLKLDGNNGNLTDGSFKDVLDLAEPGDLVVFNNTRVIPARVFGRKASGGKLEVLVERMLDEKSILAHVRCSKSPKPGTKLFLGENDEYEAEMVARHDSLFEIHFTSDQSVLEILNSVGHMPLPPYIDRPDEDADKERYQTVYNEKPGAVAAPTAGLHFDDKLMADMKAKGVEFAYVTLHVGAGTFQPVKVDNINDHHMHAEYVEVPQEVVDAVAAAKARGGRIIAVGTTSVRSLESAAQDALKKGTELVPFFGDTEIFIFPGYEYQLVDCLITNFHLPESTLIMLVSAFAGYDHVMGAYDHAVKSEYRFFSYGDAMFINKKTS

SEQ ID NO: 73539 - protein, 350 aa, Vibrio atlanticus
  REGION 1..350: note = tr|A0A1C3IKQ7|A0A1C3IKQ7_9VIBR S-adenosylmethionine:tRNA ribosyltransferase-isomerase; OS = Vibrio atlanticus OX=693153 GN=queA PE=3 SV=1
MQVSDFHFDLPDELIARYPQEERTASRLLKLDGNNGNLADGSFKDVLDLVEPGDLVVFNNTRVIPARVFGRKASGGKLEVLVERMLDEKSILAHVRCSKSPKPGTKLFLGENDEYEAEMVARHDALFEIHFTSDQSVLEILNSVGHMPLPPYIDRPDEDADKERYQTVYNEKPGAVAAPTAGLHFDDKLMADMKEKGVEFAYVTLHVGAGTFQPVKVDNINDHHMHAEYVEVPQEVVDAVAAAKARGGRIIAVGTTSVRSLESAAQDAVKNGTELVPFFGDTEIFIFPGYEYQLVDCLITNFHLPESTLIMLVSAFAGYDNVMGAYDHAVKSEYRFFSYGDAMFINKKTS

SEQ ID NO: 73540 - protein, 350 aa, Vibrio azureus
  REGION 1..350: note = tr|U3CDP6|U3CDP6_9VIBR S-adenosylmethionine:tRNA ribosyltransferase-isomerase OS=Vibrio azureus NBRC 104587; OX = 1219077 GN=queA PE=3 SV=1
MQVSDFHFDLPDELIARYPQPERTASRLLQMDGNTGELIDGTFTDVLSQVQAGDLVVFNNTRVIPARMFGRKASGGKLEVLVERMLDDKSILAHVRCSKSPKPGSTVLLGENDEYSAEMVARHDALFELKFASDKTVLEILEEIGHMPLPPYIDRPDEDSDKERYQTVYNQKPGAVAAPTAGLHFDDELLENIKAKGAEFAYVTLHVGAGTFQPVKVDDINDHHMHAEYVEVPQEVVDAIHDTKARGGRIIAVGTTSVRSLESAAQDALKNGTELVPFFGDTEIFIFPGYEYQLVDCLITNFHLPESTLIMLVSAFAGYDNTMNAYQHAVKNKYRFFSYGDSMFIKKKTS

SEQ ID NO: 73541 - protein, 350 aa, unidentified
  source 1..350: note = Vibrio barjaei
  REGION 1..350: note = tr|A0A1J4QYL4|A0A1J4QYL4_9VIBR S-adenosylmethionine:tRNA ribosyltransferase-isomerase; OS = Vibrio barjaei OX=1676683 GN=queA PE=3 SV=1
MQVSDFHFDLPDKLIARYPKAERSSSRLLQLTGNTGEVVDGSFTDIIDQVQPGDLLVFNNTRVIPARMFGRKASGGKIEVLVERMLDDKRVLAHVRSSKAPKPGTELFLGENDEYQALMVARHDALFEIEMQSDKTVLDILNDIGHMPLPPYIDRPDEDADKERYQTVYNEKPGAVAAPTAGLHFDDVVLEKIKAKGANFAYVTLHVGAGTFQPVRVENINDHHMHAEYVEVPQEVVDAINETKANGGRIIAVGTTSVRSLESAAQDALKNGTELVPFFGDTEIFIFPGYEYQLVDCLVTNFHLPESTLIMLVSAFAGYDNVMSAYHHAVEQKYRFFSYGDAMFITKKTA

SEQ ID NO: 73542 - protein, 350 aa, unidentified
  source 1..350: note = Vibrio bivalvicida
  REGION 1..350: note = tr|A0A177XV62|A0A177XV62_9VIBR S-adenosylmethionine:tRNA ribosyltransferase-isomerase; OS = Vibrio bivalvicida OX=1276888 GN=queA PE=3 SV=1
MQVSDFHFDLPDELIARYPQPERTASRLLQLNGDSGELNDGTFTDVLNHVQPGDLVVFNNTRVIPARMFGRKESGGKLEVLVERVLDEKSILAHVRCSKSPKPGSTIFIGENDEYSAQMVARHDALFELKFNSEQNVLAVLEEIGHMPLPPYIDRPDEDSDKERYQTVYNQKPGAVAAPTAGLHFDEPLIEKIKEKGAELAYVTLHVGAGTFQPVKVDNINEHHMHAEYVEVPQQVVEAINAAKARGGRIIAVGTTSVRSLESAAQDALKKGTELAPFFGDTEIFIYPGYEYQLVDCLITNFHLPESTLIMLVSAFAGYENTMNAYKHAVENKYRFFSYGDSMFIKKKTA

SEQ ID NO: 73543 - protein, 353 aa, Vibrio brasiliensis
  REGION 1..353: note = tr|E8LPX2|E8LPX2_9VIBR S-adenosylmethionine:tRNA ribosyltransferase-isomerase OS=Vibrio brasiliensis LMG 20546 OX=945543 GN=queA PE=3 SV=1
MQVSDFHFDLPDELIARYPQPERTASRLLQMDGNTGELVDGTFTDVLEQVQPGDLVVFNNTRVIPARMFGRKESGGKLEVLVERVVDEKSILAHVRCSKSPKPGSTIFVGENDEFSAEMVARHDALFELKFNSEQNVLAVLEEIGHMPLPPYIDRPDEDSDKERYQTVYNQKPGAVAAPTAGLHFDEPLLEKIKAKGAEFAYVTLHVGAGTFQPVKVDDIHDHHMHAEYVEVPQEVVDAINAAKARGGRIVAVGTTSVRSLESAAQDALKKGTELVPFFGDTEIFIYPGYQYQLVDCLITNFHLPESTLIMLVSAFAGYENTMNAYKHAVENKYRFFSYGDSMFIKKKLATSS

SEQ ID NO: 73544 - protein, 350 aa, Vibrio breoganii
  REGION 1..350: note = tr|A0A193K9Y8|A0A193K9Y8_9VIBR S-adenosylmethionine:tRNA ribosyltransferase-isomerase; OS = Vibrio breoganii OX=553239 GN=queA PE=3 SV=1
MQVSDFHFDLPDELIARYPMPDRTSSRLLQLTGNSGEVQDKNFTDMLDLVCEGDLLVFNNTRVIPARVFGRKASGGKIEVLVERMVDEHTILAHVRSSKSPKPGTELFLGDKDQYAAVMVARHDALFEIRFTSDKAVLQILEEVGHMPLPPYIDRPDEDSDQERYQTVYNEKPGAVAAPTAGLHFDDEILEKIKAKGANLAFVTLHVGAGTFQPVRVDNILEHHMHAEYVEVTQEVVDAINETKAKGGRVIAVGTTSVRSLESAAQDAVRKGTELKPFFGDTDIFIYPGYEFQLIDCLLTNFHLPESTLIMLVSAFAGYDNVMGAYLHAVEHKYRFFSYGDAMFVTRKGL

SEQ ID NO: 73545 - protein, 350 aa, Vibrio breoganii
  REGION 1..350: note = tr|A0A2N7HEW8|A0A2N7HEW8_9VIBR S-adenosylmethionine:tRNA ribosyltransferase-isomerase; OS = Vibrio breoganii OX=553239 GN=queA PE=3 SV=1
MQVSDFHFDLPDELIARYPMPDRTSSRLLQLTGNSGEVQDKNFTDMLDLVGEGDLLVFNNTRVIPARVFGRKASGGKIEVLVERMVDEHTILAHVRSSKSPKPGTELFLGDKDQYAAVMVARHDALFEIRFTSDKAVLQILEEVGHMPLPPYIDRPDEDSDQERYQTVYNEKPGAVAAPTAGLHFDDEILEKIKAKGANLAFVTLHVGAGTFQPVRVDNILEHHMHAEYVEVTQEVVDAINETKAKGGRVIAVGTTSVRSLESAAQDAVRKGTELKPFFGDTDIFIYPGYEFQLIDCLLTNFHLPESTLIMLVSAFAGYDNVMGAYLHAVEHKYRFFSYGDAMFVTRKGL

SEQ ID NO: 73546 - protein, 350 aa, Vibrio campbellii
  REGION 1..350: note = sp|A7MT82|QUEA_VIBCB S-adenosylmethionine:tRNA ribosyltransferase-isomerase OS=Vibrio campbellii (strain ATCC BAA-1116 / BB120) OX=338187 GN=queA PE=3 SV=1
MQVSDFHFDLPDELIARYPQPERTASRLLQMDGNTGELIDGTFSDVLEQVQAGDLVVFNNTRVIPARLFGRKESGGKLEVLVERMLNEKSILAHVRCSKSPKPGTTILVGENDEYSAQMVARHDALFELKFNSDKTVLEILEEIGHMPLPPYIDRPDEDADKERYQTVYNQKPGAVAAPTAGLHFDDVLLEKITAKGAEFAYVTLHVGAGTFQPVKVDDIDDHHMHAEYVEVPQDVVDAINATKARGGRVVAVGTTSVRSLESAAQDALKKGTELVPFFGDTEIFIYPGYEYQLVDCLITNFHLPESTLIMLVSAFAGYENTMNAYKHAVENKYRFFSYGDSMFIKKKTA

SEQ ID NO: 73547 - protein, 350 aa, Vibrio campbellii
  REGION 1..350: note = tr|A0A0A3FBA6|A0A0A3FBA6_9VIBR S-adenosylmethionine:tRNA ribosyltransferase-isomerase; OS = Vibrio campbellii OX=680 GN=queA PE=3 SV=1
MQVSDFHFDLPDELIARYPQPERTASRLLQMDGNTGELIDGTFTDVLEQVQAGDLVVFNNTRVIPARLFGRKESGGKLEVLVERMLDEKSILAHVRCSKSPKPGTTILVGENDEYSAQMVARHDALFELKFNSDKTVLEILEEIGHMPLPPYIDRPDEDADKERYQTVYNQKPGAVAAPTAGLHFDDVLLEKIKAKGAEFAYVTLHVGAGTFQPVKVDDINDHHMHAEYVEVPQDVVDAINATKARGGRIVAVGTTSVRSLESAAQDALKKGTELVPFFGDTEIFIYPGYEYQLVDCLITNFHLPESTLIMLVSAFAGYENTMNAYKHAVENKYRFFSYGDSMFIKKKTA

SEQ ID NO: 73548 - protein, 351 aa, unidentified
  source 1..351: note = Vibrio caribbeanicus
  REGION 1..351: note = tr|E3BMT9|E3BMT9_9VIBR S-adenosylmethionine:tRNA ribosyltransferase-isomerase OS=Vibrio caribbeanicus ATCC BAA-2122 OX=796620 GN=queA PE=3 SV=1
MQVSDFHFELPDELIARYPQPERTASRLLQLDGNSGDLKDGTFVDVLAQVQPGDLVVFNNTRVIPARMFGRKESGGKLEVLVERVLDEKSILAHVRCSKSPKPGSTIFVGEHDEFSAQMVARHDALFELKFNSDQNVLSVLEQIGHMPLPPYIDRPDEDSDKERYQTVYNQKPGAVAAPTAGLHFDELMLEKLAQKGVELAYVTLHVGAGTFQPVKVDNIHDHHMHAEYVEVPASVIDAIKATKARGGRIIAVGTTSVRSLESAAQHALTNGTELAPFFGDTEIFIYPGYEYQLVDCLITNFHLPESTLIMLVSAFAGYENTMNAYHHAVKNNYRFFSYGDSMFIKKKTAK

SEQ ID NO: 73549 - protein, 350 aa, unidentified
  source 1..350: note = Vibrio caribbeanicus
  REGION 1..350: note = tr|A0A0A6QLY3|A0A0A6QLY3_9VIBR S-adenosylmethionine:tRNA ribosyltransferase-isomerase; OS = Vibrio caribbeanicus OX=701175 GN=queA PE=3 SV=1
MQVSDFHFDLPDELIARYPQPERTASRLLQMDGNTGELVDGTFTDVLEQVQPGDLVVFNNTRVIPARMFGRKESGGKLEVLVERVLDEKSILAHVRCSKSPKPGTTIFIGENDEYSAEMVARHDALFELKFNAEQNVLAVLEEIGHMPLPPYIDRPDEDSDKERYQTVYNEKPGAVAAPTAGLHFDEPLLEKIKAKGVEFAYVTLHVGAGTFQPVKVDNINEHHMHAEYVEVPQEVVDAINATKARGGRIIAVGTTSVRSLESAAQDAIKKGTELAPFFGDTEIFIFPGYEYQLVDCLITNFHLPESTLIMLVSAFAGYENTMNAYKHAVENKYRFFSYGDSMFIKKKTD

SEQ ID NO: 73550 - protein, 350 aa, Vibrio casei
  REGION 1..350: note = tr|A0A368LL67|A0A368LL67_9VIBR S-adenosylmethionine:tRNA ribosyltransferase-isomerase; OS = Vibrio casei OX=673372 GN=queA PE=3 SV=1
MQVSDFDFELPDELIARYPQPQRTASRLLQLNGESGALTDGQFTDVLDLVQAGDLVVFNNTRVIPARVFGRKASGGKIEVLVERVIDEKSILAHVRASKSPKPGNELFLGENDEFKAVMVARHDALFEIRFDSDKSVLEVLNDVGHMPLPPYIDRPDEDADKERYQTVYNKKPGAVAAPTAGLHFDNELLDKIKAKGVSFAYVTLHVGAGTFQPVRVDDINDHHMHSEYVEVPQDVVDAIAETKARGGRIVAVGTTSVRSLESAAQDAKQKGTELVPFFGDTEIFIYPGYEYQLIDVLITNFHLPESTLIMLVSAFAGYDNVMAAYKHAVNKEYRFFSYGDAMFVTKRDS

SEQ ID NO: 73551 - protein, 350 aa, Vibrio celticus
  REGION 1..350: note = tr|A0A1C3JLB7|A0A1C3JLB7_9VIBR S-adenosylmethionine:tRNA ribosyltransferase-isomerase; OS = Vibrio celticus OX=446372 GN=queA PE=3 SV=1
MQVSDFHFDLPDELIARYPQEERTASRLLKLDGNSGNLADGSFKDVLDLVEPGDLVVFNNTRVIPARVFGRKASGGKLEVLVERMLDEKSILAHVRCSKSPKPGTKLFLGENDEYEAEMVARHDALFEIHFTSDQSVLEILNSVGHMPLPPYIDRPDEDADKERYQTVYNEKPGAVAAPTAGLHFDDKLMADMKEKGVEFAYVTLHVGAGTFQPVKVDNINDHHMHAEYVEVPQEVVDAVAAAKARGGRIIAVGTTSVRSLESAAQDAVKKGTELVPFFGDTEIFIFPGYEYQLVDCLITNFHLPESTLIMLVSAFAGYDNVMGAYDHAVKSEYRFFSYGDAMFINKKTS

SEQ ID NO: 73552 - protein, 350 aa, Vibrio chagasii
  REGION 1..350: note = tr|A0A2S7VCY2|A0A2S7VCY2_9VIBR S-adenosylmethionine:tRNA ribosyltransferase-isomerase; OS = Vibrio chagasii OX=170679 GN=queA PE=3 SV=1
MQVSDFHFDLPDELIARYPQEERTASRLLKLDGNNGNLTDGSFKDVLDLVEPGDLVVFNNTRVIPARVFGRKASGGKLEVLVERMLDEKSILAHVRCSKSPKPGTKLFLGENDEYEAEMVARHDALFEIHFTSDQSVLEILNSVGHMPLPPYIDRPDEDADKERYQTVYNEKPGAVAAPTAGLHFDDKLMADMKAKGVEFAYVTLHVGAGTFQPVKVDNINDHHMHAEYVEVPQEVVDAVAATKARGGRIIAVGTTSVRSLESAAQDALKNGTELVPFFGDTEIFIFPGYEYQLVDCLITNFHLPESTLIMLVSAFAGYDHVMSAYDHAVKSEYRFFSYGDAMFINKKTS

SEQ ID NO: 73553 - protein, 352 aa, Vibrio cholerae
  REGION 1..352: note = sp|Q9KTZ1|QUEA_VIBCH S-adenosylmethionine:tRNA ribosyltransferase-isomerase OS=Vibrio cholerae serotype O1 (strain ATCC 39315 / El Tor Inaba N16961) OX=243277; GN = que A PE=3 SV=1
MQVSDFHFELPDELIARYPKAERTASRLLQLDGNSGQLVDGTFKDVLELVEPGDLLVFNNTRVIPARMFGRKASGGKLEVLVERMLDEHTILAHVRSSKPPKPGTELYLGENDEFHAVMQARHDALFEIRFTAETVVLDILNQIGHMPLPPYIDRPDEEADKERYQTVYNQKPGAVAAPTAGLHFDQALLEQIQAKGVELAYVTLHVGAGTFQPVRVENIHDHHMHAEYVEVPQEVVDAITATKARGGRVVAVGTTSVRSLESAAQDALQKGTELKPFFGDTEIFIFPGYQYQLVDCLITNFHLPESTLIMLVSAFAGYEHTMAAYEHAVKEQYRFFSYGDAMFIRKQMTKA

SEQ ID NO: 73554 - protein, 352 aa, Vibrio cholerae; identical to SEQ ID NO: 73553
  REGION 1..352: note = sp|C3LSZ2|QUEA_VIBCM S-adenosylmethionine:tRNA ribosyltransferase-isomerase OS=Vibrio cholerae serotype O1 (strain M66-2) OX=579112 GN=queA PE=3 SV=1

SEQ ID NO: 73555 - protein, 350 aa, unidentified
  source 1..350: note = Vibrio cidicii
  REGION 1..350: note = tr|A0A151KYN9|A0A151KYN9_9VIBR S-adenosylmethionine:tRNA ribosyltransferase-isomerase; OS = Vibrio cidicii OX=1763883 GN=queA PE=3 SV=1
MQVSDFHFDLPDELIARYPQPERTASRLLQLNGNTGEVKDGTFKDVLDLVQPGDLVVFNNTRVIPARMFGRKASGGKLEVLVERMLDDKRLLAHVRCSKSPKPGSTVILGENDQYSAEMVARHGALFELKLNGDKTLLEVLEEIGHMPLPPYIDRPDEDADKERYQTVYNQKPGAVAAPTAGLHFDAQLLEQMQAKGVELAYVTLHVGAGTFQPVKVDNIHDHHMHAEYAEVPQEVVDAIAATKARGGRIIAVGTTSVRSLESAAQDALKKGTELAPYFADTEIFIYPGYQYQLVDCLITNFHLPESTLIMLVSAFAGYEHTMRAYQHAVDNQYRFFSYGDAMFIEKKTC

SEQ ID NO: 73556 - protein, 350 aa, Vibrio cincinnatiensis
  REGION 1..350: note = tr|A0A1T4N9J9|A0A1T4N9J9_VIBCI S-adenosylmethionine:tRNA ribosyltransferase-isomerase; OS = Vibrio cincinnatiensis DSM 19608 OX=1123491 GN=queA; PE = 3 SV=1
MQVSDFHFDLPDELIARYPKEQRTASRLLRLDGNSGTLVDGTFTDVLQYVAPGDLLVFNNTRVIPARMFGRKATGGKLEVLVERMLDEHSILAHVRSSKPPKPGAELYLGEQDEYHATMVARHDALFEIQFSAHTPVLEILNHIGHMPLPPYIDRPDEDADKERYQTVYNQKPGAVAAPTAGLHFDEALLEQIKAKGVTFAYVTLHVGAGTFQPVRVENIHDHHMHAEYVEVPQEVVDAIAATKARGGRVIAVGTTSVRSLESAAQDALKKGTELVPFFGDTEIFIFPGYQYQLVDCLITNFHLPESTLIMLVSAFAGYEHTMAAYQHAVAQKYRFFSYGDAMFIEKKLD

SEQ ID NO: 73557 - protein, 350 aa, Vibrio comitans
  REGION 1..350: note = tr|A0A4Y3IN72|A0A4Y3IN72_9VIBR S-adenosylmethionine:tRNA ribosyltransferase-isomerase; OS = Vibrio comitans NBRC 102076 OX=1219078 GN=queA PE=3 SV=1
MQVSDFHFDLPDELIARYPMPDRTSSRLLQLTGNSGEVQDKSFTDVLDLVNEGDLLVFNNTRVIPARVFGRKASGGKIEVLVERMVDEHTILAHVRSSKSPKPGTELFLGDKDQYAAKMVARHDALFEIRFTSDKAVLQILEEVGHMPLPPYIDRPDEDSDQERYQTVYNEKPGAVAAPTAGLHFDDEILEKIKAKGANLAFVTLHVGAGTFQPVRVDNILEHHMHAEYVEVTQEVVDAINETKAKGGRVIAVGTTSVRSLESAAQDAVRNGTKLKPFFGDTDIFIYPGYEFQLIDCLLTNFHLPESTLIMLVSAFAGYDNVMGAYQHAVEHKYRFFSYGDAMFVTRKGL

SEQ ID NO: 73558 - protein, 350 aa, Vibrio coralliilyticus
  REGION 1..350: note = tr|A0A2A2MTD3|A0A2A2MTD3_9VIBR S-adenosylmethionine:tRNA ribosyltransferase-isomerase; OS = Vibrio coralliilyticus OX=190893 GN=queA PE=3 SV=1
MQVSDFHFDLPDELIARYPQPERTASRLLQLDGNSGELSDGTFTDVLEQVQPGDLVVFNNTRVIPARMFGRKESGGKLEVLVERVLDEKSILAHVRCSKSPKPGSTIFIGENDEYSAQMVARHDALFELKFNAEKNVLAVLEEIGHMPLPPYIDRPDEDSDKERYQTVYNEKPGAVAAPTAGLHFDEALLEKIKAKGAEFAYVTLHVGAGTFQPVKVENINDHHMHAEYVEVPQEVVDAINAAKARNGRVIAVGTTSVRSLESAAQDALKKGTALAPFFGDTEIFIYPGYEYQLVDCLITNFHLPESTLIMLVSAFAGYENTMNAYKHAVENKYRFFSYGDSMFIKKKTD

SEQ ID NO: 73559 - protein, 350 aa, Vibrio coralliilyticus
  REGION 1..350: note = tr|A0A2A2CQ76|A0A2A2CQ76_9VIBR S-adenosylmethionine:tRNA ribosyltransferase-isomerase; OS = Vibrio coralliilyticus OX=190893 GN=queA PE=3 SV=1
MQVSDFHFDLPDELIARYPQPERTASRLLQLDGNSGELSDGTFTDVLEQVQPGDLVVFNNTRVIPARMFGRKESGGKLEVLVERVLDEKSILAHVRCSKSPKPGSTILIGENDEYSAQMVARHDALFELKFNAEKNVLAVLEEIGHMPLPPYIDRPDEDSDKERYQTVYNEKPGAVAAPTAGLHFDEALLEKIKAKGAEFAYVTLHVGAGTFQPVKVENINDHHMHAEYVEVPQEVVDAINAAKVRNGRVIAVGTTSVRSLESAAQDALKKGTALAPFFGDTEIFIYPGYEYQLVDCLITNFHLPESTLIMLVSAFAGYENTMNAYKHAVENKYRFFSYGDSMFIKKKTD

SEQ ID NO: 73560 - protein, 350 aa, Vibrio crassostreae
  REGION 1..350: note = tr|A0A4R2FFV1|A0A4R2FFV1_9VIBR S-adenosylmethionine:tRNA ribosyltransferase-isomerase; OS = Vibrio crassostreae OX=246167 GN=queA PE=3 SV=1
MQVSDFHFDLPDELIARYPQEERTASRLLKLDGNNGNLTDGSFKDVLDLVEPGDLVVFNNTRVIPARVFGRKASGGKLEVLVERMLDEKSILAHVRCSKSPKPGTKLFLGENDEYEAEMVARHDALFEIHFTSDQSVLEILNSVGHMPLPPYIDRPDEDADKERYQTVYNEKPGAVAAPTAGLHFDDKLMADMKEKGVEFAYVTLHVGAGTFQPVKVDNINDHHMHAEYVEVPQEVVDAVAAAKARGGRIIAVGTTSVRSLESAAQDALKKGTEFVPFFGDTEIFIFPGYEYQLVDCLITNFHLPESTLIMLVSAFAGYDNVMGAYDHAVKSEYRFFSYGDAMFINKKTS

SEQ ID NO: 73561 - protein, 350 aa, Vibrio crassostreae
  REGION 1..350: note = tr|A0A4R3P0T1|A0A4R3P0T1_9VIBR S-adenosylmethionine:tRNA ribosyltransferase-isomerase; OS = Vibrio crassostreae OX=246167 GN=queA PE=3 SV=1
MQVSDFHFDLPDELIARYPQEERTASRLLKLDGNNGNLTDGSFKDVLDLVEPGDLVVFNNTRVIPARVFGRKASGGKLEVLVERMLDEKSILAHVRCSKSPKPGTKLFLGENDEYEAEMVARHDALFEIHFTSDQSVLEILNSVGHMPLPPYIDRPDEDADKERYQTVYNEKPGAVAAPTAGLHFDDKLMADMKEKGVEFAYVTLHVGAGTFQPVKVDNINDHHMHAEYVEVPQEVVDAVAATKVRGGRIIAVGTTSVRSLESAAQDALKKGTELVPFFGDTEIFIFPGYEYQLVDCLITNFHLPESTLIMLVSAFAGYDNVMGAYDHAVKSEYRFFSYGDAMFINKKTS

SEQ ID NO: 73562 - protein, 350 aa, Vibrio diabolicus
  REGION 1..350: note = tr|A0A2L2K4X0|A0A2L2K4X0_9VIBR S-adenosylmethionine:tRNA ribosyltransferase-isomerase; OS = Vibrio diabolicus OX=50719 GN=queA PE=3 SV=1
MQVSDFHFDLPDELIARYPQPERTASRLLQMDGNTGELIDGTFTDVLGQVQPGDLVVFNNTRVIPARLFGRKESGGKLEVLVERMLDEKSILAHVRCSKSPKPGTTIIVGENDEYSAEMVARHDALFELKFNADKTVLEILEEIGHMPLPPYIDRPDEDADKERYQTVYNQKPGAVAAPTAGLHFDDVLLEQIKAKGAEFAYVTLHVGAGTFQPVKVENINDHHMHAEYVEVPQEVVEAIKATKARGGRIIAVGTTSVRSLESAAQDALKKGTELVPFFGDTEIFIFPGYEYQLVDCLITNFHLPESTLIMLVSAFAGYENTMNAYKHAVENKYRFFSYGDSMFIKKKTI

SEQ ID NO: 73563 - protein, 350 aa, Vibrio diazotrophicus
  REGION 1..350: note = tr|A0A2J8GFZ0|A0A2J8GFZ0_VIBDI S-adenosylmethionine:tRNA ribosyltransferase-isomerase; OS = Vibrio diazotrophicus OX=685 GN=queA PE=3 SV=1
MQVSDFHFELPDELIARYPKADRTASRLLQLNGNTGALTDSTFKNVLDLVEPGDLLVFNNTRVIPARMFGRKASGGKLEVLVERMLDEHTILAHVRSSKPPKPNTELYLGENDEYHAVMVARHDALFEIRFTDEKAVLEILNDIGHMPLPPYIDRPDEDADKERYQTVYNQKPGAVAAPTAGLHFDETLLEQIKAKGVEFAYVTLHVGAGTFQPVRVDNINDHHMHAEYVEVPQEVVDAIAATKARGGRIIAVGTTSVRSLESAAQDALSKGTELAPFFGDTEIFIFPGYQYQLVDCLITNFHLPESTLIMLVSAFASYEHTMAAYEHAVKEQYRFFSYGDAMFITKRTI

SEQ ID NO: 73564 - protein, 350 aa, Vibrio diazotrophicus
  REGION 1..350: note = tr|A0A329E9N4|A0A329E9N4_VIBDI S-adenosylmethionine:tRNA ribosyltransferase-isomerase; OS = Vibrio diazotrophicus OX=685 GN=queA PE=3 SV=1
MQVSDFHFELPDELIARYPKADRTASRLLQLNGNTGALTDSTFKNVLDLVEPGDLLVFNNTRVIPARMFGRKASGGKLEVLVERMLDEHTILAHVRSSKPPKPNTELYLGENDEYHAVMVARHDALFEIRFTDEKAVLEILNDIGHMPLPPYIDRPDEDADKERYQTVYNQKPGAVAAPTAGLHFDETLLEQIKAKGIEFAYVTLHVGAGTFQPVRVDNINDHHMHAEYVEVPQEVVDAIAATKARGGRIIAVGTTSVRSLESAAQDALSKGTELVPFFGDTEIFIFPGYQYQLVDCLITNFHLPESTLIMLVSAFASYEHTMAAYEHAVKEQYRFFSYGDAMFITKRTI

SEQ ID NO: 73565 - protein, 350 aa, unidentified
  source 1..350: note = Vibrio europaeus
  REGION 1..350: note = tr|A0A178JCQ4|A0A178JCQ4_9VIBR S-adenosylmethionine:tRNA ribosyltransferase-isomerase; OS = Vibrio europaeus OX=300876 GN=queA PE=3 SV=1
MQVSDFHFDLPDELIARYPQPERTASRLLQLDGNSGELNDGTFTDVLEQVQAGDLVVFNNTRVIPARLFGRKESGGKLEVLVERVLDEKSILAHVRCSKSPKPGSTIFIGENDEYSAQMVARHDALFELKFNSEQNVLAVLEEIGHMPLPPYIDRPDEDSDKERYQTVYNEKPGAVAAPTAGLHFDEPLIEKIKAKGAELAYVTLHVGAGTFQPVKVDNINDHHMHAEYVEVPQQVVEAIKAAKARGGRIIAVGTTSVRSLESAAQDAIKKGTELVPFFGDTEIFIYPGYEYQLVDCLITNFHLPESTLIMLVSAFAGYENTMNAYKHAVDNNYRFFSYGDSMFIKKKTD

SEQ ID NO: 73566 - protein, 350 aa, Vibrio ezurae
  REGION 1..350: note = tr|U3ALE2|U3ALE2_9VIBR S-adenosylmethionine:tRNA ribosyltransferase-isomerase OS=Vibrio ezurae NBRC 102218; OX = 1219080 GN=queA PE=3 SV=1
MQVSDFHFDLPDELIARYPTPDRTSSRLLQLTGNSGEVQDKHFTDILDLVNEGDLLVFNNTRVIPARVFGRKASGGKIEVLVERMVDEHTVLAHVRASKSPKPGTELLLGDKDQYSAVMVARHDALFEIRFTSDKAVLQILEEVGHMPLPPYIDRPDEDSDQERYQTVYNAKPGAVAAPTAGLHFDDEILAKIKAKGAKLAFVTLHVGAGTFQPVRVDNILEHHMHAEYVEVTQDVVDAINETKAQGGRVIAVGTTSVRSLESAAQDAVKKGTELKPFFGDTDIFIYPGYQFQLIDCLLTNFHLPESTLIMLVSAFAGYDNVMQAYKHAVEHNYRFFSYGDAMFVTRLGL

SEQ ID NO: 73567 - protein, 350 aa, Vibrio fluvialis
  REGION 1..350: note = tr|A0A1L9L6B0|A0A1L9L6B0_VIBFL S-adenosylmethionine:tRNA ribosyltransferase-isomerase; OS = Vibrio fluvialis OX=676 GN=queA PE=3 SV=1
MQVSDFHFDLPDELIARYPQSERTASRLLQLNGNTGAVKDGSFKDVLELVQAGDLVVFNNTRVIPARMFGRKESGGKLEVLVERMLDEKRFLAHVRSSKSPKPGTLVFLGEEDQYSAEMVARQDALFELHLKADKTILEVLEEIGHMPLPPYIDRPDEDADKERYQTVYNQKPGAVAAPTAGLHFDNQLLEQIKAKGAEFAYVTLHVGAGTFQPVKVDNILEHHMHSEYAEVPQEVVDAIKATKARGGRVIAVGTTSVRSLESAAQESLKNGTELMPFFGDTEIFIFPGYQYQLVDCLITNFHLPESTLIMLVSAFAGYDHTMNAYQHAVANQYRFFSYGDAMFIEKKTQ

SEQ ID NO: 73568 - protein, 352 aa, Vibrio fluvialis
  REGION 1..352: note = tr|S7I212|S7I212_VIBFL S-adenosylmethionine:tRNA ribosyltransferase-isomerase OS=Vibrio fluvialis PG41; OX = 1336752 GN=queA PE=3 SV=1
MQVSDFHFELPDELIARYPMAERTASRLLQLDGNTGELVDGTFKDVLNCVEPGDLLVFNNTRVIPARMFGRKASGGKLEVLVERMLDEHSILAHVRCSKPPKPGTELFLGENDEFHAIMEARHDALFEIRFTAETVVLDILNQIGHMPLPPYIDRPDDDADKERYQTVYNQKPGAVAAPTAGLHFDQALLEQIKAKGVEFAYVTLHVGAGTFQPVRVDNINDHHMHAEYVEVPQEVVDAIAATKARGGRIIAVGTTSVRSLESAAQDALKKGTELVPFFGDTEIFIFPGYEYQLVDCLITNFHLPESTLIMLVSAFAGYEHTMAAYDHAVTQQYRFFSYGDAMFIRKRTVEA

SEQ ID NO: 73569 - protein, 350 aa, Vibrio fortis
  REGION 1..350: note = tr|A0A066UVV5|A0A066UVV5_9VIBR S-adenosylmethionine:tRNA ribosyltransferase-isomerase; OS = Vibrio fortis OX=212667 GN=queA PE=3 SV=1
MQVSDFHFDLPDELIARYPQEERTASRLLKLDGNTGNLNDGSFKDVLDLVEPGDLVVFNNTRVIPARVFGRKASGGKLEVLVERMLDEKSILAHVRCSKSPKPGTQLFLGENDEYEAEMVARHDALFEIRFTSEESVLDILNSVGHMPLPPYIDRPDEDADKERYQTVYNEKPGAVAAPTAGLHFDDKLMADMKAKGVEFAYVTLHVGAGTFQPVKVDNINDHHMHAEYVEVPQEVVDAIAATKARGGRVIAVGTTSVRSLESAAQDALKKGTELVPFFGDTEIFIFPGYEYQLVDCLITNFHLPESTLIMLVSAFAGYDNVMGAYDHAVKSEYRFFSYGDAMFINKKTS

SEQ ID NO: 73570 - protein, 352 aa, Vibrio furnissii
  REGION 1..352: note = tr|A0A0Q2Y0Z8|A0A0Q2Y0Z8_VIBFU S-adenosylmethionine:tRNA ribosyltransferase-isomerase; OS = Vibrio furnissii OX=29494 GN=queA PE=3 SV=1
MQVSDFHFELPDELIARYPMAERTASRLLQLDGNTGELVDGTFKDVLNCVEPGDLLVFNNTRVIPARMFGRKASGGKLEVLVERMLDEHSILAHVRCSKPPKPGTELFLGENDEFHAVMDARHDALFEIRFTAETVVLDILNQIGHMPLPPYIDRPDEDADKERYQTVYNQKPGAVAAPTAGLHFDQALLEQIKAKGVEFAYVTLHVGAGTFQPVRVDNINDHHMHAEYVEVPQEVVDAIAATKARGGRIIAVGTTSVRSLESAAQDALKKGTELVPFFGDTEIFIYPGYEYQLVDCLITNFHLPESTLIMLVSAFAGYAHTMAAYDHAVKQQYRFFSYGDAMFIRKRTVDA

SEQ ID NO: 73571 - protein, 352 aa, Vibrio furnissii
  REGION 1..352: note = tr|F0LVX2|F0LVX2_VIBFN S-adenosylmethionine:tRNA ribosyltransferase-isomerase OS=Vibrio furnissii (strain DSM 14383 / NCTC 11218 / VL 6966) OX=903510 GN=queA PE=3; SV = 1
MQVSDFHFELPDELIARYPMAERTASRLLQLDGNTGELVDGTFKDVLNCVEPGDLLVFNNTRVIPARMFGRKASGGKLEVLVERMLDEHSILAHVRCSKPPKPGTELFLGENDEFHAVMDARHDALFEIRFTAETVVLDILNQIGHMPLPPYIDRPDEDADKERYQTVYNQKPGAVAAPTAGLHFDQALLEQIKAKGVEFAYVTLHVGAGTFQPVRVDNINDHHMHAEYVEVPQEVVDAIAATKARGGRIIAVGTTSVRSLESAAQDALKKGTELVPFFGDTEIFIYPGYEYQLVDCLITNFHLPESTLIMLVSAFAGYEHTMAAYDHAVKQQYRFFSYGDAMFIRKRTVDA

SEQ ID NO: 73572 - protein, 350 aa, unidentified
  source 1..350: note = Vibrio galatheae
  REGION 1..350: note = tr|A0A0F4NSJ4|A0A0F4NSJ4_9VIBR S-adenosylmethionine:tRNA ribosyltransferase-isomerase; OS = Vibrio galatheae OX=579748 GN=queA PE=3 SV=1
MQVSDFHFDLPDELIARYPQPQRTASRLLQLDGNSGELTDGTFTDVLEQVQPGDLVVFNNTRVIPARMFGRKESGGKLEVLVERVLDEKSILAHVRCSKSPKPGTTIFIGENDEYSAQMVARHDALFELKFNTEQNVLAVLEEIGHMPLPPYIDRPDEDSDKERYQTVYNKKPGAVAAPTAGLHFDEPLLEKIKAKGAEFAYVTLHVGAGTFQPVKVDNINDHHMHAEYVEVPQEVVDAINAAKARGGRIIAVGTTSVRSLESAAQDAIKKGTELVPFFGDTEIFIFPGYEYQLVDCLITNFHLPESTLIMLVSAFAGYENTMNAYKHAVENNYRFFSYGDSMFIQKKTA

SEQ ID NO: 73573 - protein, 353 aa, Vibrio gazogenes
  REGION 1..353: note = tr|A0A1Z2SGX6|A0A1Z2SGX6_VIBGA S-adenosylmethionine:tRNA ribosyltransferase-isomerase; OS = Vibrio gazogenes OX=687 GN=queA PE=3 SV=1
MQVSDFHFDLPDELIARYPKAERTSSRLLQLNGETGAVEDGTFTDVLNLVRPGDLLVFNNTRVIPARMFGRKASGGKIEVLVERMLDEHSILAHVRSSKAPRAGSALLLGENDDYPATMVARHDALFEIRLETEVTVLDVLNAIGHMPLPPYIDRPDEDADKERYQTVYNEKPGAVAAPTAGLHFDTDLLEQIAAKGVEMAYVTLHVGAGTFQPVRVENINDHHMHAEYVEVPPAVVDAINATRQRGGRVIAVGTTSVRSLESAAQQALKNGTALAPFFGDTEIFIYPGYEYQVIDCLITNFHLPESTLIMLVSAFAGYENVMAAYRHAVEQKYRFFSYGDAMFIEKRQHERT

SEQ ID NO: 73574 - protein, 353 aa, Vibrio gazogenes
  REGION 1..353: note = tr|A0A1M5G757|A0A1M5G757_VIBGA S-adenosylmethionine:tRNA ribosyltransferase-isomerase; OS = Vibrio gazogenes DSM 21264 = NBRC 103151 OX=1123492; GN = queA PE=3 SV=1
MQVSDFHFDLPDELIARYPKAERTSSRLLQLNGETGAVVDGTFTDVLNLVRPGDLLVFNNTRVIPARMFGRKASGGKIEVLVERMLDEHSILAHVRSSKAPRAGSALLLGENDDYPATMVARHDALFEIRLETEVTVLDVLNAIGHMPLPPYIDRPDEDADKERYQTVYNEKPGAVAAPTAGLHFDTDLLEQIAAKGVEMAYVTLHVGAGTFQPVRVENINDHHMHAEYVEVPPAVVDAINATRQRGGRIIAVGTTSVRSLESAAQQALKNGTALAPFFGDTEIFIYPGYEYQVIDCLITNFHLPESTLIMLVSAFAGYENVMAAYRHAVEQKYRFFSYGDAMFIEKRQHERT

SEQ ID NO: 73575 - protein, 350 aa, unidentified
  source 1..350: note = Vibrio genomosp.
  REGION 1..350: note = tr|A0A1E5CZ48|A0A1E5CZ48_9VIBR S-adenosylmethionine:tRNA ribosyltransferase-isomerase; OS = Vibrio genomosp. F6 str. FF-238 OX=1191298 GN=queA PE=3; SV = 1
MQVSDFHFELPDELIARYPQAERTASRLLQLDGNTGALSDGSFKDVLDLVQPGDLVVFNNTRVIPARLFGRKESGGKLEVLVERMIDEKSILAHVRCSKSPKPGTTLFLGENDEYQAEMVARHDALFEIRFTSDQSVLDILNAVGHMPLPPYIDRPDEDADKERYQTVYNKKPGAVAAPTAGLHFDEQLLEQIKDKGVEFAYVTLHVGAGTFQPVKVDNIHDHHMHAEYVEVPQEVVDAIAATKARGGRVIAVGTTSVRSLESAAQDALKKGTELVPFFGDTEIFIFPGYEYQLVDCLITNFHLPESTLIMLVSAFADYDKVMAAYEHAVKNEYRFFSYGDAMFINKKTK

SEQ ID NO: 73576 - protein, 350 aa, unidentified
  source 1..350: note = Vibrio genomosp.
  REGION 1..350: note = tr|A0A4U1YJ84|A0A4U1YJ84_9VIBR S-adenosylmethionine:tRNA ribosyltransferase-isomerase; OS = Vibrio genomosp. F6 OX=723172 GN=queA PE=3 SV=1
MQVSDFHFELPDELIARYPQAERTASRLLQLDGNTGTLSDGSFKDVLDLVQPGDLVVFNNTRVIPARLFGRKESGGKLEVLVERMIDEKSILAHVRCSKSPKPGTTLFLGEHDEYQAEMVARHDALFEIRFTSDQSVLEILNAVGHMPLPPYIDRPDEDADKERYQTVYNKKPGAVAAPTAGLHFDEQLLEQIKDKGVEFAYVTLHVGAGTFQPVKVDNIHDHHMHAEYVEVPQEVVDAIAATKARGGRVIAVGTTSVRSLESAAQDALKKGTELVPFFGDTEIFIFPGYEYQLVDCLITNFHLPESTLIMLVSAFADYDKVMAAYDHAVKNEYRFFSYGDAMFINKKTK

SEQ ID NO: 73577 - protein, 350 aa, Vibrio halioticoli
  REGION 1..350: note = tr|V5FEN5|V5FEN5_9VIBR S-adenosylmethionine:tRNA ribosyltransferase-isomerase OS=Vibrio halioticoli NBRC 102217 OX=1219072 GN=queA PE=3 SV=1
MQVSDFHFDLPDELIARYPTPDRTSSRLLQLTGNSGEVQDKHFTDILDLVNEGDLLVFNNTRVIPARVFGRKASGGKIEVLVERMVDEHTVLAHVRASKSPKPGTELLLGDKDQYSAVMVARHDALFEIRFTSDKAVLQILEEVGHMPLPPYIDRPDEDSDQERYQTVYNAKPGAVAAPTAGLHFDDEILAKIKAKGAKLAFVTLHVGAGTFQPVRVDNILEHHMHAEYVEVTQEVVDAINETKAQGGRVIAVGTTSVRSLESAAQDAVKKGSELKPFFGDTDIFIYPGYQFQLIDCLLTNFHLPESTLIMLVSAFAGYDNVMQAYQHAVEHSYRFFSYGDAMFVTRLGL

SEQ ID NO: 73578 - protein, 382 aa, Vibrio hangzhouensis
  REGION 1..382: note = tr|A0A1H6AIG7|A0A1H6AIG7_9VIBR S-adenosylmethionine:tRNA ribosyltransferase-isomerase; OS = Vibrio hangzhouensis OX=462991 GN=queA PE=3 SV=1
MTVQLAIPLGHFILCGCEFFRRFYLSLQKIGVMQVSDFHFDLPDELIARYPKAERSSSRLLQLTGNTGEVVDGNFTDIVAQVQPGDLLVFNNTRVIPARMFGRKASGGKLEVLVERMLDDKRVLAHVRSSKSPKPGTELLLGENDEYQATMVARHDALFEIEMKSEKTVLDILNDIGHMPLPPYIDRPDEDADKERYQTVYNEKPGAVAAPTAGLHFDDAVLEQIKAKGANFAYVTLHVGAGTFQPVRVENIHDHHMHAEYVEVPQEVVDAINETKSNGGRVIAVGTTSVRSLESAAQDALKKGTELVPFFGDTEIFIFPGYEYQLVDCLVTNFHLPESTLIMLVSAFAGYDNVMNAYKHAVEQQYRFFSYGDAMFITKKTS

SEQ ID NO: 73579 - protein, 350 aa, Vibrio harveyi
  REGION 1..350: note = tr|A0A454D2Q2|A0A454D2Q2_VIBHA S-adenosylmethionine:tRNA ribosyltransferase-isomerase; OS = Vibrio harveyi OX=669 GN=queA PE=3 SV=1
MQVSDFHFDLPDELIARYPQPERTASRLLQMDGNTGELIDGTFTDVLEQVQAGDLVVFNNTRVIPARLFGRKESGGKLEVLVERMLDEKSILAHVRCSKSPKPGTTIFVGENDEYSAQMVARHDALFELKFNSDNTVLEILEEIGHMPLPPYIDRPDEDADKERYQTVYNQKPGAVAAPTAGLHFDDVLLEKIKAKGAEFAYVTLHVGAGTFQPVKVDDINDHHMHAEYVEVPQDVVDAINATKARGGRIIAVGTTSVRSLESAAQDALKKGTELVPFFGDTEIFIYPGYEYQLVDCLITNFHLPESTLIMLVSAFAGYENTMNAYKHAVENKYRFFSYGDSMFIKKKTA

SEQ ID NO: 73580 - protein, 350 aa, Vibrio harveyi
  REGION 1..350: note = tr|D0XDK0|D0XDK0_VIBH1 S-adenosylmethionine:tRNA ribosyltransferase-isomerase OS=Vibrio harveyi (strain 1DA3) OX=673519 GN=queA PE=3 SV=1
MQVSDFHFDLPDELIARYPQPERTASRLLQMDGNTGELIDGTFTDVLEQVQAGDLVVFNNTRVIPARLFGRKESGGKLEVLVERMLDEKSILAHVRCSKSPKPGTTILVGENDEYSAQMVARHDALFELKFNADKTVLEILEEIGHMPLPPYIDRPDEDADKERYQTVYNQKPGAVAAPTAGLHFDDVLLEKIKAKGAEFAYVTLHVGAGTFQPVKVDDINDHHMHAEYVEVPQDVVDAINATKARGGRIVAVGTTSVRSLESAAQDALKKGTELVPFFGDTEIFIYPGYEYQLVDCLITNFHLPESTLIMLVSAFAGYENTMNAYKHAVENKYRFFSYGDSMFIKKKTA

SEQ ID NO: 73581 - protein, 350 aa, Vibrio hepatarius
  REGION 1..350: note = tr|A0A0M0HYQ9|A0A0M0HYQ9_9VIBR S-adenosylmethionine:tRNA ribosyltransferase-isomerase; OS = Vibrio hepatarius OX=171383 GN=queA PE=3 SV=1
MQVSDFHFDLPDELIARYPQPERTASRLLQLDGNTGELVDGTFTDVLSQVQPGDLVVFNNTRVIPARMFGRKESGGKLEVLVERMLDDKSILAHVRCSKSPKPGSTIIVGDNDEYSAEMVARHDALFELKFNADKTVLEILEEIGHMPLPPYIDRPDEDADKERYQTVYNQKPGAVAAPTAGLHFDDVLLEQIKAKGAEFAYVTLHVGAGTFQPVKVDNINDHHMHAEYVEVPQEVVDAISATKQRGGRIIAVGTTSVRSLESAAQDALKKGTELKPFFGDTEIFIFPGYEYQLVDCLITNFHLPESTLIMLVSAFAGYENTMNAYKHAVENKYRFFSYGDSMFIKKKTA

SEQ ID NO: 73582 - protein, 350 aa, Vibrio ichthyoenteri
  REGION 1..350: note = tr|F9RW71|F9RW71_9VIBR S-adenosylmethionine:tRNA ribosyltransferase-isomerase OS=Vibrio ichthyoenteri ATCC 700023 OX=870968 GN=queA PE=3 SV=1
MQVSDFHFDLPDELIARYPQPERTSSRLLQMNGNSGELVDGIFTDVLGHIEAGDLVVFNNTRVIPARMFGRKASGGKLEVLVERMLDTKSILAHVRCSKSPKPGTVILLGENDEFSAEMVARHDALFELKFNSDQTVLEILEQIGHMPLPPYIDRPDEDADKERYQTVYNQKPGAVAAPTAGLHFDEVLLEKIKAKGAELAYVTLHVGAGTFQPVKVDNIHDHHMHAEYVEVTQEVVDAINATKARGGRVIAVGTTSVRSLESAAQDALKNGTDLVPFFGDTEIFIFPGYEYQLVDCLITNFHLPESTLIMLVSAFAGYENTMNAYQHAVDNHYRFFSYGDSMFIEKKTV

SEQ ID NO: 73583 - protein, 350 aa, Vibrio inusitatus
  REGION 1..350: note = tr|A0A4Y3HV51|A0A4Y3HV51_9VIBR S-adenosylmethionine:tRNA ribosyltransferase-isomerase; OS = Vibrio inusitatus NBRC 102082 OX=1219070 GN=queA PE=3; SV = 1
MQVSDFHFDLPDELIARYPMPDRTSSRLLQLTGNSGEIQDKSFTDVLDLVNEGDLLVFNNTRVIPARVFGRKASGGKIEVLVERMVDEHTILAHVRSSKSPKPGTELFLGDKDQYAAKMVARHDALFEIRFTSDKAVLQILEEVGHMPLPPYIDRPDEDSDQERYQTVYNEKPGAVAAPTAGLHFDDEILEKIKAKGANLAFVTLHVGAGTFQPVRVDNILEHHMHAEYVEVTQEVVDAINETKAKGGRVIAVGTTSVRSLESAAQDAVRNGTGLKPFFGDTDIFIYPGYEFQLIDCLLTNFHLPESTLIMLVSAFAGYDNVMGAYQHAVEHKYRFFSYGDAMFVTRKGL

SEQ ID NO: 73584 - protein, 231 aa, unidentified
  source 1..231: note = Vibrio ishigakensis
  REGION 1..231: note = tr|A0A0B8NHR0|A0A0B8NHR0_9VIBR S-adenosylmethionine:tRNA ribosyltransferase-isomerase; OS = Vibrio ishigakensis OX=1481914 GN=JCM19231_257 PE=3 SV=1
MQVSDFNFELPDELIARYPMEERTASRLLKLDGNSGQIQDKGFTDILDSIQEGDLLVFNNTRVIPARVFGRKASGGKIEVLVERMLDEHSILAHVRSSKAPKPGAQLFLGENDQYEAEMVARHDALFELKFTSDKAVLQILEEVGHMPLPPYIDRPDEDSDQERYQTVYNEKPGAVAAPTAGLHFDEAILEKIQAKALSLPLLPCTWVPAPSNQCALITSSSTTCMLSMLR

SEQ ID NO: 73585 - protein, 361 aa, unidentified
  source 1..361: note = Vibrio ishigakensis
  REGION 1..361: note = tr|A0A0B8QQ67|A0A0B8QQ67_9VIBR S-adenosylmethionine:tRNA ribosyltransferase-isomerase; OS = Vibrio ishigakensis OX=1481914 GN=queA PE=3 SV=1
MQVSDFNFELPDELIARYPMEERTASRLLKLDGNSGQIQDKGFTDILDSIQEGDLLVFNNTRVIPARVFGRKASGGKIEVLVERMLDEHSILAHVRSSKAPKPGAQLFLGENDQYEAEMVARHDALFELKFTSDKAVLQILEEVGHMPLPPYIDRPDEDSDQERYQTVYNEKPGAVAAPTAGLHFDETILEKIQAKGAKLAFVTLHVGAGTFQPVRVDNILEHHMHAEYVEVTEEVVNTILETKKNGGRVIAVGTTSVRSLESAAQDAVKKGTELKPFFGDTDIFIYPGYEFQLIDGLLTNFHLPESTLIMLVSAFAGYDNVMNAYKHAVEQKYRFFSYGDAMFVTRKSISAILECKVWSD

SEQ ID NO: 73586 - protein, 350 aa, unidentified
  source 1..350: note = Vibrio jasicida
  REGION 1..350: note = tr|A0A2S7VND9|A0A2S7VND9_9VIBR S-adenosylmethionine:tRNA ribosyltransferase-isomerase; OS = Vibrio jasicida OX=766224 GN=queA PE=3 SV=1
MQVSDFHFDLPDELIARYPQPERTASRLLQMDGNTGELIDGTFTDVLEQVQAGDLVVFNNTRVIPARLFGRKESGGKLEVLVERMLDEKSILAHVRCSKSPKPGSTIIVGENDEYSAQMVARHDALFELKFESDKTVLEILEEIGHMPLPPYIDRPDEDADKERYQTVYNQKPGAVAAPTAGLHFDDVLLEKIKAKGAEFAYVTLHVGAGTFQPVKVDDINDHHMHAEYVEVPQDVVDAINAAKARGGRIVAVGTTSVRSLESAAQDALKKGTELVPFFGDTEIFIYPGYEYQLVDCLITNFHLPESTLIMLVSAFAGYENTMNAYKHAVDNQYRFFSYGDSMFIKKKTA

SEQ ID NO: 73587 - protein, 350 aa, Vibrio kanaloae
  REGION 1..350: note = tr|A0A1E5DNN8|A0A1E5DNN8_9VIBR S-adenosylmethionine:tRNA ribosyltransferase-isomerase; OS = Vibrio kanaloae 5S-149 OX=1191299 GN=queA PE=3 SV=1
MQVSDFHFDLPDELIARYPQEERTASRLLKLDGNSGNLADGSFKDVLDLVEPGDLVVFNNTRVIPARVFGRKASGGKLEVLVERMLDEKSILAHVRCSKSPKPGTKLFLGENDEYEAEMVARHDALFEIHFTSDQSVLEILNNVGHMPLPPYIDRPDEDADKERYQTVYNEKPGAVAAPTAGLHFDDKLMAGMKEKGVEFAYVTLHVGAGTFQPVKVDNINDHHMHAEYVEVPQEVVDAVAAAKARGGRIIAVGTTSVRSLESAAQDARNKGTELVPFFGDTEIFIFPGYEYQLVDCLITNFHLPESTLIMLVSAFAGYDNVMGAYDHAVKSEYRFFSYGDAMFINKKTS

SEQ ID NO: 73588 - protein, 350 aa, Vibrio kanaloae
  REGION 1..350: note = tr|A0A4U2CRM1|A0A4U2CRM1_9VIBR S-adenosylmethionine:tRNA ribosyltransferase-isomerase; OS = Vibrio kanaloae OX=170673 GN=queA PE=3 SV=1
MQVSDFHFDLPDELIARYPQEERTASRLLKLDGNNGNLTDGSFKDVLDLVEPGDLVVFNNTRVIPARVFGRKASGGKLEVLVERMLDEKSILAHVRCSKSPKPGTKLFLGENDEYEAEMVARHDALFEIHFTSDQSVLEILNSVGHMPLPPYIDRPDEDADKERYQTVYNEKPGAVAAPTAGLHFDDKLMADMKEKGVEFAYVTLHVGAGTFQPVKVDNINDHHMHAEYVEVPQEVVDAVAAAKARGGRIIAVGTTSVRSLESAAQDARNKGTELVPFFGDTEIFIFPGYEYQLVDCLITNFHLPESTLIMLVSAFAGYDHVMGAYDHAVKSEYRFFSYGDAMFINKKTS

SEQ ID NO: 73589 - protein, 350 aa, Vibrio lentus
  REGION 1..350: note = tr|A0A0L1L7B3|A0A0L1L7B3_9VIBR S-adenosylmethionine:tRNA ribosyltransferase-isomerase; OS = Vibrio lentus OX=136468 GN=queA PE=3 SV=1
MQVSDFHFDLPDELIARYPQEERTASRLLKLDGNNGNLTDGSFKDVLDLVEPGDLVVFNNTRVIPARVFGRKASGGKLEVLVERMLDEKSILAHVRCSKSPKPGTKLFLGENDEYEAEMVARHDALFEIHFTSDQSVLEILNSVGHMPLPPYIDRPDEDADKERYQTVYNEKPGAVAAPTAGLHFDDKLMADMKAKGVEFAYVTLHVGAGTFQPVKVDNINDHHMHAEYVEVPQEVVDAVAAAKARGGRIIAVGTTSVRSLESAAQDALKKGTELVPFFGDTEIFIFPGYEYQLVDCLITNFHLPESTLIMLVSAFAGYDNVMGAYDHAVKSEYRFFSYGDAMFINKKTS

SEQ ID NO: 73590 - protein, 350 aa, Vibrio lentus
  REGION 1..350: note = tr|A0A2J6UGW6|A0A2J6UGW6_9VIBR S-adenosylmethionine:tRNA ribosyltransferase-isomerase; OS = Vibrio lentus OX=136468 GN=queA PE=3 SV=1
MQVSDFHFDLPDELIARYPQEERTASRLLKLDGNNGNLADGSFKDVLDLVEPGDLVVFNNTRVIPARVFGRKASGGKLEVLVERMLDEKSILAHVRCSKSPKPGTKLFLGENDEYEAEMVARHDALFEIHFTSDQSVLDILNNVGHMPLPPYIDRPDEDADKERYQTVYNEKPGAVAAPTAGLHFDDKLMAGMKEKGVEFAYVTLHVGAGTFQPVKVDNINDHHMHAEYVEVPQEVVDAVAAAKARGGRIIAVGTTSVRSLESAAQDALKKGTELVPFFGDTEIFIFPGYEYQLVDCLITNFHLPESTLIMLVSAFAGYDNVMGAYDHAVKSEYRFFSYGDAMFINKKTA

SEQ ID NO: 73591 - protein, 350 aa, Vibrio mangrovi
  REGION 1..350: note = tr|A0A1Y6IQX8|A0A1Y6IQX8_9VIBR S-adenosylmethionine:tRNA ribosyltransferase-isomerase; OS = Vibrio mangrovi OX=474394 GN=queA PE=3 SV=1
MQVSDFHFDLPDELIARYPKAERTSSRLLQLNGNSGDVTDGTFKDVLDLVRPGDLLVFNNTRVIPARMFGRKASGGKIEVLVERVLDEHSILAHVRSSKAPRPGAALFLGENDDYPATMVARHDALFEIHLESEAAVLDVLNEIGHMPLPPYIDRPDEDADKERYQTVYNQKPGAVAAPTAGLHFDTDLLEQIAAKGVEMAYVTLHVGAGTFQPVRVENINDHHMHAEYVEVPSSVVEAIAATRERGGRVIAVGTTSVRSLESAAQQALKNGGALAPFFGDTDIFIYPGYEYQVVDCLITNFHLPESTLIMLVSAFAGYENVMAAYRHAVAQEYRFFSYGDAMFIEKRVN

SEQ ID NO: 73592 - protein, 350 aa, Vibrio maritimus
  REGION 1..350: note = tr|A0A090S464|A0A090S464_9VIBR S-adenosylmethionine:tRNA ribosyltransferase-isomerase; OS = Vibrio maritimus OX=990268 GN=queA PE=3 SV=1
MQVSDFHFELPDELIARYPKAERSSSRLLQLTGNTGEVVDGNFTDIVSQVQPGDLLVFNNTRVIPARMFGRKASGGKLEVLVERMLDDKRVLAHVRCSKSPKPGTELFLGENDEYQAIMTARHDALFEIEMQSEKTVLEILNDVGHMPLPPYIDRPDEDADKERYQTVYNEKPGAVAAPTAGLHFDDGVLEQIKAKGANFAYVTLHVGAGTFQPVRVENIHDHHMHAEYVEVPQDVVDAIAETKANGGRIIAVGTTSVRSLESAAQDALKNGTELVPFFGDTEIFIFPGYEYQLVDCLVTNFHLPESTLIMLVSAFAGYDNVMNAYKHAVEQKYRFFSYGDAMFITKKTA

SEQ ID NO: 73593 - protein, 394 aa, Vibrio maritimus
  REGION 1..394: note = tr|A0A090T7V7|A0A090T7V7_9VIBR S-adenosylmethionine:tRNA ribosyltransferase-isomerase; OS = Vibrio maritimus OX=990268 GN=queA PE=3 SV=1
MTLGKSRDNQSQTSVQLAIPTGHFILCGCEFFRRFSRLIKKIGVMQVSDFHFELPDELIARYPKAERSSSRLLQLTGNTGEVVDGNFTDIVSQVQPGDLLVFNNTRVIPARMFGRKASGGKLEVLVERMLDDKRVLAHVRCSKSPKPGTELFLGENDEYQAIMTARHDALFEIEMQSDKTVLEILNDVGHMPLPPYIDRPDEDADKERYQTVYNEKPGAVAAPTAGLHFDDSVLEQIKAKGANFAYVTLHVGAGTFQPVRVENIHDHHMHAEYVEVPQDVVDAIAETKANGGRIIAVGTTSVRSLESAAQDALKNGTELVPFFGDTEIFIFPGYEYQLVDCLVTNFHLPESTLIMLVSAFAGYDNVMNAYQHAVEQRYRFFSYGDAMFITKKTA

SEQ ID NO: 73594 - protein, 350 aa, Vibrio mediterranei
  REGION 1..350: note = tr|A0A2C9P882|A0A2C9P882_9VIBR S-adenosylmethionine:tRNA ribosyltransferase-isomerase; OS = Vibrio mediterranei OX=689 GN=queA PE=3 SV=1
MQVSDFHFDLPDELIARYPKAERSSSRLLQLTGNTGEVVDGSFTDIVDQVQPGDLLVFNNTRVIPARMFGRKASGGKIEVLVERMLDDKRVLAHVRSSKAPKPGTELFLGENDEYQALMVARHDALFEIEMQSEKTVLDILNDIGHMPLPPYIDRPDEDADKERYQTVYNEKPGAVAAPTAGLHFDDAVLEKIKAKGVNFAYVTLHVGAGTFQPVRVENINDHHMHAEYVEVPQEVVDAINETKANGGRIIAVGTTSVRSLESAAQDALKNGTELVPFFGDTEIFIFPGYEYQLVDCLVTNFHLPESTLIMLVSAFAGYDNVMSAYHHAVEQKYRFFSYGDAMFITKKTA

SEQ ID NO: 73595 - protein, 352 aa, unidentified
  source 1..352: note = Vibrio metoecus
  REGION 1..352: note = tr|A0A0Q0PW91|A0A0Q0PW91_9VIBR S-adenosylmethionine:tRNA ribosyltransferase-isomerase; OS = Vibrio metoecus OX=1481663 GN=queA PE=3 SV=1
MQVSDFHFELPDELIARYPKAERTASRLLQLDGNSGQLTDGTFKDVLGLVEPGDLLVFNNTRVIPARMFGRKASGGKLEVLVERMLDEHTILAHVRSSKPPKPGTELYLGENDEFHAVMQARHDALFEIRFTAETVVLDILNQIGHMPLPPYIDRPDEDADKERYQTVYNQKPGAVAAPTAGLHFDQALLEQIQAKGVELAYVTLHVGAGTFQPVRVDNIHDHHMHAEYVEVPQEVVDAVAATKARGGRVIAVGTTSVRSLESAAQDALKKGTELKPFFGDTEIFIFPGYQYQLVDCLLTNFHLPESTLIMLVSAFAGYEHTMAAYEHAVKEQYRFFSYGDAMFIRKQTTKA

SEQ ID NO: 73596 - protein, 352 aa, unidentified
  source 1..352: note = Vibrio metoecus
  REGION 1..352: note = tr|A0A271VT16|A0A271VT16_9VIBR S-adenosylmethionine:tRNA ribosyltransferase-isomerase; OS = Vibrio metoecus OX=1481663 GN=queA PE=3 SV=1
MQVSDFHFELPDELIARYPKAERTASRLLQLDGNSGQLTDGTFKDVLGLVEPGDLLVFNNTRVIPARMFGRKASGGKLEVLVERMLDEHTILAHVRSSKPPKPGTELYLGENDEFHAVMQARHDALFEIRFTAETVVLDILNEIGHMPLPPYIDRPDEDADKERYQTVYNQKPGAVAAPTAGLHFDQALLEQIQAKGVELAYVTLHVGAGTFQPVRVDNIHDHHMHAEYVEVPQEVVDAVAATKARGGRVIAVGTTSVRSLESAAQDALKKGTELKPFFGDTEIFIFPGYQYQLVDCLITNFHLPESTLIMLVSAFAGYEHTMAAYEHAVKEQYRFFSYGDAMFIRKQTTKA

SEQ ID NO: 73597 - protein, 350 aa, Vibrio metschnikovii
  REGION 1..350: note = tr|C9P6D7|C9P6D7_VIBME S-adenosylmethionine:tRNA ribosyltransferase-isomerase OS=Vibrio metschnikovii CIP 69.14 OX=675813 GN=queA PE=3 SV=1
MQVSDFHFDLPDELIARYPKAQRTDSRLLRLNGTTGERVDGTFTDVLHYIEPGDLLVFNNTRVIPARLFGRKASGGKLEVLVERMLDEHSILAHVRCSKPPKPGTELYLGEQDQYLATMVARHDALFEIRFNAQQTVLEILNHIGHMPLPPYIDRPDEETDKERYQTVYNQKPGAVAAPTAGLHFDQALLDQIQAKGVEFAYVTLHVGAGTFQPVRVENIHDHHMHAEYVEVPEEVVAAIAATKARGGRVIAVGTTSVRSLESAAQDALAKGTALAPFFGDTDIFIFPGYQYQLIDALITNFHLPESTLIMLVSAFAGYEHTMAAYQHAVEQKYRFFSYGDAMFIEKNQA

SEQ ID NO: 73598 - protein, 350 aa, Vibrio metschnikovii; identical to SEQ ID NO: 73597
  REGION 1..350: note = tr|A0A380NTS6|A0A380NTS6_VIBME S-adenosylmethionine:tRNA ribosyltransferase-isomerase; OS = Vibrio metschnikovii OX=28172 GN=queA PE=3 SV=1

SEQ ID NO: 73599 - protein, 352 aa, Vibrio mimicus
  REGION 1..352: note = tr|A0A2J9V1F4|A0A2J9V1F4_VIBMI S-adenosylmethionine:tRNA ribosyltransferase-isomerase; OS = Vibrio mimicus OX=674 GN=queA PE=3 SV=1
MQVSDFHFELPDELIARYPKAERTASRLLQLDGNSGQLVDGTFKDVLGLVEPGDLLVFNNTRVIPARMFGRKASGGKLEVLVERMLDEHTILAHVRSSKPPKPGTELYLGENDEFHAVMQARHDALFEIRFTAETVVLDILNQIGHMPLPPYIDRPDEDADKERYQTVYNQKPGAVAAPTAGLHFDQVLLEQIQAKGVELAYVTLHVGAGTFQPVRVENIHDHHMHAEYVEVPQEVVDAVAATKARGGRVIAVGTTSVRSLESAAQDALKKGTELKPFFGDTEIFIFPGYQYQLVDCLITNFHLPESTLIMLVSAFAGYGHTMAAYEHAVQQQYRFFSYGDAMFIRKQTTKA

SEQ ID NO: 73600 - protein, 352 aa, Vibrio mimicus
  REGION 1..352: note = tr|A0A5B6XEW4|A0A5B6XEW4_VIBMI S-adenosylmethionine:tRNA ribosyltransferase-isomerase; OS = Vibrio mimicus OX=674 GN=queA PE=3 SV=1
MQVSDFHFELPDELIARYPKAERTASRLLQLDGNSGQLVDGTFKDVLGLVEPGDLLVFNNTRVIPARMFGRKASGGKLEVLVERMLDEHTILAHVRSSKPPKPGTELYLGEDDEFHAVMQARHDALFEIRFTAETVVLDILNQIGHMPLPPYIDRPDEVADKERYQTVYNQKPGAVAAPTAGLHFDQALLEQIQAKGVELAYVTLHVGAGTFQPVRVEKIHDHHMHAEYVEVPQEVVDAVAATKARGGRVIAVGTTSVRSLESAAQDALKKGTELKPFFGDTEIFIFPGYQYQLVDCLITNFHLPESTLIMLVSAFAGYEHTMAAYEHAVEEQYRFFSYGDAMFIRKQTIKA

SEQ ID NO: 73601 - protein, 350 aa, Vibrio mytili
  REGION 1..350: note = tr|A0A0C3I8P8|A0A0C3I8P8_9VIBR S-adenosylmethionine:tRNA ribosyltransferase-isomerase; OS = Vibrio mytili OX=50718 GN=queA PE=3 SV=1
MQVSDFHFDLPDELIARYPQPERTASRLLQMDGNTGELVDGVFTDVLDQVQPGDLVVFNNTRVIPARLFGRKESGGKLEVLVERMQDEQSILAHVRCSKSPKPGTTIFVGENDEYSAEMVARHDALFELKFHSDKTVLEILEEIGHMPLPPYIDRPDEETDKERYQTVYNQKPGAVAAPTAGLHFDDVLLDKIKAKGVEFAYVTLHVGAGTFQPVKVENINDHHMHAEYVEVPAEVVEAIKATKARGGRIIAVGTTSVRSLESAAQDAVKKGTELVPFFGDTEIFIYPGYEYQLVDCLITNFHLPESTLIMLVSAFAGYENTMNAYKHAVENRYRFFSYGDSMFIKKKTA

SEQ ID NO: 73602 - protein, 350 aa, Vibrio natriegens
  REGION 1..350: note = tr|A0A1B1E9W7|A0A1B1E9W7_VIBNA S-adenosylmethionine:tRNA ribosyltransferase-isomerase; OS = Vibrio natriegens OX=691 GN=queA PE=3 SV=1
MQVSDFHFDLPDELIARYPQPERTASRLLQMDGNTGEIVDGTFTDVLDQVQPGDLVVFNNTRVIPARMFGRKESGGKLEVLVERMLDEKSILAHVRCSKSPKPGTTIIVGENDEYAAEMVARHDALFELKFNSDKTVLEILEEIGHMPLPPYIDRPDEDADKERYQTVYNQKPGAVAAPTAGLHFDDVLLDKIKAKGAEFAYVTLHVGAGTFQPVKVDNINDHHMHAEYVEVPQEVVDAIHATKARGGRIIAVGTTSVRSLESAAQDALKKGTELVPFFGDTEIFIYPGYEYQLVDCLITNFHLPESTLIMLVSAFAGYDNTMNAYKHAVENKYRFFSYGDSMFIKKKTA

SEQ ID NO: 73603 - protein, 350 aa, Vibrio navarrensis
  REGION 1..350: note = tr|A0A099LQX3|A0A099LQX3_9VIBR S-adenosylmethionine:tRNA ribosyltransferase-isomerase; OS = Vibrio navarrensis OX=29495 GN=queA PE=3 SV=1
MQVSDFHFDLLDELIARYPQPERTASRLLQLNGNTGEVKDGTFKDVLDLVQPGDLVVFNNTRVIPARMFGRKASGGKLEVLVERMLDDKRLLAHVRCSKSPKPGSTVILGENNQYSAEMVARHGALFELKLNGDKTLLEVLEEIGHMPLPPYIDRPDEDADKERYQTVYNQKPGAVAAPTAGLHFDAQLLEQMQAKGVELAYVTLHVGAGTFQPVKVDNIHDHHMHAEYAEVPQEVVDAIAATKARGGRIIAVGTTSVRSLESAAQDALKKGTELAPFFADTEIFIYPGYQYQLVDCLITNFHLPESTLIMLVSAFAGYEHTMRAYQHAVDSQYRFFSYGDAMFIEKKTC

SEQ ID NO: 73604 - protein, 350 aa, unidentified; identical to SEQ ID NO: 73532
  source 1..350: note = Vibrio neocaledonicus
  REGION 1..350: note = tr|A0A4P8FYQ3|A0A4P8FYQ3_9VIBR S-adenosylmethionine:tRNA ribosyltransferase-isomerase; OS = Vibrio neocaledonicus OX=1208308 GN=queA PE=3 SV=1

SEQ ID NO: 73605 - protein, 350 aa, Vibrio neptunius
  REGION 1..350: note = tr|A0A0F4NYC6|A0A0F4NYC6_9VIBR S-adenosylmethionine:tRNA ribosyltransferase-isomerase; OS = Vibrio neptunius OX=170651 GN=queA PE=3 SV=1
MQVSDFHFDLPDELIARYPQPERTASCLLQLDGNSGELSDGTFIDVLEQVQPGDLVVFNNTRVIPARMFGRKESGGKLEVLVERVLDEKSILAHVRCSKSPKPGSTIFIGENDEYSAQMVARHDALFELKFNAEKNVLAVLEEIGHMPLPPYIDRPDEDSDKERYQTVYNEKPGAVAAPTAGLHFDEALLEKIKAKGAEFAYVTLHVGAGTFQPVKVENINDHHMHAEYVEVPQDVVDAINAAKARNGRIIAVGTTSVRSLESAAQDALKKGTALAPFFGDTEIFIYPGYEYQLVDCLITNFHLPESTLIMLVSAFAGYENTMNAYKHAVENNYRFFSYGDSMFIKKKTV

SEQ ID NO: 73606 - protein, 350 aa, Vibrio nereis
  REGION 1..350: note = tr|A0A0M0HPJ2|A0A0M0HPJ2_VIBNE S-adenosylmethionine:tRNA ribosyltransferase-isomerase; OS = Vibrio nereis OX=693 GN=queA PE=3 SV=1
MQVSDFHFDLPDELIARYPQPERTASRLLQLDGNTGELVDGSFTDVLSQVQPGDLVVFNNTRVIPARMFGRKESGGKLEVLVERMLDEKSILAHVRCSKSPKPGSTIIVGENDEYAAEMVARHDALFELKFKSDKTVLEILEEIGHMPLPPYIDRPDEDADKERYQTVYNQKPGAVAAPTAGLHFDDVLLEQIKAKGAEFAYVTLHVGAGTFQPVKVENINDHHMHAEYVEVPQEVVEAINATKARGGRIIAVGTTSVRSLESAAQDALKNGTELKPFFGDTEIFIFPGYEYQLVDCLITNFHLPESTLIMLVSAFAGYDNTMNAYKHAVENHYRFFSYGDSMFIKKKTD

SEQ ID NO: 73607 - protein, 350 aa, Vibrio nigripulchritudo
  REGION 1..350: note = tr|U4K952|U4K952_9VIBR S-adenosylmethionine:tRNA ribosyltransferase-isomerase OS=Vibrio nigripulchritudo; OX = 28173 GN=queA PE=3 SV=1
MQVSDFHFELPDELIARYPQPERTASRLLQLDGNSGQVTDGTFKNVLEQVQPGDLLVFNNTRVIPARMFGRKASGGKLEALVERVLDEHSILAHVRCSKPPKPGTELYLGENDEYLAEMVARHDALFEIKFKSEKNVLDILNDIGHMPLPPYIDRPDEDADKERYQTVYNEKPGAVAAPTAGLHFDEELLEQIKAKGVEFAYVTLHVGAGTFQPVRVENINDHHMHAEYVEVPQEVVDAITATKARGGRIVAVGTTSVRSLESAAQESIKKGTELAPFFGDTEIFIYPGYEYQLVDCLITNFHLPESTLIMLVSAFAGYDNVMKAYEHAVKEKYRFFSYGDAMFISKKRG

SEQ ID NO: 73608 - protein, 350 aa, Vibrio nigripulchritudo
  REGION 1..350: note = tr|U4E2A3|U4E2A3_9VIBR S-adenosylmethionine:tRNA ribosyltransferase-isomerase OS=Vibrio nigripulchritudo FTn2 OX=1238441 GN=queA PE=3 SV=1
MQVSDFHFELPDELIARYPQPERTASRLLQLDGNSGQVTDGTFKNVLEQVQPGDLLVFNNTRVIPARMFGRKASGGKLEALVERVLDEHSILAHVRCSKPPKPDTELYLGENDEYLAEMVARHDALFEIKFKSEKNVLDILNDIGHMPLPPYIDRPDEDADKERYQTVYNEKPGAVAAPTAGLHFDEELLEQIKAKGVEFAYVTLHVGAGTFQPVRVENINDHHMHAEYVEVPQEVVDAINATKARGGRIVAVGTTSVRSLESAAQESIKKGTELAPFFGDTEIFIYPGYEYQLVDCLITNFHLPESTLIMLVSAFAGYDNVMKAYEHAVKEKYRFFSYGDAMFISKKRG

SEQ ID NO: 73609 - protein, 350 aa, Vibrio orientalis
  REGION 1..350: note = tr|C9QL40|C9QL40_VIBOR S-adenosylmethionine:tRNA ribosyltransferase-isomerase OS=Vibrio orientalis CIP 102891 = ATCC 33934 OX=675816 GN=queA PE=3 SV=1
MQVSDFHFDLPDELIARYPQPERTASRLLQMDGNTGELVDGTFTDVLEQVQPGDLVVFNNTRVIPARMFGRKESGGKLEVLVERVVDEKSILAHVRCSKSPKPGSTIFVGENDEFSAQMVARHDALFELKFNSEQNVLAVLEEIGHMPLPPYIDRPDEDSDKERYQTVYNEKPGAVAAPTAGLHFDEPLLEKIKAKGAEFAYVTLHVGAGTFQPVKVDDIHEHHMHAEYVEVPQEVVDAINATKARGGRIIAVGTTSVRSLESAAQDALKKGTELVPFFGDTEIFIFPGYEYQLVDCLITNFHLPESTLIMLVSAFAGYDNTMNAYKHAVENKYRFFSYGDSMFIKKKTA

SEQ ID NO: 73610 - protein, 350 aa, Vibrio owensii
  REGION 1..350: note = tr|A0A0C1ZC68|A0A0C1ZC68_9VIBR S-adenosylmethionine:tRNA ribosyltransferase-isomerase; OS = Vibrio owensii CAIM 1854 = LMG 25443 OX=1229493 GN=queA; PE = 3 SV=1
MQVSDFHFDLPDELIARYPQPERTASRLLQMDGNTGELIDGTFTDVLEQVQAGDLVVFNNTRVIPARLFGRKESGGKLEVLVERMLDEKSILAHVRCSKSPKPGTTILVGENDEYSAQMVARHDALFELKFNSDKTVLEILEEIGHMPLPPYIDRPDEDADKERYQTVYNQKPGAVAAPTAGLHFDDVLLEKIKAKGAEFAYVTLHVGAGTFQPVKVDDINDHHMHAEYVEVPQDVVDAINATKTRGGRIIAVGTTSVRSLESAAQDALKKGTELVPFFGDTEIFIYPGYEYQLVDCLITNFHLPESTLIMLVSAFAGYENTMNAYKHAVENKYRFFSYGDSMFIKKKTA

SEQ ID NO: 73611 - protein, 350 aa, Vibrio owensii; identical to SEQ ID NO: 73547
  REGION 1..350: note = tr|A0A3G2QCT1|A0A3G2QCT1_9VIBR S-adenosylmethionine:tRNA ribosyltransferase-isomerase; OS = Vibrio owensii OX=696485 GN=queA PE=3 SV=1

SEQ ID NO: 73612 - protein, 350 aa, unidentified
  source 1..350: note = Vibrio palustris
  REGION 1..350: note = tr|A0A1R4B8B6|A0A1R4B8B6_9VIBR S-adenosylmethionine:tRNA ribosyltransferase-isomerase; OS = Vibrio palustris OX=1918946 GN=queA PE=3 SV=1
MHVSDFHFDLPDELIARYPKEERTASRLLQLDGNTGDVVDGTFKDVLDIVQPGDLLVFNNTRVIPARMFGRKASGGKLEVLVERMLDDKSILAHVRCSKPPKPGTQLFLGENDEYQAEMLARHDALFELRFQSELTVLEILNAIGHMPLPPYIDRPDEDADKERYQTVYNKKPGAVAAPTAGLHFDTPLMEQIKEKGVEFAYVTLHVGAGTFQPVRVDDIENHHMHSEYVEVPEETVQAIQAVKARGGRVIAVGTTSVRSLESAAQDALKNGTELVPFFGDTEIFIYPGYEYQLVDCLITNFHLPESTLIMLVSAFTGYDNIMSAYRHAVEQEYRFFSYGDAMFLHKRDI

SEQ ID NO: 73613 - protein, 350 aa, unidentified
  source 1..350: note = Vibrio panuliri
  REGION 1..350: note = tr|A0A1Q9HCR9|A0A1Q9HCR9_9VIBR S-adenosylmethionine:tRNA ribosyltransferase-isomerase; OS = Vibrio panuliri OX=1381081 GN=queA PE=3 SV=1
MQVSDFHFDLPDELIARYPQPERTASRLLQLDGNSGALVDGSFTDVLNHIEAGDLVVFNNTRVIPARMFGRKESGGKLEVLVERMLDEKSILAHVRCSKSPKPGSTILLGENDEFSAEMVARHDALFELKFNAEQTVLEILEQIGHMPLPPYIDRPDEDADKERYQTVYNQKPGAVAAPTAGLHFDEVLLEKIKAKGAELAYVTLHVGAGTFQPVKVDNIHDHHMHAEYVEVTQDVVDAINATKARGGRVIAVGTTSVRSLESAAQDALKKGTELAPFFGDTEIFIFPGYEYQLVDCLITNFHLPESTLIMLVSAFAGYENTMNAYKHAVENHYRFFSYGDSMFIKKKTA

SEQ ID NO: 73614 - protein, 350 aa, Vibrio parahaemolyticus
  REGION 1..350: note = sp|Q87S37|QUEA_VIBPA S-adenosylmethionine:tRNA ribosyltransferase-isomerase OS=Vibrio parahaemolyticus serotype O3:K6 (strain RIMD 2210633) OX=223926 GN=queA; PE = 3 SV =1
MQVSDFHFDLPDELIARYPQPERTASRLLQMDGNTGELIDGTFTDVLNQVQAGDLVVFNNTRVIPARMFGRKESGGKLEVLVERMLDEKSILAHVRCSKSPKPGTTIIVGENDEYSAEMVARHDALFELKFNSDKTVLDILEEIGHMPLPPYIDRPDEDADKERYQTVYNQKPGAVAAPTAGLHFDDVLLDKIKAKGAEFAYVTLHVGAGTFQPVKVDNINDHHMHAEYVEVPQEVVDAINATKARGGRIIAVGTTSVRSLESAAQDALKKGTELVPFFGDTEIFIYPGYEYQLVDCLITNFHLPESTLIMLVSAFAGYENTMNAYKHAVENKYRFFSYGDSMFIKKKTI

SEQ ID NO: 73615 - protein, 350 aa, Vibrio parahaemolyticus
  REGION 1..350: note = tr|A0A242V5Q1|A0A242V5Q1_VIBPH S-adenosylmethionine:tRNA ribosyltransferase-isomerase; OS = Vibrio parahaemolyticus OX=670 GN=queA PE=3 SV=1
MQVSDFHFDLPDELIARYPQPERTASRLLQMDGNTGELIDGTFTDVLNQVQAGDLVVFNNTRVIPARMFGRKESGGKLEVLVERMLDEKSILAHVRCSKSPKPGTTIIVGENDEYSAEMVARHDALFELKFNSDKTVLEILEEIGHMPLPPYIDRPDEDADKERYQTVYNQKPGAVAAPTAGLHFDDVLLDKIKAKGAEFAYVTLHVGAGTFQPVKVDNINDHHMHAEYVEVPQEVVDAINATKARGGRIIAVGTTSVRSLESAAQDALKKGTELVPFFGDTEIFIYPGYEYQLVDCLITNFHLPESTLIMLVSAFAGYENTMNAYKHAVENKYRFFSYGDSMFIKKKTI

SEQ ID NO: 73616 - protein, 352 aa, Vibrio pectenicida
  REGION 1..352: note = tr|A0A427U6P1|A0A427U6P1_9VIBR S-adenosylmethionine:tRNA ribosyltransferase-isomerase; OS = Vibrio pectenicida OX=62763 GN=queA PE=3 SV=1
MQVSDFHFDLPDELIARYPQPERTASRLLQLDGNTGLLCDGIFTDVLEQIQAGDLVVFNNTRVIPARLFGRKESGGKLEVLVERILDEQRILAHVRCSKSPKPGSTIMLGESDEYSAKMLARHEALFELQFESDKAVLEILEHIGHMPLPPYIDRPDEDSDKERYQTVYNQKPGAVAAPTAGLHFDDELLDRIQAKGAELAYVTLHVGAGTFQPVKVDNIHDHHMHAEYVEVPQQVVDAINKTKSRGGKIIAVGTTSVRSLESAAQDALKKGTELAPFFGDTEIFIYPGYEYQLVDCLITNFHLPESTLIMLVSAFAGFENTMNAYSYAVEKQYRFFSYGDSMFIKKKTIER

SEQ ID NO: 73617 - protein, 350 aa, Vibrio penaeicida
  REGION 1..350: note = tr|A0A432D499|A0A432D499_9VIBR S-adenosylmethionine:tRNA ribosyltransferase-isomerase; OS = Vibrio penaeicida OX=104609 GN=queA PE=3 SV=1
MQVSDFHFELPDELIARYPQPERTASRLLQLEGDSGALIDGTFKDVLEQVQPGDLLVFNNTRVIPARMFGRKASGGKLEALVERVLDEHTILAHVRCSKPPKPGTELFLGENDEYLAEMVARHDVLFEIKFKSDKNVLDILNDIGHMPLPPYIDRPDEDTDKERYQTVYNEKPGAVAAPTAGLHFDEALLEQIKGKGVEFAYVTLHVGAGTFQPVRVDNINDHHMHAEYVEVPQDVVDAIAATKKRGGRVIAVGTTSVRSLESAAQEAKKKGVEFEPFFGDTEIFIYPGYEYQLVDCLITNFHLPESTLIMLVSAFAGYDNVMRAYEHAVQEQYRFFSYGDAMFITKKRG

SEQ ID NO: 73618 - protein, 350 aa, Vibrio ponticus
  REGION 1..350: note = tr|A0A090P317|A0A090P317_9VIBR S-adenosylmethionine:tRNA ribosyltransferase-isomerase; OS = Vibrio ponticus OX=265668 GN=queA PE=3 SV=1
MQVSDFHFDLPDELIARYPQPERTASRLLQLDGNSGALVDGTFTDVLKHIEAGDLVVFNNTRVIPARMFGRKESGGKLEVLVERMLDEKSILAHVRCSKSPKPGSTILLGENDEFSAQMVARHDALFELKFNAEQTVLEILEQIGHMPLPPYIDRPDEDADKERYQTVYNQKPGAVAAPTAGLHFDEVLLEKIKAKGAELAYVTLHVGAGTFQPVKVDNIHDHHMHAEYVEVTQDVVDAINATKARGGRVIAVGTTSVRSLESAAQDAVKKGTELVPFFGDTEIFIFPGYEYQLVDCLITNFHLPESTLIMLVSAFAGYENTMNAYKHAVENNYRFFSYGDSMFIKKKTV

SEQ ID NO: 73619 - protein, 350 aa, Vibrio ponticus
  REGION 1..350: note = tr|A0A3N3E3H3|A0A3N3E3H3_9VIBR S-adenosylmethionine:tRNA ribosyltransferase-isomerase; OS = Vibrio ponticus OX=265668 GN=queA PE=3 SV=1
MQVSDFHFDLPDELIARYPQPERTASRLLQLDGNSGALVDGTFTDVLNHIESGDLVVFNNTRVIPARMFGRKESGGKLEVLVERMLDEKSILAHVRCSKSPKPGSTILLGENDEFSAQMVARHDALFELKFNAEQTVLEILEQIGHMPLPPYIDRPDEDADKERYQTVYNQKPGAVAAPTAGLHFDEVLLEKIKAKGAELAYVTLHVGAGTFQPVKVDNIHDHHMHAEYVEVTQDVVDAINATKARGGRVIAVGTTSVRSLESAAQDAVKKGTELVPFFGDTEIFIFPGYEYQLVDCLITNFHLPESTLIMLVSAFAGYENTMNAYKHAVENNYRFFSYGDSMFIKKKTS

SEQ ID NO: 73620 - protein, 350 aa, Vibrio proteolyticus
  REGION 1..350: note = tr|U3BDX9|U3BDX9_VIBPR S-adenosylmethionine:tRNA ribosyltransferase-isomerase OS=Vibrio proteolyticus NBRC 13287 OX=1219065 GN=queA PE=3 SV=1
MQVSDFHFDLPDELIARYPQPERTASRLLQLDGNSGELTDGTFTDVLYQVQPGDLVVFNNTRVIPARMFGRKESGGKLEVLVERMLDDKRILAHVRCSKSPKPGTTIFVGEQDEYRAQMVARHDALFELEFNSEKTVLEILEQIGHMPLPPYIDRPDEEADKERYQTVYNQKPGAVAAPTAGLHFDEVLLEKMKAKGVEFAYVTLHVGAGTFQPVKVDNVHEHHMHAEYVEVPQDVVDAIQATKARGGRIIAVGTTSVRSLESAAQDALKKGTPLVPFFGDTEIFIFPGYEYQLVDCLITNFHLPESTLIMLVSAFAGYENTMKAYQHAVANQYRFFSYGDSMFIKKKTA

SEQ ID NO: 73621 - protein, 350 aa, unidentified
  source 1..350: note = Vibrio qinghaiensis
  REGION 1..350: note = tr|A0A223MWE6|A0A223MWE6_9VIBR S-adenosylmethionine:tRNA ribosyltransferase-isomerase; OS = Vibrio qinghaiensis OX=2025808 GN=queA PE=3 SV=1
MQVSDFHFELPDELIARYPMAERTASRLLQLDGNSGELADGSFKDVLDRVQPGDLLVFNNTRVIPARMFGRKASGGKLEVLVERMLDEQTILAHVRSSKPPKPGSELYLGERDEYHAQMVARHDALFEIRFTASKTVLEILNEIGHMPLPPYIDRPDEDADKERYQTVYNQKPGAVAAPTAGLHFDEALLEQIKAKGVEFAYVTLHVGAGTFQPVRVDNIHDHHMHAEYVEVPQEVVDAVNATKARGGRVIAVGTTSVRSLESAAQDALKKGTELVPFFGDTEIFIFPGYEYQLVDCLITNFHLPESTLIMLVSAFAGYEHTMAAYAHAVKHQYRFFSYGDAMFITKNTN

SEQ ID NO: 73622 - protein, 381 aa, unidentified
  source 1..381: note = Vibrio quintilis
  REGION 1..381: note = tr|A0A1M7YZX7|A0A1M7YZX7_9VIBR S-adenosylmethionine:tRNA ribosyltransferase-isomerase; OS = Vibrio quintilis OX=1117707 GN=queA PE=3 SV=1
MNLLNVLPLRKISVYTTALQMSQSNSMKTGTMQVSDFYFDLPDELIARYPKSERSASRLLQLNGNTGAVADGAFKDVLDLVAPGDLLVFNNTRVIPARMFGRKSSGGKIEVLVERILDEHHILAHVRSSKAPKPGAALFLGEQDEYQATMVSRQEALFEIRFESERPVLDILDDIGHMPLPPYIDRPDEDADKERYQTVYNKKPGAVAAPTAGLHFDDELLEQISAKGVEMAYVTLHVGAGTFQPVRVDNINDHHMHAEYVEVSQEVVDAIQTTKVRGGRVIAVGTTSVRSLESAAQNGLKNGTGLAPFFGDTSIFIYPGYEYQVIDCLITNFHLPESTLIMLVSAFAGYEHVMKAYQHAVKEKYRFFSYGDAMFIEKKNG

SEQ ID NO: 73623 - protein, 351 aa, unidentified
  source 1..351: note = Vibrio renipiscarius
  REGION 1..351: note = tr|A0A0C2KCP1|A0A0C2KCP1_9VIBR S-adenosylmethionine:tRNA ribosyltransferase-isomerase; OS = Vibrio renipiscarius OX=1461322 GN=queA PE=3 SV=1
MQVSDFHFDLPDELIARYPQPERTSSRLLQLNGNSGELVDGIFTDVLGHVEAGDLVVFNNTRVIPARMFGRKASGGKLEVLVERMLDTKSILAHVRCSKSPKPGTMILLGENDEFSAEMVARHDALFELKFHSDQTVLEILEQIGHMPLPPYIDRPDEDADKERYQTVYNQKPGAVAAPTAGLHFDEVLLDKIKAKGADLAYVTLHVGAGTFQPVKVDNIHDHHMHAEYVEVTQDVVDAINATKARGGRIIAVGTTSVRSLESAAQDALKNGTDLVPFFGDTEIFIFPGYEYQLVDCLITNFHLPESTLIMLVSAFAGYDNTMNAYQHAVDNNYRFFSYGDSMFIQKKTNG

SEQ ID NO: 73624 - protein, 350 aa, Vibrio rotiferianus
  REGION 1..350: note = tr|A0A510I3C9|A0A510I3C9_9VIBR S-adenosylmethionine:tRNA ribosyltransferase-isomerase; OS = Vibrio rotiferianus OX=190895 GN=queA PE=3 SV=1
MQVSDFHFDLPDELIARYPQPERTASRLLQMDGNTGELIDGTFTDVLEQVQAGDLVVFNNTRVIPARMFGRKASGGKLEVLVERMLDEKSILAHVRCSKSPKPGTTILVGENDEYSAEMVARHDALFELKFNSDKTVLEILEEIGHMPLPPYIDRPDEDADKERYQTVYNQKPGAVAAPTAGLHFDDVLLEKIKAKGAEFAYVTLHVGAGTFQPVKVDDINDHHMHAEYVEVPQDVVDAINATKARGGRIVAVGTTSVRSLESAAQDALKKGTELVPFFGDTEIFIYPGYEYQLVDCLITNFHLPESTLIMLVSAFAGYENTMNAYKHAVENKYRFFSYGDSMFIKKKTA

SEQ ID NO: 73625 - protein, 350 aa, Vibrio rotiferianus
  REGION 1..350: note = tr|A0A2K7SRZ0|A0A2K7SRZ0_9VIBR S-adenosylmethionine:tRNA ribosyltransferase-isomerase; OS = Vibrio rotiferianus OX=190895 GN=queA PE=3 SV=1
MQVSDFHFDLPDELIARYPQPERTASQLLQMDGNTGELIDGTFTDVLEQVQAGDLVVFNNTRVIPARMFGRKASGGKLEVLVERMLDEKSILAHVRCSKSPKPGTTILVGENDEYSAEMVARHDALFELKFNSDKTVLEILEEIGHMPLPPYIDRPDEDADKERYQTVYNQKPGAVAAPTAGLHFDDVLLEKIKAKGAEFAYVTLHVGAGTFQPVKVDDINDHHMHAEYVEVPQDVVDAINATKARGGRIVAVGTTSVRSLESAAQDALKKGTELVPFFGDTEIFIYPGYEYQLVDCLITNFHLPESTLIMLVSAFAGYENTMNAYKHAVENKYRFFSYGDSMFIKKKTA

SEQ ID NO: 73626 - protein, 371 aa, Vibrio ruber
  REGION 1..371: note = tr|A0A1R4LNG7|A0A1R4LNG7_9VIBR S-adenosylmethionine:tRNA ribosyltransferase-isomerase; OS = Vibrio ruber DSM 16370 OX=1123498 GN=queA PE=3 SV=1
MLISVYTTALRMTRQKRVMQVSDFHFDLPDELIARYPKAERTSSRLLQLNGETGAVVDGTFTDVLNLVQPGDLLVFNNTRVIPARMFGRKASGGKIEVLVERVLDEHRILAHVRSSKAPREGSALLLGEHDEYSATMVARHDALFEIRLETEVTVLDVLNVIGHMPLPPYIDRPDEDADRERYQTVYNQKPGAVAAPTAGLHFDTDLLEQIAAKGVEMAYVTLHVGAGTFQPVRVENINDHHMHAEYVEVPPAVVDAIAATRQRGGRVIAVGTTSVRSLESAAHQALKNGQTLAPFFGDTDIFIYPGYEYQIVDCLITNFHLPESTLIMLVSAFAGYDNVMAAYRHAVEQKYRFFSYGDAMFIEKRKHESA

SEQ ID NO: 73627 - protein, 350 aa, Vibrio rumoiensis
  REGION 1..350: note = tr|A0A1E5E5D5|A0A1E5E5D5_9VIBR S-adenosylmethionine:tRNA ribosyltransferase-isomerase; OS = Vibrio rumoiensis 1S-45 OX=1188252 GN=queA PE=3 SV=1
MQVSDFDFDLPDELIARYPQPQRTASRLLQLNGNTGELKDGQFTDVLDLVQEGDLVVFNNTRVIPARVFGRKASGGKIEVLVERVIDDKSILAHVRASKSPKPGNELFLGENDEFKAVMVARHDALFEIRFDSDKSVLDVLNDVGHMPLPPYIDRPDEDADKERYQTVYNEKPGAVAAPTAGLHFDNELLDKIKAKGVEFAYVTLHVGAGTFQPVRVDDINDHHMHSEYVEVPQEVVDAIAATKARGGRVIAVGTTSVRSLESAAQDAKQKGTELAPFFGDTEIFIYPGYEYQLIDVLITNFHLPESTLIMLVSAFAGYENVMAAYQHAVNKEYRFFSYGDAMFVTKRDS

SEQ ID NO: 73628 - protein, 350 aa, Vibrio sagamiensis; identical to SEQ ID NO: 73530
  REGION 1..350: note = tr|A0A511QGW4|A0A511QGW4_9VIBR S-adenosylmethionine:tRNA ribosyltransferase-isomerase; OS = Vibrio sagamiensis NBRC 104589 OX=1219064 GN=queA PE=3; SV = 1

SEQ ID NO: 73629 - protein, 350 aa, Vibrio scophthalmi
  REGION 1..350: note = tr|F9RLI0|F9RLI0_9VIBR S-adenosylmethionine:tRNA ribosyltransferase-isomerase OS=Vibrio scophthalmi LMG 19158 OX=870967 GN=queA PE=3 SV=1
MQVSDFHFDLPDELIARYPQPERTSSRLLQLNGNSGELVDGIFTDVLGHIEAGDLVVFNNTRVIPARMFGRKASGGKLEVLVERMIDTKSILAHVRCSKSPKPGTVILLGENDEFSAEMVARHDALFELKFNSDQTVLEILEQIGHMPLPPYIDRPDEDADKERYQTVYNQKPGAVAAPTAGLHFDEVLLEKIKAKGADLAYVTLHVGAGTFQPVKVDNIHDHHMHAEYVEVTQEVVDAINATKARGGRVIAVGTTSVRSLESAAQDALKNGTELVPFFGDTEIFIFPGYEYQLVDCLITNFHLPESTLIMLVSAFAGYENTMNAYQHAVDNHYRFFSYGDSMFIEKKTA

SEQ ID NO: 73630 - protein, 350 aa, Vibrio scophthalmi
  REGION 1..350: note = tr|A0A1C7F844|A0A1C7F844_9VIBR S-adenosylmethionine:tRNA ribosyltransferase-isomerase; OS = Vibrio scophthalmi OX=45658 GN=queA PE=3 SV=1
MQVSDFHFDLPDELIARYPQPERTSSRLLQLNGNSGELVDGIFTDVLGHIEAGDLVVFNNTRVIPARMFGRKASGGKLEVLVERMIDTKSILAHVRCSKSPKPGTVILLGENDEFSAEMVARHDALFELKFNSDQTVLEILEQIGHMPLPPYIDRPDEDADKERYQTVYNQKPGAVAAPTAGLHFDEVLLEKIKAKGADLAYVTLHVGAGTFQPVKVDNIHDHHMHAEYVEVTQDVVDAINATKARGGRVIAVGTTSVRSLESAAQDALKNGTELVPFFGDTEIFIFPGYEYQLVDCLITNFHLPESTLIMLVSAFAGYENTMNAYQHAVDNHYRFFSYGDSMFIEKKTA

SEQ ID NO: 73631 - protein, 350 aa, Vibrio shilonii; identical to SEQ ID NO: 73594
  REGION 1..350: note = tr|A6D749|A6D749_9VIBR S-adenosylmethionine:tRNA ribosyltransferase-isomerase OS=Vibrio shilonii AK1; OX = 391591 GN=queA PE=3 SV=1

SEQ ID NO: 73632 - protein, 350 aa, Vibrio sinaloensis
  REGION 1..350: note = tr|A0A0A5JMG1|A0A0A5JMG1_9VIBR S-adenosylmethionine:tRNA ribosyltransferase-isomerase; OS = Vibrio sinaloensis OX=379097 GN=queA PE=3 SV=1
MQVSDFHFDLPDELIARYPQPERTASRLLQMDGNTGELVDGTFTDVLEQVQPGDLVVFNNTRVIPARMFGRKESGGKLEVLVERVLDEKSILAHVRCSKSPKPGTTIFIGENDEYSAEMVARHDALFELKFNAEQNVLAVLEEIGHMPLPPYIDRPDEDSDKERYQTVYNEKPGAVAAPTAGLHFDEPLLEKIKAKGVEFAYVTLHVGAGTFQPVKVDNINEHHMHAEYVEVPQEVVDAIHATKARGGRIIAVGTTSVRSLESAAQDAIKKGTELAPFFGDTEIFIFPGYEYQLVDCLITNFHLPESTLIMLVSAFAGYENTMNAYKHAVENKYRFFSYGDSMFIKKKTD

SEQ ID NO: 73633 - protein, 350 aa, Vibrio sinaloensis
  REGION 1..350: note = tr|E8MCY5|E8MCY5_9VIBR S-adenosylmethionine:tRNA ribosyltransferase-isomerase OS=Vibrio sinaloensis DSM 21326 OX=945550 GN=queA PE=3 SV=1
MQVSDFHFDLPDELIARYPQPERTASRLLQMDGNTGELVDGTFTDVLDQVQPGDLVVFNNTRVIPARMFGRKESGGKLEVLVERVLDEKSILAHVRCSKSPKPGSTIFIGENDEYSAEMVARHDALFELKFNAEQNVLAVLEEIGHMPLPPYIDRPDEDSDKERYQTVYNEKPGAVAAPTAGLHFDEPLLEKIKAKGAEFAYVTLHVGAGTFQPVKVDNINEHHMHAEYVEVPQEVVDAIQATKARGGRIIAVGTTSVRSLESAAQDAIKKGTELVPFFGDTEIFIFPGYEYQLVDCLITNFHLPESTLIMLVSAFAGYENTMNAYKHAVENKYRFFSYGDSMFIKKKTD

SEQ ID NO: 73634 - protein, 350 aa, Vibrio sp.; identical to SEQ ID NO: 73535
  REGION 1..350: note = tr|A0A2T1J7W2|A0A2T1J7W2_9VIBR S-adenosylmethionine:tRNA ribosyltransferase-isomerase; OS = Vibrio sp. V02_P2A34T13 OX=1982231 GN=queA PE=3 SV=1

SEQ ID NO: 73635 - protein, 350 aa, Vibrio sp.; identical to SEQ ID NO: 73594
  REGION 1..350: note = tr|A0A084T9F9|A0A084T9F9_9VIBR S-adenosylmethionine:tRNA ribosyltransferase-isomerase; OS = Vibrio sp. ER1A OX=1517681 GN=queA PE=3 SV=1

SEQ ID NO: 73636 - protein, 353 aa, unidentified
  source 1..353: note = Vibrio spartinae
  REGION 1..353: note = tr|A0A1N6LZU0|A0A1N6LZU0_9VIBR S-adenosylmethionine:tRNA ribosyltransferase-isomerase; OS = Vibrio spartinae OX=1918945 GN=queA PE=3 SV=1
MQVSDFHFDLPDELIARYPKAERTSSRLLQLNGETGAVVDGTFTDVLNLVRPGDLLVFNNTRVIPARMFGRKASGGKIEVLVERMLDEHSILAHVRSSKAPRAGSALLLGENDDYPATMVARHDALFEIRLETEVTVLDVLNAIGHMPLPPYIDRPDEDADKDRYQTVYNEKPGAVAAPTAGLHFDTDLLEQIAAKGVEMAYVTLHVGAGTFQPVRVEHIHDHHMHAEYVEVPPAVVDAITATRQRGGRVIAVGTTSVRSLESAAQQALQNGTALAPFFGDTEIFIYPGYEYQVIDCLITNFHLPESTLIMLVSAFAGYDNVMAAYRHAVEQKYRFFSYGDAMFIEKRQHEST

SEQ ID NO: 73637 - protein, 350 aa, Vibrio splendidus
  REGION 1..350: note = tr|A0A1B9QGI4|A0A1B9QGI4_VIBSP S-adenosylmethionine:tRNA ribosyltransferase-isomerase; OS = Vibrio splendidus OX=29497 GN=queA PE=3 SV=1
MQVSDFHFDLPDELIARYPQEERTASRLLKLDGNSGNLADGSFKDVLDLVEPGDLVVFNNTRVIPARVFGRKASGGKLEVLVERMLDEKSILAHVRCSKSPKPGTKLFLGENDEYEAEMVARHDALFEIHFTSDQSVLEILNSVGHMPLPPYIDRPDEDADKERYQTVYNEKPGAVAAPTAGLHFDDKLMAGMKEKGVEFAYVTLHVGAGTFQPVKVDNINDHHMHAEYVEVPQEVVDAVAAAKARGGRILAVGTTSVRSLESAAQDALKNGTELVPFFGDTEIFIFPGYEYQLVDCLITNFHLPESTLIMLVSAFAGYDNVMGAYDHAVKSEYRFFSYGDAMFINKKTS

SEQ ID NO: 73638 - protein, 350 aa, Vibrio splendidus
  REGION 1..350: note = tr|A0A0P6Y941|A0A0P6Y941_VIBSP S-adenosylmethionine:tRNA ribosyltransferase-isomerase; OS = Vibrio splendidus OX=29497 GN=queA PE=3 SV=1
MQVSDFHFDLPDELIARYPQEERTASRLLKLDGNSGNLADGSFKDVLDLVEPGDLVVFNNTRVIPARVFGRKASGGKLEVLVERMLDEKSILAHVRCSKSPKPGTKLFLGENDEYEAEMVARHDALFEIHFTSDQSVLEILNSVGHMPLPPYIDRPDEDADKERYQTVYNEKPGAVAAPTAGLHFDDKLMAGMKEKGVEFAYVTLHVGAGTFQPVKVDNINDHHMHAEYVEVPQEVVDAVAAAKARGGRIIAVGTTSVRSLESAAQDALKNGTELVPFFGDTEIFIFPGYEYQLVDCLITNFHLPESTLIMLVSAFAGYDNVMGAYDHAVKSEYRFFSYGDAMFINKKTS

SEQ ID NO: 73639 - protein, 350 aa, Vibrio superstes
  REGION 1..350: note = tr|A0A511QPI0|A0A511QPI0_9VIBR S-adenosylmethionine:tRNA ribosyltransferase-isomerase; OS = Vibrio superstes NBRC 103154 OX=1219062 GN=queA PE=3; SV = 1
MQVSDFHFDLPDELIARYPMPDRTSSRLLHLTGNSGELQDKNFTDVLDSINEGDLLVFNNTRVIPARVFGRKASGGKIEVLVERMVDEHTILAHVRSSKSPKPGTQLFLGDKDQYSAEMIARHGALFEIRFSSDKAVLQILEEVGHMPLPPYIDRPDEDSDQERYQTVYNEKPGAVAAPTAGLHFDDVILEKIKAKGAKLAFVTLHVGAGTFQPVKVDNILEHHMHAEYVEVTQEVVDAINETKASGGRVIAVGTTSVRSLESAAQDARNNGTELKPFFGDTDIFIYPGYEFQLIDCLLTNFHLPESTLIMLVSAFAGYDNVMGAYKHAVEQAYRFFSYGDAMFVTRKGL

SEQ ID NO: 73640 - protein, 351 aa, Vibrio tapetis
  REGION 1..351: note = tr|A0A2N8ZEZ2|A0A2N8ZEZ2_9VIBR S-adenosylmethionine:tRNA ribosyltransferase-isomerase; OS = Vibrio tapetis subsp. tapetis OX=1671868 GN=queA PE=3; SV = 1
MSMQVSDFHFELPNELIARYPQPERTASRLLQLEGPTGQITDGHFTDVLDQVQQGDLLVFNNTRVIPARMFGRKASGGKLEVLVERMLDEESILAHVRCSKSPKPGTELFLGENDEYKAVMVARHDALFEIKFVSDKTVLEILNEVGHMPLPPYIDRPDEDADKERYQTVYNQKPGAVAAPTAGLHFDEALLEQIKAKGVEFAYVTLHVGAGTFQPVKVDNINDHHMHAEYVEVPQEVVDAIAATRARGGRIIAVGTTSVRSLESAAQDALKKGTELVPFFGDTEIFIFPGYEYQLVDCLITNFHLPESTLIMLVSAFAGYDSVMAAYQHAVDNQYRFFSYGDAMFITKKV

SEQ ID NO: 73641 - protein, 350 aa, Vibrio tasmaniensis; identical to SEQ ID NO: 73539
  REGION 1..350: note = sp|B7VJR7|QUEA_VIBTL S-adenosylmethionine:tRNA ribosyltransferase-isomerase OS=Vibrio tasmaniensis (strain LGP32) OX=575788 GN=queA PE=3 SV=1

SEQ ID NO: 73642 - protein, 350 aa, Vibrio tasmaniensis
  REGION 1..350: note = tr|A0A2N7NEQ4|A0A2N7NEQ4_9VIBR S-adenosylmethionine:tRNA ribosyltransferase-isomerase; OS = Vibrio tasmaniensis OX=212663 GN=queA PE=3 SV=1
MQVSDFHFDLPDELIARYPQEERTASRLLKLDGNNGNLADGSFKDVLDLVEPGDLVIFNNTRVIPARVFGRKASGGKLEVLVERMLDEKSILAHVRCSKSPKPGTKLFLGENDEYEAEMVARHDALFEIHFTSDQSVLEILNSVGHMPLPPYIDRPDEDADKERYQTVYNEKPGAVAAPTAGLHFDDKLMADMKEKGVEFAYVTLHVGAGTFQPVKVDNINDHHMHAEYVEVPQEVVDAVAAAKARGGRIIAVGTTSVRSLESAAQDAVKNGTELVPFFGDTEIFIFPGYEYQLVDCLITNFHLPESTLIMLVSAFAGYDNVMGAYDHAVKSEYRFFSYGDAMFINKKTS

SEQ ID NO: 73643 - protein, 350 aa, unidentified
  source 1..350: note = Vibrio thalassae
  REGION 1..350: note = tr|A0A240EIL5|A0A240EIL5_9VIBR S-adenosylmethionine:tRNA ribosyltransferase-isomerase; OS = Vibrio thalassae OX=1243014 GN=queA PE=3 SV=1
MQVSDFHFDLPDELIARYPKAERSSSRLLQLTGNTGEVVDGNFTDIVNQVQPGDLLVFNNTRVIPARMFGRKASGGKIEVLVERMLDDKRVLAHVRSSKAPKPGTELFLGENDEFQALMVARHDALFEIEMQSDKTVLDILNDIGHMPLPPYIDRPDEDADKERYQTVYNEKPGAVAAPTAGLHFDAAVLEKIKAKGVNFAYVTLHVGAGTFQPVRVENINDHHMHAEYVEVPQDVVDAINETKANGGRIIAVGTTSVRSLESAAQDALKNGTELVPFFGDTEIFIFPGYEYQLVDCLVTNFHLPESTLIMLVSAFAGYDNVMSAYQHAVEQKYRFFSYGDAMFITKKTA

SEQ ID NO: 73644 - protein, 350 aa, unidentified
  source 1..350: note = Vibrio toranzoniae
  REGION 1..350: note = tr|A0A109D8F8|A0A109D8F8_9VIBR S-adenosylmethionine:tRNA ribosyltransferase-isomerase; OS = Vibrio toranzoniae OX=1194427 GN=queA PE=3 SV=1
MQVSDFHFDLPDELIARYPQEERTASRLLKLDGNNGNLTDGSFKDVLDLVEPGDLVVFNNTRVIPARVFGRKASGGKLEVLVERMLDEKSILAHVRCSKSPKPGTKLFLGENDEYESEMVARHDALFEIHFTSDQSVLEILNSVGHMPLPPYIDRPDEDADKERYQTVYNEKPGAVAAPTAGLHFDDKLMAGMKEKGVEFAYVTLHVGAGTFQPVKVDNINDHHMHAEYVEVPQEVVDAVAAAKARGGRIIAVGTTSVRSLESAAQDARNKGTELVPFFGDTEIFIFPGYEYQLVDCLITNFHLPESTLIMLVSAFAGYDNVMGAYDHAVKSEYRFFSYGDAMFINKKTS

SEQ ID NO: 73645 - protein, 350 aa, Vibrio tubiashii
  REGION 1..350: note = tr|F9TBP1|F9TBP1_9VIBR S-adenosylmethionine:tRNA ribosyltransferase-isomerase OS=Vibrio tubiashii ATCC 19109 OX=1051646 GN=queA PE=3 SV=1
MQVSDFHFDLPDELIARYPQPERTASRLLQLDGNSGELNDGTFTDVLDQVQAGDLVVFNNTRVIPARLFGRKESGGKLEVLVERVLDEKSILAHVRCSKSPKPGSTIFIGENDEYSAQMVARHDALFELKFNSEQNVLAVLEEIGHMPLPPYIDRPDEDSDKERYQTVYNEKPGAVAAPTAGLHFDEPLIEKIKAKGAELAYVTLHVGAGTFQPVKVDNINDHHMHAEYVEVPQQVVEAIKATKARGGRIIAVGTTSVRSLESAAQDAIKKGTELVPFFGDTEIFIYPGYEYQLVDCLITNFHLPESTLIMLVSAFAGYENTMNAYKHAVENNYRFFSYGDSMFIKKKTV

SEQ ID NO: 73646 - protein, 353 aa, Vibrio tubiashii
  REGION 1..353: note = tr|A0A0A5I7U9|A0A0A5I7U9_9VIBR S-adenosylmethionine:tRNA ribosyltransferase-isomerase; OS = Vibrio tubiashii OX=29498 GN=queA PE=3 SV=1
MQVSDFHFELPDELIARYPQPERTASRLLQLDGNSGELKDGSFTDVLEQVQPGDLVVFNNTRVIPARMFGRKESGGKLEVLVERVLDEKSILAHVRCSKSPKPGSTIFIGENDEYSAEMVARHDALFELKFNSEQNVLAVLEEIGHMPLPPYIDRPDEDSDKERYQTVYNKKPGAVAAPTAGLHFDEPLLEKMKAKGAEFAYVTLHVGAGTFQPVKVDNINDHHMHAEYVEVPQEVVDAINAAKARGGRIIAVGTTSVRSLESAAQDALKKGTELAPFFGDTEIFIYPGYQYQLVDCLITNFHLPESTLIMLVSAFAGYENTMNAYKHAVENKYRFFSYGDSMFIKKKLATSS

SEQ ID NO: 73647 - protein, 220 aa, Vibrio variabilis
  REGION 1..220: note = tr|A0A090SAF0|A0A090SAF0_9VIBR S-adenosylmethionine:tRNA ribosyltransferase-isomerase; OS = Vibrio variabilis OX=990271 GN=JCM19239_7787 PE=3 SV=1
MQSEKTVLEILNDVGHMPLPPYIDRPDEDADKERYQTVYNEKPGAVAAPTAGLHFDDSVLEQIKAKGANFAYVTLHVGAGTFQPVRVENIHDHHMHAEYVEVPQDVVDAIAETKANGGRIIAVGTTSVRSLESAAQDALKNGTELVPFFGDTEIFIFPGYEYQLVDCLVTNFHLPESTLIMLVSAFAGYDNVMNAYKHAVEQKYRFFSYGDAMFITKKTA

SEQ ID NO: 73648 - protein, 110 aa, Vibrio variabilis
  REGION 1..110: note = tr|A0A090SBC6|A0A090SBC6_9VIBR S-adenosylmethionine:tRNA ribosyltransferase-isomerase; OS = Vibrio variabilis OX=990271 GN=JCM19239_7788 PE=3 SV=1
MTGNTGEVVDGNFTDIVSQVQPGDLLVFNNTRVIPARMFGRKASGGKLEVLVERMLDDKRVLAHVRCSKSPKPGTELFLGENDEYQAIIRHVTMRYLRSKCSLKRRCLRS

SEQ ID NO: 73649 - protein, 350 aa, Vibrio vulnificus; identical to SEQ ID NO: 73567
  REGION 1..350: note = sp|Q7MNH2|QUEA_VIBVY S-adenosylmethionine:tRNA ribosyltransferase-isomerase OS=Vibrio vulnificus (strain YJ016) OX=196600 GN=queA PE=3 SV=1

SEQ ID NO: 73650 - protein, 350 aa, Vibrio vulnificus
  REGION 1..350: note = sp|Q8DEX9|QUEA_VIBVU S-adenosylmethionine:tRNA ribosyltransferase-isomerase OS=Vibrio vulnificus (strain CMCP6) OX=216895 GN=queA PE=3 SV=1
MQVSDFHFDLPDELIARYPQSERTASRLLQLNGNTGAVKDGSFKDVLELVQAGDLLVFNNTRVIPARMFGRKESGGKLEVLVERMLDEKRFLAHVRSSKSPKPGTLVFLGEEDQYSAEMVARQDALFELHLKADKTILEVLEEIGHMPLPPYIDRPDEDADKERYQTVYNQKPGAVAAPTAGLHFDNQLLEQIKAKGAEFAYVTLHVGAGTFQPVKVDNILEHHMHSEYAEVPQEVVDAINATKARGGRVIAVGTTSVRSLESAAQESLKNGTELMPFFGDTEIFIFPGYQYQLVDCLITNFHLPESTLIMLVSAFAGYDHTMNAYQHAVSNQYRFFSYGDAMFIEKKTQ

SEQ ID NO: 73651 - protein, 350 aa, unidentified
  source 1..350: note = Vibrio xiamenensis
  REGION 1..350: note = tr|A0A1G7W3F1|A0A1G7W3F1_9VIBR S-adenosylmethionine:tRNA ribosyltransferase-isomerase; OS = Vibrio xiamenensis OX=861298 GN=queA PE=3 SV=1
MQVSDFHFELPDELIARYPQPERTASRLLQLNGNSGQLVDGTFKDVLDQVQPGDLMVFNNTRVIPARLFGRKASGGKLEVLVERMLDEHSILAHVRCSKSPKPGSMILIGENDEYQAEMVARHDALFELRFSSDKPVLDILNHVGHMPLPPYIDRPDEDADKERYQTVYNQKPGAVAAPTAGLHFDDALLEQIKAKGVEFAYVTLHVGAGTFQPVRVENINDHHMHAEYVEVPQEVVDAINATKARGGRIIAVGTTSVRSLESAAQNALKNGTELVPFFDDTEIFIYPGYEYQLVDCLITNFHLPESTLIMLVSAFAGYDHTMAAYHHAVEQKYRFFSYGDAMFITKRTN

SEQ ID NO: 73652 - protein, 350 aa, unidentified
  source 1..350: note = Vibrionales bacterium
  REGION 1..350: note = tr|A0A366XLV5|A0A366XLV5_9GAMM S-adenosylmethionine:tRNA ribosyltransferase-isomerase; OS = Vibrionales bacterium C3R12 OX=2267228 GN=queA PE=3 SV=1
MQVSDFHFELPDELIARYPQAERTASRLLQLDGNTGTLSDGSFKDVLDLVQPGDLVVFNNTRVIPARLFGRKESGGKLEVLVERMIDEKSILAHVRCSKSPKPGTTLFLGEHDEYQAEMVARHDALFEIRFTSDESVLEILNAVGHMPLPPYIDRPDEDADKERYQTVYNKKPGAVAAPTAGLHFDEQLLEQIKDKGVEFAYVTLHVGAGTFQPVKVDNIHDHHMHAEYVEVPQEVVDAIAATKARGGRVIAVGTTSVRSLESAAQDALKKGTELVPFFGDTEIFIFPGYEYQLVDCLITNFHLPESTLIMLVSAFADYDKVMAAYDHAVKNEYRFFSYGDAMFINKKTK

SEQ ID NO: 73653 - protein, 350 aa, unidentified
  source 1..350: note = Vibrionales bacterium
  REGION 1..350: note = tr|A5L7R6|A5L7R6_VIBBS S-adenosylmethionine:tRNA ribosyltransferase-isomerase OS=Vibrionales bacterium (strain SWAT-3) OX=391574 GN=queA PE=3 SV=1
MQVSDFHFDLPDELIARYPQEERTASRLLKLDGNNGNLTDGSFKDVLDLVEPGDLVVFNNTRVIPARVFGRKASGGKLEVLVERMLDEKSILAHVRCSKSPKPGTKLFLGENDEYEAEMIARHDALFEIHFTSDQSVLEILNSVGHMPLPPYIDRPDEDADKERYQTVYNEKPGAVAAPTAGLHFDDKLMADMKAKGVEFAYVTLHVGAGTFQPVKVDNINDHHMHAEYVEVPQEVVDAVAATKARGGRIIAVGTTSVRSLESAAQDALKNGTELVPFFGDTEIFIFPGYEYQLVDCLITNFHLPESTLIMLVSAFAGYDNVMGAYDHAVKSEYRFFSYGDAMFINKKTS

SEQ ID NO: 73654 - protein, 408 aa, unidentified
  source 1..408: note = Vibrionimonas magnilacihabitans
  REGION 1..408: note = tr|A0A2S8SGT5|A0A2S8SGT5_9BACT S-adenosylmethionine:tRNA ribosyltransferase-isomerase; OS = Vibrionimonas magnilacihabitans OX=669455; GN = CLV53_11148 PE=3 SV=1
MHPKALSILDFTYTLPDDRIARFPLEARDQSRLLVYRGGQISETVYASLAGELPGGSLLVFNNTKVVEARLLFQKNTGSIIEIFCLEPHEQYPDITSAMLEKGKVWWKCLVGGAKKWKEPVLHKALSDSGIVLSAKKIEQRADHYIIELSWSDETLSFAELLHMAGALPLPPYLNRAAEESDKERYQTIYARYDGSVAAPTAGLHFTDAVFASLSQKNIRHEFVTLHVGAGTFKPVKSATMEEHDMHAEFIDVPLSVIEKLLQQWPDTIVPVGTTSLRTIESLYWLGVKTILHPDIQPAALHLTQWEPYQLKHEAISPSLALQSLINWMQQHQLQKLLTKTQIIMAPGYQLKIAKGLITNFHQPQSTLLLLVAAIVGDDWKRIYNYALEHGFRFLSYGDGCLLMSDIV

SEQ ID NO: 73655 - protein, 349 aa, unidentified; identical to SEQ ID NO: 67377
  source 1..349: note = Vibrionimonas magnilacihabitans
  REGION 1..349: note = tr|A0A2S8SMG7|A0A2S8SMG7_9BACT S-adenosylmethionine:tRNA ribosyltransferase-isomerase; OS = Vibrionimonas magnilacihabitans OX=669455 GN=queA PE=3; SV = 1

SEQ ID NO: 73656 - protein, 348 aa, unidentified
  source 1..348: note = Vicingus serpentipes
  REGION 1..348: note = tr|A0A5C6RQH3|A0A5C6RQH3_9FLAO S-adenosylmethionine:tRNA ribosyltransferase-isomerase; OS = Vicingus serpentipes OX=1926625 GN=queA PE=3 SV=1
MKLSKFKFDLPEELLAEHPAQERDESRLMVVHRDTGEIEHKLFKDMIDYFDEGDLLIMNDTKVFPARMYGNKEKTGARIEVFLLRELNRESLLWDVLVDPARKIRIGNKLYFGDDDLVAEVIDNTTSRGRTLRFLFDGPYEEFKAIIEKLGETPIPKYIQREVVPEDADRYQTVYAQNEGAVAAPTAGLHFSKHLLKRLEIKGINFAKLTLHVGLGTFRGVEVEDLTKHKMDSEEAHIDQKCADLVNATKLKKKRICAVGTTSMRAIESSVSSDGQLKPYDGWTNKFIFPPFDFNIANAMITNFHTPYSTLLMMTCAFGGYDLIMKAYKEAIKEKYRFYTYGDAMLII

SEQ ID NO: 73657 - protein, 354 aa, unidentified
  source 1..354: note = Victivallales bacterium
  REGION 1..354: note = tr|A0A2S0KX05|A0A2S0KX05_9BACT S-adenosylmethionine:tRNA ribosyltransferase-isomerase; OS = Victivallales bacterium CCUG 44730 OX=2094242 GN=queA; PE = 3 SV=1
MLSTSLFDYDLPEELIAQHPAGRRDGSRMLVLDRASGACEIRPFGAIREYLSAGDALIYNDTRVLRGRMYARKNGDPAGAKFELLLVQALDPERRKWNALLKPGKRALPGVSAVLLDGGGALNAAGDRFTVLGRNDDGSFIIEFNTADSDRLQMQYGHIPLPPYITRGDETADAERYQTVYADKAGAVAAPTAGLHFTPEILSELAAAGVREGAVTLHVGPGTFKPVSVENAEEHKMHSEEYFLTPETAELVNSAHAAGKRVLAVGTTTVRTLESCAEPDGTVRAGHGNTQIFLYPPYRVRSVDLLLTNFHLPKSTLLMLVSCFCDREKVLAAYELAIRERMRFYSYGDCMLLK

SEQ ID NO: 73658 - protein, 354 aa, Victivallis vadensis
  REGION 1..354: note = tr|A0A2U1AVZ2|A0A2U1AVZ2_9BACT S-adenosylmethionine:tRNA ribosyltransferase-isomerase; OS = Victivallis vadensis OX=172901 GN=queA PE=3 SV=1
MLSTALFDYELPEELIAQHPAARRDGSRMMVLNRKSGECVIRPFSAIVDYLEPGDALIYNDTRVLRGRMYARKNSDPAGAKFELLLVEALDSERRRWNAMLKPGKRALPGVTAGLLDNDGSINSDGDSFCVIGRNGDGTFEIEFSTTDSDRLQQRYGHIPLPPYISRGDENADAERYQTVYAQKEGAVAAPTAGLHFTPEILAELKARGVGEAAVTLHVGPGTFKPVSVENAEEHQMHSEEYFLTPETAELVNSTRRTGHKVLAVGTTTVRVLESCVTPDGTVHAGHGKTRIFLYPPKPVLAEDMLLTNFHLPKSTLLMLVSCFCDREKVLAAYQVAIRERMRFFSYGDCMLLI

SEQ ID NO: 73659 - protein, 343 aa, Virgibacillus chiguensis
  REGION 1..343: note = tr|A0A1M5M6Y9|A0A1M5M6Y9_9BACI S-adenosylmethionine:tRNA ribosyltransferase-isomerase; OS = Virgibacillus chiguensis OX=411959 GN=queA PE=3 SV=1
MNIEEFDFDLPKELIAQTPLKERTASRLLVLNKQTKVISHHHFSDVKQFLKPGDCLVLNNTRVLPARLHGIKEDTGANVEILLLHQVDGDSWEILAKPAKKVKLGTVIRFGDGLLTATVTQVKEHGGRVVDFAYTGIFYEVLDQLGEMPLPPYIKEQLPEKERYQTVYAKEEGSAAAPTAGLHFTKKLLNELEQMGVRIAFITLHVGLGTFRPVSVETVEEHEMHAEFYHMDQDTADLLNAVKQSDGRIISVGTTSTRTLETIARDNQGAFKQASGWTDIFIYPPYQFQAVDGLITNFHLPKSTLLMLISAFAGKDAVMEAYREAVQEQYRFFSFGDAMFIYA

SEQ ID NO: 73660 - protein, 343 aa, Virgibacillus dokdonensis
  REGION 1..343: note = tr|A0A2K9J2J6|A0A2K9J2J6_9BACI S-adenosylmethionine:tRNA ribosyltransferase-isomerase; OS = Virgibacillus dokdonensis OX=302167 GN=queA PE=3 SV=1
MNIEEFDFDLPKELIAQTPLKERTASRLLVLNKQTKAISHHHFFDVKQFLKPGDCLVLNNTRVLPARLHGIKEDTGANVEILLLHQVDGDSWEILAKPAKKVKLGTVIRFGDGLLTATVTQIKEHGGRVVDFAYTGIFYEVLDQLGEMPLPPYIKEQLPEKERYQTVYAKEEGSAAAPTAGLHFTKELLNELEQMGVCIAFITLHVGLGTFRPVSVETVEEHEMHAEFYHMDQNTADLLNDVKQSDGRIISVGTTSTRTLETIARDNHGTFKQASGWTDIFIYPPYQFQAVDGLITNFHLPKSTLLMLISAFAGKDAVMEAYREAVQERYRFFSFGDAMFIYA

SEQ ID NO: 73661 - protein, 343 aa, Virgibacillus dokdonensis
  REGION 1..343: note = tr|A0A3E0WNI2|A0A3E0WNI2_9BACI S-adenosylmethionine:tRNA ribosyltransferase-isomerase; OS = Virgibacillus dokdonensis OX=302167 GN=queA PE=3 SV=1
MNIEEFYFDLPKELIAQTPLKERTASRLLVLNKQTKAISHHHFSDVKQFLKPGDCLVLNNTRVLPARLHGIKEDTGANVEILLLHQVDGDSWEILAKPAKKVKLGTVIRFGDGLLTATVTQVKEHGGRVVDFAYTGIFYEVLDQLGEMPLPPYIKEQLPEKERYQTVYAKEEGSAAAPTAGLHFTKKLLNELEQMGVRIAFITLHVGLGTFRPVSVETVEEHEMHAEFYHMDQDTADLLNAVKQSDGRIISVGTTSTRTLETIARDNQGAFKQASGWTDIFIYPPYQFQAVDGLITNFHLPKSTLLMLISAFAGKDAVMEAYREAVQEQYRFFSFGDAMFIYA

SEQ ID NO: 73662 - protein, 342 aa, Virgibacillus halodenitrificans
  REGION 1..342: note = tr|A0A1J0H0X2|A0A1J0H0X2_VIRHA S-adenosylmethionine:tRNA ribosyltransferase-isomerase; OS = Virgibacillus halodenitrificans OX=1482 GN=queA PE=3; SV = 1
MNIEDFDFDLPEELIAQTPLQERTASRLLVLDRQTKEVNHKHFSDIKSYFKKGDCLVLNDTKVLPARLYGVKEDTGAKVEILLLNQREADTWEVLAKPAKKIKVGTTLVFGEGKLKATCLATEEHGGRILEFYYTGIFYEVLDELGEMPLPPYIKEQLPEKERYQTVFAREEGSAAAPTAGLHFTNELLEEIEDMGVTIAFITLHVGLGTFRPVSVENIDDHEMHSEFYHMSKETADILNETKKSNGRIISVGTTSTRTLETIARDHQGAFKETSGWTDIFIYPPYEFKAIDGLITNFHLPKSTLIMLVSALVDKETILHAYKEAVQERYRFFSFGDAMLIL

SEQ ID NO: 73663 - protein, 342 aa, unidentified
  source 1..342: note = Virgibacillus indicus
  REGION 1..342: note = tr|A0A265NEG4|A0A265NEG4_9BACI S-adenosylmethionine:tRNA ribosyltransferase-isomerase; OS = Virgibacillus indicus OX=2024554 GN=queA PE=3 SV=1
MNIEDFDFELPEELIAQTPLKERTSSRLLVLDQETKEVEHKHFRDIKQYFKKGDCLVLNDTRVLPARLYGVKKDTGAKIEVLLLTQEEKDTWEVLTKPAKKVKVGTELVFGDGKLRATCTGYKEHGGRILEFSYSGIFYEVLDELGEMPLPPYIKEQLPEKERYQTVFAREEGSAAAPTAGLHFTNELLEEIKSMGVTIAFITLHVGLGTFRPVSADTIDNHKMHAEFYQMTKDTADTLTKIKEAGGRIISVGTTSTRTLETIARDNNGAFAESSGWTDIFIYPPYQFRAVDGLITNFHLPKSTLIMLVSALADRKTILRAYNEAVNERYRFFSFGDAMLIL

SEQ ID NO: 73664 - protein, 342 aa, unidentified
  source 1..342: note = Virgibacillus massiliensis
  REGION 1..342: note = tr|A0A024QBY9|A0A024QBY9_9BACI S-adenosylmethionine:tRNA ribosyltransferase-isomerase; OS = Virgibacillus massiliensis OX=1462526 GN=queA PE=3 SV=1
MNIDDFDFDLPEELIAQTPLKDRSASRLLALNKRNGEMEHSHFTDIKRYFRTGDCLVLNDTRVLPARLHGEKEDTGASVEILLLHQTEGDMWEVLAKPAKKIKKGTIISFGDGKLTATCMGLKEHGGRIVKFDYEGIFYEVLDELGEMPLPPYIKEQLPEKERYQTVYAKEEGSAAAPTAGLHFTNVLLDELKEMGVIITFITLHVGLGTFRPVSVDKVEEHEMHAEFYHMTKETAEILNRVKQENGRIISVGTTSTRTLETIARDHNGMFLEASGWTDIFIYPPYEFKAIDGLITNFHLPKSTLIMLISAFADKDTILAAYQEAVKHRYRFFSFGDAMIII

SEQ ID NO: 73665 - protein, 342 aa, Virgibacillus necropolis
  REGION 1..342: note = tr|A0A221MBY7|A0A221MBY7_9BACI S-adenosylmethionine:tRNA ribosyltransferase-isomerase; OS = Virgibacillus necropolis OX=163877 GN=queA PE=3 SV=1
MDINDFDFELPEKLIAQTPLQDRTASRLLVMNRKSKEIEHKHFPDIKNYLKKGDCLVLNDTRVLPARLYGIKKDTGAKLEVLLLQQEEEDCWEVLAKPAKKIKVGTELVFGDGRLRAFCLETREHGGRILQFNYDGIFYEVLDELGEMPLPPYITEQLSEKERYQTVFAKEEGSAAAPTAGLHFTNELLDELKDMGVIIAFITLHVGLGTFRPVSVDNIDDHTMHSEFYHMTAETAETLKAVKKNNGRIISVGTTSTRTIETIARDNDGEFVASSGWTDIFIYPPYNFQAIDGLITNFHLPKSTLIMLVSALVDRVSILRAYNEAVYEEYRFFSFGDAMLII

SEQ ID NO: 73666 - protein, 343 aa, Virgibacillus pantothenticus
  REGION 1..343: note = tr|A0A0L0QPU1|A0A0L0QPU1_VIRPA S-adenosylmethionine:tRNA ribosyltransferase-isomerase; OS = Virgibacillus pantothenticus OX=1473 GN=queA PE=3 SV=1
MNIEEFDFDLPEELIAQTPLKERTASRLLVLNKQTKEIAHRHFPDIKEYLQPGDCLVLNNTRVLPARLHGVKEGTGASIEVLLLHQVEGDSWEILAKPAKKVKLGSVIRFGDGLLTATCTQIKEHGGRVVQFAYEGIFYEVLDQLGEMPLPPYIKEQLSEKERYQTVYAKEEGSAAAPTAGLHFTTELLNELQQMGVCIAFITLHVGLGTFRPVSAETVENHKMHAEFYHMDQHTADMLNQVKQSAGRIISVGTTSTRTLETIARDNNGEFREASGWTDIFIYPPYQFQAIDGLITNFHLPKSTLIMLISAFAGKDIVMEAYREAVQERYRFFSFGDAMFIYA

SEQ ID NO: 73667 - protein, 349 aa, unidentified
  source 1..349: note = Virgibacillus phasianinus
  REGION 1..349: note = tr|A0A220U519|A0A220U519_9BACI S-adenosylmethionine:tRNA ribosyltransferase-isomerase; OS = Virgibacillus phasianinus OX=2017483 GN=queA PE=3 SV=1
MDIHDFDFDLPEELIAQTPLKNRTASRLLVLNRESKQIDHKHFSDIKDYLKRGDCLVLNDTRVLPARLYGIKKDTGAKLEVLLLHQKEKDCWEVLAKPAKKMKVGTELVFGDGKLTATCLQTKEHGGRIVQFDYKGIFYEVLDELGEMPLPPYIKEQLPEKERYQTVYAREEGSAAAPTAGLHFTNELLDELKGMGVIITFITLHVGLGTFRPVSVDNIDDHTMHAEFYHMTEETAQTLKAVRKNNGRIISVGTTSTRTLETIARDHEGEFVASSGWTDIFIYPPYDFQAIDGLITNFHLPKSTLIMMVSALVDRESILHAYNEAVKEKYRFFSFGDAMLILPERKRNE

SEQ ID NO: 73668 - protein, 342 aa, unidentified
  source 1..342: note = Virgibacillus profundi
  REGION 1..342: note = tr|A0A2A2IDA7|A0A2A2IDA7_9BACI S-adenosylmethionine:tRNA ribosyltransferase-isomerase; OS = Virgibacillus profundi OX=2024555 GN=queA PE=3 SV=1
MNIEDFDFDLPEELIAQTPLKDRTASRLLVLKRDTKEVQHKHFTDIKGYFKKGDCLVLNDTRVLPARLYGVKKDTGAKIEVLLLHQQEKDTWEVLTKPAKKVKIGTELIFGEGKLKATCTGYKDHGGRILEFSYVGIFYEVLDALGEMPLPPYIKEQLPEKERYQTVFAREEGSAAAPTAGLHFTNELLDEIKAMGVTITFITLHVGLGTFRPVSVDNIDEHKMHAEFYQMTRETAETLIEAKKSGGRIISVGTTSTRTLETIARDNNGTFVESSGWTDIFIYPPYNFRAIDGLITNFHLPKSTLIMLVSALVNKEAILGVYKEAVDERYRFFSFGDAMLIL

SEQ ID NO: 73669 - protein, 342 aa, Virgibacillus salinus
  REGION 1..342: note = tr|A0A1H1B4E2|A0A1H1B4E2_9BACI S-adenosylmethionine:tRNA ribosyltransferase-isomerase; OS = Virgibacillus salinus OX=553311 GN=queA PE=3 SV=1
MNIEDFDFELPEELIAQTPLKERASSRLLVLNRDTKEVAHKYFTDIKQYLKKGDCLVLNNTRVLPARLYGVKEDTSAKIEVLLLHQQDEDEWEVLAKPAKKVKVGTTLVFGEGKIRATCTALKAHGGRIFDFSYEGIFYEVLDELGEMPLPPYIKKQLSEKERYQTVYAKEEGSAAAPTAGLHFTNSLLDELKSMGVTIAFITLHVGLGTFRPVSVDNIDDHTMHAEFYHMTKETANTLSQVKQAGGRIISVGTTSTRTLETIARDNNGQFAESSGWTDIFIYPPYQFQAIDGLITNFHLPKSTLIMLVSALADRESILNAYNEAVKEKYRFFSFGDAMLIL

SEQ ID NO: 73670 - protein, 342 aa, Virgibacillus soli; identical to SEQ ID NO: 63731
  REGION 1..342: note = tr|A0A0Q9XXJ9|A0A0Q9XXJ9_9BACI S-adenosylmethionine:tRNA ribosyltransferase-isomerase; OS = Virgibacillus soli OX=480284 GN=queA PE=3 SV=1

SEQ ID NO: 73671 - protein, 341 aa, Virgibacillus sp.
  REGION 1..341: note = tr|A0A075JN42|A0A075JN42_9BACI S-adenosylmethionine:tRNA ribosyltransferase-isomerase; OS = Virgibacillus sp. SK37 OX=403957 GN=queA PE=3 SV=1
MNIEDFDFDLPEELIAQTPLKERTASRLLVLDRQTKEVDHKHFTDIKDYLKKGDCLVLNDTKVLPARLYGIKEDTGAKVEILLLNQCEEDTWEILAKPAKKIKIGTTLVFGEGKLRATCTDIKEHGGRILEFYYTGIFYEVLDELGEMPLPPYIKEQLPEKERYQTVFAREEGSAAAPTAGLHFTKELLEEIEEMGVTIAFITLHVGLGTFRPVSVENIDDHEMHSEFYHMSTETADILNQTKKSNGRIISVGTTSTRTLETIARDQGAFKETSGWTDIFIYPPYDFKAIDGLITNFHLPKSTLIMLVSALVDKETILHAYKEAVQERYRFFSFGDAMLIL

SEQ ID NO: 73672 - protein, 342 aa, Virgibacillus sp.
  REGION 1..342: note = tr|A0A268I4N8|A0A268I4N8_9BACI S-adenosylmethionine:tRNA ribosyltransferase-isomerase; OS = Virgibacillus sp. 7505 OX=2022548 GN=queA PE=3 SV=1
MDIQDYDFHLPEELIAQTPLQDRTASRLLVLNKEEKTMEHRHFADIGDYLKPGDCLVLNDTRVLPARLYGIKKDTQAKVEILLLKQIEGDSWEVLVKPAKKVKVGTELSFGDGKLTAVCKELLEHGGRIVEFHYDGIFYEVLEQLGEMPLPPYIKEQLPDQERYQTVYAKEQGSAAAPTAGLHFTKELLANLQEKGVEIAFITLHVGLGTFRPVSVESIEEHEMHAEFYQMSQETADQLTRIRANGGRIISVGTTSTRTLETITRDHDGKFVAASGWTDIFIYPGFTYRAIDGLITNFHLPKSTLIMLVSAFAGRDFILDAYRTAVEERYRFFSFGDAMLLV

SEQ ID NO: 73673 - protein, 350 aa, Viridibacillus arenosi
  REGION 1..350: note = tr|W4EPD5|W4EPD5_9BACL S-adenosylmethionine:tRNA ribosyltransferase-isomerase OS=Viridibacillus arenosi FSL R5-213 OX=1227360 GN=queA PE=3 SV=1
MKLEDFDFELPEELIAQTPLEDRTSSRLMVVDRDSGEVTHHTFRDIIEELHEGDCLVLNDTRVLPARLMGVKEETGAHVEILLLKQTSNEDEWETLVKPAKRVKVGTEITFGEGLLKATCTGELDHGGRLFKFNYEGIFYEILDQLGEMPLPPYIREKLDDQDRYQTVFAKERGSAAAPTAGLHFTTDLLDEIRAKGVKVAFLTLHVGLGTFRPVNVETIETHAMHSEFYNLTEETATIINDTKRNGGRVIAVGTTSTRTLETIAERHDGNIVADSGWTSIFIYPGFEYKSIDGLITNFHLPKSTLVMLVSALTTREIILNAYNIAVQERYRFFSFGDAMFIRPKAKKGN

SEQ ID NO: 73674 - protein, 350 aa, Viridibacillus arvi
  REGION 1..350: note = tr|A0A0M0LMM9|A0A0M0LMM9_9BACL S-adenosylmethionine:tRNA ribosyltransferase-isomerase; OS = Viridibacillus arvi OX=263475 GN=queA PE=3 SV=1
MKLEDFDFELLEELIAQTPLEDRTSSRLMIVDSDSGEVTHHTFRDIIEELHEGDCLVLNDTRVLPARLMGVKEETGAHVEILLLKQTSNEDEWETLVKPAKRVKVGTEITFGEGLLKATCTGELDHGGRLFKFNYEGIFYEILDQLGEMPLPPYIREKLDDQDRYQTVFAKERGSAAAPTAGLHFTTDLLDEIRAKGVKVAFLTLHVGLGTFRPVNVETIETHAMHSEFYNLTEETAAIINDTKRNGGRVIAVGTTSTRTLETIAERHDGKIVADSGWTSIFIYPGFEYKAIDGLITNFHLPKSTLVMLVSALTTREIILNAYNIAVQERYRFFSFGDAMFIRPKAQKGN

SEQ ID NO: 73675 - protein, 350 aa, Viridibacillus sp.
  REGION 1..350: note = tr|A0A2N0EXT8|A0A2N0EXT8_9BACL S-adenosylmethionine:tRNA ribosyltransferase-isomerase; OS = Viridibacillus sp. OK051 OX=1884360 GN=queA PE=3 SV=1
MKLEDFDFALPEELIAQTPLKDRTSSRLMVVDRESGEVTHHTFRDIIEELHEGDCLVLNDTRVLPARLMGVKEETGAHVEVLLLKQTANEDEWETLVKPAKRVKIGTEITFGEGLLKATCTGELDHGGRLFKFDYEGIFYEILDQLGEMPLPPYIREKLDDQDRYQTVFAKERGSAAAPTAGLHFTEELLDEIRAKGVKVTFLTLHVGLGTFRPVNVETIETHEMHSEFYHLSAETAALINETKQKGGRVISVGTTSTRTLETIAERHDGKLVADSGWTAIFIYPGFEYKVIDGLITNFHLPKSTLVMLVSALTTREIILNAYDIAVQERYRFFSFGDAMFIRPKAQKGN

SEQ ID NO: 73676 - protein, 349 aa, unidentified
  source 1..349: note = Vitellibacter aquimaris
  REGION 1..349: note = tr|A0A137RGN3|A0A137RGN3_9FLAO S-adenosylmethionine:tRNA ribosyltransferase-isomerase; OS = Vitellibacter aquimaris OX=1548749 GN=queA PE=3 SV=1
MKLSNFNFNLPEELLAEYPAPNRDESRLMVLDRKNKTIEHKMFKDLIDYFEEDDVLVTNNTKVFPARLFGNKEKTGARIEVFLLRELNPETRLWDVLVDPARKIRIGNKLYFGDDETLVAEVIDNTTSRGRTLRFLFDGSYEEFRNKLTELGETPLPKYIKREVEPEDAERYQTIFAKNEGAVAAPTAGLHFSKHLLKRLEIKGVNVAEVTLHVGLGTFSSVEVEDLSKHKMDSEEMEIDQQAVNIINAGIQKKKRVCAVGTTAMRALESSVSSNHTLNSYKGWTNKFIFPPYDFSIANAMVTNFHTPKSTLLMMVSAFAGHDFIKEAYAEAIKEKYRFYTYGDAMLII

SEQ ID NO: 73677 - protein, 361 aa, unidentified
  source 1..361: note = Vitiosangium sp.
  REGION 1..361: note = tr|A0A2T4V2T7|A0A2T4V2T7_9DELT S-adenosylmethionine:tRNA ribosyltransferase-isomerase; OS = Vitiosangium sp. GDMCC 1.1324 OX=2138576 GN=queA PE=3; SV = 1
MSSLLSDYDFELPEAQIAQAPLAARDASRLMVVRRSSGAWAHRHFSELPELLRDGDLLVVNDARVIPARLLGSKAGTGGRVELLVVRPAASTLTSQALGGAAEALEWICLGQASKGLKPGARISFPEGLEAEVLEALGGGEYRVRFHASSGTSLAAALEKAGRLPLPPYITRAPEASDAERYQTVYARASGAVAAPTAGLHFTDATFAALAARGIHRVEVTLDVGPGTFLPVREENLEKHHMHPERYFVPEATARAVNAARAEGRRVVAVGTTVVRTLESATDPDSGALRAGPGETTMFIRPGFTFRQVDVLLTNFHLPRSTLVVLVSALLGRERTLAAYREAVAAGYRFFSYGDAMLVTE

SEQ ID NO: 73678 - protein, 341 aa, unidentified
  source 1..341: note = Vitiosangium sp.
  REGION 1..341: note = tr|A0A2T4VQV3|A0A2T4VQV3_9DELT S-adenosylmethionine:tRNA ribosyltransferase-isomerase; OS = Vitiosangium sp. GDMCC 1.1324 OX=2138576 GN=DAT35_11925; PE = 3 SV=1
MNAARWPREQPDSGRLLHVAPRSGRLDDARMTELPRMLRPGDLLVLNDAATLPAALHGHTEAGAPIELRLVSREAEGTWTAVLFGAGDWRTRTEDRPPPPAVSPGEQFVLGGLGARVVAVLPPSARLLRVEFALQGAALWTALYRAGRPVQYAHVERPLSLWHIQTAYAARPWAVETPSAGLPLTWALLLELKHRGIRLATLTHAAGLSSTGDEVLDAALPRPERFDVPASTVEAIHATRSSGGRVVAVGTTVVRALEGRAAQTGGRLEPGEGVTDLLLGPGFIPRVVDGLLSGMHEPGTSHFTLLQAFAPQELLRAACVLAESRGYLGHEFGDSCLILEP

SEQ ID NO: 73679 - protein, 366 aa, Vitreoscilla filiformis
  REGION 1..366: note = tr|A0A221KCC5|A0A221KCC5_VITFI S-adenosylmethionine:tRNA ribosyltransferase-isomerase; OS = Vitreoscilla filiformis OX=63 GN=queA PE=3 SV=1
MTAADRLFTLSDFDFELPPALIAQHPAPERSASRLLDGRGAVPVDRVFRDLPQLLAPGDLLVFNDTKVLKARLFGEKHTGGSIEALVERILPPAQGESMARELWAHVRASKSPKPGSVIRLGTDRGPGFEAEVLGRGGPDDALFHLRVAGNAFDLVEQHGHVPLPPYITHGDAAEDERRYQTVFATHLGAVAAPTAALHFDEALLAALAARGVSTARVTLHVGAGTFQPVRTENLADHKMHSEWFDVPQTTVDALRATRAAGGRITSVGTTTLRALESAAWQEMQASGQDLHRARSGETDIFITPGFEFRVVDRLITNFHLPKSTLMMLVSALAGYERVMALYRHAIEARYRFFSYGDAMLLERQG

SEQ ID NO: 73680 - protein, 322 aa, Vitreoscilla sp.
  REGION 1..322: note = tr|A0A2L0PLZ4|A0A2L0PLZ4_VITS1 S-adenosylmethionine:tRNA ribosyltransferase-isomerase; OS = Vitreoscilla sp. (strain C1) OX=96942 GN=queA PE=3 SV=1
MIAQHPPEVRGSSRLLASWQDQAFQNLHFPDVVSFFKSGDVLVMNDTKVIKARLFGQKASGGKIEVLVERVMDDHTVWAHVRSSKSPKPGMVLEFGEDKAVMVERKDALFVLQFQGEKTVWEVLEEQGHMPLPPYIERADDADDDERYQTVYAQNDGAVAAPTAGLHFTPEILQQLQDKGVALHFVTLHVGAGTFQPVKVDNIEEHHMHSERFWVAQSVVDAIDEAKARGNHVWAVGTTSMRALESAALTGRLQAGSGDTDIFITPGFEIKVVDRLITNFHLPKSTLMMLVSAFHGYEKSWRCTNMLSKTNTAFSVMATRWC

SEQ ID NO: 73681 - protein, 341 aa, Vogesella indigofera
  REGION 1..341: note = tr|A0A495BD92|A0A495BD92_VOGIN S-adenosylmethionine:tRNA ribosyltransferase-isomerase; OS = Vogesella indigofera OX=45465 GN=queA PE=3 SV=1
MLVSDFDYHLPEHLIAQHPPAERGGSRLLRVNGRVLQDDHFAAIAHALDAGDVLVFNDTRVIKARLFGEKASGGKIEALVERVLNEHEVLAHVRASKSPKPGTRLVFAGRWQAEMVERAGELFKLRFLDAANVFDILDASGKLPLPPYIERDTDGDDDERYQTVYAREKGAVAAPTAGLHFTDAMLQTLRDKGVILCSVTLHVGAGTFQPVRVENIAEHKMHSEIYDIPQATVDAIDAAHKVGRKVLAVGTTSMRALESAARPDGVLRAGRGETDIFITPGYRFNVVDKLLTNFHLPKSTLLMLVSAFAGYEEMRAAYAHAVAQEYRFFSYGDAMLLTRKE

SEQ ID NO: 73682 - protein, 340 aa, Vogesella sp.
  REGION 1..340: note = tr|A0A1C6LLM6|A0A1C6LLM6_9NEIS S-adenosylmethionine:tRNA ribosyltransferase-isomerase; OS = Vogesella sp. LIG4 OX=1192162 GN=queA PE=3 SV=1
MHVSDFDYHLPDELIAQHPPAERGSSRLLLVHGHTPQDSRFTEFADQLQAGDVMVFNDTRVIKARLFGEKDSGGKVEALVERVLNEHEVLAHVRASKSPKPGTRIIFAGRWQAEMVARADELFHLKFLDAANVFDILEASGKLPLPPYIARDTDADDDERYQTVYAREQGAVAAPTAGLHFTDAMLQQLRDKGVQLCHVTLHVGAGTFQPVRVDNIAEHKMHSEIYEVPQGTVDAIHAAHAAGRKVLAVGTTSMRALESAARDGGLKAGRGETDIFITPGFRFQVVDKLLTNFHLPKSTLLMLVSAFAGYDEIRGAYAHAVTHGYKFFSYGDAMLLTRKD

SEQ ID NO: 73683 - protein, 341 aa, Vogesella sp.
  REGION 1..341: note = tr|A0A0J5GGL2|A0A0J5GGL2_9NEIS S-adenosylmethionine:tRNA ribosyltransferase-isomerase; OS = Vogesella sp. EB OX=1526735 GN=queA PE=3 SV=1
MLVSDFDYHLPEHLIAQHPPAERGGSRLLRVNGRVLQDDHFAAIADALDAGDVLVFNDTRVIKARLFGEKASGGKIEALVERVLNEHEVLAHVRASKSPKPGTRLVFAGRWQAEMVERAGELFKLRFLDAANVFDILDASGKLPLPPYIERDTDGDDDERYQTVYAREKGAVAAPTAGLHFTDAMLQTLRDKGVILCSVTLHVGAGTFQPVRVENIAEHKMHSEIYDIPQATVDAIDAAHKVGRKVLAVGTTSMRALESAARPDGVLRAGRGETDIFITPGYRFNVVDKLLTNFHLPKSTLLMLVSAFAGYEEMRAAYAHAVAQEYRFFSYGDAMLLTRKE

SEQ ID NO: 73684 - protein, 366 aa, Volucribacter psittacicida
  REGION 1..366: note = tr|A0A4R1FWC8|A0A4R1FWC8_9PAST S-adenosylmethionine:tRNA ribosyltransferase-isomerase; OS = Volucribacter psittacicida OX=203482 GN=queA PE=3 SV=1
MRVSDFNFDLPDELIARYPMAERRASRLLQLNGKTGEITHRTFADIVELIDEGDLLIFNNTRVIPARMFGRKASGGKVEVLVERVLTESRFLAHIRSSKSPKEQAELWLGEDKLGEGKGIGVKMLARQGSLFELELLDQSLPLLEVLQQIGHMPLPPYIDRPDEDADQERYQTVYNQVPGAVAAPTAGLHFDQDLLDQLKQKGVNFAFVTLHVGAGTFQPVRVENIEDHQMHAEYVEVPPQVCEAIIATKKAGKRVIAVGTTSVRSVESAAQQAIAKQSRQIIEPYFADTAIFLYPGKTFHIIDALITNFHLPESTLIMLVSAFAGYQHTMQAYQSAVQHRYRFFSYGDAMFIEQKTEERWLMVRD

SEQ ID NO: 73685 - protein, 342 aa, Vulcanibacillus modesticaldus
  REGION 1..342: note = tr|A0A1D2YWS4|A0A1D2YWS4_9BACI S-adenosylmethionine:tRNA ribosyltransferase-isomerase; OS = Vulcanibacillus modesticaldus OX=337097 GN=queA PE=3; SV = 1
MKIELFDFELPEELIAQTPLSHRDESKLLVLNRQTGVIEHRKFKNIIEYLQPGDALVLNDTKVLPARLYGHKKETGAKVEVLLLKQLDNNRWETLVKPGKKLRVGHEVVFGDGLLTGIVENTTEVGGRIIRFQYDGIFNEILDKLGNMPLPPYIKEQLEDKDRYQTVYAKNVGSSAAPTAGLHFTEELLNQIRQKGINIVYITLHVGLGTFRPVSVENIEEHQMHAEYFSMTKEAAETLNKTKDLKRKIIAVGTTSVRTLETIVDKQTGRFMPKDGWTDIFIYPGFEFKAIDGMITNFHLPKSSLVMLVSALAKRENIMNAYQEAIKNRYRFYSFGDAMFIY

SEQ ID NO: 73686 - protein, 357 aa, unidentified
  source 1..357: note = Vulcaniibacterium tengchongense
  REGION 1..357: note = tr|A0A3N4VE55|A0A3N4VE55_9GAMM S-adenosylmethionine:tRNA ribosyltransferase-isomerase; OS = Vulcaniibacterium tengchongense OX=1273429 GN=queA PE=3; SV = 1
MSGPAPVPVSPLKKSDFHYDLPPELIAQEPLPERSASRLLVVPPAPAPFQDRVFRELPELLQPGDLLVFNDTRVIPARLYGHKSTGGRVEILIERLLGDGEARAQLGVSKSPRPGARVALDAGGEAEVLGRDGEFYRLRFHVAEPLEQWLQRAGELPLPPYIQRTPGAGDAERYQTVFAREAGAVAAPTAGLHFDEPLLQALNARGVQFGHVTLHVGAGTFQPVRADDLSQHVMHSEWLNVGAGLVEQIRRTRAAGGRVIAVGTTVVRALESAAKDGALRPYAGETRLFILPGYRIRSVDALITNFHLPESTLLMLVSAFAGKPRVFEAYAHAIAQRYRFFSYGDAMLLFPREEGRA

SEQ ID NO: 73687 - protein, 350 aa, unidentified
  source 1..350: note = Vulgatibacter incomptus
  REGION 1..350: note = tr|A0A0K1PB21|A0A0K1PB21_9DELT S-adenosylmethionine:tRNA ribosyltransferase-isomerase; OS = Vulgatibacter incomptus OX=1391653 GN=queA PE=3 SV=1
MKTSDFDFELPEELIAQAPLAERDASRLLVLPRNGGAPTHASFRDLPGWLRPGDLLVLNDAKVIPARLRGAKEASGGKVELLLCDPLASLGDRAVWRCMGGSSKPLRPGAWLRFEAAGGMLRAEIVAVGEGGFVDVAFDEAPDALLDRVEELGELPLPPYMKRAPEASDRDRYQTIYARHRGAVAAPTAGLHFTDEVFSALRERGVERTAVTLHVGPGTFLPVRADSVEEHRMHAERYEISQDAVDAIARTREAGGRVIAVGTTALRTLESAAEETGRIRAGAGVSSLFVTPGFRFRVVDGLLTNFHLPRSTLVMLVAALAGRERLLAAYTEAVERRYRFYSYGDAMLVS

SEQ ID NO: 73688 - protein, 341 aa, Waddlia chondrophila
  REGION 1..341: note = tr|D6YW17|D6YW17_WADCW S-adenosylmethionine:tRNA ribosyltransferase-isomerase OS=Waddlia chondrophila (strain ATCC VR-1470 / WSU 86-1044) OX=716544 GN=queA PE=3; SV = 1
MLDKLESYQFDLPEDLIAKVPVTPRDHSRLMVIDRSSGKIEEIPFYELPQFLGDGDRIVFNNTKVIPARLIGRKETGGQVELLLLEEKTEGVWLTMARPARKLKKGTKVIVSDRLCAEMIEELDEGMRLVRFDYEGLFWEVLAAHGEMPLPPYLQRDELPKLDRERYQTIYAKHAGAVAAPTAGLHFTKTLLEELTEKGVDIVEITLHVGLGTFRPVTAKTITEHKMHEERYWITQEAASRLNRPAKREICVGTTCCRALESAVNEQGNVFSGEGRTDIFIRPGYQFKKVTSLLTNFHLPGSTLMMLVSAFAGYDLTMNAYKKAVLDKFRFFSYGDAMLIL

SEQ ID NO: 73689 - protein, 341 aa, Waddlia chondrophila; identical to SEQ ID NO: 73688
  REGION 1..341: note = tr|F8LDD4|F8LDD4_9BACT S-adenosylmethionine:tRNA ribosyltransferase-isomerase OS=Waddlia chondrophila 2032/99 OX=765953 GN=queA PE=3 SV=1

SEQ ID NO: 73690 - protein, 346 aa, unidentified
  source 1..346: note = Waddliaceae bacterium
  REGION 1..346: note = tr|A0A2E3LYH8|A0A2E3LYH8_9BACT S-adenosylmethionine:tRNA ribosyltransferase-isomerase; OS = Waddliaceae bacterium OX=2026802 GN=queA PE=3 SV=1
MTKDLFSIDAYHYDLPEELIAQHPCSPRHDSRLLIVDRKKESFREIRFMDLCDEMQEGDSFVFNNTKVIPARLFAKRSTGAKIQIFLHRHLGQADWEVLVKPARKVIVGETLFLDGDMEAEVIGAADDGVRHLRFSQPERLEEFLHQHGQIPLPHYIRGGQESPEDRENYQTLYAKHSGAVAAPTAGLHFSEEMLQRLREKKVYQTEVTLHVGLGTFKPVQSDDIRQHNMHNELFILDENAVRELGQRDPNRRQIVVGTTSCRALESAVDSNGMFHAGSYETDIFIYPGYQFRYVEALLTNFHLPKSTLLMLISAFAGYDLVMEAYRYAVKERFRFFSYGDAMLLL

SEQ ID NO: 73691 - protein, 351 aa, Weeksella virosa
  REGION 1..351: note = tr|F0P126|F0P126_WEEVC S-adenosylmethionine:tRNA ribosyltransferase-isomerase OS=Weeksella virosa (strain ATCC 43766 / DSM 16922 / JCM 21250 / NBRC 16016 / NCTC 1163 4 / CL345/78) OX=865938 GN=queA PE=3 SV=1
MKMKTSDFDFKLPDELLAERPSEHRDEARLMVIHRDTGKIEHRLFKDLIEYFDEGDVMIRNNTKVFPARLMGNKEKTGAKIEVFLLRELDPETRLWDVLVDPARKIRIGNKLFFDEDDTLVAEVVDNTTSRGRTLRFLFDGSYEEFRIKLKEIGDTPLPKYIKRDADEEDAERYQTIYAKEEGAVAAPTAGLHFSKHLLKRLEIKGVDFAEVTLHIGLGTFMPVEVEDLSKHKMESEQVIIPQESADLVNKAIDAKKRVCAIGTTSMRSIESSVSADGHLNAFNGWTNKFIYPPYDFSIANCMVTNFHTPKSTLLMMISAFAGHELIMKAYDEAIKEGYKFYSYGDAMLIL

SEQ ID NO: 73692 - protein, 348 aa, unidentified
  source 1..348: note = Weissella bombi
  REGION 1..348: note = tr|A0A1C4BQ93|A0A1C4BQ93_9LACT S-adenosylmethionine:tRNA ribosyltransferase-isomerase; OS = Weissella bombi OX=1505725 GN=queA PE=3 SV=1
MAENFTSLSDFDYELPQELIAQTPLKKRDGSRLLEMNADTGELHDRHFYDIIDYLNPGDALVMNNSRVLPARLYGERPDTGGHVEVLLLRQDQDDVWETLVKPARKYPVGQKITFGDGRLTAEVVEELEHGGRMVKFHYDGIFLEILEELGEMPLPPYIKEKLEDQERYQTVYSKVNGSAAAPTAGLHWTPELLQKVADKGIKLVELTLHVGLGTFRPVEEDNIDDHKMHSEFYQLSEEAAQTLNEVRANGGRIVATGTTSIRTLETIGAKFDGELHADSGWTDIFIKPGFQWHVVDAFITNFHLPKSTLVMLVAAFTGRDNILNAYKHAVDEKYRFFSFGDAMFIHR

SEQ ID NO: 73693 - protein, 348 aa, Weissella cibaria
  REGION 1..348: note = tr|A0A0D1LHM4|A0A0D1LHM4_9LACT S-adenosylmethionine:tRNA ribosyltransferase-isomerase; OS = Weissella cibaria OX=137591 GN=queA PE=3 SV=1
MTEEHYTLEDFDYDLPHELIAQTPLERRDGSRLLELNAVTGEVHDRHFYDILDYLNPGDALVMNNSRVLPARLYGERPGTGGHVEVLLLRQDHGDVWETLVKPAKKYPVGQEITFGDGQLTAVVTEELEHGGRMIEFKYDGIFLEILESLGEMPLPPYIKEKLDDKERYQTVYSKVNGSAAAPTAGLHWTPELLQKAADKGVKLVELTLHVGLGTFRPVEEENIEDHKMHSEFYQLSAEAAQTLNDVKANGGLIIATGTTSIRTLETIGSKFNGELREDSGWTDIFIKPGYKWTVVDAFITNFHLPKSTLVMLVAAFTGRENILNAYQHAIAEQYRFFSFGDAMFVHK

SEQ ID NO: 73694 - protein, 348 aa, Weissella cibaria
  REGION 1..348: note = tr|A0A0D1LX08|A0A0D1LX08_9LACT S-adenosylmethionine:tRNA ribosyltransferase-isomerase; OS = Weissella cibaria OX=137591 GN=queA PE=3 SV=1
MTEEHYTLEDFDYDLPHELIAQTPLERRDGSRLLELNAVTGEVHDRHFYDILDYLNPGDALVMNNSRVLPARLYGERPGTGGHVEVLLLRQDHGDVWETLVKPAKKYPVGQEITFGDGQLTAVVTEELEHGGRMIEFKYDGIFLEILESLGEMPLPPYIKEKLDDKERYQTVYSKVNGSAAAPTAGLHWTPELLQKAADKGVKLVELTLHVGLGTFRPVEEENIEDHKMHSEFYQLSAEAAQTLNDVKANGGRIIATGTTSIRTLETIGSKFNGELREDSGWTDIFIKPGYKWTVVDAFITNFHLPKSTLVMLVAAFTGRENILNAYQHAIAEQYRFFSFGDAMFVHK

SEQ ID NO: 73695 - protein, 348 aa, Weissella confusa
  REGION 1..348: note = tr|A0A5F1S7C8|A0A5F1S7C8_WEICO S-adenosylmethionine:tRNA ribosyltransferase-isomerase; OS = Weissella confusa OX=1583 GN=queA PE=3 SV=1
MTEQHYTLEDFDYDLPHELIAQTPLKQRDCSRLLELNAETGEVHDRHFYDILDYLNPGDALVMNNSRVLPARLYGERPGTGGHVEVLLLRQDHGDVWETLVKPAKKYPVGQEIVFGDGALKAVVTEELEHGGRMIEFKYDGIFLEILESLGEMPLPPYIKEKLDDKERYQTVYSKVNGSAAAPTAGLHWTPELLQKAADKGVKLVELTLHVGLGTFRPVEEENIEDHKMHSEFYQLSAEAAQTLNDVKANGGRIVATGTTSIRTLETIGSKFNGELREDSGWTDIFIKPGYKWTVVDAFITNFHLPKSTLVMLVAAFTGRENILNAYQHAISEGYRFFSFGDAMYVHK

SEQ ID NO: 73696 - protein, 348 aa, Weissella confusa
  REGION 1..348: note = tr|A0A0R2F6V0|A0A0R2F6V0_WEICO S-adenosylmethionine:tRNA ribosyltransferase-isomerase; OS = Weissella confusa OX=1583 GN=queA PE=3 SV=1
MTEQHYTLEDFDYDLPHELIAQTPLKQRDGSRLLELNAETGEVHDRHFYDILDYLNPGDALVMNNSRVLPARLYGERPGTGGHVEVLLLRQDHGDVWETLVKPAKKYPVGQEIVFGDGALKAVVTEELEHGGRMIEFKYDGIFLEILESLGEMPLPPYIKEKLDDKERYQTVYSKVNGSAAAPTAGLHWTPELLQKAADKGVKLVELTLHVGLGTFRPVEEENIEDHKMHSEFYQLSAEAAQTLNDVKANGGRIVATGTTSIRTLETIGSKFNGELREDSGWTDIFIKPGYKWTVVDAFITNFHLPKSTLVMLVAAFTGRENILNAYQHAISEGYRFFSFGDAMYVHK

SEQ ID NO: 73697 - protein, 349 aa, Weissella halotolerans
  REGION 1..349: note = tr|A0A0R2FVJ2|A0A0R2FVJ2_9LACT S-adenosylmethionine:tRNA ribosyltransferase-isomerase; OS = Weissella halotolerans DSM 20190 OX=1123500 GN=queA; PE = 3 SV=1
MTEPEHYTLEDFDYNLPEELIAQTPLAKRDTSRLLVLNAETGEMQDKHFYDILDYLQPGDALVMNNSRVLPARLYGTKADTGGHVEVLLLRQDHGDVWETLVKPGKKLHKGQEIVFGDGQLKAVIVDELEHGGRMIEFKYDGIFLEILEQLGEMPLPPYIKEKLADQERYQTVYSKVNGSAAAPTAGLHWTPELLEKVAAKGVKIVELTLHVGLGTFRPVEESDIDKHKMHSEFYQLSAQAARTLNDVREQGGRIIATGTTSIRTLETIGTKFNGHLQADSGWTDIFIKPGYQWQVVDAFITNFHLPKSTLVMLVAAFTGRERILNAYQHAIAERYRFFSFGDAMFVHK

SEQ ID NO: 73698 - protein, 348 aa, Weissella hellenica
  REGION 1..348: note = tr|A0A5B8TQX7|A0A5B8TQX7_WEIHE S-adenosylmethionine:tRNA ribosyltransferase-isomerase; OS = Weissella hellenica OX=46256 GN=queA PE=3 SV=1
MAENFTSLSDFDYELPQELIAQTPLKKRDGSRLLEMNADTGELHDRHFYDIIDYLNPGDALVMNNSRVLPARLYGERPETGGHVEVLLLRQDQDDVWETLVKPAKKYLVGQKITFGDGRLTAEVIAELDHGGRMIKFHYDGIFLEILEELGEMPLPPYIKEKLEDQERYQTVYSKVNGSAAAPTAGLHWTPELLQKVADKGIKLVELTLHVGLGTFRPVEEDNIDDHKMHSEFYQLSQEAAQTLNEVKANGGRIVATGTTSIRTLETIGAKFDGELKADSGWTEIFIKPGFQWRVVDAFITNFHLPKSTLVMLVAAFTGRDNILNAYEHAVKEQYRFFSFGDAMFIHH

SEQ ID NO: 73699 - protein, 348 aa, Weissella hellenica
  REGION 1..348: note = tr|A0A4Y4G541|A0A4Y4G541_WEIHE S-adenosylmethionine:tRNA ribosyltransferase-isomerase; OS = Weissella hellenica OX=46256 GN=queA PE=3 SV=1
MAENFTSLSDFDYELPQELIAQTPLKRRDGSRLLEMNADTGVLHDRHFYDIIDYLNPGDALVMNNSRVLPARLYGERPETGGHVEVLLLRQDQDDVWETLVKPAKKYVVGQKITFGDGRLTAEVISELEHGGRMIKFHYEGIFLEILEELGEMPLPPYIKEKLEDQERYQTVYSKVNGSAAAPTAGLHWTPELLQKVADKGIKLVELTLHVGLGTFRPVEEDNIDDHKMHSEFYQLSQEAAQTLNQVKANGGRIVATGTTSIRTLETIGAKFDGELKADSGWTEIFIKPGFQWRVVDAFITNFHLPKSTLVMLVAAFTGRDNILNAYEHAVKEQYRFFSFGDAMFIHH

SEQ ID NO: 73700 - protein, 348 aa, unidentified
  source 1..348: note = Weissella jogaejeotgali
  REGION 1..348: note = tr|A0A1L6RC57|A0A1L6RC57_9LACT S-adenosylmethionine:tRNA ribosyltransferase-isomerase; OS = Weissella jogaejeotgali OX=1631871 GN=queA PE=3 SV=1
MTETYTSLNDFDYDLPHELIAQTPLEKRDGSRLLELNADTGELHDRHFYDIIDYLNPGDALVMNNSRVLPARLYGVRPETGGHVEVLLLRQDQDDVWETLVKPARKYPVGQKIVFGDGRLTAEVTEELEHGGRMIKFHYDGIFLEILEELGEMPLPPYIKEKLEDQERYQTVYSKVNGSAAAPTAGLHWTPELLQKVADKGIKLIELTLHVGLGTFRPVEEDNIDDHKMHSEFYQLSEEAAQTLNEVRANGGRIVATGTTSIRTLETIGAKFDGTLHADSGWTDIFIKPGFKWQVVDAFITNFHLPKSTLVMLVAAFTGRDNILNAYKHAVTEKYRFFSFGDAMFIHH

SEQ ID NO: 73701 - protein, 348 aa, Weissella kandleri
  REGION 1..348: note = tr|A0A0R2JKY5|A0A0R2JKY5_9LACT S-adenosylmethionine:tRNA ribosyltransferase-isomerase; OS = Weissella kandleri OX=1616 GN=queA PE=3 SV=1
MSLPEYTLDDFDYDLPQELIAQTPLKQRDSSRLLTLNADTGAMEDRHFYDILDYLNPGDAIVMNNSRVLPARLHGIRPDTGGNVEVLMLRQDHGDVWETLVKPARKYPVGAQISFGNGELTATVVEELEHGGRMVEFHYDGIFLEVLESLGEMPLPPYIKEKLDDQERYQTVYSKVNGSAAAPTAGLHWTPELLAKVEAKGVKLVELTLHVGLGTFRPVETNNLNEHKMHSEFYQLSQAAADTLNEVHANGGRIIATGTTSIRTLETIGSKFNGVLQADSGWTDIFIKPGYQWAVVDAFITNFHLPKSTLVMLVAAFTGRENILNAYQHAIEERYRFFSFGDAMFIYR

SEQ ID NO: 73702 - protein, 348 aa, Weissella koreensis
  REGION 1..348: note = tr|F8HYT3|F8HYT3_WEIKK S-adenosylmethionine:tRNA ribosyltransferase-isomerase OS=Weissella koreensis (strain KACC 15510) OX=1045854 GN=queA PE=3 SV=1
MNLSNYTLDDFDYDLPVELIAQTPLEKRDTSRLLALNADTGMLEDRHFYDILEYLKPGDAIVMNNSRVLPARLHGIRPETGGHVEVLMLRQDHGDVWETLVNPARKYPIGAEISFGNGELTATVTEELEHGGRMVEFHYNGIFLEILESLGEMPLPPYIKEKLEDQERYQTVYSKVNGSAAAPTAGLHWTPELLQKVADKGVKLVELTLHVGLGTFRPVETNNLEDHKMHSEFYQLNQSAADTLNDVRANGGRIIATGTTSIRTLETIGSKFNGELKADSGWTDIFIKPGYQWTTVDAFITNFHLPKSTLVMLVAAFTGRENILNAYQHAIEEQYRFFSFGDAMFIHH

SEQ ID NO: 73703 - protein, 348 aa, Weissella koreensis
  REGION 1..348: note = tr|J0MIJ5|J0MIJ5_9LACT S-adenosylmethionine:tRNA ribosyltransferase-isomerase OS=Weissella koreensis KCTC 3621 OX=1123721 GN=queA PE=3 SV=1
MNLSNYTLDDFDYDLPVELIAQTPLEKRDTSRLLALNADTGMLEDRHFYDILEYLKPGDAIVMNNSRVLPARLHGIRPETGGHVEVLMLRQDHGDVWETLVNPARKYPVGAEISFGNGELTATVTEELEHGGRMVEFHYNGIFLEILESLGEMPLPPYIKEKLEDQERYQTVYSKVNGSAAAPTAGLHWTPELLQKVADKGVKLVELTLHVGLGTFRPVETNNLEDHKMHSEFYQLSQAAADTLNDVRANGSRIIATGTTSIRTLETIGSKFNGELKADSGWTDIFIKPGYQWTTVDAFITNFHLPKSTLVMLVAAFTGRENILNAYQHAIEEQYRFFSFGDAMFIHH

SEQ ID NO: 73704 - protein, 350 aa, Weissella minor
  REGION 1..350: note = tr|A0A0R2JG99|A0A0R2JG99_9LACT S-adenosylmethionine:tRNA ribosyltransferase-isomerase; OS = Weissella minor OX=1620 GN=queA PE=3 SV=1
MTDDVKNYTLDDFDYDLPEELIAQTPLKERDTSRLLVLDANTGATDDQHFYDIINYLNPGDALVMNNSRVLPARLYGVRPDTGGHVEVLLLRQDHDDVWETLIKPARKYRVGQTISFGDGLLEGVVTEELEHGGRMVEFHYDGIFLEILEQLGEMPLPPYIKEKLDDKERYQTVYSKVNGSAAAPTAGLHWTPELLEKVAAKGVKIVELTLHVGLGTFRPVEEENLDDHKMHSEFYQLSQEAADTLNEVHANGGRIIATGTTSIRTLETIGSKFDGQLEADSGWTDIFIRPGYKWTVVDAFITNFHLPKSTLVMLVASFTGRENILNAYQHAIEEHYRFFSFGDAMYVHK

SEQ ID NO: 73705 - protein, 348 aa, unidentified
  source 1..348: note = Weissella oryzae
  REGION 1..348: note = tr|A0A069CSX2|A0A069CSX2_WEIOS S-adenosylmethionine:tRNA ribosyltransferase-isomerase; OS = Weissella oryzae (strain DSM 25784 / JCM 18191 / SG25); OX = 1329250 GN=queA PE =3 SV=1
MEPTHYTLEDFDYDLPHELIAQTPLKQRDSSRLLALNAVTGAYEDKHFYDIIDYLNPGDAVVMNNSRVLPARLYGERPETGGGVEVLLLRQDHGDVWETLVKPARKYPVGQEIVFGDGQLKAVVTEELEHGGRMIEFKYDGIFLEILEQLGEMPLPPYIKEKLEDQERYQTVYSKVNGSAAAPTAGLHWTPELLQKVADKGIKLVELTLHVGLGTFRPVEEDNIEDHKMHSEFYQLSDEAAATLNEVRANGGRIIATGTTSIRTLETIGSKFAGELKADSGWTDIFIKPGYQWTVVDAFITNFHLPKSTLVMLVAAFTGRENILNAYQHAIDERYRFFSFGDAMFVHK

SEQ ID NO: 73706 - protein, 348 aa, Weissella paramesenteroides
  REGION 1..348: note = tr|C5RA07|C5RA07_WEIPA S-adenosylmethionine:tRNA ribosyltransferase-isomerase OS=Weissella paramesenteroides ATCC 33313 OX=585506 GN=queA PE=3 SV=1
MTENYTSLNDFDYELPHELIAQTPLERRDGSRLLELNADTGELHDRHFYDIIDYLNPGDALVMNNSRVLPARLYGVRPETGGHVEVLLLRQEKDDVWETLVKPARKYPVGQKIVFGDGQLTAEVIEELEHGGRMIKFHYDGIFLEILEELGEMPLPPYIKEKLADQERYQTVYSKVNGSAAAPTAGLHWTPELLQKVADKGIKLVELTLHVGLGTFRPVEEDNIDDHKMHSEFYQLSEEAAQTLNEVRANGGRIVATGTTSIRTLETIGAKFDGELHADSGWTDIFIKPGFEWRVVDAFITNFHLPKSTLVMLVAAFTGRDNILNAYKHAVAEKYRFFSFGDAMFIHH

SEQ ID NO: 73707 - protein, 348 aa, Weissella paramesenteroides; identical to SEQ ID NO: 73706
  REGION 1..348: note = tr|A0A4Q7IUR8|A0A4Q7IUR8_WEIPA S-adenosylmethionine:tRNA ribosyltransferase-isomerase; OS = Weissella paramesenteroides OX=1249 GN=queA PE=3 SV=1

SEQ ID NO: 73708 - protein, 348 aa, Weissella soli
  REGION 1..348: note = tr|A0A288Q8J3|A0A288Q8J3_9LACT S-adenosylmethionine:tRNA ribosyltransferase-isomerase; OS = Weissella soli OX=155866 GN=queA PE=3 SV=1
MTEQNYQLSDFDYDLPQELIAQTPLKQRDASRLLVLNALTGEYEDKHFYDILDYVQPGDAIVMNNSRVLPARLHGTRPETGGHVEVLMLRQDHGDVWEVLLKPARKYHIGQEISFGNGELTATVVGELEHGGRYVEFHYEGIFLEILESLGEMPLPPYIKEKLEDQERYQTVYSKVNGSAAAPTAGLHWTPELLKAVEDKGVKLVELTLHVGLGTFRPVEEENIEDHKMHSEFYQLTQAAADTLNEVRQNGGRIIATGTTSIRTLETIGSKFDGELQEDSGWTDIFIKPGYQWTIVDAFITNFHLPKSTLVMLVAAFTGRERILNAYQHAVAEKYRFFSFGDAMFIHK

SEQ ID NO: 73709 - protein, 344 aa, Weissella sp.
  REGION 1..344: note = tr|A0A4P6YVB5|A0A4P6YVB5_9LACT S-adenosylmethionine:tRNA ribosyltransferase-isomerase; OS = Weissella sp. 26KH-42 OX=2506420 GN=queA PE=3 SV=1
MGYQLEDFDYDLPHELIAQTPLKQRDSSRLLVLDHETGAYEDKHFYDILAELNPGDAVVMNNSRVLPARLHGEKPETHGHVEVLLLNNTEGDTWETLIKPAKKFPVGQEIKFGNGELTAIVTEELEHGGRMVEFHYDGIFLEILEALGEMPLPPYIKEKLADQERYQTVYSKVNGSAAAPTAGLHWTPELLAKVEAKGVKLVELTLHVGLGTFRPVEEENIEDHKMHSEFYQLSQEAADTLNEVHANGGRVIATGTTSIRTLETIGTKFNGKLQADSGWTEIFIKPGYQWTTVDAFITNFHLPKSTLVMLVAAFTGRENILNAYQHAIDEKYRFFSFGDAMFVK

SEQ ID NO: 73710 - protein, 348 aa, Weissella sp.
  REGION 1..348: note = tr|A0A139QIZ8|A0A139QIZ8_9LACT S-adenosylmethionine:tRNA ribosyltransferase-isomerase; OS = Weissella sp. DD23 OX=1777865 GN=queA PE=3 SV=1
MTEEHYTLEDFDYDLPHELIAQTPLERRDGSRLLELNAVTGEVHDRHFYDILDYLNPGDALVMNNSRVLPARLYGERPGTGGHVEVLLLRQDHGEVWETLVKPAKKYPVGQEIAFGDGQLTAVVTEELEHGGRMIEFKYDGIFLEILESLGEMPLPPYIKEKLDDKERYQTVYSKVNGSAAAPTAGLHWTPELLQKAADKGVKLVELTLHVGLGTFRPVEEENIEDHKMHSEFYQLSAEAAQTLNDVKANGGRIIATGTTSIRTLETIGSKFNGELREDSGWTDIFIKPGYKWTVVDAFITNFHLPKSTLVMLVAAFTGRENILNAYRHAIAEQYRFFSFGDAMFVHK

SEQ ID NO: 73711 - protein, 348 aa, Weissella thailandensis
  REGION 1..348: note = tr|A0A512PUG8|A0A512PUG8_9LACT S-adenosylmethionine:tRNA ribosyltransferase-isomerase; OS = Weissella thailandensis OX=89061 GN=queA PE=3 SV=1
MTETYTSLNDFDYDLPHELIAQTPLEKRDGSRLLELNADTGELHDRHFYDIIDYLNPGDALVMNNSRVLPARLYGVRPETGGHVEVLLLRQDQDDVWETLVKPARKYPVGQKIVFGDGRLTAEVTEELEHGGRMIKFHYDGIFLEILEELGEMPLPPYIKEKLEDQERYQTVYSKVNGSAAAPTAGLHWTPELLQKVVGKGIKLIELTLHVGLGTFRPVEEDNIDDHKMHSEFYQLSEEAAQTLNEVRANGGRIVATGTTSIRTLETIGAKFDGTLHADSGWTDIFIKPGFKWQVVDAFITNFHLPKSTLVMLVAAFTGRDNILNAYKHAVTEKYRFFSFGDAMFIHH

SEQ ID NO: 73712 - protein, 348 aa, Weissella thailandensis; identical to SEQ ID NO: 73700
  REGION 1..348: note = tr|G0UHJ3|G0UHJ3_9LACT S-adenosylmethionine:tRNA ribosyltransferase-isomerase OS=Weissella thailandensis fsh4-2 OX=1056112 GN=queA PE=3 SV=1

SEQ ID NO: 73713 - protein, 350 aa, Weissella viridescens
  REGION 1..350: note = tr|A0A0R2H8Q2|A0A0R2H8Q2_WEIVI S-adenosylmethionine:tRNA ribosyltransferase-isomerase; OS = Weissella viridescens OX=1629 GN=queA PE=3 SV=1
MTEEIPNYTLDDFDYDLPEELIAQTPLKDRDTSRLLVMNAETGDMQDKHFYDIIEYLNPGDALVMNNSRVLPARLYGVRPDTGGHVEVLLLRQDHGDVWETLIKPAKKYRVGQKIDFGDGKLEGVVTEELEHGGRMVEFHYDGIFLEILEELGEMPLPPYIKEKLDDQERYQTVYSKVNGSAAAPTAGLHWTPELLKKVEEKGVKIVELTLHVGLGTFRPVEEENLDDHKMHSEFYQLSQEAADTLNEVHANGGRIVATGTTSIRTLETIGTKFDGKLEADSSWTDIFIRPGYKWTVVDAFITNFHLPKSTLVMLVASFTGREHILNAYQHAIDERYRFFSFGDAMYIYK

SEQ ID NO: 73714 - protein, 53 aa, Weissella viridescens
  REGION 1..53: note = tr|A0A380P8C7|A0A380P8C7_WEIVI S-adenosylmethionine:tRNA ribosyltransferase-isomerase; OS = Weissella viridescens OX=1629 GN=queA_3 PE=3 SV=1
MDAFITNFHLPKSTLVMLVASFTGREHILNAYQHAIDERYRFFSFGDAMYIYK

SEQ ID NO: 73715 - protein, 344 aa, Wenxinia marina
  REGION 1..344: note = tr|A0A0D0QCD0|A0A0D0QCD0_9RHOB S-adenosylmethionine:tRNA ribosyltransferase-isomerase; OS = Wenxinia marina DSM 24838 OX=1123501 GN=queA PE=3 SV=1
MRLSDFDFDLPEELIATRPARPRSSARLLHAEGGRIADRRVADLPQILRPGDLLVLNDTKVIPARLTGIRRRGEAEARIEVTLAAPRGDGRWSALVKPLRKWAEGETVVFSPRLSAVMEGREGDMAVIRLAAEGDLDAALAEAGAMPLPPYIAAKRAADEADVADYQTVWAARAGAVAAPTASLHFDQELLAALDARGVERTHVTLHVGAGTFLPVKVDDVSEHRMHSEWGEVGAEAAAAMARAKQEGRRVIPVGTTALRLIESSGGAEWRGDTDIFITPGYAFRVADALMTNFHLPKSTLMMLVSALMGPERIRQIYAHAIAARYRFFSYGDGSLLVPDGSSR

SEQ ID NO: 73716 - protein, 357 aa, unidentified
  source 1..357: note = Wenxinia saemankumensis
  REGION 1..357: note = tr|A0A1M6GQR8|A0A1M6GQR8_9RHOB S-adenosylmethionine:tRNA ribosyltransferase-isomerase; OS = Wenxinia saemankumensis OX=1447782 GN=queA PE=3 SV=1
MKLSDFDFDLPEDLIATRPARPRSSARMLVADGAAILDRHAYDLPAFLRPGDRLVLNDTRVIPARLSGTRTRGEAVSRIEATLLEPRADGTWAALLKPLRKLREGETVRFSERLSAVLEARDEGQARLRFSLAGEDFDAALAEAGAMPLPPYIAARRPADEADKEDYQTIWAERSGAVAAPTASLHFDAPLMAALAARGVETTRVTLHVGAGTFLPVKVDDISQHRMHAEWGEVTPRAAEEIAATKASGGRVIPVGTTALRLIESAGADGAIAPFEGTTDIFITPGFRFRVADGLVTNFHLPKSTLMMLVSALMGAERIRAVYDHAIAARYRFFSYGDASLLLPGGIGAPLDGKAAP

SEQ ID NO: 73717 - protein, 349 aa, unidentified
  source 1..349: note = Wenyingzhuangia fucanilytica
  REGION 1..349: note = tr|A0A1B1Y8B0|A0A1B1Y8B0_9FLAO S-adenosylmethionine:tRNA ribosyltransferase-isomerase; OS = Wenyingzhuangia fucanilytica OX=1790137 GN=queA PE=3; SV = 1
MKLSAFHFDLPDELIAKHPAEYRDESRLMVLNRKEQTIEHKQFKDVIDYFDDGDLMILNNTKVFPARMYGNKEKTGARIEVFLLRELNAENRLWDVLVDPARKIRIGNKLFFGEDDSLVAEVIDNTTSRGRTLRFLYDGSYEEFREKLEELGETPIPKHLERDVEEEDAERFQTIYAKEEGAVAAPTAGLHFSKHLMKRLEIKGVDFSELTLHIGLGTFNPVEVEDLSKHKMDSEQMMVSEETCDAVNKAIDSKRRVCAVGTTVMRAIESTVSSNGRLNPYDGWTNKFIFPPYDFSIANAMITNFHPSKSTLMMQVAAFAGYDFLMKAYKEAIKEGYKFSTYGDAMLII

SEQ ID NO: 73718 - protein, 349 aa, unidentified
  source 1..349: note = Wenyingzhuangia marina
  REGION 1..349: note = tr|A0A1M5TAP8|A0A1M5TAP8_9FLAO S-adenosylmethionine:tRNA ribosyltransferase-isomerase; OS = Wenyingzhuangia marina OX=1195760 GN=queA PE=3 SV=1
MKLSAFHFDLPDELIAKHPAEYRDESRLMVLNRKEQTIEHKQFKDVIDYFDDGDLMILNNTKVFPARMYGNKEKTGARIEVFLLRELNAENRLWDVLVDPARKIRIGNKLFFGEDDSLVAEVIDNTTSRGRTLRFLYDGSYEEFRQKLEDLGETPIPKHLERDVEEEDAERFQTIYAKEEGAVAAPTAGLHFSKHLMKRLEIKGVDFSEITLHIGLGTFNPVEVEDLSKHKMDSEQMMVSEATCEEVNNAIDNKRRVCAVGTTVMRAIESTVSSNGRLNPYDGWTNKFIFPPYDFSIANAMITNFHPSKSTLMMQVAAFAGYDFLMKAYKEAIKEGYKFSTYGDAMLII

SEQ ID NO: 73719 - protein, 353 aa, unidentified
  source 1..353: note = Wenzhouxiangella marina
  REGION 1..353: note = tr|A0A0K0XXY4|A0A0K0XXY4_9GAMM S-adenosylmethionine:tRNA ribosyltransferase-isomerase; OS = Wenzhouxiangella marina OX=1579979 GN=queA PE=3 SV=1
MLFVFDIGHGLKLRMDVADFHFDLPEHLIAQVPLADRSASRLLHLDRSLGTLADRRFADLPELLGPDDLLVFNNTRVIPARLFAQKQTGGRVEVMIERMLGSQSALAQLRANRKPQPGMHLEVGDEGLLRLGEREGEFWRVDIASGPDWAALLERHGHMPLPPYIQREDDAVDRERYQTVYGEEPGAVAAPTAGLHFDQPLLDALARRGVRRGWCTLHVGAGTFQPVRVERVEDHEMHAEWLRVDETLVEQVSETRERGGRVIAVGTTSARSLETAAANGELAPFAGDSRLFIYPGYQFRVVDALITNFHLPGSTLLMMISALAGRETILDAYAHAIEQEYRFFSYGDAMFID

SEQ ID NO: 73720 - protein, 339 aa, unidentified
  source 1..339: note = Wenzhouxiangella sediminis
  REGION 1..339: note = tr|A0A3E1KBR7|A0A3E1KBR7_9GAMM S-adenosylmethionine:tRNA ribosyltransferase-isomerase; OS = Wenzhouxiangella sediminis OX=1792836 GN=queA PE=3 SV=1
MKVSDFRFDLPERLIAQYPLRERSASRLLHLERESGRWHDRRFADLPDLLEPGDLLVFNNTRVIPARLWARKESGGRVEIMIERVVDEREAVVQLRVNRKPRKGARLVVDDHAELEVLGREDEFWRLGVVAGPGWSALLDAVGHMPLPPYIEREDEASDAERYQTVYARVPGAVAAPTAGLHFDEDIFARLDEKGVEQAECTLHVGAGTFQPVRVEEVSEHRMHAEWLSVSADLVAAVNAAKSRGGRVVAVGTTAVRSLETAASSGELAPFEGDSRLFIHPGYRFRAVDAMVTNFHLPGSTLLMLVSAFAGRENVLAAYRHAVEAEYRFFSYGDAMFIS

SEQ ID NO: 73721 - protein, 339 aa, unidentified
  source 1..339: note = Wenzhouxiangella sp.
  REGION 1..339: note = tr|A0A372BW35|A0A372BW35_9GAMM S-adenosylmethionine:tRNA ribosyltransferase-isomerase; OS = Wenzhouxiangella sp. 15181 OX=2301224 GN=queA PE=3 SV=1
MKVSDFQFDLPEQLIAQYPLPERSASRLLHLERESGRRHDRQFADLPGLLAPGDLLVFNNTRVIPARLWARKESGGRVEIMVERVVDDREAVVQLRANRKVSFGTRLFVDGEAELEVLGREESFWRLGIVDGPGWSALLEAAGHMPLPPYIERPDEAMDAERYQTVYARVPGAVAAPTAGLHFDERIFERLDDMGVARAECTLHVGAGTFQPVRVDEVTEHRMHAEWLSVSPELVAAVQAARSRGGRVVAVGTTAVRALETAAAEGELAPFAGDSRLFIYPGYEFRVVDAMITNFHLPGSTLLMLVSAFAGRENVLAAYRHAVEQEYRFFSYGDAMFIG

SEQ ID NO: 73722 - protein, 390 aa, unidentified
  source 1..390: note = Westiellopsis prolifica
  REGION 1..390: note = tr|A0A4Q9J9W5|A0A4Q9J9W5_9CYAN S-adenosylmethionine:tRNA ribosyltransferase-isomerase; OS = Westiellopsis prolifica IICB1 OX=1970206 GN=queA PE=3; SV = 1
MQEQLAKTNSHLISKQTSENSELDFSLAGYDYELPTELIAQNPAVPRDSSRLLVVNSQNVGTETAPQHYIFRDLPQILRPGDLLVMNNTRVLPARLYGHKLTGAEVEVLLLEERQHNRWLALVKPGKRFKRGSQIVFTAKVNTDGDHPTTPVPYHSLTATVIATDAATGGRLLQFELPEEVSLLQLLDAFGEIPLPPYITTTEAQSEQYQTVYAQNPGAVAAPTAGLHFTPELLQKLREQNINQAFVTLHVGVGTFRPVEVENVTTHTMHEEWIEVPQNTVEQIRATKAAGGRIIAVGTTVVRALEGAATKGELQPFCGKTNLFIYPGYQWRVVEGMITNFHLPRSSLLMLVSALIGRQRLLNLYQEAIASQYRFYSFGDAMLILPEATI

SEQ ID NO: 73723 - protein, 349 aa, unidentified
  source 1..349: note = Williamwhitmania taraxaci
  REGION 1..349: note = tr|A0A1G6P0K8|A0A1G6P0K8_9BACT S-adenosylmethionine:tRNA ribosyltransferase-isomerase; OS = Williamwhitmania taraxaci OX=1640674 GN=queA PE=3 SV=1
MKLSQFKYNLPIELIAKHPVEHRDESRLMVLNRATGKIEHRMFKEIIEYFDEGDVMVFNNTKVFPARLYGNKEKTGAEIEVFLLRELNREQRLWDVLVDPARKIRIGNKLYFGEDDLLVAEVIDNTTSRGRTLRFLFDGDYEEFKATLYKLGETPLPKFIRRNVVPEDRERYQTIYAKHEGAVAAPTAGLHFSRELLKRLEIKGVNNAEITLHVGLGNFRTVDVEDLTKHKMDSEQINISDEAVSLVNKAKESRKHVCAVGTTVLRTLETSVTTDGYLKPYDGWTNKFIFPPYEVLVANRMISNFHLSQSTLLMMVCAFGGFDRVMAAYGEAVKEKYRFGTYGDAMLIL

SEQ ID NO: 73724 - protein, 404 aa, unidentified
  source 1..404: note = Williamwhitmania taraxaci
  REGION 1..404: note = tr|A0A1G6HWL1|A0A1G6HWL1_9BACT S-adenosylmethionine:tRNA ribosyltransferase-isomerase; OS = Williamwhitmania taraxaci OX=1640674; GN = SAMN05216323_101357 PE=3 SV=1
MPVRLIPANIEDYNYDLPDCRIAKFPEQKRDHSNLLVFNKGVIGSDQFYNLPNYLSGKILIFNNTKVIKARLLFKRVTGATIEVFCLEPMQPADYQNMFSATGSVDWKCLVGNIKRWKEDELSLNVDIDGSQVRLTAQMIERLDEGVIIRFSWNDDTVCFGQVLEAAGAIPIPPYLNRSEQVIDSDRYQTVYSKWEGSVAAPTAGLHFTDKVIADIITKGNSIAELTLHVGAGTFKPVKAKSIDEHEMHSEHFSITVSTLELLLANMGNIVAVGTTSVRTIESLYWLGVKILTNENSPDLMHLSQWDAYTLPDSYTSTEALTAILNHLKSVGLSQLVGSTQILIAPGYTFKLINALITNFHQPKSTLLLLVSALIGTEWKDVYAYAMDHNFRFLSYGDSSLLIP

SEQ ID NO: 73725 - protein, 349 aa, Winogradskyella arenosi
  REGION 1..349: note = tr|A0A368ZNF1|A0A368ZNF1_9FLAO S-adenosylmethionine:tRNA ribosyltransferase-isomerase; OS = Winogradskyella arenosi OX=533325 GN=queA PE=3 SV=1
MKLSHFNFELPDELLAEHPAEHRDEARLMVLNRAEQTIEHKQFKDIIDYFDEGDVMIMNDTKVFPARLFGNKEKTGARIEVFLLRELNQEQRLWDVLVDPARKIRIGNKLYFGDDETLVAEVIDNTTSRGRTLRFLYDGSYADFRAKLTELGETPLPKYINREVEPEDEERYQTIYAKNEGAVAAPTAGMHFSKHLLKRLEIKGIKTAEVTLHVGLGTFNPVEVEDLSKHKMDSEEIIINKQAAEIVNDAIENKKRVCAVGTTSMRTIESSVSSNGRLNEFEGWTNKFIFPPYDFSIANCMITNFHTPKSTLLMMTSAFAGHDFIKRAYEEAVKEKYKFYSYGDAMLII

SEQ ID NO: 73726 - protein, 349 aa, unidentified
  source 1..349: note = Winogradskyella aurantia
  REGION 1..349: note = tr|A0A265UPA0|A0A265UPA0_9FLAO S-adenosylmethionine:tRNA ribosyltransferase-isomerase; OS = Winogradskyella aurantia OX=1915063 GN=queA PE=3 SV=1
MKLSHFNFNLPPELLAEHPAEHRDESRLMVLNREKQTIEHKLFKDVIDYFDEGDVMILNNTKVFPARLFGNKEKTGARIEVFLLRELNQDQRLWDVLVDPARKIRIGNKLYFGEDETLVAEVIDNTTSRGRTLRFLYDGSYNDFRRKLTELGETPLPKYIKRDVEPEDEDRYQTIFAKNEGAVAAPTAGLHFSKHLLKRLEIKGVEMAEVTLHVGLGTFNPVEVEDLSKHKMDSEEIVIDERAAAIVNKGIENKKRVCAVGTTSMRTIESSVSSNGRLNPYDGWTNKFIFPPYEFSIANSMITNFHTPKSTLLMMISAFAGHEFVKHAYEVAVKEKYRFYSYGDAMLII

SEQ ID NO: 73727 - protein, 349 aa, Winogradskyella epiphytica
  REGION 1..349: note = tr|A0A2V4WV76|A0A2V4WV76_9FLAO S-adenosylmethionine:tRNA ribosyltransferase-isomerase; OS = Winogradskyella epiphytica OX=262005 GN=queA PE=3 SV=1
MKLSHFNFDLPDELLAEHPAEHRDEARLMVLNREKQTIEHKLFKDIIDYFDEGDVMIMNDTKVFPARLFGNKEKTGARIEVFLLRELNQDQRLWDVLVDPARKIRIGNKLYFGEDETLVAEVIDNTTSRGRTLRFLYDGSYSDFRTKLTELGETPLPKYIKREVEPEDEERYQTIYAKHEGAVAAPTAGLHFSKHLLKRLEIKGVETADVTLHVGLGTFNPVEVEDLSKHKMDSEEIVISKQAADIVNRGIENKKRVCAVGTTSMRTVESSVSSNGRLNEFEGWTNKFIFPPYEFSIANCMITNFHTPKSTLLMMTSAFGGYDFVKRAYEEAVKEKYKFYSYGDAMLII

SEQ ID NO: 73728 - protein, 349 aa, Winogradskyella eximia
  REGION 1..349: note = tr|A0A3D9H2X2|A0A3D9H2X2_9FLAO S-adenosylmethionine:tRNA ribosyltransferase-isomerase; OS = Winogradskyella eximia OX=262006 GN=queA PE=3 SV=1
MKLSHFSFDLPDELLAEHPAEHRDESRLMVLNRAKQTIEHKQFKDIIDYFDEGDVMIMNDTKVFPARLYGNKEKTGARIEVFLLRELNQEQRLWDVLVDPARKIRIGNKLYFGDDETLVAEVIDNTTSRGRTLRFLYDGSYADFRTKLTELGETPLPKYINREVEPEDEERYQTIYAKNEGAVAAPTAGLHFSKHLLKRLEIKGVKTAEVTLHVGLGTFNPVEVEDLSKHKMDSEEIIITKAAADIVNEGIEKKKRVCAVGTTSMRTIESSVSSNGRLNEFDGWTNKFIFPPYEFSIANCMITNFHTPKSTLLMMTSAFAGHDFMKKAYEEAVKEKYKFYSYGDAMLII

SEQ ID NO: 73729 - protein, 349 aa, unidentified
  source 1..349: note = Winogradskyella jejuensis
  REGION 1..349: note = tr|A0A1M5PHK0|A0A1M5PHK0_9FLAO S-adenosylmethionine:tRNA ribosyltransferase-isomerase; OS = Winogradskyella jejuensis OX=1089305 GN=queA PE=3 SV=1
MKLSHFNFDLPEELLAEHPAEHRDESRLMVLDRANQTIEHKMFKDVIDYFDEGDVMILNNTKVFPARLYGNKEKTGARIEVFLLRELNQDQRLWDVLVDPARKIRIGNKLYFGDDETLVAEVIDNTTSRGRTLRFLYDGSYNDFRNKLTELGETPLPKYIKREVEPEDEERYQTIYAAKEGAVAAPTAGLHFSKHLLKRLEIKGVERAEVTLHVGLGTFNPVEVEDLSKHKMDSEEIEIKQAAADIINNGIANKKRICAVGTTSMRTIESSVSSSGTLNPYTGWTNKFIFPPYDFSIANCMITNFHTPKSTLLMMISAFAGHDFMKEAYAEAIKEKYKFYSYGDAMLII

SEQ ID NO: 73730 - protein, 349 aa, Winogradskyella pacifica
  REGION 1..349: note = tr|A0A3D9LKX4|A0A3D9LKX4_9FLAO S-adenosylmethionine:tRNA ribosyltransferase-isomerase; OS = Winogradskyella pacifica OX=664642 GN=queA PE=3 SV=1
MKLSHFSFDLPDELLAEHPAEHRDESRLMVLDRAKQTIEHKQFKDIIDYFDEGDVMIMNDTKVFPARLFGNKEKTGARIEVFLLRELNQDQRLWDVLVDPARKIRIGNKLYFGDDETLVAEVIDNTTSRGRTLRFLYDGSYTDFRTKLTQLGETPLPKYINREVEPEDEERYQTIYAKNEGAVAAPTAGLHFSKHLLKRLEIKGVKTAEVTLHVGLGTFNPVEVEDLSKHKMDSEEIVIKKSAADIVNEGIEKKKRVCAVGTTSMRTIESSVSSNGRLNEFEGWTNKFIFPPYEFSIANCMITNFHTPKSTLLMMTSAFAGHDFMKKAYEEAVKEKYKFYSYGDAMLII

SEQ ID NO: 73731 - protein, 349 aa, unidentified
  source 1..349: note = Winogradskyella psychrotolerans
  REGION 1..349: note = tr|S7VTK7|S7VTK7_9FLAO S-adenosylmethionine:tRNA ribosyltransferase-isomerase OS=Winogradskyella psychrotolerans RS-3 OX=641526 GN=queA PE=3 SV=1
MKLSHFHFDLPDELLAERPAEHRDESRLMVLDRAKQTIEHKQFKDIIDYFDEGDVMIMNDTKVFPARLFGNKEKTGARIEVFLLRELNQDQRLWDVLVDPARKIRIGNKLYFGDDETLVAEVIDNTTSRGRTLRFLYDGSYTDFRTKLTQLGETPLPKYINREVEPEDEERYQTIYAKNEGAVAAPTAGLHFSKHLLKRLEIKGVKTAEVTLHVGLGTFNPVEVEDLSKHKMDSEEIVIKKSAADIVNEGIEKKKRVCAVGTTSMRTIESSVSSNGRLNEFEGWTNKFIFPPYEFSIANCMITNFHTPKSTLLMMTSAFAGHDFMKKAYEEAVKEKYKFYSYGDAMLII

SEQ ID NO: 73732 - protein, 349 aa, Winogradskyella sp.
  REGION 1..349: note = tr|A0A1Y0MG77|A0A1Y0MG77_9FLAO S-adenosylmethionine:tRNA ribosyltransferase-isomerase; OS = Winogradskyella sp. PC-19 OX=754417 GN=queA PE=3 SV=1
MKLSHFSFELPEELLAEHPAEHRDESRLMVLDRANQTIEHKMFKDIIDYFDEGDVMILNNTKVFPARLYGNKEKTGARIEVFLLRELNQDQRLWDVLVDPARKIRIGNKLYFGEDETLVAEVIDNTTSRGRTLRFLYDGSYSDFRTKLTELGQTPLPKYINRDVEPEDEERYQTIYATNEGAVAAPTAGLHFSKHLLKRLEIKGIERAEVTLHVGLGTFNPVEVEDLSKHKMDSEEIEIKQSAADIINTAQKNKKRICAVGTTSMRTIESSVSSSGTLNPYEGWTNKFIFPPYDFSIANCMITNFHTPKSTLLMMVSAFAGHDFMKEAYAEAVKEKYKFYSYGDAMLII

SEQ ID NO: 73733 - protein, 349 aa, Winogradskyella sp.
  REGION 1..349: note = tr|A0A368MIV0|A0A368MIV0_9FLAO S-adenosylmethionine:tRNA ribosyltransferase-isomerase; OS = Winogradskyella sp. KYW1333 OX=2282123 GN=queA PE=3 SV=1
MKLSHFNFDLPEELLAEHPAEHRDESRLMVLNREKQTIEHKLFKDIIDYFDEGDVMILNNTKVFPARLFGNKEKTGARIEVFLLRELNQDQRLWDVLVDPARKIRIGNKLYFGEDESLVAEVIDNTTSRGRTLRFLYDGSYMDFRRKLNELGQTPLPKYIKRDVEPEDEERYQTIFAKNEGAVAAPTAGLHFSKHLLKRLEIKGVDMAEVTLHVGLGTFNPVEVEDLSKHKMDSEEISIDERSATIVNRGIENKKRVCAVGTTSMRTIESSVSSSGRLNPYEGWTNKFIFPPYDFSIANSMITNFHTPKSTLLMMVSAFAGHDFIKKAYDEAVKEKYRFYSYGDAMLII

SEQ ID NO: 73734 - protein, 349 aa, Winogradskyella thalassocola
  REGION 1..349: note = tr|A0A1G8K390|A0A1G8K390_9FLAO S-adenosylmethionine:tRNA ribosyltransferase-isomerase; OS = Winogradskyella thalassocola OX=262004 GN=queA PE=3 SV=1
MKLSHFHFDLPDELLAERPAEHRDESRLMVLDRAKQTIEHKQFKDIIDYFDEGDVMIMNDTKVFPARLFGNKEKTGARIEVFLLRELNQDQRLWDVLVDPARKIRIGNKLYFGDDETLVAEVIDNTTSRGRTLRFLYDGSYSDFRTKLTQLGETPLPKYINREVEPEDEERYQTIYAKNEGAVAAPTAGLHFSKHLLKRLEIKGIKTAEVTLHVGLGTFNPVEVEDLSKHKMDSEEIVIKQSAADIVNNAIENKKRVCAVGTTSMRTIESSVSSNGRLNEFEGWTNKFIFPPYDFSIANCMITNFHTPKSTLLMMTSAFAGHDFMKKAYEEAVKEKYRFYSYGDAMLII

SEQ ID NO: 73735 - protein, 349 aa, unidentified
  source 1..349: note = Winogradskyella wandonensis
  REGION 1..349: note = tr|A0A4R1KR07|A0A4R1KR07_9FLAO S-adenosylmethionine:tRNA ribosyltransferase-isomerase; OS = Winogradskyella wandonensis OX=1442586 GN=queA PE=3 SV=1
MKLSHFNFDLPEELLAEHPAEHRDESRLMVLDRANQTIEHKMFKDVIDYFDEGDVMILNNTKVFPARLYGNKEKTGARIEVFLLRELNQEQRLWDVLVDPARKIRIGNKLYFGDDETLVAEVIDNTTSRGRTLRFLYDGSYNDFRNKLNELGETPLPKYIKRDVEPEDEERYQTIYAAKEGAVAAPTAGLHFSKHLLKRLEIKGVERAEVTLHVGLGTFNPVEVEDLSKHKMDSEEIEIKQSAADIINRGIANKKRVCAVGTTSMRTIESSVSSSGTLNPYSGWTNKFIFPPYDFSIANSMITNFHTPKSTLLMMISAFAGHDFMKEAYAQAVKEKYRFYSYGDAMLII

SEQ ID NO: 73736 - protein, 343 aa, unidentified
  source 1..343: note = Woeseia oceani
  REGION 1..343: note = tr|A0A193LEC3|A0A193LEC3_9GAMM S-adenosylmethionine:tRNA ribosyltransferase-isomerase; OS = Woeseia oceani OX=1548547 GN=queA PE=3 SV=1
MQLADFNYDLPDALIARYPEAERRASRLLLVDPASNSLSDRRFAELPTLLHANDLLVFNDTRVIKARLVGSKASGGRVEILVERQLDETDVLAHVRASKSPKAGGRLLFADNGQAEVLDRDGALFHLRFDRPVAPYLDAFGEMPLPPYLERRAEASDTERYQTVYARQPGAVAAPTAGLHFDQAMLAETAAKGVQQTYVTLHVGAGTFQNLRAEQVAENRLHSERVELSEQVVRAVAETRERQGRVIAVGTTSVRALEFAARDGQLKPCSGETDLFIRPGYRWHVVDAMLTNFHLPQSSLLMLVAAFAGTRRVLGAYQHAIEQRYRFFSYGDAMLLTGRGADQ

SEQ ID NO: 73737 - protein, 338 aa, unidentified
  source 1..338: note = Woeseia sp.
  REGION 1..338: note = tr|A0A2E6ECR6|A0A2E6ECR6_9GAMM S-adenosylmethionine:tRNA ribosyltransferase-isomerase; OS = Woeseia sp. OX=1980636 GN=queA PE=3 SV=1
MFLSDFDYELPDKLIARYPAPKRSGSRLLVVGPTLDDRVFSDLPQLLNNDDLLVCNNTRVVRARLVGKKETGGSVEILVERLLENNEVSAQVRASKSPTAGSIIVLPGDCAVTVLSRLDDMFRLRFSAPVTPYLEQHGKIPLPPYLGRGEVPADSERYQTVYARAAGAVAAPTAGLHFDQRLLDEIKRCGVRQAFITLHVGAGTFQPLRHDFVHDNSLHSERCFIEHKVCKAVRTARQSGNRVIAVGTTSVRALEAASINGGLSPYAGETDLFITPGYQFQSVDAILTNFHLPKSSLLMLVAAFGGHRRIMAAYEHAVSKGYRFFSYGDAMLLLPEKV

SEQ ID NO: 73738 - protein, 338 aa, unidentified
  source 1..338: note = Woeseia sp.
  REGION 1..338: note = tr|A0A2E6ZJF1|A0A2E6ZJF1_9GAMM S-adenosylmethionine:tRNA ribosyltransferase-isomerase; OS = Woeseia sp. OX=1980636 GN=queA PE=3 SV=1
MLISDFNYNLPNELIARHPTSDRRDSRFLVVEDNISDRRFVDLPNLIRPNDLFVFNDTRVIKARLSARKDTGGKVEILIERITNSSSALVHLKSNKSPKLGINLILEDDVKAKILSRKKDLFELQFTTDIASFIEVHGKVPLPPYIDRSADISDDDRYQTVYAGDPGAIAAPTAGLHFDNKMLEEIKGAGANLSWLTLHVGAGTFQSLREEQIRDNKLHSERVEVSEECCKAVNKAKSSGGRIIAVGTTSVRALECASKNGMMKSFSGETDMFIYPGYNFQTVDAMITNFHLPKSSLLMLVAAFAGKNRILDAYKHAVSEKYRFFSYGDAMFLTPENT

SEQ ID NO: 73739 - protein, 342 aa, unidentified
  source 1..342: note = Woeseiaceae bacterium
  REGION 1..342: note = tr|A0A2E5CIS3|A0A2E5CIS3_9GAMM S-adenosylmethionine:tRNA ribosyltransferase-isomerase; OS = Woeseiaceae bacterium OX=2026806 GN=queA PE=3 SV=1
  VARIANT 236..237: note = Xaa can be any naturally occurring amino acid
  VARIANT 257: note = Xaa can be any naturally occurring amino acid
  VARIANT 263: note = Xaa can be any naturally occurring amino acid
  VARIANT 266: note = Xaa can be any naturally occurring amino acid
  VARIANT 274: note = Xaa can be any naturally occurring amino acid
  VARIANT 281: note = Xaa can be any naturally occurring amino acid
  VARIANT 295: note = Xaa can be any naturally occurring amino acid
  VARIANT 308: note = Xaa can be any naturally occurring amino acid
  VARIANT 322: note = Xaa can be any naturally occurring amino acid
  VARIANT 341..342: note = Xaa can be any naturally occurring amino acid
MYISDYDYDLPNELIAKYPLDNRSDSRLMILDCERKEIIDTSFRKFYEYTKSNDLLVFNDTKVINARINGKKDTGGRVEVLIERILTETQANVFIKASKSPKIGSSLFFPKNYIAEILNKSGGTYKVEFSVPINEVISNIGSIPIPPYLNRESKDIDNRRYQTIYAKKYGAVAAPTAGLHFDEEMLNRIRPSSISLAYITLHIGAGTFRPLKQENIDNNQLHSEYFEIEKKTIEAXXQAKNKNGRVIAIGTTSARAXEAHSTXKSXESWKGETXIFIRPGXRFQVVDALLTNFHXPKSSLLMLISALXNKEFIMNAYNYAVXKKYRFYSYGDAMLILPKGXX

SEQ ID NO: 73740 - protein, 347 aa, unidentified
  source 1..347: note = Woeseiaceae bacterium
  REGION 1..347: note = tr|A0A2D9M274|A0A2D9M274_9GAMM S-adenosylmethionine:tRNA ribosyltransferase-isomerase; OS = Woeseiaceae bacterium OX=2026806 GN=queA PE=3 SV=1
  VARIANT 9..10: note = Xaa can be any naturally occurring amino acid
  VARIANT 18: note = Xaa can be any naturally occurring amino acid
  VARIANT 28..29: note = Xaa can be any naturally occurring amino acid
  VARIANT 35: note = Xaa can be any naturally occurring amino acid
  VARIANT 42: note = Xaa can be any naturally occurring amino acid
  VARIANT 49: note = Xaa can be any naturally occurring amino acid
  VARIANT 60: note = Xaa can be any naturally occurring amino acid
  VARIANT 100: note = Xaa can be any naturally occurring amino acid
  VARIANT 115: note = Xaa can be any naturally occurring amino acid
  VARIANT 131: note = Xaa can be any naturally occurring amino acid
  VARIANT 144: note = Xaa can be any naturally occurring amino acid
  VARIANT 191..193: note = Xaa can be any naturally occurring amino acid
  VARIANT 195: note = Xaa can be any naturally occurring amino acid
  VARIANT 199: note = Xaa can be any naturally occurring amino acid
  VARIANT 201: note = Xaa can be any naturally occurring amino acid
  VARIANT 206: note = Xaa can be any naturally occurring amino acid
  VARIANT 228: note = Xaa can be any naturally occurring amino acid
  VARIANT 230: note = Xaa can be any naturally occurring amino acid
  VARIANT 233: note = Xaa can be any naturally occurring amino acid
  VARIANT 252: note = Xaa can be any naturally occurring amino acid
  VARIANT 288: note = Xaa can be any naturally occurring amino acid
  VARIANT 294: note = Xaa can be any naturally occurring amino acid
  VARIANT 305: note = Xaa can be any naturally occurring amino acid
  VARIANT 311: note = Xaa can be any naturally occurring amino acid
  VARIANT 315: note = Xaa can be any naturally occurring amino acid
MKVDDFEFXXPHALIAQXPVQTRDQARXXVLDRAXGISTHTXVSLLADXFQPGDVLALNXTKVFPARLYGHRIPSGGSVKCLLMREVNPEHWDALVHPGXKLGVGEKMLFEGNGXQLFGEVVSRSAFGRRXVRLWSDQGDPWEXINVIGHIPLPPYIKRPDDQRDRDRYQTVYARTRGSVAAPTAGLHFTXXXFXSLAXRXVIRAXLTLHVGYGTFKPLRTDRVEDHXIXAEXFEISEETAHVINRALDENXRVIAVGTTTTRALETSVRHGGGRIVPGKGVSDLFIXPGFSFXAVSGIMTNFHXPKSSLXMLVXAFAGRDCLLAAYDEAVRMNYRFYSYGDAMLIV

SEQ ID NO: 73741 - protein, 340 aa, Wohlfahrtiimonas chitiniclastica
  REGION 1..340: note = tr|L8XYE4|L8XYE4_9GAMM S-adenosylmethionine:tRNA ribosyltransferase-isomerase OS=Wohlfahrtiimonas chitiniclastica SH04 OX=1261130 GN=queA PE=3 SV=1
MKDKISDYDYHLPESLIAQFPKEDRESSRLLVAKGDEIEDKIFKDIIDYIEPGDLLVINNTRVLPARVFAHKETGGAVEILVERLLSETSFLAQTRASKSPKEGQIIYVEDQPVFKMVARDDSFFIFETVDGSAVFPILEKMGHMPLPPYIVRDDSDFDKERYQTVFSKEKGAVAAPTAGLHFTKELMHAIEEKGASFVEVTLHVGAGTFKPVREEALDQHVMHKEWISVPQSAIDRILATKAAGKRVIAVGTTVCRSLETAALDGTLKAFEGDTNIFIKPGFEFHVIDALITNFHLPKSTLMVLVSTFMGYERIQKIYQHAVDDQYRFFSYGDAMILMP

SEQ ID NO: 73742 - protein, 340 aa, Wohlfahrtiimonas chitiniclastica; identical to SEQ ID NO: 73741
  REGION 1..340: note = tr|A0A165HAG8|A0A165HAG8_9GAMM S-adenosylmethionine:tRNA ribosyltransferase-isomerase; OS = Wohlfahrtiimonas chitiniclastica OX=400946 GN=queA PE=3; SV = 1

SEQ ID NO: 73743 - protein, 340 aa, Wohlfahrtiimonas sp.
  REGION 1..340: note = tr|A0A256C4S8|A0A256C4S8_9GAMM S-adenosylmethionine:tRNA ribosyltransferase-isomerase; OS = Wohlfahrtiimonas sp. G9077 OX=1980118 GN=queA PE=3 SV=1
MKDKISDYDYHLPESLIAQFPKEDRESSRLLVAKGDEIEDKIFKDIIDYIEPGDLLVINNTRVLPARVFAHKETGGAVEILVERLLSDTSFLAQTRASKSPKEGQIIYVEDQPVFKMVARDDSFFIFETVDGSAVFPILEKMGHMPLPPYIVRDDSDFDKERYQTVFSKEKGAVAAPTAGLHFTKELMQAIEEKGASFVEVTLHVGAGTFKPVREEALDQHVMHKEWISVPQSAVDRILATKAAGKRVIAVGTTVCRSLETAALDGTLKAFEGDTNIFIKPGFEFHVIDALITNFHLPKSTLMVLVSTFMGYDRIQKIYQHAVNDQYRFFSYGDAMILMP

SEQ ID NO: 73744 - protein, 343 aa, Wolinella succinogenes
  REGION 1..343: note = tr|Q7M9J7|Q7M9J7_WOLSU S-adenosylmethionine:tRNA ribosyltransferase-isomerase OS=Wolinella succinogenes (strain ATCC 29543 / DSM 1740 / LMG 7466 / NCTC 11488 / FDC 6 02W) OX=273121 GN=queA PE=3 SV=1
MKSNDPFSLLTYDYELPEELIASHPIHPKNQARLLVYNRKDGSILHTHFSEFERFIPQEALIVFNDTKVIKARFFGKKESGGGVELLYHKPLGVERFWVQIKGRVKLGQTLLLAEGWRAQILALGEGGFREVSFWDERGVKVELAQLLLFLERQGHVPLPPYIKRTDTALDEVEYQSVFAKHEGAIAAPTASLHFEETDMVRLKERFDHAFVTLHVGAGTFLGVESEDIRNHSMHKERYFISESSAQKIKQASQILAIGTTAARTIEYYVRTSKKEGECDLFLHPGNPPLKTTALLTNFHLPQSTLLMLVSAFITPKECQRVYAQALKERYRFFSYGDGMLIL

SEQ ID NO: 73745 - protein, 362 aa, Xanthobacter autotrophicus
  REGION 1..362: note = sp|A7IN97|QUEA_XANP2 S-adenosylmethionine:tRNA ribosyltransferase-isomerase OS=Xanthobacter autotrophicus (strain ATCC BAA-1158 / Py2) OX=78245 GN=queA PE=3 SV=1
MRVDAFDFDLPEEHIALRPAEPRDAARMLVVRPGGAPELSDLKVRDLPDFITANDALVVNDTRVIPAALEGVRERDGGSAVRIEANLIKRLDASRWQAFAKPGKRLRVGDRVRFGGEGSACLLGALDAQIAAKEDDGSVILAFDLAGTALDEAVTAVGHMPIPPYIAARRAEDDRDRADYQTLFARVSGSVAAPTASLHFTPELMARIAATGASMHTVTLHVGAGTFLPVKAEDTTGHRMHAEWGEVSADTAAALNAVKAKGGRIFTVGSTSTRLIESATGEDGTIRPFVGETDIFITPGYRFRAVDGMLTNFHLPRSTLVMLVAAFVGHEAQKRAYAHAIAAGYRFYSYGDACLLLPEGGP

SEQ ID NO: 73746 - protein, 362 aa, Xanthobacter tagetidis
  REGION 1..362: note = tr|A0A3L7A0Z3|A0A3L7A0Z3_9RHIZ S-adenosylmethionine:tRNA ribosyltransferase-isomerase; OS = Xanthobacter tagetidis OX=60216 GN=queA PE=3 SV=1
MRVDAFDFELPEDRIALRPAEPRDAARLLVVRPGGAPELEDRGVRDLPSFLKAGDALVVNDTRVIPAALEGARARDGGAPVRIEATLVKRIGPARWRAFAKPGKRLKAGDRIRFGGEGSACLLGTLDATVEAKEEDGSVLLAFDLSGPALDEAIAQVGHMPIPPYIAARRHEDDRDREDYQTLFARVSGSVAAPTASLHFTPDLLARIAAAGVERHTVTLHVGPGTFLPVKADDTSGHRMHAEWGEVTRDTADALNAVKARGGRILTVGSTSTRLIESAAGEGGLIRPFVGETDIFITPGYRFKAIDGMLTNFHLPRSTLVMLVAALIGHDTQKRAYAHAIAQGYRFYSYGDACLLLPEGGA

SEQ ID NO: 73747 - protein, 358 aa, unidentified
  source 1..358: note = Xanthobacteraceae bacterium
  REGION 1..358: note = tr|A0A521W165|A0A521W165_9RHIZ S-adenosylmethionine:tRNA ribosyltransferase-isomerase; OS = Xanthobacteraceae bacterium OX=2021379 GN=queA PE=3 SV=1
MRTDLFDFALPPDRIALRPMSPRDAARLLVVRPGLPFSDRIVRDLPGLLEPGDRLVINDTKVIAAQLTGRRVGRDTEPRIEATLIKRLDGSRWQALVKPAKKLAAGDRLRFGAEGRVCLLGSLDATVEDKGEAGEVTLAFDFHGPVLDQAIADVGSPPLPPYIAGKRAPDADDIADYQTMFARHEGAVAAPTAGLHFTPGLTAALEERGIALSRVTLHVGAGTFLPVKVEDTADHPMHGEWGEVSAQTARELNATRAEGGRIVAVGTTSLRILESAAGEDGAVRPFSGETAIFITPGYAFRTADVLMTNFHLPRSTLFMLVSAFAGIERMKEAYAHAIAAGYRFYSYGDACLLFRAAA

SEQ ID NO: 73748 - protein, 349 aa, unidentified
  source 1..349: note = Xanthomarina gelatinilytica
  REGION 1..349: note = tr|M7ND23|M7ND23_9FLAO S-adenosylmethionine:tRNA ribosyltransferase-isomerase OS=Xanthomarina gelatinilytica OX=1137281 GN=queA PE=3 SV=1
MKLSHFNFNLPDELLAEYPAENRDESRLMVLNREKQTIEHKMFKDLIDYFDKDDVMILNNTKVFPARLFGNKEKTGARIEVFLLRELNEEQRLWDVLVDPARKIRIGNKLYFGEGESLVAEVIDNTTSRGRTLRFLYDGSYRDFRVKLRELGETPLPKYIKREVEPEDEERYQTIFAKNEGAVAAPTAGLHFSKHLLKRLEIKGVNLAEVTLHVGLGTFNPVEVEDLSKHKMDSEEIIINKEAVETINTGIKNKRRVCAVGTTAMRAIESSVSSSGTLNEFDGWSNKFIFPPYDFSIANSMITNFHTPKSTLLMMVSAFAGHDFIKKAYEEAIKEKYKFYSYGDAMLII

SEQ ID NO: 73749 - protein, 349 aa, unidentified
  source 1..349: note = Xanthomarina sp.
  REGION 1..349: note = tr|A0A2D8D073|A0A2D8D073_9FLAO S-adenosylmethionine:tRNA ribosyltransferase-isomerase; OS = Xanthomarina sp. OX=1931211 GN=queA PE=3 SV=1
  VARIANT 239: note = Xaa can be any naturally occurring amino acid
  VARIANT 301: note = Xaa can be any naturally occurring amino acid
  VARIANT 322: note = Xaa can be any naturally occurring amino acid
MKLSHFNFNLPDELLAEYPAENRDESRLMVLNREKQTIEHKMFKDLIDYFDKDDVMILNNTKVFPARLFGNKEKTGARIEVFLLRELNEEQRLWDVLVDPARKIRIGNKLYFGEGESLVAEVIDNTTSRGRTLRFLYDGSYRDFRVKLRELGETPLPKYIKREVEPEDEERYQTIFAKNEGAVAAPTAGLHFSKHLLKRLEIKGVNLAEVTLHVGLGTFNPVEVEDLSKHKMDSEEIIXNKEAVETINTGIKNKRRVCAVGTTAMRAIESSVSSSGTLNEFDGWSNKFIFPPYDFSIANSXITNFHTPKSTLLMMVSAFAGXDFIKKAYEEAIKEKYKFYSYGDAMLII

SEQ ID NO: 73750 - protein, 343 aa, unidentified
  source 1..343: note = Xanthomonadaceae bacterium
  REGION 1..343: note = tr|A0A2A3VJA0|A0A2A3VJA0_9GAMM S-adenosylmethionine:tRNA ribosyltransferase-isomerase; OS = Xanthomonadaceae bacterium NML93-0792 OX=2032566; GN = queA PE=3 SV=1
MKKSDFHFDLPEALIAQAPLAERSASRLLLVPPGEGAFDDRHVRDLPDLLQPGDLLVFNDTRVIPARLFGQKASGGRVEILIERLLPGNEARAQIGASKAPKPGGRIVLDGGGEAEVLARDDGFYHLRFHVDDALESWLLKAGRMPLPPYIRREPGQDDAERYQTVFAREVGAVAAPTAGLHFDDALLTRLRDRGVQFGHVTLHVGAGTFQPMRVDDIREHRMHSEWLNVGAELVAQIRRTREAGGRVIAVGTTVVRALESASVDGELHPFAGETRIFIFPGYRIRSVDALVTNFHLPESTLLMLVSAFAGKDRILAAYNHAVRARYRFFSYGDAMLLWSGHS

SEQ ID NO: 73751 - protein, 356 aa, unidentified
  source 1..356: note = Xanthomonadaceae bacterium
  REGION 1..356: note = tr|A0A1E4LB20|A0A1E4LB20_9GAMM S-adenosylmethionine:tRNA ribosyltransferase-isomerase; OS = Xanthomonadaceae bacterium SCN 69-48 OX=1660171 GN=queA; PE = 3 SV=1
MRGFLAAPAPLKTSDFHYDLPQELIAQAPLPERSASRLLHVPPGDAPFADLHVRDLPSLLQPGDLLVFNDTRVIPARLFGAKATGGRVEILIERLLPNNEARVQLGVSKPPQVGSRVALDAGGEAEVLARLDDGFWRLRFHVDGPLEAWLQHAGQLPLPPYIERRPDAADAERYQTVFARETGAVAAPTAGLHFDEALLDALRARGIEFGHVTLHVGAGTFQPVRVDDVHNHRMHSEWINVGAELVAKVRRTRAAGGRVIAVGTTVVRALESAMVDGELLPFAGDTSIFIFPGYKIRSIDALMTNFHLPESTLLMLVSAFAGKQRMFAAYEHAVRQRYRFFSYGDAMLLWPQESVT

SEQ ID NO: 73752 - protein, 370 aa, unidentified
  source 1..370: note = Xanthomonadales bacterium
  REGION 1..370: note = tr|A0A259R4C0|A0A259R4C0_9GAMM S-adenosylmethionine:tRNA ribosyltransferase-isomerase; OS = Xanthomonadales bacterium 14-68-21 OX=1970612 GN=queA; PE = 3 SV=1
MNRQPGRGRVRRCRYNGRLPPSDVAALKKSDFHYDLPEELIAQAPLAERSASRLLVVPPAPAALEDRHVRDLPELLQPGDLLVFNDTRVIPARLFGHKASGGRVEILIERLLGGQQARAQVGASKSPKPGSRIQLDAGGEAEVLGRDGEFYLLRFDVPESLESWLVHAGRLPLPPYIHREPGADDRERYQTVFARQVGAVAAPTAGLHFDEALLERLRARGVGFGHITLHVGAGTFQPVRVDDLSRHVMHREWLNVGAELVQQVRRTRAAGGRVIGVGTTVVRALESAMHEGELHPFAGETQIFITPGYRIRSVDAMVTNFHLPESTLLMMISAFAGRQRVFDAYAHAIAGRYRFFSYGDAMLLFPQPDA

SEQ ID NO: 73753 - protein, 353 aa, unidentified
  source 1..353: note = Xanthomonadales bacterium
  REGION 1..353: note = tr|A0A1Q4FR91|A0A1Q4FR91_9GAMM S-adenosylmethionine:tRNA ribosyltransferase-isomerase; OS = Xanthomonadales bacterium 63-13 OX=1895867 GN=queA PE=3; SV = 1
MKKSDFHFDLPPELIAQQPLAERSASRLLLLDAERASMADRQLRELPELLRAGDLLVFNDTRVLPARLFGRKESGGAVEILIERVSGTHEATAQLGVSKKPKEGAAIELADGSLARVLGRQGEFFRLRFESPEPLEKLLLKLGRMPLPPYIERTADALDSERYQTVFAREPGAVAAPTAGLHFDQSLLDRLANRGIESGHITLHVGAGTFQPMRAEKLEDHTMHREWLNVGAELVDRIHHTRARGGRVIAVGTTVVRALESASHDGVLEPFAGETQIFIFPGYRFSSIDALLTNFHLPESTLLMLVSAFAGREFILDAYRHAVEQHYRFFSYGDAMLVWPLGAGSRESGIGNG

SEQ ID NO: 73754 - protein, 371 aa, Xanthomonas albilineans
  REGION 1..371: note = tr|D2UE23|D2UE23_XANAP S-adenosylmethionine:tRNA ribosyltransferase-isomerase OS=Xanthomonas albilineans (strain GPE PC73 / CFBP 7063) OX=380358 GN=queA PE=3 SV=1
MPSGDGVAGYNARPWFCDPPALKKSDFHYDLPDDLIAQAPLAERSASRLLWVPPAPAPFQDRQVRDLPQLLRVGDLLIFNDTRVIPARLFGQKQTGGRVEILIERLLGGQCARAQLGVSKSPQVGARIALDAGGEAEVLSRDGAFYQLQFHVDGTLEHWLQQAGRLPLPPYIRREPGLEDRERYQTVFAREAGAVAAPTAGLHFDVPLLQALHERGVEVGHITLHVGAGTFQPVRVEALEQHQMHHEWLNVGASLVEQVRRTRAAGGRVIAVGTTVVRALESASKDGELYPFAGETQLFILPGYRIRSVDAMVTNFHLPESTLLMMVAAFAGRERIFAAYRHAIAQRYRFFSYGDAMLLWSAQATLAEVES

SEQ ID NO: 73755 - protein, 356 aa, Xanthomonas alfalfae
  REGION 1..356: note = tr|A0A1S1XFP5|A0A1S1XFP5_9XANT S-adenosylmethionine:tRNA ribosyltransferase-isomerase; OS = Xanthomonas alfalfae OX=366650 GN=queA PE=3 SV=1
MKKSDFHYELPEELIAQAPLAERAASRLLVVPPAPAAFGDRQVRDLPELLQPGDLLIFNDTRVIPARLFGQKASGGRVEILIERLLGEREARVQIGASKSPKAGSVIALDAGGQAEVLGRDGEFYLLRFQIPTPLEHWLLEAGRLPLPPYIRREPGVEDRERYQTVFAREVGAVAAPTAGLHFDEPLLARLRERGVEFGHVTLHVGAGTFQPVRVDKLDQHVMHTEWLNVGAALVEQVRRTRARGGRVIAVGTTVVRSLESAWRKTEAAPEGELQPFAGETQIFILPGYRIRSVDAMVTNFHLPESTLMMMVCAFAGRERIFAAYHHAIAQRYRFFSYGDAMLLWGGESGVGNGES

SEQ ID NO: 73756 - protein, 356 aa, Xanthomonas arboricola
  REGION 1..356: note = tr|A0A2S6ZUB2|A0A2S6ZUB2_9XANT S-adenosylmethionine:tRNA ribosyltransferase-isomerase; OS = Xanthomonas arboricola pv. arracaciae OX=487851 GN=queA; PE = 3 SV=1
MKKSDFNYSLPDELIAQAPLAERAASRLLVVPPAPQALVDRQVRDLPDLLQPGDLLIFNDTRVIPARLFGQKASGGRVEILIERLLGEREARVQIGASKSPKAGSLIALDAGGQAEVLGRDGEFYLLRFEIPTPLEHWLLEAGRLPLPPYIRREPGVEDRERYQTVFAREVGAVAAPTAGLHFDEALLARLRERGVEFGHVTLHVGAGTFQPVRVDALDQHVMHTEWLNVGAALVEQVRRTRARGGRVIAVGTTVVRSLESAWRTTDAAPEGELLPFAGETQIFILPGYRIRSVDAMVTNFHLPESTLLMMVSAFAGRERIFAAYQHAIEQRYRFFSYGDAMLLWSRDWGVGSGDS

SEQ ID NO: 73757 - protein, 356 aa, Xanthomonas arboricola
  REGION 1..356: note = tr|A0A2S6Z4C7|A0A2S6Z4C7_9XANT S-adenosylmethionine:tRNA ribosyltransferase-isomerase; OS = Xanthomonas arboricola pv. populi OX=487823 GN=queA; PE = 3 SV=1
MKKSDFHYSLPDELIAQAPLAERAASRLLVVPPSPQALVDRQVRDLPELLQPGDLLIFNDTRVIPARLFGQKASGGRVEILIERLLGERQARVQIGASKSPKAGSLIALDAGGQAEVLGRDGEFYLLRFEIPTPLEHWLPEAGQLPLPPYIRREPGMEDRERYQTVFAREVGAVAAPTAGLHFDEALLAQLRERGVEFGHVTLHVGAGTFQPVRVDALDQHVMHTEWLNVGAALVEQVRRTRARGGRVIAVGTTVVRSLESAWRKTDAAPDGELLPFAGETQIFILPGYRIRSVDAMVTNFHLPESTLLMMVSAFAGRERIFAAYQHAIEQRYRFFSYGDAMLLWGRESGIGNGES

SEQ ID NO: 73758 - protein, 356 aa, Xanthomonas axonopodis
  REGION 1..356: note = tr|A0A2S6XZ17|A0A2S6XZ17_9XANT S-adenosylmethionine:tRNA ribosyltransferase-isomerase; OS = Xanthomonas axonopodis pv. begoniae OX=473403 GN=queA; PE = 3 SV=1
MKKSDFHYDLPDELIAQAPLAERAASRLLVVPPSPQALADRQVRDLPELLQPGDLLIFNDTRVIPARLFGQKASGGRVEILIERLLGEREARVQIGASKSPKAGSVIALDAGGQAEVLGRDGEFYLLRFQIPTPLEHWLLEAGRLPLPPYIRREPGVEDRERYQTVFAREVGAVAAPTAGLHFDEPLLARLRERGVEFGHVTLHVGAGTFQPVRVDKLDQHVMHKEWLNVGAALVEQVRRTRARGGRVIAVGTTVVRSLESAWRITEAAPEGELQPFAGETQIFILPGYCIRSVDAMVTNFHLPESTLMMMVSAFAGRERIFAAYHHAIAQRYRFFSYGDAMLLWGRESGIGNGES

SEQ ID NO: 73759 - protein, 356 aa, Xanthomonas axonopodis
  REGION 1..356: note = sp|Q8PJL6|QUEA_XANAC S-adenosylmethionine:tRNA ribosyltransferase-isomerase OS=Xanthomonas axonopodis pv. citri (strain 306) OX=190486 GN=queA PE=3 SV=1
MKKSDFHYDLPDELIAQAPLAERAASRLLVVPPSPQALADRQVRDLPELLQPGDLLIFNDTRVIPARLFGQKASGGRVEILIERLLGERQARVQIGASKSPKAGSLIALDAGGQAEVLGRDGEFYLLRFEIPTPLEHWLLEAGRLPLPPYIRREPGVEDRERYQTVFAREVGAVAAPTAGLHFDEPLLARLRERGVEFGHVTLHVGAGTFQPVRVDKLDQHVMHKEWLNVGAALVEQVRRTRARGGRVIAVGTTVVRSLESAWRKTEAAPEGELQPFAGETQIFILPGYRIRSVDAMVTNFHLPESTLMMMVSAFAGRERIFAAYHHAIAQRYRFFSYGDAMLLWGRESGLGNGES

SEQ ID NO: 73760 - protein, 389 aa, Xanthomonas bromi
  REGION 1..389: note = tr|A0A1C3NQZ8|A0A1C3NQZ8_9XANT S-adenosylmethionine:tRNA ribosyltransferase-isomerase; OS = Xanthomonas bromi OX=56449 GN=queA PE=3 SV=1
MVKRWRCCDSPFPTLHSRPQLQCPAHQPTQPAALKKSDFHYDLPDELIAQVPLAERAASRLLVVPPSPQALADRQVRDLPELLQPGDLLIFNDTRVIPARLFGQKASGGRVEILIERLLGEREARVQIGASKSPKAGSLIALDAGGQAEVLGRDGEFYLLRFEIPTPLEHWLLEAGRLPLPPYIRREPGIEDRERYQTVFAREVGAVAAPTAGLHFDEPLLARLRERGVEFGHVTLHVGAGTFQPVRVDKLDQHVMHKEWLNVGAALVEQVRRARARGGRVIAVGTTVVRSLESAWRTTDAAPEGELQPFAGETQIFILPGYRIRSVDAMVTNFHLPESTLMMMVSAFAGRERIFEAYQHAIAQRYRFFSYGDAMLLWGREWGIGSGES

SEQ ID NO: 73761 - protein, 356 aa, Xanthomonas campestris
  REGION 1..356: note = sp|Q8P867|QUEA_XANCP S-adenosylmethionine:tRNA ribosyltransferase-isomerase OS=Xanthomonas campestris pv. campestris (strain ATCC 33913 / DSM 3586 / NCPPB 528 / LMG568 / P 25) OX=190485 GN=queA PE=3 SV=1
MKKSDFHYDLPEELIAQAPLAERAASRLLVVPPTPAAFSDRQVRDLPELLQPGDLLIFNDTRVIPARLFGQKASGGRVEILIERLLGGQQARAQIGASKSPKAGSVIALDAGGQAEVLGRDGEFYLLRFDIPAPLEHWLLDAGRLPLPPYIRREPGLDDRERYQTVFAREVGAVAAPTAGLHFDEALLARLRERGVEFGHVTLHVGAGTFQPVRVDALDKHVMHTEWLNVGAALVEQVRRTRARGGRVIAVGTTVVRSLESAWRKTDDAPHGELQSFAGETQIFILPGYRIRSVDAMVTNFHLPESTLLMMVSAFAGCDRIFAAYAHAIAQRYRFFSYGDAMLLWSREWGIGNGES

SEQ ID NO: 73762 - protein, 356 aa, Xanthomonas campestris
  REGION 1..356: note = sp|Q3BS36|QUEA_XANC5 S-adenosylmethionine:tRNA ribosyltransferase-isomerase OS=Xanthomonas campestris pv. vesicatoria (strain 85-10) OX=316273 GN=queA PE=3 SV=1
MKKSDFHYELPEELIAQAPLAERAASRLLVVPPAPAAFGDRQVRDLPELLQPGDLLIFNDTRVIPARLFGQKASGGRVEILIERLLGEREARVQIGASKSPKAGSVIALDAGGQAEVLGRDGEFYLLRFQIPTPLEHWLLEAGRLPLPPYIRREPGVEDRERYQTVFAREVGAVAAPTAGLHFDEPLLARLRERGVEFGHVTLHVGAGTFQPVRVDKLDQHVMHKEWLNVGATLVEQVRRTRARGGRVIAVGTTVVRSLESAWRKTEAAPEGELQPFAGETQIFILPGYRIRSVDAMVTNFHLPESTLMMMVCAFAGRERIFAAYHHAIAQRYRFFSYGDAMLLWGGESGVGNGES

SEQ ID NO: 73763 - protein, 356 aa, unidentified
  source 1..356: note = Xanthomonas cannabis
  REGION 1..356: note = tr|A0A0B2CGI2|A0A0B2CGI2_9XANT S-adenosylmethionine:tRNA ribosyltransferase-isomerase; OS = Xanthomonas cannabis pv. cannabis OX=1885894 GN=queA; PE = 3 SV=1
MKKSDFHYDLPDELIAQAPLAERAASRLLVVPPAPEAFSDRQVRDLPELLQPGDLLIFNDTRVIPARLFGQKASGGRVEILIERLLGEREARVQIGASKSPKAGSLIALDAGGQAEVLGRDGEFYLLRFEIPTPLEHWLLEAGRLPLPPYIRREPGIEDRERYQTVFAREVGAVAAPTAGLHFDEALLARLRARGVEFGHVTLHVGAGTFQPVRVDALEQHVMHKEWLNVGAALVEQVRRTRERGGRVIAVGTTVVRSLESAWRKTDAAPDGELLPFAGETQIFILPGYRIRSVDAMVTNFHLPESTLMMMVSAFAGRERIFAAYQHAIAQRYRFFSYGDAMLLWGRDWGFGSGDS

SEQ ID NO: 73764 - protein, 356 aa, Xanthomonas citri
  REGION 1..356: note = tr|A0A2H1SNX1|A0A2H1SNX1_XANCI S-adenosylmethionine:tRNA ribosyltransferase-isomerase; OS = Xanthomonas citri pv. fuscans OX=366649 GN=queA PE=3; SV = 1
MKKSDFHYDLPDELIAQAPLAERAASRLLVVPPSPQALADRQVRDLPELLQPGDLLIFNDTRVIPARLFGHKASGGRVEILIERLLGERQARVQIGASKSPKAGSLIALDAGGQAEVLGRDGEFYLLRFEIPTPLEHWLLEAGRLPLPPYIRREPGVEDRERYQTVFAREVGAVAAPTAGLHFDEPLLARLRERGVEFGHVTLHVGAGTFQPVRVDKLDQHVMHTEWLNVGAALVEQVRRTRARGGRVIAVGTTVVRSLESAWRTTEAAPEGELQPFAGETQIFILPGYRIRSVDAMVTNFHLPESTLMMMVSAFAGRERIFAAYHHAIAQRYRFFSYGDAMLLWGGESGVGNGES

SEQ ID NO: 73765 - protein, 356 aa, Xanthomonas citri
  REGION 1..356: note = tr|A0A220WGK5|A0A220WGK5_XANCI S-adenosylmethionine:tRNA ribosyltransferase-isomerase; OS = Xanthomonas citri pv. vignicola OX=473426 GN=queA PE=3; SV = 1
MKKSDFHYDLPDELIAQAPLAERAASRLLVVPPSPQALADLQVRDLPELLQPGDLLIFNDTRVIPARLFGHKASGGRVEILIERLLGERQARVQIGASKSPKAGSLIALDAGGQAEVLGRDGEFYLLRFEIPTPLEHWLLEAGRLPLPPYIRREPGVEDRERYQTVFAREVGAVAAPTAGLHFDEPLLARLRERGVEFGHVTLHVGAGTFQPVRVDKLDQHVMHTEWLNVGAALVEQVRRTRARGGRVIAVGTTVVRSLESAWRTTEAAPEGELQPFAGETQIFILPGYRIRSVDAMVTNFHLPESTLMMMVSAFAGRERIFAAYHHAIAQRYRFFSYGDAMLLWGRDWGFGSGDS

SEQ ID NO: 73766 - protein, 356 aa, Xanthomonas codiaei
  REGION 1..356: note = tr|A0A2S7C893|A0A2S7C893_9XANT S-adenosylmethionine:tRNA ribosyltransferase-isomerase; OS = Xanthomonas codiaei OX=56463 GN=queA PE=3 SV=1
MKKSDFHYDLPDELIAQAPLAERAASRLLVVPPLPQALADRQVRDLPELLQPGDLLIFNDTRVIPARLFGQKASGGRVEILIERLLGEREARVQIGASKSPKAGSLIALDAGGQAGVLGRDGEFYLLRFDIPLPLQQWLPEAGRLPLPPYIRREPGVEDRERYQTVFAREVGAVAAPTAGLHFDEALLARLRERGVEFGHVTLHVGAGTFQPVRVDRLDQHVMHTEWLNVGAALVEQVRRTRARGGRVIAVGTTVVRSLESAWRITDAAPEGELQPFAGETQIFILPGYRIRSVDAMVTNFHLPESTLLMMVSAFAGRERIFEAYRHAIAQRYRFFSYGDAMLLWGRDWGLGSGDS

SEQ ID NO: 73767 - protein, 356 aa, Xanthomonas cucurbitae
  REGION 1..356: note = tr|A0A2S7DUA7|A0A2S7DUA7_9XANT S-adenosylmethionine:tRNA ribosyltransferase-isomerase; OS = Xanthomonas cucurbitae OX=56453 GN=queA PE=3 SV=1
MKKSDFNYALPEDLIAQAPLAERAASRLLVVPPAPAAFSDRQVRDLPELLQPGDLLIFNDTRVIPARLFGQKASGGRVEILIERLLGEREARVQIGASKSPKAGSLIALDAGGQAEVLGRDGEFYLLRFDIPVPLQQWLPEAGRLPLPPYIRREPGVEDRERYQTVFAREVGAVAAPTAGLHFDEALLARLRERGVEFGHVTLHVGAGTFQPVRVDRLDQHVMHTEWLNVGAALVEQVRRTRARGGRVVAVGTTVVRSLESAWRITDAAPEGELQPFAGETRIFILPGYRIRSVDAMVTNFHLPESTLLMMVSAFAGRERIFAAYQHAIAQRYRFFSYGDAMLLWGGESGIGNGES

SEQ ID NO: 73768 - protein, 356 aa, Xanthomonas cynarae
  REGION 1..356: note = tr|A0A2S7ATE0|A0A2S7ATE0_9XANT S-adenosylmethionine:tRNA ribosyltransferase-isomerase; OS = Xanthomonas cynarae OX=109214 GN=queA PE=3 SV=1
MKKSDFHYDLPDELIAQAPLAERAASRLLVVPPSPQALVDRQVRDLPELLQPGDLLIFNDTRVIPARLFGQKASGGRVEILIERLLGEREARVQIGASKSPKAGSLIALDAGGQAEVLGRDGEFYLLRFDIPAPLEQWLPEAGQLPLPPYIRREPGVEDRERYQTVFAREVGAVAAPTAGLHFDEALLAQLRERGVEFGHVTLHVGAGTFQPVRVDALDKHVMHTEWLNVGAALVEQVRRTRARGGRVIAVGTTVVRSLESAWRKTDAAPDGELLPFAGETQIFILPGYRIRSVDAMVTNFHLPESTLLMMVSAFAGRERIFAAYQHAIAQRYRFFSYGDAMLLWGREWGIGNGES

SEQ ID NO: 73769 - protein, 356 aa, Xanthomonas dyei
  REGION 1..356: note = tr|A0A2S7BZR6|A0A2S7BZR6_9XANT S-adenosylmethionine:tRNA ribosyltransferase-isomerase; OS = Xanthomonas dyei OX=743699 GN=queA PE=3 SV=1
MKKSDFNYSLPDELIAQAPLAERAASRLLVVPKAPADFSDRQVRDLPELLQPGDLLIFNDTRVIPARLFGQKASGGRVEILIERLLGERQARVQIGASKSPKAGSLIALDAGGQAEVLGRDGEFYLLRFDIPLPLEQWLPEAGRLPLPPYIRREPGLEDRERYQTVFAREVGAVAAPTAGLHFDEALLARLRERGVEFGHVTLHVGAGTFQPVRVDALDQHVMHKEWLNVGAALVEQVRRTRARGGRVIAVGTTVVRSLESAWRTTDAAPDGELLPFAGETQIFILPGYRIRSVDAMVTNFHLPESTLLMMVSAFAGRERIFAAYAHAIAQRYRFFSYGDAMLLWGRDWGIGNGES

SEQ ID NO: 73770 - protein, 356 aa, Xanthomonas euvesicatoria
  REGION 1..356: note = tr|A0A4U0TFT4|A0A4U0TFT4_XANEU S-adenosylmethionine:tRNA ribosyltransferase-isomerase; OS = Xanthomonas euvesicatoria pv. citrumelonis OX=189396; GN = queA PE=3 SV=1
MKKSDFHYELPEALIAQAPLAERAASRLLVVPPAPAAFGDRQVRDLPELLQPGDLLIFNDTRVIPARLFGQKASGGRVEILIERLLGEREARVQIGASKSPKAGSVIALDAGGQAEVLGRDGEFYLLRFQIPTPLEHWLLEAGRLPLPPYIRREPGVEDRERYQTVFAREVGAVAAPTAGLHFDEPLLARLRERGVEFGHVTLHVGAGTFQPVRVDKLDQHVMHTEWLNVGAALVEQVRRTRARGGRVIAVGTTVVRSLESAWRKTEAAPEGELQPFAGETQIFILPGYRIRSVDAMVTNFHLPESTLMMMVCAFAGRERIFAAYHHAIAQRYRFFSYGDAMLLWGGESGVGNGES

SEQ ID NO: 73771 - protein, 356 aa, Xanthomonas euvesicatoria; identical to SEQ ID NO: 73755
  REGION 1..356: note = tr|A0A2S7EA45|A0A2S7EA45_XANEU S-adenosylmethionine:tRNA ribosyltransferase-isomerase; OS = Xanthomonas euvesicatoria pv. citrumelonis OX=189396; GN = queA PE=3 SV=1

SEQ ID NO: 73772 - protein, 356 aa, unidentified
  source 1..356: note = Xanthomonas floridensis
  REGION 1..356: note = tr|A0A1A9MBT6|A0A1A9MBT6_9XANT S-adenosylmethionine:tRNA ribosyltransferase-isomerase; OS = Xanthomonas floridensis OX=1843580 GN=queA PE=3 SV=1
MKKSDFRYDLPDALIAQAPLAERAASRLLVVPPEPAAFSDRQVRDLPELLQPGDLLIFNDTRVIPARLFGQKASGGRVEILIERLLGEREARVQIGASKSPKAGSLIALDAGGQAEVLGRDGEFYLLRFDIPVPLHQWLPEAGRLPLPPYIRREPGVEDRERYQTVFAREVGAVAAPTAGLHFDEALLARLRERGVEFGHVTLHVGAGTFQPVRVDRLDQHVMHTEWLNVGAALVEQVRRTRARGGRVIAVGTTVVRSLESAWRTTDAAPEGELQPFAGETQIFILPGYRIRSVDAMVTNFHLPESTLLMMVSAFAGRERIFEAYHHAIAQRYRFFSYGDAMLLWGRESGIGNGES

SEQ ID NO: 73773 - protein, 356 aa, Xanthomonas fragariae
  REGION 1..356: note = tr|A0A1Y6H552|A0A1Y6H552_9XANT S-adenosylmethionine:tRNA ribosyltransferase-isomerase; OS = Xanthomonas fragariae OX=48664 GN=queA PE=3 SV=1
MKKSDFHYALPDDLIAQAPLAERAASRLLVVPPSPRALVDRQVRDLPALLQPGDLLIFNDTRVIPARLFGQKASGGRVEILIERLLGEREARVQIGASKSPKAGSLIALDAGGQAEVLGRDDAFYLLRFDIPTPLEHWLLEAGRLPLPPYIRREPGVEDRERYQTVFARAVGAVAAPTAGLHFDEALLAQLRERGVEFGHVTLHVGAGTFQPVRVDKLDQHVMHKEWLNVGAGLVEQVRRTRARGGRVIAVGTTVVRSLESAWRVTDTAPEGELLPFAGETQIFILPGYRIRSVDAMVTNFHLPESTLLMMVSAFAGRERIFEAYQHAIAQRYRFFSYGDAMLLWGRESGVGNGES

SEQ ID NO: 73774 - protein, 356 aa, Xanthomonas gardneri
  REGION 1..356: note = tr|F0C170|F0C170_9XANT S-adenosylmethionine:tRNA ribosyltransferase-isomerase OS=Xanthomonas gardneri ATCC 19865 OX=925777 GN=queA PE=3 SV=1
MKKSDFHYDLPDELIAQAPLAERAASRLLVVPPSPQALVDRQVRDLPELLQPGDLLIFNDTRVIPARLFGQKASGGRVEILIERLLGEREARVQIGASKSPKAGSLIALDAGGQAEVLGRDGEFYLLRFDIPTTLEQWLPEAGQLPLPPYIRREPGVEDRERYQTVFAREVGAVAAPTAGLHFDEALLAQLRERGVEFGHVTLHVGAGTFQPVRVDALDQHVMHKEWLNVGAALVEQVRRTRARGGRVIAVGTTVVRSLESAWRKTDAAPDGELLPFAGETQIFILPGYRIRSVDAMVTNFHLPESTLLMMVSAFAGRERIFAAYQHAIAQRYRFFSYGDAMLLWGREWGIGNGES

SEQ ID NO: 73775 - protein, 356 aa, Xanthomonas gardneri
  REGION 1..356: note = tr|A0A1L5Y1X0|A0A1L5Y1X0_9XANT S-adenosylmethionine:tRNA ribosyltransferase-isomerase; OS = Xanthomonas gardneri OX=90270 GN=queA PE=3 SV=1
MKKSDFNYSLPDELIAQAPLAERAASRLLVVPPAPQALVDRQVRDLPELLQPGDLLIFNDTRVIPARLFGQKASGGRVEILIERLLGEREARVQIGASKSPKAGSLIALDAGGQAEVLGRDGEFYLLRFDIPAPLEQWLQEAGQLPLPPYIRREPGVEDRERYQTVFAREVGAVAAPTAGLHFDEALLAQLRERGVEFGHVTLHVGAGTFQPVRVDALDKHVMHKEWLNVGAALVEQVRRTRARGGRVIAVGTTVVRSLESAWRKTDAAPDGELLPFAGETQIFILPGYRIRSVDAMVTNFHLPESTLLMMVSAFAGRERIFAAYQHAIAQRYRFFSYGDAMLLWGREWGIGNGES

SEQ ID NO: 73776 - protein, 356 aa, Xanthomonas hortorum
  REGION 1..356: note = tr|V7ZC63|V7ZC63_9XANT S-adenosylmethionine:tRNA ribosyltransferase-isomerase OS=Xanthomonas hortorum pv. carotae str. M081 OX=863365 GN=queA PE=3 SV=1
MKKSDFNYSLPDELIAQAPLAERAASRLLVVPPSPQALVDRQVRDLPELLQPGDLLIFNDTRVIPARLFGQKASGGRVEILIERLLGEREARVQIGASKSPKAGSLIALDAGGQAEVLGRDGEFYVLRFDIPSPLQQWLPEAGQLPLPPYIRREPGVEDRERYQTVFAREVGAVAAPTAGLHFDEALLAQLRERGVEFGHVTLHVGAGTFQPVRVDALDQHVMHTEWLNVGAALVEQVRRTRARGGRVIAVGTTVVRSLESAWRKTDAAPDGELLPFAGETQIFILPGYRIRSVDAMVTNFHLPESTLLMMVSAFAGRERIFEAYQHAIAQRYRFFSYGDAMLLWGRDWGVGIGDS

SEQ ID NO: 73777 - protein, 356 aa, Xanthomonas hortorum
  REGION 1..356: note = tr|A0A2S7E0V2|A0A2S7E0V2_9XANT S-adenosylmethionine:tRNA ribosyltransferase-isomerase; OS = Xanthomonas hortorum pv. hederae OX=453603 GN=queA PE=3; SV = 1
MKKSDFNYSLPDELIAQAPLAERAASRLLVVPPSPQALVDRQVRDLPELLQPGDLLIFNDTRVIPARLFGQKASGGRVEILIERLLGEREARVQIGASKSPKAGSLIALDAGGQAEVLGRDGEFYLLRFDIPSPLQQWLPEAGQLPLPPYIRREPGVEDRERYQTVFAREVGAVAAPTAGLHFDEALLAQLRERGVEFGHVTLHVGAGTFQPVRVDALDQHVMHTEWLNVGAALVEQVRRTRARGGRVIAVGTTVVRSLESAWRKTDAAPDGELLPFAGETQIFILPGYRIRSVDAMVTNFHLPESTLLMMVSAFAGRERIFEAYQHAIEQRYRFFSYGDAMLLWGRDWEVGIGDS

SEQ ID NO: 73778 - protein, 350 aa, unidentified
  source 1..350: note = Xanthomonas hyacinthi
  REGION 1..350: note = tr|A0A2S7F1E5|A0A2S7F1E5_9XANT S-adenosylmethionine:tRNA ribosyltransferase-isomerase; OS = Xanthomonas hyacinthi OX=56455 GN=queA PE=3 SV=1
MKKSDFRYELPEELIAQAPLAERSASRLLLVPPAPAPFADRQVRDLPQLLQPGDLLVFNDTRVIPARLFGHKSSGGRVEILIERLLGGQRARAQLGVSKSPRAGVRIALDAGGEAEVLGRDGEFYHLQFHVADTLEAWLQQAGRLPLPPYIRREPGLDDRERYQTVFARQAGAVAAPTAGLHFDAPLLEALQARGVSVGHVTLHVGAGTFQPVRVEALAQHVMHREWLNVGASLVEQVRRTRAAGGRVIAVGTTVVRALESASKDGALHPFAGETQIFILPGYRIRSVDAMVTNFHLPESTLLMMVSAFAGRERMFAAYRHAIAQRYRFFSYGDAMLLWGGETGMGNGES

SEQ ID NO: 73779 - protein, 356 aa, Xanthomonas melonis
  REGION 1..356: note = tr|A0A2S7DEF0|A0A2S7DEF0_9XANT S-adenosylmethionine:tRNA ribosyltransferase-isomerase; OS = Xanthomonas melonis OX=56456 GN=queA PE=3 SV=1
MKKSDFHYDLPDELIAQAPLAERAASRLLVVPPAPAAFDDRQVRDLPELLQPGDLLIFNDTRVIPARLFGQKASGGRVEILIERLLGEREARVQIGASKSPKAGSLIALDAGGQAEVLGRDGEFYLLRFDIPAPLQQWLPEAGRLPLPPYIRREPGLEDRERYQTVFAREVGAVAAPTAGLHFDEALLARLRERGVEFGHVTLHVGAGTFQPVRVDRLDQHVMHTEWLNVGAALVEQVRHTRARGGRVIAVGTTVVRSLESAWRKTEAAPEGELQPFAGETQIFILPGYRIRSVDAMVTNFHLPESTLLMMVSAFAGRERIFEAYRHAIAQRYRFFSYGDAMLLWSRDWGLGSGDP

SEQ ID NO: 73780 - protein, 356 aa, unidentified
  source 1..356: note = Xanthomonas nasturtii
  REGION 1..356: note = tr|A0A3E1KL96|A0A3E1KL96_9XANT S-adenosylmethionine:tRNA ribosyltransferase-isomerase; OS = Xanthomonas nasturtii OX=1843581 GN=queA PE=3 SV=1
MKKSDFHYDLPDELIAQAPLAERAASRLLVVPPSPQALADHQVRDLPELLQPGDLLIFNDTRVIPARLFGQKASGGRVEILIERLLGERQARVQIGASKSPKAGSLIALDAGGQAEVLGRDGEFYLLRFEIPTPLEHWLLEAGRLPLPPYIRREPGIEDRERYQTVFAREVGAVAAPTAGLHFDEALLARLRERGVEFGHVTLHVGAGTFQPVRVDSLDQHVMHKEWLNVGAALVEQVRRTRERGGRVIAVGTTVVRSLESAWRKTDAAPDGELLPFAGETQIFILPGYRIRSVDAMVTNFHLPESTLLMMVSAFAGRERIFAAYQHAIAQRYRFFSYGDAMLLWGRDWGFGSGDS

SEQ ID NO: 73781 - protein, 356 aa, Xanthomonas oryzae
  REGION 1..356: note = sp|Q5GZY2|QUEA_XANOR S-adenosylmethionine:tRNA ribosyltransferase-isomerase OS=Xanthomonas oryzae pv. oryzae (strain KACC10331 / KXO85) OX=291331 GN=queA PE=3; SV = 2
MKKSDFHYDLPEELIAQAPLAERAASRLLVVPPSPQALADRRARDLPELLQPGDLLIFNDTRVIPARLFGQKASGGRVEILIERLLGERQARVQIGASKSPKAGSLIALDAGGQAEVLGRDGAFYLLRFEIPTPLEHWLLEAGRLPLPPYIRREPGVEDRERYQTVFAREVGAVAAPTAGLHFDEALLARLRERGVEFGHVTLHVGAGTFQPVRVDKLDQHVMHKEWLNVGAALVEQVRRTRARGGRVIAVGTTVVRSLESAWRTTDAAPEGELQPFAGETQIFILPGYRIRSVDAMVTNFHLPESTLMMMVSAFAGRERIFEAYHHAIAQRYRFFSYGDAMLLWSRAWGLGSGDS

SEQ ID NO: 73782 - protein, 367 aa, Xanthomonas oryzae
  REGION 1..367: note = tr|A0A5C2EU69|A0A5C2EU69_9XANT S-adenosylmethionine:tRNA ribosyltransferase-isomerase; OS = Xanthomonas oryzae pv. oryzicola OX=129394 GN=queA PE=3; SV = 1
MCGYSVNDPAALKKSDFHYDLPEELIAQAPLAERAASRLLVVPPSPQALADRQVRDLPELLQPGDLLIFNDTRVIPARLFGQKASGGRVEILIERLLGERQARVQIGASKSPKAGSLIALDAGGQAEVLGRDGAFYLLRFEIPTPLEHWLLAAGRLPLPPYIRREPGVEDRERYQTVFAREVGAVAAPTAGLHFDEALLARLRERGVEFGHVTLHVGAGTFQPVRVDKLDQHVMHKEWLNVGAALVEQVRRTRARGGRVIAVGTTVVRSLESAWRTTDAAPEGELQPFAGETQIFILPGYRIRSVDAMVTNFHLPESTLMMMVSAFAGRERIFESYHHAIAQRYRFFSYGDAMLLWSRAWGLGSGDS

SEQ ID NO: 73783 - protein, 356 aa, Xanthomonas perforans
  REGION 1..356: note = tr|A0A0G8VW83|A0A0G8VW83_9XANT S-adenosylmethionine:tRNA ribosyltransferase-isomerase; OS = Xanthomonas perforans OX=442694 GN=queA PE=3 SV=1
MKKSDFHYELPEELIAQAPLAERAASRLLVVPPAPAAFGDRQVRDLPELLQPGDLLIFNDTRVIPARLFGQKASGGRVEILIERLLGEREARVQIGASKSPKAGSVIALDAGGQAEVLGRDGEFYLLRFQIPTPLEHWLLEAGRLPLPPYIRREPGVEDRERYQTVFAREVGAVAAPTAGLHFDEPLLARLRERGVEFGHVTLHVGAGTFQPVRVDKLDQHVMHTEWLNVGAALVEQVRRTRARGGRVIAVGTTVVRSLESAWRKTEAAPEGELQPFAGETQIFILPGYRIRSVDAMVTNFHLPESTLMMMVCAFAGRERIFAAYHHAIAQRYRFFSYGDAMLLWGGESGVGNRES

SEQ ID NO: 73784 - protein, 356 aa, Xanthomonas phaseoli
  REGION 1..356: note = tr|A0A1V9HCS7|A0A1V9HCS7_9XANT S-adenosylmethionine:tRNA ribosyltransferase-isomerase; OS = Xanthomonas phaseoli pv. dieffenbachiae OX=92828; GN = queA PE=3 SV=1
MKKSDFHYDLPDELIAQAPLAERAASRLLVVPPSPQALADRQVRDLPELLQPGDLLIFNDTRVIPARLFGQKASGGRVEILIERLLGEREARVQIGASKSPKAGSVIALDAGGQAEVLGRDGEFYLLRFQIPTPLEHWLLEAGRLPLPPYIRREPGVEDRERYQTVFAREVGAVAAPTAGLHFDQPLLARLRERGVEFGHVTLHVGAGTFQPVRVDKLDQHVMHKEWLNVGAALVEQVRRTRARGGRVIAVGTTVVRSLESAWRTTEAAPEGELQPFAGETQIFILPGYRIRSVDAMVTNFHLPESTLMMMVSAFAGRERIFEAYHHAIAQRYRFFSYGDAMLLWGRESGIGNGES

SEQ ID NO: 73785 - protein, 356 aa, Xanthomonas pisi
  REGION 1..356: note = tr|A0A2S7CSX4|A0A2S7CSX4_9XANT S-adenosylmethionine:tRNA ribosyltransferase-isomerase; OS = Xanthomonas pisi OX=56457 GN=queA PE=3 SV=1
MKKSDFQYDLPDELIAQAPLAERAASRLLVVPPSPQAFADRQVRDLPELLQPGDLLIFNDTRVIPARLFGQKASGGRVEILIERLLGEREARVQIGASKSPKAGSLIALDAGGQAEVLGRDGEFYLLRFEIPLPLEQWLPEAGRLPLPPYIRREPGVEDRERYQTVFAREVGAVAAPTAGLHFDEELLARLRARGVEFGHVTLHVGAGTFQPVRVDALDQHVMHKEWLNVGAALVEQVRRTRARGGRVIAVGTTVVRSLESAWRPTDAAREGELLPFAGETQIFILPGYRIRSVDAMVTNFHLPESTLLMMVSAFAGRERIFEAYHHAIAQRYRFFSYGDAMLLWGRDWGVGSGDS

SEQ ID NO: 73786 - protein, 356 aa, unidentified
  source 1..356: note = Xanthomonas prunicola
  REGION 1..356: note = tr|A0A2N3RHK4|A0A2N3RHK4_9XANT S-adenosylmethionine:tRNA ribosyltransferase-isomerase; OS = Xanthomonas prunicola OX=2053930 GN=queA PE=3 SV=1
MKKSDFHYELPEELIAQAPLAERAASRLLVVPPSPQALADRQVRDLPELLQPGDLLIFNDTRVIPARLFGQKASGGRVEILIERLLGEREARVQIGASKSPKAGSLIALDAGGQAEVLGRDGEFYLLRFEIPTPLEHWLLAAGRLPLPPYIRREPGVEDRERYQTVFAREVGAVAAPTAGLHFDEELLARLRERGVEFGHVTLHVGAGTFQPVRVDKLDQHVMHKEWLNVGAALVEQVRRTRARGGRVIAVGTTVVRSLESAWRATDAAPDGELLPFAGETQIFILPGYRIRSVDAMVTNFHLPESTLMMMVSAFAGRERIFEAYHHAIAQRYRFFSYGDAMLLWGRESEIGNGES

SEQ ID NO: 73787 - protein, 349 aa, Xanthomonas sacchari
  REGION 1..349: note = tr|A0A2P5Z927|A0A2P5Z927_9XANT S-adenosylmethionine:tRNA ribosyltransferase-isomerase; OS = Xanthomonas sacchari OX=56458 GN=queA PE=3 SV=1
MKKSDFHYDLPEDLIAQEPLAERSASRLLLVPPAPALFADRHVRDLPELLRAGDLLIFNDTRVIPARLFGQKSTGGRVEILIERLLGGQRARAQLGVSKSPKAGAHIALDAGGEAEVLGRDGEFYQLQFHVDGALEHWLQQAGRLPLPPYIRREPGLDDRERYQTVFAREAGAVAAPTAGLHFDAPLLQALQQRGVEVGHVTLHVGAGTFQPVRVEALEQHQMHREWLNVGASLVEQVRRTRAAGGRVIAVGTTVVRALESASKDGELHPFAGETQIFILPGYRIRSVDAMVTNFHLPESTLLMMVSAFAGRERIFAAYRHAIAQRYRFFSYGDAMLLWSSETPAERVG

SEQ ID NO: 73788 - protein, 349 aa, Xanthomonas sacchari
  REGION 1..349: note = tr|A0A5D1A572|A0A5D1A572_9XANT S-adenosylmethionine:tRNA ribosyltransferase-isomerase; OS = Xanthomonas sacchari OX=56458 GN=queA PE=3 SV=1
MKKSDFHYDLPEDLIAQEPLAERSASRLLLVPPAPAAFADRHVRDLPELLRAGDLLIFNDTRVIPARLFGQKSTGGRVEILIERLLGGQRARAQLGVSKSPKAGARIALDAGGEAEVLGRDGEFYQLQFHVDGALEHWLQQAGRLPLPPYIRREPGLDDRERYQTVFAREAGAVAAPTAGLHFDAPLLQALQQRGVEVGHVTLHVGAGTFQPVRVEALEQHQMHREWLNVGASLVEQVRRTRAAGGRVIAVGTTVVRALESASKDGELHPFAGETQIFILPGYRIRSVDAMVTNFHLPESTLLMMVSAFAGRERIFAAYRHAIAQRYRFFSYGDAMLLWSSETPADRVG

SEQ ID NO: 73789 - protein, 356 aa, Xanthomonas sp.
  REGION 1..356: note = tr|A0A0Q5J353|A0A0Q5J353_9XANT S-adenosylmethionine:tRNA ribosyltransferase-isomerase; OS = Xanthomonas sp. Leaf148 OX=1736275 GN=queA PE=3 SV=1
MKKSDFNYSLPDELIAQAPLAERAASRLLVVPKAPADFSDRQVRDLPELLQPGDLLIFNDTRVIPARLFGQKASGGRVEILIERLLGEREARVQIGASKSPKAGSLIALDAGGQAEVLGRDGEFYLLRFEIPLPLEQWLPEAGRLPLPPYIRREPGLEDRERYQTVFAREVGAVAAPTAGLHFDEQLLARLRERGVEFGHVTLHVGAGTFQPVRVDALDQHVMHKEWLNVGAALVEQVRRTRARGGRVIAVGTTVVRSLESAWRKTDAAPDGELLPFAGETQIFILPGYRIRSVDAMVTNFHLPESTLLMMVSAFAGRERIFAAYAHAIAQRYRFFSYGDAMLLWGRDWGIGNGES

SEQ ID NO: 73790 - protein, 346 aa, Xanthomonas sp.; identical to SEQ ID NO: 68380
  REGION 1..346: note = tr|A0A0P7GN35|A0A0P7GN35_9XANT S-adenosylmethionine:tRNA ribosyltransferase-isomerase; OS = Xanthomonas sp. Mitacek01 OX=1732019 GN=queA PE=3 SV=1

SEQ ID NO: 73791 - protein, 350 aa, Xanthomonas theicola
  REGION 1..350: note = tr|A0A2S6ZDA8|A0A2S6ZDA8_9XANT S-adenosylmethionine:tRNA ribosyltransferase-isomerase; OS = Xanthomonas theicola OX=56464 GN=queA PE=3 SV=1
MKKSDFRYDLPEELIAQAPLAKRSASRLLLVPPAPAPFADRQVRDLPQLLQPGDLLVFNDTRVIPARLFGHKRSGGRVEILIERLLGGQRARAQLGVSKSPKAGARIALDAGGEAEVLDRDGAFYVLQFRVPDTLESWLQRAGRLPLPPYIRREPGLDDRERYQTVFARQAGAVAAPTAGLHFDAPLLEALQARGVGVGHVTLHVGAGTFQPVRAEALEQHVMHREWLNVGAGLVEQVRRTRAAGGRVIAVGTTVVRALESASRDGELLPFAGETQIFILPGYRIRSVDAMVTNFHLPESTLLMMVSAFAGRERIFAAYRHAIAQCYRFFSYGDAMLLWSGEWGMGNGEP

SEQ ID NO: 73792 - protein, 361 aa, Xanthomonas translucens
  REGION 1..361: note = tr|A0A0K2ZEV1|A0A0K2ZEV1_XANCT S-adenosylmethionine:tRNA ribosyltransferase-isomerase; OS = Xanthomonas translucens pv. arrhenatheri LMG 727; OX = 1195923 GN=queA PE=3 SV= 1
MTGHLYCDAPALKKSDFRYELPEELIAQAPLAERSASRLLLVPAAPAPFADRQVRDLPELLQPGDLLVFNDTRVIPARLFGNKSSGGRVEILIERLLGGQRARAQLGVSKSPKAGARIALDAGGEAEVLDRDGEFYVLEFHVPDTLEAWLQQAGRLPLPPYIRREPGLDDRERYQTVFARQAGAVAAPTAGLHFDAPLLEALQARGVGVGHVTLHVGAGTFQPVRVEALAQHVMHREWLNVGASLVEQVRRTRAAGGRVIAVGTTVVRALESASTDGELHPFAGETQIFILPGYRIRSVDAMVTNFHLPESTLLMMVSAFAGRERIFDAYRHAIEQRYRFFSYGDAMLLWGGETGMGNGAS

SEQ ID NO: 73793 - protein, 350 aa, Xanthomonas translucens
  REGION 1..350: note = tr|A0A514ED77|A0A514ED77_XANCT S-adenosylmethionine:tRNA ribosyltransferase-isomerase; OS = Xanthomonas translucens pv. cerealis OX=152263 GN=queA; PE = 3 SV=1
MKKSDFRYELPEELIAQAPLAERSASRLLLVPPAPAPFADRHVRDLPGLLQPGDLLVFNDTRVIPARLFGHKRSGGRVEILIERLLGGQRARAQLGVSKSPKAGARIALDTGGEAEVLGRDGEFYVLQFHVPDTLEAWLQQAGRLPLPPYIRREPGLDDRERYQTVFARQAGAVAAPTAGLHFDAPLLEALQARGVGVGHVTLHVGAGTFQPVRVEALAQHVMHREWLNVGASLVEQVRRTRAAGGRVIAVGTTVVRALESASKDGELHPFAGETQIFILPGYRIRSVDAMVTNFHLPESTLLMMVSAFAGRERIFDAYRHAIEQRYRFFSYGDAMLLWGGESGMGNGES

SEQ ID NO: 73794 - protein, 356 aa, Xanthomonas vasicola
  REGION 1..356: note = tr|A0A2P5ZJN6|A0A2P5ZJN6_XANVA S-adenosylmethionine:tRNA ribosyltransferase-isomerase; OS = Xanthomonas vasicola OX=56459 GN=queA PE=3 SV=1
MKKSDFNYSLPEELIAQAPLAERAASRLLVVPPSPQALADRQVRDLPELLQPGDLLIFNDTRVIPARLFGQKASGGRVEILIERLLGEREARVQIGASKSPKAGSLIALDAGGQAEVLGRDGEFYLLRFEIPTPLERWLLEAGRLPLPPYIRREPGVEDRERYQTVFAREVGAVAAPTAGLHFDEPLLAQLRERGVEFGHVTLHVGAGTFQPVRVDKLDQHVMHKEWLNVGAALVEQVRRTRARGGRVIAVGTTVVRSLESAWRKTDAAPEGELQPFAGETQIFILPGYRIRSVDAMVTNFHLPESTLMMMVSAFAGRERIFEAYHHAIAQRYRFFSYGDAMLLWSRESGVGNGES

SEQ ID NO: 73795 - protein, 356 aa, Xanthomonas vesicatoria
  REGION 1..356: note = tr|F0BB50|F0BB50_9XANT S-adenosylmethionine:tRNA ribosyltransferase-isomerase OS=Xanthomonas vesicatoria ATCC 35937 OX=925775 GN=queA PE=3 SV=1
MKKSDFNYALPEELIAQAPLAERAASRLLVVSPAPAAFSDRQVRDLPELLQPGDLLIFNDTRVIPARLFGQKASGGRVEILIERLLGEREARVQIGASKSPKAGSLIALDAGGQAEVLGRDGEFYLLRFEIPLPLEQWLPEAGRLPLPPYIRREPGLEDRERYQTVFAREVGAVAAPTAGLHFDEDLLARLRERGIEFGHVTLHVGAGTFQPVRVDALDQHVMHKEWLNVGAALVEQVRRTRARGGRVIAVGTTVVRSLESAWRTTEAAPEGELLPFAGETQIFILPGYRIRSVDAMVTNFHLPESTLLMMVSAFAGRERIFEAYQHAIAQRYRFFSYGDAMLLWGRESGIGNGES

SEQ ID NO: 73796 - protein, 356 aa, Xanthomonas vesicatoria
  REGION 1..356: note = tr|A0A1L5QPA6|A0A1L5QPA6_9XANT S-adenosylmethionine:tRNA ribosyltransferase-isomerase; OS = Xanthomonas vesicatoria OX=56460 GN=queA PE=3 SV=1
MKKSDFNYALPEELIAQAPLAERAASRLLVVPPAPAAFSDRQVRDLPELLQPGDLLIFNDTRVIPARLFGQKASGGRVEILIERLLGEREARVQIGASKSPKAGSLIALDAGGEAEVLGRDGEFYLLRFEIPLPLEQWLPEAGRLPLPPYIRREPGLEDRERYQTVFAREVGAVAAPTAGLHFDEDLLARLRERGIEFGHVTLHVGAGTFQPVRVDALDQHVMHKEWLNVGAALVEQVRRTRARGGRVIAVGTTVVRSLESAWRTTEAAPEGELLPFAGETQIFILPGYRIRSVDAMVTNFHLPESTLLMMVSAFAGRERIFEAYQHAIAQRYRFFSYGDAMLLWGRESGIGNGES

SEQ ID NO: 73797 - protein, 379 aa, Xenococcus sp.
  REGION 1..379: note = tr|L8M510|L8M510_9CYAN S-adenosylmethionine:tRNA ribosyltransferase-isomerase OS=Xenococcus sp. PCC 7305; OX = 102125 GN=queA PE=3 SV=1
MSKDLLLSNYSYNLPPELIAQTPVSPRDSSRLLVVNSPSTHHHSIFSTLPDWLLPGDLLVLNNTRVIPARLFGAKSTGAAVEVLLLEETETNCWLALVKPGKRFKLGTKILFTPQHNQTNGNINTQTLKGNPRDLTLHQKGARLSATVVAKDEVTGGRILRFDCDSPESFWQLLSEFGEVPLPPYITSRESQPLQYQTVFAQKDGAVAAPTAGLHFTHELLDKLQSKGIDQTYITLHVGVGTFRPVEVEKITEHQMHQEWIEVSEETTRKIKETKARGGRIIAVGTTAVRALEGAAQSSLVDEGNELQAFRGKTNLFIYPGYDWQIVDGLITNFHLPGSSLLMLVSALTGRERLFSLYQDAIANRYRFYSFGDAMLILS

SEQ ID NO: 73798 - protein, 340 aa, Xenophilus sp.
  REGION 1..340: note = tr|A0A254VRH6|A0A254VRH6_9BURK S-adenosylmethionine:tRNA ribosyltransferase-isomerase; OS = Xenophilus sp. AP218F OX=2014876 GN=queA PE=3 SV=1
MQLSDFDYHLPEALIAQHPPATRGASRLLHVAGRELGDLAFSDFLALVNAGDVLVFNDTRVIRARLFGEKASGGKVEALIERVLDEHTALAHVRSSKSPKPGSRLIFAGRWEAEMVERQDSLFKLRFLAEDNVFDILEASGKLPLPPYIERSAEGEDDERYQTVYARERGAVAAPTAGLHFTDEMLAALAAKGVELAYVTLHVGAGTFQPVKVENVAEHKMHSEIYEIPAQTVERIAAARARGGKVLAVGTTSVRALESAARSGELTAGRGETDIFITPGYRFRVVDRLLTNFHLPKSTLLMLVSAFAGYEEMRAAYAHAVAREYRFFSYGDAMLLERKD

SEQ ID NO: 73799 - protein, 361 aa, Xenorhabdus beddingii
  REGION 1..361: note = tr|A0A1Y2STW9|A0A1Y2STW9_9GAMM S-adenosylmethionine:tRNA ribosyltransferase-isomerase; OS = Xenorhabdus beddingii OX=40578 GN=queA PE=3 SV=1
MRVADFTFELPEELIAHYPQPQRSACRLLSLDGETGELTHGIFTDVLDKLETGDLLVFNNTRVIPARLFGRKATGGKLEVLVERMLDNKRVLAHVRASKAPKAGAALILGEDVLGENRGIKATMLARHDTLFEIRFDDDRDVLTILDQIGHMPLPPYIARPDEDADRELYQTVYNERPGAVAAPTAGLHFDEPLLAALREKGIEMAFVTLHVGAGTFQPVRVETIEDHVMHAEYAEVPQNVVDAVLACKARGNKVIAVGTTSVRSLESAARACQDGIIAPFFDDTQIFIYPGFEYQVVDALITNFHLPESTLIMLVSAFAGYKNTMSAYQSAVTEKYRFFSYGDAMFISRNRMASKETVSK

SEQ ID NO: 73800 - protein, 355 aa, Xenorhabdus bovienii
  REGION 1..355: note = tr|A0A077P127|A0A077P127_XENBV S-adenosylmethionine:tRNA ribosyltransferase-isomerase; OS = Xenorhabdus bovienii str. oregonense OX=1398202 GN=queA; PE = 3 SV=1
MRVADFTFELPEELIAHYPQPQRSGCRLLALDGETGGLTHGIFTDVLDKLEAGDLLVFNNTRVIPARLFGRKATGGKLEVLVERMLDNKRVLAHVRASKALKEGAELLLGEDESIRATMLARHDTLFEIRFDDDRDVLTILDEIGHMPLPPYIARPDEESDRELYQTVYSERPGAVAAPTAGLHFDEPLLAALREKGIDMAFVTLHVGAGTFQPVRVETIEDHIMHAEYAEVPQNVVDAVLACKARGNKVVAVGTTSVRSLESAARASQNGLISPFFDDTQIFIYPGFEYQVVDALITNFHLPESTLIMLVSAFAGYKNTMNAYKEAVAEKYRFFSYGDAMFINRNPMAAKEKVS

SEQ ID NO: 73801 - protein, 355 aa, Xenorhabdus bovienii
  REGION 1..355: note = tr|D3V0X4|D3V0X4_XENBS S-adenosylmethionine:tRNA ribosyltransferase-isomerase OS=Xenorhabdus bovienii (strain SS-2004) OX=406818 GN=queA PE=3 SV=1
MRVADFTFELPEELIAHYPQPQRSGCRLLALDGKTGGLTHGIFTDVLDKLEAGDLLVFNNTRVIPARLFGRKATGGKLEVLVERMLDNKRVLAHVRASKALKEGAELLLGEDESIRATMLARHDTLFEIRFDDDRDVLTILDEIGHMPLPPYIARPDEESDRELYQTVYSERPGAVAAPTAGLHFDEPLLAALREKGVDMAFVTLHVGAGTFQPVRVETIEDHIMHAEYAEVPQNVVDAVLACKARGNKVVAVGTTSVRSLESAARACQNGLIEPFFDDTQIFIYPGFEYQVVDALITNFHLPESTLIMLVSAFAGYQNTMNAYKEAVAEKYRFFSYGDAMFIHRNPMATKEKVS

SEQ ID NO: 73802 - protein, 370 aa, Xenorhabdus budapestensis
  REGION 1..370: note = tr|A0A2D0J1K9|A0A2D0J1K9_XENBU S-adenosylmethionine:tRNA ribosyltransferase-isomerase; OS = Xenorhabdus budapestensis OX=290110 GN=queA PE=3 SV=1
MRVADFTFELPEELIAHYPQPQRSGCRLLSLDGETGELAHGIFTDVLDKLETGDLLVFNNTRVIPARLFGRKATGGKLEVLVERMLDNKRVLAHVRASKAPKEGAELILGEDKALGENILGANNGIKATMLARHDALFEIRFDDERDVLTILDEIGHMPLPPYIARPDEEADRELYQTVYNERPGAVAAPTAGLHFDEPLLAALREKGVEMAFVTLHVGAGTFQPVRVETIEDHVMHAEYAEVPQNVVDAVLACKARGNKVVAVGTTSVRSLESAARACQDGLIAPFFDDTQIFIYPGFEYQVVDALITNFHLPESTLIMLVSAFAGYKNTMGAYKAAVAEKYRFFSYGDAMFINRNSLAAKELWLQKKQ

SEQ ID NO: 73803 - protein, 369 aa, Xenorhabdus cabanillasii
  REGION 1..369: note = tr|A0A3D9U9Z4|A0A3D9U9Z4_9GAMM S-adenosylmethionine:tRNA ribosyltransferase-isomerase; OS = Xenorhabdus cabanillasii OX=351673 GN=queA PE=3 SV=1
MRVADFTFELPEELIAHYPQSQRSGCRLLSLNGETGELTHGIFTDVLDKLEAGDLLVFNNTRVIPARLFGRKATGGKLEVLVERMLDNKRVLAHVRASKAPKEGTELILGEDKSLGDNTFGANNGIKATMLARHDALFEIRFDDERDVLTILDEIGHMPLPPYIARPDEEADRELYQTVYNERPGAVAAPTAGLHFDEPLLAALREKGVEMAFVTLHVGAGTFQPVRVETIEDHVMHAEYAEVPQNVVDAVLACKARGNKVVAVGTTSVRSLESAARACQDDLIAPFFDDTQIFIYPGFEYQVVDALITNFHLPESTLIMLVSAFAGYKNTMGAYKAAVAEKYRFFSYGDAMFINRNSLAAKELWLQKK

SEQ ID NO: 73804 - protein, 369 aa, Xenorhabdus cabanillasii
  REGION 1..369: note = tr|W1IZN7|W1IZN7_9GAMM S-adenosylmethionine:tRNA ribosyltransferase-isomerase OS=Xenorhabdus cabanillasii JM26 OX=1427517 GN=queA PE=3 SV=1
MRVADFTFELPEELIAHYPQSQRSGCRLLSLNGETGELTHGIFTDVLDKLEAGDLLVFNNTRVIPARLFGRKATGGKLEVLVERMLDNKRVLAHVRASKAPKEGAELILGEDKSLGDNTFGANNGIKATMLARHDALFEIRFDDERDVLTILDEIGHMPLPPYIARPDEEADRELYQTVYNERPGAVAAPTAGLHFDEPLLAALREKGVEMAFVTLHVGAGTFQPVRVETIEDHVMHAEYAEVPQNVVDAVLACKARGNKVVAVGTTSVRSLESAARACQDGLIAPFFDDTQIFIYPGFEYQVVDALITNFHLPESTLIMLVSAFAGYKNTMGAYKAAVAEKYRFFSYGDAMFINRNSLAAKELWLQKK

SEQ ID NO: 73805 - protein, 366 aa, Xenorhabdus doucetiae
  REGION 1..366: note = tr|A0A068QRR6|A0A068QRR6_9GAMM S-adenosylmethionine:tRNA ribosyltransferase-isomerase; OS = Xenorhabdus doucetiae OX=351671 GN=queA PE=3 SV=1
MRVADFTFELPEELIAHYPQPQRSACRLLSLDGETGKLSHGIFTDVLDKLEAGDLLVFNNTRVIPARLFGRKATGGKLEVLVERMLDDKRVLAHIRASKAPKEGTELILGGDVLGEDALGEARSIKATMLARHDTLFEIRFDDERDVLTILDQIGHMPLPPYIARPDEDADRELYQTVYSERPGAVAAPTAGLHFDEPLLAALREKGVEMAFVTLHVGAGTFQPVRVETIEDHVMHAEYAEVPQEVVDAILACKARGNNVVAVGTTSVRSLESAARACQDGIIAPFFGDTQIFIYPGFEYQVVDALITNFHLPESTLIMLVSAFAGYQNTMSAYKEAVAEKYRFFSYGDAMFINRNRMAAKEMVSK

SEQ ID NO: 73806 - protein, 357 aa, unidentified
  source 1..357: note = Xenorhabdus eapokensis
  REGION 1..357: note = tr|A0A1Q5TVY8|A0A1Q5TVY8_9GAMM S-adenosylmethionine:tRNA ribosyltransferase-isomerase; OS = Xenorhabdus eapokensis OX=1873482 GN=queA PE=3 SV=1
MRVADFTFELPEELIAHYPQPQRSACRLLSLDGETGNLTHGVFTDVLDKLEAGDLLVFNNTRVIPARLFGRKATGGKLEVLVERMLDDKRVLAHVRASKAPKEGTELILGETQDIKATMLARHDTLFEIRFDDERDVLTILEQIGHMPLPPYIARPDEAADRELYQTVYNERPGAVAAPTAGLHFDEPLLAALREKGIEMAFVTLHVGAGTFQPVRVETIEDHVMHAEYAEVPQDVVDAVLACKARGNRVIAVGTTSVRSLESAARACQDGMIAPFFDDTQIFIYPGFEYQVVDALITNFHLPESTLIMLVSAFAGYKNTMNAYKEAVAEKYRFFSYGDAMFINRNKMAVKERVSEE

SEQ ID NO: 73807 - protein, 357 aa, Xenorhabdus ehlersii
  REGION 1..357: note = tr|A0A2D0IQ68|A0A2D0IQ68_9GAMM S-adenosylmethionine:tRNA ribosyltransferase-isomerase; OS = Xenorhabdus ehlersii OX=290111 GN=queA PE=3 SV=1
MRVADFTFELPEELIAHYPQPQRSACRLLSLDGETGKLTHGVFTDVLDKLEAGDLLVFNNTRVIPARLFGRKATGGKLEVLVERMLDDKRVLAHVRASKTPKEGTELILGETQNIKATMLARHDTLFEIRFDDERDVLTILDQIGHMPLPPYIARPDEDADRELYQTVYNERPGAVAAPTAGLHFDEPLLAALREKGIEMAFVTLHVGAGTFQPVRVETIEDHVMHAEYAEVPQDVVDAVLACKARGNRVIAVGTTSVRSLESAARACQDGVIAPFFDDTQIFIYPGFEYQVVDALITNFHLPESTLIMLVSAFAGYKNTMNAYKEAVAEKYRFFSYGDAMFINRNKMAVKERVSEE

SEQ ID NO: 73808 - protein, 366 aa, Xenorhabdus hominickii
  REGION 1..366: note = tr|A0A2G0Q8L8|A0A2G0Q8L8_9GAMM S-adenosylmethionine:tRNA ribosyltransferase-isomerase; OS = Xenorhabdus hominickii OX=351679 GN=queA PE=3 SV=1
MRVADFTFELPEELIAHYPQSQRSGCRLLSLNGETGELTHGIFTDVLNKLEAGDLLVFNNTRVIPARLFGRKTTGGKLEVLVERMLDNKRVLAHVRASKAPKEGAELILGEDVLGKEVLGEERSIKATMLARHDTLFEIRFDDDRDVLAILDEIGHIPLPPYIARPDEDADRELYQTVYSERPGAVAAPTAGLHFDEPLLAALREKGVEMAFVTLHVGAGTFQPVRVETIEDHVMHAEYAEVPQNVVDAVLACKARGNKVIAVGTTSVRSLESAARACQDGVIAPFFDDTQIFIYPGFEYQVVDALITNFHLPESTLIMLVSAFAGYKNTMNAYKEAVTEKYRFFSYGDAMFINRNTVASKETLSK

SEQ ID NO: 73809 - protein, 366 aa, Xenorhabdus innexi
  REGION 1..366: note = tr|A0A1N6N1B1|A0A1N6N1B1_9GAMM S-adenosylmethionine:tRNA ribosyltransferase-isomerase; OS = Xenorhabdus innexi OX=290109 GN=queA PE=3 SV=1
MRVADFTFELPEELIAHYPQPQRSGCRLLSLDGETGELTHGIFTDVLNKLEAGDLLVFNNTRVIPARLFGRKATGGKLEVLVERMLDDKRVLAHVRASKAPKEGAELLLGEDKASGDIKVVKATMLARHEALFEIRFDDERDVLTVLNEIGHMPLPPYIARPDEESDKELYQTVYNERPGAVAAPTAGLHFDEPLLAALREKGVEMAFVTLHVGAGTFQPVRVETIEDHVMHAEYAEVPQDVVDAVLACKARGNKVVAVGTTSVRSLESAARACQNGLIAPFFDDTQIFIYPGFEYQVVDTLITNFHLPESTLIMLVSAFAGYKNTMRAYKEAVTEKYRFFSYGDAMFINRNSMAAKEMVAEEKIA

SEQ ID NO: 73810 - protein, 357 aa, unidentified
  source 1..357: note = Xenorhabdus ishibashii
  REGION 1..357: note = tr|A0A2D0KI73|A0A2D0KI73_9GAMM S-adenosylmethionine:tRNA ribosyltransferase-isomerase; OS = Xenorhabdus ishibashii OX=1034471 GN=queA PE=3 SV=1
MRVADFTFELPEELIAHYPQPQRSACRLLSLDGETGNLTHGVFTDVLDKLEAGDLLVFNNTRVIPARLFGRKATGGKLEVLVERMLDDKRVLAHVRASKAPKEGTELILGETQDIKATMLARHDTLFEIRFDDERDVLTILEQIGHMPLPPYIARPDEDADRELYQTVYNERPGAVAAPTAGLHFDEPLLAALREKGIEMAFVTLHVGAGTFQPVRVETIEDHVMHAEYAEVPQDVVEAVLACKARGNRVIAVGTTSVRSLESAARACQNGLIAPFFDDTQIFIYPGFEYQVVDALITNFHLPESTLIMLVSAFAGYKNTMNAYKEAVAEKYRFFSYGDAMFINRNKIAAKERVSEE

SEQ ID NO: 73811 - protein, 367 aa, Xenorhabdus japonica
  REGION 1..367: note = tr|A0A1I4YK37|A0A1I4YK37_9GAMM S-adenosylmethionine:tRNA ribosyltransferase-isomerase; OS = Xenorhabdus japonica OX=53341 GN=queA PE=3 SV=1
MRVADFTFELPEELIAHYPQPQRSACRLLSLNGETGKLTHGIFTDVLDKLEAGDLLVFNNTRVIPARLFGRKATGGKLEVLVERMLDNKRVLAHVRASKAPKEGAELILGEDVLGETQSIKATMLARHDTLFEIRFDDERDVLTILDQIGHMPLPPYIARPDEDADRELYQTVYSERPGAVAAPTAGLHFDEPLLAALRKKGVEMAFVTLHVGAGTFQPVRVETIEDHVMHAEYAEVPQNVVDAVLACKARGNRVIAVGTTSVRSLESAARACQDGIISPFFDDTQIFIYPGFEYQVVDALITNFHLPESTLIMLVSAFAGYKNTMNAYKEAVAEKYRFFSYGDAMFINRNTVPSKELAASDAAVSK

SEQ ID NO: 73812 - protein, 366 aa, unidentified
  source 1..366: note = Xenorhabdus khoisanae
  REGION 1..366: note = tr|A0A0J5FV59|A0A0J5FV59_9GAMM S-adenosylmethionine:tRNA ribosyltransferase-isomerase; OS = Xenorhabdus khoisanae OX=880157 GN=queA PE=3 SV=1
MRVADFTFELPEELIAHYPQPQRSACRLLSLDGETGTLTHGVFTDVLDKLEAGDLLVFNNTRVIPARLFGRKATGGKLEVLVERMLDNKRVLAHVRASKAPKEGAELILGEDVLGEDRSIKATMLARHDTLFEIRFDDDRDVLTILDQIGHMPLPPYIARPDEDADRELYQTVYSERPGAVAAPTAGLHFDEPLLAALREKGIEMAFVTLHVGAGTFQPVRVETIEDHVMHAEYAEVPQNVVDAVLACKARGNKVVAVGTTSVRSLESAARACQNGIIASFFDDTQIFIYPGFEYQVVDALITNFHLPESTLIMLVSAFAGYKNTMSAYKEAVTEKYRFFSYGDAMFISRNMMASKEMVSKEAVLK

SEQ ID NO: 73813 - protein, 374 aa, Xenorhabdus koppenhoeferi
  REGION 1..374: note = tr|A0A1I7JLE7|A0A1I7JLE7_9GAMM S-adenosylmethionine:tRNA ribosyltransferase-isomerase; OS = Xenorhabdus koppenhoeferi OX=351659 GN=queA PE=3 SV=1
MHVADFTFELPEELIAHYPQPQRSGCRLLSLDGETGKLTHGIFTDVLDKLEVGDLLIFNNTRVIPARLFGRKATGGKLEVLVERILDNKRVLAHVRASKAPKEGAELILGEDVLGEDVLGEDVLGEDRSIKATMLARHDTLFEIRFDNYRDVLTILDQIGHMPLPPYITRPDEDADRELYQTVYNERPGAVAAPTAGLHFDEPLLAALREKGVEMAFVTLHVGAGTFQPVRVETIEDHTMHAEYAEVPQEVVDAVLACKARGNKVIAVGTTSVRSLESAAKACQDGIIAPFFDDTRIFIYPGFEYQVVDVLITNFHLPESTLIMLVSAFAGYKNTMNAYKEAVTEKYRFFSYGDAMFINRNILASTELISKIAV

SEQ ID NO: 73814 - protein, 357 aa, Xenorhabdus kozodoii
  REGION 1..357: note = tr|A0A2D0L1P6|A0A2D0L1P6_9GAMM S-adenosylmethionine:tRNA ribosyltransferase-isomerase; OS = Xenorhabdus kozodoii OX=351676 GN=queA PE=3 SV=1
MRVADFTFELPEELIAHYPQPQRSACRLLSLDGETGKLTHGIFTDVLDKLEAGDLLVFNNTRVIPARLFGRKATGGKLEVLVERVLDNKRVLAHVRASKAPKEGAELILGETESIKATMLARHDTLFEIRFDDERDVLAILDQIGHMPLPPYIARPDEDADRELYQTVYSERPGAVAAPTAGLHFDEPLLAALRDKGIEMAFVTLHVGAGTFQPVRVETIEHHVMHAEYAEVPQDVVDAVLACKARGNRVIAVGTTSVRSLESAAKACQDGIIAPFFDDTQIFIYPGFEYQIVDALITNFHLPESTLIMLVSAFAGYQNTMHAYKEAVAEKYRFFSYGDAMFINRNPMAVKERVSKA

SEQ ID NO: 73815 - protein, 361 aa, Xenorhabdus mauleonii
  REGION 1..361: note = tr|A0A1I3QFA8|A0A1I3QFA8_9GAMM S-adenosylmethionine:tRNA ribosyltransferase-isomerase; OS = Xenorhabdus mauleonii OX=351675 GN=queA PE=3 SV=1
MRVADFTFELPEELIAHYPQPQRSGCRLLSLDGETGKLTHGIFTDVLDKLEAGDLLVFNNTRVIPARLFGRKATGGKLEVLVERMLDNKRVLAHVRASKAPKEGAELILGEDVIGEEQSIKATMLARHDTLFEIRFDDERDVLTILEQVGHMPLPPYIARPDEDADRELYQTVYSERPGAVAAPTAGLHFDEPLLAALKEKGVEMSFVTLHVGAGTFQPVRVETIEDHVMHAEYAEVPQDVVDAVLACKARGNKVVAVGTTSVRSLESAARACQDGVIAPFFDDTQIFIYPGFEYQVVDALITNFHLPESTLIMLVSAFAGYKNTMNAYKEAVAEKYRFFSYGDAMFINRNEAASKEMISK

SEQ ID NO: 73816 - protein, 366 aa, Xenorhabdus miraniensis
  REGION 1..366: note = tr|A0A2D0JNG2|A0A2D0JNG2_9GAMM S-adenosylmethionine:tRNA ribosyltransferase-isomerase; OS = Xenorhabdus miraniensis OX=351674 GN=queA PE=3 SV=1
MRVADFTFELPDELIAHYPQPQRSACRLLSLDGETGKLTHGVFTDVLDKLEAGDLLVFNNTRVIPARLFGRKATGGKLEVLVERMLDNKRVLAHVRASKAPKEGAELILGEDVLGEAQSIKATMLARHDTLFEIRFDDDRDVLTILDQIGHMPLPPYIARPDEDADRELYQTVYSERPGAVAAPTAGLHFDEPLLAALREKGIEMAFVTLHVGAGTFQPVRVETIENHVMHAEYAEVPQNVVDAVLACKARGNKVVAVGTTSVRSLESAARACQNGIIAPFFDDTQIFIYPGFEYQVVDALITNFHLPESTLIMLVSAFAGYKNTMSAYKEAVTEKYRFFSYGDAMFISRNMMASKEMASKEAVLK

SEQ ID NO: 73817 - protein, 359 aa, Xenorhabdus nematophila
  REGION 1..359: note = tr|N1NR25|N1NR25_XENNE S-adenosylmethionine:tRNA ribosyltransferase-isomerase OS=Xenorhabdus nematophila F1; OX = 1306162 GN=queA PE=3 SV=1
MRVADFTFELPEELIAHYPQPQRSGCRLLSLDGETGELTHGIFTDVLDKLEAGDLLVFNNTRVIPARLFGRKATGGKLEVLVERMLDNKRVLAHVRASKAPKEGAELILGEDVLGEDRSIKATMLARHDTLFEIRFDDDRDVLTILDQIGHMPLPPYIARPDEDADRELYQTVYSERPGAVAAPTAGLHFDEPLLAALREKGVEMAFVTLHVGAGTFQPVRVETIEDHVMHAEYAEVPQDVVDAVLACKARGNRVIAVGTTSVRSLESAAKACQGEIIAPFFDDTRIFIYPGFEYQVVDALITNFHLPESTLIMLVSAFAGYKNTMNAYKEAVTEKYRFFSYGDAMFINRNSIASQEMV

SEQ ID NO: 73818 - protein, 359 aa, Xenorhabdus nematophila; identical to SEQ ID NO: 73817
  REGION 1..359: note = tr|A0A0A8NTU4|A0A0A8NTU4_XENNE S-adenosylmethionine:tRNA ribosyltransferase-isomerase; OS = Xenorhabdus nematophila str. Websteri OX=1437826; GN = queA PE=3 SV=1

SEQ ID NO: 73819 - protein, 372 aa, Xenorhabdus poinarii
  REGION 1..372: note = tr|A0A068R1T6|A0A068R1T6_9GAMM S-adenosylmethionine:tRNA ribosyltransferase-isomerase; OS = Xenorhabdus poinarii G6 OX=1354304 GN=queA PE=3 SV=1
MRVTDFTFELPEELIAHYPQPQRSACRLLSLHGETGELTHGVFTDVLDKLEAGDLLVFNNTRVIPARLFGRKATGGKLEVLVERMLDDKRVLAHVRASKAPKEGTELILGEDILGEAKGIKATMLARHDALFEIRFDDERDVLTILDQIGHMPLPPYIARPDEDADRELYQTVYSERPGAVAAPTAGLHFDEPLLAALREKGIEMAFVTLHVGAGTFQPVRVETIEDHVMHAEYAEVPQHVVDAVLACKARGNRVIAVGTTSVRSLESAAKACKDGLIAPFFGDTQIFIYPGFEYQVIDALITNFHLPESTLIMLVSAFAGYKNTMNAYREAVAEKYRFFSYGDAMFIHRNARASTEWVNPTERLSAASVAK

SEQ ID NO: 73820 - protein, 370 aa, Xenorhabdus sp.
  REGION 1..370: note = tr|A0A2D0L8A4|A0A2D0L8A4_9GAMM S-adenosylmethionine:tRNA ribosyltransferase-isomerase; OS = Xenorhabdus sp. KJ12.1 OX=1851571 GN=queA PE=3 SV=1
MRVADFTFELPEELIAHYPQPQRSGCRLLSLDGETGELTHGIFTDVLNKLEAGDLLVFNNTRVIPARLFGRKATGGKLEVLVERMLDDKRVLAHVRASKAPKEGTELILGEDKAPDGNQIVKATMLARHDALFEIRFDDKRDVLTILDEIGHMPLPPYIARPDEESDKELYQTVYNERPGAVAAPTAGLHFDEPLLAALREKGVEMAFVTLHVGAGTFQPVRVDTIEDHIMHAEYAEVPQNVVDAVLACKARGNKVVAVGTTSVRSLESAARACQDGLIAPFFDDTQIFIYPGFEYQVVDTLITNFHLPESTLIMLVSAFAGYKNTMSAYKEAVTEKYRFFSYGDAMFINRNSIAAKEMVEVATDIDQSE

SEQ ID NO: 73821 - protein, 357 aa, Xenorhabdus sp.
  REGION 1..357: note = tr|A0A0M0TA59|A0A0M0TA59_9GAMM S-adenosylmethionine:tRNA ribosyltransferase-isomerase; OS = Xenorhabdus sp. GDc328 OX=742178 GN=queA PE=3 SV=1
MRVADFTFELPEELIAHYPQPQRSACRLLSLDGETGKLAHGVFTDVLEKLEAGDLLVFNNTRVIPARLFGRKATGGKLEVLVERMLDSKRVLAHVRASKAPKEGAELILGEAQSIKATMLARHDTLFEIRFDDERDVLTILDQIGHMPLPPYIARPDEDADRELYQTVYSERPGAVAAPTAGLHFDEPLLAALRAKGIEMAFVTLHVGAGTFQPVRVETIEDHVMHAEYAEVPQDVVDAVLACKARGNRVIAVGTTSVRSLESAARACQDGIIAPFFDDTQIFIYPGFEYQVVDALITNFHLPESTLIMLVSAFAGYKNTMNAYKEAVAKEYRFFSYGDAMFINRNKMAAKERVLKE

SEQ ID NO: 73822 - protein, 370 aa, Xenorhabdus stockiae
  REGION 1..370: note = tr|A0A2D0KSE6|A0A2D0KSE6_9GAMM S-adenosylmethionine:tRNA ribosyltransferase-isomerase; OS = Xenorhabdus stockiae OX=351614 GN=queA PE=3 SV=1
MRVADFTFELPEELIAHYPQPQRSGCRLLSLDGETGELTHGIFTDVLNKLEAGDLLVFNNTRVIPARLFGRKATGGKLEVLVERMLDDKRVLAHVRASKAPKEGTELILGEDKALDGNQIVKATMLARHDALFEICFDDERDVLTILDEIGHMPLPPYIARPDEESDKELYQTVYNERPGAVAAPTAGLHFDEPLLAALREKGVEMAFVTLHVGAGTFQPVRVDTIEDHIMHAEYAEVPQNVVDAVLACKARGNKVVAVGTTSVRSLESAARACQDGLIAPFFDDTQIFIYPGFEYQVVDTLITNFHLPESTLIMLVSAFAGYKNTMSAYKEAVTEKYRFFSYGDAMFINRNSIAAKEMVEVATDIDQSE

SEQ ID NO: 73823 - protein, 361 aa, Xenorhabdus szentirmaii
  REGION 1..361: note = tr|W1J0A3|W1J0A3_9GAMM S-adenosylmethionine:tRNA ribosyltransferase-isomerase OS=Xenorhabdus szentirmaii DSM 16338 OX=1427518 GN=queA PE=3 SV=1
MRVADFTFELPEELIAHYPQPQRSGCRLLSLNGETGKLTHGIFTDVLNKLEAGDLLVFNNTRVIPARLFGRKATGGKLEVLVERMLDNKRVLAHVRASKAPKEGAELILGEDVLGEGQSVKATMLARHDTLFEIRFDDERDVLAILDQIGHMPLPPYIARPDEDADRELYQTVYSERPGAVAAPTAGLHFDESLLAALNEKGVEMAFVTLHVGAGTFQPVRVETIEDHVMHAEYAEVPQNVVDAVLACKVRGNRVIAVGTTSVRSLESAARACQDGIIAPFFDDTQIFIYPGFEYQVVDALITNFHLPESTLIMLVSAFAGYKNTMNAYKEAVEEKYRFFSYGDAMFISRNMQASKETVSK

SEQ ID NO: 73824 - protein, 357 aa, unidentified
  source 1..357: note = Xenorhabdus thuongxuanensis
  REGION 1..357: note = tr|A0A1Q5TQR0|A0A1Q5TQR0_9GAMM S-adenosylmethionine:tRNA ribosyltransferase-isomerase; OS = Xenorhabdus thuongxuanensis OX=1873484 GN=queA PE=3 SV=1
MRVADFTFELPEELIAHYPQPQRSACRLLSLDGETGKLTHGVFTDVLDKLEAGDLLVFNNTRVIPARLFGRKATGGKLEVLVERMLDDKRVLAHVRASKAPKEGTELILGETQDIKATMLARHDTLFEIRFDDERDVLTILEQIGHMPLPPYIARPDEAADRELYQTVYNERPGAVAAPTAGLHFDEPLLAALREKGIEMAFVTLHVGAGTFQPVRVETIEDHVMHAEYAEVPQDVVDAVLACKARGNRVIAVGTTSVRSLESAARACQGGMLAPFFDDTQIFIYPGFEYQVVDALITNFHLPESTLIMLVSAFAGYKNTMNAYKEAVAEKYRFFSYGDAMFINRNKIAAKERVLEE

SEQ ID NO: 73825 - protein, 378 aa, Xenorhabdus vietnamensis
  REGION 1..378: note = tr|A0A1Y2SIV6|A0A1Y2SIV6_9GAMM S-adenosylmethionine:tRNA ribosyltransferase-isomerase; OS = Xenorhabdus vietnamensis OX=351656 GN=queA PE=3 SV=1
MRVADFTFELPEELIAHYPQPQRSACRLLSLDGETGKLTHGVFTDVLDKLEAGDLLVFNNTRVIPARLFGRKATGGKLEVLVERMLDNKRVLAHVRASKAPKEGAELILGEDVLGKAQCIKATMLTRHDTLFEIRFDDERDVLTILDQIGHMPLPPYIARPDEDADRELYQTVYSERPGAVAAPTAGLHFDEPLLAVLREKGIEMAFVTLHVGAGTFQPVRVETIEDHVMHAEYAEVPKGVVDAVLACKARGNRVIAVGTTSVRSLESAAKACQDGMITPFFDDTQIFIYPGFEYQVVDALITNFHLPESTLIMLVSAFAGYKNTMSAYKEAVAEKYRFFSYGDAMFINRNTVASKELVESKELMALEEQVSEETISK

SEQ ID NO: 73826 - protein, 345 aa, unidentified
  source 1..345: note = Xinfangfangia sp.
  REGION 1..345: note = tr|A0A3P5XB23|A0A3P5XB23_9RHOB S-adenosylmethionine:tRNA ribosyltransferase-isomerase; OS = Xinfangfangia sp. CIP 111625 OX=2483812 GN=queA PE=3; SV = 1
MRLSDFDFHLPEALIATRPARPRTSARLLLAEGDGIRDLHVRDLTDLLRPGDLMVLNNTKVIPARLTGTRARGEALAKIEVTLLEPQAKGGWRALAKPLRKLKEGEEIVFSDRLSALVAEKGETDLRLEFSLSGEDFDAALNEAGQMPLPPYIAAKRPADAQDATDYQTVFARHSGAVAAPTASLHFDQDLLEALRAKGVSFTEVTLHVGAGTFLPVKVEDVASHKMHAEWGQVGAGAAQAIRETKRAGGRVIPVGTTALRLIETAARETGEIAPWQGWTDIFIRPGFPFRVSDALMTNFHLPKSTLLMLVSALMGKDRIGKIYDHAIRNGYRFFSYGDSSLLIP

SEQ ID NO: 73827 - protein, 346 aa, Xylella fastidiosa
  REGION 1..346: note = tr|A0A439EVF1|A0A439EVF1_XYLFS S-adenosylmethionine:tRNA ribosyltransferase-isomerase; OS = Xylella fastidiosa subsp. sandyi OX=671135 GN=queA PE=3; SV = 1
MKKSDFHYDLPEELIAQGPLPERSASRLMLVPSAPEQFQDCYVRDLPELLQPGDLLVFNDTRVIPARLFGRKVSGGRVEVLIERFLGTHQAVVQLRTSRSLKVGNRILLDAGGHAEVLGRDGEFYLLSFDVESPLEQWLSDVGQLPLPPYIHREPDEYDRERYQTVFARAVGAVAAPTAGLHFDESLLARLRARGVEFGYITLHVGAGTFQPVRVALLQEHVMHSEWFKVGAELVEQVRSARARGGRVIAVGTTVVRSLESAMRHGELQPFVGETQIFIFPGYCIRSVDAMVTNFHLPESTLLMLVAAFAGRTRILDAYYHAVQQRYRFFSYGDAMLLFPRNAGEQ

SEQ ID NO: 73828 - protein, 347 aa, Xylella fastidiosa
  REGION 1..347: note = sp|Q9PDR5|QUEA_XYLFA S-adenosylmethionine:tRNA ribosyltransferase-isomerase OS=Xylella fastidiosa (strain 9a5c) OX=160492 GN=queA PE=3 SV=1
MLKKSDFHYDLPEELIAQGPLPERSASRLMLVPSAPEQFQDCYVRDLPELLQPGDLLVFNDTRVIPARLFGRKVSGGRVEILIERFLGTHQAVVQLRTSRSLKVGNRILLDAGGHAGVLGRDGDFYLLSFDVESPLEQWLSDVGQLPLPPYIHREPDEYDRERYQTVFARAVGAVAAPTAGLHFDESLLARLRARGVEFGYITLHVGAGTFQPVRVALLQQHVMHSEWFKVGAELVEQVRSARARGGRVIAVGTTVVRSLESAMRHGELQPFVGETQIFIFPGYCIRSVDAMVTNFHLPESTLLMLVAAFAGRTRILDAYYHAVQQRYRFFSYGDAMLLFPRNAGEQ

SEQ ID NO: 73829 - protein, 346 aa, unidentified
  source 1..346: note = Xylella taiwanensis
  REGION 1..346: note = tr|Z9JKN5|Z9JKN5_9GAMM S-adenosylmethionine:tRNA ribosyltransferase-isomerase OS=Xylella taiwanensis; OX = 1444770 GN=queA PE=3 SV=1
MKKSDFHYNLPEDLIAQAPLPERSASRLMLVPPIPERLQDCYVRDLPELLQPGDLLVFNDTRVIPARLFGKKVSGGRVEILIERLLGAQQVAAQLRTSRPPKVGNRILLDAGGRVEVLGRDGEFYLLGFEVDLPLEQWLSDVGQLPLPPYIRREPEQNDRERYQTVFARAAGAVAAPTAGLHFDESLLARLRARGIKFGYITLHVGAGTFQPVRVALLQQHVMHSEWFNVGAELVEQVRSTRARGGRVIAVGTTVVRSLESAMRNGELQPFVGETRIFIFPGYCIRSVDAMVTNFHLPESTLLMLVAAFAGRTRVLEAYRHAVQEHYRFFSYGDAMLLFPRNAGEQ

SEQ ID NO: 73830 - protein, 375 aa, Xylophilus ampelinus
  REGION 1..375: note = tr|A0A318SFX0|A0A318SFX0_9BURK S-adenosylmethionine:tRNA ribosyltransferase-isomerase; OS = Xylophilus ampelinus OX=54067 GN=queA PE=3 SV=1
MPSPAPAAPRDFTVADFDFALPASLIAQHPAAERSGSRLLDGTGDAPADRAFRDLPGLLRAGDLLVFNDTRVVKARLFGEKPTGGKAELLVERVLQGPEIVAHVKVSKKPPVGTTLRMVGGFGATLLGRWPAEDGPLFRLRLDGPAGETPYDLMERHGHVPLPPYIERDQQHEGVADAAEDERRYQTVFARAPGAVAAPTAALHFDDAVLAALEARGVRRAAVTLHVGAGTFQPVKVERIADHRMHHERYDVPAATRQAIADCRARGGRVVAVGTTTVRTLESWAGSGEPEGDTDIFITPGFRFRVVDVLLTNFHLPRSTLMMLVSAFAGYERVMGLYRHAVAEEYRFFSYGDAMLLRRSRQARAPVPGMPGHAG

SEQ ID NO: 73831 - protein, 363 aa, Xylophilus sp.
  REGION 1..363: note = tr|A0A0Q4FYQ6|A0A0Q4FYQ6_9BURK S-adenosylmethionine:tRNA ribosyltransferase-isomerase; OS = Xylophilus sp. Leaf220 OX=1735686 GN=queA PE=3 SV=1
MPSSASSAPATPRDFTVADFDFDLPPSLIAQYPAAERSGSRLLDGTGDAPADRAFRELPGLLRAGDLLLFNDTRVVKARLFGEKPTGGKAELLVERVLQGQEIVAHVKVSKKPPVGTTLRMAGGFGATLLGRWPKEDGPLFRFRLDGTAGETPYDLMERHGHVPLPPYIERDQQHEDASDTDEDARRYQTVFARVPGAVAAPTAALHFDDAVLAQLEACGVRRAAVTLHVGAGTFQPVKVERIADHHMHHERYDVPAATQQAIADCRARGGRVVAVGTTTVRTLESWARSGQAAGDTDIFITPGFRFQVVDVLLTNFHLPKSTLMMLVSAFAGYERVMGLYRHAVAQEYRFFSYGDAMLLERR

SEQ ID NO: 73832 - protein, 349 aa, Yangia pacifica
  REGION 1..349: note = tr|A0A2U8HD83|A0A2U8HD83_9RHOB S-adenosylmethionine:tRNA ribosyltransferase-isomerase; OS = Yangia pacifica OX=311180 GN=queA PE=3 SV=1
MQLSDFDFPLPEDLIATRPAHPRSSARLLVAEGETITDAIVRDLTDWLRPGDRLVLNDTKVIPARLSGLRHRSGAQGETEARIEITLLEPRADGLWAALVKPLKKLREGETVVLSERLSATLEAREEGQGLFRFNLSGEDFDAALAEAGAMPLPPYIAAKRAADEQDKEDYQTVWARASGAVAAPTASLHFDVPLLAALKERGVEFTHVTLHVGAGTFLPVKVDDVTTHKMHGEWGEVTDVAAAEIAATKAAGGRVIPVGTTALRLIETAARGTGLIAPWRGVTDIFIYPGFDFHVADALMTNFHLPKSTLMMLVAAFMGKARMDRVYAHALAERYRFFSYGDASLLIP

SEQ ID NO: 73833 - protein, 349 aa, Yangia pacifica
  REGION 1..349: note = tr|A0A1I6NW35|A0A1I6NW35_9RHOB S-adenosylmethionine:tRNA ribosyltransferase-isomerase; OS = Yangia pacifica OX=311180 GN=queA PE=3 SV=1
MQLSDFDFPLPEDLIATRPAHPRSSARLLVAEGETITDAVVRDLTDWLHPGDRLVLNDTKVIPARLSGLRHRSSAQGETEARIEITLLEPRAGGLWAALVKPLKKLREGETVVLSERLSATLEAREEGQGLFRFNLTGEDFDAALAEAGAMPLPPYIAAKRAADEQDKEDYQTVWARTSGAVAAPTASLHFDEALLAALTARGVEFTHVTLHVGAGTFLPVKVDDVTTHKMHGEWGEVTETAAAEIAATKAAGGRVIPVGTTALRLIETAARGTGAIAPWTGVTDIFIYPGFQFHVADALMTNFHLPKSTLMMLVAAFMGKARMDRVYAHALAERYRFFSYGDASLLIP

SEQ ID NO: 73834 - protein, 349 aa, Yangia sp.
  REGION 1..349: note = tr|A0A1B1PLG5|A0A1B1PLG5_9RHOB S-adenosylmethionine:tRNA ribosyltransferase-isomerase; OS = Yangia sp. CCB-MM3 OX=1792508 GN=queA PE=3 SV=1
MQLSDFDFPLPEDLIATRPAHPRSSARLLVAEGTRITDAIVRDLTDWLQPGDRLVLNDTKVIPARLSGLRHRSSAQGETEARIEVTLLEPRAGGLWSALVKPLKKLREGETVVFSDQLSATLEAREDGQGLLRFNLTGEDFDAALAEAGAMPLPPYIAAKRAADAQDKEDYQTVWAKNSGAVAAPTASLHFDDALLAALKARGVEFTHVTLHVGAGTFLPVKVDDVTTHKMHGEWGEVTEAAASEIAATKAAGGRVIPVGTTALRLIETAARDTGAIAPWSGVTDIFIYPGFTFHVADALMTNFHLPKSTLMMLVAAFMGKERMDRVYAHAIAERYRFFSYGDASLLIP

SEQ ID NO: 73835 - protein, 349 aa, Yangia sp.
  REGION 1..349: note = tr|A0A2A3JTY8|A0A2A3JTY8_9RHOB S-adenosylmethionine:tRNA ribosyltransferase-isomerase; OS = Yangia sp. SAOS 153D OX=1779329 GN=queA PE=3 SV=1
MQLSDFDFPLPEDLIATRPAHPRSSARLLVAEGETITDAIVRDLTDWLRPGDRLVLNDTKVIPARLSGLRHRSSAQGETEARIEITLLEPRAGGLWAALVKPLKKLREGETVVLSERLSATLEAREEGQGLFRFNLTGEDFDAALAEAGAMPLPPYIAAKRAADEQDKEDYQTVWARTSGAVAAPTASLHFDAPLLAALKDRGIEFTHVTLHVGAGTFLPVKVDDVTTHKMHGEWGEVTDSAAAEIAATKAAGGRVIPVGTTALRLIETAARESGAIAPWTGVTDIFIYPGFEFHVADALMTNFHLPKSTLMMLVAAFMGKARMDRVYAHALAERYRFFSYGDASLLIP

SEQ ID NO: 73836 - protein, 356 aa, Yersinia aldovae
  REGION 1..356: note = tr|A0A0T9UGZ1|A0A0T9UGZ1_YERAL S-adenosylmethionine:tRNA ribosyltransferase-isomerase; OS = Yersinia aldovae OX=29483 GN=queA PE=3 SV=1
MRVADFSFELPESLIAHYPQPQRSGCRLLSLDGPTGTLTHGIFTDLLDKLLPGDLLVFNNTRVIPARLFGRKASGGKLEVLVERVLDDHRVLAHVKASKAPKPGAELLLGDDESIQATMLARHDTLFELRFDDERDVFTILNAVGHMPLPPYIDRPDEDADRELYQTVYSQRPGAVAAPTAGLHFDEPMLAALREKGIEMAFVTLHVGAGTFQPVRVDTIEEHIMHSEYAEVPQDVVDAVLACKARGNRVVAVGTTSVRSLESAAKATDNGLIAPFFGDTKIFIYPGYHYQVVDALITNFHLPESTLIMLVSAFAGYKNTMNAYQQAVAEQYRFFSYGDAMFISRNPRAPQETVNP

SEQ ID NO: 73837 - protein, 356 aa, Yersinia bercovieri
  REGION 1..356: note = tr|A0A2G4U2P2|A0A2G4U2P2_YERBE S-adenosylmethionine:tRNA ribosyltransferase-isomerase; OS = Yersinia bercovieri OX=634 GN=queA PE=3 SV=1
MRVADFSFELPESLIAHYPQSQRSGCRLLSLDGPTGTLTHGIFTDLLDKLEPGDLLVFNNTRVIPARLFGRKASGGKLEVLVERVLDDHRVLAHVKASKSPKPGTELLLGDDESIRATMLARHDTLFELRFDDERDVFTILNAVGHMPLPPYIDRPDEDADRELYQTVYSERPGAVAAPTAGLHFDEPMLAALREKGIEMAFVTLHVGAGTFQPVRVDTIEEHIMHSEYAEVPQQVVDAVLACKARGKRVVAVGTTSVRSLESAAKATENGLIAPFFGDTRIFIYPGYEYQVVDALVTNFHLPESTLIMLVSAFAGYKNTMNAYQQAVAEQYRFFSYGDAMFISRNPRAPQETVHP

SEQ ID NO: 73838 - protein, 362 aa, Yersinia enterocolitica
  REGION 1..362: note = sp|A1JNT4|QUEA_YERE8 S-adenosylmethionine:tRNA ribosyltransferase-isomerase OS=Yersinia enterocolitica serotype O:8 / biotype 1B (strain NCTC 13174 / 8081); OX = 393305GN=queA PE=3 SV=1
MRVADFSFELPESLIAHYPQPQRSGCRLLSLDGPTGALTHGIFTDLLDKLVPGDLLVFNNTRVIPARLFGRKASGGKLEVLVERVLDDHRVLAHVKASKAPKPGTELLLGDDESIHATMLARHDTLFELRFDDERDVFTILDAVGHMPLPPYIDRPDEDADRELYQTVYSQRLGAVAAPTAGLHFDEPMLAALREKGIEMAFVTLHVGAGTFQPVRVETIEDHIMHSEYAEVPQEVVDAVLACKARGNRVVAVGTTSVRSLESAAKSSDNGLIAPFFGDTKIFIYPGYHYQVVDALITNFHLPESTLIMLVSAFAGYKNTMNAYQQAVAEQYRFFSYGDAMFISRNPQASTEMISLNSTDNQ

SEQ ID NO: 73839 - protein, 362 aa, Yersinia enterocolitica
  REGION 1..362: note = tr|F4N3F2|F4N3F2_YEREN S-adenosylmethionine:tRNA ribosyltransferase-isomerase OS=Yersinia enterocolitica W22703 OX=913028 GN=queA PE=3 SV=1
MRVADFSFELPESLIAHYPQPQRSGCRLLSLDGPTGALTHGIFTDLLDKLVPGDLLIFNNTRVIPARLFGRKASGGKLEVLVERVLDDHRVLAHVKASKAPKPGTELLLGDDESIHATMLARHDTLFELRFDDERDVFTILDAVGHMPLPPYIDRPDEDADRELYQTVYSQRLGAVAAPTAGLHFDEPMLAALREKGIEMAFVTLHVGAGTFQPVRVETIEDHIMHSEYAEVPQEVVDAVLACKARGNRVVAVGTTSVRSLESAAKASDNGLIAPFFGDTKIFIYPGYHYQVVDALITNFHLPESTLIMLVSAFAGYKNTMNAYQQAVAEQYRFFSYGDAMFISRNPQASTEMISLNSTDNQ

SEQ ID NO: 73840 - protein, 356 aa, Yersinia entomophaga
  REGION 1..356: note = tr|A0A3S6EYF7|A0A3S6EYF7_YERET S-adenosylmethionine:tRNA ribosyltransferase-isomerase; OS = Yersinia entomophaga OX=935293 GN=queA PE=3 SV=1
MRVADFSFELPESLIAHYPQPQRSGCRLLSLDGPSGELTHGIFTDLLDKLEAGDLLVFNNTRVIPARLFGRKASGGKLEVLVERVLDDHRVLAHVRASKAPKPGAELLLGDNESIRATMLARHDTLFELRFDEEQDVFSILNAIGHMPLPPYIDRPDEDADRELYQTVYSERPGAVAAPTAGLHFDEPLLAALREKGIEMAFVTLHVGAGTFQPVRVESIEEHIMHSEYAEVPPEVVDAVLACKARGKRVVAVGTTSVRSLESAAKACENGLIAPFFGDTRIFIYPGYQYQVVDALVTNFHLPESTLIMLVSAFAGYKNTMNAYQQAVAEQYRFFSYGDAMFISRNPLAPQETVNQ

SEQ ID NO: 73841 - protein, 356 aa, Yersinia frederiksenii
  REGION 1..356: note = tr|A0A0B6FJ94|A0A0B6FJ94_YERFR S-adenosylmethionine:tRNA ribosyltransferase-isomerase; OS = Yersinia frederiksenii Y225 OX=1454377 GN=queA PE=3 SV=1
MRVADFSFELPESLIAHYPQPQRSGCRLLSLDGPTGTLTHGIFTDLLDKLVPGDLLVFNNTRVIPARLFGRKASGGKLEVLVERVLDDHRVLAHVKASKAPKPGTELLLGDDESIRATMLARHDTLFELRFDDERDVFTILNAVGHMPLPPYIDRPDEDADRELYQTVYSQRPGAVAAPTAGLHFDEPMLAALREKGIEMAFVTLHVGAGTFQPVRVDTIEEHIMHSEYAEVPQEVVDAVLACKARGNRVVAVGTTSVRSLESAAKACDNGLIAPFFGDTRIFIYPGYQYQIVDALITNFHLPESTLIMLVSAFAGYKNTMNAYQQAVAEQYRFFSYGDAMFISRNPRAPQEPVTP

SEQ ID NO: 73842 - protein, 356 aa, Yersinia frederiksenii
  REGION 1..356: note = tr|A0A0T9UII5|A0A0T9UII5_YERFR S-adenosylmethionine:tRNA ribosyltransferase-isomerase; OS = Yersinia frederiksenii OX=29484 GN=queA PE=3 SV=1
MRVADFSFELPESLIAHYPQPQRSGCRLLSLDGPTGRLTHGIFTDLLDKLEPGDLLVFNNTRVIPARLFGRKASGGKLEVLVERVLDDSRVLAHVKASKAPKPGAELLLGDDESIRATMVARHDTLFELRFDDERDVFTILNLVGHMPLPPYIDRPDEDADRELYQTVYSQRPGAVAAPTAGLHFDEPLLAALREKGIEMAFVTLHVGAGTFQPVRVDTIEEHIMHSEYAEVPQEVVDAVLACKARGNRVVAVGTTSVRSLESAAKATENGLISPFFGDTRIFIYPGYHYQVVDALVTNFHLPESTLIMLVSAFAGYKNTMNAYQQAVAEQYRFFSYGDAMFISRNPRAPEETVNP

SEQ ID NO: 73843 - protein, 362 aa, unidentified
  source 1..362: note = Yersinia hibernica
  REGION 1..362: note = tr|A0A481QEI5|A0A481QEI5_9GAMM S-adenosylmethionine:tRNA ribosyltransferase-isomerase; OS = Yersinia hibernica OX=2339259 GN=queA PE=3 SV=1
MRVADFSFELPESLIAHYPQPQRSGCRLLSLDGPTGTLTHGIFTDLLDKLVPGDLLVFNNTRVIPARLFGRKASGGKLEVLVERVLDDHRVLAHVKASKAPKPGAELLLGDDESIQATMLARHDTLFELRFDDERDVLTILNAVGHMPLPPYIDRPDEDADRELYQTVYSQRPGAVAAPTAGLHFDEPMLAALRDKGIEMAFVTLHVGAGTFQPVRVDTIEDHIMHSEYAEVPQEVVDAVLACKARGNRVVAVGTTSVRSLESAANATDDGLIAPFFGDTRIFIYPGYHYQVVDALITNFHLPESTLIMLVSAFAGYKNTMNAYQQAVAEQYRFFSYGDAMFISRNPQASTEMISQEEAGNQ

SEQ ID NO: 73844 - protein, 356 aa, Yersinia intermedia
  REGION 1..356: note = tr|A0A0H5LVC7|A0A0H5LVC7_YERIN S-adenosylmethionine:tRNA ribosyltransferase-isomerase; OS = Yersinia intermedia OX=631 GN=queA PE=3 SV=1
MRVADFSFELPESLIAHYPQPQRSGCRLLSLDGPTGALTHGIFTDLLDKLEAGDLLVFNNTRVIPARLFGRKASGGKLEVLVERVLDDHRVLAHVKASKSPKPGTELLLGDDESIRATMLARHDTLFELRFDDERDVFTILNAVGHMPLPPYIDRPDEDADRELYQTVYSERPGAVAAPTAGLHFDEPMLAALREKGIEMAFVTLHVGAGTFQPVRVDTIEDHIMHSEYAEVPQEVVDAVLACKARGKRVVAVGTTSVRSLESAANAAENDLIAPFFDDTCIFIYPGYQYQVVDALVTNFHLPESTLIMLVSAFAGYKNTMNAYQQAVAEQYRFFSYGDAMFISRNPRAPQETVNP

SEQ ID NO: 73845 - protein, 356 aa, Yersinia intermedia
  REGION 1..356: note = tr|A0A0T9M6Q2|A0A0T9M6Q2_YERIN S-adenosylmethionine:tRNA ribosyltransferase-isomerase; OS = Yersinia intermedia OX=631 GN=queA PE=3 SV=1
MRVADFSFELPESLIAHYPQPQRSGCRLLSLDGPTGTLTHGIFTDLLDKLTPGDLLVFNNTRVIPARLFGRKASGGKLEVLVERVLDDHRVLAHVKASKAPKPGAELLLGDDESIRATMLARHDTLFELRFDDERDVFTILNAVGHMPLPPYIDRPDEDADRELYQTVYSERPGAVAAPTAGLHFDEPMLAALRAKGIEMAFVTLHVGAGTFQPVRVDTIEEHIMHSEYAEVPQDVVDAVLACKARGNRVVAVGTTSVRSLESAAKAAQNSLIAPFFGDTRIFIYPGYHYQVVDALVTNFHLPESTLIMLVSAFAGYKNTMNAYQQAVAEQYRFFSYGDAMFISRNPRAPQETVNP

SEQ ID NO: 73846 - protein, 356 aa, Yersinia kristensenii
  REGION 1..356: note = tr|A0A0T9NXP2|A0A0T9NXP2_YERKR S-adenosylmethionine:tRNA ribosyltransferase-isomerase; OS = Yersinia kristensenii OX=28152 GN=queA PE=3 SV=1
MRVADFSFELPESLIAHYPQPQRSGCRLLSLDGPTGTLTHGIFTDLLDKLVPGDLLVFNNTRVIPARLFGRKASGGKLEVLVERVLDDHRVLAHVKASKAPKPGTELLLGDDESIRATMLARHDTLFELRFDDERDVFTILNAVGHMPLPPYIDRPDEDADRELYQTVYSQRPGAVAAPTAGLHFDEPMLAALREKGIEMAFVTLHVGAGTFQPVRVDTIEEHIMHSEYAEVPQEVVDAVLACKARGNRVVAVGTTSVRSLESAAKACDSGLIAPFFGDTRIFIYPGYQYQIVDALITNFHLPESTLIMLVSAFAGYKNTMNAYQQAVAEQYRFFSYGDAMFISRNPRAPQEPVTP

SEQ ID NO: 73847 - protein, 356 aa, Yersinia kristensenii; identical to SEQ ID NO: 73841
  REGION 1..356: note = tr|A0A0T9NAL5|A0A0T9NAL5_YERKR S-adenosylmethionine:tRNA ribosyltransferase-isomerase; OS = Yersinia kristensenii OX=28152 GN=queA PE=3 SV=1

SEQ ID NO: 73848 - protein, 356 aa, Yersinia massiliensis
  REGION 1..356: note = tr|A0A2R4NSZ1|A0A2R4NSZ1_9GAMM S-adenosylmethionine:tRNA ribosyltransferase-isomerase; OS = Yersinia massiliensis OX=419257 GN=queA PE=3 SV=1
MRVADFSFELPESLIAHYPQPQRSGCRLLSLDGPTGALTHGIFTDLLDKLEAGDLLVFNNTRVIPARLFGRKASGGKLEVLVERVLDDHRVLAHVKASKSPKPGTELLLGDDESIRATMLARHDTLFELRFDDERDVFTILNAVGHMPLPPYIDRPDEDADRELYQTVYSERPGAVAAPTAGLHFDEPMLAALRDKGIEMAFVTLHVGAGTFQPVRVDTIEDHIMHSEYAEVPQEVVDAVLACKARGKRVVAVGTTSVRSLESAANAAENGLIAPFFGDTCIFIYPGYQYQVVDALVTNFHLPESTLIMLVSAFAGYKNTMNAYQQAVAEQYRFFSYGDAMFISRNPRAPQETVNP

SEQ ID NO: 73849 - protein, 356 aa, Yersinia massiliensis
  REGION 1..356: note = tr|A0A0T9PK48|A0A0T9PK48_9GAMM S-adenosylmethionine:tRNA ribosyltransferase-isomerase; OS = Yersinia massiliensis OX=419257 GN=queA PE=3 SV=1
MRVADFSFELPESLIAHYPQPQRSGCRLLSLDGPTGALTHGIFTDLLDKLEAGDLLVFNNTRVIPARLFGRKASGGKLEVLVERVLDDHRVLAHVKASKSPKPGTELLLGDDESIRATMLARHDTLFELRFDDERDVFTILNAVGHMPLPPYIDRPDEDADRELYQTVYSERPGAVAAPTAGLHFDEPMLAALREKGIEMAFVTLHVGAGTFQPVRVDTIEDHIMHSEYAEVPQEVVDAVLACKARGKRVVAVGTTSVRSLESAANAAENDLIAPFFGDTCIFIYPGYQYQVVDALVTNFHLPESTLIMLVSAFAGYKNTMNAYQQAVAEQYRFFSYGDAMFISRNPRAPQETVNP

SEQ ID NO: 73850 - protein, 367 aa, Yersinia mollaretii
  REGION 1..367: note = tr|C4S7U4|C4S7U4_YERMW S-adenosylmethionine:tRNA ribosyltransferase-isomerase OS=Yersinia mollaretii (strain ATCC 43969 / DSM 18520 / CIP 103324 / CNY 7263 / WAIP 20 4) OX=349967 GN=queA PE=3 SV=1
MKWKAMRVADFSFELPESLIAHYPQAQRSGCRLLSLDGPTGALTHGIFTDLLDKLEPGDLLVFNNTRVIPARLFGRKASGGKLEVLVERVLDDHRVLAHVKASKSPKPGTELLLGDDESIRATMLARHETLFELRFDDERDVFTILNAVGHMPLPPYIDRPDEDADRELYQTVYSERLGAVAAPTAGLHFDEPMLAALREKGIEMAFVTLHVGAGTFQPVRVDTIEEHVMHSEYAEVPQEVVDAVLACKARGKRVVAVGTTSVRSLESAANATEKGLIAPFFGDTCIFIYPGYEYQVVDALVTNFHLPESTLIMLVSAFAGYKNTMNAYQQAVAEQYRFFSYGDAMFITRNPQAGIELPPLNGADNQ

SEQ ID NO: 73851 - protein, 362 aa, Yersinia mollaretii
  REGION 1..362: note = tr|A0A0U1I320|A0A0U1I320_YERMO S-adenosylmethionine:tRNA ribosyltransferase-isomerase; OS = Yersinia mollaretii OX=33060 GN=queA PE=3 SV=1
MRVADFSFELPESLIAHYPQAQRSGCRLLSLDGPTGALTHGIFTDLLDKLEPGDLLVFNNTRVIPARLFGRKASGGKLEVLVERVLDDHRVLAHVKASKSPKPGTALLLGDDESIQATMLARHDTLFELRFDDERDVFAILNAVGHMPLPPYIDRPDEDADRELYQTVYSERLGAVAAPTAGLHFDEPMLAALREKGIEMAFVTLHVGAGTFQPVRVDTIEEHVMHSEYAEVPQEVVDAVLACKARGKRVVAVGTTSVRSLESAANATEKGLIAPFFGDTCIFIYPGYEYQVVDALVTNFHLPESTLIMLVSAFAGYKNTMNAYQQAVAEQYRFFSYGDAMFITRNPQAGIELTSLNGADNQ

SEQ ID NO: 73852 - protein, 356 aa, Yersinia nurmii
  REGION 1..356: note = tr|A0A0T9L789|A0A0T9L789_9GAMM S-adenosylmethionine:tRNA ribosyltransferase-isomerase; OS = Yersinia nurmii OX=685706 GN=queA PE=3 SV=1
MRVADFSFELPESLIAHYPQPQRSGCRLLSLDGPSGELTHGIFTDLLDKLEAGDLLVFNNTRVIPARLFGRKASGGKLEVLVERVLDDHRVLAHVRASKAPKPGAELLLGDDESIRATMLARHDTLFELRFDEEQDVFSILNAIGHMPLPPYIDRPDEDADRELYQTVYSERPGAVAAPTAGLHFDEPLLAALREKGIEMAFVTLHVGAGTFQPVRVESIEEHIMHSEYAEVPQEVVDAVLACKARGKRVVAVGTTSVRSLESAAKACENGLIAPFFGDTRIFIYPGYQYQVVDALVTNFHLPESTLIMLVSAFAGYKNTMNAYRQAVAEQYRFFSYGDAMFISRNPLAPQETVNQ

SEQ ID NO: 73853 - protein, 356 aa, Yersinia pekkanenii
  REGION 1..356: note = tr|A0A0T9NJ87|A0A0T9NJ87_9GAMM S-adenosylmethionine:tRNA ribosyltransferase-isomerase; OS = Yersinia pekkanenii OX=1288385 GN=queA PE=3 SV=1
MRVADFSFALPESLIAHYPQPQRSGCRLLSLDGPTGALTHGIFTDLLDKLVPGDLLVFNNTRVIPARVFGRKASGGKLEVLVERVLDDHRVLAHVKASKSPKPGSELLLGDDESIRATMLARHDTLFELRFEDERDVFTILNAVGHMPLPPYIDRPDEDADRELYQTVYSQRPGAVAAPTAGLHFDEPMLAALREKGIEMAFVTLHVGAGTFQPVRVETLEEHIMHSEYAEVPQEVVDAVLACKARGNRVVAVGTTSVRSLESAAKAAENALIAPFFGDTRIFIYPGYHYQVVDALVTNFHLPESTLIMLVSAFAGYKNTMNAYQQAVAEQYRFFSYGDAMFISRNLQAPQERVNP

SEQ ID NO: 73854 - protein, 356 aa, Yersinia pestis
  REGION 1..356: note = sp|Q8ZC32|QUEA_YERPE S-adenosylmethionine:tRNA ribosyltransferase-isomerase OS=Yersinia pestis OX=632; GN = queA PE=3 SV=1
MRVADFSFELPEALIAHYPQPQRSGCRLLSLDGPTGTLTHGIFTDLLDKLAPGDLLVFNNTRVIPARLFGRKASGGKLEVLVERVLDDHRVLAHVKASKAPKPGAELLLGDDESIRATMLARHDTLFELRFDDERDVFTILNAVGHMPLPPYIDRPDEDADRELYQTVYSQRPGAVAAPTAGLHFDEPMLAALQEKGIEMAFVTLHVGAGTFQPVRVDTIEDHIMHSEYAEVPQEVVDAVLACKARGKRVVAVGTTSVRSLESAAKAAENGLIAPFFGDTRIFIYPGYHYQVVDALVTNFHLPESTLIMLVSAFAGYKNTMNAYQQAVAEQYRFFSYGDAMFISRNPRAPQEKVSP

SEQ ID NO: 73855 - protein, 356 aa, Yersinia pestis; identical to SEQ ID NO: 73854
  REGION 1..356: note = sp|A9R352|QUEA_YERPG S-adenosylmethionine:tRNA ribosyltransferase-isomerase OS=Yersinia pestis bv. Antiqua (strain Angola) OX=349746 GN=queA PE=3 SV=1

SEQ ID NO: 73856 - protein, 356 aa, Yersinia pseudotuberculosis; identical to SEQ ID NO: 73854
  REGION 1..356: note = tr|A0A3G5KJ39|A0A3G5KJ39_YERPU S-adenosylmethionine:tRNA ribosyltransferase-isomerase; OS = Yersinia pseudotuberculosis OX=633 GN=queA PE=3 SV=1

SEQ ID NO: 73857 - protein, 356 aa, Yersinia pseudotuberculosis
  REGION 1..356: note = sp|B1JIF0|QUEA_YERPY S-adenosylmethionine:tRNA ribosyltransferase-isomerase OS=Yersinia pseudotuberculosis serotype O:3 (strain YPIII) OX=502800; GN = queA PE=3 SV=1
MRVADFSFELPEALIAHYPQPQRSGCRLLSLDGPTGTLTHGIFTDLLDKLAPGDLLVFNNTRVIPARLFGRKASGGKLEVLVERVLDDHRVLAHVKASKAPKPGAELLLGDDENIRATMLARHDTLFELRFDDERDVFTILNAVGHMPLPPYIDRPDEDADRELYQTVYSQRPGAVAAPTAGLHFDEPMLATLQEKGIEMAFVTLHVGAGTFQPVRVDTIEDHIMHSEYAEVPQEVVDAVLACKARGKRVVAVGTTSVRSLESAAKAAENGLIAPFFGDTRIFIYPGYHYQVVDALVTNFHLPESTLIMLVSAFAGYKNTMNAYQQAVAEQYRFFSYGDAMFISRNPRAPQEKVSP

SEQ ID NO: 73858 - protein, 356 aa, Yersinia rohdei
  REGION 1..356: note = tr|A0A0U1HR70|A0A0U1HR70_YERRO S-adenosylmethionine:tRNA ribosyltransferase-isomerase; OS = Yersinia rohdei OX=29485 GN=queA PE=3 SV=1
MRVADFSFELPESLIAHYPQPQRSGCRLLSLDGPTGKLTHGIFTDLLDKLEPGDLLVFNNTRVIPARLFGRKASGGKLEVLVERVLDDSRVLAHVKASKAPKPGTELLLGDDESIRATMVARHDTLFELRFDDERDVFAILNAVGHMPLPPYIDRPDEDADRELYQTVYSERPGAVAAPTAGLHFDEPLLAALREKGIEMAFVTLHVGAGTFQPVRVDTIEEHIMHSEYAEVPQEVVDAVLACKARGKRVVAVGTTSVRSLESAAKATENGLIAPFFGDTCIFIYPGYDYQVVDALVTNFHLPESTLIMLVSAFAGYKNTMNAYQQAVTEQYRFFSYGDAMFISRNPRAPQETVNP

SEQ ID NO: 73859 - protein, 356 aa, Yersinia ruckeri
  REGION 1..356: note = tr|A0A085U572|A0A085U572_YERRU S-adenosylmethionine:tRNA ribosyltransferase-isomerase; OS = Yersinia ruckeri OX=29486 GN=queA PE=3 SV=1
MRVADFSFELPESLIAHYPQPQRSGCRLLSLDGPTGTLTHGIFTDLLDKLEAGDLLVFNNTRVIPARLFGRKASGGKLEVLVERVLDDHRVLAHVKASKAPKPGTEMLLGDDESIRATMLARHDTLFELRFDEEQDVFSILNAVGHIPLPPYIDRPDEEADRELYQTVYSQRPGAVAAPTAGLHFDEPMLAALRNKGIEMAFVTLHVGAGTFQPVRVESIEEHIMHSEYAEVPQEVVDAVLACKARGKRVVAVGTTSVRSLESAANASEDGVIAPFYGDTRIFIYPGYHYQVVDALVTNFHLPESTLIMLVSAFAGYKNTMNAYQQAVVEKYRFFSYGDAMFISRNPLAPQETVNQ

SEQ ID NO: 73860 - protein, 356 aa, Yersinia similis
  REGION 1..356: note = tr|A0A0T9QST7|A0A0T9QST7_9GAMM S-adenosylmethionine:tRNA ribosyltransferase-isomerase; OS = Yersinia similis OX=367190 GN=queA PE=3 SV=1
MRVADFSFELPEALIAHYPQPQRSGCRLLSLDGPTGTLTHGIFTDLLDKLEPGDLLVFNNTRVIPARLFGRKASGGKLEVLVERVLDDHRVLAHVKASKAPKAGAELLLGDDESIRATMLARHDTLFELRFDDERDVFTILNAVGHMPLPPYIDRPDEDADRELYQTVYSQRPGAVAAPTAGLHFDEPLLAALREKGIEMAFVTLHVGAGTFQPVRVDTIEDHIMHSEYAEVPQEVVDAVLACKARGKRVVAVGTTSVRSLESAAKAAENGLIAPFFGDTRIFIYPGYHYQVVDALVTNFHLPESTLIMLVSAFAGYKNTMNAYQQAVAEQYRFFSYGDAMFISRNPRAPQERVNP

SEQ ID NO: 73861 - protein, 356 aa, unidentified
  source 1..356: note = Yersinia wautersii
  REGION 1..356: note = tr|A0A0E8XFA0|A0A0E8XFA0_9GAMM S-adenosylmethionine:tRNA ribosyltransferase-isomerase; OS = Yersinia wautersii OX=1341643 GN=queA PE=3 SV=1
MRVADFSFELPEALIAHYPQPQRSGCRLLSLDGLTGTLTHGIFTDLLDKLAPGDLLVFNNTRVIPARLFGRKASGGKLEVLVERVLDDHRVLAHVKASKAPKPGAELLLGDDESIRATMLARHDTLFELRFDDERDVFTILNAVGHMPLPPYIDRPDEDADRELYQTVYSQRPGAVAAPTAGLHFDEPMLAALREKGIEMAFVTLHVGAGTFQPVRVDTIEDHIMHSEYAEVPQEVVDAVLACKARGKRVVAVGTTSVRSLESAAKAAENGLIAPFFGDTRIFIYPGYHYQVVDALVTNFHLPESTLIMLVSAFAGYKNTMNAYQQAVAEQYRFFSYGDAMFISRNPRAPQEKVSP

SEQ ID NO: 73862 - protein, 356 aa, unidentified
  source 1..356: note = Yersiniaceae bacterium
  REGION 1..356: note = tr|A0A2N5EQS2|A0A2N5EQS2_9GAMM S-adenosylmethionine:tRNA ribosyltransferase-isomerase; OS = Yersiniaceae bacterium 2016Iso3 OX=2060066 GN=queA PE=3; SV = 1
MRVADFSFELPESLIAHYPQAQRSGCRLLSLDGPSGDLTHGVFTDLLETLEPGDLLVFNNTRVIPARMFGRKVSGGKIEVLVERVLDDHRVLAHVRASKAPKEGAELLLGDDESISATMVARHDALFELRFNDERDVFSVLNAVGHMPLPPYIDRPDEDADRELYQTVYSAKPGAVAAPTAGLHFDEPLLAALKEKGVEMAFVTLHVGAGTFQPVRVESIEDHIMHAEYAEVPQEVVDAVLACKARGKRVVAVGTTSVRSLESAAQATQDGLIAPFFGDTKIFIYPGYEYQVIDALITNFHLPESTLIMLVSAFAGYTQTMNAYHTAVAEQYRFFSYGDAMFITRNPLAPQQAAGR

SEQ ID NO: 73863 - protein, 356 aa, unidentified
  source 1..356: note = Yersiniaceae bacterium
  REGION 1..356: note = tr|A0A2N5EAU1|A0A2N5EAU1_9GAMM S-adenosylmethionine:tRNA ribosyltransferase-isomerase; OS = Yersiniaceae bacterium 2016Iso4 OX=2060068 GN=queA PE=3; SV = 1
MRVADFSFELPESLIARYPQAQRSGCRLLSLDGPSGDLTHGVFTDLLETLEAGDLLVFNNTRVIPARMFGRKVSGGKIEVLVERVLDDHRVLAHVRASKAPKPGAELLLGDDESISATMVARHDALFELRFNDERDVFSVLNAAGHMPLPPYIDRPDDEADRELYQTVYSAKPGAVAAPTAGLHFDEPLLAALKEKGIEMAFVTLHVGAGTFQPVRVESIEDHIMHAEYAEVPQEVVDAVLDCKARGKRVVAVGTTSVRSLESAAQAAQDGLIAPFFGDTKIFIYPGYEYQVIDALITNFHLPESTLIMLVSAFAGYTQTMNAYHTAVAEQYRFFSYGDAMFITRNPLAAQQAAGR

SEQ ID NO: 73864 - protein, 356 aa, Yokenella regensburgei
  REGION 1..356: note = tr|A0A2X2QAQ7|A0A2X2QAQ7_9ENTR S-adenosylmethionine:tRNA ribosyltransferase-isomerase; OS = Yokenella regensburgei OX=158877 GN=queA PE=3 SV=1
MRVADFSFELPDSLIAHYPQPERSGCRLLSLDGPTGALTHGTFTDLLDKLNPGDLLVFNNTRVIPARLFGRKASGGKIEVLVERMLDDKRILAHIRASKAPKPGAELLLGDDESINATMVARHDALFEVEFNDERPVLDILNAIGHMPLPPYIDRPDEDADRELYQTVYSQKPGAVAAPTAGLHFDEPLLAKLREKGIEMAFVTLHVGAGTFQPVRVDTIEDHIMHSEYAEVPQDVVDAVLAAKARGSRVIAVGTTSVRSLESAAQAAKDALIAPFFGDTQIFIFPGYQYQVIDALVTNFHLPESTLIMLVSAFAGYQHTMNAYKAAVEQQYRFFSYGDAMFITYNPQAISERVGE

SEQ ID NO: 73865 - protein, 217 aa, Yokenella regensburgei
  REGION 1..217: note = tr|A0A484XB84|A0A484XB84_9ENTR S-adenosylmethionine:tRNA ribosyltransferase-isomerase; OS = Yokenella regensburgei OX=158877 GN=queA_2 PE=3 SV=1
MRVADFSFELPDSLIAHYPQPERSGCRLLSLDGPTGALTHGTFTDLLDKLNPGDLLVFNNTRVIPARLFGRKASGGKIEVLVERMLDDKRILAHIRASKAPKPGAELLLGDDESINATMVARHDALFEVEFNDERPVLDILNAIGHMPLPPYIDRPDEDADRELYQTVYSQKPGAVAAPTAGLHFDEPLLAKLREKGIEMAFRDAARGGGNLPAGAR

SEQ ID NO: 73866 - protein, 355 aa, unidentified
  source 1..355: note = Yoonia litorea
  REGION 1..355: note = tr|A0A1I6MBJ1|A0A1I6MBJ1_9RHOB S-adenosylmethionine:tRNA ribosyltransferase-isomerase; OS = Yoonia litorea OX=1123755 GN=queA PE=3 SV=1
MKLSDFDFDLPERLIATRPARPRSSARLLLAQGGMIEDRIVNQLPDILRPGDRLILNDTKVIPARLSGLRHRSGEAGDTAARIEVTLLEPQSDGAWTALIKPLKKVRDGEVIVFSDDLSASVEGRRDGQGVLRFNLTGDDFDAALAAAGSMPLPPYIEAKRKADEADKQDYQTYWAKRAGAVAAPTASLHFDGPLLDALEQRGVAFTHVTLHVGAGTFLPVKVDDISEHKMHAEWGEVTSQAAEEMNATRAAGGRIIPVGTTAMRLIESAAKDGKMQPWVGPTDIFITPGFEFQMSDGLMTNFHLPKSTLMMLVSALMGVNTIRAIYAHAIADEYRFFSYGDSSLLLPQPADKSL

SEQ ID NO: 73867 - protein, 350 aa, unidentified
  source 1..350: note = Yoonia maricola
  REGION 1..350: note = tr|A0A2M8WKV0|A0A2M8WKV0_9RHOB S-adenosylmethionine:tRNA ribosyltransferase-isomerase; OS = Yoonia maricola OX=420999 GN=queA PE=3 SV=1
MKLSEFDFDLPEALIATRPARPRSSARLLLAQGDEIADRVVNQLPDILQSGDRLILNDTKVIPARLFGLRQRSGDAGKTAAKMDVTLLEPRADGSWAALIKPLKKVRDGEVIVFSDDLEAEVIGRADGQGYLAFNLKGDDFDAALNAVGAMPLPPYIAGKRPADEADKQDYQTYWARNTGAVAAPTASLHFDGPLLDALAARGVAFTHVTLHVGAGTFLPVKVDDVREHKMHAEWGEVTPQAAAEMNATKAAGNRVIPVGTTALRLIESAVQGGVMQAWKGPTDIFITPGFTFQMADGLMTNFHLPKSTLMMLVSALMGTDTIRAIYDHAVAQNYRFFSYGDSSLLLPAD

SEQ ID NO: 73868 - protein, 351 aa, unidentified
  source 1..351: note = Yoonia maritima
  REGION 1..351: note = tr|A0A2T0W1H8|A0A2T0W1H8_9RHOB S-adenosylmethionine:tRNA ribosyltransferase-isomerase; OS = Yoonia maritima OX=1435347 GN=queA PE=3 SV=1
MKLSDFDFELPEELIATRPARPRSSAKLLLADRDGVADRVVSDLVDILKLGDRLVLNDTKVIPARLTGQRFRDGEHGLTSSKIEVTLLEPRSSGDWAALVKPLRKIRDGETIVFSEVLSATVTGRADGQAFLQFNLTGDNFDAALADVGAMPLPPYIAAKRPADEADKEDYQTYWARNAGAVAAPTASLHFDGPLLDALRARGVEFTHVTLHVGAGTFLPVKVDDVRDHKMHSEWGEVTEQAVDEINATKAAGGRIIPVGTTALRLIETAAKSGTLKPWVGPTDIFITPGFQFQVTDGLMTNFHLPKSTLMMLVSALMGVQRVKDIYSHAIGTGYRFFSYGDASLLLPTKP

SEQ ID NO: 73869 - protein, 355 aa, unidentified
  source 1..355: note = Yoonia rosea
  REGION 1..355: note = tr|A0A1R3WFD4|A0A1R3WFD4_9RHOB S-adenosylmethionine:tRNA ribosyltransferase-isomerase; OS = Yoonia rosea OX=287098 GN=queA PE=3 SV=1
MKLSEFDFDLPEELIATRPARPRSSARLLLAQGTAIEDRIVNQLPDILQPGDRLILNDTKVIPARLFGVRHRSGEAGETAARMDVTLLEPRADGAWSALIKPLKKVRDGEVIVFSDELSAEVVGRGDGQGYLQFNLKGDDFDAALNAVGAMPLPPYIAGKRPADEADKQDYQTYWARHSGAVAAPTASLHFDGPLLAALAARGVEFTHVTLHVGAGTFLPVKVDDVRDHKMHAEWGEVTPQAAAEMNATKAAGHRVIPVGTTALRLIESAVQDGKMQPWTGPTDIFITPGFRFQMADGLMTNFHLPKSTLMMLVSALMGTDNIRAIYDHAIAESYRFFSYGDSSLLLPEQEGAND

SEQ ID NO: 73870 - protein, 354 aa, unidentified
  source 1..354: note = Yoonia sediminilitoris
  REGION 1..354: note = tr|A0A2T6KRE7|A0A2T6KRE7_9RHOB S-adenosylmethionine:tRNA ribosyltransferase-isomerase; OS = Yoonia sediminilitoris OX=1286148 GN=queA PE=3 SV=1
MKLSDFDFDLPERLIATRPARPRSSARLLLAQGDRIDDLVVTDLRKILRPGDRLVLNDTKVIPARLFGLRHRTGEAGATSAQMDVTLLEPRADGTWSALIKPLRKVRDGETIVFSDDLSATVTGRNDGQATLRFSLTGDDFDKALAEVGAMPLPPYIAAKRPADAADKEDYQTYWARRSGAVAAPTASLHFDGPLLDDLAARGVAFTKVTLHVGAGTFLPVKVDDVRDHKMHAEWGEVTPQAAAEINATKAAGGRIIPVGTTALRLIESAAIDGQITPWEGPTDIFITPGFEFQITDGLMTNFHLPKSTLMMLVSALMGVDRIKAIYDHAIAQNYRFFSYGDSSLLLPEAEDQA

SEQ ID NO: 73871 - protein, 354 aa, unidentified
  source 1..354: note = Yoonia tamlensis
  REGION 1..354: note = tr|A0A1I6G4V7|A0A1I6G4V7_9RHOB S-adenosylmethionine:tRNA ribosyltransferase-isomerase; OS = Yoonia tamlensis OX=390270 GN=queA PE=3 SV=1
MKLSDFDFDLPEQLIATRPARPRTSARLLLADSAGIADHRVADLVDLLQPGDRLVLNDTKVIPARLTGMRHRDGEAGPTSAKIEVTLLEPRATGDWAALVKPLRKIRDGEVIVFSDVLSATLTARADGQAHLQFNLQGDDFDAALAAVGAMPLPPYIAAKRPADEADKQDYQTYWARHAGAVAAPTASLHFDGPLLDALRARGVAFTHVTLHVGAGTFLPVKVDDVRDHKMHAEWGEVTQTAVDEITATKAAGGRVIPVGTTALRLIETAAKEGTLKPWVGPTDIFITPGFTFQVTDGLMTNFHLPKSTLMMLVSALMGVERVKDIYAHAITTGYRFFSYGDASLLLPANVKKA

SEQ ID NO: 73872 - protein, 351 aa, unidentified
  source 1..351: note = Yoonia vestfoldensis
  REGION 1..351: note = tr|A0A1Y0EB00|A0A1Y0EB00_9RHOB S-adenosylmethionine:tRNA ribosyltransferase-isomerase; OS = Yoonia vestfoldensis OX=245188 GN=queA PE=3 SV=1
MKLSDFDFDLPEALIATRPARPRSSARLLLAQGDQIADRIVTDLVDILQPGDRLVLNDTKVIPARLTGTRARIGEAGETAAKIEVTLLEPQAGGDWSALVKPLKKVRDGEVIVFSAALSATLVSRADGQARLAFNLTGDDFDAALNAVGAMPLPPYIEAKRPSDAADMDDYQTYWAKHAGAVAAPTASLHFDGPLLQALAARGVTMSYVTLHVGAGTFLPVKVDDVRDHKMHAEWGEVTDKAAAEINATKAAGKRVIPVGTTALRLIESAAKEGQLQPWTGPTDIFITPGFAFQIADGLMTNFHLPKSTLMMLVSAMMGMDRIKAIYAHAIAERYRFFSYGDSSLLLPDRA

SEQ ID NO: 73873 - protein, 351 aa, unidentified
  source 1..351: note = Yoonia vestfoldensis
  REGION 1..351: note = tr|A3V485|A3V485_9RHOB S-adenosylmethionine:tRNA ribosyltransferase-isomerase OS=Yoonia vestfoldensis SKA53; OX = 314232 GN=queA PE=3 SV=1
MKLSDFDFDLPEALIATRPARPRSSARLLLAQGDRIADQIVTDLVDILQPGDRLVLNDTKVIPARLNGTRARSGEAGDTSARIEVTLLEPRADGSWSALVKPLKKLRDGEVVVFSADLSATMTGRGDGQAYLQFNLTGDDFDAALNAVGAMPLPPYIAAKRAADAADMDDYQTYWAKHAGAVAAPTASLHFDGPLLQALAARGVTMSYVTLHVGAGTFLPVKVDDVSEHKMHAEWGEVTATAAAQINATKAAGKRVIPVGTTALRLIESAAKGGQLQPWTGPTDIFITPGFTFQIADGLMTNFHLPKSTLMMLVSALMGMDRIKAIYAHAIAERYRFFSYGDASLLLPDRA

SEQ ID NO: 73874 - protein, 362 aa, unidentified
  source 1..362: note = Youhaiella tibetensis
  REGION 1..362: note = tr|A0A5B9DPL0|A0A5B9DPL0_9RHIZ S-adenosylmethionine:tRNA ribosyltransferase-isomerase; OS = Youhaiella tibetensis OX=1447062 GN=queA PE=3 SV=1
MRVDDFDFELPNDLIALHPAEPRDSARMLVVEPGRGMEDRVVTDLVDILQPGDVLVANDTKVLPADLRGIRVRGENRSSVAFNLHKRVDARTWKAFARPAKRLAEGDRLELGNGEQEPLLATLSEKGEGGEVTLTFDLSGAELDEAIKSHGAMPLPPYIGAKRDLEERDKSDYQTVYARHDGAVAAPTAGLHFTESLLERLAAKGVAFERVTLHVGAGTFLPVKVDDVKDHKMHAEWGVIDEDTVSRILAAKARGGRIVAVGTTSLRLLESAARATGTLAPFSDDTDIFITPGFRFRVVDVLMTNFHLPRSTLFMLVSAFAGFETMHAAYRHAIENHYRFYSYGDSSLLFRADLPSDAGTNQ

SEQ ID NO: 73875 - protein, 341 aa, unidentified
  source 1..341: note = Youngiibacter fragilis
  REGION 1..341: note = tr|V7I4U8|V7I4U8_9CLOT S-adenosylmethionine:tRNA ribosyltransferase-isomerase OS=Youngiibacter fragilis 232.1 OX=994573 GN=queA PE=3 SV=1
MKVNDFYYDLPEELIAQHPLEKRDSSRLMVLDRLSGEISHKVFSDLPEYLVEGDVLVMNDTRVIPARLIGSKEGSGGKIEFLLLKRIDKDTWEALAKPGRRAKPGARFTFGDGLLTAEVVEVHDDGNRIIRFIYEGVFEEILDRLGEMPLPPYITEKLLDRERYQTVYSREEGSSAAPTAGLHFTPELLERIREKDVETVFLTLHVGLGTFRPVKVEDIDAHVMHSEYFSISRETAERINAAKSEGRRVISVGTTSTRTLETVADENGFVSEASGWTDIFIYPGVKLKCVDALITNFHLPESTLIMLVSALAGKEKTMEAYRTAVGMKYRFFSFGDSMFIK

SEQ ID NO: 73876 - protein, 350 aa, unidentified
  source 1..350: note = Youngimonas vesicularis
  REGION 1..350: note = tr|A0A4V3UZ43|A0A4V3UZ43_9RHOB S-adenosylmethionine:tRNA ribosyltransferase-isomerase; OS = Youngimonas vesicularis OX=1294297 GN=queA PE=3 SV=1
MKLSDFDFDLPDHLIATRPAKPRSSARLLVAEGDAITDARVTDILRWLRPGDRLVLNDTKVLPARLSGTRSRMGAEGLTQAKIEVTLLEPRAHGHWAALLKPLKKIREGEEIVFSPDLTARLEAKEDGQGVLSFNLNGADFDAALQGAGQMPLPPYIAAKRAADTQDKTDYQTVWARALGAVAAPTASLHFDEPLLQQIRALGVEISFVTLHVGAGTFLPVKVEDVTTHKMHAEWGEVTAEAAAEIAATKAAGGRVIPVGTTALRLIESAARDGQIRPWQGETDIFIYPGFTFHVADALMTNFHLPKSTLMMLVSALMGPERIRAIYDHAVTEGYRFFSYGDASLLIPPR

SEQ ID NO: 73877 - protein, 347 aa, Zavarzinia compransoris
  REGION 1..347: note = tr|A0A317DZ74|A0A317DZ74_9PROT S-adenosylmethionine:tRNA ribosyltransferase-isomerase; OS = Zavarzinia compransoris OX=1264899 GN=queA PE=3 SV=1
MKVADFDFALPADRIAVRPAVPREAARLLRVTADGLADFTVGDLPALLRRGDLLVLNDTKVIPARLEGLIGAGRVELNLIRAVDGRTWDCLARPGKRFRPGAVVRFGDRLAATVRAKDPEGTITLEFDRAGADLMAALDAVGTMPLPPYIARKRTPDAQDRADYQPVFAAREGAVAAPTASLHLTPDLLARLEAMGVERTMVTLHVGAGTFLPVKVEDTRDHRMHAEWGEVTAAAAEAIGRARREGRRVIAVGTTALRLIESAAAPDGTLSPYAGWTDIFITPGYRFRAVDVLMTNFHLPKSTLFMLVSALAGTERMKAAYAHAVEAGYRFYSYGDASLIDRLEVPA

SEQ ID NO: 73878 - protein, 346 aa, Zavarzinia sp.
  REGION 1..346: note = tr|A0A317E5Q1|A0A317E5Q1_9PROT S-adenosylmethionine:tRNA ribosyltransferase-isomerase; OS = Zavarzinia sp. HR-AS OX=2211142 GN=queA PE=3 SV=1
MKVADFDFDLPPELIAVRPASPRESARLLRVRESGMADLTIADLPGELRAGDLLVLNDTKVIPARLEGTIGEAHVELNLIRAVDSRTWECLARPGRRFRPGVTVVFGDLTARVLVKDPEGTITLEFDRAGPDLMAALDVVGTMPLPPYIARKRAPDAQDRTDYQTAFAAREGAVAAPTASLHLTPELLARLGAMGVERAMVTLHVGAGTFLPVKVEDTADHKMHAEWGEVGAAAAEAINRARAEGRRVVAVGTTALRLIESAARDRDRVEPFADWTDIFITPGFRFRAADLLLTNFHLPKSTLVMLVSAFAGFDRVKAAYGHAIDKGYRFYSYGDACLFDRVEPKA

SEQ ID NO: 73879 - protein, 350 aa, Zeaxanthinibacter enoshimensis
  REGION 1..350: note = tr|A0A4R6TQ96|A0A4R6TQ96_9FLAO S-adenosylmethionine:tRNA ribosyltransferase-isomerase; OS = Zeaxanthinibacter enoshimensis OX=392009 GN=queA PE=3; SV = 1
MKLSHFNFELPKELLAEYPSENRDESKLMVVHRKSGKIEHKMFKDLIDYFDEGDVMVLNNTKVFPARLYGNKEKTGARIEVFLLRELNEEQRLWDVLVDPARKIRIGNKLYFGEDESLVAEVIDNTTSRGRTLRFLYDGSYTDFRRKLRELGETPLPKYIKREVEPEDENRYQTIYAKYEGAVAAPTAGLHFSKHLLKRLEIKGIDFAELTLHVGLGTFNPVEVEDLSKHKMDSEELVIDEKATEIVNNAKKNKRRICAVGTTAMRGLESAVSSEHMLNTFEGWTNKFIFPPYDFSIANAMVTNFHLPKSTLLMMVSAFMGHDLMKRAYKEAILEGYRFYSYGDAMLIID

SEQ ID NO: 73880 - protein, 344 aa, unidentified
  source 1..344: note = Zetaproteobacteria bacterium
  REGION 1..344: note = tr|A0A1J4YPK7|A0A1J4YPK7_9PROT S-adenosylmethionine:tRNA ribosyltransferase-isomerase; OS = Zetaproteobacteria bacterium CG1_02_53_45 OX=1805427; GN = queA PE=3 SV=1
MQISDFDFELPEHLIAKKPLGQRDASRLLCLSESDDSLVDGLIRDLANYVKPGDVWVLNDTKVIPARLVGQKPSGGKVEVLLLEPSDQPNVWLAWGKANKPMKPGTLIEFADGFSARVLKRDGKNIEVLLMAEDVGAAIEAYGHMPLPPYIDRPDTEEDKARYQTVFAKHAGAVAAPTAGLHLTHELMAAMQQAGASFAHVTLHVGPGTFQPVQVDDVNQHVMHEEGYIVPKETADAVNQAKAEGRRVVAVGTTSLRTLEAASVQGKLQAGSGRTSIFIYPGYHFNIVDALLTNFHLPKSTLIMLVAALAGRDRVMDAYAFAKGHAYRFYSYGDAMFVPRLKQL

SEQ ID NO: 73881 - protein, 339 aa, unidentified
  source 1..339: note = Zetaproteobacteria bacterium
  REGION 1..339: note = tr|A0A2M7H9Y4|A0A2M7H9Y4_9PROT S-adenosylmethionine:tRNA ribosyltransferase-isomerase; OS = Zetaproteobacteria bacterium CG12_big_fil_rev_8_21_14_0_65_55_1124 OX=197412 7 GN=queA; PE = 3 SV=1
MRVSDFDYRLPDELIAKQPLAEREGSRLLVLGETIEDRMIRDLPQLVRPGDVWVVNDTRVIPARLLGQKDSGGQVEILLLEPCQEANVWLAWGKANKPLRPGTRVNIGPDFSAEVLRRDGKEVKVRLLAPDVAAAIEACGHMPLPPYINRPDNEADKQRYQTVFARHAGAVAAPTAGLHMSLELMAAMREAGAEFAHVTLHVGPGTFQPVQVEHTEDHPMHEEAYIVSQETAEQINAARAEGRRIVAVGTTSLRTLEAAGESGVLCAGSGRTRLFITPGYDFRVTDALLTNFHLPRSTLLMLVCALGGQEKVMQAYRHAIEAAYRFYSYGDAMFVARGE

SEQ ID NO: 73882 - protein, 357 aa, unidentified
  source 1..357: note = Zhengella mangrovi
  REGION 1..357: note = tr|A0A2G1QI02|A0A2G1QI02_9RHIZ S-adenosylmethionine:tRNA ribosyltransferase-isomerase; OS = Zhengella mangrovi OX=1982044 GN=queA PE=3 SV=1
MRVDLFDFELPETSIALRPAEPRDAARMLVVRPGEGLEDCGVLDLADLLDPGDALVFNDTRVIPAQLEGLRVRDGGEARVSATLHMRTGPDRWKAFLKPGKRVKAGDRIRFGHAGSACFLGTLDATAGDKGEGGDVELVFDLSGPALDEALHAVGHVPLPPYIASKRAEDDRDRSDYQTIYAREEGAVAAPTAGLHFTPRLMERLDARGIERHFVTLHVGAGTFLPVKADDTGEHRMHAEIGHVSAGAAEALNAVKARGGRIVSVGTTSLRLLESAADEAGRLDAWSGPTDIFITPGYRFRFIDVLMTNFHLPRSTLFMLVSAFSGLETMHAAYDHAIASGYRFYSYGDSSLLFRKD

SEQ ID NO: 73883 - protein, 348 aa, unidentified
  source 1..348: note = Zhizhongheella caldifontis
  REGION 1..348: note = tr|A0A2S5SVP3|A0A2S5SVP3_9BURK S-adenosylmethionine:tRNA ribosyltransferase-isomerase; OS = Zhizhongheella caldifontis OX=1452508 GN=queA PE=3 SV=1
MPHTYTLSDFDFALPPELIAQHPTPERSASRLLDGRAWPPVDRIFRELPALLAPGDLLVFNDTRVIKARLYGAKASGGAVEALIERVLPGHEVWAHLRASKSPRAGSIVRFAGAFDAEVLGRGGPDDGLFHLRFPEDPLVLLDRHGHVPLPPYITHADSEDDERRYQTVFAAKPGAVAAPTAALHFDEGVLAALRERRIGTAHVTLHVGAGTFQPVRTENLAEHKMHSEWFEVSADTVAAIERTRAAGGRIVAVGTTTLRALESAAISGQLVAGSRDTDIFITPGFTFRVVDRLVTNFHLPKSTLMMLVSAFAGHAHIMALYRHAVEQRYRFFSYGDAMLLARISAHD

SEQ ID NO: 73884 - protein, 355 aa, unidentified
  source 1..355: note = Zhongshania aliphaticivorans
  REGION 1..355: note = tr|A0A127MAM6|A0A127MAM6_9GAMM S-adenosylmethionine:tRNA ribosyltransferase-isomerase; OS = Zhongshania aliphaticivorans OX=1470434 GN=queA PE=3; SV = 1
MRRSDFNFELPESLIAYYPMPERDASRLLVLNSQQQCEHRQFKALPDYLRAGDLLVFNNTRVIPARLFATKESGGRIEILVERIVDEYRVLAHVRSSKSPKAGATLWLAANNTDAPGTESVAVLGRHDALFELEFAEPVLTVLSRLGHMPLPPYIEREDAAEDRERYQTVYASRDGAVAAPTAGLHFTENLIQQCVAKGVELAFVTLHVGAGTFQPVRADDIRDHQMHAEYIEVPEEVAEQVRATRVRGGRVVAVGTTSVRSLESASQSGEIAAFAGDSRIFIYPGYQFRSVDMMVTNFHLPESTLIMLVSAFAGQAAVLNAYREAVAEQYRFFSYGDAMLVFPATNTEITGNTV

SEQ ID NO: 73885 - protein, 354 aa, Zhongshania sp.
  REGION 1..354: note = tr|A0A3N0C761|A0A3N0C761_9GAMM S-adenosylmethionine:tRNA ribosyltransferase-isomerase; OS = Zhongshania sp. DSW25-10 OX=2304603 GN=queA PE=3 SV=1
MRRSDFNFELPDSLIAYYPMPERDGSRLLVLGENQACEHRQFKNLPSYLRAGDLLVFNNTRVIPARLFALKSTGGRIEILIERLLDEHKVLAHVRSSKSPKAGAELQLCASAESSAGDDVATVLGRHDALFELRFASPVLEVLDRIGHMPLPPYIEREDAADDRERYQTVYASRDGAVAAPTAGLHFTDALMQECRDVGVDIAFVTLHVGAGTFQPVRADDIRDHQMHAEYIEVSDEVCEKVKATRERGGRVVAVGTTSVRSLESASQSGEIAPFSGDSRIFIYPGYQFRSVDAIVTNFHLPESTLIMLISAFAGRDAVLAAYREAVAEQYRFFSYGDAMLVFPSSNTETGSVL

SEQ ID NO: 73886 - protein, 354 aa, Zhongshania sp.
  REGION 1..354: note = tr|A0A2S4HGY4|A0A2S4HGY4_9GAMM S-adenosylmethionine:tRNA ribosyltransferase-isomerase; OS = Zhongshania sp. ZX-21 OX=2067667 GN=queA PE=3 SV=1
MRRSDFNFELPDSLIAYYPMPERDGSRLLVLGENQACEHRQFKNLPSYLRAGDLLVFNNTRVIPARLFALKSTGGRIEILIERLLDEHKVLAHVRSSKSPKAGAELQLCASAESSAGDDVATVLGRHDALFELRFASPVLEVLDRIGHMPLPPYIEREDAADDRERYQTVYASRDGAVAAPTAGLHFTDALMQECRDVGVDIAFVTLHVGAGTFQPVRADDIRDHQMHAEYIEVSDEVCEKVKATRERGGRVVAVGTTSVRSLESASQSGEIAPFSGDSRIFIYPGYQFRSVDAIVTNFHLPESTLIMLISAFAGRDAVLAAYREAVAEQYRFFSYGDAMLVFPSSITETGSVL

SEQ ID NO: 73887 - protein, 349 aa, Zhouia amylolytica
  REGION 1..349: note = tr|A0A1I6RHY6|A0A1I6RHY6_9FLAO S-adenosylmethionine:tRNA ribosyltransferase-isomerase; OS = Zhouia amylolytica OX=376730 GN=queA PE=3 SV=1
MKLSHFNFDLPKDLLAEYPSESRDEARLMVVHRETGEIEHKLFKDLIDYFDEGDVMVLNNTKVFPARLFGNKEKTGARIEVFLLRELNADQRLWDVLVDPARKIRIGNKLYFGEDESLVAEVIDNTTSRGRTLRFLYDGSYDEFRQKLSELGETPLPKYIKRDVEPEDEERYQTIYAKHEGAVAAPTAGLHFSKHLLKRLEIKGIDFAEVTLHVGLGTFNPVEVEDLSKHKMDSEELYIDDKSVDTVNSAKAKKHKVCAVGTTVMRGLESSVSSARTLNTFQGWTNKFIFPPYEFSIADCMITNFHTPKSTLLMMVSAFAGHDLMMKAYKEAVKEKYKFYSYGDAMLIL

SEQ ID NO: 73888 - protein, 349 aa, Zhouia amylolytica
  REGION 1..349: note = tr|W2ULE5|W2ULE5_9FLAO S-adenosylmethionine:tRNA ribosyltransferase-isomerase OS=Zhouia amylolytica AD3; OX = 1286632 GN=queA PE=3 SV=1
MKLSHFNFDLPKDLLAEYPSESRDEARLMVVHRETGEIEHKLFKDLIDYFDEGDVMVLNNTKVFPARLFGNKEKTGARIEVFLLRELNADQRLWDVLVDPARKIRIGNKLYFGEDESLVAEVIDNTTSRGRTLRFLYDGSYDEFRQKLSELGETPLPKYIKRDVEPEDEERYQTIYAKHEGAVAAPTAGLHFSKHLLKRLEIKGIDFAEVTLHVGLGTFNPVEVEDLSKHKMDSEELYIDDKSVDTVNSAKAKKHKVCAVGTTVMRGLESSVSSERTLNTFQGWTNKFIFPPYEFSIADCMITNFHTPKSTLLMMVSAFAGHDLMMKAYKEAVKEKYKFYSYGDAMLIL

SEQ ID NO: 73889 - protein, 349 aa, Zobellella denitrificans
  REGION 1..349: note = tr|A0A231MXS0|A0A231MXS0_9GAMM S-adenosylmethionine:tRNA ribosyltransferase-isomerase; OS = Zobellella denitrificans OX=347534 GN=queA PE=3 SV=1
MQVRDFHFELPDELIARHPMPERTASRLLQLDGNSGALVHGRFGDILNLVNPGDLLVFNNTRVIPARLFGHKASGGKVEVLVERVLDDKRVLAHVRASKSPKPGAELILEPDVRATMLARHDALFEIEFNDPRTVLEILEAVGHMPLPPYIDRPDTEADKERYQTVYNEKPGAVAAPTAGLHFDEPLLAELKAKGVELAFITLHVGAGTFQPVRVDNVLEHKMHAEYIEVPAEVVAQIEATRARGGRVIAVGTTSVRSLESAARASLGKGEPLAPFYGDTDIFIYPGYRFQLVDAMVTNFHLPESTLIMLVSAFAGHDHIMAAYRAAVAERYRFFSYGDAMFITRQSQG

SEQ ID NO: 73890 - protein, 353 aa, unidentified
  source 1..353: note = Zobellella endophytica
  REGION 1..353: note = tr|A0A2P7R3Z7|A0A2P7R3Z7_9GAMM S-adenosylmethionine:tRNA ribosyltransferase-isomerase; OS = Zobellella endophytica OX=2116700 GN=queA PE=3 SV=1
MQVRDFSFELPDELIARHPMPERAASRLLQLDGNSGEITHGRFGQILDLVNPGDLLVFNNTRVIPARLFGQKASGGKLEVLVERVLDDKRVLAHLRASKSPRPGTALLLEPDVSATMLARHDALFEIEFNDPRPVLEILEAVGHMPLPPYIDRPDTEADKERYQTVYNEKPGAVAAPTAGLHFDQPLLAALKEKGAELAFITLHVGAGTFQPVRVDKVIEHKMHAEYIEVPPEVVAQIEATRARGGRVIAVGTTSVRSLESAARASLARGEPLAPFYGDTDIFIYPGYRFQLVDAMVTNFHLPESTLIMLVSAFAGHGHIMDAYRAAVAERYRFFSYGDAMFITRQQGLGTGE

SEQ ID NO: 73891 - protein, 353 aa, Zobellella taiwanensis
  REGION 1..353: note = tr|A0A2P7QGA8|A0A2P7QGA8_9GAMM S-adenosylmethionine:tRNA ribosyltransferase-isomerase; OS = Zobellella taiwanensis OX=347535 GN=queA PE=3 SV=1
MQVRDFHFELPDELIARHPTAERTASRLLQLDGNSGALVHGRFGDILNLVNPGDLLVFNNTRVIPARLFGHKASGGKVEVLVERVLDDKRVLAHVRASKSPKPGAELILEPDVRATMLARHDALFEIAFNDPRTVLEILEAVGHMPLPPYIDRPDTEADKERYQTVYNEKPGAVAAPTAGLHFDEPLLAELQAKGVELAFITLHVGAGTFQPVRVDNVLEHKMHAEYIEVPAEVVAQIDATRARGGRVIAVGTTSVRSLESAARASLGKGEPLAPFYGDTDIFIYPGYRFQLVDAMITNFHLPESTLIMLVSAFAGHDHIMAAYRAAVAERYRFFSYGDAMFITKQLGLGTGE

SEQ ID NO: 73892 - protein, 349 aa, Zobellia galactanivorans
  REGION 1..349: note = tr|G0L9W4|G0L9W4_ZOBGA S-adenosylmethionine:tRNA ribosyltransferase-isomerase OS=Zobellia galactanivorans (strain DSM 12802 / CCUG 47099 / CIP 106680 / NCIMB 13871 /Dsij) OX=63186 GN=queA PE=3 SV=1
MKLSHFHFELPDNLLAEYPAENRDESKLMVIHRETGKIEHKMFKDLINYFDEGDVMVLNNTKVFPARLYGNKEKTGARIEVFLLRELNEEQRLWDVLVDPARKIRIGNKLYFGEDETLVAEVIDNTTSRGRTLRFLYDGSYIDFRRKLRELGQTPLPKYIKRDVEPEDEERYQTIYAKHEGAVAAPTAGLHFSKHLLKRLEIKGVDFAEVTLHVGLGTFNPVEVEDLSKHKMDSEELVIDEKATEIVNNAKLKKKRICAVGTTVMRGLESAVSSEHTLNTFDGWTNKFIFPPYDFSIANCMVTNFHLPKSTLLMMVSAFVGHDLMKKAYKEAILEQYKFYSYGDAMLII

SEQ ID NO: 73893 - protein, 349 aa, Zobellia uliginosa
  REGION 1..349: note = tr|A0A1N7N5Q2|A0A1N7N5Q2_9FLAO S-adenosylmethionine:tRNA ribosyltransferase-isomerase; OS = Zobellia uliginosa OX=143224 GN=queA PE=3 SV=1
MKLSHFHFELPDNLLAEYPAENRDESKLMVIHRETGKIEHKMFKDLINYFDEGDVMVLNNTKVFPARLYGNKEKTGARIEVFLLRELNEEQRLWDVLVDPARKIRIGNKLYFGEDETLVAEVIDNTTSRGRTLRFLYDGSYIDFRRKLRELGQTPLPKYIKRDVEPEDEERYQTIYAKHEGAVAAPTAGLHFSKHLLKRLEIKGVDFAEVTLHVGLGTFNPVEVEDLSKHKMDSEELVIDERATEIVNNAKLKKKRICAVGTTVMRGLESAVSSEHTLNTFDGWTNKFIFPPYDFSIANCMVTNFHLPKSTLLMMVSAFIGHDLMKKAYKEAILEQYKFYSYGDAMLII

SEQ ID NO: 73894 - protein, 342 aa, Zoogloea ramigera
  REGION 1..342: note = tr|A0A4Y4CWW5|A0A4Y4CWW5_ZOORA S-adenosylmethionine:tRNA ribosyltransferase-isomerase; OS = Zoogloea ramigera OX=350 GN=queA PE=3 SV=1
MAWTLDDFDYPLPQELIAQAPLARRTDSRLLRVSPQLADLHFSDLPSLLAPGDLLVFNDTRVIHARLFGTKDTGGQVEVMIERPLGPHEALAQIRASKSPKPGTRLRLEDALDVEVLGRAGEFFHLRFPDGDDLIALLERHGRLPLPPYIERAAGDTDESRYQTVYARNPGSVAAPTAGLHFDEALLARLAEHGVNTAYVTLNVGAGTFQPVRVHDLSEHKMHTEAYFVPQATVDAIAATKAAGKRVVCVGTTSMRALESAARSGNLVAGEAESDLFILPGYQFQVADALVTNFHLPKSTLLMLVSALAGVDVIRRAYAHAVAARYRFFSYGDAMFLTRDSA

SEQ ID NO: 73895 - protein, 342 aa, Zoogloea sp.
  REGION 1..342: note = tr|A0A5C7K9W2|A0A5C7K9W2_9RHOO S-adenosylmethionine:tRNA ribosyltransferase-isomerase; OS = Zoogloea sp. OX=49181 GN=queA PE=3 SV=1
MAWTLDDFDYLLPDELIAQAPLDRRTDSRLLRVQPSLADLHFADLPSLLAPGDLLVFNDTRVLHARLFGTKDTGGQVEVMIERPLGGHEALAQVRASKSPKPGSRLHLEGALDVEVLGRAGEFFHLRFPDTDDLVALLERHGRLPLPPYIERAAGNTDESRYQTVYARDPGSVAAPTAGLHFDEALLARLAGLGINSAFVTLNVGAGTFQPVRVHDLSEHQMHTEAYFVPEATVDAIAATRAAGRRVVCVGTTSMRALESAARSGPLRAGKAESDLFILPGYDFQVADALITNFHLPKSTLLMLVSAFSGMDTIRHAYAHAIKQRYRFFSYGDAMFLTRTAP

SEQ ID NO: 73896 - protein, 349 aa, unidentified
  source 1..349: note = Zoogloeaceae bacteirum
  REGION 1..349: note = tr|A0A2S0QV20|A0A2S0QV20_9RHOO S-adenosylmethionine:tRNA ribosyltransferase-isomerase; OS = Zoogloeaceae bacteirum Par-f-2 OX=2080469 GN=queA PE=3; SV = 1
MPLTLDDFDYHLPPELIAQTPLAERSASRLLAVDNGEPVDLRFTDLPTRLRAGDLLVFNDTRVIHARLHGHKDSGGQVEVLVERAIGAHEALAQVRASKSPRAGSRLHLAEAFEVEVLGRVGEFFHLRFPADEDLFALLERHGKLPLPPYIRRAAGDTDESRYQTVYAREPGSVAAPTAGLHFDDALLDRLKASGVKLAWLTLHVGAGTFQPVRVNDLGKHRMHAERYVLPAETVTAIAETRAAGGRVIAVGTTSMRALEAAAQDGPLVAGAGETDLFILPGFHFQVVDGLITNFHLPKSTLLMLVSAFAGLQTIRRAYAHAVAQRYRFFSYGDAMFLTRNPDAEHDAV

SEQ ID NO: 73897 - protein, 344 aa, Zooshikella ganghwensis
  REGION 1..344: note = tr|A0A4P9VJX1|A0A4P9VJX1_9GAMM S-adenosylmethionine:tRNA ribosyltransferase-isomerase; OS = Zooshikella ganghwensis OX=202772 GN=queA PE=3 SV=1
MRVKDFSFELPAEQIARYPTDQRSSSRLMVVDGSSGAIEHKSFVDIADYMQPGDLLVLNDTKVIPARLYGTKATGGKVEVLVERILEDQHSVLAHVRASKAAKPGTLLCFDEGIQAEMLRREGDLFVLRFLGEQPVLALLDKIGHIPLPPYIDRDDAQIDRERYQTIYSRTAGAVAAPTAGLHFDQALFDKLAAKGVEKAFVTLHVGAGTFQPVRVETIAEHKMHSEYLEVSQAVCDQIAATKARGGRVIAVGTTTVRSLETASRSGYVQPYHGETDIFIYPGYQFQCVDLMVTNFHLPESTLLMLVSAFAGYEHIMQAYQIAVAEQYRFFSYGDAMLLSRRNA

SEQ ID NO: 73898 - protein, 349 aa, unidentified
  source 1..349: note = Zunongwangia atlantica
  REGION 1..349: note = tr|A0A1Y1T9H3|A0A1Y1T9H3_9FLAO S-adenosylmethionine:tRNA ribosyltransferase-isomerase; OS = Zunongwangia atlantica 22II14-10F7 OX=1185767 GN=queA; PE = 3 SV=1
MKLSNFNFELPPELLAEYPAENRDEARLMVLNRKEQTIEHKQFKDLINYFDPEDVMVLNNTKVFPARLYGNKEKTGARIEVFLLRELNAETKLWDVLVDPARKIRIGNKLYFGDDESLVAEVIDNTTSRGRTLRFLYDGSYEDFRRKLKELGETPLPKYIKRDVQPEDQERYQTIYAKEEGAVAAPTAGLHFSKHLLKRLEIKGINFAEVTLHVGLGTFSPVEVEDLSKHKMDSEEAFVKADAVNTINKAKAEKRKVCAVGTTVMRVLESSVSSNQTLNEFGGWTNKFIFPPYDFSIANCMVTNFHTPKSTLLMMISAFAGHDFMMRAYEEAVKEKYRFYTYGDAMLIL

SEQ ID NO: 73899 - protein, 351 aa, unidentified
  source 1..351: note = Zunongwangia mangrovi
  REGION 1..351: note = tr|A0A1I1EZ75|A0A1I1EZ75_9FLAO S-adenosylmethionine:tRNA ribosyltransferase-isomerase; OS = Zunongwangia mangrovi OX=1334022 GN=queA PE=3 SV=1
MGMKLSNFNFELPPELLAEYPAENRDEARLMVLNRKEQTIEHKQFKDLINYFDPEDVMVLNNTKVFPARLYGNKEKTGARIEVFLLRELNPETKLWDVLVDPARKIRIGNKLYFGEDESLVAEVIDNTTSRGRTLRFLYDGSYEDFRRKLKELGETPLPKYIKRDVQPEDQERYQTIYAKEEGAVAAPTAGLHFSKHLLKRLEIKGINFAEVTLHVGLGTFSPVEVEDLSKHKMDSEEAFVKADAVDTINRAKSEKRKVCAVGTTVMRVLESSVSSNQTLNEFGGWTNKFIFPPYDFSIANCMVTNFHTPKSTLLMMISAFAGHDFMMRAYEEAVKEKYRFYTYGDAMLIL

SEQ ID NO: 73900 - protein, 351 aa, Zunongwangia profunda
  REGION 1..351: note = tr|D5BJY3|D5BJY3_ZUNPS S-adenosylmethionine:tRNA ribosyltransferase-isomerase OS=Zunongwangia profunda (strain DSM 18752 / CCTCC AB 206139 / SM-A87) OX=655815; GN = que A PE=3 SV=1
MGMKLSNFNFELPPELLAEYPAENRDEARLMVLNRKEQTIEHKQFKDLIDYFDPEDVMVLNNTKVFPARLYGNKEKTGARIEVFLLRELNAETKLWDVLVDPARKIRIGNKLYFGDDESLVAEVIDNTTSRGRTLRFLYDGSYEDFRRKLKELGETPLPKYIKRDVQPEDQERYQTIYAKEEGAVAAPTAGLHFSKHLLKRLEIKGVNFAEVTLHVGLGTFSPVEVEDLSKHKMDSEEAFVKGDAVHTINKAKTEKRKVCAVGTTVMRVLESSVSSNQTLNEFGGWTNKFIFPPYDFSIANCMVTNFHTPKSTLLMMISAFAGHDFMMRAYEEAVKEKYRFYTYGDAMLIL

SEQ ID NO: 73901 - protein, 349 aa, Zunongwangia profunda
  REGION 1..349: note = tr|A0A3D5J457|A0A3D5J457_9FLAO S-adenosylmethionine:tRNA ribosyltransferase-isomerase; OS = Zunongwangia profunda OX=398743 GN=queA PE=3 SV=1
MKLSNFNFELPPELLAEYPAENRDEARLMVLNRKEQTIEHKQFKDLIDYFDPEDVMVLNNTKVFPARLYGNKEKTGARIEVFLLRELNAETKLWDVLVDPARKIRIGNKLYFGDDESLVAEVIDNTTSRGRTLRFLYDGSYEDFRRKLKELGETPLPKYIKRDVQPEDQERYQTIYAKEEGAVAAPTAGLHFSKHLLKRLEIKGVNFAEVTLHVGLGTFSPVEVEDLSKHKMDSEEAFVKGDAVHTINKAKTEKRKVCAVGTTVMRVLESSVSSNQTLNEFGGWTNKFIFPPYDFSIANCMVTNFHTPKSTLLMMISAFAGHDFMMRAYEEAVKEKYRFYTYGDAMLIL

SEQ ID NO: 73902 - protein, 349 aa, Zunongwangia sp.; identical to SEQ ID NO: 73901
  REGION 1..349: note = tr|A0A2E0P1Z8|A0A2E0P1Z8_9FLAO S-adenosylmethionine:tRNA ribosyltransferase-isomerase; OS = Zunongwangia sp. OX=1965325 GN=queA PE=3 SV=1

SEQ ID NO: 73903 - protein, 362 aa, Zymobacter palmae
  REGION 1..362: note = tr|A0A348HHJ0|A0A348HHJ0_9GAMM S-adenosylmethionine:tRNA ribosyltransferase-isomerase; OS = Zymobacter palmae OX=33074 GN=queA PE=3 SV=1
MGDHRPRDTLLSSEWQAMQRSDFHFDLPEALIARYPSASRTDCRLLCVDGTSGQLAHTRFPALLDHLNPGDVMVFNDTRVIPARLFGQKASGGKVEMLLERLLDSHRALVHLRSSKSPKPGTRLHFEGGIEAEVEGRDDALFILHFLNEEALVPLLEQHGHMPLPPYITREDELSDRERYQTVYARNEGAVAAPTAGLHFDDAMMQQLRDKGIETAFVTLHVGAGTFQPVREDNITDHVMHSEWLNVSEETCDIVNAAHARGNRVIAVGTTSVRCLETASQNGTLRPFIGDTTIFIYPGYRWQCVDALVTNFHLPESTLLMLVSAFAGYDATMRAYQEAVEQQYAFFSYGDAMFLTRKPEAE

SEQ ID NO: 73904 - protein, 342 aa, Zymomonas mobilis
  REGION 1..342: note = tr|A0A2R9NU13|A0A2R9NU13_ZYMMB S-adenosylmethionine:tRNA ribosyltransferase-isomerase; OS = Zymomonas mobilis subsp. mobilis NRRL B-12526; OX = 1194424 GN=queA PE=3 SV=1
MRVDLFDFELPTESIALRPAVPRESARLLQVTSQGMDDYHVADLPNLLQEGDLLIFNDTRVIPAYLEGKKNQARISANMIKREGLRQWQAFVRNAKRLKSDDIVDFGQDVSARVVHRNDDGSVLFEFLGNEPVEILLERAGNMPLPPYIAHKRPADQQDRQDYQTIFAEKEGAVAAPTASLHFTEELLQRLEEKGVKHTKVTLHVGAGTFLPMKVDDSDDHVMHSEWGQISAETANVINETKKQGGRVIATGTTSLRLIESAADETGLVHPFSDETDIFITPGYRFRVIDGLMTNFHLPKSTLFMLVSALMGREKMLAAYQHAIDTGYRFYSYGDSSLLLPK

SEQ ID NO: 73905 - protein, 342 aa, Zymomonas mobilis
  REGION 1..342: note = sp|Q5NP84|QUEA_ZYMMO S-adenosylmethionine:tRNA ribosyltransferase-isomerase OS=Zymomonas mobilis subsp. mobilis (strain ATCC 31821 / ZM4 / CP4) OX=264203 GN=queA; PE = 3 SV=1
MRVDLFDFELPTESIALRPAVPRESARLLQVTSQEMDDYHVADLPNLLQEGDLLIFNDTRVIPAYLEGKKNQARISANMIKREGLRQWQAFVRNAKRLKSDDIVDFGQDVSARVVHRNDDGSVLFEFLGNEPVEILLERAGNMPLPPYIAHKRPADQQDRQDYQTIFAEKEGAVAAPTASLHFTEELLQRLEEKGVKHTKVTLHVGAGTFLPMKVEDSDDHVMHSEWGQISAETANAINETKKQGGRVIATGTTSLRLIESAADETGLVHPFSDETDIFITPGYRFRVIDGLMTNFHLPKSTLFMLVSALMGREKMLAAYQHAIDTGYRFYSYGDSSLLLPK

SEQ ID NO: 73906 - protein, 356 aa, Escherichia coli; identical to SEQ ID NO: 62661
  REGION 1..356: note = sp|P0A7F9|QUEA_ECOLI S-adenosylmethionine:tRNA ribosyltransferase-isomerase OS=Escherichia coli (strain K12) OX=83333 GN=queA PE=1 SV=1

SEQ ID NO: 73907 - protein, 356 aa, Escherichia coli; identical to SEQ ID NO: 62661
  REGION 1..356: note = sp|A7ZIF7|QUEA_ECO24 S-adenosylmethionine:tRNA ribosyltransferase-isomerase OS=Escherichia coli O139:H28 (strain E24377A / ETEC) OX=331111 GN=queA PE=3 SV=1

SEQ ID NO: 73908 - protein, 313 aa, unidentified
  source 1..313: note = Abditibacterium utsteinense
  REGION 1..313: note = tr|A0A2S8SSG6|A0A2S8SSG6_9BACT Epoxyqueuosine reductase OS=Abditibacterium utsteinense OX=1960156; GN = B1R32_10957 PE=4 SV=1
MSHQFAIQIKERARELGFAACGIAAAAPPQPTFDLEKWLSSGFHAGMDWMKRPESIAKRADIREVFPGAQSVIVLALNYRTDAPFDEEKHGKIARYARGLDYHDIFKARGNELLSWIQSQQPCAGRMYSDSAPILEHAWAQRAGIGWVGKNTLVMSRELGSYFLLGELVLDIELPPDAPYVQSFCGTCTACLDACPTDAFSAPRVLDANKCISYHTIENREVAPIELRENFQDNVFGCDICQQVCPWNRKNEAKVSAEPQLWTRDLPGIEEWTNIPQEEFSARLKGSPIKRAKRRGMRRNAARALKNRKSHKK

SEQ ID NO: 73909 - protein, 363 aa, unidentified
  source 1..363: note = Abyssibacter profundi
  REGION 1..363: note = tr|A0A363UNV7|A0A363UNV7_9GAMM Epoxyqueuosine reductase OS=Abyssibacter profundi OX=2182787 GN=queG PE=3; SV = 1
MRVKTQPPNATPSPEVLAGRIRDWATELGFDGVGITGFDLAEDVEHLHQWLREGRHGSMDYMARHTDLRADPARLQPEAIRCISVRMNYRTQSADAMQACLDDPDRAYVSRYALGRDYHKLMRGRLKQLARRLQEAAPEALSRPFVDSAPVLEKALGRDARLGWIGKHSLLLHRDAGSWFFLGEILTNVALPVDDDPPVKNLCGSCTACMEICPTQAITGPQQLDARRCIAYLTIEHKGSIPEGLRKPMGNRIFGCDDCQLVCPWNRYAQATREPDFAPRHGLDTARLVDLFAWSEDEFLSRTEGMPIRRTGYAGWRRNIAVALGNATASDESRQALRGALDDPSPLVREHVQWALQQLEAAD

SEQ ID NO: 73910 - protein, 381 aa, unidentified
  source 1..381: note = Abyssicoccus albus
  REGION 1..381: note = tr|A0A3N5BPD9|A0A3N5BPD9_9STAP Epoxyqueuosine reductase OS=Abyssicoccus albus OX=1817405 GN=EDD62_1005; PE = 4 SV=1
MNYYQLKRDIVDYAHSIGIDDIGFTSAEPFEELRPKLEEYYAKGYDSGFEVGTIDERINPKLSLPSAQSIIAIAVGYPNKLKDAPRSTKNERRGIFARASWGQDYHTLLNDRLNKLEAYIKHRVPEVECMNMVDTGVLSDRAVAERAGLGFTGRNGFVINPKLGTWTYLGEMLINLPFPSDNPIIDSCGDCTICVDRCPTGALLGEGGLNSKKCISFQTQLKGMMDVHYRKKIGNRLYGCDTCQQVCPLNKGINTTHEDIEVEPDVVKPLLIPLLRMSNREFKETYGHLAGAWRGKKPIQRNAMIALANFKDDSAIPELKKVISEDVRPMIVATAYWAIAEIEGISSIEFIERALQKETEQIVLDELNDILNTLRREQYAD

SEQ ID NO: 73911 - protein, 309 aa, unidentified
  source 1..309: note = Acaryochloris sp.
  REGION 1..309: note = tr|A0A2W1K6C6|A0A2W1K6C6_9CYAN Epoxyqueuosine reductase OS=Acaryochloris sp. RCC1774 OX=1764569; GN = queG_1 PE=3 SV=1
MDFCPDLVKQQALDIGFHKVGISAVQPRDTATLQSWLAQGYQAEMAWMQDPRRQDIEQVMPGVRSVISVALNYYASQERPQGKQYAKISRYGWGRDYHRVLTKRLKAFSAWLESQGEGIRTRYYVDTGPVQDKVWAERAGLGWIGKHSNLISRDYGSWIFLGEILTNLELEPDTPHTQHCGTCTRCLEACPTQAITEPFVVDANRCIAYHTIENRSETLPQEVADNLQGWVAGCDICQDVCPWNQRFAKETDIPDFQPYPWNVGPTLAELATVSEEERDRKFPASALRRITRKMLQRNAQASLDNPVQK

SEQ ID NO: 73912 - protein, 386 aa, unidentified
  source 1..386: note = Accumulibacter phosphatis
  REGION 1..386: note = tr|C7RVF3|C7RVF3_ACCPU Epoxyqueuosine reductase; OS = Accumulibacter phosphatis (strain UW-1) OX=522306; GN = queG PE=3 SV=1
MIRAMQESHSQTGGDVGPADERAENYAYAALARRIKDWGQELGFAAIGIAGIDVTAATPWLRRWLALGRHGEMHYMAKHAGLRGAPERLVPGTLSVISARLAYWPAAADARQVLADGDQAYVSRYALGRDYHKTVRQRLQKLADRIRQAVAALDHGEPFACRVFSDSAPVLETEFASRSGIAWRGKHTLSLTRGGSWHFLGEIYTNLPLPHDAAVADHCGDCRRCLEACPTAAIVAPYEVDARRCISYLTIELPGAIPVALRPLVGNRIYGCDDCQLYCPWNRFARLGDRDFAVRNGLDAVPLAELFAWSEDDFGQRLAGSPIRRIGHARWLRNIAVALGNAASSPAIIAALRSRLQDPSLLVREHVDWALAQHAARDQPAAPAGR

SEQ ID NO: 73913 - protein, 229 aa, Acetanaerobacterium elongatum
  REGION 1..229: note = tr|A0A1H0DFN5|A0A1H0DFN5_9FIRM Epoxyqueuosine reductase QueG (Queuosine biosynthesis); OS = Acetanaerobacterium elongatum OX=258515; GN = SAMN05192585_12827 PE=4 SV=1
MEQQIKELVLSLGADVCGIAGIGRFESAPEGFHPKDIYPDCKSVVVFGVALPKGLAKVEPRLVYGHYNDICKPQADRIALFAAKAIEERFKTFAVPVPSDNPYEYWDAEKLEGRGLISMKHAACLAGLGTFGKSTLLLNCQYGSLLTLGAVLTALDLASDPMADSICIAGCTRCIDSCPVQALDGKGGVNQAKCRRNTYGKNARGFNTVDCNRCRTVCPMRFGTQQQES

SEQ ID NO: 73914 - protein, 294 aa, Acetoanaerobium noterae
  REGION 1..294: note = tr|A0A1T5C4K8|A0A1T5C4K8_9FIRM Epoxyqueuosine reductase OS=Acetoanaerobium noterae OX=745369; GN = SAMN02745120_2001 PE=4 SV=1
MIDIINQENIDQYTIINVNSIKDSLDKFSFYLEERKLLGVQLDLEEQNLGSRLKLDINNKPASSIICIFFPYLTESHSFDSNISVSAQGIDYHIWAKDKLKRIVQKLQIKYPNSTFSIQVDNGPLNERFFALESGLGYKGINNMVINEVYGSYGFIGLIVTDLVLKEKRLPKKNCINCGKCIEYCPGKALNYKNGFIGQRCASYLTQKKTELSDSEIAILKKSNKVYGCDICQIVCPHNRDIKKSQEIDDVMKRLNLNDIASLSNKEFKKNYGNRAFAWRGKNILVRNFNIIGD

SEQ ID NO: 73915 - protein, 294 aa, unidentified
  source 1..294: note = Acetoanaerobium sticklandii
  REGION 1..294: note = tr|E3PXQ5|E3PXQ5_ACESD Putative iron-sulfur cluster protein OS=Acetoanaerobium sticklandii (strain ATCC 12662 / DSM 519 / JCM 1433 / NCIMB 10654) OX=499177 GN=CLOST_ 1098 PE=4 SV=1
MIDIINQENIDQYTIINVNSIKDSLDKFSFYLEERKLLGAQLDLEEQNLVSRLKLDINNKPASSIICIFFPYLTESHSFDSNISVSAQGIDYHIWAKDKLKRIVQKLQIKYPNSTFSIQVDNGPLNERFFALESGLGYKGINNMVINEVYGSYGFIGLIVTDLVLKEKRLPKKNCINCGKCIEYCPGKALNYKKGFIGQRCASYLTQKKTELSDSEIAILKKSNKVYGCDICQIVCPHNRDIKKSQEINDVIKRLNLNDIASLSNKEFKKKFGNRAFAWRGKNILVRNFNIIGD

SEQ ID NO: 73916 - protein, 372 aa, Acetobacter aceti
  REGION 1..372: note = tr|A0A1U9KK13|A0A1U9KK13_ACEAC Epoxyqueuosine reductase OS=Acetobacter aceti OX=435 GN=queG PE=3 SV=1
MSSSSSTVMLRLAERMETKARELGFHAFGICDAEIGTETGVRLRDMLAQGHHGTMTWMAERVESRAHPNGLWPEARSVISLGLSYAPEGDPLATLSEKGCGNISVYARNRDYHDIIKGMLKHLAQYLVAETRRVELKAEVKVFVDTAPVPEKPLAERAGLGWQGKHTNLVSRDHGSWLLLGEIYTTLALPPTAHRAGRCGSCSRCLAVCPTNAFPAPYQLDARRCISYLTIEYAGPIPLEFREAMGNHIYGCDDCLSACPWNRFAEESHVMKLKAREDLIAPSLSDLAALDDAGFRSLFSGSPIKRIGRNRFVRNVLIAIGNSGDSTMTQAAETLCHDPDPVVAEAAAWAMDRLTKQVAGTVSSMASAGGRP

SEQ ID NO: 73917 - protein, 367 aa, Acetobacter aceti
  REGION 1..367: note = tr|A0A0D6MRU9|A0A0D6MRU9_ACEAC Epoxyqueuosine reductase OS=Acetobacter aceti NBRC 14818 OX=887700; GN = queG PE=3 SV=1
MSSSPTLMHRLVERLETKARELGFYAFGICAADIGEETGDRLRDMIAQGHHSTMTWMAERVESRAHPNGLWPEARSVISLGLSYAPEGDPLATLADKACGNISIYARNRDYHDIIKGMLKHLAQYLVAETRRAQLEAEVKVFVDTAPVPEKPLAEQAGLGWQGKHTNLVSRDHGSWLLLGEIYTTLELPPTPHRAGQCGSCSRCLEVCPTSAFPSPYRLDARRCISYLTIEHAGPIPHEFREAMGNHIYGCDDCLSACPWNRFAEESRVMKLKAREDLIAPRLSELAALDDAGFRTLFSGSPIKRIGRNRFVRNVLIAIGNSGDEGMGPIAERLRDDADPVVAEAADWAVKRLAQTVSSPMPARPGL

SEQ ID NO: 73918 - protein, 366 aa, unidentified
  source 1..366: note = Acetobacter ascendens
  REGION 1..366: note = tr|A0A1Y0V213|A0A1Y0V213_9PROT Epoxyqueuosine reductase OS=Acetobacter ascendens OX=481146 GN=queG PE=3; SV = 1
MTAPSAHPSQPAAPAAKLAEKIRIKALELGFDAIGFCPAHLGPEVRARLKDFLAEGYHGEMGWLADRTEQRSQPIALWPEARSVIALGLNYAPAQNPLSTLQNRTCGNISVYARHRDYHDIVKGMLKHLAQFVVREARMMLNTAPDVKVFVDTAPVAEKPLAAQAGLGWQGKHTNLVSRQHGSWLFLGEIYTTLELPTSADSGGSCGSCTRCLNACPTQAFPAPYQMDARKCISYLTIEHAGPIPTPLRKAIGTHIYGCDDCLAVCPWNRFAQISRHIKLQPRPDLIAPELATLSQLDDAAFRTMFAGSPIKRIGRNRFIRNVLIAIGNSGHPELLPYAQSLRQDPDTVVAEAADWATQCLMGDAA

SEQ ID NO: 73919 - protein, 366 aa, unidentified
  source 1..366: note = Acetobacter ascendens
  REGION 1..366: note = tr|A0A1D8QY67|A0A1D8QY67_9PROT Epoxyqueuosine reductase OS=Acetobacter ascendens OX=481146 GN=queG PE=3; SV = 1
MTAPSAHPSQPAAPAAKLAEKIRIKALELGFDAIGFCPAHLGPEVRARLKDFLAEGYHGEMGWLADRTEQRNQPIALWPEARSVIALGLNYAPAENPLSTLQNRTCGNISVYARHRDYHDIVKGMLKHLAQFVVREARMMLNTAPDVKVFVDTAPVAEKPLAAQAGLGWQGKHTNLVSRQHGSWLFLGEIYTTLELPTSADSGGSCGSCTRCLNACPTQAFPAPYQMDARKCISYLTIEHAGPIPTPLRKAIGTHIYGCDDCLAVCPWNRFAQISRHIKLQPRPDLIAPELATLSQLDDAAFRTMFSGSPIKRIGRNRFIRNVLIAIGNSGHPELLPYAQSLLQDPDTVVAEAADWATQCLMGDAA

SEQ ID NO: 73920 - protein, 387 aa, Acetobacter cerevisiae
  REGION 1..387: note = tr|A0A149UVJ8|A0A149UVJ8_9PROT Epoxyqueuosine reductase OS=Acetobacter cerevisiae OX=178900 GN=queG PE=3; SV = 1
MSCLSGAEKLAARIREKALALGFDAIGFCPAHLGPEVRDRLTDFLANGYHGEMGWLADRADQRTQPTTLWPEARTVIALGLSYAPEGDPPATLSQPDRGNISVYARHRDYHDLIKGMLKHLAQFVVREGTLEAERSLAAAQRRNTQSNQHNTPDQHPAEEPRPQPPGVKVFVDTAPVAEKPLAEQAGLGWQGKHTNLVSRSHGSWLFLGEIYTTLALPTSPPSGGGCGSCTRCLTACPTQAFPAPYSMDARRCISYLTIEYAGPIPLDLRPAIGTHIYGCDDCLAVCPWNRFAQASRQIKLQPRPDLIAPDLASLSQLDDAAFRLKFSGSPIKRIGRNRFVRNVLIAMGNSGLAELRPHAHRLTQDPDSVVAEAAQWAVARLEGLPA

SEQ ID NO: 73921 - protein, 387 aa, Acetobacter cerevisiae
  REGION 1..387: note = tr|A0A149V985|A0A149V985_9PROT Epoxyqueuosine reductase OS=Acetobacter cerevisiae OX=178900 GN=queG PE=3; SV = 1
MSSLSGAEKLAARIREKALALGFDAIGFCPAHLGPEVRDRLTDFLANGYHGEMGWLADRADQRTQPTTLWPEARTVIALGLSYAPEGDPLATLSQPDRGNISVYARHRDYHDLIKGMLKHLAQFVVREGTLEAARALTAAQRQNSQTSQHNPPDQHRAEELRPQPPDVKVFVDTAPVAEKPLAEQAGLGWQGKHTNLVSRSHGSWLFLGEIYTTLALPTSPPSGGGCGSCTRCLTACPTQAFPAPYSMDARRCISYLTIEYAGPIPLDLRPAIGTHIYGCDDCLAVCPWNRFAQASRQIKLQPRPDLIAPDLASLSQLDDAAFRLKFSGSPIKRIGRNRFVRNVLIAMGNSGLAELCPHAHRLTQDPDSVVAEAAQWAVTRLEGLPA

SEQ ID NO: 73922 - protein, 365 aa, Acetobacter cibinongensis
  REGION 1..365: note = tr|A0A1Z5YZA9|A0A1Z5YZA9_9PROT Epoxyqueuosine reductase OS=Acetobacter cibinongensis OX=146475 GN=queG; PE = 3 SV=1
MAEAPAHPLHKLADRIRDKALALGFDAIGFCPATLGPEVRERLTDFLAKGYHGDMGWLADRTTQRTHPQALWPEARSVIALGVSYAPEGDALATLAKTECGNISVYARHRDYHDLIKGMLKHLAQFVVKEGQTTLSTTGTGEPPQVKVFVDTAPVAEKPLAEQAGLGWQGKHTNLVSRSHGSWLFLGEIYTTLELPQSAPSGGQCGSCTRCLTACPTQAFPAPYQMDARRCISYLTIEHAGPIPHALRAAMGTHIYGCDDCLAVCPWNRFATVSRQIKLQPRPDLIAPELADLVQLDDTAFRQRFSGSPIKRIGRDRFIRNVLTAIGNSGRQELIPLASALCHDPNPVVAEAAEWAVTRLEGHTP

SEQ ID NO: 73923 - protein, 365 aa, Acetobacter cibinongensis
  REGION 1..365: note = tr|A0A0D6N2F3|A0A0D6N2F3_9PROT Epoxyqueuosine reductase OS=Acetobacter cibinongensis 4H-1 OX=1231339; GN = queG PE=3 SV=1
MAEAPAHPLHKLADRIRDKALALGFDAIGFCPATLGPEVRERLTDFLAKGYHGDMGWLADRTTQRTHPQALWPEARSVIALGVSYAPEGDALATLAKTECGNISVYARHRDYHDLIKGMLKHLAQFVVKEGQTTLSATRTGEPPQVKVFVDTAPVSEKPLAEQAGLGWQGKHTNLVSRSHGSWLFLGEIYTTLELPQSAPSGGQCGSCTRCLTACPTQAFPAPYQMDARRCISYLTIEHAGPIPHALRAAIGTHIYGCDDCLAVCPWNRFATVSRQIKLQPRPDLIAPELADLVQLDDTAFRQRFSGSPIKRIGRDRFIRNVLTAIGNSGRQELIPLASALCHDPNPVVAEAAEWAVTRLEGRTP

SEQ ID NO: 73924 - protein, 355 aa, Acetobacter fabarum
  REGION 1..355: note = tr|A0A269XYJ1|A0A269XYJ1_9PROT Epoxyqueuosine reductase OS=Acetobacter fabarum OX=483199 GN=queG PE=3; SV = 1
MHPGSRLSARIRDKALELGFDAIGFCPATLGPEARVRLQDFLANGYHGEMGWLADRTKQRSQPTALWPEARTVIALGLSYAPEGDALATLQNPDCGNISVYARHRDYHDVLKGMLKHLAQFVVREGRLAHPATPEVKVFVDTAPVAEKPLADQAGLGWQGKHTNLVSRQHGSWLFLGEIYTTLDLPASPPSGGGCGSCTRCLNACPTQAFPAPYQMDARRCISYLTIEHAGPIPLPLRPLMGTHIYGCDDCLAVCPWNRFAKMASNIKLQPRADLIAPDLATLSQLDDAAFRALFSGSPIKRIGRNRFIRNVLVAMGNSGRAHLLPHARALTTDPDPVVRDAADWAMTQLESPTA

SEQ ID NO: 73925 - protein, 367 aa, Acetobacter ghanensis
  REGION 1..367: note = tr|A0A0U5F1K6|A0A0U5F1K6_9PROT Epoxyqueuosine reductase OS=Acetobacter ghanensis OX=431306 GN=queG PE=3; SV = 1
MTKAKPPPPQPAAHPASRLAERIRNKALELGFDAIGFCPAALGPEVRERLQDFLANGYHGEMGWLAERTDQRSQPTALWPQARTVIALGTSYAPSNNALATLQQPDRGNISVYARHRDYHDVIKGMLKHLAQFVVREGKQAAPFGPDVKVFVDTAPVAEKPLAAQAGLGWQGKHTNLVSRQHGSWLFLGEIYTTLDLPTSPPSGGGCGSCSRCLTACPTQAFPTPYQMDARRCISYLTIEHAGPIPPDLRPMMGTHIYGCDDCLAVCPWNRFAKAAHLMKLQPRQDLIAPELATLSQLDDAAFRTLFSGSPVKRIGRNRFIRNVLIAIGNSGRPSLLPHAHTLCMDPDPVVRDAAFWAVASLERRMT

SEQ ID NO: 73926 - protein, 376 aa, Acetobacter indonesiensis
  REGION 1..376: note = tr|A0A252ATG8|A0A252ATG8_9PROT Epoxyqueuosine reductase OS=Acetobacter indonesiensis OX=104101 GN=queG; PE = 3 SV=1
MSDTPPLQPTLPETRSQKLAARIREKALALGFDAIGFCPAHLGPEVRNRLTDFLAQGYHGEMGWLADRADQRAHPQALWPEARSVIALGLSYAPEGDALATLRKPECGNISVYARHRDYHDLIKGMLKHLAQFVVKEGREALNVSAQSQQATDTPQVKVFVDTAPVAEKPLAAQAGLGWQGKHTNLVSRTQGSWLFLGEIYTTLDLPLSPPSGGSCGSCTRCLTACPTQAFPEPYKMDARRCISYLTIEHAGPIPLALRPAIGTHIYGCDDCLAVCPWNRFAQVSRQIKLQPRPDLIAPELATLSQLDDAAFRQMFSGSPIKRIGRNRFIRNVLIAIGNSKQPALLPHAQTLTSDADPIVAEAAQWAATRLIDLQA

SEQ ID NO: 73927 - protein, 376 aa, Acetobacter indonesiensis
  REGION 1..376: note = tr|A0A0D6N839|A0A0D6N839_9PROT Epoxyqueuosine reductase OS=Acetobacter indonesiensis 5H-1 OX=1231340; GN = queG PE=3 SV=1
MSDTPPLQPALSETRSQKLAARIREKALALGFDAIGFCPAHLGPEVRTRLTDFLVQGYHGEMGWLADRADQRAHPQALWPEARSVIALGLSYTPEGDALATLRKPECGNISVYARHRDYHDLIKGMLKHLAQFVVKEGRDALNVSAQSQHATDTPQVKVFVDTAPVAEKPLAAQAGLGWQGKHTNLVSRTQGSWLFLGEIYTTLDLPPSPPSGGSCGSCTRCLTACPTQAFPEPYKMDARRCISYLTIEHAGPIPLALRPAIGTHIYGCDDCLAVCPWNRFAQVSRQIKLQPRPDLIAPELATLSQLDDAAFRQMFSGSPIKRIGRNRFIRNVLIAIGNSKQPALLPHAQTLTSDADPIVAEAAQWATTRLMDQQA

SEQ ID NO: 73928 - protein, 391 aa, Acetobacter malorum
  REGION 1..391: note = tr|A0A149RER9|A0A149RER9_9PROT Epoxyqueuosine reductase OS=Acetobacter malorum OX=178901 GN=queG PE=3; SV = 1
MPSQPGAEKLAARIREKALALGFDAIGFCPAHLGPEVRDRLTDFLANGYHGEMGWLADRADQRVQPTTLWPEARTVIALGVSYAPEGDPLATLSQPDRGNISVYARHRDYHDLIKGMLKHLAQFVVREGTREAERAFTAAQRQTGQTSQTGKPGLHAGEPGRSVAEAPPPGVKVFVDTAPVAEKPLAAQAGLGWQGKHTNLVSRSHGSWLFLGEIYTTLALPTSPPSGGGCGSCTRCLTACPTQAFPAPYSMDARRCISYLTIEYAGPIPLELRPAIGTHIYGCDDCLAVCPWNRFAQASRQIKLQPRPDLIAPDLASLSQLDDTAFRQKFSGSPIKRIGRNRFVRNVLIAIGNSGLAELRPHAHRLTQDPDNVVAEAARWAVARLDGLRV

SEQ ID NO: 73929 - protein, 372 aa, Acetobacter malorum
  REGION 1..372: note = tr|A0A1Y3G8L1|A0A1Y3G8L1_9PROT Epoxyqueuosine reductase OS=Acetobacter malorum OX=178901 GN=queG PE=3; SV = 1
MPSQPGAEKLAARIREKALALGFDAIGFCPAHLGPEVRERLTDFLANGYHGEMGWLADRANQRTQPTTLWSEARTVIALGLSYAPEGDPLATLSQPDRGNISVYARHRDYHDLIKGMLKHLAQFVVREGRLEAERAAARGHENANPEPEAPGVKVFVDTAPVAEKPLAAQAGLGWQGKHTNLVSRSQGSWLFLGEIYTTLALPASPPSGGGCGSCTRCLTACPTQAFPAPYSMDARRCISYLTIEYAGPIPLELRPAIGTHIYGCDDCLAVCPWNRFAQTSRQIKLQPRPDLMAPDLASLSQLDDAAFRQKFSGSPIKRIGRNRFVRNVLIAIGNSGLAELRPHAQRLTQDTDSVVAEAARWALARLEGVPE

SEQ ID NO: 73930 - protein, 376 aa, Acetobacter nitrogenifigens
  REGION 1..376: note = tr|A0A511X755|A0A511X755_9PROT Epoxyqueuosine reductase OS=Acetobacter nitrogenifigens DSM 23921 = LMG 23498 OX=1120919 GN=queG PE=3 SV=1
MAAAFDPAGFLSADAKGPALIGRDARAAALADRLRDKAFALGFDAFGICDTALGGEARERLRAFLEAGRHGAMTWMTERTEARSHPNGLWPEARSVVALGLNYGPDGDALATLDRPDRGNISVYARNRDYHDIIKGLLKHLAQFLVAEARRRNLPAEVKVFVDTAPVPEKPLAERAGLGWQGKHTNLVSRTHGSWLLLGEIYTTLDLPPSSLSGGRCGSCTRCLATCPTDAFPAPYQLDARRCVSYLTIEHPGPIPHEFREAMGNRVYGCDDCLAVCPWNRFASASRQAKLQAREDLTAPRLAALAALDDTEFRTLFSGSPIKRIGRNRFVRNVMIAIGNSNEASLLPTAQARCDDGDPVVAEAARWACERLEGPG

SEQ ID NO: 73931 - protein, 363 aa, Acetobacter oeni
  REGION 1..363: note = tr|A0A511XMU9|A0A511XMU9_9PROT Epoxyqueuosine reductase OS=Acetobacter oeni OX=304077 GN=queG PE=3 SV=1
MVSGGFGARVPVSSSSLAERIRERAFALGFDAFGICDAETGPEAGERLRAFVADGRHGTMGWLAERVEARAHPQGLWPEARSVISVGMSYAPEGDPLATLGLPGAGNISVYARHRDYHDIIKGLLKHLAQFVVVESRRGGVEAGVKVFVDTAPVPEKPLAERAGLGWQGKHTNVVSRDHGSWLLLGEVYTTLVLPPTAHRAGQCGSCTRCLVACPTDAFPAPYEMDARRCISYLTIEHAGPVPEEFRVAMGNRIYGCDDCLAACPWNRFAAESRHLKLRAREDLVAPDLAELAVLDDSGFRRLFSGSPIKRIGRGRFVRNVLIAAGNSGDARLLEVVQGLCEDSDPVVAEAARWACGRLGAAE

SEQ ID NO: 73932 - protein, 368 aa, unidentified
  source 1..368: note = Acetobacter okinawensis
  REGION 1..368: note = tr|A0A252BYB1|A0A252BYB1_9PROT Epoxyqueuosine reductase OS=Acetobacter okinawensis OX=1076594 GN=queG; PE = 3 SV=1
MTNPSPPPHATGTADPATHRLAERIRNKALELGFDAIGFCPASLGPEVRLRLQDFLANGYHGQMNWLADRAEQRSQPTALWPDARTVIALGTSYAPEGDALATLHKPGCGNISVYARHRDYHDVVKGMLKHLAQFVVREGRQATAAPEVKVFVDTAPVAEKPLAEKAGLGWAGKHTNLVSRQHGSWLFLGEIYTTLALPSSPPSGGGCGSCSRCLSACPTQAFPAPYQMDARRCISYLTIEHAGPIPVALRPLMGTHIYGCDDCLAVCPWNRFAKASQHIKLQPRAELIAPDLAELSQLDDPAFRTLFSGSPIKRIGRNRFVRNVLIAIGNSGLPALLPHAHTLSMDPDPVVRDAALWAIEQLEGRTT

SEQ ID NO: 73933 - protein, 365 aa, Acetobacter orientalis
  REGION 1..365: note = tr|A0A252BFM8|A0A252BFM8_9PROT Epoxyqueuosine reductase OS=Acetobacter orientalis OX=146474 GN=queG PE=3; SV = 1
MTQAPAPALQNLADNIRNKASALGFDAIGFCPAHLGPEVRARLADFLAKGYHGEMGWLAERSAQRTHPQALWPEAQSVIALGVSYAPEGEALATLKRPECGNISVYARHRDYHDLIKGMLKHLAQYVVKEGQAALAKHGNTAPPQVKVFVDTAPVAEKPLAAQAGLGWQGKHTNLVSRTHGSWLFLGEIYTTLALPTSPPSGGQCGSCTRCLTACPTQAFPAPYTLNAKRCISYLTIEHAGPIPHDLRPAIGTHIYGCDDCLAVCPWNRFAKTSRHAKLQPRPDLLAPELAHLVQLDDTAFRQLFSGSPIKRIGRNRFIRNVLTAIGNSGKKDLLPYATALRQDPDPIVAEAATWAVTCLESLPP

SEQ ID NO: 73934 - protein, 365 aa, Acetobacter orientalis
  REGION 1..365: note = tr|A0A0D6NFZ0|A0A0D6NFZ0_9PROT Epoxyqueuosine reductase OS=Acetobacter orientalis 21F-2 OX=1231341; GN = queG PE=3 SV=1
MTQAPAPALQNLADNIRNKALALGFDAIGFCPAHLGPEVRARLADFLAKGYHGEMGWLAERSAQRTHPQALWPEAQSVIALGVSYAPEGDALATLKRPECGNISVYARHRDYHDLIKGMLKHLAQYVVKEGQAALAKHGNAAPPQVKVFVDTAPVAEKPLAAQAGLGWQGKHTNLVSRTHGSWLFLGEIYTTLALPTTPPSGGQCGSCTRCLTACPTQAFPAPYTLNAQRCISYLTIEHAGPIPHDLRPAIGTHIYGCDDCLAVCPWNRFAKTSRHAKLQPRPDLLAPELAHLVQLDDTAFRQLFSGSPIKRIGRNRFIRNVLTAIGNSGKKDLLAYAAALRQDPDPIVAEAATWAVTCLESLPP

SEQ ID NO: 73935 - protein, 394 aa, Acetobacter orleanensis
  REGION 1..394: note = tr|A0A4Y3TKI3|A0A4Y3TKI3_9PROT Epoxyqueuosine reductase OS=Acetobacter orleanensis OX=104099 GN=queG; PE = 3 SV=1
MSKVDSAGQVDAMLPGAEKLAARIREKALALGFDAIGFCPAHLGPEVRERLTDFLAKGYHGEMGWLAERADQRTQPTTLWPDARTVIALGVSYAPEGDPLATLRLPDRGNISVYARHRDYHDLIKGMLKHLAQFVVREGTLAAERASATMQHHASRQDSAAHPTPNVPDIPPPGVKVFVDTAPVAEKPLAAQAGLGWQGKHTNLVSRSHGSWLFLGEIYTTLVLPASPPSGGGCGTCTRCLTACPTQAFPAPYQMDARRCISYLTIEHAGPIPLEFRPAIGTHIYGCDDCLAVCPWNRFAQVSRQIKLQPRPDLIAPDLTSLSQLDDAAFRQKFSGSPIKRIGRNRFVRNVLIAIGNSGLPDLLPHAHALTQDPDSVVAEAAQWAVTRLKACQP

SEQ ID NO: 73936 - protein, 366 aa, Acetobacter pasteurianus
  REGION 1..366: note = tr|A0A1A0DEE9|A0A1A0DEE9_ACEPA Epoxyqueuosine reductase OS=Acetobacter pasteurianus OX=438 GN=queG PE=3; SV = 1
MTAPSAHPPQPAAPAAKLAEKIRIKALELGFDAIGFCPAHLGPEVRTRLKDFLAEGYHGEMGWLADRTEQRSQPTALWPEARSVIALGLNYAPAENPLSTLQNRTCGNISVYARHRDYHDVVKGMLKHLAQFVVREARMMLATAPDVKVFVDTAPVAEKPLAAQAGLGWQGKHTNLVSRQHGSWLFLGEIYTTLELPASAVSGGSCGSCTRCLNACPTQAFPAPYQMDARKCISYLTIEHAGPIPHPLRKAIGTHIYGCDDCLAVCPWNRFAQTSRHIKLQPRPDLIAPELAALSQLDDAAFRTMFSGSPIKRIGRNRFIRNVLIAIGNSGHPELLPYAHALRQDPDSMVAEAADWAMQCLTGDAA

SEQ ID NO: 73937 - protein, 366 aa, Acetobacter pasteurianus; identical to SEQ ID NO: 73936
  REGION 1..366: note = tr|A0A401WH34|A0A401WH34_ACEPA Epoxyqueuosine reductase OS=Acetobacter pasteurianus subsp. pasteurianus LMG 1262 = NBRC 106471 OX=940265 GN=queG PE=3 SV=1

SEQ ID NO: 73938 - protein, 354 aa, unidentified
  source 1..354: note = Acetobacter peroxydans
  REGION 1..354: note = tr|A0A4Y3TX84|A0A4Y3TX84_9PROT Epoxyqueuosine reductase OS=Acetobacter peroxydans OX=104098 GN=queG PE=3; SV = 1
MARLTERIRDKALALGFDAIGFCPAHLSPEVRARLADFLANGQHGSMGWLAERTAERAQPTALWPQARSVVCLGVSYAPETDPRIPLPPDRGTISVYARHRDYHDMIKGMLKHLAQFMIGEAAKLDHAAAEVKVFVDTAPVAEKPLAAQAGLGWQGKHTNLVSRQHGSWLFLGEVYTTLALTPSPPPAGGCGTCTRCLNACPTNAFPAPYQLDARRCISYLTIEHAGPIPLELRRGIGTRIYGCDDCLAVCPWNRFAQTSRHPKLQPRADLMAPELTRLSQLDDAAFRTLFSGSPIKRIGRNRFIRNVLMAIGNSGLPALRPAATALLNDPDPVVAEAAQWALAQPATPEAPAP

SEQ ID NO: 73939 - protein, 364 aa, unidentified
  source 1..364: note = Acetobacter persici
  REGION 1..364: note = tr|A0A1U9LHW5|A0A1U9LHW5_9PROT Epoxyqueuosine reductase OS=Acetobacter persici OX=1076596 GN=queG PE=3; SV = 1
MPGAEKLAARIREKALALGFDAIGFCPAHLGPDVRARLTDFLAKGYHGEMGWLAERADQRTQPTTLWPDARTVIALGVSYAPEGDPLATLRQPDRGNISVYARHRDYHDLIKGMLKHLAQFVVREGTLEARRAFAAESPPPQPPGVKVFVDTAPVAEKPLAEQAGLGWQGKHTNLVSRSHGSWLFLGEIYTTLELPSSPPSGGGCGSCTRCLTACPTQAFPAPYQMDARRCISYLTIEHAGPIPLELRPGIGTHIYGCDDCLAVCPWNRFARTSRQIKLQPRADLIAPDLASLSALDDAAFRQKFSGSPIKRIGRNRFVRNVLIAIGNSGLPDLLPYAHRLTQDPDEVVAEAARWAVTRLETIP

SEQ ID NO: 73940 - protein, 364 aa, unidentified
  source 1..364: note = Acetobacter persici
  REGION 1..364: note = tr|A0A252AM48|A0A252AM48_9PROT Epoxyqueuosine reductase OS=Acetobacter persici OX=1076596 GN=queG PE=3; SV = 1
MPGAEKLAARIREKALALGFDAIGFCPAHLGPDVRARLTDFLAKGYHGEMGWLADRADQRTQPTTLWPEARTVIALGVSYAPEGDPLATLRQPDRGNISVYARHRDYHDLIKGMLKHLAQFVVREGTLEARRAFAAESTPPQPPGVKVFVDTAPVAEKPLAEQAGLGWQGKHTNLVSRSHGSWLFLGEIYTTLELPSSPPSGGGCGSCTRCLTACPTQAFPAPYQMDARRCISYLTIEHAGPIPLELRPGIGTHIYGCDDCLAVCPWNRFARTSRQIKLQPRADLIAPDLASLSALDDATFRQKFSGSPIKRIGRNRFVRNVLIAIGNSGLPDLLPYAHRLTQDPDSVVAEAARWAVTRLETIP

SEQ ID NO: 73941 - protein, 366 aa, Acetobacter pomorum
  REGION 1..366: note = tr|A0A346DX51|A0A346DX51_9PROT Epoxyqueuosine reductase OS=Acetobacter pomorum OX=65959 GN=queG PE=3 SV=1
MIAPSAPALQPVAPAARLAEKIRIKALELGFDAIGFCPAHLGPEVRARLKDFLAEGYHGEMGWLADRTEQRSQPTALWPEARSVIALGLNYTPAENPLSTLHNRTCGNISVYARHRDYHDVVKGMLKHLAQFIVREARMVLDTAPDVKVFVDTAPVAEKPLATQAGLGWQGKHTNLVSRQHGSWLFLGEIYTTLELPASAHSGGSCGSCTRCLNACPTQAFPAPYQMDARKCISYLTIEHAGPIPLPLRKAIGTHIYGCDDCLAVCPWNRFAQISRHIKLQPRPDLIAPELATLSQLDDTAFRAMFSGSPIKRIGRNRFIRNVLIAIGNSGHPDLLPYAQALRQDPDAVVAEAADWAIQRLTGDAA

SEQ ID NO: 73942 - protein, 366 aa, Acetobacter pomorum
  REGION 1..366: note = tr|F1YUU4|F1YUU4_9PROT Epoxyqueuosine reductase; OS = Acetobacter pomorum DM001 OX=945681 GN=yjeS PE=3 SV=1
MIAPSAPALQPVAPAARLAEKIRIKALELGFDAIGFCPAHLGPEVRARLKDFLAEGYHGEMGWLADRTEQRSQPTALWPEARSVIALGLNYTPAENPLSTLHNRTCGNISVYARHRDYHDVVKGMLKHLAQFIVREARMVLDTAPDVKVFVDTAPVAEKPLATQAGLGWQGKHTNLVSRQHGSWLFLGEIYTTLELPASAHSGGSCGSCTRCLNACPTQAFPAPYQMDARKCISYLTIEHAGPIPLPLRKAIGTHIYGCDDCLAVCPWNRFAQTSRHIKLQPRPDLIAPELATLSQLDDTAFRAMFSGSPIKRIGRNRFIRNVLIAIGNSGHPDLLPYAQALRQDPDAVVAEAADWAIQRLTGDAA

SEQ ID NO: 73943 - protein, 378 aa, Acetobacter senegalensis
  REGION 1..378: note = tr|A0A252EGT0|A0A252EGT0_9PROT Epoxyqueuosine reductase OS=Acetobacter senegalensis OX=446692 GN=queG; PE = 3 SV=1
MEKLAARIREKALALGFDAIGFSPAHLGPEVRTRLTDFLANGYQGEMGWLAERTDQRTHPQDLWPDAHSVIALGLSYAPEGDALATLRQRDRGNISVYARHRDYHDLVKGMLKHLAQFVVKEGRETLAAAQAQAQAQAQAQAQAQAQAQAHPLPETPQVKVFVDTAPVSEKPLAEQAGLGWQGKHTNLVSRTHGSWLFLGEIYTTLALPASSPSGGSCGSCTRCLTACPTQAFPEPYKMDARRCISYLTIEHSGLIPHALRPAIGTHIYGCDDCLAVCPWNRFAQTSRQIKLQPRPDLIAPELATLSQLDNTSFRQMFSGSPIKRIGRNRFVRNVLIAIGNSGEPSLLPHAEKLLTDTDPVVAEAAQWATLRLKENGS

SEQ ID NO: 73944 - protein, 390 aa, Acetobacter senegalensis
  REGION 1..390: note = tr|A0A149TVW4|A0A149TVW4_9PROT Epoxyqueuosine reductase OS=Acetobacter senegalensis OX=446692 GN=queG; PE = 3 SV=1
MEKLAARIRDKALALGFDAIGFSPAHLGPEVRTRLTDFLANGYQGEMGWLAERTDQRTHPQDLWPDAHSVIALGLSYAPEGDALATLRQRDRGNISVYARHRDYHDLVKGMLKHLAQFVVKEGRETLAAAQAQAQAQAQAQAQAQAQAQAQAQAQAQAQAQAHPLSETPQVKVFVDTAPVSEKPLAEQAGLGWQGKHTNLVSRTHGSWLFLGEIYTTLALPASPPSGGSCGSCTRCLTACPTQAFPEPYKMDARRCISYLTIEHSGPIPHALRPAIGTHIYGCDDCLAVCPWNRFAQTSRQIKLQPRPDLIAPELATLSQLDDASFRQMFSGSPIKRIGRNRFVRNVLIAIGNSGEPSLLPHAEKLLTDTDPAVAEAAQWATLRLKENGS

SEQ ID NO: 73945 - protein, 356 aa, Acetobacter sp.
  REGION 1..356: note = tr|A0A5B9GFP5|A0A5B9GFP5_9PROT Epoxyqueuosine reductase OS=Acetobacter sp. B6 OX=2500548 GN=queG PE=3; SV = 1
MTAPAAKLAEKIRIKALELGFDAIGFCPAHLRPEVRARLKDFLAEGYHGEMGWLADRTEQRSQPTALWPEARSVIALGLNYAPAENPLNTLQNRTCGNISVYARHRDYHDVVKGMLKHLAQFVVREARMVLDTPPDVKVFVDTAPVAEKPLAAQAGLGWQGKHTNLVSRQHGSWLFLGEIYTTLELPTSADSGGSCGSCTRCLNACPTQAFPAPYQMDARKCISYLTIEHAGPIPAPLRKAIGTHIYGCDDCLAVCPWNRFAQASRHIKLQPRPDLIAPELATLSQLDDAAFRTMFSGSPIKRIGRNRFIRNVLIAIGNSGHPALLPYAQSLQQDPDSVVAEAANWATQCLMGEAT

SEQ ID NO: 73946 - protein, 359 aa, Acetobacter sp.
  REGION 1..359: note = tr|A0A5C1YRG5|A0A5C1YRG5_9PROT Epoxyqueuosine reductase OS=Acetobacter sp. KACC 21233 OX=2592655 GN=queG; PE = 3 SV=1
MTGQPPDNTRLAARIRDKAFALGFDAIGFCPAALGPEVGQRLRDFLDNGYHGEMGWLADRVEQRSQPTGLWPQARSIIALGVSYAPQGDPLATLQRPDCGNISVYARNRDYHDLVKGMLKHLAQFVVQAGRQQAGQTHDVKVFVDTAPVAEKPLAAQAGLGWQGKHTNLVSRQQGSWLFLGEIYTTLDLPPSPPSGGGCGSCTRCLQACPTDAFPSPYKLDARRCVAYLTIEHAGPIPEPLRPLIGTRIYGCDDCLAVCPWNRFARASTHTKLHPREELIAPQLAMLSQLDDAAFRTFFSGSPIKRIGRNRFMRNVLIAIGNSGLPELRPHAAALLTDPDPIVAEAAHWALHRLGELLE

SEQ ID NO: 73947 - protein, 366 aa, Acetobacter syzygii
  REGION 1..366: note = tr|A0A270BYW9|A0A270BYW9_9PROT Epoxyqueuosine reductase OS=Acetobacter syzygii OX=146476 GN=queG PE=3; SV = 1
MTTDTPPPRHADPSPAASRLAARIRDKALELGFDAIGFCPATLGPEARTRLQDFLANGYHGEMSWLAERMEQRSQPTALWPEARTVIALGTSYAPEGNALATLQKPECGNISVYARHRDYHDVIKGMLKHLAQFVVREGKQATPTSPEVKVFVDTAPVAEKPLAAQAGLGWQGKHTNLVSRRHGSWLFLGEIYTTLALPASPPSGGGCGSCSRCLTACPTQAFPAPYQMDARRCISYLTIEHAGPIPTELRPLIGTHIYGCDDCLAVCPWNRFARTARHIKLQPRADLIAPDLATLSQLDDAAFRTLFSGSPIKRIGRNRFIRNVLIAIGNSRTPSLLPHARALCTDPDAIVRDAAHWSVAQLESI

SEQ ID NO: 73948 - protein, 379 aa, Acetobacter tropicalis
  REGION 1..379: note = tr|A0A094YFJ1|A0A094YFJ1_9PROT Epoxyqueuosine reductase OS=Acetobacter tropicalis OX=104102 GN=queG PE=3; SV = 1
MAPLLPDPHTSSSQPSAHMEKLATRIRDKALALGFDAIGFCPAHLGPEVRDRLTDFLANGYQGEMDWLAERTEQRTHPQDLWREARSVIALGVSYAPEDDALATLRQPDRGNISVYARHRDYHDLIKGMLKHLAQFVVKEGRTALEVPTQAHPALETPQVKVFVDTAPVSEKPLAEKAGLGWQGKHTNLVSRAHGSWLFLGEIYTTLELPPSAPSGGSCGSCTRCLTACPTQAFPEPYKMDARRCISYLTIEHSGPIPHALRPAIGTHIYGCDDCLAVCPWNRFAQTSRQIKLHPRADLIAPELTTLSQLDDTAFRQMFSGSPIKRIGRNRFVRNVLIAIGNSRTPSLLPHAENLLTDPDPVVTDAAQWATLRLKEHQP

SEQ ID NO: 73949 - protein, 206 aa, Acetobacter tropicalis
  REGION 1..206: note = tr|F7VCR7|F7VCR7_9PROT Iron-sulfur cluster-binding protein OS=Acetobacter tropicalis NBRC 101654 OX=749388; GN = ATPR_1166 PE=4 SV=1
MAEQAGLGWQGKHTNLVSRTHGSWLFLGEIYTTLALPASPPSGGSCGSCTRCLTACPTQAFPEPYKMDARRCISYLTIEHSGPIPHALRPAIGTHIYGCDDCLAVCPWNRFAQTSRQIKLQPRPDLIAPELATLSQLDDASFRQMFSGSPIKRIGRNRFVRNVLIAIGNSGEPSLLPRAEKLLTDTDPVVAEAAQWATLRLKENGS

SEQ ID NO: 73950 - protein, 359 aa, unidentified
  source 1..359: note = Acetobacteraceae bacterium
  REGION 1..359: note = tr|A0A354UZV0|A0A354UZV0_9PROT Epoxyqueuosine reductase OS=Acetobacteraceae bacterium OX=1909293 GN=queG; PE = 3 SV=1
MGEDRRQAVKSASSPDPRAQIRDAALRLGFDAVGFARAHLGPEVRDRLSDFVQAGYHGDMGWLAERSEQRSHPQSLWPEAASVIALAMSYAPADDPLALTSQQDKGAISVYARNRDYHDLIKGKLKHLGQFLVSRFACDVKVFVDTAPVMEKPLAQQSGLGWQGKHTNLVSKSHGSWLLLGEIYTTLEIQPDAPGQDRCGTCSRCLTACPTQAFVGPYRLDATRCISYLTIEHKGPIPHDLRKAIGNRIYGCDDCLAVCPWNKFATPTSHEHLTGRDALKAPLLRDLAALDDAQFRTMFSGSPIKRIGRNRFIRNVLTAIGNSADPTLLPSAEALQNDPDPIVAEAAEWASTQLRHPSS

SEQ ID NO: 73951 - protein, 377 aa, unidentified
  source 1..377: note = Acetobacteraceae bacterium
  REGION 1..377: note = tr|A0A1E4LMC4|A0A1E4LMC4_9PROT Epoxyqueuosine reductase OS=Acetobacteraceae bacterium SCN 69-10; OX = 1660159 GN=queG PE=3 SV=1
MPQSSAALVAELKARAKALGFDAFGIASPAARPDLRDKLGEALKRGWHGDMAWMAETAERRADPLALWDGTRSVIMLGVNYGPDRDPLEVLKQRDRGSISVYARNRDYHDIIKGRLKELAGLLARRSGAEVKVFVDTAPVMEKPLAEAAGLGWQGKHTVLVSREFGSWLFLGAIFTAAELPVDAPHEESCGSCRRCLDICPTNAFPAPFQLDARRCLAYLTVEHKGPIPREFRVAMGNRIYGCDDCLAVCPWNKFASASREAKLMARDEFNAPTLADLVLLDDAGFRALFAGSPIKRIGHARFLRNVLIAIGNSGDAALVPLAAARLGDAEPLIRGAAVWAVRRLAPVDEARRLALDFLPREDDTTVRNEWTAELSA

SEQ ID NO: 73952 - protein, 310 aa, Acetobacterium sp.
  REGION 1..310: note = tr|A0A2Z4I3J3|A0A2Z4I3J3_9FIRM tRNA epoxyqueuosine(34) reductase QueG OS=Acetobacterium sp. KB-1 OX=2184575 GN=queG PE=4 SV=1
MTEEKIRCLAKQLEIDLVGFFAVEPLTECLPHLLKRHQAGLSTGFEGGVPIERIDYRSAYPFAKAGIVIGVNNYQTFEGIVDGQLRGHFASVSWGEDYHRVLRRKMNELMQAINDERQNSGELPMNYQVFVDNSPLVDRGSAYRAGLGFFGKNNCLINHHFGSFFFIGQILVDTYITFTKPQLVENGCGTCRRCLDVCPNQALGEGFSLDPSRCISYLTQKKSLTPDEENRISTYLYGCDLCQQVCPYNQDLKKTREKAFWIEAETASPPLSEILMLTNRDYKIRYGKTASGWRGKKNLMRNAQLILKKA

SEQ ID NO: 73953 - protein, 314 aa, Acetobacterium sp.
  REGION 1..314: note = tr|A0A231NSY0|A0A231NSY0_9FIRM tRNA epoxyqueuosine(34) reductase QueG OS=Acetobacterium sp. MES1 OX=1899015 GN=BI182_10310 PE=4 SV=1
MTEKIIRVLAEQAGIDLIGFFSVEPLKECLPYLIRRHQEGFSTGFEGGEPEDRINYLKAYPDAKTGIVIGINNYQAFEEVADEKYRVQLASVSWGEDYHRVLKRRMTQLMERMNDIQRQTGGAQIEYRLFVDNSPLVDRGSAYRAGLGFYGKNNCLINDQLGSFFFIGQILIDSVIVFEPPLLLENGCGTCRRCLDACPHQALGEGFSLEPTKCISYLTQKKFLSTDEEVRLKTYLYGCDLCQKVCPHNQDLEETQEEAFLIDAKTASPPLDEILALTNKEFKIRFGKTACGWRGKKNLIRNAQLIKKNKKIYD

SEQ ID NO: 73954 - protein, 266 aa, Acetobacterium wieringae
  REGION 1..266: note = tr|A0A1F2PEQ2|A0A1F2PEQ2_9FIRM Epoxyqueuosine reductase OS=Acetobacterium wieringae OX=52694 GN=queG_6; PE = 4 SV=1
MMNKKFVALITDYVKNYQEKKQTRTTWREPVIGVAAAADPLFPRLKEIIGPNHALPGELLPGARAVLVFFLPFSKSVVASNIAGEESSQEWDYACIETNQLINDLNRFLHDTIVSMGYHASLLPSTYNYDGEKLISDWSHRSVAYIAGIGKFGLHNMLITERGCCGRLGSVITDLELTSTLRTAEELCLYKINGSCQKCLKKCVNQAFTLAEGKVAFDRYRCNEQIYDKIVPEYPIGSGDACGKCMCGVPCSLGIPGKAKKSKSDS

SEQ ID NO: 73955 - protein, 228 aa, Acetobacterium wieringae
  REGION 1..228: note = tr|A0A1F2PKC0|A0A1F2PKC0_9FIRM Epoxyqueuosine reductase OS=Acetobacterium wieringae OX=52694 GN=queG_3; PE = 4 SV=1
MKEAIRKKVLDLGADVCGFAGIERFIEAPAGFHPHDLYRDCQVVVVMGFALPKGLYEVKPDLLYGYFNNLTIPKIDQILMMAARIIEDTYNATAVPVPCDWPYDYWNSEEMEGRGLISMKHAAVNAGLGTMGKNTMLLNEAFGNRLTVGAILSDLKITSDSYAEPLCLEGCTRCLTSCPAQALNEGTVTQKLCRRNTYGTNAKGFETVLCNTCRSVCPVRFGKTTVIG

SEQ ID NO: 73956 - protein, 314 aa, Acetobacterium woodii
  REGION 1..314: note = tr|H6LC11|H6LC11_ACEWD Uncharacterized protein; OS = Acetobacterium woodii (strain ATCC 29683 / DSM 1030 / JCM 2381 / KCTC 1655 / WB1) OX=931626 GN=Awo_c21850 PE=4; SV = 1
MTEEQIRALAKKIDIDLIGFFSVEPLMECLPYLCKRENKGFSTGFEGAPAVERINFYKQFPLAKTGIVIGINNFQTFKKLDDDQERGHIASVSWGEDYHKVLKRRMNELMTAVNLELEKNGEACSEYKIFVDNSPLVDRGSAYRAGLGFFGKNNCLINAQFGSYFFIGQILWGYEVSISDVAPVENGCHDCRRCLDACPGQALGDGYELNPSKCISFLTQKKNLSPLEEGYVKKYLYGCDICQQVCPYNQNLQKTNEKSFWIEAEVASPKLIDVLELTNNSYKKAYHETASGWRGKKVFLRNAELVLKNKKKND

SEQ ID NO: 73957 - protein, 316 aa, unidentified
  source 1..316: note = Acetobacteroides hydrogenigenes
  REGION 1..316: note = tr|A0A4R2E712|A0A4R2E712_9BACT Epoxyqueuosine reductase OS=Acetobacteroides hydrogenigenes OX=979970; GN = queG PE=3 SV=1
MDALAQTSLSQTIRTLAASLGFDAVGFVRATRLDGEATHLRAWLDAGHHAGMAWMEGHFDKRVDPTLLVEGAKSVVVVLLSYKPAEVQPADAPQFAKYAYGDDYHEVIKAKLWELLAQIKEIEPEADGRPFVDSAPVLERAWAERAGLGWIGKNSLLLNRQLGSLTFIGTLMLNLELDYGTPVRPSCGTCTRCIDACPTGAIVAPKVVDARRCISYQTIENRGEIPADIQRLVGNRVFGCDACLDACPWNAKVIPNNHPELAPRKAILTYTAAQWQAVDEAQFAAIFRRSAVKRAKLSGFRRNLEVVVGNEEGNDS

SEQ ID NO: 73958 - protein, 372 aa, Acetohalobium arabaticum
  REGION 1..372: note = tr|D9QSE4|D9QSE4_ACEAZ Iron-sulfur cluster binding protein OS=Acetohalobium arabaticum (strain ATCC 49924 / DSM 5501 / Z-7288) OX=574087 GN=Acear_1904 PE=4 SV=1
MNLTTKIKEQGKKIGLDEVKITAAEPFPAVKDFLFKMKEEDKLSKFVKGDLDLITDPKQVLSTARSIIVTAISYQVDINQKPNLKEELRGKLSRFTWGEDYHNVLGKKLDQLIDFLNQQVPAVKTKKFVDTGPTVDRALARRAGIGWQGKNCSIIHPEYGSWIFIGGIITDLELKLDLPLENKCGDCQKCIEACPTGALEEPYLLNSSKCLGYVTLSRGYLKEEERQTMGTRLWGCDTCQEVCPYNQEAESGNHSEFQPQTIEVYPQLPDLLTLTDREYQEKFGPTAMNWRGKRPIQRNAAVIMGNLKNPKAIPYLIEGLKDSKPIVRAHSAWALGEIGVANVVADLEQALQIEQTKQVTEELRSAIQKLSS

SEQ ID NO: 73959 - protein, 319 aa, Acholeplasma brassicae
  REGION 1..319: note = tr|U4KNW3|U4KNW3_9MOLU Iron-sulfur cluster-binding protein OS=Acholeplasma brassicae OX=61635 GN=BN85309790; PE = 4 SV=1
MKKRLQEAFSQSFDLVGFVNTSTYNQAVKNPVRWVLEPFNTMVVVGLSYPSNRKFRHTKETLVPSIYTFGRDYHEELKERLTAVCESLGYSYQIGVDSHPIDERLAFKLSGLGFQGKNQLMINNDFGSYFFIGIALFEFELPTFNQLEDDGCGSCTICQDACPTGALNQENGYEMEKCISFFNQEKKELTETEIKKNHSLFGCDICQTVCPKNIDILRPTHSGFMLNGNEQVEIVDLFRMPTKAFKEKYHNAAYLWRGKLILMRNAVTLLYKTRNTRYNDLIKESLLQFKDVKWYVNTVSKLLEELERMKINEVKPRII

SEQ ID NO: 73960 - protein, 303 aa, Acholeplasma hippikon
  REGION 1..303: note = tr|A0A449BIZ6|A0A449BIZ6_9MOLU Epoxyqueuosine reductase OS=Acholeplasma hippikon OX=264636 GN=queG PE=4; SV = 1
MVFERLSEAFDFVGTIDVDRYLKKKFDHNLVGFESVFVVGLAYPNKYLRHEKDRLTASMYTYGYDYHDVLKELMHESLKDIDDEFKFLVDNHTIDERKCLEMTGLAFRGKNNLMINKDFGSFFFIGLVLTKKKYPEVIIENTLSCGECTICIKSCPVKALTNGFDWDKCMSGYNQEKRSLTDEEIDKNQYLLGCDICQRVCPFNKGVNSERIEAFREKPTSYVIINDLFDLSNKAFLEKYGKHAYTWRGKTILLRNALTILLRQKNTKYNDKIKETINDDRYPTWYKDDAKKILSKLESLEIK

SEQ ID NO: 73961 - protein, 302 aa, Acholeplasma laidlawii
  REGION 1..302: note = tr|A0A553IGN9|A0A553IGN9_ACHLA Epoxyqueuosine reductase OS=Acholeplasma laidlawii OX=2148 GN=FNV44_06510; PE = 4 SV=1
MVYEKLKEAFDFVGTIDADRYQSIKFDYNLVGYESIFVVGLGYPNTYLKHENDKLTASMYTYGYDYHDVMRSMMHEALKELNVDYKALVDNHTINERKCLEMTGLAFHGKNNLMIHKDLGSFFFIGLVLTKEKYPEVIEENKLSCGDCTICIKACPVGALDNGFDWPTCISGYNQEKRALTDYEISKNALLMGCDICQRVCPYNKGVNSTRVEAFREKPTSYVIIQDLFDLTNKEFMEKYGKHAYTWRGKTLLLRNALTILLRQKNVAYNDLIRQTIIDPKYPDWYKEDAQNILNKLEKFDI

SEQ ID NO: 73962 - protein, 302 aa, Acholeplasma laidlawii; identical to SEQ ID NO: 73961
  REGION 1..302: note = tr|A9NE24|A9NE24_ACHLI Uncharacterized protein; OS = Acholeplasma laidlawii (strain PG-8A) OX=441768; GN = ACL_1393 PE=4 SV=1

SEQ ID NO: 73963 - protein, 307 aa, Acholeplasma oculi
  REGION 1..307: note = tr|A0A061AI18|A0A061AI18_9MOLU Epoxyqueuosine reductase QueG OS=Acholeplasma oculi OX=35623 GN=queG PE=4; SV = 1
MVYEKLKEAFDMVGVIDANRYLSKRFDANLIGYESIFVVGLGYPNAYLKHERDRLTASMYTYGFDYHDVMKTLMHETLKGLDIEYKALVDNHTINERKCLEMTGLAFHGKNNLMIHKELGSYFFIGLVLTKEKFPEVIVENNDSCGTCTICIKACPVKALDNGFDWDTCISGYNQAKRSLTEEEIAKNALLMGCDICQRVCPYNKDVNSTKTEAFHAKPTAYVLIDDLFDLSQKEFMNKYGKHAYTWRGKTILLRNALTILLRQKNTNYNSKIEASIHDDKYPSWYKKDAQYILSKLEKFDINESSE

SEQ ID NO: 73964 - protein, 324 aa, Acholeplasma sp.
  REGION 1..324: note = tr|A0A3A6NL10|A0A3A6NL10_9MOLU DUF1730 domain-containing protein OS=Acholeplasma sp. OX=33015; GN = C4537_02410 PE=4 SV=1
MHIKRLYELFQSSFDLVGIIHTKRYLNEIKAMGREVPHVDYPTMVVLGLAYPMRILKHSNTHLVSSFYTHGSDYHTVLKERIHHVMKEIPYPYELGVDNHPHNERLAASLAGLGFFGKNQLMINNKLGSYFFLGIVFIDMNLEQEMTLFVDDDCGDCQICIQNCPTHALDHGYDMNLCMSYYNQAKRVITDDEMHANYLLFGCDICQRVCPKNVKKGTIIHPEFELSGKEMVSIMDLFTLSEKQFRENYQGMSYLWKGKTVLMRNTLMLLLKHKNTGYIHEIEETLVKYHAPWYQDTAKRVLKALKDLDEKGLMVKLWAIYPIR

SEQ ID NO: 73965 - protein, 323 aa, unidentified
  source 1..323: note = Acholeplasmataceae bacterium
  REGION 1..323: note = tr|A0A359M9Q3|A0A359M9Q3_9MOLU Uncharacterized protein OS=Acholeplasmataceae bacterium OX=1898209; GN = DEG42_06460 PE=4 SV=1
MWSFLSMNQLELYQAFQTQFDVVGVIRTKKYLEKAKSLGIIVPECNYQTMVVLGLAYPKRTIKHTKTHLVPSFYTFGQDYHTVLKDRIKDVMKDLPYPYELGVDNHPHDERLAATLAGIGYFGKNQLIINSEYGTYMFLGIVFIDIELLNEIVLDIHDDCGTCTKCIDACPVKALSEKGFEINLCMSHYNQAKRVLSDGEIDSNYALFGCDICQMVCPKNINKGIKTHPEFELSGKELVSVIDLFTDSDQVFKKKYEDMSYLWKGKTILMRNALTILLKKKNTLYNDLIEQSLHKYKMPWYQDTATRVLEKLKKIHESCSESK

SEQ ID NO: 73966 - protein, 311 aa, unidentified
  source 1..311: note = Acholeplasmataceae bacterium
  REGION 1..311: note = tr|A0A356GKM8|A0A356GKM8_9MOLU 4Fe-4S ferredoxin-type domain-containing protein; OS = Acholeplasmataceae bacterium OX=1898209 GN=DEA30_10065; PE = 4 SV=1
MDAQKLYDLFKSKFDAVGIIETKTYQEEAKKMNKIIPEVNYPTMVVLGLAYPKRMIKHTDTHVVPSFYTFGKDYHLILKARMEEVVKDLNCGYTLGVDNHPHDERLAAVLAGLGFYGKNQLIINPDYGTYMFLGIVFLDLKIDHQIILEIHDDCGTCRKCIDACPTHALDDGYDVEKCMSHFNQSKRNLLDDEIQANYSLFGCDICQMVCPKNINKGLKTHPEFMLSGKEAVSILDLFQDSEKAFKEKYKDMAYLWKGKTILMRNAVCLLYKHQNYAYNELIEASLKKLTTPWYVDTVSRLLKRMKNANQA

SEQ ID NO: 73967 - protein, 356 aa, Achromatium sp.
  REGION 1..356: note = tr|A0A0M1JEP8|A0A0M1JEP8_9GAMM Epoxyqueuosine reductase OS=Achromatium sp. WMS2 OX=1604835 GN=queG PE=3; SV = 1
MDYSELIGKINAWARDLGLQQVGISSVDQVQAQLVEERLRAWLQRGWHGDMDFMARHGQMRTRPDELLPGTLRIISVRLDYLPMSSFELLAKLANPEVGYIACYAMGRDYHRLMRRRLEQLAQLIVTEVGPFAYRAYVDSAPVMEKPLAEQAGLGWIGKHTNLVNCKAGSWFFLGELYVNLPLPSSEPAVGHCGRCQACIKSCPTGAIVAPYKLDARRCIAYLTIEAPGCIPELLRPLIGNRIFGCDDCQLVCPWNHFAQITQEPDFLPRKYLQSPQLVDLFAWSESEFLRKMEGSSIRRLGWQRWLRNIAVALGNAPANASIVAALRTRADHPSELVREHVHWALEQQTVARRYD

SEQ ID NO: 73968 - protein, 355 aa, Achromatium sp.
  REGION 1..355: note = tr|A0A0M1JK33|A0A0M1JK33_9GAMM Epoxyqueuosine reductase OS=Achromatium sp. WMS3 OX=1604836 GN=queG PE=3; SV = 1
MPKNKTFIDSYDIIQQIQNIATNLGLQQIGITDIELQNAAIQLTEWLEHGWHGQMQFMARHYQMRSHPAELLPGTKSIISAQLNYLSLPILTQTTKLTNPNTAYIANYALGRDYHRLFRKRLQQLAKQIINLTGPFKYRVYVDSAPVMEKPLAAKAGLGWIGKHTNLVNRNTGSWFFLGEIYTDLSLPTTMPASNHCGSCQTCIAACPTGAIIAPYKLDARRCIAYLTIEEPGVIPITLRSYIGNRIFGCDDCQHVCPWNRFAAFTTEPDFKPRSALHPAKLIDLFAWSEAEFLKYTEGSAIRRLGWIRWLRNIAIALGNAPPTPEIIAALQRRLIHPNALVQHHVEWALAQHIR

SEQ ID NO: 73969 - protein, 379 aa, Achromobacter sp.
  REGION 1..379: note = tr|A0A0M7MYS6|A0A0M7MYS6_9BURK Epoxyqueuosine reductase OS=Achromobacter sp. ATCC35328 OX=1806490; GN = queG PE=3 SV=1
MSEPLDLNQLAQKIKQWGLELGFQQVGITDTDLSESEPKLQAWLDKQYHGEMDWMARHGMLRARPHELLPGTLRVISVRMNYLPANAAFASTLKNPKLGYVSRYALGRDYHKLLRNRLKKLGEMIQQHCVSLNFRPFVDSAPILERPLAEKAGLGWTGKHSLILNREAGSFFFLGELLVDIPLPVDQPVEEGCGKCVACMTICPTGAIVEPYTVDARRCISYLTIELEGAIPEELRPLMGNRIYGCDDCQLICPWNRYSQLTTEEDFSPRKPLHAPELIELFAWNEEKFLKVTEGSAIRRIGHLRWLRNIAVALGNAPWDETILTALESRKGEHPLLDEHIAWAIAQQIERRNACIVEVQLPKKQRLVRVIEKGLPRDA

SEQ ID NO: 73970 - protein, 255 aa, Acidaminobacter hydrogenoformans
  REGION 1..255: note = tr|A0A1G5RZF0|A0A1G5RZF0_9FIRM Epoxyqueuosine reductase QueG (Queuosine biosynthesis) OS=Acidaminobacter hydrogenoformans DSM 2784 OX=1120920 GN=SAMN03080599_01793 P E=4 SV=1
MRANDILENSIEQKIIDSLNELNRPDLFRSPVVAFSSAEDERYSKLKEIIGDWHLNPTELLPDAKSVISYFVPFTKEVAMEPNTVEHGSFLWSEAYQEINRHFDKMNQAVADYLTMLGYSTKTIQATHTYDPKDLKSMWSHRSAAAIAGLGAFGLNRLLITEKGSAGRFCTVITSAPLQANSKPLDNKCLYVKNGSCSLCLKICPVQALETESFKKFDCQDELNKNESLMTASTPLEIADTCGKCISVCPVAYIE

SEQ ID NO: 73971 - protein, 338 aa, Acidaminobacter hydrogenoformans
  REGION 1..338: note = tr|A0A1G5S517|A0A1G5S517_9FIRM Epoxyqueuosine reductase OS=Acidaminobacter hydrogenoformans DSM 2784; OX = 1120920 GN=SAMN03080599_02693 PE=4 SV=1
MISFQRLKAAAQTLGIPIIGTLEAMDMPVPERSLASKLKKGAISGFEPPLELVGKPEKVMPGVKSIIVIGLPYELFPGPAADPLAVCEVSAMAWGYDYHDRVKEKLAGLASWLRDHDSGETMVFCDTGPLNDRYLAFLAGLGTYGRNQLLIHERWGSAVVYGYLLTKATLESTGRLDAAPYSECGSCRLCQEACPSGALQGDYEFATTRCISNLTQQKRALTEKEMDWMGTSLYGCDICQRVCPKNKKREESRLLKSATPNRLNPFELFSLNKRGFQERFHHHGFAWRGLKTLQRNALINLYNSGNVQLLATLAVWEREGKMPAQLCELSRILETEKL

SEQ ID NO: 73972 - protein, 297 aa, Acidaminococcus fermentans
  REGION 1..297: note = tr|A0A1I5GY10|A0A1I5GY10_ACIFE Epoxyqueuosine reductase QueG (Queuosine biosynthesis) OS=Acidaminococcus fermentans OX=905 GN=SAMN02910455_00295 PE=4 SV=1
MDKQELKAFCRQLGLTEVGVAPSRLPVPDPLPEICPLAAGKGLERYDLTRLLPGCQGAVVVLFPYWQPPVSGSNLSLYCQLPDYHPVVRKYLEQIAGWMAARNPDSGQLAIVDTSPLAERDLAVQAGVGFLGDNGCLINPTYGSWCFIGAVLTTWPLEPDRPLERSCCHCGACARNCPGRCFREGTYGYRTCKSYLTQKKGELTEEEQAILRKTPLIFGCDHCQLICPHNRQVPETPLAEFRRDRLPRIAGQDLENLTNRQFRERYGSYAFSWRGKKILLRNLDLVEQNDKSGQESR

SEQ ID NO: 73973 - protein, 297 aa, Acidaminococcus fermentans; identical to SEQ ID NO: 73972
  REGION 1..297: note = tr|D2RM12|D2RM12_ACIFV 4Fe-4S ferredoxin-type domain-containing protein OS=Acidaminococcus fermentans (strain ATCC 25085 / DSM 20731 / VR4) OX=591001; GN = Acfer_1758 P E=4 SV=1

SEQ ID NO: 73974 - protein, 319 aa, Acidaminococcus sp.
  REGION 1..319: note = tr|A0A415EJP5|A0A415EJP5_9FIRM Epoxyqueuosine reductase OS=Acidaminococcus sp. AM05-11 OX=2291997; GN = DW089_05855 PE=4 SV=1
MEKNITGAAIHAAALEYGYDNCGVIPLSALEGYGERLREREAKIPESKAVYQGLSGFTRLQEDYPWAKSVLVCTNWLGKYRFPKELQGKYAKSFLLSADSLPDSPQRQQKLAFEAWLTEQGVRFLGGETHLPARILPLRYAAVAAGLGIFRKNNFFYGEKGSYYELEGYLLDVSCEYRESHNLRPCADTCKACQNACKTHALCGPYTMNPLSCVSFWTTFGGGQVPPHLTAEQFGSWICGCDACQDACPYNCRQDWQQGEPVPEVEAAKELLLPENLLQASPEALVEQVVPLMADHIRPEETGTLRTCAARCLENEARA

SEQ ID NO: 73975 - protein, 184 aa, Acidaminococcus sp.
  REGION 1..184: note = tr|R7LXY5|R7LXY5_9FIRM Uncharacterized protein; OS = Acidaminococcus sp. CAG:542 OX=1262687 GN=BN701_01074; PE = 4 SV=1
MDTSPLAERDLAVQAGLGFLGDNDCLINDTWGSWCFIGAVLTTQPLEPDRPLERSCRHCGACARVCPGQCFQGGTYTYRTCKSYLTQKKGELTESEQAVLRKTPLIFGCDECQRVCPHNQQVPETPLAEFRRDRLLRLDRQDLANLTNRQFRERYGSYAFAWRGKKLLLRNLELVEQKEQQESQ

SEQ ID NO: 73976 - protein, 348 aa, unidentified
  source 1..348: note = Acidibacillus ferrooxidans
  REGION 1..348: note = tr|A0A162USV0|A0A162USV0_9BACL 4Fe-4S ferredoxin-type domain-containing protein (Fragment); OS = Acidibacillus ferrooxidans OX=1765683 GN=AYJ22_04750; PE = 4 SV=1
MDHYDVTKEQLDLAAAALGLDLVGVVSARRLDELEPVLRRYYDEQRDSGFEHPFSELRLDPRALMPAVQTAIAIALPYHTASESLRHPTGRRHGAVSVYAQRTDYHRVLKDVLSRFSALLETCAARPAQFLPCVDTSPLVDRAYATAAGLGAIGKSGMLITKTYGTYVFLGVLLTDLRVEGADALHGALPWGTEVCGTCDLCLTACPTGALIAPYTLDAKRCLSYITQEHGIVPPEFRASLGRRVWGCDTCQTVCPRNEDRAAPSTFGPPVTPLAYPDLLEILTLSNRALMKRIGHTAAAWRGPAIWRRNAIVALGNARSVEAIPVLVTYLAHARPELRAMSAWALAQ

SEQ ID NO: 73977 - protein, 379 aa, unidentified
  source 1..379: note = Acidibacillus ferrooxidans
  REGION 1..379: note = tr|A0A101XT76|A0A101XT76_9BACL 4Fe-4S ferredoxin-type domain-containing protein OS=Acidibacillus ferrooxidans OX=1765683 GN=ATW55_12555 PE=4 SV=1
MKGYDITRDQLDEIAAMLGLEHIGVVSARRLDELEPVLRRYYDEQRDSGFEHPFSESRLDPHALMPGVQSVLAIALPYHIASESLRHPTGRRHGSVSAYARHTDYHRVLKDVLLRLSAQLEACAAQPAQFLPCIDTSPLVDRAYAAAAGLGAIGKSGMLITKTHGTYVFLGVLLTDLRVEGAEGMRTALPGETDICGACDLCLTACPTGALLAPYTLDAKRCLSYVTQEHGIVPPEFRAPLGRRVWGCDTCQTVCPRNDDRVVPTAFGPPVAPLDFPDLLEILTLSNRALMKRIGHTAAAWRGPAIWRRNAIVALGNARNVEAVPVLITYLAHARPELRAMSAWALAKIDSESNRAAVRQAYEVETDEKARCEMAWALS

SEQ ID NO: 73978 - protein, 378 aa, unidentified
  source 1..378: note = Acidibacillus sulfuroxidans
  REGION 1..378: note = tr|A0A2U3D9Z8|A0A2U3D9Z8_9BACL tRNA epoxyqueuosine(34) reductase QueG OS=Acidibacillus sulfuroxidans OX=1765684 GN=BM613_05370 PE=4 SV=1
MVYEISFASLRQIAYTSGVDVVGVTTADEFPDLAEKLYRYYREGRATGFEHPYSRLRIDPTALLPEAKSIVAIAVPYLTKATRALRRPKGLRGRVSFYAWGRDYHRVLTEQLQVIADALSRQVGREIAYQIAVDTSPLVDRAVAERAGIGWIGKNGMLITKEYGSFVFLGCLLTDILIEPNVSVDELDSCGDCNLCILACPTGALVEPYILDGQRCLSYLTQSKGIIPVQYRKSMGGQLWGCDICQNVCPKNKVSLLGQLEAFTPQADLSYPVLLHILKLSRRAFLREFGHTAAAWRGYYVWRRNAILALGNLRAKEAVPDLLPFLSDVRPEIRAVTAWALQQIDAGGTQPFVALAYAQEQDPLVKQDMEWANVPDVE

SEQ ID NO: 73979 - protein, 364 aa, Acidiferrobacter sp.
  REGION 1..364: note = tr|A0A2E8QP30|A0A2E8QP30_9GAMM Epoxyqueuosine reductase OS=Acidiferrobacter sp. OX=1872107 GN=queG PE=3; SV = 1
  VARIANT 88: note = Xaa can be any naturally occurring amino acid
  VARIANT 168: note = Xaa can be any naturally occurring amino acid
  VARIANT 170: note = Xaa can be any naturally occurring amino acid
  VARIANT 189: note = Xaa can be any naturally occurring amino acid
  VARIANT 196: note = Xaa can be any naturally occurring amino acid
  VARIANT 242: note = Xaa can be any naturally occurring amino acid
  VARIANT 256: note = Xaa can be any naturally occurring amino acid
  VARIANT 269: note = Xaa can be any naturally occurring amino acid
  VARIANT 285: note = Xaa can be any naturally occurring amino acid
  VARIANT 292: note = Xaa can be any naturally occurring amino acid
  VARIANT 294: note = Xaa can be any naturally occurring amino acid
  VARIANT 296: note = Xaa can be any naturally occurring amino acid
  VARIANT 356: note = Xaa can be any naturally occurring amino acid
MKTLSDPALQQLSRDIRQWALDLGFDAVGISTGELSEAAAALQRWLKKGWQGEMDFMSAHVQERTQPDLLVPNTIRIISVRLGYWHDXDNSAHATLRDPEKAYIARYALGRDYHRPMRRRLQKLADQITEAIGPFSYRAFTDSAPVMEKPLGQAAGLGWIGKHTNLIXPXTGSWFFLGELYTDLPLPVXPPHTDHXGTCSRCSAVCPTGALDTPYELDARRCIAYLTIEHKTAIPESLRGLXGNRVFGCDDCQLVXPHNGSPGKGDALXAPRHGLDNPDLVEIFXWSLEQFXKXTXGSPLRRLGYERWMRNLAVALGNGRPSETATRALRSRLGEISDMVDEHILWALERLDARGXPAIGVQEY

SEQ ID NO: 73980 - protein, 364 aa, Acidiferrobacter sp.
  REGION 1..364: note = tr|A0A2D7VII5|A0A2D7VII5_9GAMM Epoxyqueuosine reductase OS=Acidiferrobacter sp. OX=1872107 GN=queG PE=3; SV = 1
MKTLSDPALQQLSRDIRQWALDLGFDAVGISTGELSEAAAALQRWLKKGWQGEMDFMSAHVQERTQPDLLVPNTIRIISVRLGYWHDSDDSAHETLGDPEKAYIARYALGRDYHRPMRRRLQKLADQITEAIGPFSYRAFTDSAPVMEKPLGQAAGLGWIGKHTNLIDPQTGSWFFLGELYTDLPLPVDPPHTDHCGTCSRCSAVCPTGALDTPYELDARRCIAYLTIEHKTAIPESLRGLMGNRVFGCDDCQLVCPHNGSPGKGDALFAPRHGLDNPDLVEIFSWSLEQFEKYTNGSPLRRLGYERWMRNLAVALGNGRPSETATRALRSRLGEISDMVDEHILWALERLDARGIPAIGVQEY

SEQ ID NO: 73981 - protein, 364 aa, unidentified
  source 1..364: note = Acidiferrobacteraceae bacterium
  REGION 1..364: note = tr|A0A2E1WIK6|A0A2E1WIK6_9GAMM Epoxyqueuosine reductase OS=Acidiferrobacteraceae bacterium OX=2024893; GN = queG PE=3 SV=1
  VARIANT 356: note = Xaa can be any naturally occurring amino acid
MKTLSDPALQQLGRDIRQWALDLGFDAVGISTGELSEAAAALQSWLKKGWQGEMDFMSAHVQERAQPDLLVPNTIRIISVRLGYWHDSDDSAHETLRNPEKAYIARYALGRDYHRPMRRRLQKLADQITEAIGPFSYRAFTDSAPVMEKPLGQAAGLGWIGKHTNLIEPKTGSWFFLGELYTDLPLPVDPPHTDHCGTCSRCSAVCPTGALDTPYELDARRCIAYLTIEHKTAIPESLRGLIGNRVFGCDDCQLVCPHNGSPSKGDALFAPRHGLDNPDLVEIFSWSLEQFEKYTSGSPLRRLGYERWMRNLAVALGNGRPSETATRALRSRLGEISDMVDEHILWALERLDARGXPAIGVQEY

SEQ ID NO: 73982 - protein, 348 aa, unidentified
  source 1..348: note = Acidiferrobacteraceae bacterium
  REGION 1..348: note = tr|A0A2E9IE24|A0A2E9IE24_9GAMM Epoxyqueuosine reductase OS=Acidiferrobacteraceae bacterium OX=2024893; GN = queG PE=3 SV=1
MKDPDDLPLKIKHWGRALGFQSIGFSNTALGKAENELNGWLSQGFHGEMDYMEKHGIRRSRPAELIPGTKSVIICRMNYLSTTTGVAQKSLSNPEQGYIARYALGRDYHKTVKKRLAKLSSRIEAEVGECGHRVFSDSAPVLEKSLAEKAGLGWVGKHTNLLSKECSSWFFLGEIYTTLPLPPDQPVQPHCGDCSRCLEACPTTAIVAPYQLDARRCIAYLTIELHGSIPIEYRSSIGNRIYGCDDCQLVCPWNRFAQTSDEPDFLPRHQLDHSTLVELFSWSEELFLKRTEGSVFRRLGHIRWLRNIAVALGNAPPSDQIFNALKSRSQHPSEIVREHALWALDQHL

SEQ ID NO: 73983 - protein, 345 aa, unidentified
  source 1..345: note = Acidihalobacter ferrooxidans
  REGION 1..345: note = tr|A0A1P8UL17|A0A1P8UL17_9GAMM Epoxyqueuosine reductase OS=Acidihalobacter ferrooxidans OX=1765967; GN = queG PE=3 SV=1
MTRLAARIKHWARELGFGACGITDTDLSEAHAHLHAWLAAGRHGEMDYMARHGSKRSHPAELVPGTLRVICVRMDYLPPAGAEADTVLNVPTAAYISRYALGRDYHKVMRKRLQRLAERIEAQVGPFGYRAFVDSAPVLEKPLAQKAGLGWIGKHTNLLARDAGSWFFLGELYTDLPLPVDAAGDAHCGHCQACLDICPTQAIVAPYQLDARRCISYLTIELHGAIPEPLRPLLGNRIYGCDDCQLVCPWNRFARPAAEPDFAPRDGLDAPRLIELFAWDEAEFLARTEGSAIRRIGHARWLRNIAVALGNAPRSPAVIAALRARTDHPDALVREHVAWALAQHG

SEQ ID NO: 73984 - protein, 366 aa, unidentified
  source 1..366: note = Acidihalobacter prosperus
  REGION 1..366: note = tr|A0A1D8K6F7|A0A1D8K6F7_9GAMM Epoxyqueuosine reductase OS=Acidihalobacter prosperus OX=160660 GN=queG; PE = 3 SV=1
MDSTTPDLARLAAEIKLWGRELGFGAVGIADIDLSDAEVRLLEWLARGFHGDMDYMARHGRKRSRPDELVPGTIRVISVRMDYLPPDSADPETVLNVPTAGYVSRYALGRDYHKVLRRRLQQLAERIQARIGPFGYRAFTDSAPVLEKPLAQKAGIGWVGKHTNLLAREAGSWFFLGELYTDLPLPTDWPVASHCGTCRACIDVCPTQAIVAPYRLDARRCISYLTIELKGAIPEDLRPLIGNRIYGCDDCQLVCPWNRYAQASAEADFAVRHDLDAPRLIELFAWSEAEFLARTEGSAIRRIGHERWLRNIAVALGNAPRSAGIAEALRRRADHPSAMVREHVAWALMNHDSTAKTGFMTIHRWV

SEQ ID NO: 73985 - protein, 360 aa, unidentified
  source 1..360: note = Acidihalobacter prosperus
  REGION 1..360: note = tr|A0A1A6C2K3|A0A1A6C2K3_9GAMM Epoxyqueuosine reductase OS=Acidihalobacter prosperus OX=160660 GN=queG; PE = 3 SV=1
MNAALPDPAALATRIKAWGRTLGFGAVGIAGIELERAEAHLLDWLARGFHGDMDYMARHGRKRSRPAELVPGTVRVISVRMDYLPPAGADPETVLNVPTAAYISRYALGRDYHKVMRRRLQRLADRIEAEIGAFGYRAFVDSAPVLEKPLAQQAGLGWIGKHTNLLAREAGSWFFLGELYTDLPLPVDGPVAAHCGSCSACIDICPTQAIVAPYRLDARRCISYLTIELKGSIPEPLRPLIGNRIYGCDDCQLVCPWNRFAHPAEAPDFAPRHGLDAVRLVELFAWSEADFLARTEGSAIRRIGHVRWLRNIAVALGNAPGSTAIVAALQARTDHASALVREHVHWALERHAKHAATGCT

SEQ ID NO: 73986 - protein, 295 aa, unidentified
  source 1..295: note = Acidimicrobiaceae bacterium
  REGION 1..295: note = tr|A0A351LZT7|A0A351LZT7_9ACTN tRNA epoxyqueuosine(34) reductase QueG OS=Acidimicrobiaceae bacterium OX=2024894 GN=queG PE=4 SV=1
MGGGGGPPPPPRPAGGGAGRLRIAAYARHDHYATLRGHLERLADRIRSDGWTARVVADDNALVDRAAAVRAGIGWYGKNANVLLPGRGSWFVLGAVVTDALLSPSEQVEEGCGTCRRCLDGCPTGAIIQPGVVDARRCLAWLVQAPGSIPREFRRALGGRLYGCDDCQEVCPVGRSEVIADGTEDPAADVEAIDVLEADDADLLERFGRWYIAERDPRYLRRNALVALGNTADGSDPAVVRLLEAFLADPDPVLRSHATWAAAELGRRDLLGGLDDDEDPLVAEEMALIRGRVGT

SEQ ID NO: 73987 - protein, 383 aa, unidentified
  source 1..383: note = Acidimicrobiaceae bacterium
  REGION 1..383: note = tr|A0A1Z8YZ68|A0A1Z8YZ68_9ACTN tRNA epoxyqueuosine(34) reductase QueG OS=Acidimicrobiaceae bacterium TMED77 OX=1986623 GN=CBC37_02340 PE=4 SV=1
MKSPPSLSRIQKIGMSSGLDSVGIANAEIFKSTLQDLTKRKSKGLHAGMSFTYRNPERSTNPKLAMPECKSLIVGAKSYWEPSLEKSKTGSPTGRVALYARQDHYGALRVGLESIAEELVDAGYDARILIDDNALVDREAAYRAGIGWYGKNSNILIPKRGSWFVLGSVLTNAGYQPNKPLKDGCGSCTQCITSCPTDAIVSPGVLDANRCLAWLVQSEGDFPTEFRTALGDRIYGCDDCQEVCPTNKFEERLNNSFGLSSSESVISIHKIFESDDDSLLAEFGRWYIPKRDPRYLKRNALIVLGNSKMPPSSKTIKIVKKCLAGSDEMLRAHAVWTAKRLGLGKLLIGLEGDPSPSVQKELAQKVERNTHSQGEESDLAWIG

SEQ ID NO: 73988 - protein, 219 aa, unidentified
  source 1..219: note = Acidimicrobiales bacterium
  REGION 1..219: note = tr|A0A2W6DR86|A0A2W6DR86_9ACTN 4Fe-4S ferredoxin-type domain-containing protein; OS = Acidimicrobiales bacterium OX=2201156 GN=DLM54_05490; PE = 4 SV=1
MVTDAPLAGASDVVGDQCGACTRCLAACPTGALIAPGILDARRCLAWLLEAPGWFPPAYRAALGGRIYGCDACQEACPPNRAAERHHPSPPADPHDQPEVDLVEMLACSDSDLLERFERWYIPRRQARYLRRNALVALGNVGNGTDDRVVEALEKSLSHPDPVVRGHAVWASAALGRDDLLAPLWEAEPDPDVRAELEATGGLLHDADGPTPSPGLAQA

SEQ ID NO: 73989 - protein, 395 aa, unidentified
  source 1..395: note = Acidimicrobiales bacterium
  REGION 1..395: note = tr|A0A524B0K3|A0A524B0K3_9ACTN tRNA epoxyqueuosine(34) reductase QueG OS=Acidimicrobiales bacterium mtb01 OX=1967499 GN=queG PE=4 SV=1
MSSPRPDWCLTFGIVRPATPPPPDASSAEYTESILEFARSLGLDRVGVTHTGILERSRVALVDRRVRGLSDTMGFTFRDPIRSTDPDRAVAGSQSILVAALSYAADESDGTDEPGPLSARVARYARHDFYTPLRQSLQQVALRLRRDGFRAVVFADENDLVDREVAWRAGLAWWGKNANLLVPGAGSWFVLGSLVTTAPLRATAGPAPDGCGSCRRCLDDCPTGAIVAEGVVDARRCLAWLVQKPGIFPREFRVALGDRLYGCDDCQESCPPTVRLGRRVPARSGSGGPGAFVDVMEVLAADDAHLLERFGRWYLAERDPRWLRRNALVILGNIASTPVDEQVIGVLHRYLSHDDPMLRAHAVWAAGRLGRTDLVKFLVDDPDPDVRAELAEVGA

SEQ ID NO: 73990 - protein, 376 aa, unidentified
  source 1..376: note = Acidimicrobiia bacterium
  REGION 1..376: note = tr|A0A520XX27|A0A520XX27_9ACTN tRNA epoxyqueuosine(34) reductase QueG OS=Acidimicrobiia bacterium OX=2080302 GN=queG PE=4 SV=1
MEDRAAHDLLERLKSIGDANGGVGLGVCSVEPFVEVQAEMDRRLESGEAGRRRFTYTDPVISTDVRTTFRWSERLLVAAVSYLPTAGRPGPRSPNTGRIARFATSDQYVPLRELLAALSAELESAGFRAEPLADDNRLVDRAAAVRAGVAWWGKSTMALAPGFGPWMLLGSVVTDAPLPVSEPMVRDCGTCTACIPACPTGALDTEGVLDATRCISYWAQTPGMIPLAIREAWGDRLYGCDDCLEACPPGERWEADATTVAGRVDLLELLNRSNAELLAEYGHFYIPRRDPRFLRRNALVALGHSGTTEAEPVITGYLQSPVAVLRAHAAWALGSLGAAGAIPSLRQAAAVESDSLVKGEFVAALERLADPDRPVR

SEQ ID NO: 73991 - protein, 383 aa, unidentified
  source 1..383: note = Acidimicrobiia bacterium
  REGION 1..383: note = tr|A0A0R2Q6V9|A0A0R2Q6V9_9ACTN 4Fe-4S ferredoxin-type domain-containing protein; OS = Acidimicrobiia bacterium BACL6 MAG-120924-bin43; OX = 1655583 GN=ABR75_00080 PE=4 SV= 1
MRLSKKSPKFDVADHAACVAYTDHILSLGTAGGLDRVGVAPAQVMQRAHQALVERKAAGLHDTMQFTYRNPARSTDPQSAVANAKAMIVGAYSYASPVPDPQLQPSARVARYAWTEYYESLKVGLFAMRDELRSDGFKAVVFADDNSMVDREAAYLAGLGWFGKNANVLIEGAGSFFVLGSVITTAPLFINDKPVADGCGACRRCIDACPTQAIIEPGIVDAAKCLAWLIQKPGIFDRRYREALGDRMYGCDDCQEVCPPTIRLSLSKPLREDARPWINVLELLDMDDETLLARVDQWYIAERNPDWVRRNALLVLGNIGERTDPNVVGTIARYLEHSDPMLRAHAVWSAARLDLFDLIPMHDTAPLVVDELRNLPLARQQAI

SEQ ID NO: 73992 - protein, 298 aa, Acidimicrobium sp.
  REGION 1..298: note = tr|A0A356WG39|A0A356WG39_9ACTN tRNA epoxyqueuosine(34) reductase QueG (Fragment); OS = Acidimicrobium sp. OX=1872112 GN=queG PE=4 SV=1
MQLADESGSTDKANYTNQILSLGRQAGLDHVGVASAEVLVRARQAINERKSQDLHNQMQFTYRNPERSTDPTKTLPSAKSVIVGAFSYSSSSLNFSDQSSATEIDLSARVAKYVWSDYYAQLRESLGKVAQKLKSDGHRAVVLADDNAIVDREVAYQAGLGWFGKNSNLLISGAGSYFVLGCIITSADLAVATQPVEDGCGACRRCIDNCPTEAIVAPGVIDANKCLAWLLQKPGVFDRNFRVALGDRIYGCDDCQEVCPPTIRFEKNSAGSNVSITSKELKAWVSVAKILTSDDASL

SEQ ID NO: 73993 - protein, 354 aa, Acidimicrobium sp.
  REGION 1..354: note = tr|A0A0R2PVA7|A0A0R2PVA7_9ACTN 4Fe-4S ferredoxin-type domain-containing protein (Fragment); OS = Acidimicrobium sp. BACL19 MAG-120924-bin39 OX=1655566; GN = ABR58_03065 PE =4 SV=1
MHDDYTAELLRLVREAGADRVGVTTAEPLTRARAAIEARIASGMADDMQFTFRNPERSTTPTMAVPGARSIIVAARSYFVNDQAVSNDGIAQDSVIAGAVARYAWRDHYAPLRANDSAIVGAVARYAWRDHYAPLRDALRVAAKRLHQDGHRATVFADDNSIVDREVAYRAGLGWFGKNANLLVEGLGSWFVLGCVVTTAELQHTERVVADGCGACTRCIDACPTGAIVEPGVVDARKCLAWLIQKPGVFDLRYRDALGTRIYGCDECQEVCPPSRRGAIDRSVGDERSVVDALELLTAPDDEVMRIVGRWYVADRNPRWVRRNALIILGNSGAGEHDEVALALVRYLHGDDDL

SEQ ID NO: 73994 - protein, 353 aa, Acidiphilium cryptum
  REGION 1..353: note = tr|A5FY71|A5FY71_ACICJ Epoxyqueuosine reductase; OS = Acidiphilium cryptum (strain JF-5) OX=349163 GN=queG; PE = 3 SV=1
MAEADLRAAIAARAAALGFDAIGIARARLPESVRDNLRAHLAAGHHGTMGWMEDRAAQRADPASLWPEAVSVISLGLSYAPDGDPLATLSRADRGNISVYARNRDYHDIIKGRLKHLAQFIAARGEGVKVFVDTAPVMEKPLAAAAGLGWQGKHTNLVSRRHGSWLLLGEIMTTLALPPDPPHPDRCGTCTACQAACPTDAFPAPYRLDARRCISYLTIEHKGPIPEEFRPAIGNRIYGCDDCLAACPWNKFAVAGREQKLAARDDLLAPRLADLAALDDAGFRALFAGSPIKRIGRARLARNVAIAIGNSADPALAPAAARLAADDDPVVAEAGRWAARRLAIGLAPARKPG

SEQ ID NO: 73995 - protein, 353 aa, Acidiphilium multivorum
  REGION 1..353: note = tr|F0IY76|F0IY76_ACIMA Epoxyqueuosine reductase; OS = Acidiphilium multivorum (strain DSM 11245 / JCM 8867 / NBRC 100883 / AIU301) OX=926570 GN=queG PE=3 SV=1
MAEADLRAAIAARAAALGFDAIGIARARLPESVRDNLRAHLAAGHHGTMGWMEDRAAQRADPASLWPEAVSVISLGLSYAPDGDPLATLSRPDRGNISVYARNRDYHDIIKGRLKHLAQFIAARGEGVKVFVDTAPVMEKPLAAAAGLGWQGKHTNLVSRRHGSWLLLGEIMTTLALPPDPPHPDRCGTCTACQAACPTDAFPAPYRLDARRCISYLTIEHKGPIPEEFRPAIGNRIYGCDDCLAACPWNKFAAAGREQKLAARDDLLAPRLADLAALDDAGFRALFAGSPIKRIGRARLARNVAIAIGNSADPALAPAAARLAADDDPVVAEAGRWAARRLAIGLAPARKPG

SEQ ID NO: 73996 - protein, 347 aa, Acidiphilium rubrum
  REGION 1..347: note = tr|A0A1N6RPG9|A0A1N6RPG9_ACIRU Epoxyqueuosine reductase OS=Acidiphilium rubrum OX=526 GN=queG PE=3 SV=1
MAEAQSLKAAITTSAAALGFDAIGFTRATLTAQHRANLDAYLAAGHHGTMAWLAERTAQRADPATLWPEAVSVIALGLSYAPAGDPLATLARPDRGNISVYARNRDYHDIIKGKLKHLAQFITARAAAGIKVFVDTAPVMEKPLAAAAGLGWQGKHTNLVSRTHGSWLLLGEIMTTLDLPADAPHADRCGSCTKCQAACPTDAFPAPYQLDARRCISYLTIEHEGPIPQALRPAIGNRIYGCDDCLAVCPWNKFASLGREAKLTARADLIAPPLAALATLDDAGFRAHFAGGPIKRIGRRRFARNVAIAIGNSADPSLAPSAAHLATDADPTVAEAGKWALHQLQNL

SEQ ID NO: 73997 - protein, 353 aa, Acidiphilium sp.
  REGION 1..353: note = tr|A0A257R9P7|A0A257R9P7_9PROT Epoxyqueuosine reductase OS=Acidiphilium sp. 20-67-58 OX=1970291 GN=queG; PE = 3 SV=1
MAETDLRTAIAARAAALGFDAIGIARARLPESVRDNLRAHLAAGHNGTMGWMEDRATQRGDPASLWPEAVSVISLGLSYAPDGDPLATLSRPDRGNISVYARNRDYHDIIKGRLKHLAQFIAARGAGVKVFVDTAPVMEKPLAAAAGLGWQGKHTNLVSRRHGSWLLLGEIMTTLALPPDPPHADRCGTCTACQTACPTDAFPAPYRLDARRCISYLTIEHKGPIPEEFRAAIGNRIYGCDDCLAACPWNKFAAAGREQKLAARDDLRAPRLADLAALDDAAFRALFAGSPIKRIGRARLARNVAIAIGNAADPALAPATARLAADDDPVVAEAGRWAQRRLEIGLAPARKPG

SEQ ID NO: 73998 - protein, 353 aa, Acidiphilium sp.
  REGION 1..353: note = tr|F7S805|F7S805_9PROT Epoxyqueuosine reductase; OS = Acidiphilium sp. PM OX=1043206 GN=queG PE=3 SV=1
MAEADLRAAIAARAAALGFDAIGIARARLPESVRDNLRAHLAAGHHGTMGWMEDRAAQRADPASLWPEAVSVISLGLSYAPDGDPLATLSRPDRGNISVYARNRDYHDIIKGRLKHLAQFIAARGEGVKVFVDTAPVMEKPLAAAAGLGWQGKHTNLVSRRHGSWLLLGEIMTTLALPPDPPHPDRCGTCTACQSACPTDAFPAPYRLDARRCISYLTIEHKGPIPEEFRPAIGNRIYGCDDCLAACPWNKFAAAGREQKLAARDDLLAPRLADLAALDDAGFRALFAGSPIKRIGRARLARNVAIAIGNSADPALAPAAARLAADDDPVVAEAGRWAARRLAIGLAPARKPG

SEQ ID NO: 73999 - protein, 379 aa, unidentified
  source 1..379: note = Acidipila dinghuensis
  REGION 1..379: note = tr|A0A4Q1S8U0|A0A4Q1S8U0_9BACT tRNA epoxyqueuosine(34) reductase QueG OS=Acidipila dinghuensis; OX = 1560006 GN=queG PE=4 SV=1
MRLRQEDVRRLAEEAGFTLGGVAAVPAADSAQSAEERQRFEQWIAAGSAGEMEYLKRRNESGDLLRSSVRAVFPWAKSVIVCAANYNGAAVRSLDPTSSDRGWIARYAWSGQPGSEDGQLRPSDYHKVLLKRLNGMEARLREECGAEFESRAFVDTGPIVERVYARYAGLGWTGKNTCLISQGKGSWHFLCVLLTSLEVEEEQLAVMAPDRCGSCTRCIDACPTDALTPYRMDASRCIAYLTIEKRGVIEAGDGAVDLREGIGRNVFGCDICQEVCPWNRKALPADDTELTTRQELVNPALDWLAAMTEADFGAWFYGSPVKRAKYEGFRRNLAIAMGNSRRQEYAMILRVWAQEEDAGLRSAAEWALQKLQAEIHTAS

SEQ ID NO: 74000 - protein, 376 aa, unidentified
  source 1..376: note = Acidipila rosea
  REGION 1..376: note = tr|A0A4R1LFM4|A0A4R1LFM4_9BACT Epoxyqueuosine reductase OS=Acidipila rosea OX=768535 GN=C7378_0652 PE=4; SV = 1
MEAERGFQAVSALRLQNQVKALALEAGFADAGIAPVPVSGSKTDREHRARYREWVDAGRAGEMEYLKRTNEEGQLIRSSLRIAAPWARSVIVCAANYNSLAPRSVDPAPAGAGWIARYAWSGQEDGRPSDYHKVLLTRLRKLEVSLFQKLGSFESKCYVDTGPLVEREAARLAGIGWTGKNTCTLNQELGSWFFLGVILTSLPVPEDAATLPAADRCGSCTRCIDACPTNALIAPRQMDASRCISYLTIEKRGAIDEQLRGGMGRQVFGCDICQDVCPWNRKAPVAKDLQLRPRTALVNPALEWLASLDRDDFGKLFFGSPIKRARYEGLRRNVAIAMGNSGLPEYLPTLQEWASGTEEVLADAARWAIRQIENKG

SEQ ID NO: 74001 - protein, 330 aa, unidentified
  source 1..330: note = Acidipila rosea
  REGION 1..330: note = tr|A0A4R1L706|A0A4R1L706_9BACT Epoxyqueuosine reductase QueG OS=Acidipila rosea OX=768535 GN=C7378_2425; PE = 4 SV=1
MSEPLNPRRPRRNTWQPKPEISSLLRVSGNPINGVGEGTPRRPSPFFWHPPDQHPWGELQIVARQNSRKCPGSAEAFQAASSYPELNAVSATRNDAPAETLTEEVRRFALSNEADDIGIAPMDPLYVFDGYAIDHPLVIVLALAHNYERLREVPSDETNGVGVCDVGDQYAKGTRSSYTLANWIRAQGYQADPYPGPSAGALVLIPPAIAAGLGELGKHGSLINPRFGAGVRLAGVTTDMPLIPTSPRRFGADDFCSTCQVCTQACPPGAITPKKQMVRGVERWYVDFDKCIPYFAEAASCGICIAECPWTRPAVRPKLLATMARRLGEG

SEQ ID NO: 74002 - protein, 387 aa, unidentified
  source 1..387: note = Acidipila sp.
  REGION 1..387: note = tr|A0A372ILH0|A0A372ILH0_9BACT tRNA epoxyqueuosine(34) reductase QueG OS=Acidipila sp. 4G-K13; OX = 2303751 GN=queG PE=4 SV=1
MTADRAAAALSQPAGVSASIPRSWHSFLGDLAREAGFVLAGIAAAPEPGSSEDLQERRRYEEWIDAGSAGEMEYLKRRDETGRLVRSSVRVVFPWVRSVIVCAANYNSGQPHSIDNPPPGAGWIARYAQTGSDGRPADYHKVLLKRLEALRTLLEREAGPFESRCYIDTGPLVERVYARYAGIGWTGKNTCTLHEKLGSWLFLGVILTSLDVPQQHLSIPAADRCGSCTRCIDACPTQALTAPRQMDASRCIAYLTIEKRGEIPEELRSGIGRQVFGCDICQDVCPWNRRAPVSADPEFTPREALVNPALDWLAEMDEAGFGRWFYGSPVKRAKFAGFRRNIAIAMGNSGSRQYLPVLRGWLEDGDPVLADAARWAIHTLDTTEAGS

SEQ ID NO: 74003 - protein, 406 aa, unidentified
  source 1..406: note = Acidipila sp.
  REGION 1..406: note = tr|A0A3P0X9B9|A0A3P0X9B9_9BACT tRNA epoxyqueuosine(34) reductase QueG OS=Acidipila sp. EB88; OX = 2305226 GN=queG PE=4 SV=1
MIESVQDQVRTRAIAHGFAIAGIAPLPRLGSADASTREDYFRDWIAQGHAGEMEYLKRQDALGRYLRSAVEVAVPWARSIVVCAAPYGGGPEHPLSTDPAPAGTGWIGRYAWSGRQAADGQLAPSDYHKVLLRRLKALEADLKESLGSLDDAGAEGFQSWAYVDTGPMIERAFSAMAGVGWTGKNVCTLNQELGSFFFLGVILLSTELAPEQRAELPADRCGSCTRCLDACPTDALVAPHQMNASRCIAYLTIEKRGSIDPALRAGMGRQIFGCDICQDVCPWNHRARRGAQPLTLVKDTELVPRALLINPSLAAMAALSEPEWEKLFFGSPVKRARYSGFRRNVAIAMGNSGDPALLPQLELLAAQEQDETLRETALWAIDRLHTLQGEPSSGRRLSLPHDHTAK

SEQ ID NO: 74004 - protein, 377 aa, unidentified
  source 1..377: note = Acidisarcina polymorpha
  REGION 1..377: note = tr|A0A2Z5FTB5|A0A2Z5FTB5_9BACT Epoxyqueuosine (OQ) reductase QueG OS=Acidisarcina polymorpha OX=2211140; GN = ACPOL_0356 PE=4 SV=1
MNPAASLSDLVAELAQEAGFAATGIAAVPDPASPEDYAELQNVEPWLASGRAGEMEYLKRRDEAGRLLRSSLRVALPWARSVIVCAANYNSGAPNSTEPAPSSRGWIARYAWTGKPSGDGQVRPSDYHKVLLHRLRSMETKLKDLYGDFQSRCYVDTGPIVERIYAKYAGIGWIGKNTCILNEQLGSWLFLGVIATSIEVSPASIAAVPEDRCGSCRRCIEACPTGALTDAYRMDASLCISYLTIEKRGEIPEQLRAQIGRQIFGCDICQDVCPWNRRAPLGRDVELSTRADLVNPALDWLAAIDESGFANLFHGSPVTRTKLSGLRRNVAIAMGNSRLRSFLPKLQEWSQAADTVLAATAAWAITQIESQPSTDGL

SEQ ID NO: 74005 - protein, 352 aa, Acidisphaera rubrifaciens
  REGION 1..352: note = tr|A0A0D6P549|A0A0D6P549_9PROT Epoxyqueuosine reductase OS=Acidisphaera rubrifaciens HS-AP3 OX=1231350; GN = queG PE=3 SV=1
MAGADHASHDPRAAIRARAHALGFQAVGFCAAALGAEASARLADFLAAGWHGGMGWMERRAAQRADPRALWPQARSVIALGLSYAPAEDPLAVLARPDRGNISVYARNRDYHEVFKGRLKTLAQFVVARYGPEVKVFVDTAPVMEKPLAARAGLGWQGKHTNLVSRRHGSWLFLGEIYTTLDLPEDAPHADRCGSCTRCLRACPTDAFPAPYRLDARRCISYLTIEHHGPIPEALRPAIGNRIYGCDDCLAACPWNRFAQAGREAKLQARPDLTAPALSELAALDDTGFRARFAGTAIKRIGRDRFARNVAVAIGNAGEPALLPAATRLAADADPVVAEAGAWAGARLAGRV

SEQ ID NO: 74006 - protein, 360 aa, unidentified
  source 1..360: note = Acidithiobacillales bacterium
  REGION 1..360: note = tr|A0A0S8L6M7|A0A0S8L6M7_9PROT Epoxyqueuosine reductase OS=Acidithiobacillales bacterium SM1_46; OX = 1703384 GN=queG PE=3 SV=1
MATGRHALSDAQLATLADDIRGWAMALGFQAIGIADTDLSAAEQHLIEWLHAGRHGEMGYMERHGTRRSRPAELIPGTLRVLSARMDYWPGAARDAEAVLADDALGYISRYALGRDYHKVLRQRLQQLAVHIEDAIGPFRYRVFADSAPVLEKALAEKAGIGWIGKHTNLLEQRTGSWFFLGELYTDLPLPVDAPATNHCGTCQACIDICPTRAIVAPYQLDARRCISYLTIELRGAIPVGLRPMIGNRIYGCDDCQLVCPWNRFARSTAEGEYSPRHQLDAPQLLALFAWDESEFLARTEGSAIRRIGYECWLRNLAIAIGNGPHTPAAHAALHARADHPSPLVREHVAWALARHAGGA

SEQ ID NO: 74007 - protein, 360 aa, unidentified
  source 1..360: note = Acidithiobacillales bacterium
  REGION 1..360: note = tr|A0A0S8GMC6|A0A0S8GMC6_9PROT Epoxyqueuosine reductase OS=Acidithiobacillales bacterium SM23_46; OX = 1703385 GN=queG PE=3 SV=1
MATGRHALSDAQLATLADDIRGWAMALGFQAIGIADTDLSAAEQHLIEWLHAGRHGEMGYMERHGTRRSRPAELIPGTLRVLSARMDYWPGAARDAEAVLADDALGYISRYALGRDYHKVLRQRLQQLAVHIEDAIGPFRYRVFADSAPVLEKALAEKAGIGWIGKHTNLLEQRTGSWFFLGELYTDLPLPVDAPATNHCGTCQACIDICPTRAIVAPYQLDARRCISYLTIELRGAIPVGLRPMIGNRIYGCDDCQLVCPWNRFARSTAEGEYSPRHQLDAPQLLALFAWDESEFLARTEGSAIRRIGYECWLRNLAIAIGNGPHTPAAHAALQARADHPSPLVREHVAWALARHAGGA

SEQ ID NO: 74008 - protein, 361 aa, Acidithiobacillus sp.
  REGION 1..361: note = tr|A0A2G2KGQ2|A0A2G2KGQ2_9PROT Epoxyqueuosine reductase OS=Acidithiobacillus sp. OX=1872118 GN=queG PE=3; SV = 1
MPKIFSAKDLTSVKAQMKLWASELGFCMIGIAGTDLSQEEARLFEWLADGRHGDMHYMAKHGDRRTKPDAIHPGTIRVVSVRMDYFPDSATPPTEILQDSTRGYVSRYALGRDYHRLMRRKLQKLADLISGEVGPFRYRAFVDSGPVMEKPLAVKAGLGWLGKHTNLIDKESGSFFFLGELYTDLPLPLDDEQTDHCGDCNLCMTACPTGAIDRAYQLDARRCISYLTIELKGPIPADLRPLIGNRIFGCDDCQLVCPWNRFSKPVSTQDFQPRHSLDNAVLTDLFSWSESEFNTRLEGSPIRRIGYQRWLRNIAVALGNSKATNAVLAVLEEKKLVATPMVREHIEWAIAQLNDPPVSAD

SEQ ID NO: 74009 - protein, 337 aa, unidentified
  source 1..337: note = Acidithrix ferrooxidans
  REGION 1..337: note = tr|A0A0D8HJG9|A0A0D8HJG9_9ACTN Epoxyqueuosine reductase OS=Acidithrix ferrooxidans OX=1280514 GN=queG; PE = 4 SV=1
MELYLELEAKSLELGLIGFGVAPIRRFRNVLVMLKDRKEIGLADSMEFTYRNPKRSTDPSAILDGARSMVTLGLSYYPSTEIAIEFSSPIAKYARSDFYSILRDRLETLAKLIRSKGFKAVVVMDSNALVDKEAAVRSGSGIYLKNSLLSIQGHGSFVVIGTIITDAEIERSPKRSRITGCGSCTSCIQACPTSAIGPNGTIDARLCISWVLQRPGGIDPALRSRIGVRIYGCDICQDVCPYNAKLKANEPHLDEVVSDLIAILGLGDQELLERFSHLYIYKRDVNILRRNALVGLGNSKALQLQELHRVLEVLRNYCESDDLILVEHAKWALDQLT

SEQ ID NO: 74010 - protein, 378 aa, unidentified
  source 1..378: note = Acidobacteria bacterium
  REGION 1..378: note = tr|A0A2V8YJN3|A0A2V8YJN3_9BACT tRNA epoxyqueuosine(34) reductase QueG OS=Acidobacteria bacterium OX=1978231 GN=queG PE=4 SV=1
MSQSADAIWIVEQAKGLGFDLCGVARADKFPELENTPDWLARGYAGEMKYLFDPRREDPRRAMPGVQSAIVCLLNYNSEHPFSTDAKFARRNGEARGWVSRYAWGDDYHSVLGERLEALNALLRERFSEPFEARVYVDTGPVQERVLAKYAGLGWLGKNTLLLNQTLGSYFFLGVILTTLDLEPTLGEKELPPPDLCGSCRQCLDACPTQAFVEPYVLDARKCISYLTIELRGSVPEELREPMGNHVFGCDICQDVCPWNRRAALSPLMQFQPRSLPSRQENATEASPDSQDDSLLLPRLERLLALDGENFRDFFRRSPIKRAKWRGLVRNACIAAGNSGMGPGSAGYARILDCLNRLAACGDSIVAESAQWALSRIQ

SEQ ID NO: 74011 - protein, 351 aa, unidentified
  source 1..351: note = Acidobacteria bacterium
  REGION 1..351: note = tr|A0A1F2V9J0|A0A1F2V9J0_9BACT tRNA epoxyqueuosine(34) reductase QueG OS=Acidobacteria bacterium RIFCSPLOWO2_12_FULL_67_14b OX=1797193; GN = A3J29_11635 PE=4 SV=1
MTAGAIKRQAQALGFDLCGVAPAASLPELAYLPEWLASGHAGEMVYLHKSAAARSDIRNFLPGARSVIVTGTVYNTDEGRRQKAEGGRATDSIRVARYARGRDYHVVLAERLEALVAWMRGQHVEPFEAAVFVDKHHVQERVYARHAGIGWIGKNTCVINPELGSWLFLSGIATDLALDADPPALDQCGACTLCLDACPTGALVDAHVLDATRCISYLTIEAEGAIPEERRAQIGHHAYGCDICQEVCPWNLAPPRSLDPAWQAVRRDGVSAASLWQRSDDELHQFVKGSAMTHLSLAGLRRNLATVIGNSGDAALLPALEGPGRGVKNAAHSAFTPAVAETVAWARERLK

SEQ ID NO: 74012 - protein, 372 aa, unidentified
  source 1..372: note = Acidobacteriales bacterium
  REGION 1..372: note = tr|A0A1Q7N0A0|A0A1Q7N0A0_9BACT tRNA epoxyqueuosine(34) reductase QueG OS=Acidobacteriales bacterium 13_1_40CM_3_55_5 OX=1803468 GN=AUI85_05095 PE=4; SV = 1
MPPLSDITAFVKQAARDAGFGLAGIASVRDFPELDRFADWIDAGHAGDMEYLKARHEAGQLKRASLRSTIPWARSVIVCAINYNTAQPLSTQVNDSRRGWISRYAWGQEDYHNAVMKRLRLVEAALNQHCSDPRGQTTAKDSAVRDPLSAGQPQTRCYVDTGPVVERVYAKYAGVGWIGKNTCILNQKIGSWLFLGVILTSLELGADLPAPDRCGSCTRCIDACPTDALIAPYQLDSNKCISYLTIEKRGMIPEEIRGAMGRHVFGCDICQDVCPWNRKAPATTAAEFKPREGLVNPALDWLAEMSGEEFQQTFRGSPVRRAKRGGLRRNAAIAMGNSGDPRFKPVLDRLTEDEDPIVAEHARWAEQKLSLG

SEQ ID NO: 74013 - protein, 377 aa, unidentified
  source 1..377: note = Acidobacteriales bacterium
  REGION 1..377: note = tr|A0A1Q3QQK2|A0A1Q3QQK2_9BACT tRNA epoxyqueuosine(34) reductase QueG OS=Acidobacteriales bacterium 59-55 OX=1895690 GN=BGO25_19350 PE=4 SV=1
MWAEDFHEWLQERAIEAGFDTAGVAPVYGAESEDGQVDAARFADWVDAGRAGEMEYLKRRNEQGVLLRAGVEVAMPWARSVVVCAVNYNGEGPLSIEPAGSETGWIARYAWSGRTVENPEDGERLAPSDYHDEMLGRLRGVEAALHERYGCETKCYVDTGPLVERAAAAKAGVGWIGKNACVINQGLGSWLLLGVIVTSLEVAEDVALEVAADRCGSCTRCIDACPTDALVGPRQMDASRCISYLTIEKKGTIAEEFREAMGRQVFGCDICQDVCPWNRKSPIATREGMLTRREMVNPELGWLAAMDAPAFRRWFKGSPVERTRKKRLHRNVAIAMGNSGEERFVPQLESWSAGEDEVLAESARWALGRIAEAVEKG

SEQ ID NO: 74014 - protein, 338 aa, unidentified
  source 1..338: note = Acidobacteriia bacterium
  REGION 1..338: note = tr|A0A317IVT1|A0A317IVT1_9BACT tRNA epoxyqueuosine(34) reductase QueG OS=Acidobacteriia bacterium OX=2081523 GN=queG PE=4 SV=1
MNSGDIRELARQCGFELAGVARAAPAPESAWYHAWVAAGFAGRMGYLADRRAALRDDPRNLLPSARSVICVGKLYNSPWPYSTQFSGPERAWISRYAWGEDYHSVLRCGLERLDKLLPEHESKICVDTAPLLERSYAQLAGLGWIGKNTCLINQQSGSWFFLGELLVSLDIEPDAPPPGRCGTCTRCIDACPTGAIVPGTLGYTVDSRLCISYFTIELRGEIPEAQRHKLGPHVFGCDICQDVCPWNRRAPASNDPAFQPRHFAPFLERLAGIPEEEFGGMFRGTPVTRSRYAGFLRNVAVAMGNSRDVRYKIPLQRLAAHTDAIVAEHARWALDQLR

SEQ ID NO: 74015 - protein, 405 aa, unidentified
  source 1..405: note = Acidobacteriia bacterium
  REGION 1..405: note = tr|A0A2N9LRX1|A0A2N9LRX1_9BACT 4Fe-4S ferredoxin-type domain-containing protein; OS = Acidobacteriia bacterium SbA2 OX=2043162 GN=SBA2_270064; PE = 4 SV=1
MIQAMLSGRTIKERAVGLGFDLAGIAPLDVWKDLEFSRRWVEKGFNGEMRYLENPKRFDPLMVLPSAKSVVCVGLVYNAPLPYSTETAGAASGPRAWISRYAWGRDYHEIMRAKLEQLRAAINESAPEVETRVYVDTGPVVERAFTRLSGIGWTGKNTCIINQEKGSWLFLGVILCSLELEPDLPAPDRCGSCTACLEACPTGALVEPYAMDASRCISYLTIELRGSIPNEFRSKVGSNVFGCDICQDVCPWNSSRQSAVISYQQTQSQHERPLDPREVARPATTAIQDFHPMIVEPDHARVSDGATSGQQATDNGPRTTEPVGFSLFNPPLEALASITEEGFRLNFAHSTIKRAKYRGWLRNLAVAMGNSSDERFVPWLERMARHPDPIVREHAAWALERLRGE

SEQ ID NO: 74016 - protein, 396 aa, Acidobacterium capsulatum
  REGION 1..396: note = tr|C1F530|C1F530_ACIC5 Putative iron-sulfur cluster binding protein OS=Acidobacterium capsulatum (strain ATCC 51196 / DSM 11244 / JCM 7670 / NBRC 15755 / NCIMB 13165/ 161) OX=240015 GN=ACP_3117 PE=4 SV=1
MRHEAWPSRVGQFAEEAGFDRAGVAAVPAPGSDEDRTERARFEQWIAAGHAGSMEYLKRRNEAGRLVRSSLREAVPWARSVVVCVTNYNREAPYSTDPAPEGSGWIARYAWSGSHGRPADYHKVLLKRLERVRERMSEEFGEFEARCYVDTGPVVERVYAQYAGLGWIGKNTCLLNQELGSWLFLGVILTSLELPASDAAVLAPDRCGSCTRCIDACPTGALIAPRQMDASRCISYLTIEHRGEVPLELREGIGRQIFGCDICQDVCPWNSRRRVPEQADKELAPRGELINPALAWLAEMDESAFGRYFYGSPVKRTRYSGFRRNLAIAMGNSGQAAFLPRLQAWARSGDATLAEASQWAINRIVQMGAERSGLSENEKPLNSSTGMNLRQDLPDA

SEQ ID NO: 74017 - protein, 396 aa, Acidobacterium sp.; identical to SEQ ID NO: 74016
  REGION 1..396: note = tr|A0A3D4VL46|A0A3D4VL46_9BACT tRNA epoxyqueuosine(34) reductase QueG OS=Acidobacterium sp.; OX = 1872119 GN=queG PE=4 SV=1

SEQ ID NO: 74018 - protein, 375 aa, Acidobacterium sp.
  REGION 1..375: note = tr|A0A2G4JGA6|A0A2G4JGA6_9BACT tRNA epoxyqueuosine(34) reductase QueG OS=Acidobacterium sp.; OX = 1872119 GN=queG PE=4 SV=1
MAASCRMCCVSWSEARNNVLTSASIKSRALTLGFEVCGVAPATALPELSFLPEWLARGYAGDMIYLHKSAHARADIRNFLPSARAVIVAGAIYNTEQPGAGIRDPGSVQIQVARYARGQDYHLVLAERLEQLVAWMREQQAGPFDTAIFVDKHHVQERVYAQHAGVGWIGKNSCVINLELGSFLFLCGIATSLPLEVDAPATDQCGACTLCIDSCPTGAIVDAHVLDATKCISYLTIEIDGAMPEAQRAQIGDHAYGCDICQEVCPWNLAPVLTADPAWAATPRHGASAAELWQRTDDELHQFVKGSAMTHLSLAGLRRNLATVIGNSGEGSLGPVLDRPGRGVKNAAHSAHTPVVEGAVAWAKKRLERQAPSLS

SEQ ID NO: 74019 - protein, 346 aa, Acidocella aminolytica
  REGION 1..346: note = tr|A0A0D6PJS8|A0A0D6PJS8_9PROT Epoxyqueuosine reductase OS=Acidocella aminolytica 101 = DSM 11237; OX = 1120923 GN=queG PE=3 SV=1
MAGADLKTQIAAKAAELGFAATGFTCASLPPERLAQLQDFLSHGRHGTMGWMAERVAQRAHPQALWPEALSVISLGFSYAPEGGALDNLARPDVGNISVYARNRDYHDIIKGKLKHLAQFIATCGAGVKVFVDTAPVMEKPLAEQAGLGWQGKHTNLVSRRHGSWLFLGEIYTTLMLDPDAPAHDHCGGCTACQTVCPTQAFPAPYQLDARRCISYLTIEHNGPIPEEFRAAIGNRIYGCDDCLAVCPWNKFAEAGREVKLAAREDLTAPLLAELAQMDDAAFRKRFSGSPVKRIGRKRFVRNVAISIGNSGDVALLPVAAKLAGDDDLVVAEAGRWAEKTLGRPA

SEQ ID NO: 74020 - protein, 356 aa, Acidocella sp.
  REGION 1..356: note = tr|A0A257Q8F2|A0A257Q8F2_9PROT Epoxyqueuosine reductase OS=Acidocella sp. 20-57-95 OX=1970301 GN=queG; PE = 3 SV=1
MPIAPAPAPVGRLAMTDIKPGIIARAQKLGFDAVGFTRATLSEQQRQGLRDYLAAGHHGSMSWMAARADERADPQTLWPEALSVISLGLSYAPDGDALATTRLAEAGNISVYARNRDYHDIIKGKLKHLAQFVAALGHDVKVFVDTAPVMEKPLAQLAGLGWQGKHTNLVSRQHGSWLLLGEVFTTLEIAPDAPHSDHCGSCHACMTACPTDAFPAAYKLDARRCISYLTIEYDGPIPEEFRKPMGNRIYGCDDCLAVCPWNKFAVAGHEAKLAERGDLTAPALAELARLDDAAFRAKFTSSPIKRIGRNRFVRNVAIAIGNSGVVSLIPAAESLAADADPVVAEAGAWAVASLQT

SEQ ID NO: 74021 - protein, 347 aa, Acidocella sp.
  REGION 1..347: note = tr|K5YUD4|K5YUD4_9PROT Epoxyqueuosine reductase; OS = Acidocella sp. MX-AZ02 OX=1214225 GN=queG PE=3 SV=1
MERFQNATLKTLIRDKAASLGFAATGFTRAALPPERLAYLQDFLAAGRHGGMGWMEERTEQRAHPQALWPEALSVITLGFSYAPPTDALANLTRPDIGNISVYARNRDYHDIIKGKLKHLAQFIAARGAGVKVFVDTAPVMEKPLAQQAGLGWQGKHTNLVSRAHGSWLFLGEIYTTLELEPDAPGRDLCGSCTACQEACPTAAFPAPYQLDARRCISYLTIEHDGPIPEEFRTAIGNRIYGCDDCLAVCPWNKFAKAGQELKLAARDDLTAPKLAALATLDDAGFRQKFSGSPIKRIGRNRFLRNVAIAVGNSGEFGMLPTAEQLAADDDPVVAQSGAWAAARLRG

SEQ ID NO: 74022 - protein, 359 aa, Acidovorax anthurii
  REGION 1..359: note = tr|A0A328ZC51|A0A328ZC51_9BURK Epoxyqueuosine reductase OS=Acidovorax anthurii OX=78229 GN=queG PE=3 SV=1
MQGWARELGFSQIGIAGVDLSSAEPGLMQWLAQGFHGEMHYMEAHGLRRARPAELVPGTVSVITARMDYLPHATLDRGAAREGEEGGAGWQAVEFARLERPREGIVSVYARGRDYHKVLRARLQKLADRIAAAIGPFGHRVFTDSAPVLEAELARRSGQGWRGKHTLVLNREAGSMFFLGEIYVDLPLAPSEPVTAHCGSCQACIDVCPTQAIVAPHRVDARRCISYLTIEHAGPIPEAMRPLMGNRVYGCDDCQLACPWNKFAQPSRLPDFDERPDLAGRPLAEWFAWDEPTFLRRTEGGPIRRIGHERWLRNVAVALGNALRATHDPTLRAALASRAEDPSALVREHVAWALGEKAP

SEQ ID NO: 74023 - protein, 365 aa, Acidovorax avenae
  REGION 1..365: note = tr|F0Q1A0|F0Q1A0_ACIAP Epoxyqueuosine reductase; OS = Acidovorax avenae (strain ATCC 19860 / DSM 7227 / JCM 20985 / NCPPB 1011) OX=643561 GN=queG PE=3 SV=1
MQGWARELGFSQIGVAGVDLSSAEPGLMQWLAQGFHGDMHYMQSHGLKRARPAELVPGTVSVITVRMDYLPRQTLERTAEREGAPAGWQAAELARLDRPREGIVSVYARGRDYHKVLRARLQKLADRVAGVVGPFGHRVFTDSAPVLEAELARRSGQGWRGKHTLVLHREAGSMFFLGEIYVDLPLAPSEPVSAHCGSCQACIDVCPTHAIVAPQRVDARRCISYLTIEHSGPIPEALRPLMGNRVYGCDDCQLACPWNKFAQPAQVPDFDERPGLSGRPLAEWFAWDEGTFLRMTEGGPIRRIGHERWLRNVAVALGNALRATGDPALRAALASRVDDPSPLVREHVAWALAQAAAGTPEPPPA

SEQ ID NO: 74024 - protein, 365 aa, Acidovorax avenae
  REGION 1..365: note = tr|A0A2R4DMC9|A0A2R4DMC9_9BURK Epoxyqueuosine reductase OS=Acidovorax avenae subsp. avenae OX=80870; GN = queG PE=3 SV=1
MQGWARELGFSQIGVAGVDLSSAEPGLMQWLAQGFHGDMHYMQSHGLKRARPAELVPGTVSVITVRMDYLPRRTLERTAEREGAPAGWQAAELARLDRPREGIVSVYARGRDYHKVLRARLQKLADRIAGVVGPFGHRVFTDSAPVLEAELARRSGQGWRGKHTLVLHREAGSMFFLGEIYVDLPLAPSEPVSAHCGSCQACIDVCPTRAIVAPQRVDARRCISYLTIEHSGPIPEALRPLMGNRVYGCDDCQLACPWNKFAQPAQVPDFDERPGLSGRPLAEWFAWDEGTFLRMTEGGPIRRIGHERWLRNVAVALGNALRATGDPALRAALASRVDDPSPLVREHVAWALAQAAAGTPEPPPA

SEQ ID NO: 74025 - protein, 320 aa, Acidovorax caeni
  REGION 1..320: note = tr|A0A1I7G3N2|A0A1I7G3N2_9BURK Epoxyqueuosine reductase OS=Acidovorax caeni OX=343013; GN = SAMN04489707_100415 PE=4 SV=1
MQWLAQGFHGDMHYMAAHGLKRARPAELVPGTVSVITARMDYLPRSTPEGWQAVEWERLRRPGEAIVSVYARGRDYHKVLRARLQKLADRIAEAAGPFGHRVFTDSAPVLEAELARRSGQGWRGKHTLVLSREAGSMFFLGEIYVDMALAPTAPVTAHCGSCQACMDACPTQAIVAPYRVDARRCISYLTIEHAGDIPLALRPRMGNRIYGCDDCQLACPWNKFAQPSPLPDFDARAGLTGQQLVHLFAWDEATFLRQTEGGPIRRIGHERWLRNIAVALGNALRATGDPAVRDALRRRTQDPSALVREHVAWALAQETA

SEQ ID NO: 74026 - protein, 349 aa, unidentified
  source 1..349: note = Acidovorax carolinensis
  REGION 1..349: note = tr|A0A240U3Q5|A0A240U3Q5_9BURK Epoxyqueuosine reductase OS=Acidovorax carolinensis OX=553814 GN=queG; PE = 3 SV=1
MREWARELGFSQIGVAGVDLSASEPGLMQWLAQGFHGDMHYMAAHGLKRARPAELVPGTVSVITARMDYLPRDTAMDAPQGWQAVEFARLSRPLEGIVSMYARGRDYHKVLRARLQKLSDRIGEAVGPFGHRVFTDSAPVLEAELAARSGQGWRGKHTLVLNREAGSMFFLGEIYVDMALLPSEPVTAHCGSCSACIDVCPTRAIIAPHRLDARRCISYLTIEHAGPIPLELRPLMGNRIYGCDDCQLICPWNKFAQVSRLPDFDERKGLAGQQLVHLFAWDEATFLRMTEGGPIRRIGHERWLRNVAVALGNALRATGDEAVRAALQSRAEDPSALVREHVAWALEFE

SEQ ID NO: 74027 - protein, 353 aa, unidentified
  source 1..353: note = Acidovorax carolinensis
  REGION 1..353: note = tr|A0A240TUZ8|A0A240TUZ8_9BURK Epoxyqueuosine reductase OS=Acidovorax carolinensis OX=553814 GN=queG; PE = 3 SV=1
MREWARELGFSQIGVAGVDLSASEPGLMQWLAHGFHGDMLYMAAHGLKRARPAELVPGTVSVITARMDYLPRDTFAPAPMQAQGGWQAIEFARLSRPQEGIVSVYARGRDYHKVLRARLQKLSDRIGEAVGPFGHRVFTDSAPVLEAELAARSGQGWRGKHTLVLNREAGSMFFLGEIYVDMALPPSEPVTAHCGSCSACIDVCPTQAIIAPHRLDARRCISYLTIEHAGPIPLELRPLMGNRIYGCDDCQLICPWNKFAQVSRLPDFDERAGLAGQQLVHLFAWDEPTFLHMTEGGPIRRIGHERWLRNVAVALGNALRATGDEAVRAALQSRAQDASALVREHVAWALDFE

SEQ ID NO: 74028 - protein, 365 aa, Acidovorax cattleyae
  REGION 1..365: note = tr|A0A1H0K5Z0|A0A1H0K5Z0_9BURK Epoxyqueuosine reductase OS=Acidovorax cattleyae OX=80868 GN=queG PE=3; SV = 1
MQGWARELGFSQIGVAGVDLSSAEPGLMQWLAQGFHGEMHYMQSHGLRRARPAELVPGTVSVITVRMDYLPRQTLERTAEREGSPTGWQAAELSRLDRPREGIVSVYARGRDYHKVLRARLQKLADRIAGAVGPFGHRVFTDSAPVLEAELARRSGQGWRGKHTLVLHREAGSMFFLGEIYVDLPLAPSEPVSAHCGSCQACIDVCPTRAIVAPQRVDARRCISYLTIEHSGPIPEALRPLVGNRVYGCDDCQLACPWNKFAQPAQVPDFDERPGLSGRPLAEWFAWDEPTFLRMTEGGPIRRIGHERWLRNVAVALGNALRATGDPALRAALASRLDDPSPLVREHVAWGLAQAGAGMPEPPAA

SEQ ID NO: 74029 - protein, 350 aa, unidentified
  source 1..350: note = Acidovorax cavernicola
  REGION 1..350: note = tr|A0A3A1W7T0|A0A3A1W7T0_9BURK Epoxyqueuosine reductase OS=Acidovorax cavernicola OX=1675792 GN=queG; PE = 3 SV=1
MQALARELGFSQIGIAGVDLSSAEDGLMQWLAHGFHGEMQYMATHGTRRARPAELVPGTVSVITARMDYLPRDTPGDWQTVEFDRLTRPGEAVVSVYARGRDYHKVLRNRLAKLAEKIAEEVGPFGHRAFTDSAPVLEAELASRSGQGWRGKHTLVLDREAGSMFFLGEIYVDMALPPSEPVTAHCGSCSACIDVCPTRAIVAPKRLDARRCISYLTIEHAGAIPVELRPLMANRIYGCDDCQLICPWNKFAKKSTLPDFDAREGLTGRTLAELFAWSEEDFLRRTEGSPIRRIGHERWLRNIAVALGNAVRSGEDGAKEALATRAAHESELVREHVAWGLAQQPADQPV

SEQ ID NO: 74030 - protein, 338 aa, Acidovorax citrulli
  REGION 1..338: note = tr|A1TLR0|A1TLR0_ACIAC Putative iron-sulfur cluster binding protein OS=Acidovorax citrulli (strain AAC00-1); OX = 397945 GN=Aave_1307 PE=4 SV=1
MMQWLAQGFHGDMHYMQSHGLKRARPAELVPGTVSVITVRMDYLPRQTLARTAEREGSPGGWQAAELSRLDRPREGIVSVYARGRDYHKVLRARLQKLADRIAGAVGPFGHRVFTDSAPVLEAELARRSGQGWRGKHTLVLHREAGSMFFLGEIYVDLPLPPSEPVSAHCGSCQACIDVCPTRAIVAPQRVDARRCISYLTIEHAGPIPEALRPLMGNRVYGCDDCQLACPWNKFAQPAQVPDFDERPGLSGRPLAEWFAWDESTFLRMTEGGPIRRIGHERWLRNVAVALGNALRATGDPALRAALASRANDPSPLVREHVAWALAQAAAGAEPPPA

SEQ ID NO: 74031 - protein, 349 aa, Acidovorax delafieldii
  REGION 1..349: note = tr|A0A561XMX6|A0A561XMX6_ACIDE Epoxyqueuosine reductase OS=Acidovorax delafieldii OX=47920 GN=queG PE=3; SV = 1
MQEWARELGFSQIGVAGVDLSAAEPGLAAWLAQGFHGDMHYMASHGMKRARPAELVPGTVSVITARMDYLPRDTARDAPGGWQVAELSRLQRPHEGIVSVYARGRDYHKVLRARLQKLSDRIAEAIGPFGHRVFTDSAPVLEAELAARSGQGWRGKHTLVLNREAGSMFFLGEIYVDMALPQSEPVTPHCGSCSACIDICPTQAIVAPYRVDARRCISYLTIEHAGPIPVELRPLMGNRIYGCDDCQLICPWNKFAQVSRLPDFDERKGLSGQQLVHLFAWDEATFLRMTEGGPIRRIGHERWLRNVAVALGNALRATGDGALRAALQSRAEDASALVREHVAWALDAA

SEQ ID NO: 74032 - protein, 324 aa, Acidovorax delafieldii
  REGION 1..324: note = tr|C5TC85|C5TC85_ACIDE Iron-sulfur cluster binding protein OS=Acidovorax delafieldii 2AN OX=573060; GN = AcdelDRAFT_4515 PE=4 SV=1
MQWLAQGFHGDMHYMAAHGLRRARPAELVPGTVSVITARMDYLPRDTPQQVPGGWQAVEFARLARPQEGIVSAYARGRDYHKVLRARLQKLSDRIAEAVGPFGHRVFTDSAPVLEAELAARSGQGWRGKHTLVLNREAGSMFFLGEIYVDMALPPSEPVTAHCGSCSACIDVCPTQAIIAPHRLDARRCISYLTIEHAGPIPLELRPLMGNRIYGCDDCQLICPWNKFAQASRLPDFDVRAGLAGQQLVHLFAWDEPTFLRMTEGGPIRRIGHERWLRNVAVALGNALRQTGDAAVRAALQSRAHDASALVREHVAWGLGQEGL

SEQ ID NO: 74033 - protein, 360 aa, unidentified
  source 1..360: note = Acidovorax ebreus
  REGION 1..360: note = tr|B9MEP2|B9MEP2_ACIET Epoxyqueuosine reductase; OS = Acidovorax ebreus (strain TPSY) OX=535289 GN=queG PE=3; SV = 1
MVCSSQLVPQIQGWARELGFSQIKVAGVDLSSAEPGLMQWLAQGFHGEMHYMAAHGLKRARPAELVPGTVSVITARMDYLPRAMALDAPEGWQAIELGRLARPTEAVVSVYARGRDYHKVLRARLQKLSDRVAEAVGPFGHRVFTDSAPVLEAELARRSGQGWRGKHTLVLSREAGSMFFLGEIYVDMPLEPTEPVTHHCGSCQACIDVCPTQAIIAPYRLDARRCISYLTIEHAGPIPLELRPLMGNRIYGCDDCQLICPWNKFAQTSSLPDFDVRAGLVGQQLVHLFTWDEETFLRMTEGGPIRRIGHERWLRNIAVALGNALRTTRDPVVRAALAARADDPSPLVREHVAWALAQEN

SEQ ID NO: 74034 - protein, 348 aa, unidentified
  source 1..348: note = Acidovorax kalamii
  REGION 1..348: note = tr|A0A235ET91|A0A235ET91_9BURK Epoxyqueuosine reductase OS=Acidovorax kalamii OX=2004485 GN=queG PE=3; SV = 1
MQEWARELGFSQIGVAGVDLSAAEPGLSAWLAQGFHGEMHYMAAHGMKRARPAELVPGTVSVITARMDYLPRDTAMDAPEGWQAAELSRLTRPQEGIVSVYARGRDYHKVLRARLQKLSDRIAEAIGPFGHRVFTDSAPVLEAELAARSGQGWRGKHTLVLNREAGSMFFLGEIYVDMALPESAPVTAHCGSCSACIDVCPTQAIIAPHRIDARRCISYLTIEHAGPIPLELRPLLGNRIYGCDDCQLICPWNKFAQVSRLPDFDERKGLSGQQLVHLFAWDEATFLRMTEGGPIRRIGHERWLRNVAVALGNALRATGDATLRTALQSRAQDESALVREHVAWALEI

SEQ ID NO: 74035 - protein, 371 aa, Acidovorax konjaci
  REGION 1..371: note = tr|A0A1I1RV20|A0A1I1RV20_9BURK Epoxyqueuosine reductase OS=Acidovorax konjaci OX=32040 GN=queG PE=3 SV=1
MQGWARELGFSQIGVAGVDLSSAEPGLMQWLAQGFHGDMQYMQAHGLKRARPAELVPGTVSVITARMDYLPQATLGRSLESGGTGTGLGMERGGWQAVEFARLDRPGEGIVSVYARGRDYHKVLRARLQKLADRIAAAVGPFGHRVFTDSAPVLEAELARRSGQGWRGKHTLVLNREAGSMFFLGEIYVDLPLAPSGPVTAHCGSCQACIDVCPTQAIVAPQRVDARRCISYLTIEHAGAIPEALRPLMGNRVYGCDDCQLACPWNKFAQASTVPDFDERPALSGRPLAEWFAWDEATFLRRTEGGPIRRIGHERWLRNVAVALGNALRATGDPALRAALAARAEDPSALVREHVAWALMQEPLHAAGSIE

SEQ ID NO: 74036 - protein, 345 aa, Acidovorax radicis
  REGION 1..345: note = tr|A0A561CEH6|A0A561CEH6_9BURK Epoxyqueuosine reductase OS=Acidovorax radicis OX=758826 GN=queG PE=3 SV=1
MQEWARELGFSQIGVAGVDLSAAEEGLMQWLAQGFHGEMHYMATHGTRRARPAELVPGTVSVITARMDYLPRGKAMEGWQEAELSRLARPGEGIVSVYARGRDYHKVLRARLQKLSDRIAEAVGPFGHRVFTDSAPVLEAELASRSGQGWRGKHTLVLNREAGSMFFLGEIYVDMQLPESAPVTAHCGSCSACIAICPTQAIIAPHRIDARRCISYLTIEHGGPIPLEFRVAMGNRIYGCDDCQLACPWNKFAQVSRLPDFDERNGLSGQQLVHLFAWDEATFLRMTEGGPIRRIGHERWLRNVAVALGNALRATGDEAVRAALQSRVADASPLVREHVAWALEG

SEQ ID NO: 74037 - protein, 359 aa, Acidovorax soli
  REGION 1..359: note = tr|A0A1H3WU18|A0A1H3WU18_9BURK Epoxyqueuosine reductase OS=Acidovorax soli OX=592050 GN=queG PE=3 SV=1
MWCNSQLVPQLRDWARELGFSQIGVAGVDLSASEPGLMQWLAQGFHGDMHYMAAHGLKRARPAELVPGTVSVITARMDYLPRVTPVQAPEGWQAIELARLSRPEEGIVSVYARGRDYHKVLRARLQKLSDRIAEAIGPFGHRVFTDSAPVLEAELASRSGQGWRGKHTLVLNREAGSMFFLGEIYVDMALPPSEPVSAHCGSCSACIDVCPTQAIIAPHRLDARRCISYLTIEHAGPIPVELRPLMGNRIYGCDDCQLICPWNKFAQVSRLPDFDERNGLAGQQLVHLFAWDEATFLRMTEGGPIRRIGHERWLRNVAVALGNALHATGDEALRAALQSRAEDASALVREHVAWALGLE

SEQ ID NO: 74038 - protein, 349 aa, Acidovorax sp.
  REGION 1..349: note = tr|A0A3D1MJ33|A0A3D1MJ33_9BURK Epoxyqueuosine reductase OS=Acidovorax sp. OX=1872122 GN=queG PE=3 SV=1
MQEWARELGFSQIGVAGVDLSAAEPGLEAWLAQGFHGDMHYMASHGLKRARPAELVPGTVSVITARMDYLPRDTAMDAPEGWQTAELSRLQRPQEGIVSVYARGRDYHKVLRARLQKLSDRIAEAIGPFGHRVFTDSAPVLEAELAARSGQGWRGKHTLVLNREAGSMFFLGEIYVDMALPESAPVTAHCGSCSACIDVCPTQAIIAPHRVDARRCISYLTIEHAGPIPVELRPLMGNRIYGCDDCQLICPWNKFAQVSRLPDFDERKGLAGQQLVHLFSWDEPTFLRMTEGGPIRRIGHERWLRNVAVALGNALRATGDEAVRAALQSRADDTSELVREHVVWALNIE

SEQ ID NO: 74039 - protein, 349 aa, Acidovorax sp.
  REGION 1..349: note = tr|A0A0N8VU75|A0A0N8VU75_9BURK Epoxyqueuosine reductase OS=Acidovorax sp. SD340 OX=1690268 GN=queG PE=3; SV = 1
MQEWARELGFSQIGVAGVDLSAAEPGLEAWLAQGFHGDMHYMASHGMKRARPAELVPGTVSVITARMDYLPRDTAMDAPEGWQTAELSRLQRPQEGIVSVYARGRDYHKVLRARLQKLSDRIAEAIGPFGHRVFTDSAPVLEAELAARSGQGWRGKHTLVLSREAGSMFFLGEIYVDMALPESAPVTAHCGSCSACIDVCPTQAIIAPHRVDARRCISYLTIEHAGLIPVELRPLMGNRIYGCDDCQLICPWNKFAQVSRLPDFDERKGLAGQQLVHLFAWDEPTFLRMTEGGPIRRIGHERWLRNVAVALGNALRATGDEAVRAALQSRADDTSELVREHVVWALNFE

SEQ ID NO: 74040 - protein, 362 aa, Acidovorax temperans
  REGION 1..362: note = tr|A0A543LKB8|A0A543LKB8_9BURK Epoxyqueuosine reductase OS=Acidovorax temperans OX=80878 GN=queG PE=3; SV = 1
MWCNSQLVPQIQEWARELGFSQIGVAGVDLSASEPGLMQWLAQGFHGDMHYMAAHGLKRARPAELVPGTVSVITARMDYLPRDRDSAPAVAQAGGWQAMELQRLQRPAEGIVSMYARGRDYHKVLRARLQKLSDRIAEAVGPFGHRVFTDSAPVLEAELAARSGQGWRGKHTLVLNREAGSTFFLGEIYVDMALPATEPVTAHCGSCSACIDACPTQAIVAPHRVDARRCISYLTIEYAGPIPLELRPLMGNRIYGCDDCQLVCPWNKFAQVSRLPDFDERKGLSGQQLVHLFAWDEPTFLRMTEGGPIRRIGHERWLRNVAVALGNALRQADSAELRSALQSRAHEPSELVREHVAWALAV

SEQ ID NO: 74041 - protein, 352 aa, Acidovorax temperans
  REGION 1..352: note = tr|A0A0D7K4V3|A0A0D7K4V3_9BURK Epoxyqueuosine reductase OS=Acidovorax temperans OX=80878 GN=queG PE=3; SV = 1
MQEWARELGFSQIGVAGVDLSASEPGLMQWLAQGFHGDMHYMAAHGLKRARPAELVPGTVSVITARMDYLPRDRDSAPAVAHAGGWQAMELQRLQRPAEGIVSMYARGRDYHKVLRARLQKLSDRIAEAVGPFGHRVFTDSAPVLEAELAARSGQGWRGKHTLVLNREAGSTFFLGEIYVDMALPATEPVTAHCGSCSACIDACPTQAIVAPHRVDARRCISYLTIEYAGPIPLELRTLMGNRIYGCDDCQLVCPWNKFAQVSRLSDFDERKGLSGQQLVHLFAWDEPTFLRMTEGGPIRRIGHERWLRNVAVALGNALRQADSAELRSALQSRAHDPSELVREHVAWALAV

SEQ ID NO: 74042 - protein, 372 aa, Acidovorax valerianellae
  REGION 1..372: note = tr|A0A1G6WY22|A0A1G6WY22_9BURK Epoxyqueuosine reductase OS=Acidovorax valerianellae OX=187868 GN=queG; PE = 3 SV=1
MQGWARELGFSQIGVAGVDLSSAEPGLMQWLAQGFHGEMQYMQAHGLRRARPAELVPGTVSVITARMDYLPRDTPVQGAAAAGKSAGPGWQAIEFARLERPSEGIVSVYARGRDYHKVLRQRLQKLADRIAEAVGPIGHRVFTDSAPVLEAELASRSGQGWRGKHTLVLNREAGSMFFLGEIYVDMPLDPSEPVTAHCGSCQACLDICPTQAIVAPHRVDARRCISYLTIEHAGPIPVELRPLMGNRIYGCDDCQLVCPWNKFAQASRLPDFDARPGLAGQQLAHLFSWDEPTFLRLTEGGPIRRIGHERWLRNVAVALGNALRATGDPGVQAALQSRASDPSALVREHVEWGLSQKGLQRNKDGGSALSIK

SEQ ID NO: 74043 - protein, 354 aa, unidentified
  source 1..354: note = Acidovorax wautersii
  REGION 1..354: note = tr|A0A1I2EEI7|A0A1I2EEI7_9BURK Epoxyqueuosine reductase OS=Acidovorax wautersii OX=1177982 GN=queG PE=3; SV = 1
MQGWARELGFSQIGVAGVDLSSAEAGLMQWLGQGFHGDMHYMQSHGLKRARPAELVPGTVSVITARMDYLPAATFPAAGGASGWQAIEFARLERPAEGIVSVYARGRDYHKVLRSRLQKLADRIAQAVGPIGHRVFTDSAPVLEAELASRSGQGWRGKHTLVLNREAGSMFFLGEIYVDMALPASAPVTAHCGSCSACIDVCPTQAIVAPHRVDARRCISYLTIEHAGPIPEPLRPLMGNRIYGCDDCQLACPWNKFAQASVLPDFDARPGLAGQQLVHLFGWDEPTFLRLTEGGPIRRIGHERWLRNVAVALGNALRATGDEALRAALAARADDPSPLVREHVAWALAQRPDS

SEQ ID NO: 74044 - protein, 366 aa, unidentified
  source 1..366: note = Acinetobacter albensis
  REGION 1..366: note = tr|A0A1C4GTC4|A0A1C4GTC4_9GAMM Epoxyqueuosine reductase OS=Acinetobacter albensis OX=1673609 GN=queG; PE = 3 SV=1
MVSSTLSQKIHLDQDDSEALKKWIKAQALELGFSDCVIAKPDAQAELERFKEYLKRGYHGDMKFLEENLEKRADPTLLIPGTKSIICVRMNYLVETPKPRYIPDEPNAAIIARYARGRDYHKVMRGRLKTLAAKIREKVGDFEARPFADSAPVFEKSLAENAGMGWTGKHTLLIHKSSGSFFVLGELFTSLDLPFDGPTTKHCGSCTACIDICPTQAIVEPYMLDARKCIAYLTIEYKGIIAEELRRGIGNRVFGCDDCQLICPWNSFAKKATIEDFNPRHGLDQVTLLDLWQWDEQTFLSNTEGSPLRRTGYQSFMRNIAIGLGNAPFSHQIIEILKQHYDLHDEIVQVHIDWAIQEQMIKSGVV

SEQ ID NO: 74045 - protein, 362 aa, Acinetobacter baumannii
  REGION 1..362: note = tr|A0A246A1Z1|A0A246A1Z1_ACIBA Epoxyqueuosine reductase OS=Acinetobacter baumannii OX=470 GN=queG PE=3; SV = 1
MTSSNTSRIAVQQIDPHELKAWIKAQALDLGFADCVIAKPDAQEQMPRFLEYLERGYHADMTYLEENLEKRADPTLLVPGTKSIICVRMNYLVESPKPRYVPFEPNSAIIARYARGRDYHKVMRGRLKTLATRIREKVGDFESRPFADSAPIFEKSLAESAGMGWTGKHTLLIHKKSGSFFVLGELFTSLDLPFDEPATSHCGSCRACIDICPTQAIVEPYMLDARRCIAYLTIEYKGIIAEELRAGIGNRIFGCDDCQLICPWNSFAKTASIPDFNPRHGLDNISLLDIWQWDEATFLANTEGSPIRRTGYQSFKRNIAIGLGNAPYSKEIVDQLNKGKSLHDEIVNVHIDWAIEQQLNQL

SEQ ID NO: 74046 - protein, 362 aa, Acinetobacter baumannii
  REGION 1..362: note = tr|A0A385EVF9|A0A385EVF9_ACIBA Epoxyqueuosine reductase OS=Acinetobacter baumannii WM99c OX=945555; GN = queG PE=3 SV=1
MTSSNTSRIAVQQIDPHELKAWIKAQALDLGFADCVIAKPDAQEQMPRFLEYLERGYHADMTYLEENLEKRADPTLLVPGTKSIICVRMNYLVESPKPRYVPFEPNSAIIARYARGRDYHKVMRGRLKTLATRIREKVGDFESRPFADSAPIFEKSLAESAGMGWTGKHTLLIHKKSGSFFVLGELFTSLDLPFDEPATSHCGSCSACIDICPTQAIVEPYMLDARRCIAYLTIEYKGIIAEELRAGIGNRIFGCDDCQLICPWNSFAKTASIPDFNPRHGLDNISLLDIWQWDEATFLANTEGSPIRRTGYQSFKRNIAIGLGNAPYSKEIVDQLNKGKSLHDEIVNVHIDWAIEQQLNQL

SEQ ID NO: 74047 - protein, 376 aa, Acinetobacter baylyi
  REGION 1..376: note = tr|Q6FAQ0|Q6FAQ0_ACIAD Epoxyqueuosine reductase; OS = Acinetobacter baylyi (strain ATCC 33305 / BD413 / ADP1); OX = 62977 GN=queG PE=3 SV=1
MIPSIIYSFMSFYQSKPHDNIPVQQYDSLELKQWIKEQALSLGFSDCVIAKPDAQDQMPRFQEYLKRGYHADMHYLEENLDKRANPKLLVPGTQSIICVRMNYLVESPKPRYIPEQPNSAIIARYARGRDYHKVMRGRLKTLASKIREKVGEFESRPFADSAPIFEKSLAESAGMGWTGKHTLLIHKKSGSFFVLGELFTSLELPFDQPATAHCGSCSACIDICPTQAIVEPYMLDARKCIAYLTIEYKGIIPEELREGIGNRIFGCDDCQLICPWNSFAKIATIPDFNPRHGLDNISLLEIWRWDEATFLANTEGSPIRRTGFQSFKRNIAIGLGNAPYSIDIIEALEKARDQHDEIVQVHIDWAIQQQLNKQLL

SEQ ID NO: 74048 - protein, 218 aa, Acinetobacter baylyi
  REGION 1..218: note = sp|Q6FAK7|QUEH_ACIAD Epoxyqueuosine reductase QueH; OS = Acinetobacter baylyi (strain ATCC 33305 / BD413 / ADP1); OX = 62977 GN=queH PE=3 SV=1
MSKPRIKLKLPDNADKLLLHSCCAPCSGEVMETLLYSGIDYSIFFYNPNIHPVKEYLIRKEENIRFAEKHNIPFIDCDYDTDNWFERAKGMENEPEKGIRCTMCFDMRFERAALYAYENGFKVFSSSLGISRWKNMEQINDCGIRAASHYPDIHYWDYNWRKNGGATRMLEISKREEFYQQEYCGCVYSLRDTNRWRMSQGRDRIQLGVKFYSASDPD

SEQ ID NO: 74049 - protein, 370 aa, Acinetobacter beijerinckii
  REGION 1..370: note = tr|N9E2M3|N9E2M3_9GAMM Epoxyqueuosine reductase; OS = Acinetobacter beijerinckii ANC 3835 OX=1217649 GN=queG; PE = 3 SV=1
MAFTPSSQKIEIQQLDPQQLKTWIKAQAFDLGFSDCVIAKPDAQDQMPRFKEYLQRGYHADMHYLEENLEKRADPTLLVPGTKSIICVRMNYLVASPKPRYVPFEPNSAIIARYARGRDYHKVMRGRLKILANRIKEKVGDFESRPFADSAPIFEKSLAESAGMGWTGKHTLLIHKKSGSFFVLGELFTSLDLPFDQPATAHCGSCTACIDICPTQAIVEPYMLDARKCIAYLTIEYKGIIPEELRAGIGNRIFGCDDCQLICPWNGFAKTATIPDFNPRHGLDNILLLDIWQWDEATFLANTEGSPIRRTGYQSFKRNIAIGLGNAPYSDEIIAKLQEAKTWHDEIVNVHIDWAIQQQMQQSNVHQIEK

SEQ ID NO: 74050 - protein, 370 aa, Acinetobacter beijerinckii
  REGION 1..370: note = tr|N9EBD4|N9EBD4_9GAMM Epoxyqueuosine reductase; OS = Acinetobacter beijerinckii CIP 110307 OX=1217648; GN = queG PE=3 SV=1
MAFTPSSQKIEIQQLDPQQLKTWIKAQALDLGFSDCVIAKPDAQDQMPRFKEYLERGYHADMHYLEENLEKRADPTLLVPGTKSIICVRMNYLVASPKPRYVPFEPNSAIIARYARGRDYHKVMRGRLKTLANRIKEKVGDFESRPFADSAPIFEKSLAESAGMGWTGKHTLLIHKKSGSFFVLGELFTSLDLPFDQPATAHCGSCTACIDICPTQAIVEPYMLDARKCIAYLTIEYKGIIPEELRAGIGNRIFGCDDCQLICPWNGFAKTATISDFDPRHGLDNILLLDIWQWDEATFLANTEGSPIRRTGYQSFKRNIAIGLGNAPYSDKIIAKLQEAKTWHDEIVNVHIDWAIQQQMHQSNVHQIEK

SEQ ID NO: 74051 - protein, 366 aa, Acinetobacter bereziniae
  REGION 1..366: note = tr|A0A0A8TUB1|A0A0A8TUB1_ACIBZ Epoxyqueuosine reductase OS=Acinetobacter bereziniae OX=106648 GN=queG; PE = 3 SV=1
MSATSTTSSISLQQLDPQELKAWIKQQALQLGFADCVIARPDAQAELPRFKEYLKRGYHGDMKFLEENLEKRADPTLLVPGTKSIICVRMNYLVETPKPRYVPDEPNLAIIARYARGRDYHKIMRGRLKTLATIIKDKVGEFESRPFADSAPVFEKSLAENAGMGWTGKHTLLIHKKSGSFFVLGELFTSLDLPFDEPATSHCGSCTACIDICPTQAIVEPYMLDARKCIAYLTIEYKGIIPEDLRRGIGNRVFGCDDCQLICPWNSFAKTASITDFNPRHGLDQMSLLDLWHWDEQTFLSCTEGSPLRRTGYQSFMRNIAIGLGNAPYSSEIIQALTQHRTSHDEVVQVHIDWAIAEQLNKKSSL

SEQ ID NO: 74052 - protein, 366 aa, Acinetobacter bereziniae
  REGION 1..366: note = tr|N8X8M9|N8X8M9_ACIBZ Epoxyqueuosine reductase; OS = Acinetobacter bereziniae NIPH 3 OX=1217651 GN=queG PE=3; SV = 1
MSATSTTSSISLQQLDPQELKAWIKQQALQLGFADCVIARPDAQAELPRFKEYLKRGYHGDMKFLEENLEKRADPTLLVPGTKSIICVRMNYLVETPKPRYVPDEPNLAIIARYARGRDYHKIMRGRLKTLTTIIKNKVGEFESRPFADSAPVFEKSLAENAGMGWTGKHTLLIHKKSGSFFVLGELFTSLDLPFDEPATSHCGSCTACIDICPTQAIVEPYMLDARKCIAYLTIEYKGIIPEDLRRGIGNRVFGCDDCQLICPWNSFAKTASITDFNPRHGLDQMSLLDLWHWDEQTFLNCTEGSPLRRTGYQSFMRNIAIGLGNAPYSSEIIQALTQHRTSHDEVVQVHIDWAIAEQLNKKSSL

SEQ ID NO: 74053 - protein, 364 aa, unidentified
  source 1..364: note = Acinetobacter bohemicus
  REGION 1..364: note = tr|A0A1I6NQP1|A0A1I6NQP1_9GAMM Epoxyqueuosine reductase OS=Acinetobacter bohemicus OX=1435036 GN=queG; PE = 3 SV=1
MASSTPSQKIPLDQNDPEALKAWIKAQALELGFSDCVIAKPDAQEELPRFQEYLKRGYHGDMKFLEENLEKRADPTLLVPGTKSIICVRMNYLVETPKPRYVPDEPNLAIIARYARGRDYHKVMRGRLKTLASKIREKVGNFESRPFADSAPIFEKSLAENAGMGWTGKHTLLIHKKSGSFFVLGELFTSLDLPFDSPTTKHCGSCTACIDICPTQAIVEPYMLDARKCIAYLTIEYQGIIPEELRQGIGNRVFGCDDCQLICPWNSFAKKATIEDFNPRHDLDQSSLLDLWHWDETTFLTNTEGSPLRRTGYQSFMRNIAIGLGNAPFSDEIIVTLQQTREQYDEIVQVHIDWAIQEQLNKFC

SEQ ID NO: 74054 - protein, 364 aa, unidentified
  source 1..364: note = Acinetobacter bohemicus
  REGION 1..364: note = tr|N8P0R9|N8P0R9_9GAMM Epoxyqueuosine reductase; OS = Acinetobacter bohemicus ANC 3994 OX=1217715 GN=queG; PE = 3 SV=1
MASSTPSQKIPLDQNDPEALKAWIKAQALELGFSDCVIAKPDAQEELPRFKEYLKRGYHGDMKFLEENLEKRADPTLLVPGTKSIICVRMNYLVETPKPRYVPDEPNLAIIARYARGRDYHKVMRGRLKTLASKIREKVGDFESRPFADSAPIFEKSLAESAGMGWTGKHTLLIHKKSGSFFVLGELFTSLDLPFDSPTTKHCGSCTACIDICPTQAIVEPYMLDARKCIAYLTIEYQGIIPEELRRGIGNRVFGCDDCQLICPWNSFAKKATIEDFNPRHDLDQSSLLDLWHWDETTFLANTEGSPLRRTGYQSFMRNIAIGLGNAPFSDEIIATLQQTREQYDEIVQVHIDWAIQEQLTKSC

SEQ ID NO: 74055 - protein, 363 aa, Acinetobacter bouvetii
  REGION 1..363: note = tr|A0A4Q7AQX4|A0A4Q7AQX4_9GAMM Epoxyqueuosine reductase OS=Acinetobacter bouvetii OX=202951 GN=queG PE=3; SV = 1
MATSAQSKIQLNQDDSESLKTWIKAQALALGFSDCVIAKPDAQEELPRFKEYLKRGYHGDMKFLEENLEKRADPTLLIPGTKSIICVRMDYLVETPKPRYVPHQPNAAIIARYARGRDYHKVMRGRLKTLASIIREKVGDFEARPFADSAPVFEKSLAENAGMGWTGKHTLLIHKKSGSFFVLGELFTSLDLPFDSPATKHCGSCTACIDICPTQAIVEPYMLDARKCIAYLTIEYKGIIPEELRRGIGNRVFGCDDCQLICPWNSFAKKTAIEDFNPRHGLDHLNLLDLWQWDEETFLSCTEGSPIRRTGYQSFMRNIAIGLGNADYSDEILCALQQKRVLHDEIVQVHIDWAIAEQQAKAL

SEQ ID NO: 74056 - protein, 362 aa, Acinetobacter bouvetii
  REGION 1..362: note = tr|N9C9X9|N9C9X9_9GAMM Epoxyqueuosine reductase; OS = Acinetobacter bouvetii DSM 14964 = CIP 107468; OX = 1120925 GN=queG PE=3 SV=1
MATSAQSKIQLNQDDSESLKTWIKAQALALGFSDCVIAKPDAQEELPRFKEYLKRGYHGDMKFLEENLEKRADPTLLIPGTKSIICVRMDYLVETPKPRYVPHQPNAAIIARYARGRDYHKVMRGRLKTLASIIREKVGDFEARPFADSAPVFEKSLAENAGMGWTGKHTLLIHKKSGSFFVLGELFTSLDLPFDSPATKHCGSCTACIDICPTQAIVEPYMLDARKCIAYLTIEYKGIIPEELRRGIGNRVFGCDDCQLICPWNSFAKKTTIEDFNPRHGLDHLNLLDLWQWDEETFLSCTEGSPIRRTGYQSFMRNIAIGLGNADYSDEILCALQQKRVLHDEIVQVHIDWAIAEQLAKA

SEQ ID NO: 74057 - protein, 366 aa, Acinetobacter brisouii
  REGION 1..366: note = tr|V2UPS2|V2UPS2_9GAMM Epoxyqueuosine reductase; OS = Acinetobacter brisouii CIP 110357 OX=1341683 GN=queG; PE = 3 SV=1
MSSTIPLQQFDPQELKAWIKAEALALGFADCVIAKPTRQDKEMPRFLEYLERGYHGDMHYLNDNLDKRADPTLLVPGTQSIICVRMNYLVETPKPRYVPFAPNSAIIARYARGRDYHKVMRGRLKTLTQKIRDRVGDFEARPFADSAPIFEKAIHESAGMGWTGKHTLLIQKKSGSFFVLGELFTSLDLPADPPTTAHCGSCSACIDICPTQAIVEPYMLDARRCIAYLTIEYKGIIPEEFREGIGNRIFGCDDCQLICPWNSFAKITPIEDFHPRHGLDQASLLDLWAWDETTFLQCTEGSPIRRTGFQSFKRNVAIGLGNAPYHSEIIKVLEQGKTLHDEIVNVHIDWAIQQQLKKATSTHFLK

SEQ ID NO: 74058 - protein, 356 aa, Acinetobacter calcoaceticus
  REGION 1..356: note = tr|A0A4R1XYM9|A0A4R1XYM9_ACICA Epoxyqueuosine reductase OS=Acinetobacter calcoaceticus OX=471 GN=queG; PE = 3 SV=1
MHNLDPAQLKAWIKQQALDLGFADCVIARPDAQAELARFKEYLKRGYHGDMKYLEENLEKRADPTLLVPGTKSIICVRMDYLVESPRPRHVPDAPNQAIIARYARGRDYHKTLRGRLKTLASQIKAKVGEFESRPFADSAPIFEKSLAENAGMGWTGKHTLLIQRQSGSFFVLGELFSSLELPFDSPATAHCGSCSACIDICPTQAIVEPYMLDARKCIAYLTIEYKGIIPEELRQGIGNRVFGCDDCQLICPWNRYAKKTSIEDFHPRHGLDQVSLLDLWHWDESTFLSNTEGSPIRRTGFQSFMRNIAIGLGNAPFSARILDALRQARDGHDEVVQVHIDWAIQQQQAKAAILS

SEQ ID NO: 74059 - protein, 364 aa, Acinetobacter calcoaceticus
  REGION 1..364: note = tr|D0S3C8|D0S3C8_ACICA Epoxyqueuosine reductase; OS = Acinetobacter calcoaceticus RUH2202 OX=575585 GN=queG; PE = 3 SV=1
MTSSDTSRIALQQLDLHELKAWIKAQALDLGFADCVIAKPDAQEQMPRFLEYLERGYHADMTYLEENLEKRADPTLLVPGTKSIICVRMNYLVESPKPRYVPFEPNSAIIARYARGRDYHKVMRGRLKTLATRIREKVGDFESRPFADSAPIFEKSLAESAGMGWTGKHTLLIHKKSGSFFVLGELFTSLDLPFDGPTTSHCGSCSACIDICPTQAIVEPYMLDARRCIAYLTIEYKGIIAEELRAGIGNRVFGCDDCQLICPWNSFAKTASISDFNPRNGLDNISLLDIWQWDEATFLANTEGSPIRRTGYQSFKRNIAIGLGNAPYSTEIVAQLQNGKILHDDIVNVHIDWAIEQQLNQLQS

SEQ ID NO: 74060 - protein, 362 aa, Acinetobacter calcoaceticus; identical to SEQ ID NO: 74046
  REGION 1..362: note = tr|A0A2S4SZ93|A0A2S4SZ93_9GAMM Epoxyqueuosine reductase OS=Acinetobacter calcoaceticus/baumannii complex sp. ABNIH27 OX=2080673 GN=queG PE=3 SV=1

SEQ ID NO: 74061 - protein, 362 aa, unidentified
  source 1..362: note = Acinetobacter celticus
  REGION 1..362: note = tr|A0A1C3CVZ9|A0A1C3CVZ9_9GAMM Epoxyqueuosine reductase OS=Acinetobacter celticus OX=1891224 GN=queG; PE = 3 SV=1
MVTPVQAKIQLNQNDPVALKAWIKAEALALGFSDCVIAKPDAQAELPRFKEYLKRGYHGDMKFLEENLEKRADPTLLIPGTKSIICVRMDYLVETPKPRYVPLEPNAAIIARYARGRDYHKTMRGRLKTLSAKIREKVGDFEARPFADSAPVFEKSLAENAGMGWTGKHTLLIHKKSGSFFVLGELFTSLELPFDTPTTKHCGSCTACIDICPTQAIVEPYMLDARKCIAYLTIEYKGIIAEELRRGIGNRVFGCDDCQLICPWNSFAKKTSIEDFHPRHGLDQVSLLDLWQWDEATFLSCTEGSPIRRTGYQSFMRNIAIGLGNADFSPAIIQALEQTRELHDEIVQVHIDWAIAEQYSKN

SEQ ID NO: 74062 - protein, 374 aa, unidentified
  source 1..374: note = Acinetobacter colistiniresistens
  REGION 1..374: note = tr|A0A558FHU3|A0A558FHU3_9GAMM Epoxyqueuosine reductase OS=Acinetobacter colistiniresistens OX=280145; GN = queG PE=3 SV=1
MASSTSFQTQSQKMPDKIELQQLDSQALKDWIKAQALDLGFADCVIAKPDAQDQMPRFKEYLERGYHADMHYLEENLEKRADPTLLVPGTKSIICVRMNYLVASPKPRYVPFEPNSAIIARYARGRDYHKVMRGRLKTLATRIKEKVGDFESRPFADSAPIFEKSLAESAGMGWTGKHTLLIHKKSGSFFVLGELFTSLDLPFDQPATAHCGSCTACIDICPTQAIVEPYMLDARKCIAYLTIEYKGIIPEELRSGIGNRIFGCDDCQLICPWNSFAKKASIPDFDPRHNLDDISLLEIWQWDEATFLSNTEGSPIRRTGYQSFKRNIAIGLGNAPYSAEIVTQLQDAKTRHDEIVNVHIDWAIQQQLQQIKVH

SEQ ID NO: 74063 - protein, 361 aa, unidentified
  source 1..361: note = Acinetobacter colistiniresistens
  REGION 1..361: note = tr|N9R872|N9R872_9GAMM Epoxyqueuosine reductase; OS = Acinetobacter colistiniresistens OX=280145 GN=queG PE=3; SV = 1
MPDKIELQQLDSQALKDWIKAQALDLGFADCVIAKPDAQDQMPRFKEYLERGYHADMHYLEENLEKRADPTLLVPGTKSIICVRMNYLVASPKPRYVPFEPNSAIIARYARGRDYHKVMRGRLKTLATRIKEKVGDFESRPFADSAPIFEKSLAESAGMGWTGKHTLLIHKKSGSFFVLGELFTSLDLPFDQPATAHCGSCTACIDICPTQAIVEPYMLDARKCIAYLTIEYKGIIPEELRSGIGNRIFGCDDCQLICPWNSFAKKASIPDFDPRHNLDNISLLEIWQWDEATFLANTEGSPIRRTGYQSFKRNIAIGLGNAPYSAEIVTQLQDAKTRHDEIVNVHIDWAIQQQLQQIKVH

SEQ ID NO: 74064 - protein, 362 aa, unidentified
  source 1..362: note = Acinetobacter cumulans
  REGION 1..362: note = tr|A0A3A8FY23|A0A3A8FY23_9GAMM Epoxyqueuosine reductase OS=Acinetobacter cumulans OX=2136182 GN=queG; PE = 3 SV=1
MATSAQSKIQLNQDDPATLKAWIKAQALALGFSDCVIAKPDAQAESPRFKEYLKRGYHGDMKFLEENLEKRADPTLLIPGTKSIICVRMDYLVETPKPRYVPHEPNAAIIARYARGRDYHKTMRGRLKTLATVIREKVGDFESRPFADSAPVFEKSLAENAGMGWTGKHTLLIHKKSGSFFVLGELFTSLDLPFDSPAEKHCGSCTACIDICPTQAIVEPYMLDARKCIAYLTIEYKGIIPEELRRGIGNRVFGCDDCQLICPWNSFAKKTSIEDFNPRHGLDQVSLLDLWQWDETTFLNCTEGSPIRRTGYQSFMRNIAIGLGNADYSVEILHALQQNRALHDEIVQVHIDWAIAEQQSKS

SEQ ID NO: 74065 - protein, 362 aa, unidentified
  source 1..362: note = Acinetobacter cumulans
  REGION 1..362: note = tr|A0A498D8Z4|A0A498D8Z4_9GAMM Epoxyqueuosine reductase OS=Acinetobacter cumulans OX=2136182 GN=queG; PE = 3 SV=1
MATSAQSKIQLNQDDPTTLKAWIKAQALALGFSDCVIAKPDAQAELPRFKEYLKRGYHGDMKFLEENLEKRADPTLLIPGTKSIICVRMDYLVETPKPRYVPHEPNAAIIARYARGRDYHKTMRGRLKTLATVIREKVGDFESRPFADSAPVFEKSLAENAGMGWTGKHTLLIHKKSGSFFVLGELFTSLDLPFDSPAEKHCGSCSACIDICPTQAIVEPYMLDARKCIAYLTIEYKGIIPEELRRGIGNRVFGCDDCQLICPWNSFAKKTSIEDFNPRHGLDQVSLLDLWQWDETTFLNCTEGSPIRRTGYQSFMRNIAIGLGNADYSVEILHALQQNRALHDEIVQVHIDWAIAEQQSKS

SEQ ID NO: 74066 - protein, 364 aa, unidentified
  source 1..364: note = Acinetobacter defluvii
  REGION 1..364: note = tr|A0A2S2FHW1|A0A2S2FHW1_9GAMM Epoxyqueuosine reductase OS=Acinetobacter defluvii OX=1871111 GN=queG; PE = 3 SV=1
MSASSSATHIALQQIDPEKLKAWIKEQALQLGFADCVIAQPDAQAELTRFKEYLKRGYHGDMKFLEENLEKRADPTLLVPNTKSIICVRMNYLVETPKPRYVPDHPNSAIIARYARGRDYHKVMRGRLKTLANRIKEKIGDFESRPFADSAPIFEKSLAENAGMGWTGKHTLLIHKKSGSFFVLGELFTSLDLPFDQPTTKHCGSCTACIDICPTQAIVEPYMLDARKCIAYLTIEYKGIIPEELRRGIGNRVFGCDDCQLICPWNSFAQKTEVEDFYPRHGLERVTLLDLWHWDEATFLSCTEGSPIRRTGYQSFMRNIAIGLGNAPFSTEILLALQQTRSRHDEIVQVHIDWAIAEQHNKAK

SEQ ID NO: 74067 - protein, 371 aa, unidentified
  source 1..371: note = Acinetobacter equi
  REGION 1..371: note = tr|A0A0N9VFW7|A0A0N9VFW7_9GAMM Epoxyqueuosine reductase OS=Acinetobacter equi OX=1324350 GN=queG PE=3; SV = 1
MNLSPSLHKIQVDQYDPEEVKVWIKNQALALGFSDCVIARPNAQEELLRLKEYLERGYHADMDYLAENLDKRADPTLLVPNTKSIICVRMNYLVTTPKPRTIPDLPNSGIIARYARGRDYHKVMRGRLKILATKIKEKYGDFESRPFADSAPIFEKSLAENAGMGWTGKHTLLIHKKSGSFFVLGELFTSLELPFDSPTTKHCGSCTACLDICPTQAIVEPYMLDARKCIAYLTIEYKGIIPEELRKPIGNRIFGCDDCQLICPWNSFAQKTEIEDFYPRHDLDRLTLLELWQWNEETFLKNTEGSPIRRTGYQSFKRNIAIGLGNAPFSPEILTELEVQRNKHDDIVQVHIDWAIQQQHENSLKFTNKNV

SEQ ID NO: 74068 - protein, 364 aa, unidentified
  source 1..364: note = Acinetobacter gandensis
  REGION 1..364: note = tr|A0A1A7RE62|A0A1A7RE62_9GAMM Epoxyqueuosine reductase OS=Acinetobacter gandensis OX=1443941 GN=queG; PE = 3 SV=1
MAASTPAQKIPVDQYDPETLKAWIKAQALELGFSDCVIAKPDAQEELPRFKEYLKRGYHGDMKFLEENLEKRANPTLLVPGTRSIICVRMDYLVETPKPRYVPDEPNAAIIARYARGRDYHKVMRGRLKTLSNIIREKIGDFESRPFADSAPVFEKSLAENAGMGWTGKHTLLIHKKSGSFFVLGELFTSLDLPFDTPASKHCGSCAACIDICPTQAIVEPYMLDARKCIAYLTIEYKGIIPEELRRGIGNRVFGCDDCQLICPWNSFAHKTKIEDFYPRHGLNQVSLLDLWQWDEATFLSYTEGSPIRRTGYQSFMRNIAIGLGNAPYSLNIVQSLKNTREKHDAIVQVHIDWALAEQNSKMV

SEQ ID NO: 74069 - protein, 366 aa, unidentified
  source 1..366: note = Acinetobacter genomosp.
  REGION 1..366: note = tr|A0A1V2V484|A0A1V2V484_9GAMM Epoxyqueuosine reductase OS=Acinetobacter genomosp. 33YU OX=1675530; GN = queG PE=3 SV=1
MTSSDTSRIAVQQIDPYELKAWIKAQALDLGFADCVIAKPDAQEQMPRFLEYLERGYHADMSYLEENLEKRADPTLLVPGTKSIICVRMNYLVESPKPRYVPFEPNSAIIARYARGRDYHKVMRGRLKTLATRIREKVGDFESRPFADSAPIFEKSLAESAGMGWTGKHTLLIHKKSGSFFVLGELFTSLDLPFDEPATAHCGSCSACIDICPTQAIVEPYMLDARRCIAYLTIEYKGIIAEELRSGIGNRIFGCDDCQLICPWNSFAKKVSITDFNPRHGLDNISLLDIWEWDEATFLANTEGSPIRRTGYQSFKRNIAIGLGNAPYSKEIVDQLHNGKNLHDEIVNVHIDWAIEQQLNQLELSN

SEQ ID NO: 74070 - protein, 366 aa, unidentified
  source 1..366: note = Acinetobacter genomosp.
  REGION 1..366: note = tr|A0A1V2V3L9|A0A1V2V3L9_9GAMM Epoxyqueuosine reductase OS=Acinetobacter genomosp. 33YU OX=1675530; GN = queG PE=3 SV=1
MTSSDTSRIAVQQIDPYELKAWIKAQALDLGFADCVIAKPDAQEQMPRFLEYLERGYHADMTYLEENLEKRADPTLLVPGTKSIICVRMNYLVESPKPRYVPFEPNSAIIARYARGRDYHKVMRGRLKTLATRIREKVGDFESRPFADSAPIFEKSLAESAGMGWTGKHTLLIHKKSGSFFVLGELFTSLDLPFDEPATAHCGSCSACIDICPTQAIVEPYMLDARRCIAYLTIEYKGIIAEELRTGIGNRIFGCDDCQLICPWNSFAKKASITDFNPRHGLDNISLLDIWQWDEATFLANTEGSPIRRTGYQSFKRNIAIGMGNAPYSEEIVDQLHKGKNLHDEIVNVHIDWAIEQQLNQLQRSN

SEQ ID NO: 74071 - protein, 366 aa, Acinetobacter gerneri
  REGION 1..366: note = tr|N8ZMY6|N8ZMY6_9GAMM Epoxyqueuosine reductase; OS = Acinetobacter gerneri DSM 14967 = CIP 107464 OX=1120926; GN = queG PE=3 SV=1
MASSSSKKLISELIDPEALKSWIKAEALALGFADCVIAKPDAQAELPRFKEYIKRGYHGDMKFLEENLEKRADPTLLVPGTKSVICVRMNYLVEKPEPRFVPDEPNSAIIARYARGRDYHKIMRGRLKTLATKIREKVGEFESRPFADSAPVFEKSLAENAGMGWTGKHTLLIHKKSGSFFVLGELFTSLELPFDQAATKHCGSCSACIDICPTKAIVEPYMLDARKCIAYLTIEYKGIIPEDLRRGIGNRVFGCDDCQLICPWNRFAKKASIEDFNPRHGLDQVSLLDLWKWDEETFLSCTEGSPIRRTGFQSFKRNIAIGLGNAPFSQEIVQALEQDFPAHDDIVQVHVDWALQEQQLKLKQTL

SEQ ID NO: 74072 - protein, 369 aa, Acinetobacter guillouiae
  REGION 1..369: note = tr|A0A077KZJ9|A0A077KZJ9_ACIGI Epoxyqueuosine reductase OS=Acinetobacter guillouiae OX=106649 GN=queG; PE = 3 SV=1
MSATLTSQSIPLQQLDLQELKSWIKQQALQLGFADCVIARPDAQAELPRFKEYLKRGYHGDMKFLEENLEKRADPTLLVPGTKSIICVRMNYLVETPKPRYVPDEPNAAIIARYARGRDYHKIMRGRLKTLATLIKEKVGPFESRPFADSAPVFEKSLAESAGMGWTGKHTLLIHKKSGSFFVLGELFTSLDLPFDEPATHHCGSCSACIDICPTQAIVEPYMLDARRCIAYLTIEYKGIIPEELRRGIGNRVFGCDDCQLICPWNSFAKKASIEDFNPRHGLDDINLLDLWQWDEQTFLNCTEGSPIRRTGFQSFMRNIAIGLGNAPYSAQIIAALTQNRALHDEVVQVHIDWAITEQNAKQHQISAH

SEQ ID NO: 74073 - protein, 369 aa, Acinetobacter guillouiae
  REGION 1..369: note = tr|N8WUB3|N8WUB3_ACIGI Epoxyqueuosine reductase; OS = Acinetobacter guillouiae NIPH 991 OX=1217656 GN=queG; PE = 3 SV=1
MSATLTSQSIPLQQLDLQELKSWIKQQALQLGFADCVIARPDAQAELPRFKEYLKRGYHGDMKFLEENLEKRADPTLLVPGTKSIICVRMNYLVETPKPRYVPDEPNSAIIARYARGRDYHKIMRGRLKTLATLIKEKVGPFESRPFADSAPVFEKSLAESAGMGWTGKHTLLIHKKSGSFFVLGELFTSLDLPFDEPATHHCGSCSACIDICPTQAIVEPYMLDARRCIAYLTIEYKGIIPEELRRGIGNRVFGCDDCQLICPWNSFAKKASIEDFNPRHGLDDINLLDLWQWDEQTFLNCTEGSPIRRTGFQSFMRNIAIGLGNAPYSAQIIAALTQNRALHDEVVQVHIDWAITEQNAKQHQISAH

SEQ ID NO: 74074 - protein, 374 aa, Acinetobacter gyllenbergii
  REGION 1..374: note = tr|A0A1B8UFD8|A0A1B8UFD8_9GAMM Epoxyqueuosine reductase OS=Acinetobacter gyllenbergii OX=134534 GN=queG; PE = 3 SV=1
MASSTPSQTQSQKMPDKIKLLQLDPQALKDWIKAQALDLGFADCVIAKPDAQDQMPRFKEYLERGYHADMHYLEENLEKRADPTLLVPGTKSIICVRMNYLVASPKPRYVPFEPNSAIIARYARGRDYHKVMRGRLKTLATRIKEKVGDFESRPFADSAPIFEKSLAESAGMGWTGKHTLLIHKKSGSFFVLGELFTSLDLPFDQPASAHCGSCTACIDICPTQAIVEPYMLDARKCIAYLTIEYKGIIPEELRSGIGNRIFGCDDCQLICPWNSFAKKASIPDFDPRHNLDDISLLEIWQWDEATFLANTEGSPIRRTGYQSFKRNIAIGLGNAPYSPEIVTQLQDAKTRHDEIVNVHIDWAIQQQLQQIKVH

SEQ ID NO: 74075 - protein, 361 aa, Acinetobacter gyllenbergii
  REGION 1..361: note = tr|V2UHR3|V2UHR3_9GAMM Epoxyqueuosine reductase; OS = Acinetobacter gyllenbergii NIPH 230 OX=1217658 GN=queG; PE = 3 SV=1
MPDKIKLLQLDPQALKDWIKAQALDLGFADCVIAKPDAQDQMPRFKEYLERGYHADMHYLEENLEKRADPTLLVPGTKSIICVRMNYLVASPKPRYVPFEPNSAIIARYARGRDYHKVMRGRLKTLATRIKEKVGDFESRPFADSAPIFEKSLAESAGMGWTGKHTLLIHKKSGSFFVLGELFTSLDLPFDQPASAHCGSCTACIDICPTQAIVEPYMLDARKCIAYLTIEYKGIIPEELRSGIGNRIFGCDDCQLICPWNSFAKKASIPDFDPRHNLDDISLLEIWQWDEATFLANTEGSPIRRTGYQSFKRNIAIGLGNAPYSAEIVTQLQDAKTLHDEIVNVHIDWAIQQQLQQIKVH

SEQ ID NO: 74076 - protein, 374 aa, Acinetobacter haemolyticus
  REGION 1..374: note = tr|A0A429GIJ5|A0A429GIJ5_ACIHA Epoxyqueuosine reductase OS=Acinetobacter haemolyticus OX=29430 GN=queG; PE = 3 SV=1
MASTHSSKNASQKIEIQQLDPHALKSWIKAQALDLDFSDCVIAKPDAQDQIPRFKEYLERGYHADMHYLEENLEKRADPTLLVPGTKSIICVRMNYLVASPKPRYVPFEPNSAIIARYARGRDYHKVMRGRLKTLANRIKEKVGDFESRPFADSAPIFEKSLAESAGMGWTGKHTLLIHKKSGSFFVLGELFTSLDLPFDQPATAHCGSCTACIDICPTQAIVEPYMLDARKCIAYLTIEYKGIIPEEYRAGIGNRIFGCDDCQLICPWNGFAKTATIPDFDPRHSLDNISLLDIWRWDEATFLANTEGSPIRRTGYQSFKRNIAIGLGNAPYSDEIIAKLQEAKSWHDEIVNVHIDWAIQQQLQQSTVHQIEK

SEQ ID NO: 74077 - protein, 374 aa, Acinetobacter haemolyticus
  REGION 1..374: note = tr|N9FAH0|N9FAH0_ACIHA Epoxyqueuosine reductase; OS = Acinetobacter haemolyticus NIPH 261 OX=1217986 GN=queG; PE = 3 SV=1
MASTHSSKNASQKIEIQQLDPHALKSWIKAQALDLGFSDCVIAKPDAQDQIPRFKEYLERGYHADMHYLEENLEKRADPTLLVPGTKSIICVRMNYLVASPKPRYVPFEPNSAIIARYARGRDYHKVMRGRLKTLANRIKEKVGDFESRPFADSAPIFEKSLAESAGMGWTGKHTLLIHKKSGSFFVLGELFTSLDLPFDQPATAHCGSCTACIDICPTQAIVEPYMLDARKCIAYLTIEYKGIIPEEYRAGIGNRIFGCDDCQLICPWNGFAKTATIPDFDPRHSLDNISLLDIWRWDEATFLANTEGSPIRRTGYQSFKRNIAIGLGNAPYSDEIIAKLQEAKSWHDEIVNVHIDWAIQQQLQQSTVHQIEK

SEQ ID NO: 74078 - protein, 374 aa, unidentified
  source 1..374: note = Acinetobacter halotolerans
  REGION 1..374: note = tr|A0A4Q6XKJ5|A0A4Q6XKJ5_9GAMM Epoxyqueuosine reductase OS=Acinetobacter halotolerans OX=1752076 GN=queG; PE = 3 SV=1
MASTASSQKLSQKIELQQFDPQELKAWIKAQALDLGFSDCVIAKPDAQDQMPRFKEYLKRGYHADMHYLEENLEKRANPTLLVPGTKSIICVRMNYLVASPKSRYVPFEPNSAIIARYARGRDYHKVMRGRLKTLATRIKEKVGDFESRPFADSAPIFEKSLAESAGMGWTGKHTLLIHKKSGSFFVLGELFTSLELPFDEPATAHCGSCTACIDICPTQAIVEPYMLDARKCIAYLTIEYKGIIPEDLRQGIGNRIFGCDDCQLICPWNGFAQTASIPDFDPRHSLDDISLLEIWQWDEATFLANTEGSPIRRTGYQSFKRNIAIGLGNAPYSAEIVAKLQEAKIWHDEIVNVHIDWAIQQQSRQAIVHQIEK

SEQ ID NO: 74079 - protein, 364 aa, unidentified
  source 1..364: note = Acinetobacter idrijaensis
  REGION 1..364: note = tr|A0A098YMJ3|A0A098YMJ3_9GAMM Epoxyqueuosine reductase OS=Acinetobacter idrijaensis OX=1507807 GN=queG; PE = 3 SV=1
MTTPDSHAQIQVYQQDPAELKAWIKAQALELGFSDCVIAKPDAQAELARLQEYLDRGYHGDMKFLEENLEKRANPTLLVPGTRSIICVRMDYLVEVPEPRYISYAPNSAIIARYARGRDYHKTMRGRLKTLATKIRGKIGDFESRPFADSAPIFEKSLAESAGMGWTGKHTLLIHKTSGSFFVLGELFTSLELPFDEPATKHCGSCTACIDICPTQAIVEPYMLDARRCIAYLTIEYKGIIPEDLRRGIGNRVFGCDDCQLICPWNSFARVTSVEDFHPRHGLDQVSLLDLWQWDEATFLSATEGSPMRRTGYQSFMRNIAIGLGNAPFDGQIIPALQQQRDQHDEIVQVHIDWAIQEQLAKSS

SEQ ID NO: 74080 - protein, 358 aa, unidentified
  source 1..358: note = Acinetobacter indicus
  REGION 1..358: note = tr|A0A437IX02|A0A437IX02_9GAMM Epoxyqueuosine reductase OS=Acinetobacter indicus OX=756892 GN=queG PE=3; SV = 1
MQNIPVNQLDPVQLKAWIKAQALALGFADCVIARPDAQAELPRLEAYLAQGYQADMHFLGENLEKRANPALLVPGTKSIICVRMNYLVDRPAPRHVPDAPNSAIIARYARGRDYHKVMRGRLKTLASLIRDKVGDFESRPFADSAPIFEKSLAESAGMGWTGKHTLLIHKKSGSFFVLGELFSSLELPFDEPATAHCGSCSACIDICPTKAIVEPYVLDAGKCIAYLTIEYKGIIPEDLRRPIGNRVFGCDDCQLICPWNSFAQLTPLDDFAPRHGLDRMSLLELWQWDEATFLACTEGSPLRRTGYQSFKRNIAIGLGNAPYSADIIAQLQQAKTLHDEVVNVHIDWAIQEQLTKSA

SEQ ID NO: 74081 - protein, 358 aa, unidentified; identical to SEQ ID NO: 74080
  source 1..358: note = Acinetobacter indicus
  REGION 1..358: note = tr|V2VQ15|V2VQ15_9GAMM Epoxyqueuosine reductase; OS = Acinetobacter indicus CIP 110367 OX=1341679 GN=queG; PE = 3 SV=1

SEQ ID NO: 74082 - protein, 364 aa, Acinetobacter johnsonii
  REGION 1..364: note = tr|A0A5C0U6W9|A0A5C0U6W9_ACIJO Epoxyqueuosine reductase OS=Acinetobacter johnsonii OX=40214 GN=queG PE=3; SV = 1
MTTSTSSSKIPVDQYDPEQLKAWIKAEALALGFSDCVIAKPDAQAELPRFKKYLELGYHGDMHFLTENLEKRADPTLLVPGTKSIICVRMDYLVAVPEPRLVPFAPNSAIIARYARGRDYHKVMRGRLKTLSQKIKAKVGDFESRPFADSAPIFEKSLAENAGMGWVGKHTLLIHKTSGSFFVLGELFTSLELPFDQATTKHCGSCSACIDICPTQAIVEPYLLDARKCIAYLTIEFQGIIPEELRRGIGNRVFGCDDCQLICPWNSFAKTTPIDDFNPRHGLDDIQLIDLWQWDENTFMANTEGSPLRRTGYQSFMRNVAIGLGNAPFSDEILQQLQASRPELNDIVQVHIDWAIQEQLMKKQ

SEQ ID NO: 74083 - protein, 364 aa, Acinetobacter johnsonii
  REGION 1..364: note = tr|A0A0U3SUV8|A0A0U3SUV8_ACIJO Epoxyqueuosine reductase OS=Acinetobacter johnsonii XBB1 OX=1242245; GN = queG PE=3 SV=1
MTTSTSSSKIPVDQYDPEQLKAWIKAEALALGFSDCVIAKPDAQVELPRFKKYLELGYHGDMHFLAENLEKRADPTLLVPGTKSIICVRMDYLVAVPEPRLVPFAPNSAIIARYARGRDYHKVMRGRLKTLSQKIKAKVGDFESRPFADSAPIFEKSLAENAGMGWVGKHTLLIHKTSGSFFVLGELFTSLELPFDQATTKHCGSCSACIDICPTQAIVEPYLLDARKCIAYLTIEFQGIIPVELRRGIGNRVFGCDDCQLICPWNSFAKTTPIDDFNPRHSLDDIQLLDLWQWDESTFMANTEGSPLRRTGYQSFMRNVAIGLGNAPFSDEILQQLQASRPELNDIVQVHIDWAIQEQLMKKH

SEQ ID NO: 74084 - protein, 374 aa, Acinetobacter junii
  REGION 1..374: note = tr|A0A4Q7B0L1|A0A4Q7B0L1_ACIJU Epoxyqueuosine reductase OS=Acinetobacter junii OX=40215 GN=queG PE=3 SV=1
MASTSSSHNTSQKIEIQQLDPQELKTWIKAQALELGFSDCVIAKPDAQDQMPRFKEYLKRGYHADMHYLEENLDKRADPTLLVPGTKSIICVRMNYLVASPKPRYVPFEPNSAIIARYARGRDYHKVMRGRLKTLATRIKEKVGDFESRPFADSAPIFEKSLAESAGMGWTGKHTLLIHKKSGSFFVLGELFTSLDLPFDQPATAHCGSCTACIDICPTQAIVEPYMLDARKCIAYLTIEYKGIIPEEYRAGIGNRIFGCDDCQLICPWNGFAKTATIPDFDPRHSLDNISLLDIWQWDEATFLANTEGSPIRRTGYQSFKRNIAIGLGNAPYSNEIVAKLQEAKPWHDEIVNVHIDWAIQQQLRQPIVHYIEK

SEQ ID NO: 74085 - protein, 374 aa, Acinetobacter junii
  REGION 1..374: note = tr|D0SJ49|D0SJ49_ACIJU Epoxyqueuosine reductase; OS = Acinetobacter junii SH205 OX=575587 GN=queG PE=3 SV=1
MASTSSSHNTSQKIEIQQLDPQELKTWIKAQALELGFSDCVIAKPDAQDQMPRFKEYLKRGYHADMHYLEENLDKRADPTLLVPGTKSIICVRMNYLVASPKPRYVPFEPNSAIIARYARGRDYHKIMRGRLKTLATRIKEKVGDFESRPFADSAPIFEKSLAESAGMGWTGKHTLLIHKKSGSFFVLGELFTSLDLPFDQPATAHCGSCTACIDICPTQAIVEPYMLDARKCIAYLTIEYKGIIPEEYRAGIGNRIFGCDDCQLICPWNGFAKTATIPDFDPRHSLDNISLLDIWQWDESTFLANTEGSPIRRTGYQSFKRNIAIGLGNAPYSNEIVAKLQEAKPWHDEIVNVHIDWAIQQQLRQPIVHHIEK

SEQ ID NO: 74086 - protein, 370 aa, unidentified
  source 1..370: note = Acinetobacter kookii
  REGION 1..370: note = tr|A0A1G6IML5|A0A1G6IML5_9GAMM Epoxyqueuosine reductase OS=Acinetobacter kookii OX=1226327 GN=queG PE=3; SV = 1
MASSTASQKIPLDQTDPEALKAWIKAQALQLGFSDCVIAKPDAQEELPRFQEYLKRGYHGDMKFLQENLEKRADPTLLLPGTKSIICVRMNYLVETPKPRYVPDEPNAAIIARYARGRDYHKTMRGRLKTLATKIREKVGDFESRPFADSAPIFEKSLAENAGMGWTGKHTLLIHKKSGSFFVLGELFTSLDLPFDGPSSKHCGSCTACIDICPTQAIVEPYMLDARKCIAYLTIEYQGIIPEELRRGIGNRVFGCDDCQLICPWNSFAKKATIEDFNPRHGLDQVSLLDLWHWDEQTFLAHTEGSPLRRTGYQSFMRNIAIGLGNAPFSREIMETLKQTRDQHDEIVQVHIDWAIQEQRAKSSSIMNRN

SEQ ID NO: 74087 - protein, 364 aa, unidentified
  source 1..364: note = Acinetobacter kyonggiensis
  REGION 1..364: note = tr|A0A1H3H5L4|A0A1H3H5L4_9GAMM Epoxyqueuosine reductase OS=Acinetobacter kyonggiensis OX=595670 GN=queG; PE = 3 SV=1
MASSTPSQKIPLDQNDPETLKAWIKAQALELGFSDCVIAKPDAQEELPRFQEYLKRGYHGDMKFLEENLEKRADPTLLVPGTKSIICVRMNYLVETPKPRYVPDEPNLAIIARYARGRDYHKVMRGRLKTLASKIREKVGDFESRPFADSAPIFEKSLAENAGMGWTGKHTLLIHKKSGSFFVLGELFTSLDLPFDSPTTKHCGSCTACIDICPTQAIVEPYMLDARKCIAYLTIEYQGIIPEELRRGIGNRVFGCDDCQLICPWNSFAKKATIEDFNPRHDLDQSSLLDLWHWDETTFLANTEGSPLRRTGYQSFMRNIAIGLGNAPFSNEILATLQQTREQYDEIVQVHIDWAIQEQLAKFC

SEQ ID NO: 74088 - protein, 366 aa, unidentified
  source 1..366: note = Acinetobacter lactucae
  REGION 1..366: note = tr|A0A151YUD9|A0A151YUD9_9GAMM Epoxyqueuosine reductase OS=Acinetobacter lactucae OX=1785128 GN=queG; PE = 3 SV=1
MTSSDTSRIAVQQLDPHELKAWIKAQALDLGFADCVIAKPDAQEQMPRFLEYLERGYHADMTYLEENLEKRADPTLLVPGTKSIICVRMNYLVESPKPRYVPFEPNSAIIARYARGRDYHKVMRGRLKTLATRIREKVGDFESRPFADSAPIFEKSLAESAGMGWTGKHTLLIHKKSGSFFVLGELFTSLDLPFDEPATAHCGSCSACIDICPTQAIVEPYMLDARRCIAYLTIEYKGIIAEELRAGIGNRIFGCDDCQLICPWNSFAKKASITDFNPRHGLDHISLLDIWQWDEATFLANTEGSPIRRTGYQSFKRNIAIGLGNAPYSKEIVDQLQNGKNLHDEIVNVHIDWAIEQQLSQVQSSN

SEQ ID NO: 74089 - protein, 366 aa, unidentified
  source 1..366: note = Acinetobacter lactucae
  REGION 1..366: note = tr|R8YY30|R8YY30_9GAMM Epoxyqueuosine reductase; OS = Acinetobacter lactucae OX=1785128 GN=queG PE=3 SV=1
MTSSDTSRIAVQQIDPHELKAWIKAQALDLGFADCVIAKPDAQEQMPRFLEYLERGYHADMTYLEENLEKRADPTLLVPGTKSIICVRMNYLVESPKPRYVPLEPNSAIIARYARGRDYHKVMRGRLKTLATRIREKVGDFESRPFADSAPIFEKSLAESAGMGWTGKHTLLIHKKSGSFFVLGELFTSLDLPFDEPATAHCGSCSACIDICPTQAIVEPYMLDARRCIAYLTIEYKGIIAEELRAGIGNRIFGCDDCQLICPWNSFAKTASITDFNPRHGLDNIRLLDIWQWDEATFLANTEGSPIRRTGYQSFKRNIAIGLGNAPYSKEIVDQLQNGKNLHDEIVNVHIDWAIEQQLSQVQSSN

SEQ ID NO: 74090 - protein, 373 aa, unidentified
  source 1..373: note = Acinetobacter larvae
  REGION 1..373: note = tr|A0A1B2M035|A0A1B2M035_9GAMM Epoxyqueuosine reductase OS=Acinetobacter larvae OX=1789224 GN=queG PE=3; SV = 1
MPSTSALSTQQITLQPYDPEQLKEWIKQQALQLGFADCVIAKPDASAELSRFKEYLKRGYHGEMGYLAENLEKRADPSLLVPGTKSIICVRMDYLVASPKPRHIPYAPNQAIIARYARGRDYHKIMRGRLKTLAQRIRDKIGDFESRPFADSAPIFEKALAESAGMGWTGKHTLLIQKKAGSFFVLGELFCSLALPFDRPTTSHCGSCHACIDICPTQAIVAPYMLDARKCIAYLTIEYKGVIPIALRRAIGNRVFGCDDCQLICPWNRYAKLAVIDDFQARHDLDHINLLDLWRWNETTFLERTAGSPIRRTGYESFMRNIAIALGNAPFHADISQALVQRYAELSPLVQQHIDWALDEQKNKQVKIALGLD

SEQ ID NO: 74091 - protein, 364 aa, Acinetobacter lwoffii
  REGION 1..364: note = tr|A0A4Q4DV64|A0A4Q4DV64_ACILW Epoxyqueuosine reductase OS=Acinetobacter lwoffii OX=28090 GN=queG PE=3; SV = 1
MTTPDSHAQIQVYQQDPAELKAWIKAQALELGFSDCVIAKPDAQAELARLQEYLDRGYHGDMKFLEENLEKRANPTLLVPGTRSIICVRMDYLVEVPEPRYISYAPNSAIIARYARGRDYHKTMRGRLKTLATKIRGKIGDFESRPFADSAPIFEKSLAESAGMGWTGKHTLLIHKTSGSFFVLGELFTSLELPFDEPATKHCGSCTACIDICPTQAIVEPYMLDARRCIAYLTIEYKGIIPEDLRRGIGNRVFGCDDCQLICPWNSFAQVTSIEDFHPRHGLDQVSLLDLWQWDEATFLSATEGSPMRRTGYQSFMRNIAIGLGNAPFDGQIIPALQQQRDQHDEIVQVHIDWAIQEQLAKSS

SEQ ID NO: 74092 - protein, 364 aa, Acinetobacter lwoffii
  REGION 1..364: note = tr|D0STE0|D0STE0_ACILW Epoxyqueuosine reductase; OS = Acinetobacter lwoffii SH145 OX=575588 GN=queG PE=3 SV=1
MATPDSQAQIKVYQQDPAELKAWIKAQALELGFSDCVIAKPDAQAELARLQEYLDRGYHGDMKFLEENLEKRANPTLLVPGTRSIICVRMDYLVEVPEPRYISYAPNSAIIARYARGRDYHKTMRGRLKTLATKIREKVGDFESRPFADSAPIFEKSLAETAGMGWTGKHTLLIHKTSGSFFVLGELFTSLELPFDEPATKHCGSCTACIDICPTQAIVEPYMLDARRCIAYLTIEYKGIIPEDLRRGIGNRVFGCDDCQLICPWNSFAQVTSIEDFHPRHGLDQVSLLDLWQWDEATFLSATEGSPMRRTGYQSFMRNIAIGLGNAPFDGQIIPALQQQRNQHDEIVQVHIDWAIQEQLAKSS

SEQ ID NO: 74093 - protein, 364 aa, unidentified
  source 1..364: note = Acinetobacter marinus
  REGION 1..364: note = tr|A0A1G6GLI6|A0A1G6GLI6_9GAMM Epoxyqueuosine reductase OS=Acinetobacter marinus OX=281375 GN=queG PE=3; SV = 1
MPKAIPSIDLQLRNDPIALKAWIKAEAQDLGFADCVVARPDTEDQIPHLQAYLDKGYHADMHYLAENLDKRANPKLLVEGTACILCVRLNYLQEKPQGRYVPEQPDVGIIARYARGRDYHKIMRGRLKQLAQRIEAKVGQFSNRPFSDSAPIFEKALAENAGMGWTGKHTLLINRDSGSFFVLGELFCGLPLPFDEPTTAHCGSCSACIDICPTQAIVAPYQLDARKCIAYLTIEYKGSIPLELRPQIGNRIFGCDDCQLVCPWNRYAKITSIDDFLPRHGLDHTSLLEFWQWDEATFLHKTEGSPIRRTGFQSFKRNVAIALGNASHSKDIIQQLSEQNTEQHQDIVLEHQHWALQQQLAMQS

SEQ ID NO: 74094 - protein, 356 aa, Acinetobacter nosocomialis
  REGION 1..356: note = tr|A0A2L1VMI4|A0A2L1VMI4_ACINO Epoxyqueuosine reductase OS=Acinetobacter nosocomialis OX=106654 GN=queG; PE = 3 SV=1
MQQIDPHELKAWIKAQALDLGFADCVIAKPDAQEQMPRFLEYLERGYHADMTYLEENLEKRADPTLLVPGTKSIICVRMNYLVESPKPRYVPFEPNSAIIARYARGRDYHKVMRGRLKTLATRIREKVGDFESRPFADSAPIFEKSLAESAGMGWTGKHTLLIHKKSGSFFVLGELFTSLDLPFDEPATSHCGSCSACIDICPTQAIVEPYMLDARRCIAYLTIEYKGIIDEELRAGIGNRIFGCDDCQLICPWNSFAKTASITDFNPRHGLDNISLLDIWQWDEATFLANTEGSPIRRTGYQSFKRNIAIGLGNAPYSKEIVDQLHKGKNLHDEIVNVHIDWAIEQQLNQLQRSN

SEQ ID NO: 74095 - protein, 366 aa, Acinetobacter nosocomialis
  REGION 1..366: note = tr|A0A1Y5NS92|A0A1Y5NS92_ACINO Epoxyqueuosine reductase OS=Acinetobacter nosocomialis P020 OX=1285584; GN = queG PE=3 SV=1
MTSSNTSRIAVQQIDPHELKAWIKAQALDLGFADCVIAKPDAQEQMPRFLEYLERGYHADMTYLQENLEKRADPTLLVPGTKSIICVRMNYLVESPKPRYVPFEPNSAIIARYARGRDYHKVMRGRLKTLATRIREKVGDFESRPFADSAPIFEKSLAESAGMGWTGKHTLLIHKNSGSFFVLGELFTSLDLPFDEPATSHCGSCSACIDICPTQAIVEPYMLDARRCIAYLTIEYKGIIDEELRAGIGNRIFGCDDCQLICPWNSFAKTASITDFNPRHGLDNISLLDIWQWDEATFLANTEGSPIRRTGYQSFKRNIAIGLGNAPYSKEIIDQLHKGKNLHDEIVNVHIDWAIEQQLNQLQLSN

SEQ ID NO: 74096 - protein, 356 aa, unidentified
  source 1..356: note = Acinetobacter oleivorans
  REGION 1..356: note = tr|A0A2T5QMH2|A0A2T5QMH2_9GAMM Epoxyqueuosine reductase OS=Acinetobacter oleivorans OX=1148157 GN=queG; PE = 3 SV=1
MQQLDPHELKAWIKAQALDLGFADCVIAKPDAQEQMPRFLEYLERGYHADMTYLEENLEKRADPTLLVPGTKSIICVRMNYLVESPKPRYVPFEPNSAIIARYARGRDYHKVMRGRLKTLATRIREKVGDFESRPFADSAPIFEKSLAESAGMGWTGKHTLLIHKKSGSFFVLGELFTSLDLPFDEPATAHCGSCSACIDICPTQAIVEPYMLDARRCIAYLTIEYKGIIAEELRAGIGNRIFGCDDCQLICPWNSFAKTASISDFNPRNGLDNISLLDIWQWDEATFLANTEGSPIRRTGYQSFKRNIAIGLGNAPYSKEIVDQLHKGKNLHDEIVNVHIDWAIEQQLNQLQLSN

SEQ ID NO: 74097 - protein, 366 aa, unidentified
  source 1..366: note = Acinetobacter oleivorans
  REGION 1..366: note = tr|D8JL68|D8JL68_ACISD Epoxyqueuosine reductase; OS = Acinetobacter oleivorans (strain JCM 16667 / KCTC 23045 / DR1) OX=436717 GN=queG PE=3 SV=1
MTSSDTSRIAVQQLDPHELKAWIKAQALDLGFADCVIAKPDAQEQMPRFLEYLERGYHADMTYLEENLEKRANPTLLVPGTKSIICVRMNYLVESPKPRYVPFEPNSAIIARYARGRDYHKVMRGRLKTLATRIREKVGDFESRPFADSAPIFEKSLAESAGMGWTGKHTLLIHKKSGSFFVLGELFTSLDLPFDEPATAHCGSCSACIDICPTQAIVEPYMLDARRCIAYLTIEYKGIIAEELRAGIGNRIFGCDDCQLICPWNSFAKTASISDFNPRNGLDNISLLDIWQWDEATFLANTEGSPIRRTGYQSFKRNIAIGLGNAPYSKEIVDQLHKGKNLHDEIVNVHIDWAIEQQLNQLQLSN

SEQ ID NO: 74098 - protein, 371 aa, Acinetobacter parvus
  REGION 1..371: note = tr|N8RLU5|N8RLU5_9GAMM Epoxyqueuosine reductase; OS = Acinetobacter parvus DSM 16617 = CIP 108168 OX=981333; GN = queG PE=3 SV=1
MASTTSSGKSLDKIELQQLDPQELKTWIKTQALDLGFSDCVIAKPDAQDQMPRFKEYLKRGYHADMHYLEENLEKRADPTLLVPGTKSIICVRMNYLVASPKPRYVPFEPNSAIIARYARGRDYHKVMRGRLKTLASRIKEKVGDFESRPFADSAPIFEKSLAESAGMGWTGKHTLLIHKKSGSFFVLGELFTSLDLPFDQPATAHCGSCTACIDICPTQAIVEPYMLDARKCIAYLTIEHKGIIPEELRSGIGNRIFGCDDCQLICPWNGFAKTASIPDFDPRHSLDDISLLDIWQWDEATFLAKTEGSPIRRTGYQSFKRNIAIGLGNAPYSAEIISQLHDAKMWHDEIVNVHIEWAIQQQLQQISVPE

SEQ ID NO: 74099 - protein, 371 aa, Acinetobacter parvus
  REGION 1..371: note = tr|N8Q6G3|N8Q6G3_9GAMM Epoxyqueuosine reductase; OS = Acinetobacter parvus NIPH 1103 OX=1217671 GN=queG PE=3; SV = 1
MASTTSSGKSLDKIELQQLDPQELKTWIKTQALDLGFSDCVIAKPDAQDQMPHFKEYLKRGYHADMHYLEENLEKRADPTLLVPETKSIICVRMNYLVASPKPRYVPFEPNSAIIARYARGRDYHKVMRGRLKTLASRIKEKVGDFESRPFADSAPIFEKSLAESAGMGWTGKHTLLIHKKSGSFFVLGELFTSLDLPFDQPATAHCGSCTACIDICPTQAIVEPYMLDARKCIAYLTIEYKGIIPEELRSGIGNRIFGCDDCQLICPWNGFAKTALIPDFDPRHSLDDISLLEIWQWDEATFLAKTEGSPIRRTGYQSFKRNIAIGLGNAPYSAEIVSQLQEAKALHDEIVNVHIEWAIQQQLQQISVPE

SEQ ID NO: 74100 - protein, 364 aa, unidentified
  source 1..364: note = Acinetobacter piscicola
  REGION 1..364: note = tr|A0A4Q4GYK8|A0A4Q4GYK8_9GAMM Epoxyqueuosine reductase OS=Acinetobacter piscicola OX=2006115 GN=queG; PE = 3 SV=1
MSASSSSTHIALQHIDPEQLKSWIKEQALQLGFADCVIAKPDAQAELVRFKEYLKRGYHGDMKFLEENLEKRADPTLLVPNTKSIICVRMNYLVETPKPRYVPDEPNSAIIARYARGRDYHKVMRGRLKTLANKIKEKVGDFESRPFADSAPVFEKSLAENAGMGWTGKHTLLIHKKSGSFFVLGELFTSLELPFDQPTTKHCGSCTACIDICPTQAIVEPYMLDARKCIAYLTIEYKGIIPEELRRGIGNRVFGCDDCQLICPWNSFAKKTPIEDFYPRHGLDNASLLDLWHWDEATFLNCTEGSPIRRTGYQSFMRNIAIGLGNAPFSTEILQALQHHRAHHDEIVQVHIDWAIAEQQRKSK

SEQ ID NO: 74101 - protein, 356 aa, Acinetobacter pittii
  REGION 1..356: note = tr|A0A242T0U6|A0A242T0U6_ACIPI Epoxyqueuosine reductase OS=Acinetobacter pittii OX=48296 GN=queG PE=3; SV = 1
MQQIDPHELKAWIKAQALDLGFADCVIAKPDAQEQMPRFLEYLERGYHADMTYLEENLEKRADPTLLVPGTKSIICVRMNYLVESPKPRYVPLEPNSAIIARYARGRDYHKVMRGRLKTLATRIREKVGDFESRPFADSAPIFEKSLAESAGMGWTGKHTLLIHKKSGSFFVLGELFTSLELPFDEPATAHCGSCSACIDICPTQAIVEPYMLDARRCIAYLTIEYKGIIAEELRAGIGNRIFGCDDCQLICPWNSFAKTASISDFNPRHGLDNISLLDIWQWDEATFLANTEGSPIRRTGYQSFKRNIAIGLGNAPYSKEIVDQLQNGKNLHDEIVNVHIDWAIEQQLNQLQLSN

SEQ ID NO: 74102 - protein, 366 aa, Acinetobacter pittii
  REGION 1..366: note = tr|R8YPW4|R8YPW4_ACIPI Epoxyqueuosine reductase; OS = Acinetobacter pittii ANC 4050 OX=1217691 GN=queG PE=3; SV = 1
MTSSDTSRIAVQQLDPHELKAWIKAQALELGFADCVIAKPDAQEQMPRFLEYLERGYHADMTYLEENLEKRADPTLLVPGTKSIICVRMNYLVESPKPRYVPFEPNSAIIARYARGRDYHKVMRGRLKTLATRIREKVGDFESRPFADSAPIFEKSLAESAGMGWTGKHTLLIHKKSGSFFVLGELFTSLDLPFDEPATAHCGTCSACIDICPTQAIVEPYMLDARRCIAYLTIEYKGIIAEELRAGIGNRIFGCDDCQLICPWNSFAKKASITDFNPRHGLDHISLLDIWQWDEATFLANTEGSPIRRTGYQSFKRNIAIGLGNASYSKEIVDQLQNGKNLHDEIVNVHIDWAIEQQLSQVQSSN

SEQ ID NO: 74103 - protein, 364 aa, unidentified
  source 1..364: note = Acinetobacter populi
  REGION 1..364: note = tr|A0A1Z9YXP5|A0A1Z9YXP5_9GAMM Epoxyqueuosine reductase OS=Acinetobacter populi OX=1582270 GN=queG PE=3; SV = 1
MSKSLSTLDLGLRDDPPALKHWIKAQAIALGFNDCVIAKPDTKDQLAHFQRYLDNGYHADMHYLEENLDKRADPTLLVPDTQSIICVRLNYLQDKPQARYVPDQPDLGIIARYARGRDYHKVMRGRLKQLAQRIEAKIGPFSSRPFSDSAPIFEKTLAENAGMGWTGKHTLLINRQSGSFFVLGELFCSLALPFDTPASKHCGSCSACIDICPTQAIVEPYMLDARKCIAYLTIEYKGSIPLELRAQIGNRIFGCDDCQLICPWNRYAKVTTLDDFQTRHGLDQTALLDFWQWDEATFLAKTEGSAIRRTGFQSFKRNVAVALGNAPFSTQILAALQQHFSEHEAVVNEHIAWAISVQLQKKRA

SEQ ID NO: 74104 - protein, 363 aa, unidentified
  source 1..363: note = Acinetobacter pragensis
  REGION 1..363: note = tr|A0A151XYB6|A0A151XYB6_9GAMM Epoxyqueuosine reductase OS=Acinetobacter pragensis OX=1806892 GN=queG; PE = 3 SV=1
MATPDQAKISLNQDDPEALKAWIKAQALALGFSDCVIAKPDAQAELPRFKEYLKRGYHGDMKFLEENLDKRADPTLLIPGTKSIICVRMDYLVETPKPRYVPFEPNAAIIARYARGRDYHKVMRGRLKTLAAAIREKVGNFESRPFADSAPIFEKSLAENAGMGWTGKHTLLIHKKSGSFFVLGELFTSLDLPFDSPADKHCGSCTACIDICPTQAIVEPYMLDARKCIAYLTIEYKGIIPEELRRGIGNRVFGCDDCQLICPWNSFAKKTSIEDFNPRHGLDQVSLLDLWQWDEATFLTCTEGSPIRRTGYQSFMRNIAIGLGNAEYSPEIIQSLTQNRALHDEIVQVHVDWAIAEQSSKAL

SEQ ID NO: 74105 - protein, 374 aa, unidentified
  source 1..374: note = Acinetobacter proteolyticus
  REGION 1..374: note = tr|A0A2N0WGW5|A0A2N0WGW5_9GAMM Epoxyqueuosine reductase OS=Acinetobacter proteolyticus OX=1776741; GN = queG PE=3 SV=1
MASSTPSQTQSQKMPDKIKLQQLDPQALKDWIKAQALDLGFADCVIAKPDAQDQMPRFKEYLERGYHADMHYLEENLDKRADPTLLVPGTKSIICVRMNYLVASPKPRYVPFEPNSAIIARYARGRDYHKVMRGRLKTLATRIKEKVGDFESRPFADSAPIFEKSLAESAGMGWTGKHTLLIHKKSGSFFVLGELFTSLDLPFDQPASAHCGSCTACIDICPTQAIVEPYMLDARKCIAYLTIEYKGIIPEELRSGIGNRIFGCDDCQLICPWNSFAKKASIPDFDPRHNLDDISLLEIWQWDEATFLANTEGSPIRRTGYQSFKRNIAIGLGNAPYSAEIVTQLQDAKTLHDEIVNVHIDWAIQQQLQQIKVH

SEQ ID NO: 74106 - protein, 374 aa, unidentified
  source 1..374: note = Acinetobacter proteolyticus
  REGION 1..374: note = tr|A0A1E7R6R8|A0A1E7R6R8_9GAMM Epoxyqueuosine reductase OS=Acinetobacter proteolyticus OX=1776741; GN = queG PE=3 SV=1
MASSTPSQTQSQKTPDKIKLQQLDPQALKDWIKVQALDLGFADCVIAKPDAQDQMPRFKEYLERGYHADMHYLEENLDKRADPTLLVPGTKSIICVRMNYLVASPKPRYVPFEPNSAIIARYARGRDYHKVMRGRLKTLATRIKEKVGDFESRPFADSAPIFEKSLAESAGMGWTGKHTLLIHKKSGSFFVLGELFTSLDLPFDQPASAHCGSCTACIDICPTQAIVEPYMLDARKCIAYLTIEYKGIIPEELRSGIGNRIFGCDDCQLICPWNSFAKKASIPDFDPRHNLDDISLLEIWQWDETTFLANTEGSPIRRTGYQSFKRNIAIGLGNAPYSAEIVTQLQDAKTLHDEIVNVHIDWAIQQQLQQINVH

SEQ ID NO: 74107 - protein, 367 aa, unidentified
  source 1..367: note = Acinetobacter puyangensis
  REGION 1..367: note = tr|A0A240EAL2|A0A240EAL2_9GAMM Epoxyqueuosine reductase OS=Acinetobacter puyangensis OX=1096779 GN=queG; PE = 3 SV=1
MSKSLSTLDLGLRDDPHALKHWIKAQAMALGFNDCVIAKPDTKDQLAHFQRYLDNGYHADMHYLEENLDKRADPTLLVPDTHSIICVRLNYLQDKPQARYVPDQPDLGIIARYARGRDYHKVMRGRLKQLAQRIEDKIGPFSSRPFSDSAPIFEKTLAENAGMGWTGKHTLLINRQSGSFFVLGELFCSLALPFDTPASKHCGSCSACIDICPTQAIVEPYMLDARKCIAYLTIEYKGSIPLELRAQIGNRIFGCDDCQLICPWNRYAKVTTLDDFQTRHDLDQTALLDFWQWDEATFLAKTEGSAIRRTGFQSFKRNVAIALGNAPFSTQILAALQQYFSEHEALVKEHVAWAISVQVQKNEHKSH

SEQ ID NO: 74108 - protein, 366 aa, unidentified
  source 1..366: note = Acinetobacter qingfengensis
  REGION 1..366: note = tr|A0A1E7R944|A0A1E7R944_9GAMM Epoxyqueuosine reductase OS=Acinetobacter qingfengensis OX=1262585; GN = queG PE=3 SV=1
MSKNSVKTLDLSLRENPQALKTWIKTQALALGFNDCVIAKPDTKDQLEHFKRYLDQGYHADMHYLTENLDKRADPTLLVPNTQSIICVRLNYLQDKPQPRYIPDTPDIGIIARYARGRDYHKVMRGRLKQLAQCIEAKIGPFSSRPFSDSAPIFEKTLAENAGMGWTGKHTLLINRQSGSFFVLGELFCSLQLPFDAPATRHCGSCSACIDICPTQAIVEPYMLDARKCIAYLTIEYKGSIPLALRPMIGNRIFGCDDCQLICPWNRYAKVTTLEDFHTRHQLDQTHLMDFWQWDESTFLAKTEGSAIRRTGFQSFKRNVAIALGNAPFSAAICSALQQQNTEHNDLVLEHRNWALQQQINKNVQS

SEQ ID NO: 74109 - protein, 363 aa, Acinetobacter radioresistens
  REGION 1..363: note = tr|A0A2T1J3L7|A0A2T1J3L7_ACIRA Epoxyqueuosine reductase OS=Acinetobacter radioresistens OX=40216 GN=queG; PE = 3 SV=1
MSESLPSRKIDLAQLDAEALKQWIKSQALDLGFADCVVAKPDAQAEMVRFQEYLDRGYHADMDYLKENLEKRTDPTLLVPGTKSIICVRMNYLVETPKPRYVPYEPNSAIIARYARGRDYHKIMRGRLKTLASRIRDKVGNFESRPFADSAPIFEKSLAESAGMGWTGKHTLLIHKKSGSFFVLGELFTSLDLPFDEPATAHCGSCSACIDICPTQAIVEPYMLDARKCIAYLTIEYKGIIPQELRHGIGNRVFGCDDCQLICPWNSFAKKATIEDFNPRNGLDNISLLELWQWDEETFLKNTEGSPLRRTGYQSFKRNIAIGLGNAPYTTEIIAQLEQARTKHDEIVNHHIDWAIEQQISKS

SEQ ID NO: 74110 - protein, 363 aa, Acinetobacter radioresistens
  REGION 1..363: note = tr|A0A3F3GWQ2|A0A3F3GWQ2_ACIRA Epoxyqueuosine reductase OS=Acinetobacter radioresistens NIPH 2130; OX = 1217674 GN=queG PE=3 SV=1
MSESLPSRKIDLAQLDAEALKQWIKSQALDLGFADCVVAKPDAQAEMARFQEYLDRGYHADMDYLKENLEKRADPTLLVPGTKSIICVRMNYLVETPKPRYVPYEPNSAIIARYARGRDYHKIMRGRLKTLASRIRDKVGNFESRPFADSAPIFEKSLAESAGMGWTGKHTLLIHKKSGSFFVLGELFTSLDLPFDEPATAHCGSCSACIDICPTQAIVEPYMLDARKCIAYLTIEYKGIIPQELRHGIGNRVFGCDDCQLICPWNSFAKKATIEDFNPRNGLDNISLLELWQWDEETFLKNTEGSPLRRTGYQSFKRNIAIGLGNAPYTTEIVTQLEQARTKHDEIVNHHIDWAIEQQISKS

SEQ ID NO: 74111 - protein, 372 aa, Acinetobacter rudis
  REGION 1..372: note = tr|S3NC12|S3NC12_9GAMM Epoxyqueuosine reductase; OS = Acinetobacter rudis CIP 110305 OX=421052 GN=queG PE=3; SV = 1
MLSSPSSQIAAHEPLDPEQLKIWIKEQARALGFSDCVIAQPDTQAELARFKTYLERGYHGDMSYLEENLDKRADPTLLVPGTKSIICVRMDYLVERPAPRIVPHAPNHAIIARYARGRDYHKVMRGRLKTLASKIRDKVGEFESRPFADSAPIFEKALAENAGMGWTGKHTLLINKKSGSFFVLGELFTSLLLPFDSPASKHCGTCQACIDICPTQAIVEPYMLDARKCIAYLTIEYKGIIPIEHRRGIGNRIFGCDDCQLICPWNRYAQITPIEDFHPRHGLDQASLLELWQWDEQTFLSRTEGSPIRRTGYSSFMRNIAIGLGNAPYSEDIVLALKQAHVLHDPIVQVHIDWALQEQTEKLKAQSQQLID

SEQ ID NO: 74112 - protein, 364 aa, Acinetobacter schindleri
  REGION 1..364: note = tr|A0A3B8HM28|A0A3B8HM28_9GAMM Epoxyqueuosine reductase OS=Acinetobacter schindleri OX=108981 GN=queG; PE = 3 SV=1
MTTPDSPAQIQVFQEDSEALKAWIKVQALELGFSDCVIARPDAQAELPRLKEYLERGYHGDMKFLEENLEKRADPTLLIPNTRSIICVRMDYLVESPEPRMVPDAPNSAIIARYARGRDYHKTMRGRLKMLSAKIKEKVGEFESRPFADSAPVFEKSLAENAGMGWTGKHTLLIHKKSGSFFVLGELFTSLELPFDEPTTKHCGSCTACIDICPTQAIVEPYMLDARRCIAYLTIEYKGIIPEDLRRGIGNRVFGCDDCQLICPWNSFAKTTTIADFHPRHGLDQASLLDLWQWDEPTFLASTEGSPLRRTGYQSFIRNIAIGLGNAPFNPAIIQALQNSRAQHDEVVQVHIDWSIQEQLSKSR

SEQ ID NO: 74113 - protein, 364 aa, Acinetobacter schindleri
  REGION 1..364: note = tr|N8WKZ5|N8WKZ5_9GAMM Epoxyqueuosine reductase; OS = Acinetobacter schindleri NIPH 900 OX=1217675 GN=queG; PE = 3 SV=1
MTTPDSPAQIQVFQEDPEALKAWIKVQALELGFSDCVIARPDAQAELPRLQEYLERGYHGDMKFLEENLDKRANPTLLIPNTRSVICVRMDYLVESPEPRMVPDAPNSAIIARYARGRDYHKTMRGRLKMLSAKIKEKVGEFESRPFADSAPVFEKSLAENAGMGWTGKHTLLIHKKSGSFFVLGELFTSLELPFDEPTTKHCGSCTACIDICPTQAIVEPYMLDARRCIAYLTIEYKGIIPEDLRRGIGNRVFGCDDCQLICPWNSFAKTTTIADFHPRNGLDQASLLDLWQWDEPTFLASTEGSPLRRTGYQSFMRNIAIGLGNAPFNPAIIQALQNSRAQHDEVVQVHIDWSIQEQLSKSR

SEQ ID NO: 74114 - protein, 356 aa, unidentified
  source 1..356: note = Acinetobacter seifertii
  REGION 1..356: note = tr|A0A2T5QV92|A0A2T5QV92_9GAMM Epoxyqueuosine reductase OS=Acinetobacter seifertii OX=1530123 GN=queG; PE = 3 SV=1
MQQIDPYELKAWIKAQALDLGFADCVIAKPDAQEQMPRFLEYLERGYHADMSYLEENLEKRADPTLLVPGTKSIICVRMNYLVESPKPRYVPFEPNSAIIARYARGRDYHKVMRGRLKTLATRIREKVGDFESRPFADSAPIFEKSLAESAGMGWTGKHTLLIHKKSGSFFVLGELFTSLDLPFDEPATAHCGSCSACIDICPTQAIVEPYMLDARRCIAYLTIEYKGIIAEELRAGIGNRIFGCDDCQLICPWNSFAKKASITDFDPRYGLDNISLLEIWQWDEATFLANTEGSPIRRTGYQSFKRNIAIGMGNAPYSEEIVDQLHKGKNLHDEIVNVHIDWAIEQQLNQLQRSN

SEQ ID NO: 74115 - protein, 356 aa, unidentified
  source 1..356: note = Acinetobacter seifertii
  REGION 1..356: note = tr|A0A2M8MHA3|A0A2M8MHA3_9GAMM Epoxyqueuosine reductase OS=Acinetobacter seifertii OX=1530123 GN=queG; PE = 3 SV=1
MQQIDPYELKAWIKAQALDLGFADCVIAKPDAQEQMPRFLEYLERGYHADMSYLEENLEKRADPTLLVPGTKSIICVRMNYLVESPKPRYVPFEPNSAIIARYARGRDYHKVMRGRLKTLATRIREKVGDFESRPFADSAPIFEKSLAESAGMGWTGKHTLLIHKKSGSFFVLGELFTSLDLPFDEPATAHCGSCSACIDICPTQAIVEPYMLDARRCIAYLTIEYKGIIAEELRAGIGNRIFGCDDCQLICPWNSFAKKASITDFNPRHGLDNISLLDIWQWDEATFLSNTEGSPIRRTGYQSFKRNIAIGMGNAPYSEEIVDQLHKGKNLHDEIVNVHIDWAIEQQLNQLQRSN

SEQ ID NO: 74116 - protein, 367 aa, Acinetobacter soli
  REGION 1..367: note = tr|A0A3R9A4D5|A0A3R9A4D5_9GAMM Epoxyqueuosine reductase OS=Acinetobacter soli OX=487316 GN=queG PE=3 SV=1
MPLDQPHGSIPLTQDDPEELKSWIKSQALALGFSDCVIAKPDAQDQMPRFKEYLKRGYHADMHYLAENLDKRADPTLLVPGTKSIICVRMNYLVESPKPRYVPDQPNSAIIARYARGRDYHKVMRGRLKTLAGIIKARVGEFESRPFADSAPIFEKSLAESAGMGWTGKHTLLIHKKSGSFFVLGELFTSLELPFDQPATAHCGSCTACIDICPTQAIVEPYMLDARKCIAYLTIEYKGIIAEELRAGIGNRIFGCDDCQLICPWNSFAKIASIPDFNPRHGLDNISLLEIWTWDEATFLANTEGSPIRRTGFQSFKRNIAIGLGNAPYSDEIIEALKMAREQHDEIVQVHIDWAIEQQLKKQYQIH

SEQ ID NO: 74117 - protein, 367 aa, Acinetobacter soli
  REGION 1..367: note = tr|N9AEF1|N9AEF1_9GAMM Epoxyqueuosine reductase; OS = Acinetobacter soli NIPH 2899 OX=1217677 GN=queG PE=3; SV = 1
MPLDQPHGSIPLTQDDPEELKSWIKSQALALGFSDCVIAKPDAQDQMPRFKEYLKRGYHADMHYLAENLDKRADPTLLVPGTKSIICVRMNYLVESPKPRYVPDQPNSAIIARYARGRDYHKVMRGRLKTLAGIIKARVGEFESRPFADSAPIFEKSLAESAGMGWTGKHTLLIHKKSGSFFVLAELFTSLELPFDQPATAHCGSCTACIDICPTQAIVEPYMLDARKCIAYLTIEYKGIIAEELRAGIGNRIFGCDDCQLICPWNSFAKIASIPDFNPRHGLDNISLLEIWTWDEATFLANTEGSPIRRTGFQSFKRNIAIGLGNAPYSDDVIEALKMAREQHDEIVQIHIDWAIEQQLKKQYQIH

SEQ ID NO: 74118 - protein, 364 aa, Acinetobacter sp.
  REGION 1..364: note = tr|A0A519J8D0|A0A519J8D0_ACISP Epoxyqueuosine reductase OS=Acinetobacter sp. OX=472 GN=queG PE=3 SV=1
MASSTLSQKIPLDQYDPEALKAWIKVQALELGFSDCVIAKPDAQEELPRFQEYLKRGYHGDMKFLQENLEKRANPALLVPGTKSIICVRMNYLVETPKPRYVPDEPNAAIIARYARGRDYHKTMRGRLKTLATKIREKVGDFESRPFADSAPIFEKSLAENAGMGWTGKHTLLIHKKSGSFFVLGELFTSLDLPFDGPTSKHCGSCTACMDICPTRAIVEPYMLDARKCIAYLTIEYQGIIPEELRRGIGNRVFGCDDCQLICPWNSFAKKTTIEDFNPRHGLDQVSLLDLWHWDEPTFLANTEGSPLRRTGYQSFMRNIAIGLGNAPFSTEIIETLRQSRDQHDEIVQVHIDWAIREQLAKSS

SEQ ID NO: 74119 - protein, 366 aa, Acinetobacter sp.
  REGION 1..366: note = tr|A0A2A5PJQ0|A0A2A5PJQ0_9GAMM Epoxyqueuosine reductase OS=Acinetobacter sp. YT-02 OX=2018564 GN=queG; PE = 3 SV=1
MATSTTSAHISLHQDDPAALKAWIKAQALALGFADCVIAKPDAQAELARFQEYLKRGYHGDMKFLEENLDKRANPTLLVPNTKSIICVRMNYLVETPRPRHIPDAPNSAIIARYARGRDYHKVMRGRLKTLATRIREKVGNFESRPFADSAPIFEKSLAESAGMGWTGKHTLLIHKKSGSFFVLGELFTSLDLPFDPPATSHCGSCTACIDICPTQAIVEPYMLDARKCIAYLTIEYQGIIPEELRRGIGNRVFGCDDCQLICPWNSFAQVTTVEDFHPRHALDQVSLLDLWQWDESTFLAKTEGSPLRRTGYQSFMRNIAIGLGNAPFSAQILQTLQQTRAQHDEIVQIHIDWAIQEQLLKQPKI

SEQ ID NO: 74120 - protein, 366 aa, Acinetobacter tandoii
  REGION 1..366: note = tr|A0A515BE59|A0A515BE59_9GAMM Epoxyqueuosine reductase OS=Acinetobacter tandoii OX=202954 GN=queG PE=3; SV = 1
MASTSSSSKISLQQLDPQELKAWIKAQALDLGFADCVIAKPDAQAELERFKEYLKRGYHADMTYLEENLDKRADPTLLVPGTRSIICVRMNYLVETPKPRYVPNEPNVAIIARYARGRDYHKIMRGRLKTLATRIRERVGDFESRPFADSAPIFEKSLAENAGMGWTGKHTLLIHKKSGSFFVLGELFTSLDLPFDPPTTKHCGSCTACIDICPTQAIVEPYMLDARKCIAYLTIEYKGIIPEELRRGIGNRVFGCDDCQLICPWNSFAQKASIEDFNPRHDLDRVTLLDLWHWDEATFLANTEGSPIRRTGYQSFMRNIAIGLGNAPFSSLILQTLHETRHLHDDIVQVHIDWAIQEQLIKSQTV

SEQ ID NO: 74121 - protein, 366 aa, Acinetobacter tandoii
  REGION 1..366: note = tr|R9B0Z5|R9B0Z5_9GAMM Epoxyqueuosine reductase; OS = Acinetobacter tandoii DSM 14970 = CIP 107469 OX=1120927; GN = queG PE=3 SV=1
MASTSSSSNISLQQLDLQELKTWIKTQALDLGFADCVIAKPDAQAELERFKEYLKRGYHADMTYLEENLDKRADPTLLVPGTRSIICVRMNYLVETPKPRYVPNEPNAAIIARYARGRDYHKIMRGRLKTLATRIRERVGDFESRPFADSAPIFEKSLAENAGMGWTGKHTLLIHKKSGSFFVLGELFTSLDLPFDGPTTKHCGSCTACIDICPTQAIVEPYMLDARKCIAYLTIEYKGIIPEELRRGIGNRVFGCDDCQLICPWNSFAQKASIEDFNPRHDLDRVTLLDLWHWDEATFLSNTEGSPIRRTGYQSFMRNIAIGLGNAPFSRLILQTLHETRHLHDDIVQVHIDWAIQEQLIKSQSV

SEQ ID NO: 74122 - protein, 371 aa, Acinetobacter tjernbergiae
  REGION 1..371: note = tr|V2UZA2|V2UZA2_9GAMM Epoxyqueuosine reductase; OS = Acinetobacter tjernbergiae DSM 14971 = CIP 107465; OX = 1120928 GN=queG PE=3 SV=1
MASSTSSQKLSQKIELQQFDPQALKAWIKAQALDLGFSDCVIAKPDAQDQMPRFKEYLKRGYHADMHYLEENLEKRADPTLLVPGTKSIICVRMNYLVASPKPRYVPFEPNSAIIARYARGRDYHKIMRGRLKTLATRLREKVGDFESRPFADSAPIFEKSLAESAGMGWTGKHTLLIHKKSGSFFVLGELFTSLDLPFDQPATAHCGSCTACIDICPTQAIVEPYMLDARKCIAYLTIEYKGIIPEELRSGIGNRIFGCDDCQLICPWNGFAKTASIPDFDPRHSLDDISLLEIWQWDEATFLAKTEGSPIRRTGYQSFKRNIAIGLGNAPYSAEIVSQLQEAKALHDEIVNVHIEWAIQQQLQQINVPE

SEQ ID NO: 74123 - protein, 366 aa, Acinetobacter towneri
  REGION 1..366: note = tr|A0A1E8DZR1|A0A1E8DZR1_9GAMM Epoxyqueuosine reductase OS=Acinetobacter towneri OX=202956 GN=queG PE=3; SV = 1
MAKSTTSAQISLYQDDPVALKTWIKAQALALGFADCVIAKPDAQAELARFQEYLKRGYHGDMKFLEENLDKRANPTLLVPNTKSIICVRMNYLVETPRPRHIPDAPNSAIIARYARGRDYHKVMRGRLKTLATRIREKVGEFESRPFADSAPIFEKSLAESAGMGWTGKHTLLIHKKSGSFFVLGELFTSLDLPFDAPATSHCGSCTACIDICPTQAIVEPYMLDARKCIAYLTIEYQGVIPEELRRGIGNRVFGCDDCQLICPWNSFAQVTTVDDFHPRHALDQVSLLDLWQWDESTFLAKTEGSPLRRTGYQSFMRNIAIGLGNAPFSAQILQTLQQTRAQHDEIVQIHMDWAIQEQLLKQPKI

SEQ ID NO: 74124 - protein, 369 aa, Acinetobacter towneri
  REGION 1..369: note = tr|N9B5C8|N9B5C8_9GAMM Epoxyqueuosine reductase; OS = Acinetobacter towneri DSM 14962 = CIP 107472 OX=1120929; GN = queG PE=3 SV=1
MATSTTSAHISLHQDDPAALKAWIKAQALALGFADCVIAKPDAQAELARFQEYLKRGYHGDMKFLEENLDKRANPTLLVPNTKSIICVRMNYLVETPRPRHIPDAPNSAIIARYARGRDYHKVMRGRLKTLATRIREKVGEFESRPFADSAPIFEKSLAESAGMGWTGKHTLLIHKKSGSFFVLGELFTSLDLPFDAPATPHCGSCTACIDICPTQAIVEPYMLDARKCIAYLTIEYQGVIPEELRRGIGNRVFGCDDCQLICPWNSFAQVTTVDDFHPRHALDQISLLDLWQWDESTFLAKTEGSPLRRTGYQSFMRNIAIGLGNAPFSAQILQILQQTRTQHDEIVQIHMDWAIQEQLLKQPKIKQK

SEQ ID NO: 74125 - protein, 367 aa, Acinetobacter ursingii
  REGION 1..367: note = tr|A0A3R9SJD7|A0A3R9SJD7_9GAMM Epoxyqueuosine reductase OS=Acinetobacter ursingii OX=108980 GN=queG PE=3; SV = 1
MSSISSAASIPVLQHDAIALKQWIKQQALALGFADCVIAKPDAQAQMPRFEEYLKRGYHADMHYLEENLEKRADPKLLVPGTKSIICVRMNYLVETPKPRYVPDEPNSAIIARYARGRDYHKVMRGRLKTLASKIKEKVGEFESRPFADSAPIFEKSLAESAGMGWTGKHTLLIHKKSGSFFVLGELFTSLDLPFDEPATAHCGSCSACIDICPTQAIVEPYMLDARKCIAYLTIEYKGIIPEELRSGIGNRIFGCDDCQLICPWNSFAKTASIPDFDPRHGLDNISLIEIWNWDEATFLNNTEGSPIRRTGYQSFKRNIAIGLGNALYSELTVEQLIQAKAQHDDIVNVHIDWAIEQQLLKQRASQ

SEQ ID NO: 74126 - protein, 367 aa, Acinetobacter ursingii; identical to SEQ ID NO: 74125
  REGION 1..367: note = tr|N9SCF5|N9SCF5_9GAMM Epoxyqueuosine reductase; OS = Acinetobacter ursingii NIPH 706 OX=1217716 GN=queG PE=3; SV = 1

SEQ ID NO: 74127 - protein, 364 aa, unidentified
  source 1..364: note = Acinetobacter variabilis
  REGION 1..364: note = tr|A0A427LKW7|A0A427LKW7_9GAMM Epoxyqueuosine reductase OS=Acinetobacter variabilis OX=70346 GN=queG; PE = 3 SV=1
MTTPDSQAQIQVYQQDPNELKAWIKAQARELGFSDCVIAKPDAQAELARLQEYLDRGYHGDMKFLEENLEKRADPTLLIPNTKSVICVRMDYLVDLPEPRLVPYAPNSAIIARYARGRDYHKTMRGRLKMLASKIREKVGEFESRPFADSAPVFEKSLAESAGMGWTGKHTLLIHKKSGSFFVLGELFSSLELPFDEPASKHCGSCTACIDICPTQAIVEPYMLDARRCIAYLTIEYKGIIPEELRRGIGNRVFGCDDCQLICPWNSFAQKTNIEDFHPRHGLDQVSLLDLWQWDEATFLSSTEGSPLRRTGYQSFMRNIAIGLGNAPFDPQIVQALQAQQNQHDEIVQVHIDWAIQEQLAKSR

SEQ ID NO: 74128 - protein, 364 aa, unidentified
  source 1..364: note = Acinetobacter variabilis
  REGION 1..364: note = tr|N9NZE6|N9NZE6_9GAMM Epoxyqueuosine reductase; OS = Acinetobacter variabilis OX=70346 GN=queG PE=3 SV=1
MTIPDSQAQIQVYQQDPNELKAWIKAQARELGFSDCVIAKPDAQAELVRLQEYLDRGYHGDMKFLEENLEKRANPTLLIPNTKSVICVRMDYLVDLPEPRLVPYAPNSAIIARYARGRDYHKTMRGRLKMLAAKIREKVGEFESRPFADSAPVFEKSLAESAGMGWTGKHTLLIHKKSGSFFVLGELFSLLELPFDEPASKHCGSCTACIDICPTQAIVEPYMLDARRCIAYLTIEYKGIIPEELRRGIGNRVFGCDDCQLICPWNSFAQKTNIEDFHPRYGLDQVSLLDLWQWDEATFLSSTEGSPLRRTGYQSFMRNIAIGLGNAPFDPQIVQALQAQQNQHDEIVRVHIDWAIQEQLAKSR

SEQ ID NO: 74129 - protein, 369 aa, Acinetobacter venetianus
  REGION 1..369: note = tr|A0A150HRH1|A0A150HRH1_9GAMM Epoxyqueuosine reductase OS=Acinetobacter venetianus OX=52133 GN=queG; PE = 3 SV=1
MASSTPSGKSLDKIELQQLDPQELKTWIKAQALDLGFSDCVIAKPDAQDQMPRFKEYLERGYHADMHYLEENLQKRADPTLLVPGTKSIICVRMNYLVASPQPRYVPFEPNSAIIARYARGRDYHKVMRGRLKTLSSRIKQKVGDFESRPFADSAPIFEKSLAESAGMGWTGKHTLLIHKKSGSFFVLGELFTSLELPFDQPATAHCGSCTACIDICPTQAIVEPYMLDARKCIAYLTIEYKGIIPEELRQGIGNRIFGCDDCQLICPWNSFAKMATIPDFDARHSLDNISLLDIWQWDEVTFLANTEGSPIRRTGYQSFKRNIAIGLGNAPYSVDVVTQLQEAKPLHDEIVNVHIDWAIQQQLQRANV

SEQ ID NO: 74130 - protein, 369 aa, Acinetobacter venetianus
  REGION 1..369: note = tr|N8ZT00|N8ZT00_ACIVR Epoxyqueuosine reductase; OS = Acinetobacter venetianus (strain ATCC 31012 / CIP 110063 / RAG-1) OX=1191460 GN=queG PE=3 SV=1
MASSTPSEKSLDKIELQQLDPQELKTWIKAQALDLGFSDCVIAKPDAQDQMPRFKEYLERGYHADMHYLEENLEKRANPTLLVPGTKSIICVRMNYLVASPQPRYVPFEPNSAIIARYARGRDYHKVMRGRLKTLASQIKEKVGDFESRPFADSAPIFEKSLAESAGMGWTGKHTLLIHKKSGSFFVLGELFTSLELPFDQPATAHCGSCTACIDICPTQAIVEPYMLDARKCIAYLTIEYKGIIPEELRQGIGNRIFGCDDCQLICPWNSFAKMATIPDFDARHGLDNISLLDIWQWDEATFLANTEGSPIRRTGYQSFKRNIAIGLGNAPYSADVVTQLQEAKPLHDEIVNVHIDWAIQQQLQRANV

SEQ ID NO: 74131 - protein, 364 aa, unidentified
  source 1..364: note = Acinetobacter wuhouensis
  REGION 1..364: note = tr|A0A385C366|A0A385C366_9GAMM Epoxyqueuosine reductase OS=Acinetobacter wuhouensis OX=1879050 GN=queG; PE = 3 SV=1
MSATSTTPSIPLQQLDLQELKTWIKQQALQLGFADCVIARPDAQAELPRFKEYLKRGYHGDMKFLEENLEKRADPTLLVPGTKSIICVRMNYLVETPKPRYVPDEPNSAIIARYARGRDYHKVMRGRLKTLASIIRERVGEFESRPFADSAPVFEKSLAENAGMGWTGKHTLLIHKKSGSFFVLGELFTSLELPFDEPATHHCGSCTACIDICPTQAIVEPYMLDARKCIAYLTIEYKGIIPEELRRGIGNRVFGCDDCQLICPWNSFAKKASIEDFNPRHGLDDVSLLDLWQWDEQTFLDCTEGSPIRRTGFQSFKRNIAIGLGNAPFSPQIIQALQQNNPQHDHVVQVHVDWAIAEQLAKKP

SEQ ID NO: 74132 - protein, 364 aa, unidentified
  source 1..364: note = Acinetobacter wuhouensis
  REGION 1..364: note = tr|A0A3G2T4R2|A0A3G2T4R2_9GAMM Epoxyqueuosine reductase OS=Acinetobacter wuhouensis OX=1879050 GN=queG; PE = 3 SV=1
MSATSTTPSIPLQQLDLQELKTWIKQQALQLGFADCVIARPDAQAELPRFKEYLKRGYHGDMKFLEENLEKRADPTLLVPGTKSIICVRMNYLVETPKPRYVPDEPNSAIIARYARGRDYHKVMRGRLKTLASIIRERVGEFESRPFADSAPVFEKSLAENAGMGWTGKHTLLIHKKSGSFFVLGELFTSLELPFDEPATHHCGSCTACIDICPTQAIVEPYMLDARKCIAYLTIEYKGIIPEELRRGIGNRVFGCDDCQLICPWNSFAKKASIEDFNPRHGLDDVSLLDLWQWDEQTFLDCTEGSPIRRTGFQSFKRNIAIGLGNAPFSPKNIQALQQNNPQHDHVVQVHVDWAIAEQLAKKP

SEQ ID NO: 74133 - protein, 343 aa, unidentified
  source 1..343: note = Actibacterium atlanticum
  REGION 1..343: note = tr|A0A058ZMG5|A0A058ZMG5_9RHOB Epoxyqueuosine reductase OS=Actibacterium atlanticum OX=1461693 GN=queG; PE = 3 SV=1
MLKQALISRALEEGFAKCRIMRPDAVPELPDRLAAFVEQGYHGQMGWMAERMQWRGNPAALWPQAKSVIMLAEPYTPDEDPMEVIAQPDRAAISVYARNRDYHDVAKKRLKRLGRWLLEQAPGEEIKVFVDTAPVMEKPLAQAAGLGWQGKHTNLLGRDLGSWFFLGALFTTVEFEPDTPEINHCGNCTACLEACPTDAFPAPYQIDARRCISYLTIEHHGPVDEKLRAKMGNRIYGCDDCLAACPWNKFAVEASEMKYAARDDLIAPKLADLALLDDAGFRAHFSGSPIKRIGRNRFVRNVLYAIGNSGDASLLHPAQALLDDPDDTVADAARWAVARLSKK

SEQ ID NO: 74134 - protein, 347 aa, unidentified
  source 1..347: note = Actibacterium mucosum
  REGION 1..347: note = tr|A0A037ZL25|A0A037ZL25_9RHOB Epoxyqueuosine reductase OS=Actibacterium mucosum KCTC 23349 OX=1454373; GN = queG PE=3 SV=1
MTDQLRADLTDFAHQAGFAAVGFCRPDAVPQLPERLKFFLDEGRHGQMGWMAERTHWRADPAALWPEAQTVIMLAEPYTPDHNPLDTLARRDRAAISVYAQNRDYHDIVKKRLKRVGRWLLEQVPAGEAIKVFVDTAPVMEKPLAQAAGLGWQGKHTNLLSRDLGNWFFLGAIFTTVRFDADTPGLSKCGSCTACLDICPTKAFPAPYQLDARRCISYLTIEHHGPVAPDLRAAMGNRIYGCDDCLAICPWNKFAVTGAEARYAARDDLRAPPLAELAMLDDAGFRARFSGSPIKRIGRNRFVRNVLYAIGNSGDPALLPTARALQGDADPTVADAAQWAFARLANP

SEQ ID NO: 74135 - protein, 276 aa, Actinobacillus pleuropneumoniae
  REGION 1..276: note = tr|A0A4U9WQ36|A0A4U9WQ36_ACTPL Epoxyqueuosine reductase OS=Actinobacillus pleuropneumoniae OX=715; GN = queG PE=4 SV=1
MTYTLGSYAPPPSVWEELKQELKAVAPELGIDDIGFASAEPFQSLKGILQSHRDKGFESGFEEPDLDKRVTPALPGTEPKSLIAIAITYHSKMENPPKSEPGKYRGIMARSAWGRDYHHVLREAMSRLEAYIKERVPDAELESMVDTGALVDRAVSQRAGIGFSAKNCAIISPKFGSWIFLGEMVTNIPFPPDTPITEDCGECTKCIDACPTGALVGPGQLNAQRCVSFLTQTKGFLDEEAMRKIGNRLYGCDTVKLFVRRTGQELDSSRGLQARS

SEQ ID NO: 74136 - protein, 367 aa, unidentified
  source 1..367: note = Actinobacteria bacterium
  REGION 1..367: note = tr|A0A2E7TIU0|A0A2E7TIU0_9ACTN 4Fe-4S ferredoxin-type domain-containing protein; OS = Actinobacteria bacterium OX=1883427 GN=CL508_00280 PE=4; SV = 1
  VARIANT 84: note = Xaa can be any naturally occurring amino acid
  VARIANT 152: note = Xaa can be any naturally occurring amino acid
  VARIANT 176: note = Xaa can be any naturally occurring amino acid
  VARIANT 322: note = Xaa can be any naturally occurring amino acid
  VARIANT 358: note = Xaa can be any naturally occurring amino acid
MKDINLLNYLSENNIDIPDGFNISVVRLPSQLNKSLEINRAKEENRHANMKFTFSDPNYSGLGDKFEWAESCIIVSYSYISEDXSNLGFLPGRGSIARFAKEDFYIPLKEFINQIKEHFKKKNLRTAEFIDNPKHYDRLFFEQSGLGWQGKXTMMLSPGKGPWQLIGNIYVEKKFXLAIEKDYSCGSCNLCQISCPTGALDEDFILDSNKCISYWLQSPDIIPHDMREKIGNRFYGCDECLISCPPGQGVATNNNIDSSVDLVQVLNSDSSDLLELYNWFYIPKRNGDFLKRNAIIALANNPSSDTKEVFINLLKSNSDLVXLYCIWGLWKIGEFEVVSQNLDIENEKNEMILEEYQXLNEMIYSNK

SEQ ID NO: 74137 - protein, 358 aa, unidentified
  source 1..358: note = Actinobacteria bacterium
  REGION 1..358: note = tr|A0A1Z9JN71|A0A1Z9JN71_9ACTN Epoxyqueuosine reductase OS=Actinobacteria bacterium TMED172 OX=1986617; GN = queG PE=3 SV=1
  VARIANT 184: note = Xaa can be any naturally occurring amino acid
  VARIANT 186: note = Xaa can be any naturally occurring amino acid
  VARIANT 190: note = Xaa can be any naturally occurring amino acid
  VARIANT 201: note = Xaa can be any naturally occurring amino acid
  VARIANT 212: note = Xaa can be any naturally occurring amino acid
  VARIANT 230: note = Xaa can be any naturally occurring amino acid
  VARIANT 265: note = Xaa can be any naturally occurring amino acid
  VARIANT 277: note = Xaa can be any naturally occurring amino acid
  VARIANT 281: note = Xaa can be any naturally occurring amino acid
  VARIANT 286..287: note = Xaa can be any naturally occurring amino acid
  VARIANT 305: note = Xaa can be any naturally occurring amino acid
  VARIANT 324: note = Xaa can be any naturally occurring amino acid
  VARIANT 329: note = Xaa can be any naturally occurring amino acid
  VARIANT 337: note = Xaa can be any naturally occurring amino acid
  VARIANT 339: note = Xaa can be any naturally occurring amino acid
  VARIANT 341: note = Xaa can be any naturally occurring amino acid
  VARIANT 345..346: note = Xaa can be any naturally occurring amino acid
  VARIANT 349: note = Xaa can be any naturally occurring amino acid
MSDAALLALADDIKRWGRELGFQQVGITDTELGQHSDHLHRWLEKHHHGEMAYMAERETLRQNPEALHANTLRVISLRMDYLPPEVETVKILDHPRTAYISRYALGRDYHKLIRKRIKQLADKIIAQVGQHSSRPFVDSAPVLERALAEKAGLGWIGKNAMLINPSMGSWFFLGELFTDLPLPXDXPQTXQHCGSCTACLXICPTQAFVGPXQLDARRCISYLTIELKTXIPIELRPLIGNRVFGCDDCQLICPWNKFAKPTDEXDFKPRHGLDQAXMVDXFLWTXXEFDRHTQGSAIRRIGYEXWLRNLAVGIGNGENSAQAXAALLXQRGFSALXDXHXDWAXXQLXKNDRPVIRG

SEQ ID NO: 74138 - protein, 385 aa, unidentified
  source 1..385: note = Unknown
  REGION 1..385: note = tr|A0A094RKJ3|A0A094RKJ3_9ACTN 4Fe-4S ferredoxin-type domain-containing protein; OS = actinobacterium acAcidi OX=1504320 GN=GM46_11225 PE=4; SV = 1
MPLAKPSSRNPAVVSPDAPQGPEYWAQLHAIGQAAGLHSLGVAPADQMLRARQQIHDRIDQDLVNDMKFTFLRPERSTTPRQHLDGAQSIIVGVRSYAITDHSDDGASSPLARVARYAWLDHYGHLKDSLSVIAERLRQDGHRAVVFADDNAMVDRESAWLAGLGWFGKNANILLPGHGSFFVIGCVITTAVLPIATPIDDGCGACSRCIPACPTGAIVKDGVIDANKCLAWLLQKPGIFDREFRVALHDRIYGCDDCQTACPQVRRQELSESTEQLQSMIEVLAWLSMDDETLHESCMRWYVHKRDMTWIRRNLLIVLGNIADPKNPDVVDAVRKYLSHSRSELRAHAVWAAARLGLTELINHEDSDPMVCDELLHLPTLREGL

SEQ ID NO: 74139 - protein, 386 aa, unidentified
  source 1..386: note = Unknown
  REGION 1..386: note = tr|A0A094Q7I3|A0A094Q7I3_9ACTN 4Fe-4S ferredoxin-type domain-containing protein; OS = actinobacterium acAcidi OX=1504320 GN=GM46_5710 PE=4; SV = 1
MPEWCLRFGIVPLANQQPFNREQAAAYTEQLRALGLANGIDRIGVAPATVMQRARETLHSRKAIGLHDTMQFTYRNPDRSTNPEAAVPNAKAMIVGACSYSTDGPNEPQQLSARVARYAWADYYETLRDGLGVVAEALKSNGWNAQVFVDHNALVDREAAYLAGLGWYGKNANLLISGAGSFFVLGSVVTDAPLVVNERPVDDGCGACKRCLDSCPTNAIVEPGVIDAAKCLAWLVQKPGVFNRDYRVALADRVYGCDSCQDVCPPTIRLGITTKPTAVRAWVPILHMLNMEDAQLLESVGQWYIADRNPMWVRRNLLIVLGNIGNAEDEDVRDAIQRFCSHKEPMLRAHAIWSAARLGLHQFIPLTDEDPVVVEELRNLPEVRVG

SEQ ID NO: 74140 - protein, 465 aa, Actinomyces sp.
  REGION 1..465: note = tr|A0A3M2GMB2|A0A3M2GMB2_ACTSX tRNA epoxyqueuosine(34) reductase QueG OS=Actinomyces sp.; OX = 29317 GN=queG PE=4 SV=1
MRRVLLRRHAPLRGLCGHPRPGGRPHPSPGPRRRGARRRPPPQRGRPRAPAPLPGPGGVRGPGACEHGHVRRVPEVAELVEAGRRAGLAAVGVATAAPFDEVRVTLERRRAAGLAADMQFTYRNPARSTDPARSLPGARSLVVGALSFAVPDTPPPARPAGRVAAYATDDHYARLRAALGSVADILGGEGWRAVVLADQNALVDRAAAHRAGIGWWGRSTNILVPGAGSTVVLGSVVTDAPLVEVDPEPVADACGPCRRCLDACPTGALVAPGVLDARRCLAWIVQAPGMIDPAWREALGDRLYGCDDCQDACPPNRVPRGRARPTAPGEPDGRRWVDVVELLSCDDETLLERFGRWYIAGRDPAHLRRNALVVCANTAEPAPRTSPEVVAVLERHLSDPRPLVRAHAVWAARRLGLDELCVHAADDPDERVRAELAAAVEPRAPRPVTGSEAVPPTPRPDRRAH

SEQ ID NO: 74141 - protein, 312 aa, Adhaeribacter aerolatus
  REGION 1..312: note = tr|A0A512ARM9|A0A512ARM9_9BACT Epoxyqueuosine reductase OS=Adhaeribacter aerolatus OX=670289 GN=queG; PE = 3 SV=1
MSVKQQFTNLIKQKATELGFMYCGISKAEFLEEEAPRLENWLNNQMHGQMHYMENHFDKRLDPHLLVPGAKSVVSLLLNYYPPETLPENSLQISKYAYGQDYHFVIKDKLKSLLTYIRENIGEVDGRAFVDSAPVLDKAWAKKSGLGWIGKNSNLITTQVGSFYFIAELIIDLELEYDGPIKDYCGTCTKCLDACPTGAITEPYVVDGSKCISYFTIELKDKIPDEVGGKFGNWVFGCDICQDVCPWNRFSKPHQEPAFKLEPALQHLAKNDWRELTEDVFRQVFRKSAVKRTGFNGLLRNIKFVEEQKEKN

SEQ ID NO: 74142 - protein, 311 aa, Adhaeribacter sp.
  REGION 1..311: note = tr|A0A2T2Y9K1|A0A2T2Y9K1_9BACT Epoxyqueuosine reductase OS=Adhaeribacter sp. HMF7605 OX=2072846 GN=queG; PE = 3 SV=1
MLPTQQYTQLIKQKALELGFMYCGISKAEFLEEEAPRLENWLNRQMHGQMHYMENHFDKRLDPRLLVEGAKSVVSLLLNYYPEEQQPNDTFQISKYAYGQDYHFVIKDKLKDLLAYIRENIGEVGGRAFVDSAPVLDKAWAKKSGLGWIGKNSNLITPQVGSFYFIAELILDVELEYDGPIKDYCGTCTKCLDACPTNAIIEPYVVDGSKCISYFTIELKDQIPDSVDGKLGNWVFGCDICQDVCPWNRFARPHQEPAFNPNPGLLNMSEKDWQEITEDVFREVFRKSAVKRTGYNGLLRNIKFVTHKKDD

SEQ ID NO: 74143 - protein, 311 aa, Adhaeribacter sp.
  REGION 1..311: note = tr|A0A369QF62|A0A369QF62_9BACT Epoxyqueuosine reductase OS=Adhaeribacter sp. HMF7616 OX=2072847 GN=queG; PE = 3 SV=1
MTPKQQYTFLIKQKAQELGFMFCGVSRAEFLEEEAPRLENWLNRQMHGQMHYMENHFDKRLDPRLLVEGAKSVVSLLLNYYPEQPQPTDTFQISKYAYGQDYHFVIKDKLKSLLAYIRETIGDVGGRAFVDSAPVLDKAWAKKSGLGWVGKNSNLITPQVGSFYFIAELIIDLELEYDGPIKDYCGTCTKCIDACPTDAIIEPYVVNGSKCISYFTIELKDQIPQEVNGKFGNWVFGCDICQDVCPWNRFAKAHQEPAFDPQPGLTEFSKKDWQEITEEIFKEVFRKSAVKRTGFNGLLRNIKFVIPKNED

SEQ ID NO: 74144 - protein, 308 aa, Aequorivita antarctica
  REGION 1..308: note = tr|A0A5C6Z4D7|A0A5C6Z4D7_9FLAO Epoxyqueuosine reductase OS=Aequorivita antarctica OX=153266 GN=queG PE=3; SV = 1
MIQNPLKYSQLIKVEAKRLGFISCGISKAEFLEEEAPRLENWLNKNMNGEMAYMENHFDKRLDPTILVPDSKSVISLLLNYFPSEIQTSETYKISKYAYGTDYHFIIKAKLKQLMDFISEEIGEVHGRAFVDSAPVLDKAWAAKSGLGWIGKHSNLLTKQLGSFYFIAELIIDLDLEYDTPVTDHCGSCTACIDACPTQAIVADKVVDGSKCISYFTIELKNEIPTSQKGHFEDWMFGCDICQDVCPWNRFSKLHSEPIFNPHPEMLSMTKKDWEEITEEVFQKLFKNSAVKRTKFSGLQRNINFLKD

SEQ ID NO: 74145 - protein, 308 aa, Aequorivita lipolytica
  REGION 1..308: note = tr|A0A5C6YTC2|A0A5C6YTC2_9FLAO Epoxyqueuosine reductase OS=Aequorivita lipolytica OX=153267 GN=queG PE=3; SV = 1
MIQNTSKYTQLIKAEAKRLGFLSCGISKAEFLEEEAPRLENWLKKNMNGEMAYMENHFDKRLDPTILVPDSKSVISLLLNYFPSETQTSETYKISKYAYGTDYHLVIKDKLKQLMNFISEEIGEVHGRAFVDSAPVLDKAWAAKSGLGWIGKHSNLLTKQLGSFYFIAELILDLDLEYDSPVTDHCGSCNACIDACPTNAIVADKVVDGSKCISYFTIELKNEIPTSQKGNFEDWMFGCDICQDVCPWNRFSKPHNEPLFNPNPELLSMSKKDWEEITEDVFQKLFQKSAVNRTKFSGLKRNIQFLKD

SEQ ID NO: 74146 - protein, 308 aa, unidentified
  source 1..308: note = Aequorivita soesokkakensis
  REGION 1..308: note = tr|A0A1A9LFZ9|A0A1A9LFZ9_9FLAO Epoxyqueuosine reductase OS=Aequorivita soesokkakensis OX=1385699 GN=queG; PE = 3 SV=1
MINNKSKNTAVIKAEAKRLGFLSCGISKAEFLEKEAPRLETWLKKNMHGEMAYMENHFDKRLDPTLLVQDSKSVISLLLNYFPSEIQNPDSYQISKYAYGTDYHFVIKDKLKQLMEFISEKIGEVHGRAFVDSAPVLDKAWAAKSGLGWIGKHSNLLTKQLGSFYFIAELIVDLDLEYDTPVTDHCGSCTACIDACPTNAIVADKVVDGSKCISYFTIELKNEIPTSQKGNFEDWMFGCDICQDVCPWNRFSKPHNEPLFNPNPELLSMTKKDWEEITEDVFQKIFKNSAVNRTKFSGLKRNINFVKD

SEQ ID NO: 74147 - protein, 307 aa, Aequorivita sp.
  REGION 1..307: note = tr|A0A2D4XKS2|A0A2D4XKS2_9FLAO Epoxyqueuosine reductase OS=Aequorivita sp. OX=1872390 GN=queG PE=3 SV=1
MNDKSKNTAKIKSEAKRLGFLSCGISKAEFLEEQAPRLENWLNKDMHGEMAYMENHFDKRLNPTLLVPDSKSVISLLLNYFPSELQPSETYKISKYAYGTDYHFIIKDKLKQLMDFISEEIGEVHGRAFVDSAPVLDKAWAAKSGLGWIGKHSNLLTKQLGSFYFIAELIVDLDLEYDTPVTDHCGSCTACIDACPTNAIVADRVVDGSKCISYYTIELKNEIPTSEKGKFEDWMFGCDICQDVCPWNRFSKPNNEPLFNPHPELLSMTKKDWEEITEDVFQKLFKKSAVKRTKFLGLERNINFLKD

SEQ ID NO: 74148 - protein, 307 aa, Aequorivita sp.
  REGION 1..307: note = tr|A0A410G3X9|A0A410G3X9_9FLAO Epoxyqueuosine reductase OS=Aequorivita sp. H23M31 OX=2494375 GN=queG; PE = 3 SV=1
MSNKSKYTDLIKAEAKRLGFLSCGISKAGFLEEEAPRLESYLKANMNGEMAYLENHFDKRLDPTILVPDSKSVISLLYNYFPAETQREDTYKISKYAYGTDYHFVIKDKLKLLMDFISEEIGDVGGRAFVDSAPVLDKAWASKSGLGWIGKHSLLLTKQRGSFYFVSELILDLELEYDSPVTDHCGSCTACIDACPTGAIVAERVVDGSKCISYFTIELKNQIPESEKGKFENWMFGCDICQDVCPWNRFSQTHNEPLFNPHPDLLNMDRSDWEEITEEVFKSVFKKSAVKRTKFSGLQRNIQFLKD

SEQ ID NO: 74149 - protein, 308 aa, Aequorivita sublithincola
  REGION 1..308: note = tr|I3YTS5|I3YTS5_AEQSU Epoxyqueuosine reductase; OS = Aequorivita sublithincola (strain DSM 14238 / LMG 21431 / ACAM 643 / 9-3) OX=746697 GN=queG PE=3 SV=1
MIQNSSKYTQLIKAEAKRLGFISCGISRAEFLEEDAPRLENWLKNNMNGEMAYMENHFDKRLDPTLLVPDSKSVISLLLNYFPSETQTSESYKISKYAYGVDYHFIIKDKLKQLMEFISEEIGEVNGRAFVDSAPVLDKAWAAKSGLGWIGKHSNLLTKQVGSFYFIAELILDLDLEYDNPVTDHCGSCNACIDACPTNAIVADKVVDGSKCISYFTIELKNEIPISEKGKFEDWMFGCDICQDVCPWNRFSKSHNEPLFNPNPELLSMTKKDWEEITEEVFQKIFQKSAVKRTKFSGLQRNIKFLKD

SEQ ID NO: 74150 - protein, 307 aa, unidentified
  source 1..307: note = Aequorivita viscosa
  REGION 1..307: note = tr|A0A1M6AF29|A0A1M6AF29_9FLAO Epoxyqueuosine reductase OS=Aequorivita viscosa OX=797419 GN=queG PE=3; SV = 1
MSSKSVYSNLIKAEAKRLGFLSCGISKAGFLEEEAPRLEHYLKNNMNGEMAYMENHFDKRLDPTILVPGSKSVISLLLNYFPSETQIDNTYKVSKYAYGTDYHFVIKDKLKQLMYFISEEIGDVSGRAFVDSAPVLDKAWAAKSGLGWVGKHSLLLTKNTGSFYFVAELILDLDLDYDAPVTDHCGTCTACIDACPTDAIVADRVVDGSKCISYFTIELKNEIPNSEKGKFEDWMFGCDICQDVCPWNRFSKPHNEPLFNPHPEMLDMNKKDWEEITAEVFQKIFQKSAVKRTKLSGLERNIQFLKK

SEQ ID NO: 74151 - protein, 377 aa, unidentified
  source 1..377: note = Aeribacillus composti
  REGION 1..377: note = tr|A0A559UGU1|A0A559UGU1_9BACI Epoxyqueuosine reductase OS=Aeribacillus composti OX=1868734 GN=queG PE=3; SV = 1
MDFAVLKQEIIEYSKQIGIDKIGFASADVFETLKERLIVQQQLGYQSGFEEPDIEKRTNPELLLPKAKSIISIALAYPSKMKNAPRSTKKERRGLFCRASWGTDYHVILKDRLKKLERFILEKVDGAQVKSMVDTGELSDRAVAERAGIGWSGKNCMIITPEFGSYVYLGEMITNIPFPPDSPIEDRCGSCNICVDSCPTGALVQGGQLDSKKCIAFLTQTKGFLPDEYRGKIGNRLYGCDTCQLVCPENKGKDFHIHSEMEPDPEIAKPKLKPLLHISNREFKEKFGHIAGSWRGKKPIQRNAIIALAHYKDRTALPDLIKLMHEDSRPIIRGTAAWAIGRIGDQSVLFELEKALEKEQDEEVKNEIVKGIEMLKA

SEQ ID NO: 74152 - protein, 377 aa, Aeribacillus pallidus; identical to SEQ ID NO: 74151
  REGION 1..377: note = tr|A0A165YEB3|A0A165YEB3_9BACI Epoxyqueuosine reductase OS=Aeribacillus pallidus OX=33936 GN=queG PE=3; SV = 1

SEQ ID NO: 74153 - protein, 399 aa, unidentified
  source 1..399: note = Aerococcaceae bacterium
  REGION 1..399: note = tr|A0A3D0CHG6|A0A3D0CHG6_9LACT tRNA epoxyqueuosine(34) reductase QueG OS=Aerococcaceae bacterium OX=2053495 GN=queG PE=4 SV=1
MINIRSRFVEVTDLNQQLKEKIKLKAEELGIDKIGFTHAEPFYTLEDRLKQQRAAGHNSGFEHKNIEERIYPEKIFEQPKSIIAIALAYPSRMKKPRSEKGKPRGEFARASWGTDYHHILNDRMNKLIAYIKEAADEENIGSVDFKPMVDTGELVDVAVAQRAGLGFIGRNGLLITEEFGSFVYLGEIITNIDFEADEEVPFGCGDCMKCIDACPTGALLGDGRINAQVCLSYQTQTKGYMPEEFRKKMGRVIYGCDICQVVCPYNRGINTHHHEEMEPDPELTNPVLEPLLDISNREFKESFGKMAGSWRGKKPLQRNAIIALANYREKSAIPKLLQVIETDPRPMIRGTAAWAIAKITEESPNQELILFLEEMREKEDEAETISEFNKALDILRTNM

SEQ ID NO: 74154 - protein, 389 aa, unidentified
  source 1..389: note = Aerococcaceae bacterium
  REGION 1..389: note = tr|A0A347WLP2|A0A347WLP2_9LACT tRNA epoxyqueuosine(34) reductase QueG OS=Aerococcaceae bacterium ZY16052 OX=2036206 GN=queG PE=4 SV=1
MDNTVLKQEIQRLASEVGIDKIGFTNADPFDELASSLREQKAMGHTTGFEHQVLEERLYPDLIFDQPKSIISIALAYPSRIKEPLENTKEVKRGQFARASWGIDYHTILREKMECLIEEIKVLAPHAHFKAMVDTGELMDVAVAQRAGIGFIGRNGLLITEEFGSWIYLGEIVTDLEIAPDEPVPFGCGDCYRCVNACPTGALLGDGRMNGQRCLSYQTQTKGYMPEEFRKKISNVIYGCDICQHVCPYNQGIDFHRHPEMEPDSEVVQPALKPLLTISNRAFRETYGHLAGSWRGKKPLQRNAIIALVNSRDRTALPQLIQVMEEDPRPMMRGTAAWAISKLQRDYNAQLLACVKAQYVKETDKETIDEMRQAIHTLERKRPAKKPRR

SEQ ID NO: 74155 - protein, 399 aa, Aerococcus sanguinicola
  REGION 1..399: note = tr|A0A2I1MTT4|A0A2I1MTT4_9LACT tRNA epoxyqueuosine(34) reductase QueG OS=Aerococcus sanguinicola OX=119206 GN=queG PE=4 SV=1
MAMDWQVETEKIRRLALDEVGMNLVGFTTADDFTHIRQSLVEAKEEGRTTGFEHPVIEERLYPKALMEGAASIISFAMAYPNKPLYPKEHSRGERRGQFARASWGEDYHSILHRAASDLVQRLEGLYPDIETKTMVDTGELPDVAVAQRAGIGFIGRNGLIINEKFGSFIYLGEIITNLPLVPDTPKANACGDCTRCLDFCPTGALIGDGKMNAKVCVSYLTQTKGYIPQEFRRQVGHQIYGCDICQQVCPYNQNVDSHYHGAMEPEREEVEPLLQPMLTMSNREFKDKFGHLAGAWRGKKPLQRNAILALANYRDRSSIPLLLELIEKDPRPMIRGTAAYAVSIIERHFNPELLSFMEERLEAEQAQPSPDQETVVEFSQAVERLKKKRNKRQRKRSR

SEQ ID NO: 74156 - protein, 397 aa, Aerococcus sanguinicola
  REGION 1..397: note = tr|A0A0X8FC77|A0A0X8FC77_9LACT Epoxyqueuosine reductase OS=Aerococcus sanguinicola OX=119206; GN = AWM72_06715 PE=4 SV=1
MDWQVETEKIRRLALDEVGMNLVGFTTADDFTHIRQSLVEAKEEGRTTGFEHPVIEERLYPKALMEGAASIISFAMAYPNKPLYPKEHSRGERRGQFARASWGEDYHSILHRAASDLVQRLEGLYPDIETKTMVDTGELPDVAVAQRAGIGFIGRNGLIINEKFGSFIYLGEIITNLPLVPDTPKANACGDCTRCLDFCPTGALIGDGKMNAKVCVSYLTQTKGYIPQEFRRQVGHQIYGCDICQQVCPYNQNVDSHYHGAMEPEREEVEPLLQPMLTMSNREFKDKFGHLAGAWRGKKPLQRNAILALANYRDRSSIPLLLELIEKDPRPMIRGTAAYAVSIIERHFNPELLSFMEERLEAEQAQPSPDQETVVEFSQAVERLKKKRNKRQRKRSR

SEQ ID NO: 74157 - protein, 397 aa, Aerococcus sp.
  REGION 1..397: note = tr|A0A1S1BRM1|A0A1S1BRM1_9LACT Epoxyqueuosine reductase OS=Aerococcus sp. HMSC035B07 OX=1715184; GN = HMPREF2705_06780 PE=4 SV=1
MDWQVETEKIRRLALDEIGMNLVGFTTADDFTHIRQSLIEAKEEGRTTGFEHPVIEERLYPKALMEGAASIISFAMAYPNKPLYPKEHSRGERRGQFARASWGEDYHSILHRAASDLVQRLEGLYPDIETKTMVDTGELPDVAVAQRAGIGFIGHNGLIINEKFGSFIYLGEIITNLPLVPDTPKVNACGDCTRCLDFCPTGALIGDGKMNAKVCVSYLTQTKGYIPQEFRRQVGHQIYGCDICQQVCPYNQDVDSHYHGAMEPEREEVEPLLQPMLTMSNREFKDKFGHLAGAWRGKKPLQRNAILALANYRDRSSIPLLLELIEKDPRPMIRGTAAYAVSIIERHFNPELLSFMEERLEAEQAEPAPDQETVVEFSQAVERLKKKRNKRQRKRSR

SEQ ID NO: 74158 - protein, 376 aa, Aerococcus sp.
  REGION 1..376: note = tr|A0A1F1DL22|A0A1F1DL22_9LACT Epoxyqueuosine reductase OS=Aerococcus sp. HMSC061A03 OX=1739396; GN = HMPREF2892_09800 PE=4 SV=1
MNVVGFTSADDFTHIRQSLEEAEAEGRTTGFEHPVIEERLYPKDLLDGAASIIAFAMAYPNKPLYPKERNRGERRGQFARASWGEDYHSILHRAASDLVQALEERYPGIQTKTMVDTGELPDVAVAQRAGIGFIGRNGLIINEEFGSFIYLGEIITNLPLVPDAPKANACGDCTRCLDFCPTGALLGEGKMNAKVCISYLTQTKGYIPQAFRRQVGHQIYGCDICQQVCPYNQHVDSHYHAAMEPERDQVEPLLKPMLTLSNREFKEQFGHLAGAWRGKKPLQRNAILALANYRDRSAIPLLLEMIEKDPRPMIRGTAAYAVSIIERQFNPELLSFMEDRLRIEEAGPEADQETVVEFSQAVERIKKKRNKRQRKR

SEQ ID NO: 74159 - protein, 386 aa, Aerococcus urinaehominis
  REGION 1..386: note = tr|A0A0X8FNT5|A0A0X8FNT5_9LACT Epoxyqueuosine reductase OS=Aerococcus urinaehominis OX=128944; GN = AWM75_06095 PE=4 SV=1
MEEKEKVRDLALNQVGMDLVGFTTADDFSYMQKSLYEQKAAGHTSGFEHPVIDERLYPKRLLASGQSIVSFALAYPNQPLYEKKRERGVRRGQFARASWGVDYHHLLREKMDQLIACLAERYEGFEAYGMVDTGELSDVAVARRAGLGFIGRNGLLINQKYGSYIYLGEIITNLPFDNDPIIADGCGECRRCIDFCPTGALLGDGRMNAKRCISYLTQTKGYIPREFRDQVGHQIYGCDICQQVCPYNQGIDSHIHPLMEPERDQVEPILQPMLTMSNKQFKEQFGHLAGAWRGKKPLQRNAILALANYRDRSAIPLLLEIIDQDMRPMIRGTAAYAVAKIEKRYNQALVDFISQAYDQECRRSDSDEETRIEFKLALTTLKEKRK

SEQ ID NO: 74160 - protein, 384 aa, Aeromonas allosaccharophila
  REGION 1..384: note = tr|A0A1Q5VQM8|A0A1Q5VQM8_9GAMM Epoxyqueuosine reductase OS=Aeromonas allosaccharophila OX=656 GN=queG; PE = 3 SV=1
MSAPDFHQLAHDIKLWARELGFDQAGITDTDLRIEEPRLQAWLDAGYHGSMDYMARHGMMRARPHELLPGTVRVLSVRMNYLPFEAGFAATLRDPTLGYISRYALGRDYHKVLRNRLKQLGDRIEARCAELFQGTEDTLGEWRPFVDSAPILERPLAAKAGLGWVGKHSLLLNESAGSFFFLGELLLNLPLPLDQPVEKEQCGKCVACINICPTGAIVAPYVVDGRRCISYLTIENDGPIPEEFRPLMGNRIYGCDDCQLICPWNRYADASPEPDFSPRPSLHRPPLLALWRWSESDFLKQTEGSPIRRIGYQRWRRNLAVALGNGPATPEVIAALQLGLTTAEPMVAEHIEWALATLASRQDEENKKTRLLIRCIEKGLSDHA

SEQ ID NO: 74161 - protein, 384 aa, Aeromonas allosaccharophila
  REGION 1..384: note = tr|A0A0T6UJB7|A0A0T6UJB7_9GAMM Epoxyqueuosine reductase OS=Aeromonas allosaccharophila OX=656 GN=queG; PE = 3 SV=1
MSAPDFHQLAHDIKLWARELGFDQAGITDTDLRIEEPRLQAWLDAGYHGSMDYMARHGMMRARPHELLPGTVRVLSVRMNYLPFEAGFAATLRDPTLGYISRYALGRDYHKVLRNRLKQLGDRIEARCAELFQGTEETLGEWRPFVDSAPILERPLAAKAGLGWVGKHSLLLNESAGSFFFLGELLLNLPLPLDQPVAKEQCGKCVACINICPTGAIVAPYVVDGRRCISYLTIENDGPIPEEFRPLMGNRIYGCDDCQLICPWNRYADASPEPDFSPRPNLHRPPLLTLWGWSESDFLKQTEGSPIRRIGYQRWRRNLAVALGNGPATPEVIAALQQGLTTAEPMVAEHIEWALATLARRQDEENKKTRLLIRCIEKGLPDHA

SEQ ID NO: 74162 - protein, 384 aa, unidentified
  source 1..384: note = Aeromonas cavernicola
  REGION 1..384: note = tr|A0A2H9U5J6|A0A2H9U5J6_9GAMM Epoxyqueuosine reductase OS=Aeromonas cavernicola OX=1006623 GN=queG PE=3; SV = 1
MTPPDLQQLAQEIKQWARELGFDQAGITDTDLAIEEPRLQAWLDAGHHGSMDYMARHGMMRARPHELLPGTVRVLSVRMNYLPFEAGFAATLRDPTLGYISRYALGRDYHKLLRHRLKQLGERIDVRCAELCADRAHPIAEWRPFVDSAPILERPLAAKAGLGWVGKHSLLLNESAGSFFFLGELLVSLPLPIDAPVAKEQCGKCVACINICPTGAIVAPYVVDARRCISYLTIENDGPIPEEFRPLMGNRIYGCDDCQLICPWNRYAGASAEPDFKARPSLHRPPLLELWGWSENDFLKQTEGSAIRRIGYQRWRRNLAVALGNGPATPEVFAALKMGLTTAEHMVAEHIEWALTTLARRQTEENKKTRLLIRCIEKGLSDHA

SEQ ID NO: 74163 - protein, 384 aa, Aeromonas caviae
  REGION 1..384: note = tr|A0A3G9IKV1|A0A3G9IKV1_AERCA Epoxyqueuosine reductase OS=Aeromonas caviae OX=648 GN=queG PE=3 SV=1
MTAAELAQLAHDIKLWARELGFDQVGIADTDLTLEEPRLQAWLDAGYHGTMDYMARHGMMRARPHELLPGTLRVISVRMNYLPFEAGFAATLRDPTLGYISRYALGRDYHKVLRNRLKQLGERIELRCETLLRAAGQTLGEWRPFVDSAPILERPLAAKAGLGWVGKHSLLLNESAGSFFFLGELLIALPLPVDAPVEKELCGKCVACINICPTGAIIAPYVVDGRRCISYLTIENDGPIPEEFRPLMGNRIYGCDDCQLICPWNRYADASPEPDFSPRPDLHRPPLLVLWRWSEAEFLKHTEGSPIRRIGYQRWRRNLAVALGNGPASSEVLDALQQALPEAAPMVAEHIEWALATLARRQQEENKKTRLLIRCIEKGLPDHA

SEQ ID NO: 74164 - protein, 384 aa, Aeromonas caviae
  REGION 1..384: note = tr|A0A3S7NWI4|A0A3S7NWI4_AERCA Epoxyqueuosine reductase OS=Aeromonas caviae OX=648 GN=queG PE=3 SV=1
MTAAELAQLAHDIKLWARELGFDQVGIADTDLTLEEPRLQAWLDAGYHGTMDYMARHGMMRARPHELLPGTLRVISVRMNYLPFEAGFAATLRDPTLGYISRYALGRDYHKVLRNRLKQLGERIELRCDTLLRAAGQTLGEWRPFVDSAPILERPLAAKAGLGWVGKHSLLLNESAGSFFFLGELLIALPLPVDAPVEKELCGKCVACINICPTGAIIAPYVVDGRRCISYLTIENDGPIPEEFRPLMGNRIYGCDDCQLICPWNRYADASPEPDFSPRPNLHRPPLLTLWGWSEAEFLKHTEGSPIRRIGYQRWRRNLAVALGNGPASSEVLAALEQALPEAAPMVAEHIEWALATLARRQQEENKKTRLLIRCIEKGLPDHA

SEQ ID NO: 74165 - protein, 375 aa, unidentified
  source 1..375: note = Aeromonas dhakensis
  REGION 1..375: note = tr|A0A433G670|A0A433G670_9GAMM Epoxyqueuosine reductase OS=Aeromonas dhakensis OX=196024 GN=queG PE=3; SV = 1
MTTAELHQLAQDIKLWASELGFDQAGITDTDLTLEEPRLQAWLDAGYHGSMDYMARHGMMRARPHELLPGTLRVLSVRMNYLPFEAGFAATLRDPTLGYISRYALGRDYHKLLRSRLKQLGERIEQRCEALGWRPFVDSAPILERPLAAKAGLGWVGKHSLLLNESAGSFFFLGELLLSLPLPLDAPVEKEQCGKCVACINICPTGAIVAPYVVDGRRCISYLTIENDGPIPVEFRPLMGNRIYGCDDCQLICPWNRYANASPEPDFSPRPNLHRPPLLTLWGWSESEFLKHTEGSPIRRIGYQRWRRNLAVALGNGPASQEVMVALQQALTEAEPMVAEHIEWALATLARRQQDDNKKTRLLIRCIEKGLPDHA

SEQ ID NO: 74166 - protein, 375 aa, unidentified
  source 1..375: note = Aeromonas dhakensis
  REGION 1..375: note = tr|K1J7B6|K1J7B6_9GAMM Epoxyqueuosine reductase; OS = Aeromonas dhakensis OX=196024 GN=queG PE=3 SV=1
MTTAELHQLAQDIKLWASELGFDQAGITDTDLTLEEPRLQAWLDAGYHGSMDYMARHGMMRARPHELLPGTLRVLSVRMNYLPFEAGFAATLRDPTLGYISRYALGRDYHKLLRSRLKQLGERIEQRCEALGWRPFVDSAPILERPLAAKAGLGWVGKHSLLLNESAGSFFFLGELLLSLPLPLEAPVEKEQCGKCVACINICPTGAIVAPYVVDGRRCISYLTIENDGPIPVEFRPMMGNRIYGCDDCQLICPWNRYANASPEPDFSPRPNLHRPPLLTLWGWSESEFLKHTEGSPIRRIGYQRWRRNLAVALGNGPASQEVVVALQQALAEAEPMVAEHIEWALATLTRRQQDDNKKTRLLIRCIEKGLPDHA

SEQ ID NO: 74167 - protein, 382 aa, Aeromonas diversa
  REGION 1..382: note = tr|N9VQR6|N9VQR6_9GAMM Epoxyqueuosine reductase; OS = Aeromonas diversa CDC 2478-85 OX=1268237 GN=queG PE=3; SV = 1
MSSLPLPSPECDLHALAHHIKLWARELGFDQAGITDTDLRLEEPRLQAWLDAGYHGSMEYMERHGMLRARPDELLPGTLRVISVRMNYLPFEAGFAATLRDPRLGYISRYALGRDYHKVLRNRLKQLGERIEQACAGLGYRPFVDSAPILERPLAAKAGLGWVGKHSLLLNAEAGSFFFLGELLVNIPLPLDAPVEKEQCGKCTACLTICPTGAIVAPYVVDGRRCISYLTIESDDPIPVELRPALGNRIYGCDDCQLICPWNRYAGATPEPDFSPRPNLHRPPLLTLWSWDEPAFLKHTEGSPIRRIGYQRWRRNLAVALGNGPADAAVIEALEQGRPDASPLVAEHIDWALATLKTRAEEENKKTQRLIRCIEKGLPDHA

SEQ ID NO: 74168 - protein, 375 aa, Aeromonas encheleia
  REGION 1..375: note = tr|A0A3S4UEA1|A0A3S4UEA1_9GAMM Epoxyqueuosine reductase OS=Aeromonas encheleia OX=73010 GN=queG PE=3 SV=1
MTATELQQLAQDIKLWARELGFDQVGITDTDLAVEEPRLQAWLDAGYHGSMDYMARHGMMRARPHELLPGTLRVLSVRMNYLPFEAGFAATLRDPTLGYISRYALGRDYHKVLRNRLKQLGERIEQRCETLGWRPFVDSAPVLERPLAAKAGLGWVGKHSLLLNEAAGSFFFLGELLVDLPLPMDAPVEKEQCGKCVACINICPTGAIVAPYVVDGRRCISYLTIESDEPIPLELRPLLGNRIYGCDDCQLICPWNRYADVSPEPDFSPRPNLHRPPLLDLWQWSEAEFLKHTEGSPIRRIGYQRWRRNLAVALGNGPATAAVSDALQQALGAAEPMVAEHIEWALATLAQRQQDDSKKTRLLIRCIEKGLPDHA

SEQ ID NO: 74169 - protein, 384 aa, Aeromonas enteropelogenes
  REGION 1..384: note = tr|A0A175VE95|A0A175VE95_AEREN Epoxyqueuosine reductase OS=Aeromonas enteropelogenes OX=29489 GN=queG; PE = 3 SV=1
MTAPDFEQLAQDIKLWARELGFDQAGITDTDLAIEEPRLQAWLDAGHHGSMEYMARHGMMRARPHELLPGTRRVLSVRMNYLPFEAGFAATLRDPALGYISRYALGRDYHKVLRNRLKQLGERIERRCAELFQTTTGPISEWRPFVDSAPILERPLAAKAGLGWVGKHSLLLNESAGSFFFLGELLLNLPLPLDEPVEKELCGKCVACINICPTGAIKAPYVVDGRRCISYLTIENDGPIPQEFRPLMGNRIYGCDDCQLICPWNRYADASPEPDFSARPNLHRPPLLELWRWSESEFLKHTEGSPIRRIGYQRWRRNLAVALGNGPATAEVIDALQQALAEAEPLVAEHIEWALATLAGRREEESKKTRLLIRCIEKGLPDHA

SEQ ID NO: 74170 - protein, 413 aa, Aeromonas hydrophila
  REGION 1..413: note = tr|A0A454GFM1|A0A454GFM1_AERHY Epoxyqueuosine reductase OS=Aeromonas hydrophila OX=644 GN=queG PE=3 SV=1
MTATAMPVGQPWQQDPRDAIQHDSTPPSRSAPWQADGPMTTTELHQLAQDIKLWASELGFDQAGITDTDLTLEEPRLQAWLDAGHHGSMDYMARHGMMRARPHELLPGTLRVLSVRMNYLPFEAGFAATLRDPTLGYISRYALGRDYHKLLRSRLKQLGERIEQRCEALGWRPFVDSAPILERPLAAKAGLGWVGKHSLLLNESAGSFFFLGELLLSLPLPLDAPVEKEQCGKCVACINICPTGAIIAPYVVDGRRCISYLTIENDGPIPEEFRPLMGNRIYGCDDCQLICPWNRYANASPEPDFSPRPNLHRPPLLTLWGWSESEFLKHTEGSPIRRIGYQRWRRNLAVALGNGPASPQVMTALQQALAAAEPMVAEHIEWALATLAKRQQDDNKKTRLLIRCIEKGLPDHA

SEQ ID NO: 74171 - protein, 413 aa, Aeromonas hydrophila
  REGION 1..413: note = tr|A0KGR5|A0KGR5_AERHH Epoxyqueuosine reductase; OS = Aeromonas hydrophila subsp. hydrophila (strain ATCC 7966 / DSM 30187 / JCM 1027 / KCTC 2358 / NCIMB 9240); OX = 38070 3 GN=queG PE=3 SV=1
MTATAMPVGQPWQQDPRDAIQHDSTPPSRSAPGQADGPMTTTELHQLAQDIKLWASELGFDQAGITDTDLTLEEPRLQAWLDAGHHGSMDYMARHGMMRARPHELLPGTLRVLSVRMNYLPFEAGFAATLRDPTLGYISRYALGRDYHKLLRNRLKQLGERIEQRCEALGWRPFVDSAPILERPLAAKAGLGWVGKHSLLLNESAGSFFFLGELLLSLPLPLDAPVEKEQCGKCVACINICPTGAIIAPYVVDGRRCISYLTIENDGPIPEEFRPLMGNRIYGCDDCQLICPWNRYANASPEPDFSPRPNLHRPPLLTLWGWSESEFLKHTEGSPIRRIGYQRWRRNLAVALGNGPASPQIMTALQQALAAAEPMVAEHIEWALATLAKRQQDDNKKTRLLIRCIEKGLPDHA

SEQ ID NO: 74172 - protein, 384 aa, Aeromonas jandaei
  REGION 1..384: note = tr|A0A2S5FD94|A0A2S5FD94_AERJA Epoxyqueuosine reductase OS=Aeromonas jandaei OX=650 GN=queG PE=3 SV=1
MTTPDFNQLAQDIKLWASELGFDQLGITDTDLLAEEPKLQAWLDAGYHGSMDYMARHGMMRARPHELLPGTLRVISVRMNYLPFEAGFAATLRDPTLGYISRYALGRDYHKVLRNRLKQLGDRIEARCAELFQGTSDTLGEWRPFVDSAPVLERPLAAKAGLGWVGKHSLLLNESAGSFFFLGELLVSLPLPIDAPVEKEQCGKCVACINICPTGAIVAPYVVDGRRCISYLTIENDGPIPEEFRPLMGNRIYGCDDCQLICPWNRYADASPEPDFSPRPSLHRPPLLALWRWSEAEFLKHTEGSPIRRIGYQRWRRNLAVALGNGPAGPEVIAVLQQALPEAEPMVAEHIEWALATLARRQDETNKKTRLLIRCIEKGLPDHA

SEQ ID NO: 74173 - protein, 384 aa, Aeromonas jandaei
  REGION 1..384: note = tr|A0A3N6V2R0|A0A3N6V2R0_AERJA Epoxyqueuosine reductase OS=Aeromonas jandaei OX=650 GN=queG PE=3 SV=1
MTTPDFNQLAQDIKLWASELGFDQVGITDTDLRAEEPKLQAWLDAGYHGIMDYMARHGMMRARPHELLPGTLRVISVRMNYLPFEAGFAATLRDPTLGYISRYALGRDYHKVLRNRLKQLGDRIEARCAELFQGTSDTLGEWRPFVDSAPVLERPLAAKAGLGWVGKHSLLLNESAGSFFFLGELLVSLPLPIDAPVEKEQCGKCVACINICPTGAIVAPYVVDGRRCISYLTIENDGPIPEEFRPLMGNRIYGCDDCQLICPWNRYADASPEPDFSPRPSLHRPPLLALWRWSEAEFLKHTEGSPIRRIGYQRWRRNLAVALGNGPANPEVMAALQQALPEAEPMVAEHIEWALATLARRQDETNKKTRLLIRCIEKGLPDHA

SEQ ID NO: 74174 - protein, 379 aa, unidentified
  source 1..379: note = Aeromonas lusitana
  REGION 1..379: note = tr|A0A2M8HEM1|A0A2M8HEM1_9GAMM Epoxyqueuosine reductase OS=Aeromonas lusitana OX=931529 GN=queG PE=3 SV=1
MTTAELHQLAQDIKLWARELGFDQVGITDTDLSIEEPRLQAWLDAGYHGSMDYMARHGMMRARPHELLPGTQRVLSVRMNYLPFEAGFASTLRDPTLGYISRYALGRDYHKVLRNRLKQLGERIEQRCQALFQATDWRPFVDSAPVLERPLAAKAGLGWVGKHSLVLNESAGSFFFLGELLINLPLPLDAPVEKEQCGKCVACINICPTGAIVAPYVVDGRRCISYLTIENDGPIPEEFRPLMGNRIYGCDDCQLICPWNRYADVSPEPDFSPRPNLHRPPLLDLWRWQESEFLKHTEGSPIRRIGYQRWRRNLAVALGNGPANPEVMAALQQALETASPMVAEHIEWALATLTSRQQGENKKTKLLIRCIEKGLSDHA

SEQ ID NO: 74175 - protein, 384 aa, Aeromonas media
  REGION 1..384: note = tr|A0A023RNB3|A0A023RNB3_AERME Epoxyqueuosine reductase OS=Aeromonas media WS OX=1208104 GN=queG PE=3; SV = 1
MTAAELAQLAHDIKLWARELGFDQVGITDTDLALEEPRLQAWLDAGHHGTMDYMARHGMMRARPHELLPGTLRVLSVRMNYLPFEAGFAATLRDPTLGYISRYALGRDYHKVLRNRLKQLGERIEQRCQTLLPSTQATPGEWRPFVDSAPILERPLAAKAGLGWVGKHSLLLNETAGSFFFLGELLVGLPLPVDAPVEKEQCGKCVACINICPTGAIVAPYVVDGRRCISYLTIENDGPIPEEFRPLMGNRIYGCDDCQLICPWNRYADASPEPDFSPRPNLHRPPLLTLWGWSESDFLKHTEGSPIRRIGYRRWRRNLAVALGNGPASSDAMAALQQALASAEPMVAEHIEWALATLAVRQEKEDKKTRLLIRCIEKGLPDHA

SEQ ID NO: 74176 - protein, 375 aa, Aeromonas molluscorum
  REGION 1..375: note = tr|R1H487|R1H487_9GAMM Epoxyqueuosine reductase; OS = Aeromonas molluscorum 848 OX=1268236 GN=queG PE=3 SV=1
MTAPDFDKLAHDIKLWARELGFDQAGITDTDLSLEESRLQAWLDAGHHGSMDYMARHGMMRARPHELLPGTLRVLSVRMNYLPFEAGFAATLRDPSLGYISRYALGRDYHKLLRARLKQLGERIEARCDALGWRPFVDSAPVLERPLAAKAGLGWVGKHSLLLNESAGSFFFLGELLLSLPLPLDKPVEKELCGKCVACINICPTGAIVAPYVVDGRRCISYLTIESDDPIPVELRPLLGNRIYGCDDCQLICPWNRYADASPEPDFRPRANLHSPKLLDLWCWSEPEFLKNTEGSPIRRIGYQRWRRNLAVALGNGPADEGVLDALKAALPTAEPMVAEHISWALASLTARQQGENRKTKLLIRCIEKGLPDHA

SEQ ID NO: 74177 - protein, 384 aa, unidentified
  source 1..384: note = Aeromonas rivipollensis
  REGION 1..384: note = tr|A0A2P1PEA0|A0A2P1PEA0_9GAMM Epoxyqueuosine reductase OS=Aeromonas rivipollensis OX=948519 GN=queG; PE = 3 SV=1
MTAAELAQLAHDIKLWARELGFDQVGITDTDLALEEPRLQAWLDAGHHGTMDYMARHGMMRARPHELLPGTLRVLSVRMNYLPFEAGFAATLRDPTLGYISRYALGRDYHKVLRNRLKQLGERIEQRCQALLPSTQETPGEWRPFVDSAPILERPLAAKAGLGWVGKHSLLLNESAGSFFFLGELLVSLPLPVDAPVEKEQCGKCVACINICPTGAIIAPYVVDGRRCISYLTIENDGPIPEEFRPLMGNRIYGCDDCQLICPWNRYADASPEPDFSPRPNLHRPPLLDLWQWSEAAFLKHTEGSPIRRIGYQRWRRNLAVALGNGPASSDAMAALQQALPGAEPMVAEHIEWALATLAARQEKENKKTRLLIRCIEKGLPDHA

SEQ ID NO: 74178 - protein, 384 aa, Aeromonas salmonicida
  REGION 1..384: note = tr|A0A428VMI4|A0A428VMI4_AERSA Epoxyqueuosine reductase OS=Aeromonas salmonicida OX=645 GN=queG PE=3 SV=1
MTTPDFQQLAHDIKLWAGELGFDQVGITDTDLTLEEPRLQAWLDAGHHGSMDYMARHGMMRARPHELLPGTLRVVSVRMNYLPFEAGFAATLRDPTLGYISRYALGRDYHKVLRNRLKQLGERIEQRCQALFQTTQDTMGEWRPFVDSAPILERPLAAKAGQGWVGKHSLLLNESAGSFFFLGELLLALPLPIDAPVEKELCGKCVACINICPTGAIVAPYVVDGRRCISYLTIENDGPIPEEFRPLMGNRIYGCDDCQLICPWNRYADASPEPDFKARPNLHRPPLLELWRWAESEFLKHTEGSPIRRIGYQRWRRNLAVALGNGPATPEVIAALQLALTSADPMVAEHIEWALTTLAKRQQDDNKKTRLLIRCIEKGLPDHA

SEQ ID NO: 74179 - protein, 384 aa, Aeromonas salmonicida
  REGION 1..384: note = tr|A0A4U7JXD0|A0A4U7JXD0_AERSA Epoxyqueuosine reductase OS=Aeromonas salmonicida subsp. salmonicida; OX = 29491 GN=queG PE=3 SV=1
MTTPDFQQLAHDIKLWAGELGFDQVGITDTDLTLEEPRLQAWLDAGHHGSMDYMARHGMMRARPHELLPGTLRVVSVRMNYLPFEAGFAATLRDPTLGYISRYALGRDYHKVLRNRLKQLGERIEQRCQALFQTTQDTMGEWRPFVDSAPILERPLAAKAGLGWVGKHSLLLNESAGSFFFLGELLLALPLPIDAPVEKELCGKCVACINICPTGAIVAPYVVDGRRCISYLTIENDGPIPEEFRPLMGNRIYGCDDCQLICPWNRYADASPEPDFKARPNLHRPPLLELWRWAESEFLKHTEGSPIRRIGYQRWRRNLAVALGNGPATPEVIAALQLALTSAEPMVAEHIAWALTTLAKRQQDDNKKTRLLIRCIEKGLPDHA

SEQ ID NO: 74180 - protein, 382 aa, Aeromonas schubertii
  REGION 1..382: note = tr|A0A0S2SM67|A0A0S2SM67_9GAMM Epoxyqueuosine reductase OS=Aeromonas schubertii OX=652 GN=queG PE=3 SV=1
MSSLPQPSSESDLHALAHHIKLWARELGFDQAGITDTDLSIEEPRLQAWLDAGYHGSMEYMERHGMLRARPDELLPGTLRVISVRMNYLPFEAGFAATLRDPRLGYISRYALGRDYHKVLRNRLKQLGERIEQACAGLGYRPFVDSAPILERPLAAKAGLGWVGKHSLLLNAEAGSFFFLGELLVNIPLPLDAPVEKAQCGKCTACLTICPTGAIVAPYVVDGRRCISYLTIESDEPIPVELRPALGNRIYGCDDCQLICPWNRYADATPEPDFTPRPNLHRPPLLTLWSWDEPTFLKHTEGSPIRRIGYQRWRRNLAVALGNGPADGAVITALEQARPHATPLVAEHVDWALATLKNRAEEENKKTQRLIRCIEKGLPDQA

SEQ ID NO: 74181 - protein, 382 aa, Aeromonas schubertii
  REGION 1..382: note = tr|A0A0W7TWC3|A0A0W7TWC3_9GAMM Epoxyqueuosine reductase OS=Aeromonas schubertii OX=652 GN=queG PE=3 SV=1
MSSLPQPSSESDLHALAHHIKLWARELGFDQAGITDTDLSIEEPRLQAWLDAGYHGSMEYMERHGMLRARPDELLPGTLRVISVRMNYLPFEAGFAATLRDPRLGYISRYALGRDYHKVLRNRLKQLGERIEQACAGLGYRPFVDSAPILERPLAAKAGLGWVGKHSLLLNAEAGSFFFLGELLVNIPLPLDAPVEKAQCGKCTACLTICPTGAIVAPYVVDGRRCISYLTIESDEPIPVELRPALGNRIYGCDDCQLICPWNRYADATPEPDFTPRPNLHRPPLLTLWSWDEPTFLKHTEGSPIRRIGYQRWRRNLAVALGNGPADGAVITALEQARPHATPLVAEHVDWALATLQSRAEEENKKTQRLIRCIEKGLPDHA

SEQ ID NO: 74182 - protein, 382 aa, Aeromonas simiae
  REGION 1..382: note = tr|A0A5J6WT26|A0A5J6WT26_9GAMM tRNA epoxyqueuosine(34) reductase QueG OS=Aeromonas simiae; OX = 218936 GN=queG PE=4 SV=1
MTAPDLPDPASDLHALAHHIKLWARELGFDQAGITDTDLRLEEPRLQAWLDAGYHGSMEYMARHGMLRARPDELLPGTLRVISLRMNYLPFEAGFAATLRDPRLGYISRYALGRDYHKVLRSRLKQLGERIERACGELGFRPFVDSAPLLERPLAAKAGLGWVGKHSLLLNAEVGSFFFLGELLVNIPLPLDTAQEKEQCGKCTACLTLCPTGAIVAPYVVDGRRCISYLTIESDEPIPLELRPALGNRIYGCDDCQLICPWNRYAAASPEPDFAPRPTLHRPPLLLLWSWDEAAFLTHTEGSPIRRIGYQRWRRNLAVALGNGPADAEVIAALEQALPDASSLVAEHIEWALATLHLRADTENKKTQRLIRCIEKGLPDHA

SEQ ID NO: 74183 - protein, 384 aa, Aeromonas sobria
  REGION 1..384: note = tr|A0A1S2D612|A0A1S2D612_AERSO Epoxyqueuosine reductase OS=Aeromonas sobria OX=646 GN=queG PE=3 SV=1
MSAPDFHQLAHDIKLWARELGFDQAGITDTDLRSEEPRLQAWLDAGYHGSMDYMARHGMMRARAHELLPGTVRVLSVRMNYLPFEAGFAATLRDPTLGYISRYALGRDYHKVLRNRLKQLGDRIEARCAELFQDTADTLGEWRPFVDSAPILERPLAAKAGLGWVGKHSLLLNESAGSFFFLGELLLNLPLPLDQPVEKAQCGKCVACINICPTSAIVAPYVVDGRRCISYLTIENDGPIPEEFRPLMGNRIYGCDDCQLICPWNRYADASPEPDFSPRPSLHRPPLLALWCWSESDFLKQTEGSPIRRIGYQRWRRNLAVALGNGPAAPEVIAALQQGLTTAEPMVAEHIEWALATLARRQDEENKKTRLLIRCIEKGLPDHA

SEQ ID NO: 74184 - protein, 384 aa, Aeromonas sobria
  REGION 1..384: note = tr|A0A2N3IYV9|A0A2N3IYV9_AERSO Epoxyqueuosine reductase OS=Aeromonas sobria OX=646 GN=queG PE=3 SV=1
MSAPDFHQLAHDIKLWARELGFDQAGITDTDLRSEEPRLQAWLDAGYHGSMDYMARHGMMRARAHELLPGTVRVLSVRMNYLPFEAGFAATLRDPTLGYISRYALGRDYHKVLRNRLKQLGDRIEARCAELFQGTPDTQGDWRPFVDSAPILERPLAAKAGLGWVGKHSLLLNESAGSFFFLGELLLNLPLPLDQPVEKAQCGKCVACINICPTGAIVAPYVVDGRRCISYLTIENDGPIPEEFRPLMGNRIYGCDDCQLICPWNRYADASPEPDFSPRQSLHRPPLLALWRWSESDFLKQTEGSPIRRIGYQRWRRNLAVALGNGPATPEVIAALQQGLTTAEPMVAEHIEWALATLARRQDEENKKTRLLIRCIEKGLPDHA

SEQ ID NO: 74185 - protein, 375 aa, Aeromonas sp.
  REGION 1..375: note = tr|A0A261E477|A0A261E477_9GAMM Epoxyqueuosine reductase OS=Aeromonas sp. A35_P OX=1983805 GN=queG PE=3; SV = 1
MTTAELHQLAQDIKLWASELGFDQAGITDTDLTLEEPRLQAWLDAGYHGSMDYMARHGMMRARPHELLPGTLRVLSVRMNYLPFEAGFAATLRDPTLGYISRYALGRDYHKLLRSRLKQLGERIEQRCEALGWRPFVDSAPILERPLAAKAGLGWVGKHSLLLNESAGSFFFLGELLLSLPLPLDAPVEKEQCGKCVACINICPTGAIVAPYVVDGRRCISYLTIENDGPIPAEFRPLMGNRIYGCDDCQLICPWNRYANASPEPDFSPRPNLHRPPLLTLWGWSESEFLKHTEGSPIRRIGYQRWRRNLAVALGNGPASQEVMVALQQALTEAEPMVAEHIEWALATLARRQQDDNKKTRLLIRCIEKGLPDHA

SEQ ID NO: 74186 - protein, 384 aa, Aeromonas sp.
  REGION 1..384: note = tr|A0A1Q8D2W6|A0A1Q8D2W6_9GAMM Epoxyqueuosine reductase OS=Aeromonas sp. YN13HZO-058 OX=1921564 GN=queG; PE = 3 SV=1
MSAPDFHQLAHDIKLWARELGFDQAGITDTDLRIEEPRLQAWLDAGYHGSMDYMARHGMMRARPHELLPGTVRVLSVRMNYLPFEAGFAATLRDPTLGYISRYALGRDYHKVLRNRLKQLGDRIEARCAELFQGTEETLGEWRPFVDSAPILERPLAAKAGLGWVGKHSLLLNESAGSFFFLGELLLNLPLPLDQPVEKEQCGKCVACINICPTGAIVAPYVVDGRRCISYLTIENDGPIPEEFRPLMGNRIYGCDDCQLICPWNRYADASPEPDFSPRASLHRPPLLALWRWSESDFLKQTEGSPIRRIGYQRWRRNLAVALGNGPAAPEVIAALQQGLTTAEPMVAEHIEWALATLARRQDEENKKTRLLIRCIEKGLPDHA

SEQ ID NO: 74187 - protein, 384 aa, Aeromonas taiwanensis
  REGION 1..384: note = tr|A0A5F0K868|A0A5F0K868_9GAMM Epoxyqueuosine reductase OS=Aeromonas taiwanensis OX=633417 GN=queG PE=3; SV = 1
MMAAELAQLAQDIKLWARELGFDQVGITDTDLALEEPRLQAWLDAGHHGTMDYMARHGMMRARPHELLPGTLRVLSVRMNYLPFEAGFAATLKDPTLGYISRYALGRDYHKVLRNRLKQLGERIERRCAELFHTTTDPMGEWRPFVDSAPILERPLAAKAGLGWVGKHSLLLNESAGSFFFLGELLVSLPLPLDAPVEKEQCGKCVACINICPTGAIVAPYVVDGRRCISYLTIENDGPIPEEFRPLMGNRIYGCDDCQLICPWNRYADASPEPDFSPRPNLHRPPLIDLWGWSENEFLKHTEGSPIRRIGYQRWRRNLAVALGNGPATPEVMAALQQARPEAEPMVAEHIDWALATLARRQQDENKKTRLLIRCIEKGLPDHA

SEQ ID NO: 74188 - protein, 384 aa, Aeromonas veronii
  REGION 1..384: note = tr|A0A1Q8F410|A0A1Q8F410_9GAMM Epoxyqueuosine reductase OS=Aeromonas veronii OX=654 GN=queG PE=3 SV=1
MSAPDFHQLAHDIKLWARELGFDQAGITDTDLRIEEPRLQAWLDAGYHGSMDYMARHGMMRARPHELLPGTVRVLSVRMNYLPFEAGFAATLRDPTLGYISRYALGRDYHKVLRNRLKQLGDRIEARCAELFQGTEDTLGEWRPFVDSAPILERPLAAKAGLGWVGKHSLLLNESAGSFFFLGELLLNLPLPLDQPVEKEQCGKCVACINICPTGAIVAPYVVDGRRCISYLTIENDGPIPEEFRPLMGNRIYGCDDCQLICPWNRYADASPEPDFSPRPSLHRPPLLALWHWSESDFLKQTEGSPIRRIGYQRWRRNLAVALGNGPATPEVIAALQQGLATAEPMVAEHIEWALATLARRQDEENKKTRLLIRCIEKGLSDHA

SEQ ID NO: 74189 - protein, 384 aa, Aeromonas veronii
  REGION 1..384: note = tr|A0A0E2LAH9|A0A0E2LAH9_9GAMM Epoxyqueuosine reductase OS=Aeromonas veronii Hm21 OX=1347420 GN=queG; PE = 3 SV=1
MSAPDFHQLAQDIKLWARELGFDQAGITDTDLRIEEPRLQAWLDAGYHGSMDYMARHGMMRARAHELLPGTVRVLSVRMNYLPFEAGFAATLRDPTLGYISRYALGRDYHKVLRNRLKQLGDRIEARCAELFQGTEETLGEWRPFVDSAPILERPLAAKAGLGWIGKHSLLLNESAGSFFFLGELLLNLPLPLDQPVEKEQCGKCVACINICPTGAIVAPYVVDGRRCISYLTIENDGPIPEEFRPLMGNRIYGCDDCQLICPWNRYADASPEPDFSPRPSLHRPPLLALWCWSESDFLKQTEGSPIRRIGYQRWRRNLAVALGNGPATPEVIAALQLGLTTADPMVAEHIEWALATLARRQDEENKKTRLLIRCIEKGLSDHA

SEQ ID NO: 74190 - protein, 381 aa, Aestuariibacter sp.
  REGION 1..381: note = tr|A0A2D6XZ85|A0A2D6XZ85_9ALTE Epoxyqueuosine reductase OS=Aestuariibacter sp. OX=1872400 GN=queG PE=3; SV = 1
MSELQSIDLYKLVDDIKAWANALGFQQVGISDIDLSQHEAALQSWLDNQYHGDMAFMANHGMKRARPAELVPGTLRVISVRMDYLPPDASFAKHLNNPDIGYISRYALGRDYHKVLRSKLKKLGEKIQAELADTQFRPFVDSAPVLEHAIAEKAGIGWTGKHSLTLNKQAGSWFFLGELFINLPLPVDEPTSEEHCGTCTACMTICPTQAIVAPYVVDARRCISYLTIEYDGVIPEVFREPMGNRLYGCDDCQLICPWNRYAPLTDEADFHPRKVLHGQSLATLFSWDEATFLRNTEGSPIRRIGYTKWRRNVSVAIGNASYDEHYIHLLTEALPDACEILRPHFEWALERQQQKNGDALSRPRQITRLVRTIEKGLPRDA

SEQ ID NO: 74191 - protein, 381 aa, Aestuariibacter sp.
  REGION 1..381: note = tr|A0A506RCH7|A0A506RCH7_9ALTE Epoxyqueuosine reductase OS=Aestuariibacter sp. GS-14 OX=2590670 GN=queG; PE = 3 SV=1
MSELQSIDLYKLVDDIKAWANALGFQQVGISDIDLSQHEAALQSWLDNQYHGDMAFMASHGMKRARPAELVPGTVRVISVRMDYLPPDASFAKHLNNPDIGYVSRYALGRDYHKVLRNKLKRLGEKIQSELANTQFRPFVDSAPVLEHAIAEKAGIGWTGKHSLTLNKQAGSWFFLGELFINLPLPVDEPTTEEHCGTCTACLTICPTQAIVAPYVVDARRCISYLTIEYDGVIPEALRKPMGNRIYGCDDCQLICPWNRYAPLTEEADFHPRKVLHGQSLAALFSWDEHTFLTNTEGSPIRRIGFTKWRRNISVAMGNAGYDERYVTLLTEALYGACDVLRPHLEWAIQQQQQKAGEMLTRPRQITRLVRTIEKGLPRDA

SEQ ID NO: 74192 - protein, 368 aa, unidentified
  source 1..368: note = Aestuariispira insulae
  REGION 1..368: note = tr|A0A3D9HXU3|A0A3D9HXU3_9PROT Epoxyqueuosine reductase OS=Aestuariispira insulae OX=1461337 GN=queG; PE = 3 SV=1
MTDLKAAIIEKAKEAGFDSVSFAPVTIPQRNLDRYQEFLEAGQYGDMDWMQEKNDWRRGPNSLWEECRTVIVLGMNYGPNQDPMLKLQFQERANISVYAQNKDYHDLVKKKLKQVARWLVETHSGQVKVFVDTAPVMEKAVAAQSGLGWQGKHTNLVSRDFGSWLFLGEIFTTLEIAPDKAVKDSCGNCQACLDICPTQAMPGPYKLDASRCISYLTIEHKSHIPVEFRNPMGNRIYGCDDCLAVCPWNKFAQMSDKMDFWPRAELSAPRLVDFLDLDDAGFRKFFSSSPIKRIGRNKFLRNVLIALGNARNPDLAEKIIPSLRDESPLVRAMAVWALGQLLDSSTFQALRQQYLPHEADTDVAREWG

SEQ ID NO: 74193 - protein, 373 aa, unidentified
  source 1..373: note = Aestuariivirga litoralis
  REGION 1..373: note = tr|A0A2W2AMN1|A0A2W2AMN1_9RHIZ tRNA epoxyqueuosine(34) reductase QueG OS=Aestuariivirga litoralis OX=2650924 GN=queG PE=4 SV=1
MSEVKTLRQELGERASGEGFSATRIVTLGPDAQQAERLSQFITEGRHGSMAWMAETEARRASPQAMWPEARTAIVFAQSYGQDLDPLERLADRESGVISVYALNRDYHDVVKGKLKRIAQWLARRTGADVKVFVDTAPLMEKPLAQKAGLGWQGKHTNLVSRELGSWFFIGTILTTAEIEADAAEADHCGSCRACLDICPTKAFPAPYQLDARRCISYLTIEHAGHIDREFRVAMGNRIYGCDDCLAACPWNKFAAAAREAKLLAREDLKAPRLGHLLALEDAAFRALFTGSPVKRTGRDRFIRNVLIAAGNSGDKSLVPQVTALLDDPAPIVRAMAVWAMSRLLGEPDFAQLRTERTGHETDADVRREWETA

SEQ ID NO: 74194 - protein, 351 aa, unidentified
  source 1..351: note = Aestuariivita sp.
  REGION 1..351: note = tr|A0A2E0YJF2|A0A2E0YJF2_9RHOB Epoxyqueuosine reductase OS=Aestuariivita sp. OX=1872407 GN=queG PE=3 SV=1
MHGQSVLYDLKARLQKKSQSEGFDDMRICRPWSVPQVSERLNKFLDKGYHGQMNWMAERSQWRSDPSALWPEARSVIIFAQSYAPDHDPRSILFEREKAAISVYALNKDYHKIVKKQLKAIASWLIAEAGGHVKIFVDTAPIPEKPLGHAAGLGWQGKHTNLVSRKLGNWFFIGSVFSTLDLPTDASEEDHCGSCTKCMMACPTEAFPAPYQLDARRCISYLTIEHKGPVAPELREKLGNRIYGCDDCLAACPWNKFAQDAREVRYHAREDLIEPRLVELVTLNDADFRQKFSGSPIKRIGRDRFVRNVLYAIGNSGESTLCQSAQNLCGDSDPVVAEAARWAVAKLAAGT

SEQ ID NO: 74195 - protein, 356 aa, Afifella marina
  REGION 1..356: note = tr|A0A1G5NZT8|A0A1G5NZT8_AFIMA Epoxyqueuosine reductase OS=Afifella marina DSM 2698 OX=1120955; GN = SAMN03080610_02918 PE=4 SV=1
MTPPEGLGEAGKRLGVWIDAGRHGSMEWMPETAERRSDPRRIFRDVRSVVMLGMNYGPEGDPLATLAERQKATISVYARNRDYHDLIKGAMKRIGSRFAAEARRRDLPDEIKVFVDTAPVMEKPLAAAAGIGWQGKHTNLVSREHGSWLFLGAIFTAAELPADQAETDHCGSCRRCLDACPTNAFPAPYQLDARRCISYLTIEDKGLIPREFRKDLGNRIYGCDDCLAACPWNKFAETASEAKLKARADLQAPSLKDLVCLDDAAFRQHFSGSPIKRIGRAKFVSNVLIAIGNSGDPGLASQARARLDDDSPLVRGAAIWALARLAPETAERARAELLPQEEDAAVRGEWNLLGED

SEQ ID NO: 74196 - protein, 394 aa, Afipia broomeae
  REGION 1..394: note = tr|A0A2M8ZTE3|A0A2M8ZTE3_9BRAD Epoxyqueuosine reductase OS=Afipia broomeae OX=56946 GN=queG PE=3 SV=1
MAGGGAGVAHLRGSRLLNVNVKLSPADLKAALASEARALGFDCVGVTDPDAIADAARHFHAFLDAGAHGDMDWLAAQPERRTDPRVLWPGVRSVIMLGVNYGPDENPLAILQQRTRGAISVYAQGDDYHDVIKKRLKTLARWLVAASSAEVKVFVDTAAVMEKPLAHAAGLGWQGKHTNLVSREFGSWLFLGAIFTAAKLPRDDAAVDHCGSCQACLDICPTAAFPAPYRLDARRCISYLTIESKGPIPHEFRKAIGNRIYGCDDCLAACPWNKFAQAGREAKLAARDELRTPSLAELVRLDDAAFRALFAKSPVKRIGRNRFIRNVLIAIGNARDSALAVEAKRLLDDDNPLVRGAAVWALSQLMEPEAFAALASHAIGAETDESVQEEWRLA

SEQ ID NO: 74197 - protein, 372 aa, Afipia broomeae
  REGION 1..372: note = tr|K8P8F7|K8P8F7_9BRAD Epoxyqueuosine reductase; OS = Afipia broomeae ATCC 49717 OX=883078 GN=queG PE=3 SV=1
MDAVAIKAALTEEARTIGFGTIGITDPDAIAGARERLQTFLDAGSHGDMEWLANEPARRASPRVLWSDVRSVIMLGMNYGPDENPLALLGQKTRGAISVYARGDDYHDLIKKRLKTLARWLIAHAGGDVKVFVDTAAVMEKPLAQAAGLGWQGKHTNLVSREYGSWLFLGAIFTTLDLPRDATDIDHCGSCRACLDICPTNAFPAPYRLDARKCISYLTIEHKGAIPHEYREAIGNRIYGCDDCLSVCPWNKFAQEGHEAKLAARDELRGPALAELAKLDDASFRAMFTKSPVKRIGRDRFLRNVLTAIGNSNDTSLGTEARRLLDDESPLVRGAAVWALSRLLPREEFSQLAARSHDADEHVRSEWAAALA

SEQ ID NO: 74198 - protein, 411 aa, Afipia clevelandensis
  REGION 1..411: note = tr|K8NXE8|K8NXE8_9BRAD Epoxyqueuosine reductase; OS = Afipia clevelandensis ATCC 49720 OX=883079 GN=queG PE=3; SV = 1
MDGGRSGLGALRGSRLLTTPPDAAALKAALAAEARANGFSTLGIADPAAIDGARERLQAFLDAGAHGDMDWLANEPSRRASPKVLWSEVRSVIMLGMNYGPNENPLALLEQTTRGNISVYARGDDYHDLIKKRLKSVARWLIAQAGGDVKVFVDTAAVMEKPLAHAAGLGWQGKHTNLVSREFGSWLFLGAIFTTLDLPRDDADVNHCGSCQACLDICPTNAFPAPYRLDARKCISYLTIEHKGAIPREHRAAIGNRIYGCDDCLSVCPWNKFAQEGHEAKLAARDELRAPSLAELSRLDDASFRALFTKSPVKRIGRDRFLRNVLTAIGNSGDISLAPEARRLLDDPNPLVRGAAVWALSRLLSDQEFSELAAASTDHDADVRNEWEMGLHSSGNVEGDSLSPPAGRGLG

SEQ ID NO: 74199 - protein, 399 aa, Afipia massiliensis
  REGION 1..399: note = tr|A0A4U6BM44|A0A4U6BM44_9BRAD Epoxyqueuosine reductase OS=Afipia massiliensis OX=211460 GN=queG PE=3; SV = 1
MDGGRPGVGPLRGSRLLTNTTLVDASHVDSAAVKAALIEQARAIGFGTIGITDPGAIEGAHDRLQNFLDAGSHGDMGWLANEPARRASPKVLWSDVRSVVMLGMNYGPDENPLALLEQKTRGAISVYARGDDYHDLIKKRLKTLARWLLATAGGDVKVFVDTAAVMEKPLAHAAGLGWQGKHTNLVSREYGSWLFLGAIFTTLELPRDDADVDHCGSCQACLDICPTSAFPAPYRLDARKCISYLTIEHKGAIPREHREAIGNRIYGCDDCLSVCPWNKFAQEGHELRLAARDELRGPSLAELARLDDPAFRTLFTKSPVKRIGRDRFMRNVLTAIGNSNDAALIPEARRLLDDANPLVRGAAVWALSRLLPHAEFSELAARSDESDEDVRSEWAAATN

SEQ ID NO: 74200 - protein, 392 aa, Afipia sp.
  REGION 1..392: note = tr|A0A5C8DZJ0|A0A5C8DZJ0_9BRAD Epoxyqueuosine reductase OS=Afipia sp. OX=1871052 GN=queG PE=3 SV=1
MDGGRPGLGALRGSRLLTTPIDVIALKAALAAEARANGFSTIGIADPDAIEGARERLQAFLDAGSHGDMDWLANEPARRASPKVLWSDVRSVIMLGMNYGPDENPLALLAQKNRGNISVYARGDDYHDLIKKRLKVVARWLIAQAGGDVKVFVDTAAVMEKPLAHAAGIGWQGKHTNLVSREFGSWLFLGAIFTTLDLPRDTADVNHCGSCQSCLDICPTNAFPAPYRLDARKCISYLTIEHKGAIPREHRQAIGNRIYGCDDCLSVCPWNKFAQEGHEAKLVARDELRAPSLAELSRLDDVSFRALFTKSPVKRIGRDRFMRNVLIAIGNSGDAALASDARRLLDDQSPLVRGTAVWALSRLLSRAEFAALADVSNDNDEGVREEWTTALA

SEQ ID NO: 74201 - protein, 401 aa, Afipia sp.
  REGION 1..401: note = tr|A0A0Q6YVY0|A0A0Q6YVY0_9BRAD Epoxyqueuosine reductase OS=Afipia sp. Root123D2 OX=1736436 GN=queG PE=3; SV = 1
MDGGPAGTGALRGSGLLTSPAADPTDARMAEVKTALTGEALALGFDTLGVTAPDSISGAGKLLQIFLDDGAHGDMDWLARDPERRADPRVLWSEVRSVIMLGVNYGPDEDPMAVIAQRSRGAISVYARGDDYHELIKKRLKTLARSLLAQAGGDVKVFVDTAAVMEKPLARTAGLGWQGKHTNLVSREFGSWLFLGAIFTTLVLPRDAAEIDHCGSCHACLDACPTAAFPAPYRLDARKCISYLTIENKGPIPREFRAAIGNRIYGCDDCLAVCPWNKFAQQGHEAKLAARDELRAPTLAELSRLDDASFRALFTKSPVKRIGRERFIRNVLTAIGNSGDPSLAQDARRLLADDSAVVRGAAVWALSRLLAPSEFAELAAYANDDDETVRNEWRAAMPISV

SEQ ID NO: 74202 - protein, 377 aa, Agarivorans albus
  REGION 1..377: note = tr|R9PRF7|R9PRF7_AGAAL Epoxyqueuosine reductase; OS = Agarivorans albus MKT 106 OX=1331007 GN=queG PE=3 SV=1
MSLLSEIDLKQLVQHIKLTAKSLGFQQIGITDVDLSQHHQDVEQWLAKNYHGEMDYLARNLELRKHPEQLHEGTQRIISVRMDYLPEDAKFAQSLSASDQAYISRYALGRDYHKLMRKRLNQLGKSINDYCQQQLNMRPFVDSAPVMERQLATKAGLGWTGKHSLIINQDAGSWFFLGELFVDLPLPIDQPVDEQCGDCVACITICPTQAIVEPYQVDARRCISYLTIEYDGIIEEELRPLMGNRIYGCDDCQLTCPWNRYAQLTQEADFAAREQLDQPTLLALFAWTEEEFLKKTEGSPIRRIGYQQWLRNIAIALGNAAYSQQAIDELSAKQGLEAVAQHHVNWAIEQQQNKAAKASRKTARLIRIIEKGLTRDA

SEQ ID NO: 74203 - protein, 377 aa, Agarivorans sp.
  REGION 1..377: note = tr|A0A4D4IVZ4|A0A4D4IVZ4_9ALTE Epoxyqueuosine reductase OS=Agarivorans sp. Toyoura001 OX=2283141 GN=yjeS; PE = 3 SV=1
MPIPTEIDLKQLVQHIKLTAKSLGFQQIGITDVDLSQHHQSVEQWLAKDYHGEMDYLARNLELRKHPELLHEGTQRIISVRMDYLPEDAKFAQSLSNTEQAYISRYALGRDYHKLMRKRLNHLGKAINDYCEQQLNMRPFVDSAPVMERQLASKAGLGWTGKHTLVINQDAGSWFFLGELFVDLPLPIDQPVKEQCGDCVACITICPTQAIVEPYQVDARRCISYLTIEYDGVIDEELRPLMGNRIYGCDDCQLACPWNRYAQLTQEADFAAREQLDQPTLLQLFAWTETEFLKKTEGSPIRRIGHQQWLRNIAIALGNASYSEQAIQDLQSKQDVSDVVQEHIDWAIKQQLAKASKASRKTARLIRIIEKGLTRDA

SEQ ID NO: 74204 - protein, 358 aa, Agitococcus lubricus
  REGION 1..358: note = tr|A0A2T5IZL2|A0A2T5IZL2_9LACT Epoxyqueuosine reductase OS=Agitococcus lubricus OX=1077255 GN=queG PE=3; SV = 1
MIMQKIPLLHDMQSLTQEIKRWGHELGFQQVGISGVDLGQHGQHLQNWLAKGYHADLDYMASHGAKRWQPDLLEPYTQRIISVRMDYLVDKPAPRTISSHPQQGVIARYALGRDYHKVLRKRLQKLAERIETHIQDLEYRAFVDSAPVLERAIAEQAGLGWIGKNTMLINRQAGSFFFLGELFTNLPLIIDQPSSAHCGSCSACLDICPTQAIVAPYQLDARLCIAYLTIEYTGVIPEHLRSLIGNRVFGCDDCQLICPWNRYANLSQEVDFQVRHQLDRVSLLTLWSWTEAEFLQRTEGSPLRRIGYQAFMRNIAIGLGNAPPSKTIIEALQQKQPMVTEMVQEHIIWAIKQQEKTF

SEQ ID NO: 74205 - protein, 384 aa, unidentified
  source 1..384: note = Agrobacterium albertimagni
  REGION 1..384: note = tr|K2PHU7|K2PHU7_9RHIZ Iron-sulfur cluster binding protein OS=Agrobacterium albertimagni AOL15 OX=1156935; GN = QWE_05113 PE=4 SV=1
MDEPQIDPKIRKRRADLTQFLRHEAYAQGFDLCRITLPNAIPEAPARLASFLEAGRHGTMNWMEETKERRADPRVLWSEVRSIVMFGMNYGPNEDPRLLQAQPEKAAISVYARNRDYHDVIKGRLKEVATRFAAHAGEDVKVFVDTAPVMEKPLAASAGLGWQGKHTNLVSRDFGSWLFLGSLFTTAELEIDAPERDHCGSCRSCLDACPTDAFPAPYQIDARRCISYLTIEHKGPIDRALRPAFGNRIYGCDDCLAACPWNKFAAAAREMKLVAREDLKAPEIAFFLTLDDPSFRTYFSGSPVKRIGRDRFVRNVLIAAGNSGSLDLAPACERLLTDGSSDVRGMAAWALSRLLPADRFASLKRAHLTTETDEHVRQEWMTEN

SEQ ID NO: 74206 - protein, 383 aa, unidentified
  source 1..383: note = Agrobacterium arsenijevicii
  REGION 1..383: note = tr|A0A0D8L244|A0A0D8L244_9RHIZ Epoxyqueuosine reductase OS=Agrobacterium arsenijevicii OX=1585697; GN = queG PE=3 SV=1
MDVASDKQRIRARKLTDFVRQEALSLGFDLCRITAPDSIPLAPERLRLFLDKSYHGTMAWMEETEARRAEPKTLWGDVRSIVMFGLNYGPEEDPRGILAKPDKAAISVYARNRDYHDVIKGRLKEIATRFAARAGEDVKVFVDTAPVMEKPLAAAAGLGWQGKHTNLVSRTHGSWLFLGSMFTTAELCLDEAERDHCGSCRACLDACPTAAFPAPYQLDARRCISYLTIEHKGTIPHEFRPMIGNRIYGCDDCLAACPWNKFAASASEMKLQAREDLKEPSIAFLLTLDDAAFRSFFSGSPVKRIGRNRFVRNVLIAAGNSCDRQFVEQCKSLAETDASPEVRGMAVWALSQLMDREEFHTYSAGRAPEPDPEAEMEWQLAEA

SEQ ID NO: 74207 - protein, 395 aa, unidentified
  source 1..395: note = Agrobacterium bohemicum
  REGION 1..395: note = tr|A0A135NYQ1|A0A135NYQ1_9RHIZ Epoxyqueuosine reductase OS=Agrobacterium bohemicum OX=2052828 GN=queG; PE = 3 SV=1
MRVPIRINCGRSAIDTALQKQQLRAGKLTDFVRAEALSLGFDLCRVTSADSIPLAPERLREFIGNGFHGTMGWMEETEERRASPKTLWGDVRSVVMFGLNYGPDEDPRDILTKPDKAAISVYARNRDYHDVIKGRLKEIATRFAARAGEDVKVFVDTAPVMEKPLAAAAGLGWQGKHTNLVSRTHGSWLFLGSMFTTAQLQLDEAERDHCGSCRACLDACPTNAFPEPYKIDARRCISYLTIEHKGPIPPEFRPMIGNRIYGCDDCLAACPWNKFAASASEMKLQAREDLKEPSIAFLLTLDDAAFRTFFSGSPVKRIGRNRFVRNVLIAAGNSGDSDFIAQCQTLARDSSAEVRAMAVWALSRLMDGKSFTTYAAARAPESDSNVLDEWRIAGV

SEQ ID NO: 74208 - protein, 323 aa, unidentified
  source 1..323: note = Agrobacterium deltaense
  REGION 1..323: note = tr|A0A1S7TPM9|A0A1S7TPM9_9RHIZ Iron-sulfur cluster binding protein OS=Agrobacterium deltaense NCPPB 1641; OX = 1183425 GN=AGR7A_Cc290321 PE=4 SV=1
MEETEARRAEPKTLWGDVRSIVMFGLNYGPEEDPRGLLSKPDKAAVSVYARNRDYHDVIKGRLKEIATRFAARAGEDVKVFVDTAPVMEKPLAAAAGLGWQGKHTNLVSRTHGSWLFLGSMFTTAELCLDEAERDHCGSCRACLDACPTAAFPAPYQLDARRCISYLTIEHKGPIPHEFRPVIGNRIYGCDDCLAACPWNKFAASASEMKLQAREDLKEPSIAFLLTLDDAAFRGFFSGSPVKRIGRNRFIRNVLIAAGNSADRQFVERCKALAETDPSPEVRGMAAWALSRLMDRDEFRTYSAGRAPEPDPEAEMEWQLAEA

SEQ ID NO: 74209 - protein, 326 aa, unidentified
  source 1..326: note = Agrobacterium deltaense
  REGION 1..326: note = tr|A0A1S7QBS0|A0A1S7QBS0_9RHIZ Iron-sulfur cluster binding protein OS=Agrobacterium deltaense Zutra 3/1; OX = 1183427 GN=AGR7C_Cc260357 PE=4 SV=1
MAWMEETEARRAEPKTLWGDVRSIVMFGLNYGPEEDPRGLLSKPDKAAISVYARNRDYHDIIKGRLKEIATRFAARAGEDVKVFVDTAPVMEKPLAAAAGLGWQGKHTNLVSRTHGSWLFLGSMFTTAELCLDEAERDHCGSCRACLDACPTAAFPAPYQLDARRCISYLTIEHKGPIPHEFRPMIGNRIYGCDDCLAACPWNKFAASASEMKLQAREDLKEPSIAFLLTLDDAAFRSFFSGSPVKRIGRNRFIRNVLIAAGNSADRQFVEQCKALAETDPSPEVRGMAAWALSRLMDRDEFRTYSAGRAPEPDPEAEMEWQLAEA

SEQ ID NO: 74210 - protein, 349 aa, unidentified
  source 1..349: note = Agrobacterium fabrum
  REGION 1..349: note = tr|A0A3G2CU07|A0A3G2CU07_9RHIZ Iron-sulfur cluster binding protein OS=Agrobacterium fabrum OX=1176649; GN = At1D132_27840 PE=4 SV=1
MPDSIPLAPKRLRQFLENGYHGTMAWMEETEARRAEPKTLWADVRSIVMFGLNYGPEEDPRDLLSKPDKAAISVYARNRDYHDIIKGRLKEIATRFAARAGEDVKVFVDTAPVMEKPLAAAAGLGWQGKHTNLVSRSHGSWLFLGSMFTTAELCLDEAEKDHCGSCRACLDACPTAAFPAPYQLDARRCISYLTIEHKGPIPHEFRPMIGNRIYGCDDCLAACPWNKFAASASEMKLKAREDLKEPSIAFLLTLDDAAFRSFFSGSPVKRIGRNRFIRNVLIAAGNSADRQFLGQCKALAETDPSAEVRGMAAWALSRLMDRDEFRTYSAGRAPETDPEAAMEWQLAEA

SEQ ID NO: 74211 - protein, 326 aa, unidentified
  source 1..326: note = Agrobacterium fabrum
  REGION 1..326: note = tr|A0A1S7PZG3|A0A1S7PZG3_9RHIZ Iron-sulfur cluster binding protein OS=Agrobacterium fabrum str. J-07; OX = 1183433 GN=AGR8A_Cc70019 PE=4 SV=1
MAWMEETEARRAEPKTLWADVRSIVMFGLNYGPEEDPRDLLSKPDKAAISVYARNRDYHDIIKGRLKEIATRFAARAGEDVKVFVDTAPVMEKPLAAAAGLGWQGKHTNLVSRSHGSWLFLGSMFTTAELCLDEAEKDHCGSCRACLDACPTAAFPAPYQLDARRCISYLTIEHKGPIPHESRPMIGNRIYGCDDCLAACPWNKFAASASEMKLKAREDLKEPSIAFLLTLDDAAFRSFFSGSPVKRIGRNRFIRNVLIAAGNSVDRQFVGQCKALAETDPSAEVRGMAAWALSRLMDRDEFRTYSAGRAPETDPEAAMEWQLAEA

SEQ ID NO: 74212 - protein, 326 aa, unidentified
  source 1..326: note = Agrobacterium genomosp.
  REGION 1..326: note = tr|A0A1S7MGL1|A0A1S7MGL1_9RHIZ Iron-sulfur cluster binding protein OS=Agrobacterium genomosp. 1 str. S56; OX = 1183429 GN=AGR1B_Cc120649 PE=4 SV=1
MAWMEETEARRAEPKTLWGDVRSIVMFGLNYGPEEDPRGVLSKADKAAISVYARNRDYHDVIKGRLKEIATRFAARAGEDVKVFVDTAPVMEKPLAAAAGLGWQGKHTNLVSRTHGSWLFLGSMFTTAELCLDEAENDHCGSCRACLDACPTAAFPAPYQLDARRCISYLTIEHKGVIPHEFRPMIGNRIYGCDDCLAACPWNKFAASASEMKLQAREDLKEPSIAFLLTLDDAAFRSFFSGSPVKRIGRNRFIRNVLIAAGNSRDQQFVQQCKSLAEKDPAPEVRGMAAWALSQLMDSEEFRAYSAGRAPEPDPEAEMEWQLAEA

SEQ ID NO: 74213 - protein, 326 aa, unidentified
  source 1..326: note = Agrobacterium genomosp.
  REGION 1..326: note = tr|A0A1S7QPR3|A0A1S7QPR3_9RHIZ Iron-sulfur cluster binding protein OS=Agrobacterium genomosp. 5 str. CFBP 6626 OX=1183435 GN=AGR5A_Cc90229 PE=4 SV=1
MAWMEETEARRAEPKTLWGDVRSIVMFGLNYGPEEDPRGVLSKPDKAAISVYARNRDYHDVIKGRLKEIATRFAARAGEDVKVFVDTAPVMEKPLAAAAGLGWQGKHTNLVSRTHGSWLFLGSMFTTADLCLDEAEKDHCGSCRACLDACPTAAFPAPYQLDARRCISYLTIEHKGPIPHEFRPMIGNRIYGCDDCLAACPWNKFAASASEMKLQAREDLKEPSIAFLLTLDDAAFRSFFSGSPVKRIGRNRFIRNVLIAAGNSRDRQFLEQCKALSERDPSPEVRGMAAWALSRLMDREEFRTYSATRAPETDPEAEMEWQLAEA

SEQ ID NO: 74214 - protein, 395 aa, unidentified
  source 1..395: note = Agrobacterium larrymoorei
  REGION 1..395: note = tr|A0A4Z1PTX8|A0A4Z1PTX8_9RHIZ Epoxyqueuosine reductase OS=Agrobacterium larrymoorei OX=160699 GN=queG; PE = 3 SV=1
MLAFARRHRRREPIDTSSQKQELRARKLTDFVRAEATALGFDLCRITSADAIPLAPERLRDFLDNGFHGTMAWMEETQERRANPKTLWSEVRSVVMFGLNYGPDEDPRQLLSQPDKAAISVYARNRDYHDVIKGRLKEIATRFAARAGEDVKVFVDTAPVMEKPLAAAAGLGWQGKHTNLVSRTHGSWLFLGSMFTTAELCLDEAERDHCGSCRACLDACPTNAFPSPYKIDARRCISYLTIEHKGPIPHEFRPMIGNRIYGCDDCLAACPWNKFAASASEMKLQAREDLKEPSIAFLLTLDDAAFRSFFSGSPVKRIGRNRFIRNVLIAAGNSNDPLLIDQCRQLADDASPDVRGMAIWALSRLMDRESFHAYAATHTADDDSDVQEEWRMAGE

SEQ ID NO: 74215 - protein, 395 aa, unidentified
  source 1..395: note = Agrobacterium larrymoorei
  REGION 1..395: note = tr|A0A4D7E2D2|A0A4D7E2D2_9RHIZ Epoxyqueuosine reductase OS=Agrobacterium larrymoorei OX=160699 GN=queG; PE = 3 SV=1
MLALASRWSRRETIDTSSQKQELRARKLTDFVRAEATALGFDLCRITSADAIPLAPERLRDFLDNGFHGTMAWMEETQERRANPKTLWSEVRSVVMFGLNYGPDEDPRQLLSQADKAAISVYARNRDYHDVIKGRLKEIATRFAARAGEDVKVFVDTAPVMEKPLAAAAGLGWQGKHTNLVSRTHGSWLFLGSMFTTAELCLDEAERDHCGSCRACLDACPTSAFPSPYKIDARRCISYLTIEHKGPIPHEFRPMIGNRIYGCDDCLAACPWNKFAASASEMKLRAREDLKEPSIAFLLTLDDAAFRSFFSGSPVKRIGRNRFIRNVLIAAGNSNDPLLIDQCRQLADDASPDVRGMAIWALSRLMDRESFHAYAATHTADDDSDVQEEWRMAGE

SEQ ID NO: 74216 - protein, 385 aa, unidentified
  source 1..385: note = Agrobacterium radiobacter
  REGION 1..385: note = tr|B9J7M3|B9J7M3_AGRRK Epoxyqueuosine reductase; OS = Agrobacterium radiobacter (strain K84 / ATCC BAA-868); OX = 311403 GN=queG PE=3 SV=1
MPEDRAAEKESRRRHSLTAFLRAEARAQGFDLCRITRPDAIPEASVRLDQFLEQGYHGTMTWMEETRERRGDPRMLWSDVRSVAVFGLNYGPDEDPRTILEKPDKAAISVYARNRDYHDVIKGRLKEIATRFAARSQQDVKVFVDTAPVMEKPLAAAAGLGWQGKHTNLVSRTHGSWLFLGSMFTTADLEPDQAEIDHCGSCRACLDACPTAAFPAPYQLDARRCISYLTIEHKGPIDPLLRPLIGNRIYGCDDCLAACPWNKFASSASEMKLIAREDLKEPSIAFLLELDDAAFRAFFSGSPVKRIGRDRFVRNVLIAAGNSDDRTLIEACRRLSADPSPVVRGMAVWALSRLMTAGEFLAFAAERTDEPDADVRAEWKLAGVA

SEQ ID NO: 74217 - protein, 326 aa, unidentified
  source 1..326: note = Agrobacterium radiobacter
  REGION 1..326: note = tr|W1KZ18|W1KZ18_RHIRD 4Fe-4S ferredoxin; OS = Agrobacterium radiobacter DSM 30147 OX=1336745; GN = L902_34405 PE=4 SV=1
MAWMEETEARRAEPKTLWGDVRSIVMFGLNYGPEEDPRDLLSKPDKAAISVYARNRDYHDIIKGRLKEIATRFAARAGEDVKVFVDTAPVMEKPLAAAAGLGWQGKHTNLVSRTHGSWLFLGSMFTTAELCLDEAEKDHCGSCRACLDACPTAAFPAPYQLDARRCISYLTIEHKGPIPHEFRPMIGNRIYGCDDCLAACPWNKFAASASEMKLQAREDLKEPSIAFLLTLDDAAFRSFFSGSPVKRIGRNRFIRNVLIAAGNSADRQFVEQCKALAETDPSPEVRGMAAWALSRLMDRDEFRTYSAGRAPEPDPEAEMEWQLAEA

SEQ ID NO: 74218 - protein, 385 aa, unidentified
  source 1..385: note = Agrobacterium rhizogenes
  REGION 1..385: note = tr|A0A546ZCS1|A0A546ZCS1_AGRRH tRNA epoxyqueuosine(34) reductase QueG OS=Agrobacterium rhizogenes OX=359 GN=queG PE=4 SV=1
MPEDRAAEKESRRRRSLTAFLCAEARAQGFDLCRITRPDAIPEASVRLDQFLEQGYHGTMAWMEETRERRGDPRMLWSDVRSIAVFGLNYGPDEDPRTILEKPDKAAISVYARNRDYHDVIKGRLKEIATRFAARSQQDVKVFVDTAPVMEKPLAAAAGLGWQGKHTNLVSRTHGSWLFLGSMFTTADLEPDQAEIDHCGSCRACLDACPTAAFPAPYQLDARRCISYLTIEHKGPIDPLLRPLIGNRIYGCDDCLAACPWNKFASSASEMKLIAREDLKEPSIAFLLELDDAAFRAFFSGSPVKRIGRDRFVRNVLIAAGNSDDRTLIGACRHLSADPSPVVRGMAVWALSRLMTAGEFLAFAAERTDEPDADVRVEWKLAGVA

SEQ ID NO: 74219 - protein, 378 aa, unidentified
  source 1..378: note = Agrobacterium rhizogenes
  REGION 1..378: note = tr|A0A2T7VC84|A0A2T7VC84_AGRRH Epoxyqueuosine reductase OS=Agrobacterium rhizogenes OX=359 GN=queG PE=3; SV = 1
MQKQELRARKLTDFVKAEATALGFDLCRITSPDAIPLAPDRLREFLDSGFHGTMGWMAETQERRASPKTLWGDVRSIVMFGLNYGPDEDPRTILEKRDKAAISVYARNRDYHDVIKGRLKEIATRFAARAGEDVKVFVDTAPVMEKPLAAAAGLGWQGKHTNLVSRSFGSWLFLGSMFTTAELCLDEAERDHCGSCRACLDACPTNAFPAPYKLDARRCISYLTIEHKGPIPHEFRPMIGNRIYGCDDCLAACPWNKFAASASEMKLQAREDLKEPPIDFLLGLDDAAFRTFFSGSPVKRIGRNRFIRNVLIAAGNSKDQRLVEQCKRLASDVSPEVRGMAVWALSQLMDSHSFHAYAAAHTAEDDSDVQEEWRIAGA

SEQ ID NO: 74220 - protein, 395 aa, unidentified
  source 1..395: note = Agrobacterium rosae
  REGION 1..395: note = tr|A0A2S4EIL7|A0A2S4EIL7_9RHIZ Epoxyqueuosine reductase OS=Agrobacterium rosae OX=1972867 GN=queG PE=3; SV = 1
MPVPTGSNRGRHAIDTALQKQQVRAAKLTDFVRSEALSLGFDLCRITAPDSIPQAPERLREFIDNGFHGTMGWMEETQERRADPKTLWGDVRSVVMFGLNYGPDEDPRGILDRPDKGAISVYARNRDYHDVIKGRLKEIATRFAARAGEDVKVFVDTAPVMEKPLAAAAGLGWQGKHTNLVSRTHGSWLFLGSMFTTAELQRDEAERDHCGSCRACLDACPTNAFPAPYKIDARRCISYLTIEHKGPIPLEFRPMIGNRIYGCDDCLAACPWNKFAASASEMKLQARDDLKEPSITFLLTLDDAAFRTFFSGSPVKRIGRNRFVRNVLIAAGNSGDSGFIAQCQTLAQDSSPEVRAMAVWALSRLMDGESFTTYATTRAPEDDSNVLDEWRMAGV

SEQ ID NO: 74221 - protein, 382 aa, unidentified
  source 1..382: note = Agrobacterium rubi
  REGION 1..382: note = tr|A0A1B9TI55|A0A1B9TI55_9RHIZ Epoxyqueuosine reductase OS=Agrobacterium rubi OX=28099 GN=queG PE=3 SV=1
MDTALHKQQLRAAKLTDFVRSEATALGFDLCRITSADSIPLAPERLREFIDNGFHGTMGWMEETEERRGRPRTLWSDVRSVVMFGLNYGPDEDPRDILTKPDKAAISVYARNRDYHDVIKGRLKEIATRFSARAGEDVKVFVDTAPVMEKPLAEAAGLGWQGKHTNLVSRTHGSWLFLGSMFTTAELCLDEAERDHCGSCRACLDACPTNAFPSPYKLDARRCISYLTIEHKGTIPHEFRPMIGNRIYGCDDCLAACPWNKFAASASEMKLQARDDLKEPDIASLLTLDDATFRTFFSGSPVKRIGRNRFIRNVLIAAGNSGDAKFIAQCQTLAQDVSPDVRGMAVWALSRLMDRHSFNAYACAHAAEDDSDVLNEWIIAGV

SEQ ID NO: 74222 - protein, 378 aa, unidentified
  source 1..378: note = Agrobacterium rubi
  REGION 1..378: note = tr|A0A081CUR7|A0A081CUR7_9RHIZ Epoxyqueuosine reductase OS=Agrobacterium rubi TR3 = NBRC 13261; OX = 1368415 GN=queG PE=3 SV=1
MHKQQLRAAKLTDFVRSEASALGFDLCRITSADSIPLAPERLREFIDNGFHGTMGWMEETQERRARPRTLWSDVRSVVMFGLNYGPNEDPRDILTKPDKAAISVYARNRDYHDVIKGRLKEIATRFSARAGEDVKVFVDTAPVMEKPLAEAAGLGWQGKHTNLVSRTHGSWLFLGSMFTTAELCLDEAERDHCGSCRACLDACPTNAFPSPYKLDARRCISYLTIEHKGTIPHEFRPMIGNRIYGCDDCLAACPWNKFAASASEMKLQARDDLKEPDIAFLLTLDDATFRTFFSGSPVKRIGRNRFIRNVLIAAGNSGDAKFIAQCQTLAQDVSPDVRGMAVWALSRLMDRHSFNAYACARAAEDDSDVLNEWMIAGV

SEQ ID NO: 74223 - protein, 383 aa, unidentified
  source 1..383: note = Agrobacterium salinitolerans
  REGION 1..383: note = tr|A0A1S9ELU5|A0A1S9ELU5_9RHIZ Epoxyqueuosine reductase OS=Agrobacterium salinitolerans OX=1183413; GN = queG PE=3 SV=1
MDVASEKQRIRAHKLTDFVRREALSLGFDLCRITAPDSIPLAPERLRQFLDNGYHGTMAWMEETEARRAEPKTLWGDVRSIVMFGLNYGPEEDPRDLLSKPDKAAISVYARNRDYHDVIKGRLKEIATRFAARAGEHVKVFVDTAPVMEKPLAAAAGLGWQGKHTNLVSRTHGSWLFLGSMFTTAELCLDEAERDHCGSCRACLDACPTAAFPAPYQLDARRCISYLTIEHKGPIPHEFRPMIGNRIYGCDDCLAACPWNKFAASASEMKLQAREDLKEPSIAFLLTLDDAAFRSFFSGSPVKRIGRNRFIRNVLIAAGNSADRQFVEQCKALAETDPSPEVRGMAAWALSRLMDRDEFRTYSAGRAPEPDPEAEMEWQLAEA

SEQ ID NO: 74224 - protein, 326 aa, unidentified
  source 1..326: note = Agrobacterium salinitolerans
  REGION 1..326: note = tr|A0A1S7U072|A0A1S7U072_9RHIZ Iron-sulfur cluster binding protein OS=Agrobacterium salinitolerans str. Hayward 0363 OX=1183434 GN=AGR9A_Cc210359 PE=4 SV=1
MAWMEETEARRAEPRTLWGDVRSIVMFGLNYGPEEDPRGLLLKPDKAAISVYARNRDYHDVIKGRLKEIATRFAARAGEDVKVFVDTAPVMEKPLAAAAGLGWQGKHTNLVSRTHGSWLFLGSMFTTAELCLDDAERDHCGSCRACLDACPTAAFPAPYQLDARRCISYLTIEHKGPIPHEFRPMIGNRIYGCDDCLAACPWNKFAASASEMKLQAREDLKEPSIAFLLTLDDAAFRSFFSGSPVKRIGRNRFIRNVLIAAGNSADRQFVEQCKALAETDPSPEVRGMAAWALSRLMDRDEFRTYSAGRAPEPDPEAEMEWQLAEA

SEQ ID NO: 74225 - protein, 140 aa, unidentified
  source 1..140: note = Agrobacterium sp.
  REGION 1..140: note = tr|A0A357XDA2|A0A357XDA2_AGRSP tRNA epoxyqueuosine(34) reductase QueG (Fragment); OS = Agrobacterium sp. OX=361 GN=DEB63_19430 PE=4 SV=1
GNRIYGCDDCLAACPWNKFAASASEMKLQAREDLKEPSITFLLTLDDAAFRRFFSGSPVKRIGRNRFIRNVLIAAGNSADRQFLEQCKALAGRDPSPEVRGMAAWALSRLMDREEFRTYSATRAPETDPEAEMEWQLAEA

SEQ ID NO: 74226 - protein, 323 aa, unidentified
  source 1..323: note = Agrobacterium sp.
  REGION 1..323: note = tr|A0A0L6K2F8|A0A0L6K2F8_9RHIZ 4Fe-4S ferredoxin; OS = Agrobacterium sp. SUL3 OX=1701910 GN=AKG12_20420 PE=4; SV = 1
MEETEARRAEPKTLWGDVRSIVMFGLNYGPEEDPRGLLSKPDKAAISVYARNRDYHDIIKGRLKEIATRFAARAGEDVKVFVDTAPVMEKPLAAAAGLGWQGKHTNLVSRTHGSWLFLGSMFTTAELCLDEAEKDHCGSCRACLDACPTAAFPAPYQLDARRCISYLTIEHKGPIPHEFRPMIGNRIYGCDDCLAACPWNKFAASASEMKLQAREDLKEPSISFLLTLDDAAFRSFFSGSPVKRIGRNRFIRNVLIAAGNSADRQFVEQCKSLAETDPSPEVRGMAAWALSHLMDREEFRTYSATRAPESDPEAAMEWQLAKA

SEQ ID NO: 74227 - protein, 326 aa, unidentified
  source 1..326: note = Agrobacterium tumefaciens
  REGION 1..326: note = tr|H0H8V7|H0H8V7_RHIRD Iron-sulfur cluster binding protein OS=Agrobacterium tumefaciens 5A OX=1107544; GN = AT5A_11357 PE=4 SV=1
MAWMEETEARRAEPKTLWGDVRSIVMFGLNYGPEEDPRGVLSKADKAAISVYARNRDYHDVIKGRLKEIATRFAARAGEDVKVFVDTAPVMEKPLAAAAGLGWQGKHTNLVSRTHGSWLFLGSMFTTAELCLDEAEKDHCGSCRACLDACPTAAFPAPYQLDARRCISYLTIEHKGVIPHEFRPMIGNRIYGCDDCLAACPWNKFAASASEMKLQAREDLKEPSIAFLLTLDDAAFRSFFSGSPVKRIGRNRFIRNVLIAAGNSRDQQFVQQCKSLAEKDPAPEVRGMAAWALSQLMDSEEFRAYSAGRAPEPDPEAEMEWQLAEA

SEQ ID NO: 74228 - protein, 326 aa, unidentified; identical to SEQ ID NO: 74217
  source 1..326: note = Agrobacterium tumefaciens
  REGION 1..326: note = tr|A0A1S7PPE1|A0A1S7PPE1_RHIRD Iron-sulfur cluster binding protein OS=Agrobacterium tumefaciens str. Kerr 14; OX = 1183424 GN=AGR4C_Cc20129 PE=4 SV=1

SEQ ID NO: 74229 - protein, 390 aa, unidentified
  source 1..390: note = Agrobacterium vitis
  REGION 1..390: note = tr|A0A1S2E963|A0A1S2E963_AGRVI tRNA epoxyqueuosine(34) reductase QueG OS=Agrobacterium vitis; OX = 373 GN=BBK95_10990 PE=4 SV=1
MAKEGSPERTAEKARARAAKLSAFIRQEAADKGFDLCRITGPESIPQAPARLLEFVDAGYHGTMAWMEETRDRRGDPKVLWPQVRSIVMFGLNYGPETDPRALQAQPDKAAISVYARNRDYHDIIKGKLKEIATRFAARAGEDVKVFVDTAPVMEKPLAAAAGLGWQGKHTNLVSREYGSWLFLGSLFTTAELQLDAAERDHCGSCRACLDACPTSAFPAPYQIDARRCISYLTIEHKGVIDRNLRPAFGNRIYGCDDCLAACPWNKFAAQAREIKLQAREDLTAPDIAFFLTLDDPGFRSHFSGSPVKRIGRDRFVRNVLIAAGNSGLSTLITPCLDLLADASPDVRGMAVWALSRLMEPQAFGALAHSIENEPDSDVRAEWIAAGVTP

SEQ ID NO: 74230 - protein, 390 aa, unidentified
  source 1..390: note = Agrobacterium vitis
  REGION 1..390: note = tr|B9JZB4|B9JZB4_AGRVS Epoxyqueuosine reductase; OS = Agrobacterium vitis (strain S4 / ATCC BAA-846); OX = 311402 GN=queG PE=3 SV=1
MAKEGSPERTAEKAKARAAKLSAFIRQEAADKGFDLCRITGPQSIPQAPARLMEFVDAGYHGTMAWMEETRERRGDPKVLWPQVRSIVMFGLNYGPETDPRALQAQPNKAAISVYARNRDYHDIIKGKLKEIATRFAARAGEDVKVFVDTAPVMEKPLAAAAGLGWQGKHTNLVSRDYGSWLFLGSLFTTAELELDAAERDHCGSCRACLDACPTAAFPAPYQIDARRCISYLTIEHKGVIDRDLRPAFGNRIYGCDDCLAACPWNKFAAQTREIKLQAREDLMAPDIAFFLTLDDPGFRSHFSGSPVKRIGRDRFVRNVLIAAGNSGLSTLITPCLDLLADASPDVRGMAVWALSRLMEPQAFGALAHYRENEPDSDVRAEWIAAGVTP

SEQ ID NO: 74231 - protein, 357 aa, Agromyces sp.
  REGION 1..357: note = tr|A0A542JL10|A0A542JL10_9PSED Epoxyqueuosine reductase OS=Agromyces sp. SLBN-50 OX=744977 GN=queG PE=3; SV = 1
MSDSPPDLAQLAQSIKDWGRELGFQQVGITDVDLGEHEAHLQRWLDAGYQGEMDYMAAHGSKRSHPDELVPGTLRVVSLRMDYLPGDTRMAERLAQPEQAYVSRYALGRDYHKLVRKRLQQLAERIQAVIGPFGHRAFVDSAPVLEKAIAEKAGLGWIGKNTLVLNRKAGSWFFLGELFVDIPLPIDAPRASEHCGRCTACMDICPTAAFAGPYVLDARRCISYLTIELKGSIPEELRAPIGNRVFGCDDCQIVCPWNRFARPTEQGDFQPRHGLDSGGLVELFLWTEAEFLSRTEGSPLRRAGYERWLRNLAVGLGNAPSTIPVLEALRARREHPSELVREHVAWALARHHEKGPH

SEQ ID NO: 74232 - protein, 357 aa, unidentified
  source 1..357: note = Ahniella affigens
  REGION 1..357: note = tr|A0A2P1PYY4|A0A2P1PYY4_9GAMM Epoxyqueuosine reductase OS=Ahniella affigens OX=2021234 GN=queG PE=3 SV=1
MNETRALPDREQIRQWARALGFQECGVSTAPLAEDEAYLLSWLQQGFHGDMDYMARHGSKRSRPAELHTGTVSVISVRMDYHQPDAAPIAEILADPDAAFISRYALGRDYHKVLRQRLQKLADRIGQAVGPFGYRAFVDSAPVLEKALARNAGLGWIGKHTNLIHERHGSWFFLGELYTDLPLAPDPAHDRNHCGTCTRCLDVCPTQAIIAPYQVDARRCISYLTIELHGSIPEDLRPLLGNRIYGCDDCQWVCPWNKFADATIEVDFQIRHGLDRARLLDLFAWDETTFQNRTEGSPIRRIGYERWLRNIAVALGNAPFSEQTIQALRAKQSHPSELVQEHVAWAIKAQLAKASAA

SEQ ID NO: 74233 - protein, 386 aa, unidentified
  source 1..386: note = Ahrensia marina
  REGION 1..386: note = tr|A0A0N0VLX3|A0A0N0VLX3_9RHOB 4Fe-4S ferredoxin; OS = Ahrensia marina OX=1514904 GN=SU32_04260 PE=4 SV=1
MSTTLSPEKAKQSLISDLSSEGFELVGFMDANDTGKMTSALSEFIDAGYHGSMQWMEDTQERRAAPTVLWEDAKTIILAAMVYSPDNDYDPLHATTLDDRATISCYAHNRDYHDVIKGKLKQVAGRFVAKTGAEVKVFIDTAPVMEKPLAQKAGLGWQGKHTNLVSRQIGSWFFIGSIFTDMDLPLDDAETDHCGSCRACLDCCPTNAFPSAYRLDARRCISYLTIEHAGPIDIEFRKPMGNRIYGCDDCLAVCPWNKFATKAREAKLQAREDLKSPPLAALLQLDDTAFRKMFAGSPVKRIGRNRFIRNCLVAAGNSSDQELLPLIKTHLNDPDNVVRGTAVWALAQHVNKDEFSVLYETYYPTESDQSVCQEWMTALETTGLEL

SEQ ID NO: 74234 - protein, 376 aa, Ahrensia sp.
  REGION 1..376: note = tr|A0A2E0IKN6|A0A2E0IKN6_9RHOB tRNA epoxyqueuosine(34) reductase QueG OS=Ahrensia sp.; OX = 1872419 GN=queG PE=4 SV=1
MTPEKAKQSLVEDLKREGFADVRVARVDSIPLAPVRLREFLEAGRHATMGWMEETEERRADPRVLWPEARTVVLAAMNYGPPDSDEPLRALTRRERATISVYARNRDYHDVIKGKLKQAAGRFAAKTGGQVKVFIDTAPVMEKPLGEAAGLGWQGKHTNLVSRKLGSWFFIGSIFTDMDLPADAAETDHCGSCRNCLDICPTDAFPAPYTLDARRCISYLTIEHAGPIPVEFRKSMGNRIYGCDDCLAVCPWNKFAAAASEAKLTARDELNAPLIAELLRLDDPAFRTKFSGSPIKRIGRDRFVRNVLIAAGNSALPALADQVEPHLTDPQPVVRGAAAWALRELAEPRRFETAREAHLEKETDERVKQEWMGTAP

SEQ ID NO: 74235 - protein, 355 aa, Ahrensia sp.
  REGION 1..355: note = tr|E0MRA3|E0MRA3_9RHOB Putative electron transport protein YjeS OS=Ahrensia sp. R2A130 OX=744979; GN = R2A130_2946 PE=4 SV=1
MSVPNLPKNWRANLEADANELGFESIGITTPDAIPEAAERLARALKDGHHATMGWMEETAERRGSPTALWPDVQSVIVLAMNYGPEFDPLTVLDEPERGAISVYARHRDYHDVMKGKVKTLASKLAARHRETFPDIEVKVFVDTAPVMEKPLAQAAGLGWQGKHTNLVSRDHGSWLFLASLFTNLSLPVDKLERDHCGSCMDCHDACPTNAFPAPYRLDARRCISYLTIEHHGPIPHEFRKPMGNRIYGCDDCLAVCPWNKFAHAASEVKLASPEPPRDDDLAGFLALDDTAFRTRFSGSPVKRIGRDRFIRNCCIAAGNSALPELLPAVEQLTQDADETVAEAARWAEAELRKN

SEQ ID NO: 74236 - protein, 368 aa, Aidingimonas halophila
  REGION 1..368: note = tr|A0A1H2R9A7|A0A1H2R9A7_9GAMM Epoxyqueuosine reductase OS=Aidingimonas halophila OX=574349 GN=queG PE=3; SV = 1
MSSAAERELNESDLARLADLIKTWGRELGFQQVGITDTDLEAHEHYLERWLANGRHGEMQFMEKHGRKRTRPAELVPGTLRVISVRMDYLPPEVETTKVLGQPNRAYVSRYAVGRDYHKVIRKRLQQLAEHIEAEVGQFGYRAFVDSAPVMERALAQKAGLGWFGKNSMLLNPRAGSLFFLGELYTNLPLPTDPPFEEEHCGSCTSCQTACPTGAIVDDKVVDSRRCISYLTIELHGSIPEQYREAIGNRVYGCDDCQLVCPFTRFTRVSDEDDFAPRHDLDRMDLVSLFAWSREEFLTKTEGSPIRRIGYERWLRNLAVGLGNAPWSDRVEAALRARLAYPSDLVREHVRWALGKQQEKRQRVITKA

SEQ ID NO: 74237 - protein, 332 aa, unidentified
  source 1..332: note = Akkermansia glycaniphila
  REGION 1..332: note = tr|A0A1C7PCB3|A0A1C7PCB3_9BACT Tigr00276: epoxyqueuosine reductase OS=Akkermansia glycaniphila; OX = 1679444 GN=PYTT_2094 PE=4 SV=1
MAARQLGFSDCRVAHAVPTPYGHTLQQWLRNGCHASMEWMERQEEKRLDPTLVLPDVRSIAILSYPYTPHNLRTARGRIARYAHGHDYHKLLESKLADLDETLRFYGGSQRYYTDSGPVNERDYATLSGMGWIGRHRQIIHPQGGSCIFLATILTTLELPADTPCSPRCGSCRRCIDACPGGALDGHSVDARRCISYWTIEHKGSIPEEWRSLLGDRLYGCDTCLEACPWNRFARETHDTRLLLPRHLRTLQPRDILTLDDQTFTEHFRHSPIRRIKREGLLRNACCVLGNIGTADDLPALEQALHDTPLIAEHAEWAIRRIHDRTASSSEP

SEQ ID NO: 74238 - protein, 383 aa, Akkermansia muciniphila
  REGION 1..383: note = tr|A0A2N8HKN7|A0A2N8HKN7_9BACT tRNA epoxyqueuosine(34) reductase QueG OS=Akkermansia muciniphila OX=239935 GN=queG PE=4 SV=1
MKRRQGAGNPISTGLKKILGGRGALVHDAGVLTPDPAVIKDSLCAVSRQLGFSGCRVARAGRSPHAEKLFQWLERGWHAGMEWMARSPERRADPAEVLSGCRSVICLSYDYDSPAMRPEGEGSICLYAHGRDYHGILEEKLADLQELLSIYGGEQKGYVDAGPVMERDHAEACGLGWRGRSGLIVRRKGGSRFFIATLLTTLELEPDTPVSHGCGSCRRCADLCPTGAIMENGQVDAGRCLSYWTIEHRGSIPEEIRPLVGTRLYGCDTCVTVCPWNGKPLPEADERFRMSRLLASIPLRDLLALDAGGFADLFRNSPLKRIKREGLLRNGCIVLGNAGTPDDIDFLKALSGESPLVAEHASWAVERILRRHGRHACSSGARD

SEQ ID NO: 74239 - protein, 353 aa, Akkermansia muciniphila
  REGION 1..353: note = tr|R6J2M9|R6J2M9_9BACT Uncharacterized protein; OS = Akkermansia muciniphila CAG:154 OX=1263034; GN = BN502_01864 PE=4 SV=1
MLTPDSSVIKDSLCAVSRQLGFSGCRVARAEKSPHAEKLFQWLERGWHAGMEWMARSPERRTDPAEVLPGCRSVICLSYDYDSPGRRPEGEGSICLYAHGKDYHGILGEKLADLQELLSIYGGKQKGYVDSGPVMERDHAEACGLGWRGKSGLIVRRKGGSRFFIATLLTTLELEPDAPVSNGCGSCRRCAALCPTGAIMGNGQVDAGRCLSYWTIEHRGAIPEEIRPLIGTRLYGCDTCVTVCPWNGKPLPDVDERFRMSRLLASIPLRGLLSLDAGGFAALFRNSPLKRLKREGLLRNGCVVLGNAGTPDDIDFLKALYGESPLVEEHASWAVERILRRYGRHASSSGARD

SEQ ID NO: 74240 - protein, 350 aa, Akkermansia sp.
  REGION 1..350: note = tr|A0A354E9H7|A0A354E9H7_9BACT tRNA epoxyqueuosine(34) reductase QueG (Fragment); OS = Akkermansia sp. OX=1872421 GN=queG PE=4 SV=1
PDPAVIKNSLCAVSRQLGFSGCRVARAGKSLHAEKLFQWLERGWHAGMEWMARSPERRADPAEVLPGCRSVICLSYDYDSPVMRPEGEGSICLYAHGRDYHGILEEKLADLQELLSIYGGEQKGYVDSGPVMEREHAETCGLGWRGRSGLIVRRKGGSRFFIATLLTTLELEPDAPVSNGCGSCRRCAALCPTGAIMENGQVDAGRCLSYWTIEHRGAIPEKIRPLIGTRLYGCDTCVTVCPWNSKPLPDADERFRMSRFLSSVSLRDLLSLDAGGFAALFRNSPLKRLKREGLLRNGCIVMGNAGTPDDVDFLKTLYGESPLVEEHASWAVERILRRYGRHASSSGARD

SEQ ID NO: 74241 - protein, 388 aa, Akkermansia sp.
  REGION 1..388: note = tr|A0A139TQK3|A0A139TQK3_9BACT Putative iron-sulfur cluster-binding protein OS=Akkermansia sp. KLE1798; OX = 1574265 GN=HMPREF3039_01938 PE=4 SV=1
MSIMGRQGCAGNPISAGAKKILGAGSALRHDGGVPKPDSFLIKDSLHSVSRSLGFSDCRVARAGRALHAEELFLWLERGWHADMEWMARSPERRVNPAEVLPGCRSVICLSYDYDSSMSRPSGSGSICLYAHGRDYHGILEEKLADLSELLSIYGGEQKGYVDAGPVMERDHAEACGLGWRGRSGLIVRRRGGSRFFIATLLTTLELEPDAPASGTCGSCRRCVEACPAGAIMENGLVDANRCLSYWTIEHRGAIPEDIRPLIGTRLYGCDTCVTACPWNKKPLTDADERFRMPLRLASISLRDLLSLDDAGFTAMFRNSPLKRIRREGLLRNGCIVLGNAGTPDDLDLLKRLCGESPLVAEHAEWAMERILHRHAAGGCPGGAEDEK

SEQ ID NO: 74242 - protein, 306 aa, Albidiferax sp.
  REGION 1..306: note = tr|A0A1H0SET7|A0A1H0SET7_9BURK Epoxyqueuosine reductase OS=Albidiferax sp. OV413 OX=1855285; GN = SAMN05216303_104159 PE=4 SV=1
MAYMESHGLKRARPAELVPGTVSVITARMDYLPRSTPEGWQALESDRLSRPQEGIVSVYARGRDYHKVLRARLQKLSDRIATELGPLGYRVFTDSAPVLEAELAARSGQGWRGKHTLVLNREAGSMFFLGEIYVDRALPPTAPTSGHCGSCSACIDVCPTQAIIAPQRLDARRCISYLTIEHAGPIPLEFRPLIANRIYGCDDCQLACPWNKFAQRSALPDFDERRGLSGQQLGTLFSWTEDEFLRYTEGGPIRRIGHERWLRNVAVAMGNALRAGEDADIRLALQQRAEDPSALVREHVAWALGI

SEQ ID NO: 74243 - protein, 368 aa, Albidovulum inexpectatum
  REGION 1..368: note = tr|A0A2S5JM03|A0A2S5JM03_9RHOB Epoxyqueuosine reductase OS=Albidovulum inexpectatum OX=196587 GN=queG; PE = 3 SV=1
MDARAFRNRLTAKALEEGFSQVGYCAPDAIPDAPARLASFLEQGRHGQMHWMAERTGWRANPAALWPEARTIVMLAESYTPDHDPLAVLQHRDRAAISCYAQGRDYHDLVKKRLKRVGRWLIEQAAKEGVEAQIKVFVDTAPVMEKPLGQAAGLGWQGKHTNLVGRQLGSWFFLGAIFTTLDLPKDQPETDHCGNCRRCLDICPTAAFPAPYQLDARRCISYLTIEHRGPVAEDLRPALGNRIYGCDDCLAVCPWNKFAQKAREIGYAARVGAPELAELAALDDAAFRARFSGSPIKRIGRDRFVRNVAYAIGNSGRSELARSLMPLLNDPDPAVADAARWALDRLQGRQGPADRPAGGGNQTDSAPS

SEQ ID NO: 74244 - protein, 351 aa, unidentified
  source 1..351: note = Albidovulum xiamenense
  REGION 1..351: note = tr|A0A1G8Z3J1|A0A1G8Z3J1_9RHOB Epoxyqueuosine reductase OS=Albidovulum xiamenense OX=990712 GN=queG PE=3; SV = 1
MSAAPDPAALKAELLREAEAVGFAEARVTTPDAIPEAAERLRHFVELGRHGTMRWMAERMEWRGNPAALWPEARSIVMLADLYTPRHDPLEVLKKREAGAISVYAGGRDYHDVIKKKLKRLGRWLLARAGGGEIKVFVDTAPVMEKPLGQAAGLGWQGKHTNLLSRRLGNWFFLGAIFTTLELPPDAPEVEHCGSCTACLDICPTRAFPAPFQLDARRCISYLTIEHAGPVDPELRPALGNRIYGCDDCLAVCPWNKFARAASEARYAMREELRAPDLAQLARLDDAGFRAFFSGSPIKRIGRNRFARNVAYAIGNSASPRLLPIAQELSNDADETVAEAGRWAAARLRQR

SEQ ID NO: 74245 - protein, 462 aa, Albimonas donghaensis
  REGION 1..462: note = tr|A0A1H3E420|A0A1H3E420_9RHOB Epoxyqueuosine reductase OS=Albimonas donghaensis OX=356660 GN=queG PE=3; SV = 1
MCFPRRAARGPRPPRRGFQRAAAPGFGPRDLGRRASGPRPRVISDSAHTALRHPPRGTSLPHLAPRRTGDGAATRRRAIPLDPAQLKTRLAEAARAEGFAAMGVCRPDAIPEAAPRLARFLEAGRHGDMGWMEARSHWRGDPTTLWPEARSVIMLAEAYTPAEDPLALLEMPDRASVSVYARGPDYHDRVKKRLKRLAGAFLAEAGPETGVKVFVDTAPVMEKPLAQAAGLGWQGKHTNLLGREIGNWVFLGAIFTTAELPADAPEVSHCGTCRKCLDICPTQAFPAPYQLDATRCISYLTIELKGPIPREFRPLIGNRIYGCDDCLAVCPWNKFAAEASGALYQSRVELNRPRLTDFAALDEAGFREVFAGSPIKRIGHARFLRNVLIAMGNSGVSELIPWVEARIDDPAPLVRGTAVWALSRLAPGRLAARAPARPDPDPQVAEEWRLALAETGGAARRA

SEQ ID NO: 74246 - protein, 356 aa, unidentified
  source 1..356: note = Albimonas pacifica
  REGION 1..356: note = tr|A0A1I3DW01|A0A1I3DW01_9RHOB Epoxyqueuosine reductase OS=Albimonas pacifica OX=1114924; GN = SAMN05216258_10341 PE=4 SV=1
MGFGVCRADALGPGGGETAARLRRFLAEGAHGDMDWMEARAAWRGDPKTLWPEARSIVMLAESYAPAENPLHLLEMPERASVSVYARGPDYHDKVKGKLKRLARWAAERTGQPVKVFVDTAPVMEKPLAQAAGLGWQGKHTNLLGREIGNWVFLGAIFLAAELPPDAAETEHCGSCRRCLDICPTNAFPAPFRLDARRCISYLTIELKGPIPREMRPLIGNRIYGCDDCLAVCPWNKFAVEAGTLYQSRVELNRPRLADFAALDDAAFREVFRGSPIKRIGRGRFLRNVMVAVGNSGLAEMIPVAEARLDDPEPLVRGHAVWALSRLSPARLRARAEGRAPDPDPFVAQEWRAALA

SEQ ID NO: 74247 - protein, 351 aa, unidentified
  source 1..351: note = Alcanivoracaceae bacterium
  REGION 1..351: note = tr|A0A2E2DMI8|A0A2E2DMI8_9GAMM Epoxyqueuosine reductase OS=Alcanivoracaceae bacterium OX=2024895 GN=queG; PE = 3 SV=1
MDFQQLKENIQQWGRELGFQQIGIADTDLSAAEADLKTWLAKGYQGQMQWMSAHGDKRFRPEALEPGTLRVISARMDYLPPDTQPVKMLGEKNKAYVSRYALGRDYHKLIRKRLATLAARIRAEVGDSELARAFVDSAPVMEKPLAAKAGLGWQGKHTLVLNREAGSWFFLGEIYTDIPLPVDQPGEDHCGKCKACITVCPTDAIVAPYQLDARRCISYLTIEHDGSIPEDLRRGIGNRIFGCDDCQLMCPWNRFARHTGETDFHPRHGLGDSDLVTLFRWNEADFLERTAGSAIRRAGYAKWLRNIAVALGNAPTSPDIILALKERLDYPDETVQEHVQWALEQHRTPKP

SEQ ID NO: 74248 - protein, 364 aa, unidentified
  source 1..364: note = Alcanivoracaceae bacterium
  REGION 1..364: note = tr|A0A3L8AYM7|A0A3L8AYM7_9GAMM Epoxyqueuosine reductase OS=Alcanivoracaceae bacterium GenoA1_TS13_700; OX = 2072747 GN=queG PE=3 SV=1
MSHDTGGSLDYQALADKIRQWGKELGFQQIAIADVALDDHEQHLQQWLAAGFHGEMDYMARHGSKRSRPQELLPGTLRVISARMDYLPPDTGMVDVLNDPTKGFISRYTLGRDYHKLIRKRLAQLGKHIEAEVGPYGYRAFVDSAPVLEKALAAKAGLGWIGKHTLLLDRSAGSWFFLGEIYVDLPLPTDPPLSGHCGTCTACLDVCPTQAIVAPYQLDSRKCISYLTIELHGPIPEPLRAPMGNRVFGCDDCQLVCPWNRFAKFTQEPDFLPRHHLHNRSLVELFLWDEDTFLRNTEGSAIRRIGYLRWLRNLAVGLGNAPTSAAVVDALKTRAQHESELVREHVQWALQRHHDNPRIDLRSE

SEQ ID NO: 74249 - protein, 349 aa, Alcanivorax borkumensis
  REGION 1..349: note = tr|Q0VME1|Q0VME1_ALCBS Epoxyqueuosine reductase; OS = Alcanivorax borkumensis (strain ATCC 700651 / DSM 11573 / NCIMB 13689 / SK2) OX=393595 GN=queG PE=3 SV=1
MDLNQLKEQIQQWGRELGFQQIGIADTDLHAEEVQLKAWLAKGYQGQMNWMSAHGNKRFRPGELEPGTLRVISARMDYLPPGTQPVKLLQQKDKAYVSRYALGRDYHKLIRKRLAILAGRIREAVADSELARAFVDSAPVMEKPLAAKAGLGWQGKHTLVLNREAGSWFFLGEIYTDIALPVDSPGEDHCGKCKACITVCPTDAIVAPYELDARRCISYLTIEHEGSIPEDLRKGIGNRIFGCDDCQLMCPWNRFAQHTEESDFQPRHGLGDSDLVALFSWSEEAFLERTAGSAIRRAGYLKWLRNIAVALGNAPTTEGIVQALKDKLDYPDETVREHVRWALEQHQAS

SEQ ID NO: 74250 - protein, 348 aa, Alcanivorax dieselolei
  REGION 1..348: note = tr|K0CBI4|K0CBI4_ALCDB Epoxyqueuosine reductase; OS = Alcanivorax dieselolei (strain DSM 16502 / CGMCC 1.3690 / B-5) OX=930169 GN=queG PE=3 SV=1
MDFTHFKTQLAEQARLLGFQQLGVADIDLGEAETRLRRWLDAGYHGEMKWMEAHGHKRSRPQELEPGTLRVISLRMNYLPPDTQPVKLLKQGEKAYVSRYALGRDYHKLVRKRLATLARWIREQVSDSELARAFVDSAPVMEKPLAAKAGLGWQGKHTLLLNREAGSWFFLGEIYTDLPLPVDQPVEDRCGKCSACMTVCPTDAIVAPYQLDARRCISYLTIEHPGSIPEALRAGIGNRIFGCDDCQLMCPWNRFAQFTGEHDFQPRHQLENSDLVTLFLWDEATFLRCTEGSPIRRAGYQRWLRNLAVALGNGPASTEAIGALRSRRDDPSELVREHVNWALHRLLA

SEQ ID NO: 74251 - protein, 351 aa, Alcanivorax hongdengensis
  REGION 1..351: note = tr|L0WG25|L0WG25_9GAMM Epoxyqueuosine reductase; OS = Alcanivorax hongdengensis A-11-3 OX=1177179 GN=queG; PE = 3 SV=1
MDLVELKQQIQQWGRELGFQQIGVADIDLADAEQQLKDWLANGYQGDMDWMAAHGNKRSRPAELEPGTLRVISARMDYLPPDTQPVKILQQKDKAYVSRYALGRDYHKLIRKRLAQLGARIREAVADSELARAFVDSAPVMEKPLAAKAGLGWQGKHTLLLNREAGSWFFLGEIYTDLPLPVDAPGEDHCGKCRACITVCPTDAIVAPYQLDARRCISYLTIEHDGSIPEDLREGIGNRIFGCDDCQLMCPWNRYSQHSGESDFHPRHGLGDSDLVTLFGWSEAQFLERTAGSAIRRAGYHKWLRNIAVALGNAPYSEDIVAALKARSEYPDETVREHVAWALKKQHASVI

SEQ ID NO: 74252 - protein, 349 aa, Alcanivorax jadensis
  REGION 1..349: note = tr|A0A095TIV6|A0A095TIV6_9GAMM Epoxyqueuosine reductase OS=Alcanivorax jadensis T9 OX=1177181 GN=queG; PE = 3 SV=1
MDLQALKEKIQLWGRELGFQQIGIADTDLRAAEADLKAWLEKGYQGQMKWMAAHGNKRYRPEELEPGTLRVISARMDYLPPDTQPVKILQQKDKAYVSRYALGRDYHKLIRKRLAILAARIREEVADSELARAFVDSAPVMEKPLAAKAGLGWQGKHTLVLNREAGSWFFLGEIYTDIPLPVDQPGEDHCGKCRACITVCPTDAIVAPYELDARRCISYLTIEHEGSIPEDLREGIGNRIFGCDDCQLMCPWNRFAQHTGEGDFHPRHGLGDSDLVTLFSWSEEEFLERTAGSAIRRAGYRKWLRNIAVALGNAPGSEEIVQALRDRRDFPDETVQEHVCWALERHTQT

SEQ ID NO: 74253 - protein, 348 aa, unidentified
  source 1..348: note = Alcanivorax nanhaiticus
  REGION 1..348: note = tr|A0A095SI94|A0A095SI94_9GAMM Epoxyqueuosine reductase OS=Alcanivorax nanhaiticus OX=1177154 GN=queG; PE = 3 SV=1
MDLHQLKDKIQQWGRELGFQQIGIADTDLSIAEADLKAWLAKGYQGQMEWMAAHGNKRFRPEELEPGTLRVISARMDYLPPDTQPVKMLQEKDKAYVSRYALGRDYHKLIRKRLATLASRIREEVADSQLARAFVDSAPVMEKPLAAKAGLGWQGKHTLVLNREAGSWFFLGEIYTDIPLPVDTPGEDHCGKCKACITVCPTDAIVAPYQLDARRCISYLTIEHDGSIPEDLRPGIGNRIFGCDDCQLMCPWNRFAQHTGETDFHPRHGLGDSDLVTLFGWNEEEFLERTAGSAIRRAGYEKWLRNIAVALGNAPTSEGVILALNARRNHPDETVQEHVQWALEQHQG

SEQ ID NO: 74254 - protein, 340 aa, Alcanivorax pacificus
  REGION 1..340: note = tr|A0A0B4XMJ4|A0A0B4XMJ4_9GAMM Epoxyqueuosine reductase OS=Alcanivorax pacificus W11-5 OX=391936 GN=queG; PE = 3 SV=1
MHIKTWGRELGFQQVGIADTDLSAAEAQLKAWLAAGYHGGMDWMLAHGDKRSRPAQLEPGTLRVISVRMDYLPPDTAPIKRLKQGEKAYISRYALGRDYHKLIRKRLARLAEQIRDAASDAGLARAFVDSAPVLEKPLAAKAGLGWQGKHTLILNRQAGSWFFLGEIYTDLPLPVDAPVTSHCGSCSACIDVCPTDAIVAPYQLDARRCISYLTIEHKGDIPEALRAPIGNRIFGCDDCQLVCPWNRYARHTGETDFHPRHQLDDVALVTLFNWSEEEFLRNTEGSAIRRTGYENWLRNIAVALGNGPASEVAIAALTRRLEHPSAMVVRHVRWALAQLA

SEQ ID NO: 74255 - protein, 349 aa, unidentified
  source 1..349: note = Alcanivorax profundi
  REGION 1..349: note = tr|A0A418XY36|A0A418XY36_9GAMM Epoxyqueuosine reductase OS=Alcanivorax profundi OX=2338368 GN=queG PE=3; SV = 1
MDLQQLKENIQQWGRELGFQQIGIADTDLSAAEADLKAWLAKGYQGQMQWMSAHGDKRFRPEALEPGTLRVISARMDYLPPDTQPVKMLGEKDKAYVSRYALGRDYHKLIRKRLATLAARIRAEVGDSELARAFVDSAPVMEKPLAAKAGLGWQGKHTLVLNREAGSWFFLGEIYTDIPLPVDQPGEDHCGKCKACITVCPTDAIVAPYQLDARRCISYLTIEHDGSIPEDLRRGIGNRIFGCDDCQLMCPWNRFARHTGETDFHPRHGLGDSDLVTLFRWNEADFLERTAGSAIRRAGYAKWLRNIAVALGNAPTSPDIILALKERLDYPDETVQEHVQWALEQHRTP

SEQ ID NO: 74256 - protein, 73 aa, Alcanivorax sp.
  REGION 1..73: note = tr|A0A3C1HSJ6|A0A3C1HSJ6_9GAMM tRNA epoxyqueuosine(34) reductase QueG (Fragment); OS = Alcanivorax sp. OX=1872427 GN=DCQ09_15375 PE=4 SV=1
WMAAHGNKRSRPAELEPDTVRVLSLRMDYLPPDTQPVKVLQQKEKAYVSRYALGRDYHKLVRKRLARLAALIR

SEQ ID NO: 74257 - protein, 352 aa, Alcanivorax sp.
  REGION 1..352: note = tr|A0A220SPR6|A0A220SPR6_9GAMM Epoxyqueuosine reductase OS=Alcanivorax sp. N3-2A OX=2014542 GN=queG PE=3; SV = 1
MDLADLKQRIADQALTLGFQQMGVADIDLSQAEQRLQQWLEAGHQGEMHWMAAHDGKRSRPAQLEPGTLRVLSFRMDYLPPDTQPVKVLRQKEKAYLSRYALGRDYHKLIRKRLARLAGWIREQAQESGLARAFVDSAPVMEKPLAAKAGLGWQGKHTLLLNREAGSWFFLGEIYTDLPLPIDAPGEDHCGKCSACMTVCPTDAIVAPYQLDARRCISYLTIEHPGPIPEPLRPGIGNRVFGCDDCQLMCPWNRFASHTGEHAFHPRHGLDDQELVSLFLWDEATFLARTEGSAIRRAGFERWLRNLAVALGNGPASARALAALRQRRHHPSALVREHVEWALARLEPAFPL

SEQ ID NO: 74258 - protein, 307 aa, unidentified
  source 1..307: note = Algibacter alginicilyticus
  REGION 1..307: note = tr|A0A0P0CZC7|A0A0P0CZC7_9FLAO Epoxyqueuosine reductase OS=Algibacter alginicilyticus OX=1736674 GN=queG; PE = 3 SV=1
MDNKSNRTKLIKKEAKRLGFLSCGISKAAFLEEEAPRLEKWLNHSMNGKMQYMENHFDKRLDPTKLVEGSKSVISLLLNYFPSEVQKFDSFKLSKYAYGTDYHFVIKDKLKSLLNFIQDEIGEVHGRAFVDSAPVLDKAWAAKSGLGWIGKHSNLLTQQVGSFYFIAELIIDLDLEYDSVTTDHCGTCTACIDACPTQAITEPYVVDGSKCISYLTIELKENIPSEFKGKMDDWMFGCDVCQDVCPWNRFSKIHNEPLFNPHPELLSITKKDWEEITEATFKKVFKKSAVKRTKFEGLKRNIKFLNS

SEQ ID NO: 74259 - protein, 307 aa, unidentified
  source 1..307: note = Algibacter amylolyticus
  REGION 1..307: note = tr|A0A556QZK9|A0A556QZK9_9FLAO Epoxyqueuosine reductase OS=Algibacter amylolyticus OX=1608400 GN=queG; PE = 3 SV=1
MIDNKSKYTQLIKSEAKRLGFLSCGISKAGFLEAEAPRLEKWLNKNMNGQMQYMENHFDKRLDPTKLVEDSKSVVSLLLNYYPSENQSKKAFKISKYAYGTDYHFVIKDKLKSLLHFIQDEIGEVHGRAFVDSAPVLDKAWAAKSGLGWIGKHSNLLTQQVGSFYFIAELIIDLDLEYDSITSDHCGTCTACIDACPTQAITEPYVVDGSKCISYFTIELKENIPTEFKGKMDDWMFGCDVCQDVCPWNRFSKPHNEPLFNPHPELLQMTKKDWEEVTQETFSKVFQKSAVKRTKFSGLKRNIEFLK

SEQ ID NO: 74260 - protein, 309 aa, unidentified
  source 1..309: note = Algibacter aquaticus
  REGION 1..309: note = tr|A0A1E5TCT5|A0A1E5TCT5_9FLAO Epoxyqueuosine reductase OS=Algibacter aquaticus OX=1849968 GN=queG PE=3; SV = 1
MINSKSDNAKLIKEEAKRLGFLSCGISKSQFLEEEAPRLEKWLNKNMNGQMQYMENHFDKRLDPTKLVEDSKSVISLLLNYYPQEKQQDITAPKISKYAYGRDYHFVIKDKLKSLLNFIQEEIGEVHGRAFVDSAPVLDKAWAAKSGLGWIGKHSNLLTQQVGSFYFIAELIVDLDLEYDSATTDHCGTCTACIDACPTQAIVEPYVVDGSKCISYFTIELKENIPTEFKGKMDDWMFGCDVCQDVCPWNRFSKTHNEPLFNPHPELLSITKKDWEEITEDTFRKVFKNSAVKRTKYSGLKRNINFLKD

SEQ ID NO: 74261 - protein, 132 aa, Algibacter lectus
  REGION 1..132: note = tr|A0A090WTQ7|A0A090WTQ7_9FLAO Epoxyqueuosine (OQ) reductase queG OS=Algibacter lectus OX=221126; GN = JCM19274_3015 PE=4 SV=1
MEYDSATTDHCGSCTACIDACPTEAIVEPYVVDGSKCISYLTIELKENLPPSFKGKMDDWMFGCDVCQDVCPWNRFSKAHSEPLFNPHPELLSMTKKDWEEITEDTFKKVFQKSAVKRTKFAGLKRNINFLK

SEQ ID NO: 74262 - protein, 306 aa, Algibacter lectus
  REGION 1..306: note = tr|A0A090VHR8|A0A090VHR8_9FLAO Epoxyqueuosine reductase OS=Algibacter lectus OX=221126 GN=queG PE=3 SV=1
MNKEDYTLLIKTEAKRLGFLSCGISKAQFLEEEAPRLENYLNKNMNGQMRYMENHFDKRLNPTLLVEDSKSVVSLLLNYFPSEVQQDTSAPKLSKYAYGHDYHHIIKDKLKHLLHFIQDEIGEVSGRAFVDSAPVLDKAWAAKSGLGWVGKHSNLITQKVGSFYFIAELIIDLELEYDSATTDHCGSCTACIDACPTEAIVEPYVVDGSKCISYLTIELKENLPPSFKGKMDDWMFGCDVCQDVCPWNRFSKAHSEPLFNPHPELLSMTKKDWEEITEDTFKKVFQKSAVKRTKFAGLKRNINFLK

SEQ ID NO: 74263 - protein, 308 aa, unidentified
  source 1..308: note = Algibacter pectinivorans
  REGION 1..308: note = tr|A0A1I1MS74|A0A1I1MS74_9FLAO Epoxyqueuosine reductase OS=Algibacter pectinivorans OX=870482 GN=queG; PE = 3 SV=1
MINNKAKYSNFIKAEAKRLGFLSCGISKAGFLEEEAPRLEKWLNNNMNGQMQYMENHFDKRLDPTKLVEDSKSVISLLLNYYPAEEQNSNSFKISKYAYGADYHFVIKDKLKSLLHVIQDEIGEVHGRAFVDSAPVLDKAWAAKSGLGWIGKHSNLLTQQVGSFYFIAELIIDLDLEYDSVTTDHCGTCTACIDACPTQAITEPYVVDGSKCISYFTIELKENIPTEFKGKMDNWMFGCDVCQDVCPWNRFSKPHNEPLFNPHPDLLEMTRKDWEEVTQETFSKVFQKSAVKRTKFSGLKRNIDFLKT

SEQ ID NO: 74264 - protein, 309 aa, Algibacter sp.
  REGION 1..309: note = tr|A0A2N0J966|A0A2N0J966_9FLAO Epoxyqueuosine reductase OS=Algibacter sp. RHA_19 OX=1798237 GN=queG PE=3; SV = 1
MLPIVHKENATTLIKEEAKRLGFISCGVSKAEFLEEEAPRLESWLNKNMNGQMSYMENHFDKRLDPTKLVDGSKSVISLLLNYYPEATQNDDALKISKYAYGQDYHHVIKSKLRALQEFITDNIGEVEGRAFVDSAPVLDKAWAAKSGLGWIGKNSNLITQRVGSFYFIAELIVDIELAYDSAVTDHCGTCTACIDACPTQAIVDPYVVDGSKCISYFTIELKNEIPAEVRGKFDDWIFGCDVCQDVCPWNKFSKPHNEPLFNPHPDLLSMTKKDWEEITEDVFRKVFKKSAVKRTKFSGLQRNIDFLE

SEQ ID NO: 74265 - protein, 307 aa, Algibacter sp.
  REGION 1..307: note = tr|A0A2U2XA04|A0A2U2XA04_9FLAO Epoxyqueuosine reductase OS=Algibacter sp. ZY111 OX=2100723 GN=queG PE=3; SV = 1
MEAKSKYTELIKTEAKRLGFLSCGISKAEFLEEEAPRLEKWLNNNMHGQMHYMENHFDKRLDPTLLVEGSKSVVSLLLNYFPSEEQNKDSFKISKYAFGTDYHFVIKDKLKSLLHFIQDEIGDVHGRAFVDSAPVLDKAWAAKSGLGWIGKHSNLLSQQVGSFYFIAELIIDLELEYDTPVTDHCGTCTACIDACPTEAITEPYVVDGSKCISYFTIELKENIPSGFKGQLDDWMFGCDVCQDVCPWNRFSKSHSEPLFNPNPELLSMTKKDWEEITEDTFRKVFKKSAVKRTKFSGLKRNINFLKD

SEQ ID NO: 74266 - protein, 306 aa, unidentified; identical to SEQ ID NO: 74262
  source 1..306: note = Algibacter wandonensis
  REGION 1..306: note = tr|A0A4R8MFR0|A0A4R8MFR0_9FLAO Epoxyqueuosine reductase OS=Algibacter wandonensis OX=1343161 GN=queG; PE = 3 SV=1

SEQ ID NO: 74267 - protein, 313 aa, Algoriphagus alkaliphilus
  REGION 1..313: note = tr|A0A1G5ZQI7|A0A1G5ZQI7_9BACT Epoxyqueuosine reductase OS=Algoriphagus alkaliphilus OX=279824 GN=queG; PE = 3 SV=1
MTPADKHASILKSTAKRLGFDFCGIAKAELLESEAPRLEDWLNRNYHGKMGYLANHFDKRLDPTKLVEGAKTVVSLIYNYYPEKQLPHQSEDIKLAKYAYGEDYHDVIRARLTEFLEVLREEIGEIGGRFFVDSAPIMERQWAQKAGLGWIGKNSLLLNREMGSFFFLAELIIDLEATPDAPLAKDYCGTCTACIDACPTDAIVQPGVVDGSRCISYLTIELKEAIPDEFAGKMENWAFGCDICQDVCPWNRFSRPNREPAFQPDAELANFSNKEWIEMTEETFKRVFSKSAVKRTKFVGLKRNVDFLVSNSF

SEQ ID NO: 74268 - protein, 324 aa, Algoriphagus antarcticus
  REGION 1..324: note = tr|A0A3E0DWY5|A0A3E0DWY5_9BACT Epoxyqueuosine reductase OS=Algoriphagus antarcticus OX=238540 GN=queG; PE = 3 SV=1
MSVEKIKDVYLYPMAPAENNASIIKSTAKRLGFDFCGIAKAGFLEEEAPRLEDWLNRNYNGEMGYLSNHFDKRLDPTKLVEGAKTVVSLVYNYYPSNELPAEKSDIKLAKYAYGEDYHFVIRDKLNEFLEILREEIGEIDGRGFVDSAPVMERQWAQKAGLGWLGKNSLLLNREMGSFFFLSELIIDLEVAPDTPLAKDYCGTCTACIDACPTDAIVDNGVIDASRCISYLTIELKEAIPNEFKGKMENWVFGCDICQDVCPWNRFSKPHQEPRFQPNDELKELSKSDWQEITEETFGKVFKKSAVKRTKLAGLKRNVDFLTSN

SEQ ID NO: 74269 - protein, 313 aa, Algoriphagus aquaeductus
  REGION 1..313: note = tr|A0A326S4T4|A0A326S4T4_9BACT Epoxyqueuosine reductase OS=Algoriphagus aquaeductus OX=475299 GN=queG; PE = 3 SV=1
MSPAEKHAKILKSTAKRLGFDFCGIAKAEFLESEAPRLEEWLNRNYQGKMAYLANHFDKRLDPTKLVEGAKTVVSLIYNYYPEKQLSHQPEDLKLAKYAYGQDYHDVIRAKLTEFLEVIREEIGEINGRSFVDSAPVMERQWAQRAGLGWIGKNSLLLNRQMGSFFFLAELIIDLEATPDTALAKDYCGTCTACMDACPTDAIVQPEVIDASKCISYLTIELKEAIPNEFAGKMENWVFGCDICQDVCPWNRFSRTHQEPAFQPNPELSQFTNLEWIEMTEETFKRVFAKSAVKRTKFSGIKRNVDFLKNGLA

SEQ ID NO: 74270 - protein, 311 aa, Algoriphagus aquimarinus
  REGION 1..311: note = tr|A0A5C7B2C3|A0A5C7B2C3_9BACT Epoxyqueuosine reductase OS=Algoriphagus aquimarinus OX=237018 GN=queG; PE = 3 SV=1
MTPAEKNASIIKSTAKRLGFDFCGIAKAGFLEEEAPKLEEWLNRNYNGEMGYLANHFDKRLDPTKLVEGAKTVVSLIYNYYPEQKLPETSNSIKLAKYAYGEDYHFVIRDKLNEFLEILRDEIGEIDGRGFVDSAPVMERQWAQKAGLGWLGKNSLLLNREIGSFFFLAELIIDLEVIPDTPLAKDYCGTCTACIDACPTDAIVDNGVIDGSRCISYLTIELKDAIPIEFKSQMENWAFGCDICQDVCPWNRFSKPHQEPKFQPHPELAEFTNRDWQEITEETFRKVFKKSAVKRTKLAGLKRNVDFLTSK

SEQ ID NO: 74271 - protein, 311 aa, Algoriphagus aquimarinus
  REGION 1..311: note = tr|A0A1I0VSP4|A0A1I0VSP4_9BACT Epoxyqueuosine reductase OS=Algoriphagus aquimarinus OX=237018 GN=queG; PE = 3 SV=1
MTPAEKNASIIKTTAKRLGFDFCGIAKAGFLEEEAPKLEEWLNRNYNGEMGYLANHFDKRLDPTKLVEGAKTVVSLVYNYYPEEKLPSGNSDIKLAKYAYGEDYHFVIRDKLNEFLEILRAEIGEIDGRGFVDSAPVMERQWAQKAGLGWLGKNSLLLNKQQGSFFFLSELIIDLEVAPDTPLTKDYCGTCTACIDACPTDAIVDNGVIDGSRCISYLTIELKDAIPTEFKGQMENWAFGCDICQDVCPWNRFSKPHQEPRFSPNEELKELSKTDWREITEETFRKVFKKSAVKRTKLAGLKRNVDFLTSN

SEQ ID NO: 74272 - protein, 312 aa, Algoriphagus boritolerans
  REGION 1..312: note = tr|A0A1H5V7Y3|A0A1H5V7Y3_9BACT Epoxyqueuosine reductase OS=Algoriphagus boritolerans DSM 17298 = JCM 18970 OX=1120964 GN=queG PE=3 SV=1
MTPADKHAQLIKSIAKRLGFDFCGIAKAEFLESEAPRLEEWLNRNYQGKMGYLANHFDKRLDPTKLVEGAKTVVSLIYNYYPEKQLPHQSEDIKLAKYAYGADYHDVIRTKLTEFLEVLREEIGEINGRSFVDSAPVMERQWAQKAGLGWIGKNSLLLNREMGSFFFLAELIIDLEVTPDLPLAKDYCGTCTACIDACPTDAIVQAGVVDASRCISYLTIELKEAIPDEFAGKMENWAFGCDICQDVCPWNRFSKPNREPAFQPKDELAGFSNRDWVEMTEETFKRVFAKSAVKRPKFLGIKRNVEFLSRPK

SEQ ID NO: 74273 - protein, 313 aa, unidentified
  source 1..313: note = Algoriphagus boseongensis
  REGION 1..313: note = tr|A0A4R6T6Y1|A0A4R6T6Y1_9BACT Epoxyqueuosine reductase OS=Algoriphagus boseongensis OX=1442587 GN=queG; PE = 3 SV=1
MSSAENHSLIIKSTAKRLGFDFCGIANAEFLESEAPRMEEWLNRNYHGKMAYLANHFDKRLDPTKLVEGAKTVVSLIYNYFPEKELPHQSEDFKLAKYAYGEDYHIVIRDKLNEFLEVLREEIGEINGRSFVDSAPVMERQWAQRAGLGWIGKNSLLLNREMGSFFFLADLIIDLEATPDTPLAKDYCGTCTACIDACPTDAIVQPEVIDASKCISYLTIELKEAIPDEFKGKMENWAFGCDICQDVCPWNRFSKPHQETRFSPNSELSAFTNKEWIEMTEETFKRVFSKSAVKRTKLSGIKRNVDFLQSKGL

SEQ ID NO: 74274 - protein, 311 aa, Algoriphagus chordae
  REGION 1..311: note = tr|A0A2W7QF88|A0A2W7QF88_9BACT Epoxyqueuosine reductase OS=Algoriphagus chordae OX=237019 GN=queG PE=3; SV = 1
MTPAEKNASIIKSTAKALGFDFCGIAKAGFLEEEAPLLEEWLNRSYNGQMGYLANHFDKRLDPTKLVEGAKTVVSLVYNYFPEQKLPESPDSIKLAKYAYGEDYHFVIREKLNEFLEILREEIGEIDGRGFVDSAPVMERQWAQKAGLGWLGKNSLLLNRDMGSFFFLSELIIDLEVTPDTPLAKDFCGTCTACIDACPTDAIVDNGVIDGSRCISYLTIELKDAIPSEFQGKMENWAFGCDICQDVCPWNRFSKPHQEPRFSPNEELKELSKTDWKEITEETFRKVFKKSAVKRTKLAGIKRNVDFLSSK

SEQ ID NO: 74275 - protein, 314 aa, Algoriphagus faecimaris
  REGION 1..314: note = tr|A0A1G6NUN3|A0A1G6NUN3_9BACT Epoxyqueuosine reductase OS=Algoriphagus faecimaris OX=686796 GN=queG; PE = 3 SV=1
MLSPSEKNAQLIKSTAAQLGFDFCGIAKAEFLEEEAPRLEEWLNRNYQGKMAYLANHFDKRLDPTKLVTGAQTVVSLIYNYYPHKKLPENPEDIKLAKYAYGEDYHFVIKEKLKTFLEILREKIGEIEGRAFVDSAPVMERQWAQKAGLGWIGKNSLLLNREMGSFFFLAELIIDLKVEPDSPLAKDYCGTCTACIDACPTDAIVQPGVVDGSRCISYLTIELKDAIPDEFQGKMENWAFGCDICQDVCPWNRFSRPHQEPAFAPPPDLQGFSKKDWVEMTEETFRKVFKKSAVKRTKFAGLKRNLQFIASNKS

SEQ ID NO: 74276 - protein, 312 aa, Algoriphagus halophilus
  REGION 1..312: note = tr|A0A1N6GGT7|A0A1N6GGT7_9BACT Epoxyqueuosine reductase OS=Algoriphagus halophilus OX=226505 GN=queG; PE = 3 SV=1
MTPAEKHASLIKSIANRLGFDFCGIAKAGFLEEEAPRLEEWLSRNYQGEMGYLANHFDKRLDPTKLVEGAKTVVSLVYNYYPETSLPESPESIKLAKYAYGEDYHFVIKDKLKDFLEILRNEIGEIEGRAFVDSAPVMERQWAQKAGLGWIGKNSLLLNKKQGSFFFLAELIIDLEVTPDTPLTKDYCGTCTACIDACPTDAIVQPSVVDGSRCISYLTIELKDAIPNEFKGKMDNWAFGCDICQDVCPWNRFSKPHQESKFKPHPDLEGFTNQDWLELTDETFRKVFKKSAVKRTKFAGLKRNVEFLRSKE

SEQ ID NO: 74277 - protein, 314 aa, Algoriphagus hitonicola
  REGION 1..314: note = tr|A0A1I2QRV7|A0A1I2QRV7_9BACT Epoxyqueuosine reductase OS=Algoriphagus hitonicola OX=435880 GN=queG; PE = 3 SV=1
MNSIQKHAQLIKSTAAQLGFDFCGIAKADFLEEEVPRLEEWLNRNYHGQMAYLANHFDKRLDPTKLVPGAKTVVSLIYNYFPEKKLPEKAEDIKLAKYAYGQDYHFVIKDKLKTFLEILREEIGEIEGRVFVDSAPVMERQWAQKSGIGWVGKNSLLLNREMGSFFFLAELIIDLEATPDIPLAKDYCGTCTACIDACPTDAIVQPGVVDGSRCISYLTIELKDAIPNEFQGKMKNWTFGCDICQDVCPWNRFSRPHQEPAFDLHPDLKEFTNKDWIEMTEETFRKVFKKSAVKRAGFPKLKTTLSFFKNEGSS

SEQ ID NO: 74278 - protein, 311 aa, Algoriphagus locisalis
  REGION 1..311: note = tr|A0A1I7DD46|A0A1I7DD46_9BACT Epoxyqueuosine reductase OS=Algoriphagus locisalis OX=305507 GN=queG PE=3; SV = 1
MTPAETNASLIKSTAKRLGFDFCGVAKAGFLEEEAPRLEDWLNGNYNGEMGYLANHFDKRLDPTKLVEGAKTVVSLVYNYYPEEKLSSESSDIKLAKYAYGEDYHFVIRDKLNEFLEILREEIGEIDGRGFVDSAPVMERQWAQKAGLGWLGKNSLLLNREMGSFFFLAELIIDLEVTPDIPLAKDYCGTCTACVDACPTNAIVENGVVDGSRCISYLTIELKDSIPNQFKGQMENWAFGCDICQDVCPWNRFSKPHQEPRFQAHPELAGFSNRDWQEITEETFRKVFKKSAVKRTKLAGLKRNVDFLKSN

SEQ ID NO: 74279 - protein, 311 aa, unidentified
  source 1..311: note = Algoriphagus machipongonensis
  REGION 1..311: note = tr|A3HU74|A3HU74_9BACT Epoxyqueuosine reductase; OS = Algoriphagus machipongonensis OX=388413 GN=queG PE=3; SV = 1
MTSAERHASFIKSTAKRLGFDFCGIAKAEFLEEEAPRLEEWLSRNYNGEMGYLANHFDKRLDPTKLVEGAKTVVSMVYNYYPEKKLPESSEDIKLAKYAYGEDYHFVIREKLNEFLKILREEIGEIDGRGFVDSAPVMERQWAKKAGLGWLGKNSLLLNRQMGSFFFLAELIIDLEVTPDTPLAKDYCGTCTACIDACPTDAIVDHGVIDGSKCISYLTIELKDAIPSEFQGKMENWAFGCDICQDVCPWNRFSKPHQEAKFQPHPELAEFTHRDWQEITEETFRKVFKKSAVKRTKLAGLKRNVDFLKSK

SEQ ID NO: 74280 - protein, 313 aa, Algoriphagus marincola
  REGION 1..313: note = tr|A0A0P7XHB5|A0A0P7XHB5_9BACT Epoxyqueuosine reductase OS=Algoriphagus marincola HL-49 OX=1305737; GN = queG PE=3 SV=1
MNSTQKHAQTIKSTAKRLGFDFCGISKAEFLEEEAPRLEDWLNRNYQGQMAYLANHFDKRLDPCKLVPGAQTVVSLIYNYFPEKKLPEKAEDIKLAKYAYGQDYHFVIKEKLKTFLEILREEIGEIEGRVFVDSAPVMERQWAQKAGLGWIGKNSLLLNREMGSFFFLAELIIDLEVEPDSPIAKDYCGTCTACIDACPTDAIVQPGVVDGSRCISYLTIELKDSIPNEFRDKMENWAFGCDICQDVCPWNRFSRPHQEPAFDLHPDLKDFTKKDWIEMTEETFRKVFKKSAVKRTKFVGLKRNIEFLKEKNP

SEQ ID NO: 74281 - protein, 313 aa, Algoriphagus ornithinivorans
  REGION 1..313: note = tr|A0A1I5G8A7|A0A1I5G8A7_9BACT Epoxyqueuosine reductase OS=Algoriphagus ornithinivorans OX=226506; GN = queG PE=3 SV=1
MSPSFKYAQFIKSTAKHLGFDFCGIAKAEFLEEEAPRLEEWLNRNYQGQMAYLANHFDKRLDPTKLVPSAKTVISLIYNYYPEHKLPEKPEDIKLAKYAYGEDYHFVIKDKLKTFLEILRREIGEIEGRVFVDSAPVMERQWAHKAGLGWVGKNSLLLNRKMGSFFFLAELIIDLEVVPDVPLAKDYCGTCTACIDACPTDAIVQPGVVDGSRCISYLTIELKEAIPSEFKGKMENWAFGCDICQDVCPWNRFSKPHQEPKFDPHSDLKDYSKKDWIEMTEETFQKVFKKSPLKRTKFAGLKRNLEFIQSKPS

SEQ ID NO: 74282 - protein, 311 aa, Algoriphagus ratkowskyi
  REGION 1..311: note = tr|A0A2W7RHQ4|A0A2W7RHQ4_9BACT Epoxyqueuosine reductase OS=Algoriphagus ratkowskyi OX=57028 GN=queG PE=3; SV = 1
MTSAEKNASIIKSTAKRLGFDFCGIAKAGFLEEEAPKLEDWLNRNYNGEMGYLANHFDKRLDPTKLVEGAKTVVSLIYNYYPAEELQSESSAIKLAKYAYGEDYHFVIRDKLNEFLEILRDEIGEIDGRSFVDSAPVMERQWAQKAGLGWLGKNSLLLNRKQGSFFFLSELIIDLEVSPDTPLAKDYCGTCTACIDACPTDAIVGNGVIDGSRCISYLTIELKDAIPDVFKGKMENWAFGCDICQDVCPWNRFSKPNQEPRFQPSDELKELTKSDWKEITEETFRRVFKKSAVKRTKLVGLNRNIDFLNSK

SEQ ID NO: 74283 - protein, 313 aa, Algoriphagus sp.
  REGION 1..313: note = tr|A0A2D8CAL9|A0A2D8CAL9_9BACT Epoxyqueuosine reductase OS=Algoriphagus sp. OX=1872435 GN=queG PE=3 SV=1
MSPSLKYAQFIKSTAKQLGFDFCGIAKAEFLEEEAPRLEEWLNRNYQGQMAYLANHFDKRLDPTKLVPGAQTVISLIYNYYPAHKLPEKPEDIKLAKYAYGEDYHFVIKDKLKTFLEVLREEIGEIEGRVFVDSAPVMERQWAQKAGLGWIGKNSLLLNRKMGSFFFLAELIIDLEVEPDLPLAKDYCGTCTACIDACPTDAIVQPGVVDGSRCISYLTIELKEAIPAEFKGKMENWAFGCDICQDVCPWNRFSKPHQEPKFDPHSDLKDYSKKDWIEMTEETFQKVFKKSPLKRTKFAGLKRNLEFIQSKPS

SEQ ID NO: 74284 - protein, 313 aa, Algoriphagus sp.
  REGION 1..313: note = tr|A0A4Y9QVS2|A0A4Y9QVS2_9BACT Epoxyqueuosine reductase OS=Algoriphagus sp. XY-J91 OX=2562278 GN=queG; PE = 3 SV=1
MSSADQHNAILKKIARQLGFDFCGIAKAEFLEEEAPRLEEWLNRNYQGQMSYLANHFDKRLDPTKLVPGAKTVVSLIYNYYPEKKLPENSESIKLAKYAYGEDYHLVIKEKLKTFLEMLREQIGEIDGRVFVDSAPVMERQWAQKAGLGWIGKNSLLLNRKMGSFFFLAELIIDLEATPDTPLAKDYCGTCTACIDACPTDAIVQPGVVDGSRCISYLTIELKEAIPNEFKGQLENWAFGCDICQDVCPWNRFSKPHHEPAFLPHPDLEGFTNQDWIEMTEETFRKVFKKSAVKRTKFAGLKRNIEFIKSNKS

SEQ ID NO: 74285 - protein, 311 aa, Algoriphagus yeomjeoni
  REGION 1..311: note = tr|A0A327PRW1|A0A327PRW1_9BACT Epoxyqueuosine reductase OS=Algoriphagus yeomjeoni OX=291403 GN=queG PE=3; SV = 1
MTPAEKNAHLIKSAAKRLGFDFCGIAKAGFLEEEAPRLEEWLNRNYQGEMGYLANHFDKRLDPTKLVEGAKTVVSLIYNYYPEQKLPESSESIKLAKYAYGEDYHFVIRDKLNEFLEILRDEIGEIDGRGFVDSAPVMERQWAQKAGLGWLGKNSLLLNREMGSFFFLAELIIDLEVTPDTPLAKDYCGTCTACIDACPTDAINGDGVIDGSRCISYLTIELKDSIPSEFKNKMENWAFGCDICQDVCPWNRFSKPHQEPKFQPHPELAEFTNRDWQEITEETFRKVFKKSAVKRTKLAGLKRNVEFLKSK

SEQ ID NO: 74286 - protein, 312 aa, unidentified
  source 1..312: note = Algoriphagus zhangzhouensis
  REGION 1..312: note = tr|A0A1M7ZBD2|A0A1M7ZBD2_9BACT Epoxyqueuosine reductase OS=Algoriphagus zhangzhouensis OX=1073327; GN = queG PE=3 SV=1
MLSPEKNAQILKSIAQRLGFEACGIAKAGFLEEEAPRLENWLNQNYQGEMGYLANHFDKRLDPTKLVPGAKTVVSLIYNYYPENKLPEDTDSIKLAKYAYGEDYHFVIKDKLKTFIELIREEIGEVEGRAFVDSAPVMERQWAQKSGLGWLGKNSLLLNRKMGSFFFLAELIIDLEAQPDTPLSKDYCGTCTACVDACPTDAIAKAGVVDGSRCISYLTIELKDAIPSEFQGKMENWVFGCDICQDVCPWNRFSKPHSEPKFIPDPELRDFSNQDWIEMTEDTFRKVFKKSPLKRTKFAGLSRNIEFLISND

SEQ ID NO: 74287 - protein, 360 aa, Alicycliphilus denitrificans
  REGION 1..360: note = tr|A0A3R7EFU4|A0A3R7EFU4_9BURK Epoxyqueuosine reductase OS=Alicycliphilus denitrificans OX=179636; GN = queG PE=3 SV=1
MVCSSQLVPRIQGWARELGFSQIGVAGVDLSAAEPGLMQWLAEGFHGEMHYMAAHGLRRARPAELVPGTVSVITARMDYLPRTTPEGWQAVEFERLRRPQEAIVSVYARGRDYHKVLRARLQKLSDRIAEAVGPFGHRVFTDSAPVLEAELARRSGQGWRGKHTLVLSREAGSMFFLGEIYLDMALAPTEPVTAHCGSCQACMDVCPTQAIVAPHRVDARRCISYLTIEHAGPIPPALRPLMGNRIYGCDDCQLICPWNKFAQPSSLPDFDARAPLVGQQLVQLFAWDEATFLRMTEGGPIRRIGHERWLRNIAVALGNALRAARDAGEAGALRAALATRADDASALVREHVAWALAQGV

SEQ ID NO: 74288 - protein, 360 aa, Alicycliphilus denitrificans
  REGION 1..360: note = sp|F4G4E2|QUEG_ALIDK Epoxyqueuosine reductase; OS = Alicycliphilus denitrificans (strain DSM 14773 / CIP 107495 / K601) OX=596154 GN=queG PE=3 SV=2
MVCSSQLVPRIQGWARELGFSQIGVAGVDLSAAEPGLMQWLAEGFHGEMHYMAAHGLRRARPAELVPGTVSVITARMDYLPRTTPEGWQAVEFERLRRPQEAIVSVYARGRDYHKVLRARLQKLSDRIAEAVGPFGHRVFTDSAPVLEAELARRSGQGWRGKHTLVLSREAGSMFFLGEIYLDMALAPTEPVTAHCGSCQACMDVCPTQAIVAPHRVDARRCISYLTIEHAGPIPPALRPLMGNRIYGCDDCQLICPWNKFAQPSSLPDFDARAPLEGQQLAQLFAWDEAMFLRMTEGGPIRRIGHERWLRNIAVALGNALRATRDAGEAGALRAALATRANDASALVREHVAWALAQGI

SEQ ID NO: 74289 - protein, 358 aa, Alicycliphilus sp.
  REGION 1..358: note = tr|A0A5C8CXH3|A0A5C8CXH3_9BURK Epoxyqueuosine reductase OS=Alicycliphilus sp. OX=1872437 GN=queG PE=3; SV = 1
MVSSSQLVPQIRGWARELGFSQIGVAGVDLSAAEPGLMQWLAEGFHGEMHYMAAHGLRRARPAELVPGTVSVITARMDYLPRATPPGWQAVEFDRLTRPREAIVSVYARGRDYHKVLRARLQKLSERIAGAVGPFGHRVFTDSAPVLEAELARRSGQGWRGKHTLVLSREAGSMFFLGEIYLDMALAPTQPVTAHCGSCQACMDVCPTQAIIAPHRVDARRCISYLTIEHGGPIPEELRPLMGNRIYGCDDCQLICPWNKYAQASSLPDFDARAPLVGQQLVQLFAWDEATFLRQTEGGPIRRIGHERWLRNIAVALGNALRATGDERLRAALLARADDPSALVREHVAWALLEEKRP

SEQ ID NO: 74290 - protein, 336 aa, Alicycliphilus sp.
  REGION 1..336: note = tr|A0A0E9LQ21|A0A0E9LQ21_9BURK Epoxyqueuosine reductase OS=Alicycliphilus sp. B1 OX=1603291 GN=queG PE=3; SV = 1
MAGVDLSAAEPGLMQWLAEGFHGEMHYMAAHGLRRARPAELVPGTVSVITARMDYLPRTTPEGWQAVEFERLRRPQEAIVSVYARGRDYHKVLRARLQKLSDRIAEAVGPFGHRVFTDSAPVLEAELARRSGQGWRGKHTLVLSREAGSMFFLGEIYLDMALAPTEPVTAHCGSCQACMDVCPTQAIVAPHRVDARRCISYLTIEHAGPIPPALRPLMGNRIYGCDDCQLICPWNKFAQPSSLPDFDARAPLEGQQLAQLFAWDEAMFLRMTEGGPIRRIGHERWLRNIAVALGNALRATRDAGEAGALRAALATRANDASALVREHVAWALAQGI

SEQ ID NO: 74291 - protein, 425 aa, Alicyclobacillus acidocaldarius
  REGION 1..425: note = tr|F8ID72|F8ID72_ALIAT 4Fe-4S ferredoxin-type domain-containing protein OS=Alicyclobacillus acidocaldarius (strain Tc-4-1) OX=1048834 GN=TC41_0578; PE = 4 SV=1
MRRAGAERDPEVTGRDKLTLADIRPLAEEVGLPEIAATDASPFDELASPLADYEARGRTGFEWADAAERMDPRFWLPEAKSILTAALPYLTEEGARRMREHPRSEIRGQTSCYVYGEDYHRVLSDRLTALAGRIGNLVGREIRYRVAVDTSPLVDRRVAERSGLGWIGKNGMLFSPRYGSYVFLGALLIDVEIEDALHLPPAIGKHCGDCDLCMRACPTQAFVAPGELKATACLSYVTQMKGIIPRAYRKPLGRRVWGCDVCQQVCPLNRDRAHAEDPAFTPDAEAAYPDLVRLLGMSNRQFLRAYGRSAMAWRGVRTLQRNALVALGNLRRPEAVPIVARYLASDRAELRASAAWALGEIGGADALRALQAALAAEQDPDVQKEIEDAIANASRGGHDGSEEREQPGLGHRDGEHAGGGHVARR

SEQ ID NO: 74292 - protein, 414 aa, Alicyclobacillus acidocaldarius
  REGION 1..414: note = tr|C8WS72|C8WS72_ALIAD 4Fe-4S ferredoxin-type domain-containing protein OS=Alicyclobacillus acidocaldarius subsp. acidocaldarius (strain ATCC 27009 / DSM 446 / JCM 5 260 / NBRC 15652 / NCIMB 11725 / NRRL B-14509 /
MTGRDKLTLADIRPLAEEVGLPEIAATDASPFDDLARPLADYEARGRTGFEWADAAERMDPRFWLPEAKSILTAALPYLTEEGARRMREHPRSEICGQTSCYVYGEDYHRVLSDRLTALAGRIGNLVGREIRYRVAVDTSPLVDRRVAERSGLGWIGKNGMLFSPRYGSYVFLGALLIDVEIEDALHLPPAIGKHCGDCDLCMRACPTQAFVAPGELKATACLSYVTQMKGIIPRAYRKPLGRRVWGCDVCQQVCPLNRDRAHAEDPAFTPDAEAAYPDLVRLLGMSNRQFLRAYGRSAMAWRGVRTLQRNALVALGNLRRPEAVPIVARFLASDRVELRASAAWALGEIGGQDALRELRAAFASEQDPDVRKEMEDAIANAWGKACEGDEGRDETGSGYRDCDHPCRGDVAGR

SEQ ID NO: 74293 - protein, 384 aa, Alicyclobacillus acidoterrestris
  REGION 1..384: note = tr|A0A512CPK9|A0A512CPK9_9BACL Epoxyqueuosine reductase OS=Alicyclobacillus acidoterrestris OX=1450; GN = queG PE=4 SV=1
MSTELDIETLRELAQREGVLEVAVTDTAPFPELIPWLEAYEARGSTGFEVGEVAQRINPRLWMREAKSIIVIALPYLTEQGARTARSHPRGRRHGHTSHYTYGVDYHRVLAEKLHAIHRSMEVVVGHEIAMKLSIDTSPLVDRRLAERAGLGWIGKNAMFYSHRYGSYVFIGAMLVDLVIPPTAHQEAAVGALCGTCSRCLTACPTGAIVAPGVMDATRCLSYVTQMKGLIPVEFRDKLGRRVWGCDVCQSTCPINQNVEHSKENAFGPSQELAYPDLIELLQMSNRQFMRKYGHTAMAWRGLRTLQRNALIALGNAGDAAALAWMIPFLQNARVELRASAAWAIGKIGGPEAKEALLEALEEEADAQVMEELRNGLEACHERG

SEQ ID NO: 74294 - protein, 384 aa, Alicyclobacillus acidoterrestris
  REGION 1..384: note = tr|T0CZP2|T0CZP2_ALIAG 4Fe-4S ferredoxin-type domain-containing protein OS=Alicyclobacillus acidoterrestris (strain ATCC 49025 / DSM 3922 / CIP 106132 / NCIMB 13137/ GD3B) OX=1356854 GN=N007_01315 PE=4 SV=1
MSAELDIETLRELAKREGVLEVAVTDAAPFPELIPWLEAYEARGRTGFEVGEVALRINPRFWMHEARSIIVIALPYLTEQGAHTARSHPRGRRHGRTSHYTYGVDYHRVLAEKLRAIHRSMEAVVGHEIAMKLSIDTSPLVDRRLAERAGLGWIGKNAMFYSHRYGSYVFLGAMLVNLAIPPTAHQEAAVGALCGTCTRCLTACPTGAIVAPGVIDATRCLSYVTQMKGIIPVEFRDKLGRRVWGCDVCQSTCPINQNVEHSKEDAFGPSHELAYPDLIELLQMSNRQFMRKYGHTAMAWRGLRTLQRNALIALGNAGDAAALAWMIPFLHNARVELRASAAWAIGKIGGKEAKEALLHALDEEQDAQVMEELRNGLEACHERG

SEQ ID NO: 74295 - protein, 380 aa, Alicyclobacillus ferrooxydans
  REGION 1..380: note = tr|A0A0P9GW03|A0A0P9GW03_9BACL 4Fe-4S ferredoxin-type domain-containing protein; OS = Alicyclobacillus ferrooxydans OX=471514 GN=AN477_00435; PE = 4 SV=1
MAELSSHTLQRLGREAGFDAIGATSAKPFPELIPRLEDYEKRGRTGFEHADIAARVDPKTWFPPARSLISVAMAYLTDEGRKLARSHPQKGWHGHVTVYSYGEDYHQVMVAKMRHLVALIEAELGRKIESKTAIDTAPLVDRRVAERAGIGWVGKNCMFFTPQHGSFVFLGTLAVDIEVESVRTELEQKCGSCTLCLDACPTGALLAPGVIDATRCLSYITQMKGVIPREFRAALGKRVWGCDTCQWACPENKAVTGSGHGEYMPSSPAGELEFPDLAEVLSWTNRSFAKRYGHTAAAWRGLRTWQRNALIALGNTRSKEAVPLVTPFLNHERKELRISAIWALGRIGGEEARNALTLCLVDESDSEVIEELQLALQGEE

SEQ ID NO: 74296 - protein, 391 aa, Alicyclobacillus hesperidum
  REGION 1..391: note = tr|A0A1H2W9S8|A0A1H2W9S8_9BACL Epoxyqueuosine reductase OS=Alicyclobacillus hesperidum OX=89784; GN = SAMN04489725_11425 PE=4 SV=1
MTSSVQLTRQDIADMAAALHLPEIGVTDAQPFPELIAPLLAYEKRGRTGFEAGDLAARTQPSLWFPEAKSIVVAALPYMTPDGQALARSHPRGGLRGQASGYTYGQDYHEVLRDRLTQLQMAIAERLGRPVAGRIAVDTSPLVDRRVAERSGVGWVGKNGMLYSQRYGSYVFLGALLLDVEIADASAHPPAVGRHCGTCELCMTACPTGAIVGPGQLDATRCLSYITQMKGVIPRPFRKKMGRRVWGCDVCQTACPVNRLREAPDDSAFHPNAELAFPDLVELLQMSNRRFLRVYGETAMGWRGVRTLQRNALIALGNMGRVEAIPHIEPFLQSERAELRASAAWALGEIGGPDAVRLLLDARAVESDAQVQCEIADAIEAARKKTREREA

SEQ ID NO: 74297 - protein, 391 aa, Alicyclobacillus hesperidum; identical to SEQ ID NO: 74296
  REGION 1..391: note = tr|J9HPD6|J9HPD6_9BACL Uncharacterized protein; OS = Alicyclobacillus hesperidum URH17-3-68 OX=1200346; GN = URH17368_1163 PE=4 SV=1

SEQ ID NO: 74298 - protein, 378 aa, Alicyclobacillus macrosporangiidus
  REGION 1..378: note = tr|A0A1I7K358|A0A1I7K358_9BACL Epoxyqueuosine reductase OS=Alicyclobacillus macrosporangiidus OX=392015; GN = SAMN05421543_11364 PE=4 SV=1
MSELSLETLRALGREAGLDAVGATTADPFPEMAPRLEAYAARGRTGFEHDQVENRIDPRRWMPEARSLVAAAMAYLTPEGRQLARRHPRDPRRGVVSVYSYGEDYHNVLAKRLRRLAELMGAEVGRPVRYRIAVDTSPLVDRRVAERAGIGWVGKNCMLYSAEHGSFVFLGTLLTDVEVEPAQAMVPPKCGACTRCLEACPTGALMGPGVIDARRCLSYITQMKGIIPREFRIPMGRRVWGCDTCQWACPENRATGGASHAEYRPAEELAFPDLLEILSWSNRTFEHRLGHTAAAWRGLRTWQRNALIALGNCRDEAAVPYIVPFLRHDRRELRASAAWALWRIGGEAARQAVAAAYAAETDPEVKAEMAWAASSRDA

SEQ ID NO: 74299 - protein, 384 aa, unidentified
  source 1..384: note = Alicyclobacillus montanus
  REGION 1..384: note = tr|A0A1M6P3F6|A0A1M6P3F6_9BACL Epoxyqueuosine reductase OS=Alicyclobacillus montanus OX=1830138; GN = SAMN05443507_10776 PE=4 SV=1
MKSLTLERLQEIARPLNFAAVGATDASPFEELQPILSEYAKRGLTGFEVSDIRQRMDPRQWLPEAESIVVVAMAYLTEKGLHEARLHPRSRQHGQTSVYVYGEDYHIVLRNQLLTLHALLEEEWGGSIPARVIVDTSPMVDRRLAERAGIGWIGKNCMLIVPGSGSFVFLGAILLGIPIQGSQQLAMPTMQCGHCDLCLKACPTGALLAPGVIQATACLSYVTQMKGIIPKAYRAALGKRIFGCDTCQWVCPENRHIEYAHATVFEPEKDQAYPDLLKILRMSQRQFQKLYGRSAAGWRGVRTVQRNALIALGNMRAREALMEIIPFLDHHRRELRASAAYALGQIGGQVAMDVLKQRLSIEEDEEIRQELVDALHQASVGNNS

SEQ ID NO: 74300 - protein, 391 aa, Alicyclobacillus sacchari
  REGION 1..391: note = tr|A0A4R8LK71|A0A4R8LK71_9BACL Epoxyqueuosine reductase OS=Alicyclobacillus sacchari OX=392010; GN = C7445_10943 PE=4 SV=1
MTPPLRLTRDDIAQMAAALDLPEIGVTDAEPFPELVAPLLAYEERGRTGFEAGDLASRIQPSLLFPEVKSIVVAALPYMTPAGEALARSHPRGEMRGQASGYTYGQDYHGVLRDRLTQLQAAIEDCLGRPVGARVAVDTSPLVDRRVAERSGVGWVGKNGMLYSERYGSYVFLGALLLDIEIADANSYPPAIGRHCGSCERCMTACPTGAIVGPGQLDATRCLSYITQMKGVIPRAYRKKMGRRVWGCDVCQTACPLNRMREAADDPAFHPNPELAYPDLVALLKMSNRQFMRVYGETAMGWRGVRTLQRNALIALGNIGRHDAIAHIEPFLRSDRVELRASAAWALGEIGGPDAVKLLVAAQAVEADEDVRRELEEAVMSIKNRTKEKEA

SEQ ID NO: 74301 - protein, 391 aa, unidentified
  source 1..391: note = Alicyclobacillus tengchongensis
  REGION 1..391: note = tr|A0A0V0PN34|A0A0V0PN34_9BACL Uncharacterized protein OS=Alicyclobacillus tengchongensis OX=368812; GN = SD51_10045 PE=4 SV=1
MTSSVQLTRQDIADMAAALHLPEIGVTDAQPFPELIAPLLAYEERGRTGFEAGDLAARTQPSLWFPEAKSIVVAALPYMTPEGQTVARSHPRGELRGQASGYTYGQDYHEVLRDRLTRLQTAIAERLGRPVAGRIAVDTSPLVDRRVAERSGVGWVGKNGMLYSERYGSYVFLGALLLDIEIADASAHPPAVGRHCGTCELCMTACPTGAIVGPGQLDATRCLSYITQMKGMIPRPFRKKMGRRVWGCDVCQTACPVNRLREAPDDPAFHPNAELAFPDLVELLQMSNRRFMRVYGETAMGWRGVRTLQRNALIALGNMGRVDAIPHIEPFLQSERAELRASAAWALGEIGGTDAVRLLLDARAVESDAQVQCEIADAIEAARKKTREREA

SEQ ID NO: 74302 - protein, 414 aa, Alicyclobacillus vulcanalis
  REGION 1..414: note = tr|A0A1N7NXI7|A0A1N7NXI7_9BACL Epoxyqueuosine reductase OS=Alicyclobacillus vulcanalis OX=252246; GN = SAMN05421799_11049 PE=4 SV=1
MNRGDKLSLSEIRPLAEAVGLPEIAATDASPFDDLAGPLADYEARGRTGFEWANAVERMDPRFWLPEAKSIITAALPYLTEEAARQMREHPRHELRGQTSCYVYGEDYHGVLSARLEALARRIQDLVGREIRFRVAVDTSPLVDRRVAERSGLGWIGKNGMLFSPRYGSYVFLGALLLDVEIEDANHLPPDVGKHCGDCDLCMRACPTQAFAAPGELKATACLSYVTQMKGMIPREYRRPLGRRIWGCDVCQQVCPLNRQREAAKDDAFLPDREVAYPDLVRLLEMSNRQFVRAYGRSALAWRGVRTLQRNALIALGNLRREEAVPLIVRFLSSDRVELRASAAWALGEIGGEQARRELQAALTVEQDAEVRQEIEAAIANASGNGREEASGCEGRRLGGRDGGDASGRHVAGG

SEQ ID NO: 74303 - protein, 382 aa, unidentified
  source 1..382: note = Aliidiomarina haloalkalitolerans
  REGION 1..382: note = tr|A0A432VVD2|A0A432VVD2_9GAMM Epoxyqueuosine reductase OS=Aliidiomarina haloalkalitolerans OX=859059; GN = queG PE=3 SV=1
MRNKLLDYHALAEKIKQWGRELGFQQVGITDLDLSEHEATLQKWLDNHYHGDMHFMERHGMLRARPAELQPGSVRAICVRMDYLPKGAKFAQVLRQPQLGYVSRYALGRDYHKMMRKRLKALGDRIREEVSTADFRPFVDSAPLLEKPLAVKAGLGWTGKHSLVLDSQDGSWFFLGELLINLPLPVDQPQPEQCGSCTACMTICPTQAIVEPYVIDARRCISYLTIEHAGEIPLEFRQAMGNRIYGCDDCQLICPWNRYATPTPEADFLPRHELHEPDLLYLWSWSEDEFLRLTEGSPIRRIGYEKWQRNLAVAMGNAPASTELISALAQQRPNTTPLVQVHIDWALDQLEQRLAATETSAKPARLTQRLIRVIEKGLPRDA

SEQ ID NO: 74304 - protein, 384 aa, unidentified
  source 1..384: note = Aliidiomarina iranensis
  REGION 1..384: note = tr|A0A432W2H2|A0A432W2H2_9GAMM Epoxyqueuosine reductase OS=Aliidiomarina iranensis OX=1434071 GN=queG; PE = 3 SV=1
MTPDYHGLTEKIKQWGIELGFQQVGISDLDLSAHEESLQAWLDKKYHGEMAFMERHGMLRARPAELHPGSVRAICVRMDYLPEGARFAAVLKQPQLGYISRYALGRDYHKVLRKRLKQLGDKIAKHIEDNREDYSLSADFRPFVDSAPIMERPLAEKAGLGWVGKHTLLLDSDDGSWFFLGELLINLPLPVDKPQPEQCGSCTACITICPTQAIVEPYVLDARRCISYLTIEHGGSIPEEFRKAIGNRIYGCDDCQLVCPWNRYAKPTPETDFMPRHALHTPDLLDLWAWSEEEFLTATEGSPIRRIGYEKWQRNLAIALGNAPHDKAVISALSARLETASDIVKEHIEWALAQQQAATESSAVKSRLTERLIRVVEKGLPRDA

SEQ ID NO: 74305 - protein, 382 aa, unidentified
  source 1..382: note = Aliidiomarina minuta
  REGION 1..382: note = tr|A0A432W9G2|A0A432W9G2_9GAMM Epoxyqueuosine reductase OS=Aliidiomarina minuta OX=880057 GN=queG PE=3; SV = 1
MFSIMVQTTDYQLLADNIKRWGKELGFQQVGITDIDLSQHQAALQSWLDKNFHGDMDYMQRHGMLRTRPDELHPGSVRAISVRMDYLPKGAAFARVLKNSRLGYVSRYALGRDYHKLMRKRLKQLGEKIKAEFSETDFRPFVDSAPILERPLAEKAGLGWTGKHTLLLDSKDGSWFFLGELLINLPLPTDTPQAEQCGKCTACMTICPTQAIVEPYLLDARRCISYLTIELKGPIPEEFRKPMGNRIYGCDDCQLICPWNRYASPTDEKDFHPRSVLHAPDLIELWNWTETEFLKHTEGSPIRRIGHQRWLRNIAVALGNAPASEEVVQALLQRNQQVSELIQEHIDWALQEQKRKLQQDDQPSQQIKRLVRVIEKGLPRDA

SEQ ID NO: 74306 - protein, 391 aa, unidentified
  source 1..391: note = Aliidiomarina sanyensis
  REGION 1..391: note = tr|A0A432WP98|A0A432WP98_9GAMM Epoxyqueuosine reductase OS=Aliidiomarina sanyensis OX=1249555 GN=queG; PE = 3 SV=1
MQNSESKSATTVKLSELVEKIKQWGSELGFQKVGIADLDLSKHESALQEWLDNQYHGTMDYMERHGMLRARPADLHPGSVRAISVRMNYLPPNARFAEVLGDDKKAFVSRYALGRDYHKVMRKRLQKLGAKITDYCLTHLHDVMPNFRPFVDSAPILERPLAEKAGLGWTGKHTLLLDTDDGSWFFLGELLINLPLPIDQPQPEQCGKCTACITICPTQAIVAPYKLDARRCISYLTIEHAGPIPEAFRRPMGNRIYGCDDCQLVCPWNRYATPTPEEDFLPRHPLHAPELLELWAWDEATFLERTEGSPIRRIGFERWQRNLAVAFGNARPSADLIEALEQRLPDASPLVGEHIEWALAELRKKALEGTPKNLQLDRLIRIVEKGLPRDA

SEQ ID NO: 74307 - protein, 387 aa, unidentified
  source 1..387: note = Aliidiomarina shirensis
  REGION 1..387: note = tr|A0A432WV55|A0A432WV55_9GAMM Epoxyqueuosine reductase OS=Aliidiomarina shirensis OX=1048642 GN=queG; PE = 3 SV=1
MTPDYHGLTEKIKQWGIDLGFQQVGISDLDLSAHEEKLQEWLDKKYHGDMDYMERHGMLRARPAELHPGSLRAICVRMDYLPEGARFAAVLKQPQLGYVSRYALGRDYHKVLRKRLKQLGEKITKFIQENRNDYDLDADFRPFVDSAPILERPLAEKAGLGWTGKHTLLLDSEDGSWFFLGELLINLPLPVDKPQPEQCGSCTACITICPTQAIVEPYVVDARRCISYLTIEHAGVIPEEFRKPMGNRIYGCDDCQLVCPWNRYAKPTPETDFLPRHELHTPDLLELWAWDEARFLQETEGSPIRRIGYEKWQRNLAIAMGNAPTNATVIEALSARLETASEMVKVHIEWALGQHEQHLNENNTEHKHSRLTERLIRVVEKGLPRDA

SEQ ID NO: 74308 - protein, 378 aa, unidentified
  source 1..378: note = Aliidiomarina soli
  REGION 1..378: note = tr|A0A432WKB0|A0A432WKB0_9GAMM Epoxyqueuosine reductase OS=Aliidiomarina soli OX=1928574 GN=queG PE=3; SV = 1
MPDSIDYHALARDIKEWGKELGFQDVGITDLDLSQHQASLQKWLDNEYHGEMEYMQRHVDLRLHPELLHPGSVRAICVRMDYLPKGALFAKVLKNPQLGYVSRYALGRDYHKLMRKRLKKLGDRIKAAFADTDFRPFVDSAPVMERPLAEKAGLGWTGKHSLLLDSKDGSWFFLGELFINLPLPVDEKQPEQCGKCTACMTICPTQAIVEPYVVDARRCISYLTIELQGPIPEEFRRPMGNRIYGCDDCQLICPWNRYATPTDEGDFAPRHQLHAPELLTLFGWDEATFLQQTEGSPIRRIGHQRWLRNIAVALGNAPYSEDIVTALQSRQHEVSDMVSEHIAWALAEQAAKKIDSQRPSQQIKRLVRVIEKGLPRDA

SEQ ID NO: 74309 - protein, 383 aa, Aliidiomarina sp.
  REGION 1..383: note = tr|A0A552X1Z4|A0A552X1Z4_9GAMM Epoxyqueuosine reductase OS=Aliidiomarina sp. IM1326 OX=2593535 GN=queG; PE = 3 SV=1
MTTADLHELAEKIKSWGSELGFQQVGITDLDLSMHEDALQRWLDNQYHGSMDYMERHGMLRARPQELHPGSVRAICVRMDYLPQGARFAEVLSDERKAYVSRYALGRDYHKVMRKRLKQLGDKIQAYCDHELPGTSADFRPFVDSAPILERPLAEKAGLGWTGKHTLLLDANDGSWFFLGELLINLPLPTDQAQPEQCGKCTACITICPTQAIIEPYVLDARRCISYLTIEHEGAIPEQFRKPMGNRIYGCDDCQLVCPWNRYATPTPEADFLPRHPLHAPDLLALWAWDEATFLQQTQGSPIRRIGFERWQRNLAIAIGNSAPNPSLIQALQEKRTAASEVVKEHIDWALAELEHKQRAGHTGNQQVKRLVRIIEKGLPRDA

SEQ ID NO: 74310 - protein, 314 aa, unidentified
  source 1..314: note = Aliifodinibius roseus
  REGION 1..314: note = tr|A0A1M5C599|A0A1M5C599_9BACT Epoxyqueuosine reductase OS=Aliifodinibius roseus OX=1194090 GN=queG PE=3; SV = 1
MNLAKRTKRVREEALRLGFDACGFAKAGRLETEERRLEEWLNQGRHGSMSWMENHFDKRVDPTKLVPGSKSVVSVIGSYFHPDHERQQQQVGQPKIAKYAQGRDYHKVYKKKLKKLFAFTEELLGGLNGRVFVDSAPVLDKAWAVRGGLGWIGKNSNLLNRDTGSFCFIGEMIIDAEFLYSTQVTDHCGSCTRCIDACPTNAIHEPYRVDGSKCISYHTIELKERIPEEYRDRLGEWMYGCDICQDVCPWNRDAGYTQMEDLYPRDKILDHDINFWKELDNEQYDALFEGSAMRRAKFEKYKDNVAAVAENLNR

SEQ ID NO: 74311 - protein, 316 aa, unidentified
  source 1..316: note = Aliifodinibius sediminis
  REGION 1..316: note = tr|A0A521DCE2|A0A521DCE2_9BACT Epoxyqueuosine reductase OS=Aliifodinibius sediminis OX=1214077 GN=queG; PE = 3 SV=1
MNLAQRTKRVREEALRLGFDACGFAKAGRLETEERRLEEWLNQGRHGMMHWMENHFDKRVDPTRLVPGSRSVVSVIGSYFHPDHRRQQQQGDRPKIAKYAQGRDYHKVYKKKLKKLFSFTEELLGELHGRVFVDSAPVLDKAWAVRAGLGWIGKNSNLLNKNVGSFLFIGEMIVDADFLYSTQVTDHCGSCTRCIDACPTNAIYEPYRVDGSKCISYHTIELKERIPEEYRDSIGQWLYGCDICQDVCPWNRDAKYSQMEDLYPRQKILDHDINFWKELDNQQYDALFEGSAMRRAKFEKYKDNVAAVAENMNAGS

SEQ ID NO: 74312 - protein, 316 aa, unidentified
  source 1..316: note = Aliifodinibius sp.
  REGION 1..316: note = tr|A0A2A2GF77|A0A2A2GF77_9BACT Epoxyqueuosine reductase OS=Aliifodinibius sp. WN023 OX=2032627 GN=queG; PE = 3 SV=1
MNIRERTQKVREYALRLGFNACGFAKAGRLEKEERRLREWLNQDRNGTMGWMENHFEKRVDPTKLVPGSKSVVSVIGSYFHPDHERQMEQDGTPKIAKYAQGRDYHKVYKKKLKKLFAQTKELLGGLEGRVFVDSAPVLDKAWAVKSGLGWMGKNSNILNKNIGSFFFIGEMIVDAEFNYDTPVTDHCGSCTRCIDACPTNAIYEPYRVDATKCISYLTIELKDEIPEEYRDDLEGWMFGCDICQNVCPWNRDAPYGEMEDLFPRKKILDHDINYWEELDIPQYDALFEGSAIRRAKFEKYKDNVAAAAENLNKRD

SEQ ID NO: 74313 - protein, 382 aa, unidentified
  source 1..382: note = Aliiglaciecola lipolytica
  REGION 1..382: note = tr|K6YQP2|K6YQP2_9ALTE Epoxyqueuosine reductase; OS = Aliiglaciecola lipolytica E3 OX=1127673 GN=queG PE=3; SV = 1
MTQLSPLFLDELAKNIKEWGKALGFQQVGIADTDLSQHQKYLKSWLEKGYNGNMQFFERNQEKRADPAQLLPGTLRLISVRMDYLPPDASFARDLKQSGTAYISRYAVGRDYHKLLRNRLKKLGEKIQQHFAELEFRPFVDSAPVLEHAVAEKAGIGWTGKHSLTLNKEAGSWFFLGELFVNIPLPIDQPIQNDCGSCTACLTICPTQAIVEPYVVDARRCISYLTIEHDGVIPEQFRTAMGNRIYGCDDCQLICPWNRYAHLTQEKDFYARVAIKSQDLLVLFAWDENEFLANTEGSAIRRIGYQKWQRNIAIALGNADFDTNILSTLKSKLQNTSEMVAEHIQWAIEQQLNKQLNTPPNNEQRLTKRLIRSVEKGLPRDA

SEQ ID NO: 74314 - protein, 386 aa, unidentified
  source 1..386: note = Aliiglaciecola sp.
  REGION 1..386: note = tr|A0A553LA16|A0A553LA16_9ALTE Epoxyqueuosine reductase OS=Aliiglaciecola sp. M165 OX=2593649 GN=queG; PE = 3 SV=1
MTQFSPEYLDDLAKSIKAWAKSLGFQQVGITDTDVSQHNHALKSWVEQGYHGDMAFFEQNHELRTDPAKLEQGTLRVISVRMNYLPPDASFAQDLKNDSTGYISRYALGRDYHKLIRKRLKQLGDKIREHCEQIQFRPFVDSAPILEHALAEKAGIGWTGKHSLTLNKDAGSWFFLGELFINIPLPVDQPVEENCGACTACMTICPTQAIVAPYTVDARKCISYLTIEHKGPIPLELRPLIGNRIYGCDDCQLICPWNRFADVTDESDFLPRSLLKSQPLTELFAWDEETFLQNTTGTPIRRIGYQKWKRNLAVAMGNARYSTEILQALREALPLQSELVQEHIIWALAQQESKSRLIETTSNANDVERLKSRLVRSVEKGLPRDA

SEQ ID NO: 74315 - protein, 382 aa, unidentified
  source 1..382: note = Aliikangiella marina
  REGION 1..382: note = tr|A0A545TIN3|A0A545TIN3_9GAMM Epoxyqueuosine reductase OS=Aliikangiella marina OX=1712262 GN=queG PE=3; SV = 1
MPVTQDQLKQIKTFIYEKACKVGFQGARVSDISTSGYFEAFKQWVDDGFHGDMSFLERNQNLREFPPQLHPNTCRVISLRYDYLPVNASFTKPLKDTSLANISRYALGKDYHKLLRKKLSRLCDALRTHFNQIEDIDTRVFVDSAPVLETAFAEKSGIGWKGKHSLIINEAAGSWFFLAEIFINLPLALDEPVKDKCGSCNACIKLCPTDAIIGNKKVDATRCISYLTIENKGPIPLELRSKIGNRVYGCDDCQLACPWNRYASVSSEPAFLPMQNLGASRLLELWNWTEEDFNTNLQGSPIRRIGYQAWLRNLAVGIGNGPFAPDIISQLEKKKPDANDMVLEHINWAIEELINKNGQQLNLQAKTKKLINCVESMLARDA

SEQ ID NO: 74316 - protein, 381 aa, unidentified
  source 1..381: note = Aliikangiella sp.
  REGION 1..381: note = tr|A0A545U546|A0A545U546_9GAMM Epoxyqueuosine reductase OS=Aliikangiella sp. M105 OX=2592383 GN=queG; PE = 3 SV=1
MLSTEALTEIKSKLVIKAREHGFQDARVSDTSTSGYFAKFKQWVNDGFHGDMSFLERNQNLRSSPDELHPGTLRVVSLRYDYLPEHAGFVKPLKHPQQANVSRYALGRDYHKLMRKKLDAVCRQLQAEIETSDAVDYRVFVDSAPVLETSFAEKSGLGWKGKHSLIINKKAGSWFFLGEIFINLPLPIDEPVEDLCGNCSACISLCPTDAIIDSKKVDATRCISYLTIENKGPIPISLRSKMGNRIYGCDDCQLACPWNRYAQISKETGFQPKNNLDTISLLQLWQWNEKEFLDNFQGSPIRRIGYQNWLRNLAVAIGNSVYEPQTIELLVNKKQEANDLVCEHIDWAISQLKNRQSNDLTVNKKTQKLINCVTNMLPRDA

SEQ ID NO: 74317 - protein, 353 aa, unidentified
  source 1..353: note = Aliiroseovarius crassostreae
  REGION 1..353: note = tr|A0A0N8IC36|A0A0N8IC36_9RHOB Epoxyqueuosine reductase OS=Aliiroseovarius crassostreae OX=154981; GN = queG PE=3 SV=1
MTASPGDPATFKARIEAKARDEGFAAFGVCRPDATPDTAARLAQYVAEGRHGDMGWMEERMHWRGSAAALWPEARSVIMLAEPYTPEHDPRDVLNMPDKGAISVYAQNRDYHDIVKKRLKRVGRWMVEQFSCEIKVFVDTAPVMEKPLAAAAGLGWQGKHSNLLSRELGNWFFLGAIFTTLELPADPPGTENCGSCRACLDACPTDAFPAPFQVDARRCISYLTIEHKGPVEEELRGKLGNHIYGCDDCLAACPWNKFAVQAQELRYAARADLLAPDLAELALLDDTAFRTKFSGSPIKRVGWGRFMRNVLYAIGNSGRADLRSSAKRHIGSEDPCIRDAAQWALNMLTKTSR

SEQ ID NO: 74318 - protein, 326 aa, unidentified
  source 1..326: note = Aliiroseovarius halocynthiae
  REGION 1..326: note = tr|A0A545SQG2|A0A545SQG2_9RHOB tRNA epoxyqueuosine(34) reductase QueG OS=Aliiroseovarius halocynthiae OX=985055 GN=queG PE=4 SV=1
MARICRPDSVPDIAARLEQFVAEGRHGDMGWMKDRMHWRGNPAALWSEAKSVIMLAEPYTPSHDPMEVVEQPDRAAISVYAQNRDYHDIVKKRLKRVGRWMIERFGGEIKVFVDTAPVMEKPLGAAAGLGWQGKHTNLLSRELGNWFFLGAIFTTLELPEDEPGRENCGSCTSCLDACPTDAFPAPFQLDARRCISYLTIEHNGPVPEELRAKMGNRIYGCDDCLAACPWNKFAVEAQEIRYAARDDLVAPKLGELLDLDDTAFRAKFSGSPIKRIGRDRFLRNVLYAVGNSGDSAFLAKLEPHLRDPHPIVADAARWAKERLLMP

SEQ ID NO: 74319 - protein, 368 aa, unidentified
  source 1..368: note = Aliiroseovarius pelagivivens
  REGION 1..368: note = tr|A0A2R8ATE6|A0A2R8ATE6_9RHOB Epoxyqueuosine reductase OS=Aliiroseovarius pelagivivens OX=1639690; GN = queG PE=3 SV=1
MSRKPPQGGRLPPDPGKPGSPPEDISGKKIEIVAQAEAEGFAMARICRPDAVPEIAARLEQFVAEGRHGDMAWMGERMHWRGNPAALWPEAKSVIMLAEPYTPSHDPMEVIGQPDRAAISVYAQNRDYHDIVKKRLKRVGRWMIDHFGGEIKVFVDTAPVMEKPLGAAAGLGWQGKHTNLLSRELGNWFFLGAIFTTLELPVDEPGRENCGSCTSCLDACPTDAFPAPFQLDARRCISYLTIEHKGPMSEELRSKLGNRIYGCDDCLAACPWNKFAEGAHEMRYAAREDLVAPKLAELMGLDDAGFREKFSGSPIKRIGRDRFLRNVLYAVGNSADSAFLPALEPHLADPDPVVADAARWAKSRLQAV

SEQ ID NO: 74320 - protein, 345 aa, unidentified
  source 1..345: note = Aliiroseovarius sediminilitoris
  REGION 1..345: note = tr|A0A1I0MY17|A0A1I0MY17_9RHOB Epoxyqueuosine reductase OS=Aliiroseovarius sediminilitoris OX=1173584; GN = queG PE=3 SV=1
MTAEIRQAIIDKALEEGFAQAGFCRPDSVPQIADRLDTFVAEGRHGDMLWMGERMHWRGNPAALWPEARTVIMLAEPYTPSHDPMDVIGQTDRAAISVYAQNKDYHDIVKKRLKRVGRWMIDSFGGEIKVFVDTAPVMEKPLAAAAGLGWQGKHTNLLSRELGNWFFLGAIFTTLDLPTDEPAREKCGSCTACLDVCPTDAFPAPFQLDARRCISYLTIEHKGPVDEPLRSQLGNRIYGCDDCLAACPWNKFAVEATEMRYAAREDLVAPKLADLVGFDDAGFRAHFSGSPIKRIGLSRFLRNVLYAIGNSGKSSLLPHAQAHADSDDPVVADAARWAVGKLSGA

SEQ ID NO: 74321 - protein, 351 aa, unidentified
  source 1..351: note = Aliishimia ponticola
  REGION 1..351: note = tr|A0A4S4N6Q4|A0A4S4N6Q4_9RHOB Epoxyqueuosine reductase OS=Aliishimia ponticola OX=2499833 GN=queG PE=3; SV = 1
MPDDLKDRVIQQALGEGFVSARVCRPDSVPEVAARLKAFVDAGYHGQMSWMAERMEWRGAPDVLWPEARSVVMLAESYTPEHDPLSVLERRDRGAISVYAQNRDYHDVVKKRLKRLARWMVAETGCQVKVFVDTAPVPEKALGAASGLGWQGKHTNLVSRDWGNWAFIGSVFTTLELTPDTAGVDNCGSCRACLDICPTDAFPAPYQLDARRCISYLTIEHKGPVAPELRAKMGNRIYGCDDCLAACPWNKFAVAASDLRYAARAELTAPKLAELAMLDDAAFRAMFSGSPIKRIGRDRFVRNVLYAIGNSGDPALAPSAAALVGDPNPVVAEAATWAVSRLGARGIDVAG

SEQ ID NO: 74322 - protein, 372 aa, Aliivibrio finisterrensis
  REGION 1..372: note = tr|A0A4Q5KQW0|A0A4Q5KQW0_9GAMM Epoxyqueuosine reductase OS=Aliivibrio finisterrensis OX=511998 GN=queG; PE = 3 SV=1
MNIDYQALANNIKVWAQELGFQKVGICDVDLSQHEAALEQWLDAGYHGSMDWMARHGMMRARPNELHPGTIRVISARMDYLPPQAGFASNLSDPTQAYISRYALGRDYHKLIRNQLKKLGQKIEAEVEQLGYRPFVDSAPILERPLAEKAGLGWTGKHSLLLDKDAGSWFFLGELLIDIPLPVDSPVENQCGKCTACVTSCPTNAILENGVIDARRCISYLTIENSEVIPEEFRSLMGNRIYGCDDCQLVCPWNREAEITQQNDFHRRESLDNANLLSLFAWDEVTFLKNTEGSAIRRIGHKQWLRNLAIAMGNAPHSTDIISALQARIGLDDNLDIHLLWAIEQQQSQQVNANRKEQRLIRIIEKGLPRDA

SEQ ID NO: 74323 - protein, 371 aa, Aliivibrio fischeri
  REGION 1..371: note = sp|Q5E2C3|QUEG_ALIF1 Epoxyqueuosine reductase; OS = Aliivibrio fischeri (strain ATCC 700601 / ES114); OX = 312309 GN=queG PE=3 SV=1
MKINYQELANNIKLWAKELGFQKVGICDVDLSQHEAALEQWLEAGYHGSMDWMARHGVMRARPDELHPGTIRVISARMDYLPPKAGFASNLKDPNQAYISRYALGRDYHKLIRNQLKKLGQKIEEEVEQLGYRPFVDSAPILERPLAEKAGLGWTGKHSLLLDKNAGSWFFLGELLVDIPLPVDTPVENQCGKCTACISSCPTNAILENGVIDARRCISYLTIENSGIIPEEFRSLMGNRIYGCDDCQLVCPWNREAEITQQADFHRRSSLGNSDLISLFSWDESTFLKNMEGSAIRRIGHIQWLRNLSIAMGNAPHSEAIISALQDRLGLDENLDIHIQWAIKQQSLVITSNRKEQRLIRIIEKGLPRDA

SEQ ID NO: 74324 - protein, 371 aa, Aliivibrio fischeri
  REGION 1..371: note = tr|A0A510UMQ0|A0A510UMQ0_ALIFS Epoxyqueuosine reductase OS=Aliivibrio fischeri OX=668 GN=queG PE=3 SV=1
MKINYQELANNIKLWAKELGFQKVGICDVDLSQHEVALEQWLEAGYHGSMDWMARHGVMRARPDELHPGTIRVISARMDYLPPEANFASNLKDPNQAYISRYALGRDYHKLLRNQLKKLGQKIEKEVEQLGYRPFVDSAPILERPLAEKAGLGWTGKHSLLLDKHAGSWFFLGELLVDIPLPVDTPVENQCGKCTACVSSCPTNAILENGVIDARRCISYLTIENSGVIPEEFRSLMGNRIYGCDDCQLVCPWNREAEITQQADFHRRSSLGDSDLISLFSWDESTFLKNMEGSAIRRIGHTQWLRNLSIAMGNAPHSEAIISALRDRLGLDENLDIHIQWAIKQQSLAITSNRKEQRLIRIIEKGLPRDA

SEQ ID NO: 74325 - protein, 370 aa, Aliivibrio logei
  REGION 1..370: note = tr|A0A1B9P2X2|A0A1B9P2X2_ALILO Epoxyqueuosine reductase OS=Aliivibrio logei OX=688 GN=queG PE=3 SV=1
MDYQELAINIKLWAQELGFQKVGICDVDLSQHEAALEQWLEAGYHGSMDWMARHGLMRARPNELHPGTIRVISARMDYLPPEACFASNLSDPTQAYISRYALGRDYHKLIRNQLKKLGQKIETEVEQLGYRPFVDSAPILERPLAEKAGLGWTGKHSLLLDKDAGSWFFLGELLVDIPLPIDAPVENQCGKCTACVSSCPTNAILDNGVIDARRCISYLTIENSGVIPEEFRSLMGNRIYGCDDCQLVCPWNREAEITQQSDFHRRDSLNNSDLLALFDWDEDSFLKYMEGSAIRRIGHTQWLRNISIALGNAPHSPDIILSLQNRLGFDTNLDIHIHWAIEQQNSQQINIKRKEQRLIRIIEKGLPRDA

SEQ ID NO: 74326 - protein, 372 aa, Aliivibrio salmonicida
  REGION 1..372: note = tr|B6EMR2|B6EMR2_ALISL Epoxyqueuosine reductase; OS = Aliivibrio salmonicida (strain LFI1238) OX=316275; GN = queG PE=3 SV=1
MKIDYQELAINIKLWAQELGFQKVGICDVDLSQHEAALEQWLEAGYHGSMDWMARHGLMRARPNELHPGTIRVISARMDYLPPEACFASNLSDPTQAYISRYALGRDYHKLIRNQLKKLGQKIETEVEQLGYRPFVDSAPILERPLAEKAGLGWTGKHSLLLDKDAGSWFFLGELLVDIPLPIDAPVENQCGKCTACVSSCPTNAILDNGVIDARRCISYLTIENSGVIPEEFRSLMGNRIYGCDDCQLVCPWNREAEITQQSDFHRRDSLNNSDLLALFDWDEDSFLKYMEGSAIRRIGHTQWLRNISIALGNAPHSPDIILSLQNRLGFDTNLDIHIHWAIEQQNSQQINIKRKEQRLIRIIEKGLPRDA

SEQ ID NO: 74327 - protein, 370 aa, Aliivibrio sifiae
  REGION 1..370: note = tr|A0A2S7XLR6|A0A2S7XLR6_9GAMM Epoxyqueuosine reductase OS=Aliivibrio sifiae OX=566293 GN=queG PE=3 SV=1
MDYQELANNIKLWAQELGFQKVGICDIDLSQHEAALEQWLDAGYHGSMDWMARHGVMRARPAELHPGTIRVISARMDYLPPEAGFASNLSDSTQAYISRYALGRDYHKLIRNQLKKLGQKIEAEVEELGYRPFVDSAPILERPLAEKAGLGWTGKHSLLLDKDAGSWFFLGELLVDIPLPVDTPLENQCGKCTACITSCPTNAILDNGVIDARRCISYLTIENSNVIPEEFRSLMGNRIYGCDDCQLVCPWNREAEITQQNDFHRRDSLNNADLLSLFAWDEATFLKNMEGSAIRRIGHLQWLRNISIAMGNAPHSEIIISALNDKLGLDTNLDIHLNWAIEQQHSLQVNQNRKEQRLIRIIEKGLPRDA

SEQ ID NO: 74328 - protein, 370 aa, Aliivibrio sifiae
  REGION 1..370: note = tr|A0A2S7XG54|A0A2S7XG54_9GAMM Epoxyqueuosine reductase OS=Aliivibrio sifiae OX=566293 GN=queG PE=3 SV=1
MDYQELANNIKLWAQELGFQKVGICDIDLSQHEAALEQWLDAGYHGSMDWMARHGVMRARPDELHPGTIRVISARMDYLPPEAGFASNLSDSTQAYISRYALGRDYHKLIRNQLKKLGQKIEAEVEELGYRPFVDSAPILERPLAEKAGLGWTGKHSLLLDKDAGSWFFLGELLVDIPLPVDTPLENQCGKCTACVTSCPTNAILDNGVIDARRCISYLTIENSDVIPEEFRSLMGNRIYGCDDCQLVCPWNREADITQQNDFHRRDSLNNADLLSLFAWDESTFLKNMEGSAIRRIGHLQWLRNISIAMGNAPHSELIISALNDKLGLDTNLDIHLNWAIEQQKSGQINQNRKEQRLIRIIEKGLPRDA

SEQ ID NO: 74329 - protein, 370 aa, Aliivibrio sp.
  REGION 1..370: note = tr|A0A1B9P9N2|A0A1B9P9N2_9GAMM Epoxyqueuosine reductase OS=Aliivibrio sp. 1S175 OX=1840087 GN=queG PE=3; SV = 1
MDYQALANNIKLWAQELGFQKVGICDIDLSQHEAALEQWLDAGYHGSMDWMARHGVMRARPNELHPGTIRVISARMDYLPPEAGFASNLSDTTQAYISRYALGRDYHKLIRNQLKKLGQKIEAEVEQLGYRPFVDSAPILERPLAEKAGLGWTGKHSLLLDKDAGSWFFLGELLVDIPLPVDSPVENQCGKCTACVTSCPTNAILENGVIDARRCISYLTIENSGVIPEEFRPLMGNRIYGCDDCQLVCPWNREADITQQNDFHRRDSLNNADLISLFDWDEATFLKNMEGSAIRRIGYLQWLRNISIAMGNAPQSELIISALMKRLDLDENLDIHIHWAIEQQKSHQINKNRKEQRLIRIIEKGLPRDA

SEQ ID NO: 74330 - protein, 372 aa, Aliivibrio wodanis
  REGION 1..372: note = tr|A0A090IIK6|A0A090IIK6_9GAMM Epoxyqueuosine reductase OS=Aliivibrio wodanis OX=80852 GN=queG PE=3 SV=1
MKIDYQALATNIKLWAQELGFQKVGICDVDLSQHEAALEQWIDAGYHGSMDWMARHGVMRARPNELHPGTIRVISARMDYLPPQAGFASNLSDPTQAYISRYALGRDYHKLIRNQLKKLGQRIEAEVEQLGYRPFVDSAPILERPLAEKAGLGWTGKHSLLLDKDAGSWFFLGELLVDIPLPVDSPVENQCGKCTACVTSCPTNAILENGVIDARRCISYLTIENSDVIPEEFRSLMGNRIYGCDDCQLVCPWNREADITQQSDFHRRESLDNANLLSLFAWDETTFLKNMEGSAIRRIGHLQWLRNIAIAMGNAPHSKDIVLSLRDRLGLDNNLDIHILWAIEQQNSRPINKNRKEQRLIRIIEKGLPRDA

SEQ ID NO: 74331 - protein, 377 aa, Alishewanella aestuarii
  REGION 1..377: note = tr|J2II02|J2II02_9ALTE Epoxyqueuosine reductase; OS = Alishewanella aestuarii B11 OX=1197174 GN=queG PE=3 SV=1
MQAEQISQQIKTWAKELGFQSCGISRPQLGAEQEARLQQWLDAGYHGEMQYMAEHGMLRARPTELHPGTLSVISVRLDYLPKAAAFATNLADPSQAYISRYALGRDYHKLMRNRLKQLGQKIATLISDLDCRPFVDSAPILERPLAQQAGLGWIGKHSLLLAEEAGSWFFLGELLVNLELPADQPHPGDCGSCVACITSCPTGAIVAPYVVDARRCISYLTIELKDAIPTEFRPLLGNRIYGCDDCQLVCPVNRQAPLTEEPDFQRRPQWQDQSLLALFQWDETTFLRLTEGSAIRRIGFERWQRNLAVALGNAPYQPEIVATLKQALPTATPLVAEHIEWALQQQKHKSYLAQNLLPRSTERLVRIIQKGLPRDAG

SEQ ID NO: 74332 - protein, 377 aa, Alishewanella agri
  REGION 1..377: note = tr|I8U5Z6|I8U5Z6_9ALTE Epoxyqueuosine reductase; OS = Alishewanella agri BL06 OX=1195246 GN=queG PE=3 SV=1
MQAEKIRNQIKAWAKELGFQACGISRPQLGAEQEQRLQQWLDAGYHGEMQYMAEHGMLRARPAGLHPGTLSVISVRLDYLPKAAAFATNLADPSQAYISRYALGRDYHKLMRNRLKQLGQKIATLISDLDGRPFVDSAPILERPLAQQAGLGWIGKHSLLLAEEAGSWFFLGELLVNLELPVDQPHPGDCGSCVACITSCPTGAIVAPYVVDARRCISYLTIELKGAIPTEFRPLLGNRIYGCDDCQLVCPVNRQAPLTAEPDFQRRPQWQDQSLLALFQWDETTFLRLTEGSAIRRIGFERWQRNLAVALGNAPYQPEIVASLKQAQPTATPLVAEHIEWALQQQKQKSYLAQNLLPRSTERLVRIIQKGLPRDAG

SEQ ID NO: 74333 - protein, 377 aa, Alishewanella jeotgali
  REGION 1..377: note = tr|H3ZGQ7|H3ZGQ7_9ALTE Epoxyqueuosine reductase; OS = Alishewanella jeotgali KCTC 22429 OX=1129374 GN=queG; PE = 3 SV=1
MQAEQISQQIKTWAKELGFQSCGISRPQLGAEQEARLQQWLDAGYHGEMQYMAEHGMLRARPAELHPGTLSVISVRLDYLPKAAAFATNLADPSQAYISRYALGRDYHKLMRNRLKQLGQKIASLISDLDGRPFVDSAPILERPLAQQAGLGWIGKHSLLLAEEAGSWFFLGELLVNLELPADQPHPGDCGSCVACITSCPTGAIVAPYVVDARRCISYLTIELKGAIPTEFRPLLGNRIYGCDDCQLVCPVNRQAPLTAEPDFQRRPQWLDQSLLALFQWDETTFLRLTEGSAIRRIGFERWQRNLAVALGNAPYQPEIVATLKQALPTATPLVAEHIEWALQQQKQKSYLAQNLLPRSTERLVRIIQKGLPRDAG

SEQ ID NO: 74334 - protein, 377 aa, Alishewanella sp.
  REGION 1..377: note = tr|A0A259P4F4|A0A259P4F4_9ALTE Epoxyqueuosine reductase OS=Alishewanella sp. 34-51-39 OX=1970316 GN=queG; PE = 3 SV=1
MQAEQIRNQIKAWAKELGFQACGISRPQLGAEQEQRLQQWLDAGYHGEMQYMAEHGMLRARPAELHPGTLSVISVRLDYLPKAAAFATNLADPSQAYISRYALGRDYHKLMRNRLKQLGQKIATLISDLDGRPFVDSAPILERPLAQQAGLGWIGKHSLLLAEETGSWFFLGELLVNLELPADQPHPGDCGSCVACITSCPTGAIVAPYVVDARRCISYLTIELKGAIPTEFRPLLGNRIYGCDDCQLVCPVNRQAPLTAEPDFQRRPQWQDQSLLALFQWDETTFLRLTEGSAIRRIGFERWQRNLAVALGNAPYQPEIVATLKQALPTATPLVAEHIQWALQQQKHKSYLAENLLPRSTERLVRIIQKGLPRDAG

SEQ ID NO: 74335 - protein, 377 aa, Alishewanella sp.
  REGION 1..377: note = tr|A0A0T5PII3|A0A0T5PII3_9ALTE Epoxyqueuosine reductase OS=Alishewanella sp. WH16-1 OX=1651088 GN=queG; PE = 3 SV=1
MQAEQIRNQIKAWAKELGFQACGISRPQLGAKQEQRLQQWLDAGYHGEMQYMAEHGMLRARPAGLHPGTLSVISVRLDYLPKAAAFATNLADPSQAYISRYALGRDYHKLMRNRLKQLGQKIATLISDLDGRPFVDSAPILERPLAQQAGLGWIGKHSLLLAEEAGSWFFLGELLVNLELPVDQPHPGDCGSCVACITSCPTGAIVAPYVVDARRCISYLTIELKGAIPTEFRPLLGNRIYGCDDCQLVCPVNRQAPLTAEPDFQRRPQWQDQSLLALFQWDEATFLHLTEGSAIRRIGFERWQRNLVVALGNAPYQPEIVATLKQALPTATPLVAEHIEWALQQQKQKSYLAQNLLPRSTERLVRIIQKGLPRDAG

SEQ ID NO: 74336 - protein, 306 aa, Alistipes finegoldii
  REGION 1..306: note = tr|A0A174CPN3|A0A174CPN3_9BACT Epoxyqueuosine reductase OS=Alistipes finegoldii OX=214856 GN=queG PE=4; SV = 1
MLDHQYIKKLAADAGFDLCGLAPCRHLVENESMLRAWLGKGYQSSLAYMERNVEKRADPRKLVEGARTAVVCAVSYKNRAGEGYPPGHRTKVASYACAADYHTTIKGMLGRMLDALCASRPDLSGRAFVDTAPLLEKQLAVEAGLGWIGRQSLLVTPRFGTYVLLGELLLTDDADAYDPPFEGSRCGRCHNCIESCPTGAIVAPKVIDTGRCISCHTIEKEPTEGIGLDGWIFGCDRCQSCCPHNQKAPMHTNPAFDPVFDPLAMDAEAWLAMDETEFEARMGTTPLTRSGLARIRSNIAGTPGPE

SEQ ID NO: 74337 - protein, 302 aa, Alistipes finegoldii
  REGION 1..302: note = tr|R5UL22|R5UL22_9BACT Uncharacterized Fe-S protein; OS = Alistipes finegoldii CAG:68 OX=1263035 GN=BN754_01964; PE = 4 SV=1
MLDYQHIKKLAADAGFDLCGLTPCGHMAQNEAWLRAWLGKGYQSSLTYMERNVEKRADPRKLVEGARTAVVCAVSYKSRIGEGYPPGYRTKIASYACTADYHTTIKGMLNGMLEHLKAAVPGLGGRAFVDTAPLLEKQLAVEAGLGWIGRQSLLVTPRHGTYVLLGELLLTDEADTYDAPFEGSRCGRCRNCIESCPTGAIIAPKVIDTGRCISCHTIEREPSGGIDLDGWIFGCDRCQSCCPHNQKAPMHANRAFDPVFDPLTMDAAAWTAMDETEFEARMGATPLTRSGLARIRGNIKTE

SEQ ID NO: 74338 - protein, 301 aa, Alistipes indistinctus
  REGION 1..301: note = tr|A0A412SFB0|A0A412SFB0_9BACT tRNA epoxyqueuosine(34) reductase QueG OS=Alistipes indistinctus OX=626932 GN=queG PE=4 SV=1
MNQDHSIHSRAEILGFDRCGIARCRPLEERRGLLERWLAQGRHGGLTYMERNLDKRIDPALLVEGARSVVVCAISYNRPPAAGVASRIASYARGRDYHPVLKEKLHELLAYIRDLHPGTSGRVFVDTAPILEKSWAAEAGVGRIGRHSLLIVPGLGSFVVLGLIVTDAELEPDPPFLAPDPCGSCRACIEACPVGAIGNDRTIDASLCISRRTIEAEAGNEGDLHGWIFGCDICQLACPHNRHAPVSAHTCFAPAGDIGQMTETDWLQLSGTDFQNRFGDTPLARCGLERIQRRIRQGSQK

SEQ ID NO: 74339 - protein, 301 aa, Alistipes indistinctus
  REGION 1..301: note = tr|G5H866|G5H866_9BACT 4Fe-4S ferredoxin-type domain-containing protein OS=Alistipes indistinctus YIT 12060 OX=742725 GN=HMPREF9450_01126 PE=4 SV=1
MNQDHSIHSRAEILGFDRCGIARCRPLEERRGLLERWLAQGRHGGLTYMERNLDKRIDPALLVEGARSVVVCAISYNRPPAAGVASRIASYARGRDYHPVLKEKLHELLAYIRDLHPGTSGRVFVDTAPILEKSWAAEAGVGRIGRHSLLIVPGLGSFVVLGLIVTDAELEPDPPFLAPDPCGSCRACIEACPVGAIGNDRTIDASLCISRRTIEAEAGDEGDLHGWIFGCDICQLACPHNRHAPVSAHTCFAPAGDIGQMTETDWLQLSGTDFQNRFGDTPLARCGLERIQRRIRQGSQK

SEQ ID NO: 74340 - protein, 308 aa, unidentified
  source 1..308: note = Alistipes inops
  REGION 1..308: note = tr|A0A0B0BVV9|A0A0B0BVV9_9BACT 4Fe-4S ferredoxin-type domain-containing protein OS=Alistipes inops OX=1501391 GN=LG35_03500 PE=4 SV=1
MLQAREIKQAAAAAGFDLCGICRVRNFSAEQTFFEGWLERGFDGGLGYLRRNVEKRFSPAELMPGAHSVVVCGVSYKNDTSLGYGDTAVPKVASYACSGDYHVAVKEMLYETAARLGLKEDGTGFRAFTDTAPLLEKRLACEAGLGFIGRNTLLVSPRYGSFLLLGELVVDVPVDTYDRPYEGIGCGACRRCVEHCPAGALTGEGLDARRCISRLTVEPHPERVPALAQRIGASTAGWIFGCDDCQNVCPYNLRAPFFANPRFRPLFSPADMPACRWLEMTQAEFDARFGATPMARSGLARIKELLRR

SEQ ID NO: 74341 - protein, 309 aa, unidentified
  source 1..309: note = Alistipes obesi
  REGION 1..309: note = tr|A0A3D3YL85|A0A3D3YL85_9BACT tRNA epoxyqueuosine(34) reductase QueG OS=Alistipes obesi; OX = 1118061 GN=queG PE=4 SV=1
MLDRSFIRQSAAAAGFDLCGVAPCRHLVRNEQFFRRWLGDGRHASLGYLERNLDKRFDVRRLVEGAQTVVVCAVGYKNGLSDGYPDDFRAKIASYALTADYHATIKGMLGDLFGRLRAAEPALAGRAFVDSAPLVEKQLAVEAGLGWIGRQSLLVTPRFGSFVLLGELVLDAACDRYDEPLAGVGCGSCRRCVEACPTGAVCNDRAIDARRCISCHTIERTPAAEIALDGWIFGCDACQSRCPYNLRAPLHLHPAFDPLFDPLSFPPERWLAMEEAEFRTSFGRTPLMRSGLRRLQANAAQNLRRKGRE

SEQ ID NO: 74342 - protein, 306 aa, Alistipes onderdonkii
  REGION 1..306: note = tr|A0A5B5IVN7|A0A5B5IVN7_9BACT tRNA epoxyqueuosine(34) reductase QueG OS=Alistipes onderdonkii; OX = 328813 GN=queG PE=4 SV=1
MLDHQYIKKLAADAGFDLCGLAPCRHLVENESMLRAWLGKGYQSSLAYMERNVEKRADPRKLVEGARTAVVCAVSYKNRAGEGYPPGHRTKVASYACAADYHTTIKGMLGRMLDALCASRPDLSGRAFVDTAPLLEKQLAVEAGLGWIGRQSLLVTPRFGTYVLLGELLLTDDADAYDPPFEGSRCGRCHNCIESCPTGAIVAPKVIDTGRCISCHTIEKEPTEGIGLDGWIFGCARCQSCCPHNQKAPMHTNPAFDPVFDPLAMDAEAWLAMDETEFEARMGTTPLTRSGLARIRSNIAGTPGPE

SEQ ID NO: 74343 - protein, 306 aa, Alistipes onderdonkii
  REGION 1..306: note = tr|A0A4Q5I9F7|A0A4Q5I9F7_9BACT tRNA epoxyqueuosine(34) reductase QueG OS=Alistipes onderdonkii; OX = 328813 GN=queG PE=4 SV=1
MLDHQYIKKLAADAGFDLCGLAPCRHLVENESMLRAWLGKGYQSSLAYMERNVEKRADPRKLVEGARTAVVCAVSYKNRAGEGYPPGHRTKVASYACAADYHTTIKGMLGRMLDALRASRPDLSGRAFVDTAPLLEKQLAVEAGLGWIGRQSLLVTPRFGTYVLLGELLLTDDADVYDPPFEGSRCGRCHNCIESCPTGAIVAPKVIDTGRCISCHTIEKEPTEGIGLDGWIFGCDRCQSCCPHNQKAPMHTNPAFDPVFDPLAMDAEAWLAMDEAEFEARMGTTPLTRSGLARIRSNIAGTPGPE

SEQ ID NO: 74344 - protein, 309 aa, Alistipes putredinis
  REGION 1..309: note = tr|A0A1Q6FAH9|A0A1Q6FAH9_9BACT tRNA epoxyqueuosine(34) reductase QueG OS=Alistipes putredinis; OX = 28117 GN=BHV66_02690 PE=4 SV=1
MISGQYIKKLAENAGFDLCGITPCKHLAENESYFREWLAKGYGSSLEYLERNLDKRFDVRRLVEGAQTVVVCAVSYKNPLGEGYPPGCRTKIASYARNRDYHPVLKGMLGTMLEALRRQYPGLTGRTFVDTAPLLEKQLAVEAGLGWIGRQSLLLTPQYGSYVLLGELVLTLPSDQYDAPFAGARCGRCRNCLDSCPTGAIVAPKVIDTNRCISCRTIEKESDSALPDLDGWIFGCDRCQSCCPHNQKAPMHRSPHFDPLFDPLTISDREWLAMSEEEFLLRFGNTPLARSGLRRIQQNVRINQEKNEE

SEQ ID NO: 74345 - protein, 309 aa, Alistipes putredinis
  REGION 1..309: note = tr|B0MVD7|B0MVD7_9BACT Putative iron-sulfur cluster-binding protein OS=Alistipes putredinis DSM 17216; OX = 445970 GN=ALIPUT_01084 PE=4 SV=1
MISGQYIKKLAENAGFDLCGITPCKHLAENESYFREWLAKGYGSSLEYLERNLDKRFDVRHLVEGAQTVVVCAVSYKNPLGEGYPPGCRTKIASYARSRDYHPVLKRMLGTMLEALRRQYPGLTGRTFVDTAPLLEKQLAVEAGLGWIGRQSLLLTPQYGSYVLLGELVLTLPSDQYDAPFAGARCGRCRNCLDSCPTGAIVAPKVIDTNRCISCRTIEKESDSALPDLDGWIFGCDRCQSCCPHNQKAPMHRSPHFDPLFDPLTISDREWLAMSEEEFLLRFGNTPLARSGLRRIQQNVRINQEKNEE

SEQ ID NO: 74346 - protein, 311 aa, Alistipes shahii
  REGION 1..311: note = tr|A0A5B3G955|A0A5B3G955_9BACT tRNA epoxyqueuosine(34) reductase QueG OS=Alistipes shahii; OX = 328814 GN=queG PE=4 SV=1
MIDHLYIKRLAAGAGFDLCGIAPCRHLAENEALFRAWLARGRQSSLGYLERNVDKRFDARRLVEGARTAVVCAVSYKNRVGEGYPPGHRTKVASYACAADYHATLRTMLGGMLDALRAAHPGLGGRAFVDTAPLAEKQLAVEAGLGWIGRQSLLVTPQYGSYVVLGELILTEETDRYDAPFEGSRCGTCRSCIDNCPTGAVAPDRTIDTGRCISCRTIEREQPGQTDLHGWIFGCDACQSLCPWNRRAPQHRNAAFDAVFDPLAMDAATWLGMDEAAFEALCGRTPLTRSGLVRIRENALRNAAPEEPSER

SEQ ID NO: 74347 - protein, 311 aa, Alistipes shahii
  REGION 1..311: note = tr|D4IPA6|D4IPA6_9BACT Uncharacterized Fe-S protein; OS = Alistipes shahii WAL 8301 OX=717959 GN=AL1_25650 PE=4; SV = 1
MIDHLYIKRLAAGAGFDLCGIAPCRHLAENETLFRAWLARGRQSSLGYLERNVDKRFDARRLVEGARTAVVCAVSYKNRVGEGYPPGHRTKVASYACAADYHATLRTMLGGMLDALRAAHPGLGGRAFVDTAPLAEKQLAVEAGLGWIGRQSLLVTPQYGSYVVLGELILTEETDRYDAPFEGSRCGTCRSCIDNCPTGAVAPDRTIDTGRCISCRTIEREQPGQTDLHGWIFGCDACQSLCPWNRRAPQHRNAAFDAVFDPLAMDAATWLGMDEAAFEALCGRTPLTRSGLVRIRENALRNAAPEEPSER

SEQ ID NO: 74348 - protein, 300 aa, Alistipes sp.
  REGION 1..300: note = tr|A0A359G5Z0|A0A359G5Z0_9BACT tRNA epoxyqueuosine(34) reductase QueG OS=Alistipes sp.; OX = 1872444 GN=queG PE=4 SV=1
MLDRTEIKRLAAEAGFDLCGVAPCHPMPQAEERFRAWLGRGLHSTLGYMERHTEKRFDPARLFEGARTAVVCAVGYKNAASNGYPAAHRTRVASYACAADYHTSIRAMLGRMLDALLKTRPALRGRAFVDTAPLAEKQLAVEAGLGWIGRQSLLVTPALGTYVLLGELLLTEPCGSYDAPFEGSRCGTCRACLDACPVQALTPDRTVDTRRCISRHTVERDPDPAAPLHGWIFGCDACQSVCPYNRRAPQHRNPAFDPLFDPAAMTADEWFALSEEEFDRRMGQTPLTRSGLERIRRNIG

SEQ ID NO: 74349 - protein, 302 aa, Alistipes sp.
  REGION 1..302: note = tr|E4ME62|E4ME62_9BACT Putative iron-sulfur cluster-binding protein OS=Alistipes sp. HGB5 OX=908612; GN = HMPREF9720_2020 PE=4 SV=1
MLDYQHIKKLAADAGFDLCGLAPCGHMAQNEAWLRAWLGKGYQSSLTYMERNVEKRADPRKLVEGARTAVVCAVSYKNRIGEGYPPGHRTKIASYACTADYHTTIKGMLNGMLEHLKAADPGLGGRAFVDTAPLLEKQLAVEAGLGWIGRQSLLVTPRHGTYVLLGELLLTDEADAYDAPFEGSRCGRCRNCIESCPTGAIVVPKVIDTGRCISCHTIEREPSGGIDLDGWIFGCDRCQSCCPHNQKAPMHANRAFDPVFDPLTMDAAAWMALDETEFEARMGATPLTRSGLARIRGNIKTE

SEQ ID NO: 74350 - protein, 311 aa, unidentified
  source 1..311: note = Alistipes timonensis
  REGION 1..311: note = tr|A0A1H4FGS8|A0A1H4FGS8_9BACT Epoxyqueuosine reductase OS=Alistipes timonensis JC136 OX=1033731; GN = SAMN05444145_11071 PE=4 SV=1
MLDFLNIKKLAAEAGFDLCGVAPCRHLADGEARFRAWLARGGQSSLGYMERNTEKRFDPRLLVEGARTAVICAVSYKNAAGEGYPARHRTKVASYACTTDYHTTIRTMLLQLFDALRTAHPGLSGRAFVDTAPLAEKQLAAEAGLGWIGRQSLLVTPQFGTYVLLGELILTDEADAYDTPFGENRCGSCRRCVEACPTGAVAPDRTIDTARCISCRTIEKVPESDADLDGWIFGCDACQSCCPWNLRAPLHRNAAFDPVFDPLSMDAATWLGMDEAAFEALCGRTPLTRSGLTRIRENIRRNSAPGEPSER

SEQ ID NO: 74351 - protein, 310 aa, unidentified
  source 1..310: note = Aliterella atlantica
  REGION 1..310: note = tr|A0A0D9A2E5|A0A0D9A2E5_9CYAN Epoxyqueuosine reductase OS=Aliterella atlantica CENA595 OX=1618023; GN = queG PE=3 SV=1
MDKFSIEQRALELGFHKVGIASVDSIDAEVQHLRSWLKQGYQADMAWMDNPKRQDIRKVMPEVRSVICVALNYYTPHQRPNSPEYAKISRYAWGRDYHKVLTKKLKALTNWLQQTPGVQARYYADTGPIQDKVWAQKAGIGWIAKNGNVIAREYGSWIFLGEILTNLDLTPSIPHTEHCGSCTRCLDACPTGALAKPFVVDANRCIAYHTIENRAQELPENIVPHLQGWVAGCDICQDVCPWNQRFARVTDVAEFQPYPTNVAPKLTDLAQMSDESWEQRFTASALRRIKPDMWRRNARANLLRQGRVET

SEQ ID NO: 74352 - protein, 381 aa, Alkalibacillus haloalkaliphilus
  REGION 1..381: note = tr|A0A511W9S5|A0A511W9S5_9BACI Epoxyqueuosine reductase OS=Alkalibacillus haloalkaliphilus OX=94136; GN = queG PE=3 SV=1
MDFNQLKQELFDYCEEINVQKVGIASTDTFDTLKQRLVTQQAFNYQSGFEKGTVEERTTPTKLLPKAQSIISIALAYPSKMKDAPKSKKGDRRGIFARASWGKDYHDVLREKLNLIGEFLEEKVEGAQFKAMVDTGELHDRAVAERAGIGFVGKNCNLITDEYGSWVYLGELITNIPFEPDEPIEEGCGDCNICVDKCPTGALVQGGQLNASRCIAYQTLTKDFLPDEYRTKIGNRIYGCDTCQVVCPKNKGVDFHLHPEMEPDPELAKPKLEPLLTISNREFKEQFGYMSGSWRGKKPIQRNAIIALAHYKEVESVDTLIHLMKKDPRPVIRGTAAWAIGKIGREDAKQVLEKAKLHEQDEDVLVEIDKGLDFLKVHTTT

SEQ ID NO: 74353 - protein, 363 aa, Alkalibacter saccharofermentans
  REGION 1..363: note = tr|A0A1M4V2S0|A0A1M4V2S0_9FIRM Epoxyqueuosine reductase OS=Alkalibacter saccharofermentans DSM 14828; OX = 1120975 GN=SAMN02746064_00897 PE=4 SV=1
MDLKDDIMIAAKDIGIDMIGFTDSVSKDFFVPIYEDRKSKGCLVLLDSVDSKEWFSPKAHWDLCKSVVSIGVPYRWEEECELGGTQGLFARVSRGVDYHKVLHEKIKQMMERVKKYHPDIDYKAYVDNGPVSDRAFAWAAGVGFYGKNGFIISPDYGSFVFLGQVLLNKELSEKSTPLESMCGHCDLCINACPVDALKGPFRFDGNKCISYLTQKKGILNRQERKAIGQSLYGCDICQDVCPFNKEAKLSKEGKFKADCKDIAPELEYILNMDNKTYSEYFKGTSSGWRGKRTLQRNAVILCGNILLENNFTLLLQCIHDQREEIRIHAMFSLLEYGARGEKTVEEHIQAESCDFMDKFNRYR

SEQ ID NO: 74354 - protein, 391 aa, unidentified
  source 1..391: note = Alkalibacterium gilvum
  REGION 1..391: note = tr|A0A1H6RTL1|A0A1H6RTL1_9LACT Epoxyqueuosine reductase OS=Alkalibacterium gilvum OX=1130080 GN=queG; PE = 3 SV=1
MTQDLKELIKIKAAEIGIDKIGFTHAEPFYSLEDKLKKQQAKGHHSGFEHKVIEERVYPEKIFDEPRSIISIALAYPSKMHNKPPRVKGERRGEFARASWGTDYHYILRDRMNKLIHYIKEIAPQNVSFKPMVDTGELVDVAVAQRAGLGFIGRNGLLITKEFGSYVYLGEIITNIEFEADEEVAFGCGDCTRCIDACPTDALLGDGRMNANRCLSFQTQTKGYMPKEYRRKMGHVIYGCDICQIVCPYNKGMDSHFHEEMEPEPFNTNPKLKPLLTISNREFKETFGELAGSWRGKKPLQRNAIIALANYRDYSAVPDLLNVIDNDVRPMIRGTAAWAIGVITNKRPNGEIIAFLEEALLKETDEETIEEFQSAINDLKERMNKLNMKEN

SEQ ID NO: 74355 - protein, 391 aa, Alkalibacterium kapii
  REGION 1..391: note = tr|A0A511ARB0|A0A511ARB0_9LACT Epoxyqueuosine reductase OS=Alkalibacterium kapii OX=426704 GN=queG PE=4; SV = 1
MNQELKELIKTKAAEIGIDKIGFTHAEPFYSLEDKLKKQHAKGHHSGFEHKVIEERIYPEKIFAEPKSIISIALAYPSKMPNKPPRVKGERRGEFARASWGTDYHYVLRDRMNKLIKYIEEIGPEDVAFKPMVDTGELVDVAVAQRAGIGFIGRNGLLITKEFGSYVYLGEIITNLEFEPDEEVTYDCGDCTRCVDACPTDALLGDGRMNAIRCLSYQTQTKGYMTKEYRRKMGHVIYGCDICQIVCPYNKGIDSHIHEEMEPEPFNTNPKLKPLLTISNREFKETFGNLAGSWRGKKPLQRNAIIALANYRDYSAVPDLLNVIDNDVRPMIRGTAAWAVAVITQKRPNTEVIAFLEDALLKETEEETIREFQGAIENLKARMSQLETKEN

SEQ ID NO: 74356 - protein, 393 aa, Alkalibacterium olivapovliticus
  REGION 1..393: note = tr|A0A2T0W9R6|A0A2T0W9R6_9LACT Epoxyqueuosine reductase OS=Alkalibacterium olivapovliticus OX=99907; GN = queG PE=3 SV=1
MNQELKEKIQAKAEDLGINKIGFTHADPFYDLEAKLHAQQEKGHHSGFEHKVIEERIYPERIFDQPKSIIAIALAYPSKMRDKAPRVKGERRGEFARASWGTDYHTVLSKKMDQLIDYIRSEAEGDVSFKPMVDTGELVDVAVAQRAGLGFIGRNGLLITKEFGSYVYLGEIITNIEFESDEEVSFGCGDCTRCVDACPTDALLGDGRMNAQRCLSYQTQTKGYMPKEYRRQMGHVIYGCDICQIVCPYNKGIDSHFHEEMEPEPFNTTPELKPLLTISNKDFKKDFGDMAGSWRGKKPLQRNAIIALANYRDFSAVPDLLNVIENDPRPMIRGTAAWAVATITKKRPNQDVLDFLEESVLKETDEETVAEFTEAIIELKERLDLIESKRRDT

SEQ ID NO: 74357 - protein, 394 aa, Alkalibacterium pelagium
  REGION 1..394: note = tr|A0A1H7KW57|A0A1H7KW57_9LACT Epoxyqueuosine reductase OS=Alkalibacterium pelagium OX=426702 GN=queG; PE = 3 SV=1
MNQLLKEKIIDKAEELGINKIGFTHADPFYDLEEKLHAQQEKGHHSGFEHRVIEERIYPEKIFDQPKSIIAIALAYPSKMREKAPRVKGERRGEFARASWGKDYHSILKDKMDQLIEYIRSEAEGDVTFKPMVDTGELVDVAVAQRAGLGFIGRNGLLITKEYGSYVYLGEIITNIAFEPDNEVDFGCGDCTRCVDACPTDALLGDGRMNAQRCLSYQTQTKGYMPKEYRRKMGHVIYGCDICQIVCPYNKGMDSHFHEDMEPEPFNTTPELKPLLTISNKEFKQTFGEMAGSWRGKKPLQRNAIIALANYRDFTAVPDLLNVIDNDPRPMIRGTAAWAVATIISKRPNEDVLAFLEEAVLKETDEETITEFNEAIAGLKERLDAIESKRRDKH

SEQ ID NO: 74358 - protein, 391 aa, Alkalibacterium putridalgicola
  REGION 1..391: note = tr|A0A1H7TA90|A0A1H7TA90_9LACT Epoxyqueuosine reductase OS=Alkalibacterium putridalgicola OX=426703; GN = queG PE=3 SV=1
MSQQLKELIKVKAAEIGIDKIGFTHAEPFYSLEDKLIKQHAKGHHSGFEHKVIEERIYPEKIFAEPKSIIAIALAYPSKMRNKPPRVKGERRGEFARASWGTDYHYVLQDRMDKLIAYIEEVAPGEVAFKPMVDTGELVDVAVAQRAGLGFIGRNGLLITEEFGSYVYLGEILTNIDFEPDEEVAFGCGDCTRCVDACPTDALLGDGRMNANRCLSYQTQTKGYMPKEYRRKMGHVIYGCDICQIVCPYNKGVDSHFHEEMEPEPFNTMPELKPLLTISNREFKETFGDLAGSWRGKKPLQRNAIIALANYRDYSAVPDLLNVIDNDVRPMIRGTAAWAIATITKKRPNEEIVTFLEEALLKETDEETITEFKEAIGEIKARLNKLNAKES

SEQ ID NO: 74359 - protein, 388 aa, Alkalibacterium sp.
  REGION 1..388: note = tr|A0A1L8P6R4|A0A1L8P6R4_9LACT Epoxyqueuosine reductase OS=Alkalibacterium sp. 20 OX=1798803 GN=queG; PE = 3 SV=1
MSQQLKELIKAKAKEIGIDKIGFTHAEPFYSLEDKLIKQHAKGHHSGFEHKVIEERIYPEKIFDEPKSIIAIALAYPSKMQNKPPRVKGERRGEFARASWGTDYHFILRDRMKKLVEYIEEIAPGEVAFKPMVDTGELVDVAVAQRAGLGFIGRNGLLITEEFGSYVYLGEIITNIAFESDEKVAFGCGDCTRCIDACPTDALLGDGRMNANRCLSYQTQTKGYMPKEYRRKMGHMIYGCDICQIVCPYNKGMDSHFHEEMEPDPINTMPELKPLLTISNREFKDTFGDLAGSWRGKKPLQRNAIIALANYRDYTAVPDLLNVIDNDPRPMIRGTAAWAVATITNKHPNEEIVLFLEEAVKKETEDETVSEFNEAIGDLKARLNTLNN

SEQ ID NO: 74360 - protein, 388 aa, Alkalibacterium sp.
  REGION 1..388: note = tr|A0A011RLB3|A0A011RLB3_9LACT Epoxyqueuosine (OQ) reductase QueG OS=Alkalibacterium sp. AK22 OX=1229520; GN = ADIAL_2021 PE=4 SV=1
MNEELKQKIIRQAERIGINKIGFTHADPFYDLEPKLHAQQEKGHHSGFEHKIIEERIYPEKIFDQPQSIIAIALAYPSKMSRKPPRVKGERRGEFARASWGRDYHEILSEKMDQLIAYIRSEAGEDVRFKPMVDTGELVDVAVAQRAGLGFIGRNGLLITEEYGSYVYLGEIITNIPFEPDKEVAFGCGDCTRCIDACPTDALLGDGRMNAKCCLSFQTQTKGYMPKEYRRQMGHVIYGCDICQIVCPYNKGIDSHFHEEMEPESENTNPKLKPLLTISNKEFKQAFGPLAGSWRGKKPIQRNAIIALANYRDFSAVPDLLNVIDNDPRPMIRGTAAWAVATIVKKRPTDDILSFLEEAAEKESEPETVQEFAEAIQDLKDRLNRKNS

SEQ ID NO: 74361 - protein, 391 aa, Alkalibacterium subtropicum
  REGION 1..391: note = tr|A0A1I1J0Y8|A0A1I1J0Y8_9LACT Epoxyqueuosine reductase OS=Alkalibacterium subtropicum OX=753702; GN = SAMN04488102_106110 PE=4 SV=1
MNQQLKELIKAKAKEIGIDKIGFTHAEPFYSLEDKLIKQHAKGHHSGFEHKVIEERIYPEKIFAEPKSIIAIALAYPSKMRNKPPRVKGERRGEFARASWGTDYHYVLQDRMDKLIAYIEEIAPGEVAFKPMVDTGELVDIAVAQRAGLGFIGRNGLLITEEFGSFVYLGEILTNIEFEPDQEVSFGCGDCTRCVDACPTDALLGDGRMNANRCLSYQTQTKGYMPKEYRRKMGHVIYGCDICQIVCPYNKGVDSHVHEEMEPEPFNTMPELKPLLTISNRDFKETFGDLAGSWRGKKPLQRNAIIALANYRDYSAVPDLLNVIDNDVRPMIRGTAAWAIATITKKRPNEEIVTFLEEALLKETDEETVTEFKEAIGELKARLNKLNAKES

SEQ ID NO: 74362 - protein, 394 aa, Alkalibacterium thalassium
  REGION 1..394: note = tr|A0A1G9CVB7|A0A1G9CVB7_9LACT Epoxyqueuosine reductase OS=Alkalibacterium thalassium OX=426701 GN=queG; PE = 3 SV=1
MNQLLKEKIIDKAEELGINKIGFTHADPFYELEEKLHAQQEKGHHSGFEHRVIEERIYPEKIFDQPKSIIAIALAYPSKMREKAPRVKGERRGEFARASWGKDYHLILKEKMDQLIEYIRQEAEGDVTFKPMVDTGELVDVAVAQRAGLGFIGRNGLLITKEYGSYVYLGEIITNIAFEPDSEVDFGCGDCTRCVDACPTDALLGDGRMNAQRCLSYQTQTKGYMPKEYRRKMGHVIYGCDICQIVCPYNKGMDSHFHEDMEPEPFNTTPELKPLLTISNKEFKQTFGEMAGSWRGKKPLQRNAIIALANYRDFTAVPDLLNVIDNDPRPMIRGTAAWAVATIISKRPNEDVLAFLEEAVLKETDEETITEFNEAITGLRERLDAIESKRRDKH

SEQ ID NO: 74363 - protein, 368 aa, Alkalibaculum bacchi
  REGION 1..368: note = tr|A0A366IG37|A0A366IG37_9FIRM Epoxyqueuosine reductase OS=Alkalibaculum bacchi OX=645887; GN = DES36_102191 PE=4 SV=1
MKDRIIEEAKKLNIDLIGFTNADVFHEAKSAIEDRIDKENLSPFLPLDLEKNTNPLKVWDEAKSIISIGIFYKHDILFGEDESNGGKISRVAWGKDYHIVLMDKMNRLMSTIQAIYPQLEYKPFTDSGFLLDRAIAERSGLGYYGKNGFIINPLYGSYIFLGHILVNVDIEENAKKMNSKCGPCKRCITACPTGALEEGQGFRSKKCISYLTQKKEFLNREERKSLGNSLYGCDICQEVCPMNKGSLLSKEGQFAPDLSTVKPKLKDLLKMDNKTFKKNYGSTAAGWRGKKNLQRNAIIVAGNVQSEENFRLLIDTLKDNRPDIRLYAMLSLLEYGEKGRVLVEKSLVLEDEEFKQKYVESGKLKGED

SEQ ID NO: 74364 - protein, 383 aa, unidentified
  source 1..383: note = Alkalicoccus halolimnae
  REGION 1..383: note = tr|A0A5C7FPF9|A0A5C7FPF9_9BACI tRNA epoxyqueuosine(34) reductase QueG OS=Alkalicoccus halolimnae OX=1667239 GN=queG PE=4 SV=1
MSSQFKNEIIEFSRKIGIDKIGFAPADPFVTMKERLRIQQEKGYASGFEKGSLEERTNPDLLLPEAKTIISIALAYPSKMKDAPRSVKGDRRGIFCRASWGEDYHHVLRRKLKQVEEFILQKDPRARCKEMVDTGELPDRAVAERAGIGWSGKNCAIITPEFGSYVYLGEMITTISFEEDVPLEEQCGTCNKCVDACPTGALVQGGQLDATKCIAFLTQTKTMLPKQYRKKLGNRLYGCDTCQTVCPENKGVDEHRHPEMEPDPEIVKPQLEPLLTMSNREFKEKFGRISGSWRGKKPIQRNAIIALAVFKEKASLPVLTKLMHEDPRPVIRGTAAWALSEIENSEDIYKEIDKAGSNENNEEAKTEMENALSFMKNAGEKSY

SEQ ID NO: 74365 - protein, 383 aa, unidentified
  source 1..383: note = Alkalicoccus saliphilus
  REGION 1..383: note = tr|A0A2T4U6K8|A0A2T4U6K8_9BACI Epoxyqueuosine reductase OS=Alkalicoccus saliphilus OX=200989 GN=queG; PE = 3 SV=1
MRMNRGLKQEIIDYSKEIGVDKIGFAAADPFVTLKERLRVQQEKGYVSGFEKGTLGERTTPELLLPEAKTVISIALAYPSKMKDAPRSVKGDRRGIFCRASWGEDYHHILRRKLNLLEEFIQKKVTGARSKSMVDTGELSDRAVAERAGIGWSGKNCAVITPEFGSYVYLGDLITTVPLEEDQPLEDQCGSCTKCIDACPTGALIQGGQLDATKCVAFLTQTKTMLPEKYRKKIGNRLYGCDTCQVVCPENKGKDFHHHPEMEPDPEVVKPRLEEVLSMSNKEFKKKFGHISGSWRGKKPIQRNAVIALGVFKEKSALPTLIKLLKEDPRPVIRGTAAWAIGEIEKSSETYQMLEASAETEKDEEVLSEIYSVLNNTQTTLRS

SEQ ID NO: 74366 - protein, 360 aa, Alkalilimnicola ehrlichii
  REGION 1..360: note = tr|A0A3E0WYF6|A0A3E0WYF6_9GAMM Epoxyqueuosine reductase OS=Alkalilimnicola ehrlichii OX=351052 GN=queG; PE = 3 SV=1
MSSPVSAKNQDALRDPRTLAELAASIKQWGREAGFAEVGITGTDLAQDEAYLLRWLERQFHGDMDYMARHGVKRSRPEQLLPGTIRVISVRMDYAPEEEPEHGDNTQAFIARYARGRDYHKLIRKRLQHLATRLEQEVGMFGYRVFVDSAPVLEKALARNAGLGWIGKNTLLINSRAGSYFFLGEIYTDLPLPVDEPASEHCGSCRACLDICPTKAIVAPYQLDARLCISYLTIESHQAIPEDLRPHIGNRIFGCDDCQQVCPWNKFAQATDEADFKPRHGFDSADLIELFLWSEETFLERTAGSAIRRLGHERWLRNIAVALGNQAPEPTIEAALEQRRNHPSALVREHVEWALARLRT

SEQ ID NO: 74367 - protein, 351 aa, Alkalilimnicola ehrlichii
  REGION 1..351: note = tr|Q0AB66|Q0AB66_ALKEH Epoxyqueuosine reductase; OS = Alkalilimnicola ehrlichii (strain ATCC BAA-1101 / DSM 17681 / MLHE-1) OX=187272 GN=queG PE=3 SV=1
MQALAERIRVWAGELGFTGVGIADPDLRQDEYWLLRWLRRGWQGTMGWMGRHGVKRSRPQRLLPGTGRIISVRLDYQPAGAEPWSVLADGRKAYVARYALGRDYHKLMRQRLQKLARRIETEVGPYGYRAFVDSAPVLEKAVGREADLGWIGKHTLLMDRDASSWFFLGELFTDLPLPADPPRRRGHCGRCRACIDVCPTGAIVGPYQLDARLCISYLTIEHDGPIPEPLRPLMGNRVFGCDDCQLICPWNKFARPTAEGDFQPRHNLDHADLVELFGWTESQFLDRMAGSAIRRLGHERWLRNLAVALGNGPASAEAVAALEARQEHPSALVREHVAWALRRLTEPGNAE

SEQ ID NO: 74368 - protein, 375 aa, Alkalimonas amylolytica
  REGION 1..375: note = tr|A0A1H3Y3I8|A0A1H3Y3I8_ALKAM Epoxyqueuosine reductase OS=Alkalimonas amylolytica OX=152573 GN=queG; PE = 3 SV=1
MSLAALATRIKIWAKELGFADCGITNTDLKREEPRLQAWLEQEFHGEMDYMARHGMVRARPDELLPGTLRVISVRMDYLPERAAFASNLKDPSKAYISRYALGRDYHKVIRKKLKQLAERIEQEVSELGYRPFVDSAPVLERPLAQKAGLGWVGKHSLLLNNEAGSWFFLGELLVNLPLPIDEPHPGDCGSCVACITSCPTQAIVAPFVVDGRRCISYLTIELKGAIPLEFRPLLGNRIYGCDDCQLVCPENRTAPLSLEADFQIKDHWRDQSLLSLFGWDEPTFLQRTEGSPIRRIGFERWQRNLAVALGNAPYSEDIVQTLQQAHAGASALVQEHIDWALQQQQKKQWLETSVLPRQTERLVRIVKKGLPRDA

SEQ ID NO: 74369 - protein, 321 aa, unidentified
  source 1..321: note = Alkalinema sp.
  REGION 1..321: note = tr|A0A251WID1|A0A251WID1_9CYAN Epoxyqueuosine reductase OS=Alkalinema sp. CACIAM 70d OX=1934309 GN=queG; PE = 3 SV=1
MASTEPSTLTSAIKQKAFDLGFHKVGIVRVADWANVEPQELRSWLAQGYQAEMAWMAASKRQNVYEILPTVQSIVCVAINYYTPHQRPTGAEYGKISRYGWGRDYHKVLHKRLKAFSLWLEAQTGLDAHNETIQTRYYADTGPIQDKVWAERAGIGWIAKNSNVITREYGSWVFLGEILTNLVLIPDRPHTQHCGTCTRCIDACPTAAITQPFVVDANRCIAYHTIENRNDELPHDIASNLQGWVAGCDICQDVCPWNQRFAQATDIPDFQPYPDNIAPQLQDLATLDAAEYDRRFPASALRRIKPEMWRRNARANLTHHS

SEQ ID NO: 74370 - protein, 370 aa, unidentified
  source 1..370: note = Alkaliphilus metalliredigens
  REGION 1..370: note = tr|A6TU90|A6TU90_ALKMQ 4Fe-4S ferredoxin-type domain-containing protein OS=Alkaliphilus metalliredigens (strain QYMF) OX=293826 GN=Amet_3636 PE=4 SV=1
MNLKKEIIDFAKTIGIDLIGFTTAAPFEELRPILEERKAKGYLSGFEEQDMEKRIDPKKTMANAQSILVIGQPYYIDDLETTLGDSQFYGELARTAWGTDYHQIVKEKLEEIMSFIKEKEENVEYRTFVDTGPLVDRQVAYRAGLGWYGWNNTLISSKYGSWFFIGYLLINLEFPPDRPMDDQVCLACQLCIKHCPNQALQGPYSFNSQRCVSNLLQQKEEMKDADKKKIGKKIYGCDICQSVCPHNERVRKTKELRFQPQNPKHEIDLIHFLGISKKEFKDIYGQNASGWRGKKILQRNAIIAMGNHHNKEAIPHLLPLLKDPRLDIRSVTIWALNELDPEYTCQLLQEMMERENSEELQSMMNKYCNP

SEQ ID NO: 74371 - protein, 375 aa, Alkaliphilus oremlandii
  REGION 1..375: note = tr|A8MEX5|A8MEX5_ALKOO Uncharacterized protein; OS = Alkaliphilus oremlandii (strain OhILAs) OX=350688; GN = Clos_0907 PE=4 SV=1
MNLKEKIVQYSKSIGIDLIGFTDAGPFDDLRQILLDRKINGKLSGFEEEDIQLRVDPRKTLDTAKSIIVIAMSYYVGADQLPCSEKPKFYGELARTAWGKDYHLVLKEKLNQLADFIKNEEEDFQYKAFVDTGPLVDRYVANRSGIGFYGYNSAIINKTYGSWIFIGYMINNMAFEEDKSLENVHCYGCNLCIEQCPTSAIEGPYQFDANKCLSNILQQKRDIAEDVRLLIGKKIYGCDICQNVCPHNKGIKEMTTKEFMPKNPSHCVDLIELLHISNKEYNEIFKGNASGWRGKKTLQRNAIIALGNYKDENPWPHLIPMLKDERPDIRKITIETLYSIHPQKTVQLISSMKGNEKDQEVLMTIHKYLDNYKNK

SEQ ID NO: 74372 - protein, 366 aa, Alkaliphilus peptidifermentans
  REGION 1..366: note = tr|A0A1G5K2P8|A0A1G5K2P8_9CLOT Epoxyqueuosine reductase OS=Alkaliphilus peptidifermentans DSM 18978; OX = 1120976 GN=SAMN03080606_03213 PE=4 SV=1
MNLKQDIITFSKTIGVDLIGFTSAEPFEEIRATLEDRKKRNLLSGFEEQDLEKRIDPRRTMANAKSIIVIGQSYYYNSQYEETKYYGDLARTAWGRDYHLVLAGKLDEISNFINSRVRDFQYKGYVDTGPLVDRHLAYRAGLGWYGHNATLINDVYGSWFFIGYLITNIELESDKPLDTKCAGCNICIEQCPGGAIEEPYIINAKKCLSNILQQKSDIPIEKRKILGRRLYGCDICQTVCPHNKNAKEMTGEDFIPSILPNKIDLIKLLNISNKEYKELFETNASGWRGKRVLQRNAIIALVNYGDRNIVPHLIKLLKDNRPEIRRYALWGIIHLDRSIGIELAKDLYTIETDENNKKTIEDYFLL

SEQ ID NO: 74373 - protein, 353 aa, Alkaliphilus sp.
  REGION 1..353: note = tr|A0A2G2MME9|A0A2G2MME9_9CLOT tRNA epoxyqueuosine(34) reductase QueG OS=Alkaliphilus sp.; OX = 1872455 GN=queG PE=4 SV=1
MSVLSSRGSMLELKSEIIKYAHTLSIDLIGFTTADRFNGLENILNERKKKNYLSEFEEENFELRINPRKTLKSARSIVVIGQSYYSNIDSSPVDTNRSKFQGDLARISWGEDYHIVLKEKLDKLSSFIGNKHSDFQFLSFVDTGPLVDRHVAWRAGLGVFGKNNCLINDKLGSWFVIGYMLTNLDIEADKPKENICCINCNICIKECPTGAIEKPHVINVKKCISYILQSKDSILENNRELLETRIYGCDICQNKCPKNFMVTETSLDEFKPIVKQIDLVDLLTISNKKFKLLLGNNSAGWRGKKILQRNAIIAMGNQNRASAIPYLLPYLTDDRVEMREYARWAIAKLKKLT

SEQ ID NO: 74374 - protein, 355 aa, Alkalispirillum mobile
  REGION 1..355: note = tr|A0A498CFT1|A0A498CFT1_9GAMM Epoxyqueuosine reductase OS=Alkalispirillum mobile OX=85925 GN=queG PE=3; SV = 1
MTADSMQALAGRIRSWAREMGFTGVGIADPDLRQDEYWLLRWLQHGWQGTMGWMGRHGVKRSRPARLLPGTRRIISVRLNYQPEGAEPWSVLQDGRKAYVARYALGRDYHKLMRQRLQRLARRIEAEVGPHGYRAFVDSAPVLEKAVGREANLGWIGKHTLLMDRDASSWFFLGELFTDLPLPADPPRRQGHCGSCRACIDICPTRAIIGPYQLDARRCISYLTIEHDGPIPEALRPLIGNRVFGCDDCQLVCPWNKFAQPTAEADFQPRHGLDQTDLVTLFGWTEQQFLDRMAGSAIRRLGHERWLRNLAVALGNGPASAEAVAALEARRAHPSELVREHVAWALNRLRSPSGG

SEQ ID NO: 74375 - protein, 353 aa, unidentified
  source 1..353: note = Alkalispirochaeta americana
  REGION 1..353: note = tr|A0A1N6QRR6|A0A1N6QRR6_9SPIO Epoxyqueuosine reductase OS=Alkalispirochaeta americana OX=159291; GN = SAMN05920897_10528 PE=4 SV=1
MVDDELRELARQEGLKCLAVMDARSAPEKEEEVFRQWLSQGRHGTMKWMERHAEMRYRPQGLLPGCRSMIFVGFNYYQPLPRAPDKPAGRVARYAWGRDYHKELGKRLRRVVRALQGRYPHHHFRSWTDATPLAERYYAELAGLGFSGRNNLIIHRRFGSWFFLGEILSTLKFREHRPSRDCSSSATATRTRTCPDRCSRCIDSCPTRALMEPHRIDASRCISYLTIEYQGVIGPDLARSLGDWVFGCDLCQERCPFNQGVPSTGIEGFLQHRGGSFLLLRDLLSLREEDMLARFAGSPLMRAGRTRLVRNACIAAANSGALDLLPQLRVLREDADEIIAAQAEQAITALEGY

SEQ ID NO: 74376 - protein, 373 aa, unidentified
  source 1..373: note = Alkalispirochaeta odontotermitis
  REGION 1..373: note = tr|A0A0A0DXE1|A0A0A0DXE1_9SPIO Uncharacterized protein OS=Alkalispirochaeta odontotermitis OX=1329640; GN = JY97_13230 PE=4 SV=1
MTPKKIIREKALELGFEDAGFTGVEPLDDYIREIDSRPPQMYGWVQTEKFNTRRGATVGQKHPWAKSLVVLIRNYHRRAFPPQMVGIIGRCYQVDERREHGPEHQRVVDFLNFLKSHGIRVWFDEELPARMSAARAGITNYGKNCFAYARTSMRGASWLESIPLLLDAELEPDEPSIELDCPKWCKNACMAACPTGALYAPKKMNPLRCIAFNTYYTSGITPLELREPMGTWVYGCDRCQEVCPRNQPWLNQNLPENKPLERRAPDFALETLLSMDDRHYVDKVWPLAFYISRKLAAKWQMNAARALGNLGDPAKVPFLIQSLKENPHEIVRSMSAWSLGQLGGKGARAGLEACRSGEEGLVRQEIEQALQKS

SEQ ID NO: 74377 - protein, 353 aa, unidentified
  source 1..353: note = Alkalispirochaeta sphaeroplastigenens
  REGION 1..353: note = tr|A0A2S4JFZ9|A0A2S4JFZ9_9SPIO DUF1730 domain-containing protein OS=Alkalispirochaeta sphaeroplastigenens OX=1187066 GN=AU468_12900 PE=4 SV=1
MTTEELRDLAREEGLECLAVIDARAAPEEEEVFRQWLSQERHGTMAWLERHAPVRYRPQELLPGCRSMISVGFNYYQPLPPEPEQPAGRVARYAWGRDYHKELGKRLRRLVRALQDRFPGDRFRSWTDATPLAERYYAELSGLGFTGRNNLLIHRRFGSWFFLGEILSTASLAEHRPRQEEGCSSRAACPHRCSRCIDSCPTRALIGPHRLDASRCISYLTIEYRGVIAPDLADSLGNWVFGCDLCQDCCPLNGGVPSTRAEGFLRHRSGSFLALADLLSLREEDLLSRFAGSPLMRAGRTRLVRNACIAAANSGDFELLPLVRALREDADQVVAAQAEQAVARLEERRDGAP

SEQ ID NO: 74378 - protein, 319 aa, unidentified
  source 1..319: note = Alkalitalea saponilacus
  REGION 1..319: note = tr|A0A1T5FUG3|A0A1T5FUG3_9BACT Epoxyqueuosine reductase OS=Alkalitalea saponilacus OX=889453 GN=queG; PE = 3 SV=1
MNLTQQHIANTIRDKALELGFDDVGFSPATELTEDKERLEKWLNNGYNAGMKYMNNHFEKRVNPALLVERSLSVITVLKNYNQQNNQLSTNFPKISRYAYGKDYHDTIRKKLSVLFDYIREHIYPDLQGRYFVDSAPLLERTLAVKAGLGWIGKNSMLINRKLGSWVFIAELVVNLELPYNQTTVNDGCGGCTRCIDACPTQAILPHRQIDSNRCISYLTIENRDDIPENFEGKLDGWVFGCDICQEVCPWNRKAKDTDEPDFRPSEQLLKMTPVEWEKLTPEKFSELFRGSAVKRTKFNGFMRNHNFIAEPHKTHKKI

SEQ ID NO: 74379 - protein, 366 aa, Alkanindiges illinoisensis
  REGION 1..366: note = tr|A0A4Y7XDZ5|A0A4Y7XDZ5_9GAMM Epoxyqueuosine reductase OS=Alkanindiges illinoisensis OX=197183 GN=queG; PE = 3 SV=1
MASKKATIPVLDETLRQNPQALKEWIKAQARQLGFSDCGIARPDTQDQIPHLQQYLADGFHADMDYLATNLDKRANPALLVPDTRSIICVRMDYLAEAPPHRYVPHEPNQAIIARYARGRDYHKVLRGRLKQLARVIEEKVGPFESRPFADSAPIFEKALAEKSGLGWTGKHTLLINKKAGSFFFLGELFTSLDLPFDEPATAHCGSCSACLDICPTKAIVAPYRLDARKCIAYLTIEYQGIIPEEFRKPIGNRVFGCDDCQLICPWNGFAQLSGEDDFKARHHLNQATLLELWQWTEQEFLSKTEGSAIRRTGYQGFMRNVAIGLGNADFDPQIIAALQQSQHDEVVQVHVDWALTQQQLKMQAV

SEQ ID NO: 74380 - protein, 366 aa, Alkanindiges sp.
  REGION 1..366: note = tr|A0A1S8CZG9|A0A1S8CZG9_9GAMM Epoxyqueuosine reductase OS=Alkanindiges sp. H1 OX=1907941 GN=queG PE=3; SV = 1
MTHKKASIVLLDESLRQNPQALKDWIKAQARQLGFSDCGIARPDTCDQIPHLQQYLDDGFHADMDYLAANLSIRANPALLVPNTRSIICVRMDYLAEAPPHRYVPHEPNQAIIARYARGRDYHKVVRGRLKQLARLIEEQIGPFESRPFADSAPIFEKALAEKSGLGWTGKHTLLINKKAGSFFFLGELFTSLDLPFDEPATAHCGSCSACLDICPTQAIVAPYRLDARKCIAYLTIEYQGIIPEEFRKPIGNRVFGCDDCQLICPWNGFAQLSKEDDFKARHNLNQVTLLELWQWSEQEFLSKTEGSAIRRTGYQGFMRNVAIGLGNADFDPAIIAALQHSQHDEVVQVHVDWAIQQQQLKMQAD

SEQ ID NO: 74381 - protein, 381 aa, Allobacillus sp.
  REGION 1..381: note = tr|A0A556PPH0|A0A556PPH0_9BACI Epoxyqueuosine reductase OS=Allobacillus sp. SKP2-8 OX=1955271 GN=queG; PE = 3 SV=1
MDFNQLKQELLEYGAEVNIQKIGFASADTFDTLKQRLLVQQSLGYQSGFEKGSIEERTTPTKLLPKAQSIISIAIAYPSRMKDAPKSRKGDRRGFFARASWGKDYHDVLREKLRLLEEFLHQKVEGVATKAMVDTGELHDRAVAERAGVGFVGKNCALITEEYGSYVYLGELITNIPFEPDQPVEDGCGDCNICVDACPTGALVEGGQLNASRCIAFQTLTKSFLPDEFRSKLGNRLYGCDTCQLVCPKNKGMDFHLHEELEPDPELVKPRLIPLLTISNREFREKFGYMAGSWRGKKPLQRNAIIALAHYRDETAVDTLNDLMHKDPRPVIRGTAAWAIGKIGTMEAKELIEAAMKKETDEDVLEEMNKGIALTKQERAI

SEQ ID NO: 74382 - protein, 381 aa, Allobacillus sp.
  REGION 1..381: note = tr|A0A556PNQ7|A0A556PNQ7_9BACI Epoxyqueuosine reductase OS=Allobacillus sp. SKP4-8 OX=1955272 GN=queG; PE = 3 SV=1
MDFHQLKQELLEYGAEVNIQKIGFASADTFDTLKQRLLVQQSLGYHSGFEKGSVEERTTPTKLLPKAQSIISIAIAYPSRMKDAPKSRKGDRRGFFARASWGKDYHDVLREKLRLLEEFLHEKVDGVATKAVVDTGELHDRAVAERAGVGFVGKNCALITEEYGSYVYLGELITNIPFEPDQPVEDGCGDCNICVDACPTDALVQGGQLNASRCIAFQTLTKSFLPDEFRSKLGNRIYGCDTCQLVCPKNKGMDFHLHEELEPDPELVKPRLIPLLTISNREFKDKFGYMAGSWRGKKPLQRNAIIALAHYRDETAVDTLNDLMHKDPRPVIRGTAAWAIGKIGTEEAKELIETAMEKETDEDVLIEMEKGLALTKQESAM

SEQ ID NO: 74383 - protein, 357 aa, Allochromatium vinosum
  REGION 1..357: note = tr|D3RRU4|D3RRU4_ALLVD Epoxyqueuosine reductase; OS = Allochromatium vinosum (strain ATCC 17899 / DSM 180 / NBRC 103801 / NCIMB 10441 / D) OX=572477 GN=queG PE=3 SV=1
MSHATHSPDTPQVLAERLKTWGRELGFQQIGITDTDLTDAEPRLRDWLARGYHGEMDYMARHGTKRSRPDELVPGTLSVISARMDYQPESRATLHERLADPAGAFISRYSLGRDYHKVLRRRLQRLADRLAAHIGPFGHRVFVDSAPVMEKPLAEKAGLGWIGKHSNLVNPRAGSWFFLGEIYTDQPLPPDQPMADHCGRCRACLDACPTGAIVAPYQVDGRRCISYLTIELKGAIPEPLRPLIGNRIHGCDDCQLVCPWNRFARLTEETDFLPRHGLDTATLIALFAWDEPTFLARTEGSAIRRLGHERWLRNLAVALGNAPDSPEVRLALETRADHPSPLVREHVVWALAGLACR

SEQ ID NO: 74384 - protein, 367 aa, Allochromatium warmingii
  REGION 1..367: note = tr|A0A1H3HPB1|A0A1H3HPB1_ALLWA Epoxyqueuosine reductase OS=Allochromatium warmingii OX=61595 GN=queG; PE = 3 SV=1
MPLTLTPLESPAALVARIKTWGRELGFQQLGIADTDLTDAEPRLRDWLARGYHGEMEYMARHGRKRSRPAELVPGTLSVIAARMDYQPESRATLRERLADPATAFIARYALGRDYHKVLRQRLQRLADRLATHIGPFGHRVFVDSAPVMEKPLAAKAGLGWIGKHSNLVHPQAGSWFFLGEIYTDLPLPPDPPLTDHCGRCHACLSACPTGAIVAPYQVDARRCVSYLTIELHGPIPESLRPLIGNRIHGCDDCQLVCPWNRFASLTTESDFLPRHGLDTATLLALFAWDDATFLARTAGSAIRRLGPERWLRNLAVALGNAPPSIEIETALQARADHPSALVREHVAWALGQHITRRNQPPAANTT

SEQ ID NO: 74385 - protein, 362 aa, unidentified
  source 1..362: note = Allofrancisella guangzhouensis
  REGION 1..362: note = tr|A0A0A8EA52|A0A0A8EA52_9GAMM Epoxyqueuosine reductase OS=Allofrancisella guangzhouensis OX=594679; GN = queG PE=3 SV=1
MKLELTLEQWQKVKNYALDELGLSSLSKADCDLSEYIPYYNKWLESGYNAELDYMVKHGEKRFVPNQLVPGTNSVIVATLNYLNRHISTKTEVKRLRSISEIAEVSIYAHGRDYHKVMKKKLQKLGEYIDKITANHQFRVFTDSAPVLEKPLAEKAGLGWIGKNSMLMNKEQGSFFFIGVIYSNLDLSKLPDTDLKLNECGKCRACIKLCPTGAILPNKMIDSRKCISYLTIENKGAIPLEFRDKIGTRIYGCDDCQLVCPFNNAAPETTEQDFQQRDFLVNRPLLELFSWSKEDFDKYTQGSAIRRIGYDAWIRNISIAIGNSPYKDENLLALENKRTKYLDNKLILEHIDWAINKQKSFI

SEQ ID NO: 74386 - protein, 366 aa, unidentified
  source 1..366: note = Allofrancisella inopinata
  REGION 1..366: note = tr|A0A4R7LJ17|A0A4R7LJ17_9GAMM Epoxyqueuosine reductase OS=Allofrancisella inopinata OX=1085647 GN=queG; PE = 3 SV=1
MKLELTLEQWQKVKNYAVNELGLSSLSKADCDLSEYIPYYNKWIENGYYAELDYMVKHGQKRFIPDQLVPGTNSVIVATLNYLNRSISTKTEVKRLRTPSEIAEISIYAHGRDYHKVMKKKLQKLGEYIDKITSDHQFRVFTDSAPVLEKPLAEKAGLGWIGKNSMLMNKEQGSFFFIGVIYSNLDLSKLPNTDPKLNECGKCQACIKLCPTGAILPNKMIDSRKCISYLTIENKGAIPLEFRDKIGTRIYGCDDCQLVCPFNNQAPVTTEQDFQQRNFLVNRPLLELFSWSKEDFDNYTQGSAIRRIGYDAWIRNISIAIGNSPYKHENLLALKNKRAEYLDNFLILEHIDWAINKLYNKQKSSI

SEQ ID NO: 74387 - protein, 319 aa, unidentified
  source 1..319: note = Alloprevotella rava
  REGION 1..319: note = tr|G5GC84|G5GC84_9BACT Uncharacterized protein; OS = Alloprevotella rava F0323 OX=679199 GN=HMPREF9332_01185; PE = 4 SV=1
MTKKTPDEPSFLTEGILKASLIKAEALRLGFSACGLAPAEPVDKVHAERRLQWISEGRHADMQYLERNMDKRLDPRLLVEGARTIVSVALNYYPAEKLSGWALSRYVYGQDYHEVMKARLRQLAEHIPPKEGYETRVFVDTAPLDERYWAWRCGLGWQGRSGQLILPKGGTYFFLGEIVLPYEADAYDTPIENRCGTCHACVDACPGQALRGDGTLDANRCLSYLTIENRGDLPPGTGQKMGTCFYGCDRCAEVCPWNRFAKPTEVEEFRPSEQLLQMTREDWEQLTIEQYRAIFKGSAVKRAKFEGLKRNIKALARKK

SEQ ID NO: 74388 - protein, 240 aa, unidentified
  source 1..240: note = Alloprevotella sp.
  REGION 1..240: note = tr|A0A496KQV0|A0A496KQV0_9BACT DUF1730 domain-containing protein (Fragment) OS=Alloprevotella sp.; OX = 1872471 GN=D8H91_04900 PE=4 SV=1
MILSSEYIKAEAQRLGFFACGISPALPMDAEHVARRQQWLDEGMHGEMSYLERNEDKRRDPRLLVEGVQCIVSLALNYYTFVPEESAPNYPPSDDKTAHNLTENTTSTTSSNTFDAEKTTPSSISPASTTNPRREKQKERYIPLARYARGKDYHDEMKARLFQLLGNIRQHLIDNGHTAAAEQLETSRVFTDTAPVDERYWAWKSGLGWIGKNSQLIIPGAGSYFFLGELFLTLPADAFD

SEQ ID NO: 74389 - protein, 321 aa, unidentified
  source 1..321: note = Alloprevotella sp.
  REGION 1..321: note = tr|A0A3P1ZFF7|A0A3P1ZFF7_9BACT tRNA epoxyqueuosine(34) reductase QueG OS=Alloprevotella sp. OH1205_COT-284 OX=2491043 GN=queG PE=4 SV=1
MPTTLSSDFIKAEALRLGFFACGLSAAAPIDKQRAQRRERWVAEGCHAEMSYLERNEDKRRDPRLLVEGAQTVVSVALNYYTFVPDTEHGGERHIPIARYARGRDYHDVMKQRLHALLHILAEKYGEPSLAGSRAFVDTAPIDERYWAWRSGLGWIGKNTQLIIPGAGSYFFLGELLLTLPADNYDSPIKNRCGTCRRCLTSCPTQALSEENGLDARRCLSYLTIEYRGENLPEGTGRKMGNTFYGCDRCSDCCPWNKWARPTAETDFQPSQALLNMTFEDWKKLTIEEYRKLFKGSAVKRAKYEGLTRNIRTLAEAETEE

SEQ ID NO: 74390 - protein, 306 aa, unidentified
  source 1..306: note = Alloprevotella tannerae
  REGION 1..306: note = tr|C9LFH4|C9LFH4_9BACT Putative iron-sulfur cluster-binding protein OS=Alloprevotella tannerae ATCC 51259 OX=626522 GN=GCWU000325_00956 PE=4 SV=1
MDKKVLQAQTIKAEAARLGFSACGLARAERVDQTQEARFRKWIAEGKHGEMDYLARNIEKRMDPRLLVEGAQTIVAVAMNYLPAHLPEKPPLARYAYGKDYHDVVRERLLALMQSLNLKPYEDGRAFVDTAPVDERYWAVKAGLGWTGRNGQLIIPRAGSYFFLGELILVHPADAYDSPKRNLCGNCRACVDACPAGALCGDGSMDARKCLSYLTIEHRGPLPEEAGEQMGDCFYGCDRCAEVCPWNRFARPTQEAAFAPSAELLRMKTEDWRALDVETYRRLFKGSAVKRAKYEGLKRNIDAWKP

SEQ ID NO: 74391 - protein, 356 aa, unidentified
  source 1..356: note = Unknown
  REGION 1..356: note = tr|A0A0N0K1P1|A0A0N0K1P1_9PROT Epoxyqueuosine reductase OS=alpha proteobacterium AAP81b OX=1523432; GN = queG PE=3 SV=1
MSALREALAAEAARLGFVAFGIAPADAAPAAGARLRQWLAEGCHGDMLWMAETESRRASPRGLWPEVRSVVMLGMSYASPHDPRRLAEHPDRAAISVYAQGEDYHEVVKKRLKTLARWLVAAAPDAGVKVFVDTAPVMEKPLAEAAGLGWQGKHTNLVSRAHGSWLFLGSIMTTLELGLDLAADAPHADRCGSCDRCQVACPTAAFPAPYRLDARRCISYLTIEHKGPVPDEFRAALGNRIYGCDDCLAACPWNRFAAVAQAMQAFRPRAELAAPRLADLLALDDAAFRAVFSGSPIKRIGRDRFVRNCLYAAGNSGDAALRPAVAALAGDPDPGVADAAAWALARLAERTAASTH

SEQ ID NO: 74392 - protein, 364 aa, unidentified
  source 1..364: note = Unknown
  REGION 1..364: note = tr|A0A1V1PJH8|A0A1V1PJH8_9PROT Epoxyqueuosine (OQ) reductase QueG OS=alpha proteobacterium U9-1i OX=1605283; GN = U91I_00131 PE=4 SV=1
MRDRLIAQARVLGFDAIGVADARAEWPADAWLKEFLREGRQGDMDWLGSERRAHPNALWPEAKSAILVGQSYAPEDDALALLGETQSGLVSAYAARRDYHDVVKGKLKQLAQWLARESGQDVKVFVDTAPLMEKPLAARAGLGWQGKHTNLVSREHGSWLFLGAILSAAEIETDTPHEDHCGSCRACLDICPTNAFPAPYKLDARRCLAYLTIEHKGQIAREFREPLGNRVFGCDDCLAACPWNKFAQTSREQRLAMKQELRLAPLSELAALDDAQFRLRFAGTPVKRTGRDRFVRNVVCAIGNSGDAALAPAAEALLDDASPLVRGMAVWALSRLLDGPAFERLKSARASQERDVSVREEWGP

SEQ ID NO: 74393 - protein, 188 aa, unidentified
  source 1..188: note = Alphaproteobacteria bacterium
  REGION 1..188: note = tr|A0A351T2G5|A0A351T2G5_9PROT tRNA epoxyqueuosine(34) reductase QueG (Fragment); OS = Alphaproteobacteria bacterium OX=1913988 GN=queG PE=4; SV = 1
MVSRLRAEADAAGFAAFGIADPAAIAEDGARFRTFLVLGRQGEMAWLAAKADRRADPFTLWPDVRSVIMLGMNYAPARNPMEKLAHRSAGNISCYAQGRDYHIIVKKRLKKVAGWLHRETGAEVKVFVDTAPVLEKPLARAAALGWQGKHTNLVSRQFGSWLFLGAIFTTLPLTPDNPEPDHCGSCRA

SEQ ID NO: 74394 - protein, 371 aa, unidentified
  source 1..371: note = Alphaproteobacteria bacterium
  REGION 1..371: note = tr|A0A424SWV8|A0A424SWV8_9PROT tRNA epoxyqueuosine(34) reductase QueG OS=Alphaproteobacteria bacterium TMED93 OX=1986648 GN=queG PE=4 SV=1
MSDIFLNEIEEYSKSLGFQDFKVTNFKDFSIYSNNLREFIKNKFYGEMGWIKEKSLIRENPKNIWLDAKSALVFGLNYGPATNPLLEIKNRNTGYISIYARRKDYHKVIKTKLKSIGRFISNNSDIKVKVFVDTAPIMEKPLAELSNMGWIGKHTNLVSKKYGSWLFLGIILTNYSFKKIKKDKKNNCGSCKACNEVCPTNAFISPYKLDARKCISYLTIEHKSHIKKKYRPLIGNRIFGCDDCLAVCPWNKFARTHSDIKLDINKNLVLQPLKSLVNLDEESFRKKFSGTPVRRLGYDRFLRNILIAIGNSGDKSLVESTVSKLEHNSNLVRAMAVWALFQLSINRFKEEKKLRFEREKDSRVREEWNIR

SEQ ID NO: 74395 - protein, 382 aa, unidentified
  source 1..382: note = Alsobacter sp.
  REGION 1..382: note = tr|A0A2T1HNW9|A0A2T1HNW9_9RHIZ Epoxyqueuosine reductase OS=Alsobacter sp. SH9 OX=2109933 GN=queG PE=3; SV = 1
MSGDRLKARLLADAAREGFDAVGVTTPDAIPDAPARLAEALAQGWHAGMDWLAETPERRASPAGLWPDVRSVVLLGTSYAPEEDPLAGLAHPDRAVISVYARSRDYHDVIKGKLKQVAGRFAAAAGADVKVFVDTAPVMEKPLAAAAGLGWQGKHSVLVSRRHGSWLFLGAIYTTAALPPDAPEPDHCGSCRRCLDICPTDAFPAPYRLDAGRCISYLTIEHKGPIPHELRTGVGNRVFGCDDCLAVCPWNKFAQAGREAKLRAREDLANPPLAELARLDDAAFRLRFAGTPVKRTGRDRFVRNVLVAVGNSGDAALAREAEALLSDASPLVRGAAIWALGRLAPDRLAAARRELEPAEADPDVVAEWRLAGGGPAERSNAS

SEQ ID NO: 74396 - protein, 357 aa, unidentified
  source 1..357: note = Altererythrobacter aquimixticola
  REGION 1..357: note = tr|A0A4T3EY77|A0A4T3EY77_9SPHN Epoxyqueuosine reductase OS=Altererythrobacter aquimixticola OX=2489173; GN = queG PE=3 SV=1
MVKDASIATLQDGLRAKAAELGFACVGFAPAEDDPLRAERLHDWLGAGFHATMGWMQDRADVRQGPQSMWPEAQSVIALGMSYAPDGDPLALEGDAEKARISVYAQGRDYHDVVKKAEKALARWLVAEAEGMGLEVALKVFVDTAPVMEKPLGESAGIGWQGKHTNLVSREHGSWLFLGAIYCTLPFVPDEPHDDRCGSCRACQDACPTNAFPRPYQLDARRCISYLTIEHKGPIPEEFREGMGNRIYGCDDCLAVCPWNKFADTAARHQAFVAREELVEPNLAELLALDDAGFRTKFSGSPIKRIGRDRFVRNCLIAAGNSGNAELLPAVSALANDEDGVVAEAAGWAATKLTVIP

SEQ ID NO: 74397 - protein, 357 aa, unidentified
  source 1..357: note = Altererythrobacter atlanticus
  REGION 1..357: note = tr|A0A0F7KRS7|A0A0F7KRS7_9SPHN Epoxyqueuosine reductase OS=Altererythrobacter atlanticus OX=1267766; GN = queG PE=3 SV=1
MIRGPDLVDLKARLVDQARLLGFATIGFAPAADNPEQARRLREWLDAGMHGEMQWMEDRADVRQGPQSMWPDAQSVLALGMSYAPDCDPLALEGDAERARISVYAQGRDYHDVVKKALKALARWLVAEAEKIGLEVQLKVFVDTAPVMEKPLGQAAGIGWQGKHTNLVSREHGSWLFLGAIYTTLPFPPDEAHPDRCGNCTACQQACPTNAFPEPYRLDARRCISYLTIEHKGPIPHEFREAMGNRIYGCDDCLAVCPWNKFAGTAARHKALAPREELAAPHLAELLALDDPAFRQKFSGSPIKRVGRDRFVRNCLIAAGNSGNPDLAGPVRALLDDPDPVVAEAARWAVARLTASL

SEQ ID NO: 74398 - protein, 351 aa, Altererythrobacter dongtanensis
  REGION 1..351: note = tr|A0A1B2A9S4|A0A1B2A9S4_9SPHN Epoxyqueuosine reductase OS=Altererythrobacter dongtanensis OX=692370; GN = queG PE=3 SV=1
MVNALVSSDLRPRLIERARAEGFVAVGVAPASLDRGDALRAWLAEGAHGSMEWMEQRVAERASPQGLWPAARSVIALGMSYTPENDPLALEGQTDRGRISVYAQARDYHDTVKKALKRLARWLVAEAPGAEVKVFVDTAPVMEKPLGEAAGIGWQGKHTNLVSRDHGSWLFLGAIYTTIEFAPDAPHGDRCGSCDACQRACPTDAFPSPYRLDARRCISYLTIEHAGPIPVEFRKAIGNRVYGCDDCLAVCPWNKFADAAAANRAFLPRAELAAPRLEELLALDDAGFRALFSGSPIKRIGRGRFVRNCLIAAGNSADGRLLPQVRTLTQDADPVVAEAAQWAVKELTAAP

SEQ ID NO: 74399 - protein, 352 aa, Altererythrobacter epoxidivorans
  REGION 1..352: note = tr|A0A0M4LX37|A0A0M4LX37_9SPHN Epoxyqueuosine reductase OS=Altererythrobacter epoxidivorans OX=361183; GN = queG PE=3 SV=1
MVNTATKLSLAGRIEEEARRLGFVSFGVTSASEDPVRSQRLEEWLDEGRHASMEWMENRKDQRASPQTLWPDARSVIALGMSYAPAQDPLALADAADRARISVYAQGKDYHDTVKKRLKALARWMVAEWPESELKVFVDTAPVMEKPLGEASGLGWQGKHTNLVSREHGSWLFLGAIYTTLDLEPARPHRDLCGSCDACQRACPTDAFPRPYQLDARRCISYLTIEHKGPVPEEFRAGLGNRIYGCDDCLAVCPWNKFAETAHRHRDFIPRAELTAPRLAELLALDDAGFRQFFSGSPIKRIGRDRFVRNCLYAAGNSGDVRLLDQVDLLRADPDPVVADAAAWAADRLRTS

SEQ ID NO: 74400 - protein, 353 aa, Altererythrobacter ishigakiensis
  REGION 1..353: note = tr|A0A562UT60|A0A562UT60_9SPHN Epoxyqueuosine reductase OS=Altererythrobacter ishigakiensis OX=476157; GN = queG PE=3 SV=1
MVNAASKSDLKARIAAEAERLGFAAFGVTDATDDPLRAKRLHQWLGAGHHASMEWMETRADVRHGPQSLWPEAKSVIALGMSYAPADDPLALEAHPEKARISVYARGKDYHDTVKKKLKALARWMVEHEPDNELKVFVDTAPVMEKPLGEAAGIGWQGKHTNLVSCSHGNWLFLGAIYTTLELKPDNPHSDRCGSCKACQVACPTDAFPAPYQLDARRCISYLTIEHKGPIAEEFREALGNRIYGCDDCLAVCPWNKFAETAASNRDFLPRAELVAPRLNELLDLNDAGFRQLFSGSPIKRIGRDRFIRNCLYAAGNSGDATLLAHAEALQNDPNPAVADAARWAITKLRAVP

SEQ ID NO: 74401 - protein, 353 aa, Altererythrobacter marensis
  REGION 1..353: note = tr|A0A2W4YUL2|A0A2W4YUL2_9SPHN Epoxyqueuosine reductase OS=Altererythrobacter marensis OX=543877 GN=queG; PE = 3 SV=1
MVNAAANPALQQRLRDEARRLGFVAVGFTDAADDPLRARRLHQWLGEGHNGAMGWMATRAHQRQGPQSLWPAARSVIALGMAYTPGGDPLALADHPERARISVYAQGRDYHDTVKKALKALARWLVAEAPDTELKVFVDTAPVMEKPLGEAAGIGWQGKHTNLVSREHGSWLFLGAIYTTIAFAPDKPHRDLCGSCRACQDACPTAAFPTPYRLDARRCLSYLTIEHSGPIPEEFRAALGNRIYGCDDCLAVCPWNKFADAAARHRAFLPRAELVAPRLAELLALDDAGFRRLFAGSPVKRIGRNRFVRNCAIAAGNSGDVALRAPLSALTSDVDPVVAEAARWALTRLPAAS

SEQ ID NO: 74402 - protein, 353 aa, Altererythrobacter marensis
  REGION 1..353: note = tr|A0A0G3XA29|A0A0G3XA29_9SPHN Epoxyqueuosine reductase OS=Altererythrobacter marensis OX=543877 GN=queG; PE = 3 SV=1
MSNARENAALRGDLLAEARRLGFVAVDIAPATDDPERARRLREWIAAGHHGTMGWMEDRAEVRQGPQAMWPEAKSVIALGMSYAPAHDPLALEGDAERARISVYAQGRDYHDTVKKAAKALARWLASRAPDARLKVFVDTAPVMEKPLGEAAGIGWQGKHTNLVSREHGSWLFLAAIYTTLELDPAEPHGDNCGSCRACQDACPTDAFPEPYRLDARRCISYLTIEHKGPIPHEFRKAIGNRIYGCDDCLAVCPWNKFADSAARNRAFLPRAELVAPRLAELLALDDPGFRQLFSGSPIKRIGRNRFVRNCLIAAGNSGNPALAGAVRALADDPDPVVAEAAEWAARELTPAP

SEQ ID NO: 74403 - protein, 352 aa, Altererythrobacter namhicola
  REGION 1..352: note = tr|A0A1C7D5Y7|A0A1C7D5Y7_9SPHN Epoxyqueuosine reductase OS=Altererythrobacter namhicola OX=645517; GN = queG PE=3 SV=1
MARNQPIAALQEALREKARELGFVAVGFTHAADDPERARRLHEWLEAGHHGDMAWMEDRADVRQGPASMWPEAKSVIALGMAYTPDADPLALEGDGAKARISVYAQGRDYHDTVKKALKALARWLVEQAPETQLKVFVDTAPVMEKPLGQAAGIGWQGKHSNLVSREHGSWLFLGAIYTTLAFEPDAAEADHCGSCTACHQACPTDAFPQPYVVDARRCISYLTIELKGPIPHEFREAMGNRIYGCDDCLAVCPWNKFADSAARHKAFVPREELVAPDLAALLALDDAGFRQKFSGSPIKRIGRDRFVRNCLVAAGNSGNGALLAMVETLRDDPDPVVAEAADWAAARLSEA

SEQ ID NO: 74404 - protein, 344 aa, Altererythrobacter sp.
  REGION 1..344: note = tr|A0A2E1Y6C2|A0A2E1Y6C2_9SPHN Epoxyqueuosine reductase OS=Altererythrobacter sp. OX=1872480 GN=queG; PE = 3 SV=1
MQNALRAEARELGFAACGFAPAGEEPRRTARFEEWLADGRHGSMEWMESRKVQRASPQGLWPEAKSVIALGMSYAPDVDPLALEGDPEKARISVYAQGRDYHDVVKKALKALARWLIAREPDSELKVFVDTAPVMEKPLGEAAGIGWQGKHTNLVSRKHGSWMFLGAIYSTIEFTPDEPHRDMCGSCRNCQDACPTNAFPAPYQLDARRCISYLTIEHKGPIPEEFRESLGNRIYGCDDCLAVCPWNKFADTAHRHIKLAPRQELAAPQLARFLEFDDAGFRQFFSGSPIKRVGRDRFVRNCLYAAGNSGNGALKAQVESLKADPDPAVAEAAIWAAGKLSPFP

SEQ ID NO: 74405 - protein, 353 aa, Altererythrobacter sp.
  REGION 1..353: note = tr|A0A316JV39|A0A316JV39_9SPHN Epoxyqueuosine reductase OS=Altererythrobacter sp. XM-24bin4 OX=2133952; GN = queG PE=3 SV=1
MVNTAANLRLKARIAEQAKSLGFAAFGVTTAQDDPIRADRLEQWLGEGHHGSMEWMEARSDVRRGPQSLWPEAKSVIALGMSYVPADDPLALEAHPEKARISVYARGKDYHDTVKKRLKALARWMVEQEPESELKVFVDTAPVMEKPLGEAAGIGWQGKHTNLVSRDHGNWLFLGAIYTTLELEPDAPHENRCGSCNACQTACPTDAFPAPYTLDARRCISYLTIEHKGPIAEEFREALGNRIYGCDDCLAVCPWNKFAETAATHRDFLPRAELVAPRLAELLALDDAGFCRLFAGSPIKRIGRDRFVRNCLYAAGNSGDASLIARIGSLRNDPDPAVAEAADWATEKLTTAL

SEQ ID NO: 74406 - protein, 353 aa, unidentified
  source 1..353: note = Altererythrobacter xiamenensis
  REGION 1..353: note = tr|A0A1Y6F202|A0A1Y6F202_9SPHN Epoxyqueuosine reductase OS=Altererythrobacter xiamenensis OX=1316679; GN = queG PE=3 SV=1
MVNAAATNELRTALLAEAKRLGFVAVGFAPAAEDPLRAERLEQWLAEGNHGTMEWMEARADVRRSPHAMWPEAQSVIALGMSYAPADDPLALEAHPDRARISVYARGKDYHDTVKKRLKALARWLVERAPDSELKVFVDTAPVMEKPLGEAAGIGWQGKHTNLVSRDHGSWLFLGAIYTTIRFAPDEPHDDRCGSCNACQMACPTDAFPAPYRLDARRCISYLTIEHKGPIAEEFRAALGNRIYGCDDCLAVCPWNKFAQTAQAHRDFLPRGELTAPRLADLLTLDDAGFRQFFSGSPIKRIGRDRFVRNCLYAAGNSGDRSLLGQVEPLLGDPDPVVAEAARWALSQLRAVP

SEQ ID NO: 74407 - protein, 384 aa, unidentified
  source 1..384: note = Alteribacillus bidgolensis
  REGION 1..384: note = tr|A0A1G8MY10|A0A1G8MY10_9BACI Epoxyqueuosine reductase OS=Alteribacillus bidgolensis OX=930129 GN=queG; PE = 3 SV=1
MTGAQLKEKIMAYSKDIGIDKIGFASADPFLSLKDRLHEQQRLNYQSGFEEKDIEKRVTPAKLLPEAKTIVAIALAYPSKMKNPPKSTKGDRRGVFCRASWGEDYHRVLKDRLQKLEEYMLELVPGARCQSMVDTGELSDRAVAERAGIGWSGKNCAIITPEFGSYVYLGEMVTTISLPPDNPITEQCGTCNKCVDACPTGALVQGGQLDSNKCIAYLTQTKDFLPERYRKKLGNRLYGCDTCQQVCPENKGMDFHHQEEFEPDPDTVKPKLLPLLELSNKEFKQKYGRLAGSWRGKKPIQRNAIIALGHFKAEESIETLDQLLNNDPRPVIRGTAAWSLGQINTKRTITLLEKAKGYETEGEVLKEIENALNQIAEDQMLSSK

SEQ ID NO: 74408 - protein, 383 aa, unidentified
  source 1..383: note = Alteribacillus iranensis
  REGION 1..383: note = tr|A0A1I2FKH9|A0A1I2FKH9_9BACI Epoxyqueuosine reductase OS=Alteribacillus iranensis OX=930128 GN=queG; PE = 3 SV=1
MTNVELKEKIIEYSKEIGIDKIGFASADPFLTLKDRLLEQQRLQYQSGFEEKDIDKRVTPKKLLPEAKTIIAIALAYPSKMKNEPKNKKGERRGRFCRASWGEDYHRVLQNRLEKLEDYIMSLVPEAACKSMVDTGELSDRAVAERAGIGWSGKNCAIITPEFGSYVYLGEMITTLSLPPDTPITDQCGTCNKCVEACPTDALVQGGQLNSNKCIAYLTQTKDFLPKQYRKQIGNRLYGCDTCQQVCPENKGRDIHSNEEFEPDPDIVKPLLIPILQLSNREFRENYGPLAGSWRGKKPIQRNAIIALGNYKEESAIEVLEDLLLHDPRPIIRGSAAWALGQINTERSALSLYRAKETEKDSDIVKEINEALDYITSEVRYAK

SEQ ID NO: 74409 - protein, 378 aa, unidentified
  source 1..378: note = Alteribacillus persepolensis
  REGION 1..378: note = tr|A0A1G8D8H8|A0A1G8D8H8_9BACI Epoxyqueuosine reductase OS=Alteribacillus persepolensis OX=568899; GN = queG PE=3 SV=1
MTAAQLKEKIIAYSKDIGIDKIGFTSADPFLSLKDRLLEQQRLQYQSGFEENDIEKRTTPKKLVPEAKTIISIALAYPSKMKNPPKSRKGERRGVFCRASWGEDYHRVLKNRLQKLEAYIQELVPEAKCQSMVDTGELADRAVAERAGIGWSGKNCAIITPEFGSYVYLGEMITTVSIPADTPVTEQCGTCNKCVDACPTGALVQGGQLDSNKCIAYLTQTKDFLPKRYRKKLGNRLYGCDTCQQVCPENKGVDSHRHEEFEPDPELVKPKLMPLLELSNKEFKQKYGRLAGSWRGKKPIQRNAVIALGHFKAEESIELLSRLLTNDPRPVIRGTAAWSLGQMNTADTQKLLEQAKQSETDEKVLEEIDDALLPFPLH

SEQ ID NO: 74410 - protein, 380 aa, unidentified
  source 1..380: note = Alteromonadaceae bacterium
  REGION 1..380: note = tr|A0A2D9RZ81|A0A2D9RZ81_9ALTE Epoxyqueuosine reductase OS=Alteromonadaceae bacterium OX=1916082 GN=queG; PE = 3 SV=1
MSTLQSIDLVNLVDDIKAWAVALGFQQVGISDIDLSQHEYALQQWLDNQYHGEMDYMASHGMKRARPAELVPGTVRVISVRMDYLPPDASFARHLKDGDIAYISRYALGRDYHKVLRKKLKQLGEQISERLAGTQYRPFVDSAPVLEHAIAEKAGLGWTGKHSLTLNKQAGSWFFLGELFINLPLPVDEPVEEHCGTCTACMTMCPTQAIVAPYQVDARRCISYLTIESNGVIPEELRAAMGNRIYGCDDCQLVCPWNRYAPVTAESDFHPRQVLHGQSLLTLFDWDEKTFLQNTEGSPIRRIGYAKWQRNLCVAIGNAPYSEDYVAALNAARDEACELVLPHLDWALEQQQGKQQASSSENRQLARLTRTIEKGLPRDA

SEQ ID NO: 74411 - protein, 380 aa, unidentified
  source 1..380: note = Alteromonadaceae bacterium
  REGION 1..380: note = tr|A0A424TUX3|A0A424TUX3_9ALTE Epoxyqueuosine reductase OS=Alteromonadaceae bacterium TMED7 OX=1986650; GN = queG PE=3 SV=1
MSTLQSIDLVNLVDDIKAWAVALGFQQVGISDIDLSQHEYALQQWLDNQYHGEMDYMASHGMKRARPAELVPGTVRVISVRMDYLPPDASFARHLKDGDMAYISRYALGRDYHKVLRKKLKQLGEQISERLAGTQYRPFVDSAPVLEHAIAEKAGLGWTGKHSLTLNKQAGSWFFLGELFINLPLPVDEPVEENCGTCTACMTMCPTQAIVAPYQVDARRCISYLTIEYNGVIPEDLRPAMGNRIYGCDDCQLVCPWNRFAPVTAESDFHPRQVLHGQSLLTLFGWDEKTFLHNTEGSPIRRIGYAKWQRNLCVAIGNAPYSEEYITALNAAKDEACELVLPHLEWALAQQHRKHQANSDENRQLARLTRTIEKGLPRDA

SEQ ID NO: 74412 - protein, 375 aa, unidentified
  source 1..375: note = Alteromonadales bacterium
  REGION 1..375: note = tr|A0A2N0WTM0|A0A2N0WTM0_9GAMM Epoxyqueuosine reductase OS=Alteromonadales bacterium alter-6D02; OX = 2058087 GN=queG PE=3 SV=1
MNESICYQQLAQQIEQWAIDLGFTGFGICDTDLSQHEAAFQQWLDNGYHGGMEYMARHGMMRARPNELLPGTLRVISVRLDYLPPDALIVSTMKEPTNAYISRYATGRDYHKIMRNRLKKLQQKIETQVEGLIARPFVDSAPILERPLAEKAGLGWVGKHTLILNQDVGSFFFLGELLVSIPLPVSEPVKEQCGSCVACITICPTQAIVEPYVVDGRRCLSYITIEKFGEIPVEFRKAMGNRIYGCDDCQLICPWNKFAQASSEDDFKPRKDLHSPQLLSLFSWDEATFLKRTEGSPIRRIGHERWLRNIAVALGNAPYEEAIVQALKDKREEVSELVQEHIDWAIAQQQEKTNSINRKTLRMLKAVERGMPAHQ

SEQ ID NO: 74413 - protein, 376 aa, unidentified
  source 1..376: note = Alteromonadales bacterium
  REGION 1..376: note = tr|A0Y531|A0Y531_9GAMM Epoxyqueuosine reductase; OS = Alteromonadales bacterium TW-7 OX=156578 GN=queG PE=3; SV = 1
MSNLTPDYPKLAQQIKAWGKELGFSEVGITDIDLSKHEQQLQRWLDAGFHGSMDYMAAHGMKRARPDELIPGTQRVISVKMNYLPPDAGFAKTLKNKQKAYISRYALGRDYHKLIRNRLKKLGQKIEQEVGEYGFRPFVDSAPVLERQLAEKAGLGWRGKHSLLINKEAGSWFFLGELFIDLPLPIENENTFEGCGKCVACITLCPTGAIVEPYVVDARKCISYLTIEHQGPIPEQYRALLGNRVYGCDDCQLVCPWNRYGQITDERDFHPRTQLKDKDLLELFSWDETTFLKNTEGSPIRRIGHERWLRNLAVGLGNANFDPDIISALEQKIDGCSDLVKEHIQWALEQQNNKQPSLRKTQRLIRIVEKGLPRDA

SEQ ID NO: 74414 - protein, 381 aa, unidentified
  source 1..381: note = Alteromonas aestuariivivens
  REGION 1..381: note = tr|A0A3D8M8U3|A0A3D8M8U3_9ALTE Epoxyqueuosine reductase OS=Alteromonas aestuariivivens OX=1938339; GN = queG PE=3 SV=1
MSTIDSIDLNRLVKDIKAWGQALGFQQVGISDIDLSQHEHHLNNWLAEGYHGQMHYMASHGSKRARPAELVPGTVRVISVRMDYLPPDASFAKHLSSAQTAYISRYALGRDYHKVLRNRLKQLGEKITQSLQQTQYRPFVDSAPVLEHAIAQKAGLGWTGKHTLTINRQAGSWFFLGELFVNLPLPVDNPVEEGCGSCTACLTICPTQAIVAPYKVDARRCISYLTIEYDGVIPEELRSAMGNRIYGCDDCQLICPWNRYANLSEEPDFHPRKALHGQSLTDLFRWTEEDFLHNTQGSPIRRIGFVKWQRNLTVAMGNAEYSEEIIFLLKERRSEAPELVQTHIDWAIAQQMKKYENRSPVPNRQTQRLVRAVQKGLPRDA

SEQ ID NO: 74415 - protein, 386 aa, unidentified
  source 1..386: note = Alteromonas australica
  REGION 1..386: note = tr|A0A353JK90|A0A353JK90_9ALTE Epoxyqueuosine reductase OS=Alteromonas australica OX=589873 GN=queG PE=3; SV = 1
MSKIHSIDLIQLSNDIKAWGRTLGFQDVGICDIDLSKHEKPLREWLDKGYHGSMHFMESHGMKRARPDELVPGTLRVISVRMNYLPPDASFASHLNDPDIGYISRYALGRDYHKVLRKKLKQLGEKIAHAIANSDIEHQYRPFVDSAPVLEHALAEKAGIGWTGKHSLTLNKDAGSWFFLGELFTNLPLPIDAPAEPACGTCNACMTMCPTNAIVAPYTVDAKRCISYLTIELDDDIPEALRPLMGNRIYGCDDCQLVCPWNRYADITEESDFYPRQVLHGKRLIDLFAWSEATFLRHTEGSPIRRIGYEKWQRNIAVALGNAPYSSEIVDALQQALKKVSDRVDRHIQWAIAQQLARKSNLGKDTPLRQQDRLIRIVQKGLPRDA

SEQ ID NO: 74416 - protein, 386 aa, unidentified
  source 1..386: note = Alteromonas australica
  REGION 1..386: note = tr|A0A075P0D3|A0A075P0D3_9ALTE Epoxyqueuosine reductase OS=Alteromonas australica OX=589873 GN=queG PE=3; SV = 1
MSKIHSIDLIQLSNDIKAWGRTLGFQDVGICDIDLSKHEKPLREWLDKGYHGSMHFMESHGMKRARPDELVPGTLRVISVRMNYLPPDASFASHLNDPDIGYISRYALGRDYHKVLRKKLKQLGEKIAHAIANSDIEHQYRPFVDSAPVLEHALAEKAGIGWTGKHSLTLNKDAGSWFFLGELFTNLPLPIDAPAEPACGTCNACMTMCPTNAIVAPYTVDAKRCISYLTIELDDDIPEALRPLMGNRIYGCDDCQLVCPWNRYADITEESDFYPRQVLHGKRLIDLFAWSEATFLSHTEGSPIRRIGYEKWQRNIAVALGNAPYSSEIVDALQQALKKVSDRVDRHIQWAIAQQLARKSNLGKDTPLRQQDRLIRIVQKGLPRDA

SEQ ID NO: 74417 - protein, 379 aa, unidentified
  source 1..379: note = Alteromonas confluentis
  REGION 1..379: note = tr|A0A1E7Z9E4|A0A1E7Z9E4_9ALTE Epoxyqueuosine reductase OS=Alteromonas confluentis OX=1656094 GN=queG; PE = 3 SV=1
MSALQSIDLNRLTDDIKAWGRALGFQQVGISDVDLSQHEDKLLEWLNNGYHGSMDYMAAHGLKRARPAELVPGTVRVISVRMNYLPPDASFARHLSDDKIGYISRYALGRDYHKVLRNRLKQLGEKIKAELADTEYRPFVDSAPVLEHAIAEKAGIGWTGKHSLTLNKEAGSWFFLGELFINLPLPVDEAVEEGCGSCTACLTICPTQAIVAPYTVDARKCISYLTIENDGPIPEDLRPLMGNRIYGCDDCQLVCPWNRYGNITEEKDFFPRSQLHGETLVNLFNWDETTFLKNTEGSPIRRIGHARWLRNIAVAMGNAAADGSILSALESRSGQVSELVQEHIDWAIDQQKNKNAAYDDNRQKQRLIRVIQKGLPRDA

SEQ ID NO: 74418 - protein, 380 aa, unidentified
  source 1..380: note = Alteromonas lipolytica
  REGION 1..380: note = tr|A0A1E8F9A2|A0A1E8F9A2_9ALTE Epoxyqueuosine reductase OS=Alteromonas lipolytica OX=1856405 GN=queG; PE = 3 SV=1
MSTLQSIDLVNLVDDIKAWAVALGFQQVGISDIDLSQHEYYLQQWLNNNYHGEMDYMASHGMKRARPDELVPGTLRVISVRMDYLPPDASFAKHLKDGHTGYISRYALGRDYHKVLRKKLKQLGEQISQHLATTAYRPFVDSAPVLEHAIAEKAGIGWTGKHTLTLNKQAGSWFFLGELFINLPLPVDEPAQENCGTCNACITMCPTQAIVAPYQVDARRCISYLTIEYNGIIPESLRPAMGNRIYGCDDCQLVCPWNRYAPLTSESDFHARGVLHGQSLLTLFRWDEDTFLRHTEGSPIRRIGFAKWRRNLCVAIGNAPFATDYLTALDEAEETACELVRPHLLWARQQQISKQHAALTTNRQVARLTRSIEKGLPRDA

SEQ ID NO: 74419 - protein, 380 aa, Alteromonas macleodii
  REGION 1..380: note = tr|A0A1E7D8N5|A0A1E7D8N5_ALTMA Epoxyqueuosine reductase OS=Alteromonas macleodii OX=28108 GN=queG PE=3; SV = 1
MSEFSSIDLVELTNNIKAWGTALGFQQVGISDIDLHQHEAHLQEWLDNGYHGDMAFMESHGMKRARPDELVPGTLRVISVRMNYLPPDASFAKHLKTPEIGYISRYALGRDYHKVLRKRLKQLGEKITASLAHTQYRPFVDSAPVLEHAIAEKAGIGWTGKHSLTLNKEAGSWFFLGELFINLPLPTDSPIEEGCGTCTACLTICPTNAIVAPYKVDARRCISYLTIESDKDIPEELRPMMGNRIYGCDDCQLVCPWNRFADVTSEEDFHPRQVLHGQSLNALFGWSEETFLRNTEGSPIRRIGFEKWQRNIAVALGNAPYDEQSILLLKERRGSVSDLVDRHIDWALKRQQEKQQASDAKNRQQARLIRVIEKGLPRDA

SEQ ID NO: 74420 - protein, 380 aa, Alteromonas macleodii
  REGION 1..380: note = tr|K0D5I4|K0D5I4_ALTMS Epoxyqueuosine reductase; OS = Alteromonas macleodii (strain Black Sea 11) OX=1004785; GN = queG PE=3 SV=1
MSEISSIDLVELTNNIKAWGTALGFQQVGISDIDLHQHEAHLKEWLDNGYHGDMAFMESHGMKRARPDELVPGTLRVISVRMNYLPPDASFAEHLKKPEIGYISRYALGRDYHKVLRKRLKQLGEKITASLARTQYRPFVDSAPVLEHAIAEKAGIGWTGKHSLTLNKEAGSWFFLGELFINLPLPVDSPIEEGCGSCTACLTICPTNAIVAPYKVDARRCISYLTIESDKDIPEALRPMMGNRIYGCDDCQLVCPWNRFADVTSEEDFHPRQVLHGQSLNALFSWSEEAFLRNTEGSPIRRIGFEKWQRNIAVALGNAPYSEESILLLKERRGCVSDLVDRHIDWALEQQQEKQQATDVKNRQQARLIRVIEKGLPRDA

SEQ ID NO: 74421 - protein, 380 aa, Alteromonas marina
  REGION 1..380: note = tr|A0A0B3Z1D4|A0A0B3Z1D4_9ALTE Epoxyqueuosine reductase OS=Alteromonas marina OX=203795 GN=queG PE=3 SV=1
MSEFSSIDLVELTNNIKAWGTALGFQQVGISDIDLHQHEAHLQEWLDNGYHGDMAFMESHGMKRARPDELVPGTLRVISVRMNYLPPDASFAKHLKKPEIGYISRYALGRDYHKVLRKRLKQLGEKITASLAHTQYRPFVDSAPVLEHAIAEKAGIGWTGKHSLTLNKEAGSWFFLGELFINLPLPTDSPIEEGCGTCTACLTICPTNAIVAPYKVDARRCISYLTIESDKDIPEGLRPMMGNRIYGCDDCQLVCPWNRFADVTSEEDFHPRQVLHGQSLNALFGWSEETFLRNTEGSPIRRIGFEKWQRNIAVALGNAPYDEQSILLLKERRGSVSDLVDRHIDWALKRQQEKQQASDAKNRQQARLIRVIEKGLPRDA

SEQ ID NO: 74422 - protein, 380 aa, unidentified
  source 1..380: note = Alteromonas mediterranea
  REGION 1..380: note = tr|A0A1J0SV60|A0A1J0SV60_9ALTE Epoxyqueuosine reductase OS=Alteromonas mediterranea OX=314275 GN=queG; PE = 3 SV=1
MSEINSIDLRELTNNIKAWGTALGFQQVGISDIDLHQHEAHLQAWLDKGYHGDMAYMESHGMKRARPAELVPGTLRVISVRMNYLPPDASFAQHLKAPHIGYISRYALGRDYHKVLRKRLKQLGEKITASLADTQYRPFVDSAPVLEHAIAEKAGIGWTGKHSLTLNKDAGSWFFLGELFINVPLPVDSPIEEGCGSCTACLTICPTNAIVEPYKVDGRKCISYLTIESDKDIPEELRPLMGNRIYGCDDCQLVCPWNRFANITEEEDFHPRTVLHGQSLNTLFSWSEETFLQNTEGSPIRRIGFQKWQRNIAVALGNAPYNEESIQLLKERYGTVSELVDRHIDWALQQQQKKQAAYEAQNRQQQRLIRVIEKGLPRDA

SEQ ID NO: 74423 - protein, 380 aa, unidentified
  source 1..380: note = Alteromonas mediterranea
  REGION 1..380: note = tr|S5C721|S5C721_9ALTE Epoxyqueuosine reductase; OS = Alteromonas mediterranea UM7 OX=1300258 GN=queG PE=3; SV = 1
MSEINSIDLRELTNNIKAWGTALGFQQVGISDIDLHQHEAHLQAWLDKGYHGDMAYMESHGMKRARPAELVPGTLRVISVRMNYLPPDASFAQHLKAPHIGYISRYALGRDYHKVLRKRLKQLGEKITASLADTQYRPFVDSAPVLEHAIAEKAGIGWTGKHSLTLNKDAGSWFFLGELFINVPLPVDSPIEEGCGSCTACLTICPTNAIVEPYKVDGRKCISYLTIESDKDIPEELRPLMGNRIYGCDDCQLVCPWNRFANITEEEDFHPRTVLHGQSLNTLFSWSEETFLQNTEGSPIRRIGYQKWQRNIAVALGNAPYNEESIKLLKERHGTVSELVDRHIDWALQQQQKKQAAYEAQNRQQQRLIRVIEKGLPRDA

SEQ ID NO: 74424 - protein, 383 aa, unidentified
  source 1..383: note = Alteromonas naphthalenivorans
  REGION 1..383: note = tr|F5Z6F6|F5Z6F6_ALTNA Epoxyqueuosine reductase; OS = Alteromonas naphthalenivorans OX=715451 GN=queG PE=3; SV = 1
MSTINSIDLIQLTQDIKAWGRALGFQQVGISDIDLHQHEAHLTQWLENDYHGDMAFMANHGMKRARPDELVPGTLRVISVRMNYLPPDASFAKHLSQPDTGYISRYALGRDYHKVLRKRLKQLGEKITGALSNTEYRPFVDSAPVLEHAIAEKAGIGWTGKHSLTINKEAGSWFFLGELFINLPLPIDSPLEEGCGTCTACLTICPTNAIVAPYKVDARRCISYLTIESDKDIPEDLRPLMGNRIYGCDDCQLICPWNRYADITEEEDFHPRKVLHGQSLTTLFSWDEATFLNNTEGSPIRRIGFEKWQRNIAVALGNANYSEQTVNALQTNLGKVSDKVDRHISWALAQQENKKAGLALEEKANRQQKRLTRAVEKGLPRDA

SEQ ID NO: 74425 - protein, 381 aa, unidentified
  source 1..381: note = Alteromonas pelagimontana
  REGION 1..381: note = tr|A0A2A6B0X0|A0A2A6B0X0_9ALTE Epoxyqueuosine reductase OS=Alteromonas pelagimontana OX=1858656 GN=queG; PE = 3 SV=1
MSKISSLDLIRLVDDIKAWGKALGFQQVGISDIDLSKHEVYLNQWLENGFHGDMHFMAAHGTKRARPAELVPGTLRVISVSMDYLPPDASFARHLGNDSIAYISRYALGRDYHKVLRKKLKQLGDKITSALSTTEFRPFVDSAPVLEHAIAEKAGLGWTGKHSLTLNRQSGSWFFLGELFINLPLPVDSPVEEGCGSCTACMTICPTQAIVAPYTVDARKCISYLTIEHDGEIPEKLRPLMGNRIYGCDDCQLVCPWNRFASITEQEDFHPREMLHGQSLVTLMEWDEETFLRNTEGSPIRRIGWAKWQRNIAVAMGNASYDEQIIASLKKAAVKANEIVRLHIEWALTQQHQKQATNKQTTSRQTLRLTRVIEKGLPRDA

SEQ ID NO: 74426 - protein, 380 aa, Alteromonas sp.
  REGION 1..380: note = tr|A0A2D5LHI8|A0A2D5LHI8_ALTSX Epoxyqueuosine reductase OS=Alteromonas sp. OX=232 GN=queG PE=3 SV=1
MSTLQSIDLVNLVDDIKAWAVALGFQQVGISDIDLSQHEYALQQWLDNQYHGEMEYMASHGMKRARPAELVPGTVRVISVRMDYLPPDASFARHLKDGDIAYISRYALGRDYHKVLRKKLKQLGEQISERLADTQYRPFVDSAPVLEHAIAEKAGLGWTGKHSLTLNKQAGSWFFLGELFINLPLPVDEPVEENCGTCTACMTMCPTQAIVAPYQVDARRCISYLTIEYNGVIPEELRAPMGNRIYGCDDCQLVCPWNRFAPLTAESDFHPRQVLHGQSLLTLFNWDEKTFLQNTEGSPIRRIGYAKWQRNLCVAIGNAPYSEDYIAALNAAKDEACELVSPHLEWALEQQLRKQQASSDENRQLARLTRTIEKGLPRDA

SEQ ID NO: 74427 - protein, 380 aa, Alteromonas sp.
  REGION 1..380: note = tr|A0A1L8MFT0|A0A1L8MFT0_9ALTE Epoxyqueuosine reductase OS=Alteromonas sp. V450 OX=1912139 GN=queG PE=3; SV = 1
MSEISSIDLVELANNIKAWGTALGFQQVGISDIDLHQHESHLQEWLDNGYHGDMAFMENHGMKRARPNELVPGTLRVISVRMNYLPPDASFAKHLNMPEVGYISRYALGRDYHKVLRKRLKQLGEKITASLAHTQYRPFVDSAPVLEHAIAEKAGIGWTGKHSLTLNKEAGSWFFLGELFINLPLPVDAPIEEGCGSCTACLTICPTNAIIAPYKVDARRCISYLTIESDKDIPEDLRPMMGNRIYGCDDCQLVCPWNRFADITSEQDFHPRQVLHGQSLNALFSWSEETFLRNTEGSPIRRIGFEKWQRNIAVALGNAPYNEQSILLLKERRGCVSDLVDRHIDWALKQQQEKQQVSDAQNRQQSRLIRVIEKGLPRDA

SEQ ID NO: 74428 - protein, 383 aa, Alteromonas stellipolaris
  REGION 1..383: note = tr|A0A0S1YQZ4|A0A0S1YQZ4_9ALTE Epoxyqueuosine reductase OS=Alteromonas stellipolaris LMG 21856; OX = 1160720 GN=queG PE=3 SV=1
MSTINSIDLIQLTQDIKAWGRTLGFQQVGISDIDLHQHEAHLTKWLENGYHGDMAFMANHGMKRARPDELVPGTLRVISVRMNYLPPDASFAKHLSQPDTGYISRYALGRDYHKVLRKRLKQLGEKITTALSDTQYRPFVDSAPVLEHAIAEKAGIGWTGKHSLTINKEAGSWFFLGELFINVPLPIDAPIEEGCGTCTACLTICPTNAIVAPYKVDARRCISYLTIESDKDIPEELRPLMGNRIYGCDDCQLICPWNRYADITEEEDFHPRKVLHGQSLTTLFSWDEATFLTNTEGSPIRRIGFEKWQRNIAVALGNANYSELTVNALQVNLGKVSDKVDRHITWALAQQENKKAGLALEEKANRQQKRLTRAVEKGLPRDA

SEQ ID NO: 74429 - protein, 307 aa, unidentified
  source 1..307: note = Altibacter sp.
  REGION 1..307: note = tr|A0A2D9N3C5|A0A2D9N3C5_9FLAO Epoxyqueuosine reductase OS=Altibacter sp. OX=2024823 GN=queG PE=3 SV=1
MNTKHKHTELIKTEAKRLGFLSCGISKAEFLEEEAPRLEHWLTMNRHGEMGYMENHFDKRLDPTLLVPDAKSVVSLLLNYYPSEFQRDDTYKVSKYAYGTDYHFVIKDKLKEFLHFISEEIGEVQGRAFVDSAPVLDKAWAAKSGLGWMGKHSNLLTKQVGSFYFIAELILDLELDYDSPVTDHCGACTACIDACPTQAIVEPYVVDGSKCISYYTIELKNEIPLSAKGQFEDWMFGCDICQDVCPWNRFSKSHKEPLLQPSPELLSMNKKDWEEITQEVFQDLFQKSAVKRTKFSGLKRNIKFLKD

SEQ ID NO: 74430 - protein, 361 aa, unidentified
  source 1..361: note = Amantichitinum ursilacus
  REGION 1..361: note = tr|A0A0N0XKJ7|A0A0N0XKJ7_9NEIS Epoxyqueuosine reductase OS=Amantichitinum ursilacus OX=857265 GN=queG; PE = 3 SV=1
MQNEFPSVESGGLDLTALAARIKAWAQELGFARAAITDTDLSAAEPALTEWLAAGFHGEMDYMARHGLTRARPAELVPGTVSIVSVFMPYLPAGTSNAEAMLQDGSKAYLSRYALGRDYHKVLRNRLQKLAERVQAEIGPFGFRAFVDSAPVLEVELAKKAGLGWRGKHTLLLNREYGSFFFIGELFTDLPLPPDPPEPNEHCGRCTRCLGACPTGAIVAPYKVDARKCISYLTIELKGSIPDEYRPLIGNRVYGCDDCQLVCPWNRFAVDSKEADFAVRHGLDDVSLVELFGWDEATFRERMAGSAILRIGHERWLRNLAVGLGNAPTRPDIVSALQSRINDPSELVREHVAWALNRHAA

SEQ ID NO: 74431 - protein, 367 aa, Amaricoccus sp.
  REGION 1..367: note = tr|A0A501WV49|A0A501WV49_9RHOB Epoxyqueuosine reductase OS=Amaricoccus sp. HB172011 OX=2589815 GN=queG; PE = 3 SV=1
MLDAGPEEIAARIRARALAERFSASGICAPDAIPLAKARLAAFVAAGRHGTMGYMAERMAWRGDPAALWPEARSVIMLAEVYTPEEDPLALLSRPDRGNVSVYARGRDYHDTVKKRLKRLGRWLVAETGAEIKVFVDTAPVMEKPLAEAAGLGWQGKHTNLVGRRLGSWFFLGAIFTTLDLPRDAAERDHCGSCRACLDICPTGAFPAPYQLDARRCVSYLTIEHAGPVDPELRPLLGNRIYGCDDCLAVCPWNKFAGVAREAAYHARENLRAPALAELAGLDDAGFRARFSGSPIKRIGRNRFARNVAYAVGNSGEAALIPVAEGLAADADPVAREAGEWALARLRSASAGSAAPGRPDRSPDGSR

SEQ ID NO: 74432 - protein, 382 aa, Aminobacter aminovorans
  REGION 1..382: note = tr|A0A380WEI9|A0A380WEI9_AMIAI Epoxyqueuosine reductase OS=Aminobacter aminovorans OX=83263 GN=queG PE=3; SV = 1
MRTSISDSALRQLIEREASRAGFAAIAVTRPDAIPLAPARLAQFVGEGLHGSMAWMAETLERRSEPSVLWPEVRSIVVLAMNYGPDSDPRALQAMPDRAAISVYARNRDYHDVMKGRLKEIAGKIVARAGGDVKVFVDTAPVMEKPLAEAAGLGWQGKHTNLVSREFGSWLFLGTIFTTAELTADDAEIDHCGSCRACLDACPTNAFPAPYRIDARRCISYLTIENKGPIPLEFRQKIGNRIYGCDDCLAACPWNKFAQAASEQKLAARDDLREPRLAELLLLDDATFRTFFSGSPVKRIGRDRFVRNVLIAAGNSADTTLIEPCRTLLSDASPLVRGAAVWALSRLLPDATFSALAEQMLKVEIEDDVIAEWQAGLTQVEL

SEQ ID NO: 74433 - protein, 387 aa, Aminobacter aminovorans
  REGION 1..387: note = tr|A0A142LZW2|A0A142LZW2_AMIAI Epoxyqueuosine reductase OS=Aminobacter aminovorans OX=83263 GN=queG PE=3; SV = 1
MRTSISESALRQLIEREASRAGFAAIAVTRPDAIPLAPARLAQFVGEGLHGSMAWMAETLERRSEPSVLWPEVRSIVVLAMNYGPDSDPRALQAMSDRAAISVYARNRDYHDVMKGRLKEIAGKIVSRAGGDVKVFVDTAPVMEKPLAEAAGLGWQGKHTNLVSREFGSWLFLGTIFTTAELAPDEAEIDRCGSCRACLDACPTEAFPAPYRIDARRCISYLTIENKGPIPLEFRPKIGNRIYGCDDCLAACPWNKFAQAASEQKLAARDDLREPRLAELLSLDDATFRIFFSGSPVKRIGRDRFVRNVLIASGNSADATLIAPCRTLLSDTSPLVRGAAVWALSRLLPDATFSALAEQMLKVETDNDVIAEWQAGLTQVEQSRTQS

SEQ ID NO: 74434 - protein, 385 aa, Aminobacter sp.
  REGION 1..385: note = tr|A0A316GQN0|A0A316GQN0_9RHIZ Epoxyqueuosine reductase OS=Aminobacter sp. AP02 OX=2135737 GN=queG PE=3; SV = 1
MRTSISDTALRQLIEREAKRAGFAAVAVTRPDAIPLAPARLAQFVDEGLHGSMGWIAETLERRSEPSVLWPEVRSIIVLAMNYGPDSDPRDLQSQKDCAAISVYARNRDYHDVMKGRLKEIAGKIVARAGGDVKVFVDTAPVMEKPLAEAAGLGWQGKHTNLVSREFGSWLFLGTIFTTAELEPDEAEIDHCGSCRACLDACPTDAFPAPYRLDARRCISYLTIENKGPIPLEFRQKIGNRIYGCDDCLAACPWNKFAQAASEQKLAARDDLREPRLIELLALDDATFRTFFSGSPVKRIGRDRFIRNVLIASGNSADAALVEPCRALLADPSPLVRGAAVWALSRLVSRKTFSALAQLALKSETEADVIAEWQVTQAEPARTQA

SEQ ID NO: 74435 - protein, 387 aa, Aminobacter sp.
  REGION 1..387: note = tr|A0A0Q6LI97|A0A0Q6LI97_9RHIZ Epoxyqueuosine reductase OS=Aminobacter sp. Root100 OX=1736420 GN=queG; PE = 3 SV=1
MRTSISDTALRQLIEREAKRAGFAAVAVTRPDAIPLAPARLAQFVEEGLHGSMGWMAETLERRAEPSVLWPEVRSIIVLAMNYGPDTDPRDLQAMPDRAAISVYARNRDYHDVMKGRLKEIAGKIVARAGGDVKVFVDTAPVMEKPLAEAAGLGWQGKHTNLVSREFGSWLFLGTIFTTAELVPDEAEADHCGSCRACLDACPTDAFPAPYRIDARRCISYLTIENKGPIPIEFRERIGNRIYGCDDCLAACPWNKFAQSASEAKLAARDDLRQPRLADLLQLDDAAFRSFFSGSPVKRIGRERFIRNVLIAAGNSADSALGWPCRALLSDAAPLVRGAAVWALSRLVTPEAFSALALEALKAETEQDVIAEWQAALTQAEPARTQA

SEQ ID NO: 74436 - protein, 297 aa, Aminomonas paucivorans
  REGION 1..297: note = tr|E3CZE2|E3CZE2_9BACT 4Fe-4S ferredoxin iron-sulfur binding domain protein OS=Aminomonas paucivorans DSM 12260; OX = 584708 GN=Apau_2229 PE=4 SV=1
MATLRGAFEARGRRARTVGAERTEELLEDLFRGLERRPLDPHLQKRYIEPFRERAGVFPQARSLVVVASPEPPTPVRFRHRGRRIETLLPPQYAHQKDLEEATRILREHLPPGERFEAVRLPLKLLAARSGLGRYGRNRVLFVPGMGSCCHLAAFALSLPPEEETWGPAEPLPRCSSCGLCVARCPSGALGKGWHDFDSSRCLTRHNEETDPLPGWMDPGWHHSLLGCTRCQELCPANRGIWDHPLSPVDFDEEETEGILRASGFEALPGPVRERLADLGLAEDFAPAARNLRLLLG

SEQ ID NO: 74437 - protein, 383 aa, Ammoniphilus oxalaticus
  REGION 1..383: note = tr|A0A419SDI2|A0A419SDI2_9BACL Epoxyqueuosine reductase OS=Ammoniphilus oxalaticus OX=66863 GN=queG PE=3; SV = 1
MQTPQQLKDKVINYAASIGIDKIGFASADPFLELKQRLVEHRKLGYESGFEEADLAMRTHPEMILPEAQSIIAIALAYPTKIEEAPRSEPGQYRGMVARAAWGEDYHHVLRRKLKQLEEYILEFVPDAKCESMVDTGALSDRAVAERAGLGWVGKNTSLITPEFGSWVYLGEMITSIPFPPDTPLEDGCGDCTLCMDHCPTDAFEQPGQLNSQKCLAFVTQLKNYVPEAFRESVGNRVYGCDTCQQVCPKNRKINFTHHPEFQPDPELAKPLLKPLLTIGNKRFRETFGPTAAAWRGKKPLQRNAILGLAHFKDVSAVPDLIEVLNQDVRPPLRGTAAWALGKIGGEQARQALDAALSVEKDDEVKEEINHALGMLDEGKKGM

SEQ ID NO: 74438 - protein, 380 aa, Ammoniphilus sp.
  REGION 1..380: note = tr|A0A4V1NWZ1|A0A4V1NWZ1_9BACL Epoxyqueuosine reductase OS=Ammoniphilus sp. CFH 90114 OX=2493665 GN=queG; PE = 3 SV=1
MVDMVELKRMLIDFAHSVGIDKIGFASADPFLELKDRLYKHRELGYESGFEESDIEKRAHPELTIQEAKSIIAIAIAYPARMEDSPKSKPGEYRGMVSRAAWGKDYHHVLREKLRLLEAFIEEKLPGARCESMVDTGVLSDRAVAERAGLGWIGKNTNLITPEFGSWVYLGELITDIPFPPDQPIEESCGDCTLCLDHCPTGAFEQPFQLNAQKCVAFLTQVKDYIPEEYRERVGNRLYGCDTCQQVCPKNRKVNFTHQEDCLPDPELAKPLLKPLLTIGKKEFQTKFGPTSAAWRGKKPIQRNAILALAHFKDRTAVPDLISLMKKDERPVIRGTAAWALGKIGGEEAMQALEEARSSEKDQKVQAEIDQAWSKLRSIL

SEQ ID NO: 74439 - protein, 379 aa, unidentified
  source 1..379: note = Amphibacillus marinus
  REGION 1..379: note = tr|A0A1H8R0A2|A0A1H8R0A2_9BACI Epoxyqueuosine reductase OS=Amphibacillus marinus OX=872970; GN = SAMN04488134_109112 PE=4 SV=1
MANEQLKEEIISYAKQIGIDKIGFAAANPFAEMKARLQMQQEDGFQSGFEKGTLEERTNPALHLEDAESIIAIAVAYPSRMRDRPLNKKGQRRGNFCRASWGHDYHDVLNSRLELLTAFIAERVPGFRSRSMVDTGELSDRAVAERAGIGWSGKNSFIITPEFGSYVYLGEMITNVPFPSDQPLDDQCGDCTMCLDNCPTGALVAPGRLNAQNCIAFVTQTKGFLADEYRSKIGNQLYGFDTCQLVCPKNKGIDVHHHPELEPDPELVKPELIPLLSISNKEFKERFGKMSGSWRGKKPIQRNAILALAHYREQTAVDELIRLMRDDPRPVIRGTAAWAIGKIGRYDSYDAIRSALEIEQDPEVRNEMEKGLAFEQAQV

SEQ ID NO: 74440 - protein, 379 aa, Amphibacillus xylanus
  REGION 1..379: note = tr|K0J464|K0J464_AMPXN 4Fe-4S ferredoxin-type domain-containing protein OS=Amphibacillus xylanus (strain ATCC 51415 / DSM 6626 / JCM 7361 / LMG 17667 / NBRC 15112 /Ep01) OX=698758 GN=AXY_18700 PE=4 SV=1
MANEQLKQDIIEYSKTIGIDKIGFAAANPFAEMKARLKNQQESGFQSGFEKGTIEERTEPTLHLTEAESIIAVAIAYPAKMKERVKNVRGNRRGSFCRASWGTDYHHVVREKLELLETYIASRVPGFRSKIMVDTGELVDKAVAERAGIGWSGKNTLIITPEFGSYVYIGEMITNLPFPADEPVEDGCGDCTLCIDLCPTGALVAPGRLNAQMCLAYQTQTKGFMPDEFRQKMGNQLYGYDNCQVVCPKNRGIDHHLHPELEPDPDLVKPELLPLLTISNREFKEKFGHMAGSWRGKKPIQRNAIIALANYKEESAVDELIKLMNNDPRPVIRGTAAWAIGKIGRQDGYQAIRDAMENETDLDVIEEMEKGLAFEQVAT

SEQ ID NO: 74441 - protein, 386 aa, unidentified
  source 1..386: note = Amphiplicatus metriothermophilus
  REGION 1..386: note = tr|A0A239PKG9|A0A239PKG9_9PROT Epoxyqueuosine reductase OS=Amphiplicatus metriothermophilus OX=1519374; GN = queG PE=3 SV=1
MQTSISEPTRAPLPPPALAAEIRAHAKSLGFDAVGVAPAAAPPEREARLRAFVEAGRHGDMAWMATRLVERGAPQALWPDAKSVVMVGLNYGPDHDPLDDVARRREGAISVYARGRDYHDVMKPRLKRLARWMVERFGGGVKVFVDTAPVMEKPLATEAGVGWQGKHTNLVSREFGSWLFLGAVFTTLDLYPETPETDHCGRCTRCLDICPTKAFPAPYQLDARRCISYLTIEHKGPIPAEFREAIGNRIYGCDDCLAVCPWNKFAQSAREAALAARKELSTPPLAALAALDDAAFRALFRGSPVKRTGRDRFVRNVMIAIGNSGDPTLAETARARLDDASPLVRGAAVWALCRLIGPTALADIRAGRGNDPDPDVEAEWRMALAA

SEQ ID NO: 74442 - protein, 374 aa, Amphritea atlantica
  REGION 1..374: note = tr|A0A1H9L230|A0A1H9L230_9GAMM Epoxyqueuosine reductase OS=Amphritea atlantica OX=355243 GN=queG PE=3; SV = 1
MTQYDPEILQTLADQIKAMAISLGFQQCGITGTDLSAEAAPLKAWLDKGYQGEMGYLENHFDKRINPALLTEGTQRIICVRMNCLPPDTKTISVLKNLDQAYISRYTMGRDYHKVMRKKLTQLGKQMETLIGQFGYRAFVDSAPVLERPLARNSGLGWQGKHTLILNRQAGSWFLLGELFVDLPLPVDPPYEEEHCGQCQACIDICPTQAIVAPYQLDARRCISYLTIELKGSIPTAFRPLIGNRIFGCDDCQLICPWNRFAKHSDETDFTPRHNLDRISLLELQQWSEATFLKRTEGSAIRRTGYSGWQRNIAVALGNSRGGEQVLNALQSMIDGDDPLVREHALWALQHLQSRNADQQPPILSHRRSATLPD

SEQ ID NO: 74443 - protein, 370 aa, Amphritea balenae
  REGION 1..370: note = tr|A0A3P1SRL5|A0A3P1SRL5_9GAMM Epoxyqueuosine reductase OS=Amphritea balenae OX=452629 GN=queG PE=3 SV=1
MTQYDPDSMQSLAKQIKNRAIELGFQQCGITDTDLSSEAEALKAWLDKGYQGEMGYLENHFEKRIDPSLLVENTQRIICVRMNCLPPEIETLKILKNPDQAYISRYTMGRDYHKIMRKKLTRLAKDIEGLIGEFGYRPFVDSAPVMERPLARKAGLGWVGKHTLILNRSAGSWFLLGELLVDLPLPVDTEYKEEHCGKCQACIDICPTAAIVAPYELDARRCISYLTIELKGSIPEEFRPLIGNRIFGCDDCQLICPWNRFAQHSSEADFNPRHKLDSMSLVELLAWDEETFLKRTEGSAIRRTGYQGWLRNIAVAMGNSHGGEAIEAALQELSQYPDDIVQEHALWALKQLNKTKITAPILTHPRAAKL

SEQ ID NO: 74444 - protein, 374 aa, Amphritea sp.
  REGION 1..374: note = tr|A0A430KSR4|A0A430KSR4_9GAMM Epoxyqueuosine reductase OS=Amphritea sp. MCCC 1K03512 OX=2490544 GN=queG; PE = 3 SV=1
MTQYDPETLQNLAIKIKTEAAALGFQQCGITDTDLSAEEAPLKEWLDKGYHGEMSYLENNIDKRINPALLTEGTQRIICVRMNCLPPDIQTLKILKNPDQAYISRYTMGRDYHKIMRKKLTLLGKAIEKLIGEFGYRPFVDSAPVLERPLARKSGLGWQGKHTLILNREAGSWFLLGELFVDLPLPVDPPYTEEHCGQCQACIDVCPTQAIVAPYELDARRCISYLTIELKGAIPVEFRPLIGNRIFGCDDCQLICPWNRFAKHSEETDFTPRHQLDQISLLELQRWDEATFLKRTEGSAIRRTGFSGWQRNIAVALGNSRGGEAVLSALQGMIDGDDPLVREHARWAMEALQSTSTDNSTPILQHPRAAKLPD

SEQ ID NO: 74445 - protein, 349 aa, unidentified
  source 1..349: note = Amylibacter cionae
  REGION 1..349: note = tr|A0A2N5IL98|A0A2N5IL98_9RHOB Epoxyqueuosine reductase OS=Amylibacter cionae OX=2035344 GN=queG PE=3; SV = 1
MSAELTRALRDKALAEGFSDFGICRPDAAPHTAQRLAEFVGDGRHGQMGWMAERMNWRGSAAALWPEARSVIMLAENYGPDHDPLEALAHKDRAAISVYAQNKDYHDVVKKRLKRVGRWLIEQADGAEIKVFVDTAPVMEKPLAMAAGLGWQGKHTNVVSRRLGSWFFLGAIFTTLELEETNGEVDHCGSCRKCLDICPTDAFPAPYQLDARRCISYLTIEHRGPVDVALRKGLGNRIYGCDDCLAVCPWNKFASRAAEIKYHGRAELQSPRLGELAVLDETEFRALFSGSPIKRIGRNGFVRNVLYAIGNSEDAGLLSVVQALCEDEDETVADAARWACGELVQTVKD

SEQ ID NO: 74446 - protein, 328 aa, unidentified
  source 1..328: note = Amylibacter kogurei
  REGION 1..328: note = tr|A0A2G5K3H7|A0A2G5K3H7_9RHOB tRNA epoxyqueuosine(34) reductase QueG OS=Amylibacter kogurei; OX = 1889778 GN=BFP76_08445 PE=4 SV=1
MGICAPDAIPLAPARLAEFVDAGMHGQMAWMADRMHWRGNPAELWPEAKSVIMLAEPYTPEHDPLDILQHPDRAAISVYAQNRDYHDMVKKRLKRLGRWLIEQAAGTEIKVFVDTAPVMEKPLGAAAGLGWQGKHTNLVGRDLGSWFFLGAIFTTVDFAKDTGEVDHCGSCRACLDVCPTDAFPAPYRLDARRCISYLTIEHKGPVDVDLRPLLGNRIYGCDDCLAVCPWNKFATEARDIGYTARSELTAPKLTELAMLDDAQFRTLFSKNPIKRIGRNQFIRNVLYAIGNSGDAGLRDVAKRLISDGDETVVDAANWALSELERTHG

SEQ ID NO: 74447 - protein, 323 aa, Anabaena cylindrica
  REGION 1..323: note = tr|K9ZG24|K9ZG24_ANACC Epoxyqueuosine reductase; OS = Anabaena cylindrica (strain ATCC 27899 / PCC 7122); OX = 272123 GN=queG PE=3 SV=1
MNQPLLTSSMVKEKARELGFHKVGISSVDGLDAIVTQRLQAWMELGYHADMQWMANPKREDIRLVMPEVRSLVCVALNYYTPDQRPEGEEYGKISRYGWGRDYHKILHKKLKQLATGLESWSEGVKARYYADTGPVQDKVWAQKAGIGWIAKNGNVITRDYGSWVFLGEILTNLELESDRPATEHCGTCTRCLQACPTGAITEPFIVDANRCIAYHTIENRADNLPETLTPHLHGWVAGCDICQDVCPWNQRFAQETDVTDFQPYPGNLAPKLVELAQISEEEWDKQFPASALRRIKPEMLRRNARANLDAFRLKNDPESNNI

SEQ ID NO: 74448 - protein, 324 aa, Anabaena sp.
  REGION 1..324: note = tr|A0A1W5CNH9|A0A1W5CNH9_9NOST Epoxyqueuosine reductase OS=Anabaena sp. 39858 OX=1710890 GN=queG PE=3; SV = 1
MNYCSIVSSNVVKGKAKELGFHKVGIAAVNESTNAEAERLQAWIKLGYHADMEWMNNPKRSDISLIMPEARSLVCVALNYYTPHQRPDSAEYAKISRYGWGRDYHKVMNRKLKALTTWLQSLDPSIQARYYADTGPVQDKVWAQRAGIGWIAKNGNVITRAYGSWVFLGEVVTNLELEKDSPHTEHCGSCTRCLDACPTGAITQPFVVDANRCIAYHTIENRAAELPEAIASQMQGWVAGCDICQDVCPWNQRFAQTTDVVDFQPYPDNIAPKLIELAQISDEEWDKQFPASALRRIKPEMLRRNARANLDASKRNNDPESNHF

SEQ ID NO: 74449 - protein, 324 aa, Anabaena sp.
  REGION 1..324: note = tr|A0A1B7VIZ9|A0A1B7VIZ9_9NOST Epoxyqueuosine reductase OS=Anabaena sp. WA113 OX=1710889 GN=queG PE=3; SV = 1
MPECTSISSIVVKAKAKELGFHEVGITAVGDLDPTETEKLPAWLKMGYHADMEWMENPQRQQISLIMPDVRSLISVALNYYTPHERPHGNEYGKISRYAWGRDYHRIIHKKLKALSIWLESQGKEIKTRYYADTGPVQDKVWAQKAGIGWIGKNGNVITRKYGSWVFLAEILTNIDLESDRPSSQHCGTCTRCLQACPTGAITAPFVVDANRCIAYHTIENRSPELPPDITPHLQGWVAGCDICQDVCPWNQRFAQTTDVTDFQPYPGNLAPKLVELAQISKEEWDTKFTASALRRIKPEMLRRNARANLDKSRHNNDPEDNNF

SEQ ID NO: 74450 - protein, 324 aa, Anabaenopsis circularis
  REGION 1..324: note = tr|A0A1Z4GMM5|A0A1Z4GMM5_9CYAN Epoxyqueuosine reductase OS=Anabaenopsis circularis NIES-21 OX=1085406; GN = queG PE=3 SV=1
MNQSSVTSSRTVKEQALDLGFHKVGIAAVDEVDNTEVQRLQAWIALGYHADMEWMDNPKRQDIRLVMPEARSLVCVALNYYTPHQRPQGEEYAKISRYGWGRDYHKVMHKKLKQLTTWLESLGEGVTARYYADTGPVQDKVWAQKAGIGWIAKNGNVITREYGSWVFLGEVVTNLELECDRPHTQHCGSCTRCLTACPTGAITQPFVVDANRCIAYHTIENRGEKLPEAIAPHLQGWVAGCDICQDVCPWNQRFAKTTDVADFQPYPGNIAPKLIELAKISDEEWDRQFPASALRRIKPEMLRRNARANLDASQQNNDSESNCF

SEQ ID NO: 74451 - protein, 380 aa, Anaerobacillus alkalidiazotrophicus
  REGION 1..380: note = tr|A0A1S2MCF3|A0A1S2MCF3_9BACI tRNA epoxyqueuosine(34) reductase QueG OS=Anaerobacillus alkalidiazotrophicus OX=472963 GN=BKP45_01695 PE=4 SV=1
MTLAQLKQEIIAYSISIGIDKIGFASADPFVDLKDKLINQQDLGYQSGFEEPDIDKRVHPELLLPEAKSIIAIALAYPSKMKHAPLSTKGARRGLFCRASWGEDYHKILKRKMEQLEAFILEKAPNARVVSMVDTGELSDRAVAQRAGIGWSGKNCSIITEEFGSYVYLGEIITTLALPPDTPITEQCGSCTKCIDACPTGAIVQGGQLDSNKCIAFLTQTKTFLADEYREKIGNRIYGCDTCQQVCPENKGKDFHLHDEMEPDPEVVKPLLKELLFISNRQFKETYGLLSGAWRGKKPLQRNAIIALAHFKDVNAITDLERLLKEDPRPVIRGTAAWAIGKIAAEKSELILKVAKEREKDADVLREIEKGLNLLENHNI

SEQ ID NO: 74452 - protein, 380 aa, Anaerobacillus alkalilacustris
  REGION 1..380: note = tr|A0A1S2LXL0|A0A1S2LXL0_9BACI tRNA epoxyqueuosine(34) reductase QueG OS=Anaerobacillus alkalilacustris OX=393763 GN=BKP37_00500 PE=4 SV=1
MTLAQLKQEIIAYSISIGIDKIGFASADPFVDLKDKLINQQDLGYQSGFEEPDIDKRVHPELLLPEAKSIIAIALAYPSKMKHAPLSTKGARRGLFCRASWGEDYHKILKRKMEQLEAFILEKAPNARVVSMVDTGELSDRAVAQRAGIGWSGKNCSIITEEFGSYVYLGEIITTLALPPDTPITEQCGSCTKCIDACPTGAIVQGGQLDSNKCIAFLTQTKTFLADEYREKIGNRIYGCDTCQQVCPENKGKDFHLHDEMEPDPEVVKPLLKELLFISNRQFKETYGLLSGAWRGKKPLQRNAIIALAHFKDVNAITGLERLLKEDPRPVIRGTAAWAIGKIAAEKSELILKVAKEREKDADVLREIEKGLNLLENHNI

SEQ ID NO: 74453 - protein, 380 aa, unidentified
  source 1..380: note = Anaerobacillus isosaccharinicus
  REGION 1..380: note = tr|A0A1S2L559|A0A1S2L559_9BACI tRNA epoxyqueuosine(34) reductase QueG OS=Anaerobacillus isosaccharinicus OX=1532552 GN=AWH56_20565 PE=4 SV=1
MTYAQLKAEIIAYSISIGIDKIGFAATDPFLELKERLITQQKLGYQSGFEEADIEKRVSPELLLPKAKSIIAIALAYPSKMKNAPLSKKLERRGLFCRASWGEDYHTILRNKLAKLEAFILEKDPSAKLVSMVDTGELSDRAVAERAGIGWSGKNCSIITEEFGTYVYLGQMITTIPLPPDKPITEQCGTCTKCIDACPTGAIVQGGQLDSNKCIAFLTQTKTFLADEFREKLGNRIYGCDTCQQVCPENKGKDFHLHEEMEPDPEVVKPLLRELLFISNREFKEKFGSLSGAWRGKKPLQRNAIIGIAHYKDTTALNDLEKLLKEDPRPVIRGTAAWTIGKLATNQSESILKAAKEREKDANVIAEIDKGLNMLKNQII

SEQ ID NO: 74454 - protein, 379 aa, unidentified
  source 1..379: note = Anaerobacillus macyae
  REGION 1..379: note = tr|A0A0J6CTF3|A0A0J6CTF3_9BACI Epoxyqueuosine reductase OS=Anaerobacillus macyae OX=157733 GN=queG PE=3; SV = 1
MLNAQLKSDIVAYSKTIGIDKIGFAAADPFKSLKERLRRQQDLGYQSGFEESDIEKRTEPELLLNGATTIISIAIAYPSRMKESPRSKRGERRGLFCRASWGVDYHHVLREKLSLLDAYIKSKVPEVSTSSMVDTGELSDRAVAERAGIGFSGKNTMTITEEFGSWVYLGEMITDLYLEPDEPVEEGCGDCNICVDACPTGALIEGGQLNASKCIAFLTQTKGFLPDQYRSKLGNRLYGCDTCQLVCPKNKGKDFHHHPELEPDPEMVKPKLIPLLTMSNREFKEKFGNAAGSWRGKKPIQRNAILALAHYKDETAIETLIELMQKDPRPVIRGTSAWALGKIGGDKAYHALYMEQMREKDKDAANEIAKGLSMLQNKV

SEQ ID NO: 74455 - protein, 312 aa, Anaerobranca californiensis
  REGION 1..312: note = tr|A0A1M6P6N2|A0A1M6P6N2_9FIRM Epoxyqueuosine reductase OS=Anaerobranca californiensis DSM 14826; OX = 1120989 GN=SAMN02745227_01350 PE=4 SV=1
MLKEKIREKGKELGFCQVGFTHPAPFEEYKIVLEKLKRLNNYPPFVPEDINLRTDPKLIMENCKTIIAVAFPYINYVKLSLLYPPAKDEGYISPSAWGLDYHILVKDKMEELICFINGQTKGQYQFMSFVDTGPLSDREIAKRAGIGFVGKNSSLITKEMGSFVWLGHILTDLELSPDSIDTIDNLNCGDCNLCIQSCPTNAIKEDWIIDYSKCLANVLIQKGALPLEIQEKMGKRIYGCDTCQLVCPKNKEILKKYCHSNASLGWIKLQELIELSNKSFKNKYGNTAFSWRGKGVLSRNAKTIIEKNKDLQ

SEQ ID NO: 74456 - protein, 312 aa, Anaerobranca gottschalkii
  REGION 1..312: note = tr|A0A1I0AFH9|A0A1I0AFH9_9FIRM Epoxyqueuosine reductase OS=Anaerobranca gottschalkii DSM 13577; OX = 1120990 GN=SAMN03080614_10218 PE=4 SV=1
MLKEKIREKGKELGFSQVGFTHSLPFEEYKFVLEKLKKINNYPPFVSEDINLRTDPKLIMENCKTIIAVAFPYVNNVKLSLLHPPAEDEGYISPSAWGLDYHILVKDKMEELVQFIDRETKGRYQFMSFVDTGHLSDREIAKRAGIGFVGKNSSLITKEMGSFVWLGHILTDLELAPDSVMNNLDCGHCNLCIQSCPTNAIKEDGFIDYSKCLANVLVQKGELSLEIREKMNKRIYGCDTCQLVCPKNMEVLKKHSPSYASLGWIKLRELLELSNKSFKSKYGNTAFSWRGKGVLSRNAKVIIEKNSKTVEK

SEQ ID NO: 74457 - protein, 294 aa, Anaerococcus prevotii
  REGION 1..294: note = tr|A0A449IBC8|A0A449IBC8_9FIRM Epoxyqueuosine reductase OS=Anaerococcus prevotii OX=33034 GN=queG PE=4; SV = 1
MDRNQVLKKCGLDVLGFCPGTALKEEKAYLLDRQAHFGLCKYEGQNIEERLDPSLQYSPVKSVLVFGINTKTRPIQLKKGQGLLAGISRIPDYHILLKEAGNKLCGILELEDQAKVLVDSHPLMERAFAQRAGLGYIGKNTALIHPVYGTYLALGLILTEKIFPYDKEEKGTCGSCNLCIKACPGGALKGGGILDPGACLSYQTQTIETSPGQVGPRLYGCDVCQEICPKNKEVPLTRLEQVVDRGINKEEIQDLSNREFKKRYGHLTGAWRGKKQWMENFKSVEAYWARKSKE

SEQ ID NO: 74458 - protein, 352 aa, unidentified
  source 1..352: note = Anaerocolumna jejuensis
  REGION 1..352: note = tr|A0A1M6PWN7|A0A1M6PWN7_9FIRM Epoxyqueuosine reductase OS=Anaerocolumna jejuensis DSM 15929 OX=1121322; GN = SAMN02745136_01768 PE=4 SV=1
MEQIEKLIQRKALELGYEKCGIIPVHLLEGYKEKLNERVQKVAESEAFYKGKQHLAHFEKEFPWAKSVVVLTVPQTQYKVPEAVGGHIAKSYLFDSRVDEQTKEHQHSLSLEAYMKELGLRVSTERKYGIVGLRWAAMQAGLGIIRRNNFFYSESGSWVRLEAFLTDRDMELIEKPRFTPCPKNCDRCIKACPTSSLCDAYTMNPLRCVSFLTTFSGRDLPQEPLAADFGEWIYGCDICQEVCPMNHGKWTGSEEFPGLTELAPSLTVETIMKMDEEFYRQKVQPKFFYLTPDELWKWQVNALNYMNNNYQEHFEQIILEACGSSFEKVREMAVAICKSHEIHVEKELASYE

SEQ ID NO: 74459 - protein, 185 aa, Anaeroglobus geminatus
  REGION 1..185: note = tr|G9YJA6|G9YJA6_9FIRM 4Fe-4S ferredoxin-type domain-containing protein OS=Anaeroglobus geminatus F0357; OX = 861450 GN=HMPREF0080_01751 PE=4 SV=1
MFPVVDTSPLADRYMARMAGLGFIGDNQCLIHENYGSYCFIGTIVTTAVLEIDTPSTRECIHCRRCKEICPGRCFDGKNYDYRLCKSYLTQKKGDLSSEEIRIIRKTPYIFGCDECQRVCAHNRTPAPTPIPEFRQNLLTRLDIAAVAAMTNKEFKEAYGKRAFAWRGKKILIRNDGYIKSTPED

SEQ ID NO: 74460 - protein, 380 aa, Anaerolinea sp.
  REGION 1..380: note = tr|A0A1W9PVZ5|A0A1W9PVZ5_9CHLR tRNA epoxyqueuosine(34) reductase QueG OS=Anaerolinea sp. 4484_236 OX=1968532 GN=B5M51_06900 PE=4 SV=1
MVPETLLAKKIKEEAQKQGFILAGITTPNPPPHISTYLDWLDAGRHASMGYLADERARTRRADPCLILPECQSILVLAAPYPDPKLASAKPTGDEVRGKGRVSSYAWSDDYHLTLKEKLKNIVTFIEREVGHKIPNRWYTDTGPILEKDLAQRAGLGWIGKNTCLINPKRGSYFFLAEILLGIALPPNEPFTADHCGTCTRCLDACPTQAILLNRTIDANLCISYLTIENKGEIPEEARPKLGQWIFGCDICQTVCPWNQKPDRSLRPVRFGMTIDPRPDLITELALTPQEFNKKFKHNPVKRAKRRGYLRNIAVALGNAGDSAAIPALEKALKDIEPLVRDHAKWALDRIRSKSPHPASPVSKTGNREGTGFPPVNGGS

SEQ ID NO: 74461 - protein, 383 aa, Anaerolinea thermophila
  REGION 1..383: note = tr|A0A101FY15|A0A101FY15_9CHLR Epoxyqueuosine reductase OS=Anaerolinea thermophila OX=167964; GN = XD73_0664 PE=4 SV=1
MPAALDQIKTYCHSLGFDLVGFTRPAKYTSFSIFAHWIEAGYHADMQYLASAQSLRLRQSPLVLMPTCQSIIVLAYRYPGDILPTQESQHGNPSIAAYARGRDYHNFLPPRMEQIKAYIQSLFVKPVTALCYTDTAPILEKELGVRAGLGWIGKNTCLINPFIGSYFFLSEILLDVDLLGKRGDEYQLPDRCGTCHRCIDICPTHCIKDDRTLDASNCIAYLTIENKGAIPFSAREQVGNHLFGCDLCQQVCPWNKNTGELIADLPEKQEVLDHLEIATYQQISGNEEFNHYFNKTPIKRANRRGFYRNLAVVLGNSLAKNTYSILEKLLQDTDALVRQHAAWALGKHLSPESLPLLRTALSQETDKKVIKEIELALHRKEAQ

SEQ ID NO: 74462 - protein, 376 aa, Anaerolinea thermophila
  REGION 1..376: note = tr|E8MYJ5|E8MYJ5_ANATU Iron-sulfur binding protein; OS = Anaerolinea thermophila (strain DSM 14523 / JCM 11388 / NBRC 100420 / UNI-1) OX=926569 GN=ANT_23050 PE=4 SV=1
MSLETQIKQFFYERGANGVGITHLESPPHYPQYLQWVEAGLHGSMSYLDNERARALRGNPQAILPSARSVVFVSLPIASSIQSPPANRPLTGRVASYAWGEDYHLVFPKLFQAFVEWLSQQLGRVPEAKWYTDTGPVLERDLASRAGLGWIGKNTCLIHPRKGSFFLLGEIFLDVALEPDEPFKTDHCGTCTRCIEACPTECILPNRTLDASRCISYLTIENKGSIPRELREKMGNWVFGCDICQQVCPWNQRFGQTEPYPAFQPRENVPEPNLLEEIHLDSTGFNRKFKNSPVQRPRRRGYLRNVAVALGNAQDEYAVPALIECTENEPEPLVRQHAIWALGRYSSPRIREFFSQRLKEDNDEGVRLAIVQELER

SEQ ID NO: 74463 - protein, 357 aa, unidentified
  source 1..357: note = Anaerolineaceae bacterium
  REGION 1..357: note = tr|A0A3A4QKG1|A0A3A4QKG1_9CHLR tRNA epoxyqueuosine(34) reductase QueG OS=Anaerolineaceae bacterium OX=2024896 GN=queG PE=4 SV=1
MSTALKQAIKDKARQLGFILAGVTSSKPPAHYKAFENWLNQNMHGTMDYLAEDRSRTRRADLEQILPECKSILVLAIPYSPLPQLSKGKSNQEELEVKIASYALGDDYHDILPQKLQAIVAFIEDQLGHSIPNRYYTDSGPILERELAQRAGLGWIGKNSMLINPQAGSTFFLAEILLGIELEPDDAFATDQCGTCTRCITACPTQCILPNRTLDVRRCISYLTIENKVDIPEDLRPQIGNWVFGCDICQQVCPWNRFSQPADPAFEPKIPLPVLTSDLLLSSVEFNQRFRKSPVKRARRRGYLRNLAVVIGNIGNEKDIPVLEQAAQDDEPLVSEHAKWAGRYLTQEGNMRNRVSG

SEQ ID NO: 74464 - protein, 318 aa, unidentified
  source 1..318: note = Anaerolineaceae bacterium
  REGION 1..318: note = tr|A0A1B3WQM1|A0A1B3WQM1_9CHLR tRNA epoxyqueuosine(34) reductase QueG OS=Anaerolineaceae bacterium oral taxon 439 OX=1889813 GN=BEQ56_07135 PE=4; SV = 1
MTSSDRKNWIRAEANRLGFSFTGFTTADPLEAETLRYLDWLRRGCHGEMVYLERADTIAKRADPRALFPDGRSAIVFGVRIGVWPRPDRGYQVADFARYYDYHDTIPVRLNELFERYNRVFASELRWKICADSSPVFERALAVRAGLGWIGRSSMLIHPRFGSKTLLAVAFTDAAFEADAPFIGEWCGSCRRCVEACPMGCIDGEMREIDARRCISYLTIERKSSLEAELWERIGTRVFGCDVCTDVCPWNRSAMRLEITPAKTSSGILIPNGAAFPDERDFELTQATFKEKYCGSPILRRKLPRWLANLENAGRNWR

SEQ ID NO: 74465 - protein, 466 aa, unidentified
  source 1..466: note = Anaerolineae bacterium
  REGION 1..466: note = tr|A0A2U2SMJ0|A0A2U2SMJ0_9CHLR Epoxyqueuosine reductase OS=Anaerolineae bacterium OX=2052143 GN=queG; PE = 3 SV=1
MNAEELAQAIKALALELGFAAVGITSSEPPPHLDIYSKWLAQGYHGEMGYMAEPRSVYLRSNPAELLPGCQSVIVLAARYPAPPPHPQPRSQGERGKDVSPLSLSNTERREQLHQALSSKEEDYPSPFGRGSKEDEIDHRPPSSSAEEPPISSPSLSRPDGTPSPLSKGDGSEGLSGRVAAYAWGKDYHVVLRQRMEDLMQRLQEKAERTIAYRCFTDSAPILERELAQRAGLGWIGKNTCLIHPHFGSYLFLAEIFTDLPLPPDPPFLPDRCGTCQRCIQACPTQCILPNRTLDARRCLSYLTIEHKSTLPSELRAKLGDWVFGCDICQQVCPWNQRVSASPSFPEFLPQPKRARLPLVEILSLSRAEFKQQFRLSPLSRPKWRGLSRNSAVVLGNLIRQNPSLQPRVAEFLIQALQSHPDPLVRQHLAWSLAQVGAPIAQQALKDHLQVETDPLVKAEIETLLQ

SEQ ID NO: 74466 - protein, 379 aa, unidentified
  source 1..379: note = Anaerolineae bacterium
  REGION 1..379: note = tr|A0A0S8IA90|A0A0S8IA90_9CHLR Uncharacterized protein OS=Anaerolineae bacterium SM23_ 63 OX=1703387; GN = AMJ88_03945 PE=4 SV=1
MTNLNTQDLTARIKAEAKRIGFDLVGVTGPAPPSHLDVYHQWLAKGRYGSMSYLADERALKRRSDPLQILPECESILTVAVNYLPEDEQHAKDTPRVAAYARGDDYHDVLIERLERLTEFIATQMGESVPHRMYTDTGPLLERELAQRSGLGWIGKNTCLINPSHGSYFLLAELLLGVQLEPDAPFEEDRCGTCTRCIDACPTSCILPDRTLDARLCISYLTIEHKDSVPLELREKIGNWLFGCDICQQVCPWNRFSMPTKDPTFQTRSLLKPPDIEDLLNLAPGTWPKHLHGSPLLRPRRRGLVRNAAIVAGNQRIQAAVPRLIELLLHDQESLLRGHAAWALGQIGGTSALMALREAKETETDPIVLAEIEAAFIFL

SEQ ID NO: 74467 - protein, 379 aa, unidentified
  source 1..379: note = Anaerolineales bacterium
  REGION 1..379: note = tr|A0A523YX48|A0A523YX48_9CHLR tRNA epoxyqueuosine(34) reductase QueG OS=Anaerolineales bacterium OX=2073117 GN=queG PE=4 SV=1
MEELIELTRFVKEEAHRLGFTLVGITTPDPPSHFDVYQLWLERGNHGSMNYLSSGRALHRRADPRTILPECQSILVCGTMYLPMDSSASTPTSPVQISSYALGEDYHTVLKERLESLIHIIENRLNKPVKHRIYTDTGPLLERELAQRAGLGWIGKNTCLIHPQLGSYLLLAEVLLNIPLQPDPYFPFDRCGTCTRCIDACPTGCILPDRTLDARRCISYLTIEEKQSIDYDLRGAIGNWLFGCDICQQVCPWNQRFAKPTEDPAFQPRPFLKRPAVADFLLLKPETWRKPLRGSPLERPRRKGLVRNAIIVAGNARDRSAILILAELLQSDPEPIIRAHAAWALGQIPGREAQSSLQAAADDETDPIVQGEINRALIT

SEQ ID NO: 74468 - protein, 324 aa, unidentified
  source 1..324: note = Anaerolineales bacterium
  REGION 1..324: note = tr|A0A524HK29|A0A524HK29_9CHLR Epoxyqueuosine reductase OS=Anaerolineales bacterium OX=2073117 GN=queG; PE = 3 SV=1
MPDNKKLTRKVKQMAHELGFPLVGVTSADPPGHLDFFRAWLASGYQASMDWMGSEQSLERRADPKAILPECKSILALGSPYPAPRGNPKGGNIAAYALNRDYHDVLEKRLQALVGKLEEWVGEPVPNRWYTDTGPILEKELAQRAGLGWIGKNTTLINRNFGSYFFLSEILLGIELITDSPNTESFCGSCSRCLETCPTGALLTPYTLDANRCISYLTIAHREEIPTELRPLMGDWIFGCDICQIVCPWNKPDSETPSILEEFLPREELLAIDLTNELNLSQTEFSAKFTGSPVKRAKYSGYLRNVANALGNLSKNNQKAQTED

SEQ ID NO: 74469 - protein, 294 aa, unidentified
  source 1..294: note = Anaeromicrobium sediminis
  REGION 1..294: note = tr|A0A267MGN6|A0A267MGN6_9CLOT tRNA epoxyqueuosine(34) reductase QueG OS=Anaeromicrobium sediminis OX=1478221 GN=queG PE=4 SV=1
MKEKLKKYCNNIGIEYVGIAPIRPYNELKDIIKKREENNWLSGMEEGDIEKRIDPKLIMDDCRSIIVCLFPYYIKDINSNISNYTYGKDYHMVVKEKLNQIGSYLSSEIEGFKYEAFTDTGPLADRYLAYMAGLGFFGLNQSLINDKYGTYTFIGYIINNYPFKEDTPLNKTCLRCGECIEACPGKALYDDFNMDAKKCVSYLTQKKEELRVDEIEKVKKAKKVFGCDVCQQVCPHNKNVAKTNIIEFKEDLLTSLDKGEIENMSNKGFKREYGNRAFSWRGRKIISRNFSYMD

SEQ ID NO: 74470 - protein, 345 aa, Anaeromyxobacter dehalogenans
  REGION 1..345: note = tr|B8JFJ2|B8JFJ2_ANAD2 4Fe-4S ferredoxin-type domain-containing protein OS=Anaeromyxobacter dehalogenans (strain 2CP-1 / ATCC BAA-258) OX=455488 GN=A2cp1_3034 PE=4 S V=1
MAGLDADRVKAAAARAGFSRCGIARAEPLDPGPLDRVLAGGLEADMVWLRTQRDERLDPARLLPGVRSVVALALSYHAGEPAAPPPGAAAVARYARGRDYHTVVKRKLAALLADLREADPGLGAYASCDIAPVMEKAWAERAGVGWVGKNGCLITPEHGSWVVLATLLLDRELAPDAPHPDRCGTCEACLPACPTGAIPAPGVVDARRCISFWTIERRGPIPDELAGRLGGWAFGCDDCQTVCPWNRGVPAEADLELVPRPGQLALWLDELLALDAEGYRRRFHGTSLARARHDGLVRNALLLAGTSGDRRYLPAIRAHLESPLGDAVRAAARWALERLGEARDP

SEQ ID NO: 74471 - protein, 343 aa, Anaeromyxobacter dehalogenans
  REGION 1..343: note = tr|Q2ILU6|Q2ILU6_ANADE 4Fe-4S ferredoxin, iron-sulfur binding protein OS=Anaeromyxobacter dehalogenans (strain 2CP-C) OX=290397 GN=Adeh_2853 PE=4; SV = 1
MAGLDADQVKAAAARAGFSKCGIARAEPLDPGPLDRVLAGGLEADMTWLRTQRDERLDPARLLPGVRSVVALALSYHAGEPAPPPPGAAAVARYARGRDYHTVVKRKLAAMLADLRAADPGLGAYASCDIAPVMEKAWAERAGVGWVGKNGCLITPEHGSWVVLATLLLDRELAPDAPHPDRCGTCEACLPACPTGAIPAPGVVDARRCISFWTIERRGPIPDELAGRLGGWVFGCDDCQTVCPWNRGVPADGDLELVPRPGQLSLWLDELLALDAEGYRRRFHGTSLARARHDGLVRNALLLAGASGDRRHLPAIRAHLASPLGDGVRAAARWALERLGGEP

SEQ ID NO: 74472 - protein, 347 aa, Anaeromyxobacter sp.
  REGION 1..347: note = tr|A7HE37|A7HE37_ANADF 4Fe-4S ferredoxin-type domain-containing protein OS=Anaeromyxobacter sp. (strain Fw109-5) OX=404589 GN=Anae109_2783 PE=4 SV=1
MSQPLDAASVKDAARRCGFAACGIARAERLDPGPLDRMLAAGAEADMVWLRTQREERLDPSRLLPGARSVVALALGYDGAGAEPPAGAGEVARYARGRDYHAVMRGKLKGLVAELRARDPEVRTFASSDLAPVMEKAWAERAGLGWVGKNGCLITERYGSWVLLATVLLDRELEPDAPHPERCGSCDACLSACPTGAIPAPGLVDARRCISFWTIERRGAVPDELAGRLGRWVFGCDACQTVCPWNRHPDAAVDPGLAPRPEQTALGIDELLALTEEEYRRRFYGTALARARHDGLVRNALLAAGREGDPRRLEAVRAHLASPHEGVRAAARWALDELARRAGMRPA

SEQ ID NO: 74473 - protein, 347 aa, Anaeromyxobacter sp.
  REGION 1..347: note = tr|A0A1F3BNU9|A0A1F3BNU9_9DELT tRNA epoxyqueuosine(34) reductase QueG OS=Anaeromyxobacter sp. RBG_16_69_14 OX=1797238 GN=A2V77_16960 PE=4 SV=1
MAVALDTAFVKEASLAIGFHKVGVARAAALDPAPLDRMLASGWDADMTWLRATRAQRLDPARLLPGARSVVALALSYLEGDLATREPAEARVARYARGRDYHAVMKRKLKALVARLRERDPGIGTFASADVAPVMEKAWAQRAGLGWVGKNGCLITTDLGSWVLLATVILDRELEPDAPHKEHCGSCAECLSACPTAALVSPGFVDARRCISFQTIERRGSIPQEVAERLGPWAFGCDDCQTVCPWNRAPAARCDPELSARPGQRGLDLDALLTLTLEQYQRRFYGTALARSRYEGLLRNAVLAAGHAGDARRLPAVRAHLDSPFEGVRQAACWAVTRLERASPTAP

SEQ ID NO: 74474 - protein, 298 aa, Anaerosphaera sp.
  REGION 1..298: note = tr|A0A1E9AFA1|A0A1E9AFA1_9FIRM 4Fe-4S ferredoxin-type domain-containing protein OS=Anaerosphaera sp. HMSC064C01 OX=1739304 GN=HMPREF2800_04945 PE=4 SV=1
MIIKHSELDKLIKKYSVDAFRITDASRLDLLGDALNEFTKYNKEERLNPKTLFPNAKSIIVFGLSYNYKKAKRKEGSYLLSRSSYGYDYHKIFKEKLDKIDKELFLDEKSESHVFVDTGPLIERLLAKKSGLGFLGKNTCIINPNLGSFIFIGYIISNEPSDFYDESLKIDCGSCDICERACPNRALCGYKMQMTKCLSYITQKKGDLSEFEKKNIKTYIYGCDICQEVCPYNKNAKKVYHEEFHELDDYGLVYKDDFNLSNREFKEKYKAMAALWRGKKILERNANIIDNNKNDIVK

SEQ ID NO: 74475 - protein, 342 aa, unidentified
  source 1..342: note = Anaerospora hongkongensis
  REGION 1..342: note = tr|A0A4R1QAP8|A0A4R1QAP8_9FIRM Epoxyqueuosine reductase QueG OS=Anaerospora hongkongensis OX=244830; GN = EV210_102152 PE=4 SV=1
MQTTAQLIRERAYQLGYEKCGIIPVRALEGYAEKFNERIQKIPASEMFYQRQRHLTQPLEHYPWAKSVVILVAGYGKYKIPEAVRGQIAKAYLFDVRCDASSEEFQNSQAMERFMEGLGLKIATNRKFGVVGLRWAAMQAGLGIIRRNNFFYTQAGSWMHLEAWLTDEEMELREASNTRPCPEGCNRCVKACPTRSLSAPYTMLPNTCVSFLTTFGGRNLPQEPLRKTFGSCIYGCDICQDVCPMNKGKWQEEKEFPGLAELSLALTPENILQMKDDFYRAKVQPKFFYLSPDELWKWQINVLSFMRNNYQAKYKNVILTACESDNEKVREMAQTIAKEVAV

SEQ ID NO: 74476 - protein, 228 aa, unidentified
  source 1..228: note = Anaerospora hongkongensis
  REGION 1..228: note = tr|A0A4R1Q0I1|A0A4R1Q0I1_9FIRM Epoxyqueuosine reductase QueG OS=Anaerospora hongkongensis OX=244830; GN = EV210_10785 PE=4 SV=1
MNRIDAAEVKLRATELGMDLCGIAPVGRFADAPQGFHPTDVNKTCKSVIVLAARFPVSSLASPSAAAYTFVRNKVMDKVDAAACQLAAELEMLGGNAVPIPSSDPYEYWDEERRHGQGILSLKHAAVRAGLGQMGKNTLLINDRLGNMLWLGAVLVDQELAADEPVGYQACISGCRICLKACPAQALDGTTIVQKQCRAVSYKQTGGGGGVYACNLCRKLCPSHNGIQ

SEQ ID NO: 74477 - protein, 245 aa, Anaerosporobacter mobilis
  REGION 1..245: note = tr|A0A1M7KPE1|A0A1M7KPE1_9FIRM Epoxyqueuosine reductase QueG (Queuosine biosynthesis); OS = Anaerosporobacter mobilis DSM 15930 OX=1120996; GN = SAMN02746066_02868 PE=4 SV =1
MNKEYNGNEAARDIVFSNVSKEYLRKIILDYGAQVCGFADIERFEDAPKGSHPCDIYSDCKSVVAFGVSLPKGLYMVDSRLIYGHFYDDVCNKVNEIAYKIALLMEKEYGAIAVPIPADGPYEYWDTKNLDGRGWLSMKHVAVQAGLGTLGKNTLFLNQLYGNRLTVGCVLTNIVVNPDSYAEPVCLPNCNECVTNCPSGALHVGSAAQSECRMKAYGKGEKEFNTVDCYRCRTVCPMRFGACVI

SEQ ID NO: 74478 - protein, 334 aa, Anaerosporobacter mobilis
  REGION 1..334: note = tr|A0A1M7IJ05|A0A1M7IJ05_9FIRM Epoxyqueuosine reductase OS=Anaerosporobacter mobilis DSM 15930; OX = 1120996 GN=SAMN02746066_01878 PE=4 SV=1
MKLEVGNVVKKKIEEFCRSLGLDTFGFVPCRTFDELRELYQIRQEKKLQNEFEEKDIEKRIRPSHYMEDGKTILSIAFPYYHEGEDIDNGFSIYTKRPDYHRVVMQYIDKICEFIISLGGKAKGFVDSNTLPERYIAYLAGVGFIGRNNMIITKKYGSYVFLGEIITDLKIPCEDKHTFDQIREYTQCGECMNCIKECPTKSINKHQINPNICLSYITQKKEISNKEISLLKGNVFGCDFCQLQCPYNQDATCNVLSEFKTVEYMNEDIYTYANMNNQYFKEKISKTSCGWRGKNVIKRNAIIGINYQDKKYDLDEFRGDSPYINEYIDRIQEK

SEQ ID NO: 74479 - protein, 285 aa, Anaerotruncus colihominis
  REGION 1..285: note = tr|A0A174RJJ3|A0A174RJJ3_9FIRM Epoxyqueuosine reductase OS=Anaerotruncus colihominis OX=169435 GN=queG; PE = 4 SV=1
MNSRLETLMRGMAFDEWGVCRFHDALPLLPVRSKARIPQGARSVIVVLFGYYIGDFPNRNISYYAIVDDYHTIVRAVLETAADKLRALYADEQFVPFVDASPVAEVRAAYLAGLGDIGMNGQLLNRTYASRCFIGEIVTTAALEPSRRAAPLCTRCGRCIAACPTGALRPDGFDRALCRSHITQKKGSLTGWERAQIRSGGFVWGCDRCTDACPVNRLAQKSRVPAFYEHPEPVVHAGNAARLCGEKAYGWRGTPVLLRNLEIICGDARDDMDTDARPSPPAGRT

SEQ ID NO: 74480 - protein, 285 aa, Anaerotruncus colihominis
  REGION 1..285: note = tr|B0P9B8|B0P9B8_9FIRM Putative iron-sulfur cluster-binding protein OS=Anaerotruncus colihominis DSM 17241 OX=445972 GN=ANACOL_01365 PE=4 SV=1
MNSRLETLMRGMAFDEWGVCRFHDALPLLPVRSKARIPQGARSVIVVLFGYYIGDFPNRNISYYAIVDDYHTIVRAVLETAADKLRALYADEQFVPFVDASPVAEVRAACLAGLGDIGMNGQLLNRTYASRCFIGEIVTTAALEPSRRAAPLCTRCGRCIAACPTGALRPDGFDRALCRSHITQKKGALTGWERAQIRSGGFVWGCDRCTDACPVNRLAQKSRVPAFYEHPEPVVHAGNAAHLCGEKAYGWRGTPVLLRNLEIICGDARDDMDTDARPSPPAGRT

SEQ ID NO: 74481 - protein, 273 aa, Anaerotruncus sp.
  REGION 1..273: note = tr|A0A3A9J5T0|A0A3A9J5T0_9FIRM Epoxyqueuosine reductase OS=Anaerotruncus sp. 1XD22-93 OX=2320082; GN = D7Y41_04460 PE=4 SV=1
MERLRACMQPFGIDQWGACRFSELPPLLEVRSRERIPQNAQSVLVFLFGYYTEAFPDRNIARYAVPDDYHSILRPLLAEVAASCAERFPGEAFVPFIDSSPIDEVAAAALAGLGEVGLNGLLLNPVYGSYCFIGEIVTTLPLEIPPPQPQQLCTRCGACRAACPSGALAQGRFTRERCRSELTQKKGELTLWEQEQIREGGLVWGCDRCTEACPVNRSAAKSRVEGFYRNPAPVVDAQNAALLCKTKSYGWRGKNILLRNLHILSGETKDVVS

SEQ ID NO: 74482 - protein, 273 aa, Anaerotruncus sp.; identical to SEQ ID NO: 74481
  REGION 1..273: note = tr|R9LVM4|R9LVM4_9FIRM Uncharacterized protein; OS = Anaerotruncus sp. G3(2012) OX=1235835 GN=C814_01814; PE = 4 SV=1

SEQ ID NO: 74483 - protein, 378 aa, Anaerovirgula multivorans
  REGION 1..378: note = tr|A0A239H7P4|A0A239H7P4_9FIRM Epoxyqueuosine reductase OS=Anaerovirgula multivorans OX=312168; GN = SAMN05446037_102017 PE=4 SV=1
MTLKEQIVNYAKSIGVSMIGFTSAEAFEDIRGILEERKKLEYLSGFEEKDIDLRIDPKKTMPEAKSILVIALPYYIDEENLQQKETPLFHGELARTAWGKDYHDVVKEKLEKIATFIKGKKEKFDYKSFVDTGPLVDRHVAYRAGLGWYGYNSILMNDEYGSWFFIGYMLNNLEIPSDKPLNNRSCQGCNLCIKHCPKGAIEAPYKFNAKKCLSNILQQKEDIKESDRKSLGKSLYGCDICQQVCPHNKEIKKETEEDFYPKEALHKPDLLQLLSMSNKEFKKTYGETSAGWRGKKILQRNAIIALVNHGDKKTIPYLLPLLQDNRPEIRKYAIWAICELDPFKAYQILMKVKKQEKDEEVLKTIEYYCKKISCEKKR

SEQ ID NO: 74484 - protein, 231 aa, Anaerovirgula multivorans
  REGION 1..231: note = tr|A0A239BET7|A0A239BET7_9FIRM Epoxyqueuosine reductase QueG (Queuosine biosynthesis) OS=Anaerovirgula multivorans OX=312168 GN=SAMN05446037_1003188 PE=4 SV=1
MNKQQQIEKMILDLGVEKVGFCQLDDLLPQEFKHLKNGISIAIRLSDQVISDIDLEKGPTHTYFHHYRTVNAFIDQVSFKITNQLQQWGYLAMAIPASQSINDKGWHYKGLFQHRTTATRAGIGWIGKNCCLVTEEVGPRVRLGTILTNMEFKYDIPITASQCGNCNLCITSCPVKALKGETWTAGMEREAFINPELCSSHMKSQYKHIGRGAVCGICVKVCPRGKKVLKK

SEQ ID NO: 74485 - protein, 391 aa, Ancylobacter aquaticus
  REGION 1..391: note = tr|A0A4R1I495|A0A4R1I495_ANCAQ Epoxyqueuosine reductase OS=Ancylobacter aquaticus OX=100 GN=queG PE=3; SV = 1
MLRGSGFLTPEAARDYLFALAREEGFDAMGIARADAIPHAGPRLIQWISEGAHGEMDWMPDTAARRAAPANMWPDVASILMLGLNYGPDEDPRALLGQPTRGTISVYARGDDYHELIKGKLKRIASRFVPRAGAAGTVEVKVFVDTAPLMEKPLAEAAGLGWQGKHTNLVSRDKGSWLFLGAIATNLALPPDDAEVDHCGSCRACLDACPTGAFPAPYRIDARRCISYLTIELKGAIPRELRPLVGNRIYGCDDCLAACPWNKFAALGREMRLSARDENRAPTLAELARLDDAAFRARFSKSPVKRIGRARFLRNVLVAIGNSGEAGLAVEAERHLGDGHPLVRGAAVWALSRLLPPADFAALRAAHAGEADAQVSAEWRQAPTDSAGEAP

SEQ ID NO: 74486 - protein, 391 aa, Ancylobacter aquaticus
  REGION 1..391: note = tr|A0A3S0EH92|A0A3S0EH92_ANCAQ Epoxyqueuosine reductase OS=Ancylobacter aquaticus OX=100 GN=queG PE=3; SV = 1
MLRGSGFLTPEAARDYLFALAREEGFDAMGIAAADAIPEAGPRLHQWIAEGAHGDMEWMPETAARRAAPANMWPEVASLLMLGLNYGPDQDPRAILAERAHGAISVYAQGDDYHELIKGKLKRIASRFVPRAGAAGTVEVKVFVDTAPLMEKPLAQAAGLGWQGKHTNLVSRDKGSWLFLGAIATNLALPPDARETDHCGSCRACLDACPTNAFPAPYQIDARRCISYLTIELKGAIPRELRPLVGNRIYGCDDCLAACPWNKFAALGREVRLAAREENRAPPLAELARLDDAAFRARFSKSPVKRIGRARFLRNVLVAIGNSGEPGLAVDAGRHLSDAHPLVRGAAVWALSRLLPPAEFAALRAAHDTETDPEVRAEWRPAPVEPAGVHA

SEQ ID NO: 74487 - protein, 391 aa, Ancylobacter rudongensis
  REGION 1..391: note = tr|A0A1G4SMJ6|A0A1G4SMJ6_9RHIZ Epoxyqueuosine reductase OS=Ancylobacter rudongensis OX=177413 GN=queG; PE = 3 SV=1
MLRGSGFLTPEAARDYLFALAREEGFDAMGIAAADAIPEAGPRLHQWIAEGAHGDMEWMPETAARRAAPANMWPEVGSLLMLGLNYGPDQDPRAILAERTRGAISVYAQGDDYHELIKGKLKRIASRFVPRAGAAGTVEVKVFVDTAPLMEKPLAQAAGLGWQGKHTNLVSRDKGSWLFLGAIATNLALPPDARETDHCGSCRACLDACPTNAFPAPYQIDARRCISYLTIELKGAIPRELRPLVGNRIYGCDDCLAACPWNKFAALGREVRLAAREENRAPPLAELARLDDAAFRARFSKSPVKRIGRARFLRNVLVAIGNSGEAALAVDAGRHLGDAHPLVRGAAVWALSRLLPPAEFAALRAAHDTETDPEVRAEWRPAPVEPAGVHA

SEQ ID NO: 74488 - protein, 313 aa, unidentified
  source 1..313: note = Ancylomarina sp.
  REGION 1..313: note = tr|A0A425Y285|A0A425Y285_9BACT Epoxyqueuosine reductase OS=Ancylomarina sp. A4 OX=2283628 GN=queG PE=3; SV = 1
MNLTLSAKSNLIKAKAIELGLDLCGIAKADFLDEEKENFQSWLDKKYHGEMLYMANNIEKRLDPRLLVENTKSIVVVGLNYFPKQQQQDPEAPVIAKYAYGKDYHFVLKDRLNQLLEYINTEIGEVSGRAFVDSAPILEHAWAKKAGLGWIGKNSLLLNRKIGSFLFLGELLIDMELEYEEEKYQDFCGGCSKCIRACPTGAITEPYVVNGSKCISYFTIELKGEIPEEMKGKFKNRVFGCDICQDVCPWNRMVKSNSVPEFQPDSDLLSLSKAEWEQLDAYKFGEIFKNSAVKRTKFKGLKRNLDFLHTESE

SEQ ID NO: 74489 - protein, 310 aa, unidentified
  source 1..310: note = Ancylomarina sp.
  REGION 1..310: note = tr|A0A4Q1JKH2|A0A4Q1JKH2_9BACT Epoxyqueuosine reductase OS=Ancylomarina sp. SHSM-M15 OX=2501299 GN=queG; PE = 3 SV=1
MNLTLAAKSQLIKDKALELGFDLCGIAEANFLSEEKERFTDWLDKDYHGEMGYMANNVEKRLDPRLLVENTKSVVVVALNYYPESKQEDAEAPVLAKYAYGKDYHFVIKEKLNALLAYINEEIGETQGRAFVDSAPILEHAWARKAGLGWIGKNSLLLNRKLGSFMFLGELLIDMPLEYNTEIYPDFCGGCNRCIRSCPTDAIVAPKVVNGSKCISYFTIELKDDITEEMKGKFQNRVFGCDICQDVCPWNRMVKPHSVEDFKPNPKILSLSKDEWFAMNAHEFGDLFKNSAVKRTKFKGLKRNLDFLTE

SEQ ID NO: 74490 - protein, 310 aa, unidentified
  source 1..310: note = Ancylomarina subtilis
  REGION 1..310: note = tr|A0A4Q7VAV5|A0A4Q7VAV5_9BACT Epoxyqueuosine reductase OS=Ancylomarina subtilis OX=1639035 GN=queG PE=3; SV = 1
MNLTLAAKSQLIKDKAHELGFDLCGIAEANFLSEEKEHFTDWLSKDYHGQMGYMANNVEKRLDPRLLVENTKSVVVVALNYYPESKQEDAKAPVLAKYAYGKDYHFVLKEKLNTLLEYINEEIGETQGRAFVDSAPILEHAWARKAGLGWIGKNSLLLNRKLGSFMFLGELLIDLPLVYETETYPDFCGGCNRCIRSCPTDAIVAPQVVDGSKCISYFTIELKDDIPEEMKGKFQNRVFGCDICQDVCPWNRMVKPHSVEAFKPNPKILSLSKDEWFAMDAHKFGDLFKNSAVKRTKFKGLKRNLDFLIE

SEQ ID NO: 74491 - protein, 310 aa, unidentified
  source 1..310: note = Anditalea andensis
  REGION 1..310: note = tr|A0A074KYJ3|A0A074KYJ3_9BACT Epoxyqueuosine reductase OS=Anditalea andensis OX=1048983 GN=queG PE=3; SV = 1
MSLPDKYASIIKSISKGLGFEFCGIAKAKFLEKEAPLLENWLNKNYHGQMAYMANHFDKRLDPTLLVDGAKTVVSLIYNYYPIEKLPSGPEDLKLAKYAYGRDYHFVIKEKLNAMLSVLQKEIGEIGGRAFVDSAPVMERQWAQRSGIGWLGKNSLLLNRSMGSFFFLAELIIDLEVTPDIPSTKDYCGSCTRCVDACPTDAITEAGVVDGSKCISYFTIELKEELPLSAKGKFENWMFGCDICQDVCPWNRFAKPNREPKFLPHPDLKNMTVKDWEEITAETFGKIFQKSAVKRTKLQGLKRNIDFLKP

SEQ ID NO: 74492 - protein, 228 aa, unidentified
  source 1..228: note = Andreesenia angusta
  REGION 1..228: note = tr|A0A1S1VAI0|A0A1S1VAI0_9FIRM Epoxyqueuosine reductase OS=Andreesenia angusta OX=39480 GN=queG_1 PE=4; SV = 1
MREKIEKIAKEMGASLVGVGSIERLLSPEHSHLKTGISIAVRLSDQIMNDVVDSPTHTYYHHYRTVNFLIDQICLRISMEIQNRGYLAMGVAASQTVKSESENYKGLISHKMVATRAGIGWIGKSACLVTPEYGPRVRLGTVVTDMEMEYDKPRDISECGDCTICMVNCPSLAIRGVNWEVGKSREEIYDAYACSRHMSEEYRDIGRGSVCGICVSCCPYGKRLQNRT

SEQ ID NO: 74493 - protein, 376 aa, unidentified
  source 1..376: note = Andreesenia angusta
  REGION 1..376: note = tr|A0A1S1V7U7|A0A1S1V7U7_9FIRM Epoxyqueuosine reductase OS=Andreesenia angusta OX=39480 GN=queG_2 PE=4; SV = 1
MRIEDKIRAEAERIGIDDLGIARGYDRMRILDILAERRRIGWELEFEHSDIEDRTRPEKLLEDYSSIIAVAVSYNLKRASGRDSGGILRGVMSVSAVGEDYHRVVREKAEKLMESIVAEHPSKYYIGVDTSPLLDREIAAAAGIGFFGKNTSIINPELGSRIFLGYILTTLELECGTKLEDGCGSCEICVKACPTNAIQGDYTMNPRRCIAYLTQTKLKIPFELREKMGFKIYGCDVCQNACPKNKKAKHCRAENFMSAEGLGLEHSTRVDIQKLLSMTNREFKETYGKTSSGWRGKNILKRNAIIALGNSGDRSYVEVIRPLLKDQSKIIKEYALWSLMKLDFEGTANYIEENRELLDKELEGEYRDIHNYLEER

SEQ ID NO: 74494 - protein, 382 aa, Andreprevotia lacus
  REGION 1..382: note = tr|A0A1W1XKS4|A0A1W1XKS4_9NEIS Epoxyqueuosine reductase OS=Andreprevotia lacus DSM 23236 OX=1121001; GN = queG PE=3 SV=1
MPDGDVTAQDAARPDPVAVVAQLKAWALELGFARAAVTGTDLSHAEAGLQAWLDAGYHGEMDYMARHGMKRARPAELVPGTQSVVSVFLPYRPPAVANSEAVMADGEKAHISRYALGRDYHKVLRNRLQTLADRLTALIGPFGHRVFVDSAPVLEVELAKQAGLGWRGKHTLLINRDYGSYFFLGELFTDLPLPADPPEQNEHCGRCTKCLDVCPTQAIVAPYTVDARRCISYLTIELKGSIPVEFRPMIGNRVYGCDDCQLCCPWNRFAVDTAEADFHVRHGLDDITLAELFAWSEADFQSRMAGSAIYRIGHAQWLRNLAVGLGNAPSTPRVLAALASRQQSDDETLREHVAWALAQHAARQKGENDDRRGAAPGHTTTG

SEQ ID NO: 74495 - protein, 389 aa, Aneurinibacillus aneurinilyticus
  REGION 1..389: note = tr|U1WRP8|U1WRP8_ANEAE Epoxyqueuosine reductase; OS = Aneurinibacillus aneurinilyticus ATCC 12856 OX=649747; GN = queG PE=3 SV=1
MKTRHDDTTVTDWSRLKQDVIQYAHHIGIDKIGFASADPFLMLKERLYKHREKGYESGFEEKDIEKRTHPERILPEVKSIIAIALAYPSRMEAPPKSEPGNYRGVMARVAWGEDYHHVLRDRLQKLERFLHERVPEIKTEIMVDTGALSDRAVAERAGLGWVGKNTSLITKEFGSWVYLGEMLTSVPFPPDQSIEEECGECTICIDSCPTGAIVQGGQLDSTRCVAFLTQVKDEIPEEFRSAIGNRLYGCDTCQQVCPKNRKINFTHHQEFTPDSDAAKPLLKPLLTISKKEFASRFGRSSGSWRGKKPIQRNAILALAHFKDKSAVPDLLHVLLEDERSVLRSTAAWALGRIGGEDAMLALKKAKIREKDAMVQKEIEKALINVENVE

SEQ ID NO: 74496 - protein, 388 aa, Aneurinibacillus danicus
  REGION 1..388: note = tr|A0A511V0V1|A0A511V0V1_9BACL Epoxyqueuosine reductase OS=Aneurinibacillus danicus OX=267746 GN=queG; PE = 3 SV=1
MEQQHEMTATDWSRLKQGVIRYAHDIGIDKIGFAAADPFLVLKERLYKHRELGYESGFEEKDIEKRAHPEHTLPEVKSIIAIALAYPSRMESPPKSEQGNYRGIMARVSWGEDYHHVLRDRLKKLEQFLHEKVPGIRTEIMVDTGALSDRAVAERAGLGWVGKNTSLITPEFGSWVYLGEMLTSAPFPPDQPVIEDCGDCTLCIDFCPTGAIVQGGQLNSQRCVAFLTQLKDEIPEEFRPAIGNRLYGCDTCQQVCPKNRKLNFTHHPEFTPDPEAAKPLLKPLLTISKKQFASTFGRTSGAWRGKKPIQRNAILALAHFKDKSAVPDIIRVLTEDERPALRSTAAWALGRIGGDEAILALKKAKTREKEETVRQEIEKALLSRENVE

SEQ ID NO: 74497 - protein, 387 aa, Aneurinibacillus migulanus
  REGION 1..387: note = tr|A0A0D1XTB9|A0A0D1XTB9_ANEMI Epoxyqueuosine reductase OS=Aneurinibacillus migulanus OX=47500 GN=queG; PE = 3 SV=1
MRHDCTTVTDWSRLKQDVIRYAHHIGIDKIGFASADPFLMLKERLYKHREQGYESGFEEKDIEKRTHPESILPEVKSIIAIALAYPSRIEGPPKSEPGNYRGVMARVAWGEDYHHVLRERLQKLEQFLHEQVPEIKTEIMVDTGALSDRAVAERAGLGWVGKNTSLITKEFGSWVYLGEMLTSAPFPPDHPIEEECGDCTMCIDSCPTGAIIQGGQLDSTRCVAFLTQVKDEIPEEFRSAIGNRLYGCDTCQQVCPKNRKINFTHHPEFTPDPDAAKPLLKPLLTISKKQFASKFGRSSGSWRGKKPIQRNAILALAHFKDKSAVPDLLCVLLEDERSVLRSTAAWALGRIGGEEAMLALKKAKIREKDAVVQEEIEKALMSGESVE

SEQ ID NO: 74498 - protein, 389 aa, Aneurinibacillus migulanus
  REGION 1..389: note = tr|A0A1G9B6I7|A0A1G9B6I7_ANEMI Epoxyqueuosine reductase OS=Aneurinibacillus migulanus OX=47500 GN=queG; PE = 3 SV=1
MEIRHDCTTVTDWSRLKQDVIRYAHHIGIDKIGFASADPFLMLKERLYKHREQGYESGFEEKDIEKRTHPESILPEVKSIIAIALAYPSRIEGPPKSEPGNYRGVMARVAWGEDYHHVLRERLQKLEQFLHEQVPEIKTEIMVDTGALSDRAVAERAGLGWVGKNTSLITKEFGSWVYLGEMLTSAPFPPDHPIEEECGDCTMCIDSCPTGAIIQGGQLDSTRCVAFLTQVKDEIPEEFRSAIGNRLYGCDTCQQVCPKNRKINFTHHPEFTPDPDAAKPLLKPLLTISKKQFASKFGRSSGSWRGKKPIQRNAILALAHFKDKSAVPDLLCVLLEDERSVLRSTAAWALGRIGGEEAMLALKKAKIREKDAVVQEEIEKALMSGESVE

SEQ ID NO: 74499 - protein, 379 aa, unidentified
  source 1..379: note = Aneurinibacillus soli
  REGION 1..379: note = tr|A0A0U5B4L4|A0A0U5B4L4_9BACL Epoxyqueuosine reductase OS=Aneurinibacillus soli OX=1500254 GN=queG PE=3; SV = 1
MNIEQLKQEVIAYAYSIGIDKIGFAAADPFLTLKERLYTHRERGYESGFEEKDIEKRVYPERTMEGARSIISIALAYPSRMEAPPKSEPGTYRGVLARVAWGEDYHNVLRDRLQKLEGFLQARVPDVQTVTMVDTGVLSDRAVAARAGLGWVGKNTSLITHEFGSWVYLGEMLTNVPFPPDTPIEDECGDCTLCIDSCPTSAIVQGGQLDSTRCVAFLTQVKDYIPDEFRTAVGNRLYGCDTCQQVCPKNRKKHVNLHPEFVPDNEAAKPLLKPLLSIGKKEFTARFGRSSAAWRGKKPIQRNAILALAHFKDTTAIPELIQLLRKDERPAIRGTAAWALGRIGGEDARVALEMAKNSERDNLAYSEIEKALSKLENVE

SEQ ID NO: 74500 - protein, 389 aa, Aneurinibacillus sp.
  REGION 1..389: note = tr|A0A109QE69|A0A109QE69_9BACL Epoxyqueuosine reductase OS=Aneurinibacillus sp. XH2 OX=1450761 GN=queG; PE = 3 SV=1
MEQKQHKQAETDWSHLKQEIIAYAHKIGIDKIGFASSAPFLTLKERLYKHRELGYESGFEEKDIEKRTHPEQIMPEAKSIIAIALAYPSRMEAPPKSTPGNYRGIMARVSWGEDYHRVLRDRLKKLEQFLHEKVPDIRTEIMVDTGALSDRAVAERAGLGWVGKNTSLITPEFGSWVYLGEMLTSAPFPPDKPIEDECGDCTICIDACPTGAIVQRGQLNSQRCIAFLTQVKDMIPEAFRPAVGNRLYGCDTCQQVCPKNRKINFTHHPEFVPDPEMAKPLLKPLLTISKKEFAAKFGRTSGAWRGKKPIQRNAILALAHFKDKSAVPDLIEIMTNDERPVMRGTAAWALGRIGGDAAITALKKAKTREKVKTVLREIEKALSLTENVE

SEQ ID NO: 74501 - protein, 389 aa, Aneurinibacillus thermoaerophilus; identical to SEQ ID NO: 74500
  REGION 1..389: note = tr|A0A1G7WN71|A0A1G7WN71_ANETH Epoxyqueuosine reductase OS=Aneurinibacillus thermoaerophilus OX=143495; GN = queG PE=3 SV=1

SEQ ID NO: 74502 - protein, 381 aa, Anoxybacillus amylolyticus
  REGION 1..381: note = tr|A0A160F3G6|A0A160F3G6_9BACI Epoxyqueuosine reductase OS=Anoxybacillus amylolyticus OX=294699 GN=queG; PE = 3 SV=1
MDIDQLKKEIIVYSQEIGIDKIGFASADPFIELKERLLQQQQLGYQSGFEEPDIEKRTNPSMLLPHAKSIIAIALAYPSKMKGAPRSTKEARRGIFCRASWGEDYHHILRQRLKMLEDFILAKVPSAQVKSMVDTGELADRAVAVRAGIGWSGKNCAVITPEFGSYVYLGEMITTIPFPPDIPIEDRCGTCTKCIEACPTGALVQEGQLNAQRCIAFLTQTKGFLSEEFRDKIGNRLYGCDTCQMVCPANKGKDFHLHPEMEPDPEIVKPLLKPLLHLSNREFKEKYGSLAGSWRGKKPIQRNAILALAHFKDRTAIPDLVHLLKEDSRPVIRGTAAWALGKIGDDSVAKILEQALQHEKDEEVLREIEKGLRMLHTQRKK

SEQ ID NO: 74503 - protein, 380 aa, Anoxybacillus amylolyticus
  REGION 1..380: note = tr|A0A4R1FCK7|A0A4R1FCK7_9BACI Epoxyqueuosine reductase OS=Anoxybacillus amylolyticus OX=294699 GN=queG; PE = 3 SV=1
MDVMALKQEVIEYSRSIGIDKIGFASADPFVELKERLRRQQELGYQSGFEEPDIEKRTNPSLLLPEAKSIIAIALAYPSKMKNAPRGTKTERRGVFCRASWGKDYHDVLRERLQQLEEFLLAKVPHARVRSMVDTGELADRAVAERAGIGWSGKNCSIITPEFGSYVYLGEMITNIPFPPDEPVENRCGTCTKCIDACPTGALVQGGQLNAQRCLSFLTQTKGFLADEFREKIGNRLYGCDTCQQVCPENKGKDFHLHPEFEPDPEAVKPKLIPLLQMSNREFKETFGAMAGSWRGKKPIQRNAILALAHYKDQTAVPHLLRLLKEDSRPVIRGTAAWALGKIGDPSAKPYLEAARQTEADADVIAEIEKGLKLLAEAKE

SEQ ID NO: 74504 - protein, 378 aa, Anoxybacillus ayderensis
  REGION 1..378: note = tr|A0A1X6M9R9|A0A1X6M9R9_9BACI Epoxyqueuosine reductase OS=Anoxybacillus ayderensis OX=265546 GN=queG; PE = 3 SV=1
MDVKALKEEIIQYSRTIGIDKIGFASADPFFELKERLRQQQQLGYQSGFEEPDIEKRTTPSLLLPEARSIIAIALAYPSKLKNAPRSTKKERRGIFCRASWGRDYHVILRERLQKLEQFILERVPDAKVKSMVDTGELADRAVAERAGIGWSGKNCSIITHEFGSYVYLGEMITNIPFPPDTPIEDECGTCTRCIDACPTGALVQGGQLNAQRCIAFLTQTKTFIPDEFRDKIGNRLYGCDTCQLVCPKNKGKDFHFHPEMEPDPEVVKPLLKPLLHMTNRQFKETFGHISGAWRGKKPIQRNAIIALAHYKDESAIDDLFTLLQEDSRPVIRGTAAWALGKIGNRKVVPMLQQAKQREQDEDVIREIEKALAMFENV

SEQ ID NO: 74505 - protein, 378 aa, Anoxybacillus ayderensis
  REGION 1..378: note = tr|A0A0D0HRM4|A0A0D0HRM4_9BACI Epoxyqueuosine reductase OS=Anoxybacillus ayderensis OX=265546 GN=queG; PE = 3 SV=1
MDVEALKEEIIQYSRTIGIDKIGFASADPFFELKERLRQQQQLGYQSGFEEPDIEKRTTPSLLLPEARSIIAIALAYPSKLKNAPRSTKKERRGIFCRASWGRDYHVILRERLQKLEQFILERVPDAKVKSMVDTGELADRAVAERAGIGWSGKNCSIITHEFGSYVYLGEMITNIPFPPDTPIEDECGTCTRCIDACPTGALVQGGQLNAQRCIAFLTQTKTFIPDEFRDKIGNRLYGCDTCQLVCPKNKGKDFHFHPEMEPDPEIVKPLLKPLLRMTNRQFKETFGHISGAWRGKKPIQRNAIIALAHYKDESAIDDLFTLLREDSRPVIRGTAAWALGKIGNRKVVPMLQQAKQREQDEDVIREIEKALAMFENV

SEQ ID NO: 74506 - protein, 389 aa, Anoxybacillus flavithermus
  REGION 1..389: note = tr|A0A150LKW4|A0A150LKW4_9BACI Epoxyqueuosine reductase OS=Anoxybacillus flavithermus OX=33934 GN=queG; PE = 3 SV=1
MDAAALKQEIIEYSKTIGIDKIGFASADPFVELKERLRRQQELGYQSGFEEQDIEKRTNPSLLLPEAKSIIAIALAYPSKIKNAPRGTKMERRGIFCRASWGKDYHDVLRERLEKLEAFILEKVPHARVKSMVDTGELADRAVAERAGIGWSGKNCSIITLEFGSYVYLGEMITNIPFPPDEPVESRCGTCTKCIDACPTGALVQGGQLNAQRCISFLTQTKGFLADEFRDKIGNRLYGCDTCQMVCPENKGKDFHLHPEMEPDPEVVKPKLIPLLHISNREFKEKFGSLAGAWRGKKPIQRNAILALAHYKDKTAVPHLLKLLKEDSRPVIRGTAAWALGKIGDMRVIPDLEEAGRTEKDHEVLLEIQKGLQLLRSKQEKGKNRSPAT

SEQ ID NO: 74507 - protein, 378 aa, Anoxybacillus flavithermus
  REGION 1..378: note = tr|R4FA23|R4FA23_9BACI Epoxyqueuosine reductase; OS = Anoxybacillus flavithermus NBRC 109594 OX=1315967; GN = queG PE=3 SV=1
MDVEALKEEIIQYSRTIGIDKIGFAHADPFFELKERLRHQQQLGYESGFEEPDIEKRTTPSLLLPEARSIIAIALAYPSKLKNAPRSTKTERRGIFCRASWGQDYHVVLRDRLQKLEQFILERVPGAKVKSMVDTGELSDRAVAERAGIGWSGKNCSIITPEFGSYVYLGEMITNIPFPSDAPIEDECGACTRCIDACPTGALVQGGQLNAKRCIAFLTQTKTFIPDEFRDKIGNRLYGCDTCQLVCPKNKGKDFHLHPEMEPDPEVVKPLLKPLLHMTNRQFKETFGHLSGGWRGKKPIQRNAIIALAHYKDESAIDDLLILLQKDSRPVIRGTAAWALGKIGNYEVVPMLKKAKEREQDEDVIREIEKALAMLENV

SEQ ID NO: 74508 - protein, 378 aa, Anoxybacillus gonensis
  REGION 1..378: note = tr|A0A0A2SNN6|A0A0A2SNN6_9BACI Epoxyqueuosine reductase OS=Anoxybacillus gonensis OX=198467 GN=queG PE=3; SV = 1
MDVAALKEEIIQYSRTIGIDKIGFASADPFSELKERLREQQRLGYESGFEEPDIDKRTTPSLLLKEARSIIAIALAYPSKLKNAPRSTKKERRGIFCRASWGQDYHIILRDRLQKLEQFILTRVPDAKVKSMVDTGELSDRAVAERAGIGWSGKNCSIITPEFGSYVYLGEMITNIPFPPDAPIEDECGTCTRCIDACPTGALVQGGQLNAKRCIAFLTQTKTFIPDEFRDKIGNRLYGCDTCQLVCPKNKGKDFHFHPEMEPDPEVVKPLLKPILHMTNRQFKETFGHLSGAWRGKKPIQRNAIIALAHYKDESAIDDLFVLLQEDSRPVIRGTAAWALGKIGNRKVVPMLQQAKEREQDEDVIREIEKALAMFENV

SEQ ID NO: 74509 - protein, 378 aa, Anoxybacillus gonensis
  REGION 1..378: note = tr|M5QSC0|M5QSC0_9BACI Epoxyqueuosine reductase; OS = Anoxybacillus gonensis OX=198467 GN=queG PE=3 SV=1
MDVEALKEEIIQYSRTIGIDKIGFASADPFFELKERLRQQQQLGYQSGFEEPDIEKRTTPSLLLPEARSIIAIALAYPSKLKNAPRSTKKERRGIFCRASWGRDYHVILRERLQKLEQFILERVPDAKVKSMVDTGELADRAVAERAGIGWSGKNCSIITHEFGSYVYLGEMITNIPFPPDTPIEDECGTCTRCIDACPTGALVQGGQLNAQRCIAFLTQTKTFIPDEFRDKIGNRLYGCDTCQLVCPKNKGKDFHFHSEMEPDPEVVKPLLKPLLHMTNRQFKETFGHISGAWRGKKPIQRNAIIALAHYKDESAIDDLFTLLREDSRPVIRGTAAWALGKIGNRKVVPMLQQAKQREQDEDVIREIDKALAMLENV

SEQ ID NO: 74510 - protein, 378 aa, Anoxybacillus kamchatkensis
  REGION 1..378: note = tr|A0A4S3L0Z7|A0A4S3L0Z7_9BACI Epoxyqueuosine reductase OS=Anoxybacillus kamchatkensis OX=196180 GN=queG; PE = 3 SV=1
MDVEALKEETIQYSRTIGIDKIGFASADPFFELKERLRQQQQLGYQSGFEEPDIEKRTTPSLLLPEARSIIAIALAYPSKLKNAPQSTKKERRGIFCRASWGRDYHVILRERLQKLEQFILERVPDAKVKSMVDTGELADRAVAERAGIGWSGKNCSIITHEFGSYVYLGEMITNIPFPPDTPIEDECGTCTRCIDACPTGALVQGGQLNAQRCIAFLTQTKTFIPDEFRDKIGNRLYGCDTCQLVCPKNKGKDFHFHPEMEPDPEVVKPLLKPLLHMTNRQFKETFGHISGAWRGKKPIQRNAIIALAHYKDESAIDDLFTLLREDSRPVIRGTAAWALGKIGNRKVVPMLQQAKQREQDEDVIREIDKALAMLENV

SEQ ID NO: 74511 - protein, 378 aa, Anoxybacillus kamchatkensis
  REGION 1..378: note = tr|A0A346DEI2|A0A346DEI2_9BACI Epoxyqueuosine reductase OS=Anoxybacillus kamchatkensis G10 OX=1212546; GN = queG PE=3 SV=1
MDVEALKEEIIQYSRTIGIDKIGFASADPFFELKERLRQQQQLGYQSGFEEPDIEKRTTPSLLLPEARSIIAIALAYPSKLKNAPRSTKKERRGIFCRASWGRDYHVILRERLRKLEQFILERVPDAKVKSMVDTGELADRAVAERAGIGWSGKNCSIITHEFGSYVYLGEMITNIPFPPDTPIEDECGTCTRCIDACPTGALVQGGQLNAQRCIAFLTQTKTFIPDEFRDKIGNRLYGCDTCQLVCPKNKGKDFHFHSEMEPDPEVVKPLLKPLLHMTNRQFKETFGHISGAWRGKKPIQRNAIIALAHYKDESAIDDLFTLLREDSRPVIRGTAAWALGKIGNRKVVPMLQQAKQREQDEDVIREIDKALAMLENV

SEQ ID NO: 74512 - protein, 378 aa, Anoxybacillus pushchinoensis
  REGION 1..378: note = tr|A0A1I0TU10|A0A1I0TU10_9BACI Epoxyqueuosine reductase OS=Anoxybacillus pushchinoensis OX=150248; GN = queG PE=3 SV=1
MDVAALKEEIIQYSRTIGIDKIGFASADPFSELKERLREQQRLGYESGFEEPDIDKRTTPSLLLKEARSIIAIALAYPSKLKNAPRSTKKERRGIFCRASWGQDYHIILRERLQKLEQFILTRVPDAKVKSMVDTGELSDRAVAERAGIGWSGKNCSIITPEFGSYVYLGEMITNIPFPPDAPIEDQCGTCTRCIDACPTGALVQGGQLNAKRCIAFLTQTKTFIPDEFRDKIGNRLYGCDTCQLVCPKNKGKDFHFHPEMEPDPEVVKPLLKPILHMTNRQFKETFGHLSGAWRGKKPIQRNAIIALAHYKDESAIDDLFVLLQEDSRPVIRGTAAWALGKIGNRKVVPMLQQAKEKEQDEDVIREIDNALAMLKRV

SEQ ID NO: 74513 - protein, 378 aa, Anoxybacillus sp.
  REGION 1..378: note = tr|A0A1V3FXU6|A0A1V3FXU6_9BACI Epoxyqueuosine reductase OS=Anoxybacillus sp. 103 OX=1919277 GN=queG PE=3; SV = 1
MDVEALKEEIIQYSRTIGIDKIGFAHADPFFELKERLRQQQQLGYESGFEEPDIEKRTNPSLLLPEARSIIAIALAYPSKLKNAPRSTKKERRGIFCRASWGQDYHIILRERLQKLEQFILTRVPDAKVKSMVDTGELSDRAVAERAGIGWSGKNCSIITPEFGSYVYLGEMITNIPFPPDEPIEDQCGTCTRCIDACPTGALVQGGQLNAKRCIAFLTQTKTFIPDEFRDKLGNRLYGCDTCQLVCPKNKGKDFHLHPEMEPDPEVVKPLLKPLLHMTNRQFKETFGHLSGAWRGKKPIQRNAIIALAHYKDESAIDDLLILLQKDSRPVIRGTAAWALGKIGNYEVVPMLKKAKEREQDEDVIREIEKALAMLENV

SEQ ID NO: 74514 - protein, 378 aa, Anoxybacillus sp.
  REGION 1..378: note = tr|A0A094M6W9|A0A094M6W9_9BACI Epoxyqueuosine reductase OS=Anoxybacillus sp. KU2-6(11) OX=1535751; GN = queG PE=3 SV=1
MDVEALKEEIIQYSRTIGIDKIGFASADPFFELKERLRQQQQLGYQSGFEEPDIEKRTIPSLLLSEARSIIAIALAYPSKLKNAPRSTKTERRGIFCRASWGQDYHVVLRDRLQKLEQFILERVPDAKVKSMVDTGELADRAVAERAGIGWSGKNCSIITHEFGSYVYLGEMITNIPFPPDTPIEDECGTCTRCIDACPTGALVQGGQLNAKRCIAFLTQTKTFIPDEFRDKIGNRLYGCDTCQLVCPKNKGKDFHLHPEMEPDPEVVKPLLKPLLHMTNRQFKETFGHLSGAWRGKKPIQRNAIIALAHYKDESAIDDLLILVQKDSRPVIRGTAAWALGKIGNRKVMPMLQQAKEREQDEDVIREIEKALAMLENV

SEQ ID NO: 74515 - protein, 378 aa, unidentified
  source 1..378: note = Anoxybacillus suryakundensis
  REGION 1..378: note = tr|A0A0K6GKL2|A0A0K6GKL2_9BACI Epoxyqueuosine reductase OS=Anoxybacillus suryakundensis OX=1325335; GN = queG PE=3 SV=1
MDVVALKEEIIQYSRTIGIDKIGFTSADPFFELKERLRQQQHLGYQSGFEEPDIDKRTNPSLLLSEARSIIAIALAYPSKLKNAPRSTKTERRGIFCRASWGQDYHVILRDRLQKLEQFILARVPNARVKSMVDTGELADRAVAERAGIGWSGKNCSIITREFGSYVYLGEMITNIPFPPDTPIEDECGTCTRCIDACPTGALVQGGQLNAKRCIAFLTQTKTFIPDEFRDKIGNRLYGCDTCQLVCPKNKGKDFHFHPEMEPDPEVVKPLLKPLLHMTNRQFKETFGHLSGAWRGKKPIQRNAIIALAHYKDESAIDDLLMLLREDSRPVIRGTAAWALGKIGNRKVMPMLQQAKENEQDEDVIQEIDKALVMLENV

SEQ ID NO: 74516 - protein, 378 aa, Anoxybacillus thermarum
  REGION 1..378: note = tr|A0A0D0RZ03|A0A0D0RZ03_9BACI Epoxyqueuosine reductase OS=Anoxybacillus thermarum OX=404937 GN=queG; PE = 3 SV=1
MDVEALKEEIIQYSRTIGIDKIGFASADPFFELKERLRQQQQLGYQSGFEEPDIEKRTTPSLLLPEARSIIAIALAYPSKLKNAPRSTKKERRGIFCRASWGRDYHVILRDRLQKLEQFILERVPDAKVKSMVDTGELADRAVAERAGIGWSGKNCSIITHEFGSYVYLGEMITNIPFPPDTPIEDECGTCTRCIDACPTGALVQGGQLNAQRCIAFLTQTKTFIPDEFRDKIGNRLYGCDTCQLVCPKNKGKDFHFHPEMEPDPEVVKPLLKPLLHMTNRQFKETFGHISGAWRGKKPIQRNAIIALAHYKDESAIDDLFTLLREDSRPVIRGTAAWALGKIGNRKVVPMLQQAKQREQDEEVIREIDKALAMLENV

SEQ ID NO: 74517 - protein, 379 aa, unidentified
  source 1..379: note = Anoxybacillus vitaminiphilus
  REGION 1..379: note = tr|A0A327Y3K9|A0A327Y3K9_9BACI Epoxyqueuosine reductase OS=Anoxybacillus vitaminiphilus OX=581036; GN = queG PE=3 SV=1
MDMVALKKEIIEYSKTIGIDKIGFASADVFTELKERLRRQQELGYQSGFEEPDIEKRTNPSLLLPGAKSIIAIALAYPSKMKNAPRSTREERRGIFCRASWGKDYHHILRERLQKLEEFILEKVPNAQLKSMVDTGELADRAVAERAGIGWSGKNCSIITPEFGSYVYLGEMITNIPFPPDTPIEDRCGTCNKCIEVCPTGALVQGGQLNAQRCIAFLTQTKGFLADEFRDKIGNRLYGCDTCQTVCPENKGKDFHLHPEMEPDPEIVKPKLKPLLHISNREFKEKFGSISGSWRGKKPIQRNAILALAHYKDKTAVSDLLKLLNEDSRPVIRGTAAWALGKIGEKSVIPFLEEAKRAEKDEEVLKEIDKGLHLLLNQD

SEQ ID NO: 74518 - protein, 371 aa, unidentified
  source 1..371: note = Anoxybacter fermentans
  REGION 1..371: note = tr|A0A3Q9HRA3|A0A3Q9HRA3_9FIRM tRNA epoxyqueuosine(34) reductase QueG OS=Anoxybacter fermentans OX=1323375 GN=BBF96_10790 PE=4 SV=1
MTFEERLKKYAKEIGIDLIGITTAKPFYEAYNRLEKMKRLGYLSPWTEMDFKKRCFPKLLMKDAASLIAVGISYLVKEDDGEEDDKTLFYGKLARFAQFEDYHKILRSKMEELVSFIKKKYPEVKAKIFVDTGPLIDREVAYRAGLGFFGKNSALINPEYGSFLALGEILLNIPLKPDKPMKNGCGDCILCLKACPQQAIKAPGEIQTNECLSHYTQEKGLFNEKIRRKLGLRLWGCDTCQEVCPYNQKARPGSGIFKVHKLGKKPDLEQILKLSNREYRKLVGETAMAWRGKRILQRNALINLGNLKDPHAISILKEALKDPRPIIRGAAAWAIGEIGGKEAKTILARALQKEKDEQVREELRKGLEKIL

SEQ ID NO: 74519 - protein, 312 aa, unidentified
  source 1..312: note = Anseongella ginsenosidimutans
  REGION 1..312: note = tr|A0A4R3KS96|A0A4R3KS96_9SPHI Epoxyqueuosine reductase OS=Anseongella ginsenosidimutans OX=496056; GN = queG PE=3 SV=1
MDQAAAYTKLIKAEAKRLGFLFCGISRADFLEEEAVQLEKWLREGRHGRMQYMENHFDKRLDPRLLVEGARSVISLGLNYYTPRSQEDPEAPRISRYAYGKDYHFVIKDKLKELLFFIQSAIGEVGGRAFVDSAPVMDKAWARRSGLGWTGKNTNLINKQTGSFFFLAELVIDLELEYDNPAADHCGTCTRCIDACPTEAISAPYEIDGSKCISYFTIELKDQLPEGFHGQFENWMFGCDTCQDVCPWNRFSKPHSEPAFDPHPDLLGMKKQEWEELTEETFREVFRGSAVKRTKFSGLKRNIGFLRPNNIS

SEQ ID NO: 74520 - protein, 298 aa, unidentified
  source 1..298: note = Antarcticibacterium flavum
  REGION 1..298: note = tr|A0A5B7XA11|A0A5B7XA11_9FLAO Epoxyqueuosine reductase OS=Antarcticibacterium flavum OX=2058175 GN=queG; PE = 3 SV=1
MIKTEAKRLGFMSCGISKAEFLEVEAPRLENYLEKGMHGEMHYMENHFDKRLDPTKLVEGSKSVISLLLNYYPEKTQQEGTYKISKYAYGRDYHFIIKDKLKDLLKFISEEIGEVDGRAFVDSAPVLDKAWAAKSGLGWIGKNSNLLTRQVGSFYFIAELIIDLELEYDTPVTDHCGSCTACIDACPTQAIVEPYKVDGSKCISYFTIELKEELPSSVKGQFDDWMFGCDICQDVCPWNRFSKPHNEPLFNPHPQLLEMDKKDWEEITQETFNEIFRKSAVKRTKYSGLKRNIDFLKK

SEQ ID NO: 74521 - protein, 307 aa, unidentified
  source 1..307: note = Antarcticibacterium sp.
  REGION 1..307: note = tr|A0A5B8YQA4|A0A5B8YQA4_9FLAO Epoxyqueuosine reductase OS=Antarcticibacterium sp. PAMC 28998 OX=2585771; GN = queG PE=3 SV=1
MNPAYKYSQLIKAEARRLGFMSCGISKAGFLEAEAPRLENYLKKGMHGEMHYMENHFDKRLDPTKLVEGSKSVISLLLNYYPHQLQRQDSFKLSKYAYGTDYHFVIKDKLKDLLNYMRTEIGEIEGRAFVDSAPVLDKAWAAKSGLGWIGKNSNLLTKQVGSFYFIAELIVDLDLVYDSPVTDHCGSCTACIDACPTQAIIEPYKVDGSKCISYFTIELKDEIPPNVGGKFEDWMFGCDICQDVCPWNKFSKSHNEPLFDPHPKLLEMDKKEWQEITKETFNEIFKRSAVKRTKFEGLKRNIKFLED

SEQ ID NO: 74522 - protein, 355 aa, Antarctobacter heliothermus
  REGION 1..355: note = tr|A0A222DYI0|A0A222DYI0_9RHOB Epoxyqueuosine reductase OS=Antarctobacter heliothermus OX=74033 GN=queG; PE = 3 SV=1
MVDLTERLKREALDVGFADCRICRPGDVPEVMARLRGFLHKGYHGQMGWLAERVHWRGAPDVLWPEAQSVIMLAENYGPDDDPLAVLEVRDRAAISVYARNRDYHDVVKKRLKRLGRWLIDTAGGEIKVFVDTAPVPEKPLAQAAGLGWQGKHSNLVSRQLGSWLFLGCVFTTLELTPDGAERDHCGSCRACLDICPTNAFPAPYQVDARLCISYLTIEHKGPVDEGLRPGLGNRIYGCDDCLAVCPWNKFARRAEEVKYHARDDLVAPPLADLAMLDDARFRARFSGSPIKRIGRDRFVRNVCYAIGNSGLPTLIPSVQALCEDTDEAVRDAARWAVLRLQARVSGLSGKQDGR

SEQ ID NO: 74523 - protein, 354 aa, Antarctobacter heliothermus
  REGION 1..354: note = tr|A0A239M1D2|A0A239M1D2_9RHOB Epoxyqueuosine reductase OS=Antarctobacter heliothermus OX=74033 GN=queG; PE = 3 SV=1
MDLTERVKREALEVGFADCRICRPGDVPEVMARLRAFLDRGYHGQMGWMAERVHWRGAPDVLWPEARSVIMLAENYGPDDDPLAVLEARDRAAISVYARNRDYHDVVKKRLKRLGRWLIDTAGGEIKVFVDTAPVPEKPLAQAAGLGWQGKHSNLVSRQLGSWLFLGSVFTTLELTPDGAERDHCGSCRACLDICPTDAFPAPYQVDARRCISYLTIEHKGPIDEDLRPGLGNRIYGCDDCLAVCPWNKFARTAEEVKYHARDDLVAPPLADLAMLDDAGFRARFSGSPIKRIGRDRFVRNVCYAIGNSGLTSLIPSVQALCDDSDEAVQDAARWAVLRLQAGLPGNAGEQDGR

SEQ ID NO: 74524 - protein, 324 aa, Aphanizomenon flosaquae
  REGION 1..324: note = tr|A0A0B0QNR4|A0A0B0QNR4_APHFL Epoxyqueuosine reductase OS=Aphanizomenon flos-aquae 2012/KM1/D3; OX = 1532906 GN=queG PE=3 SV=1
MNEYISIDSAAVKAKAKELGFHEVGIAAVGDLEKTETEKLQAWLKMGYHADMEWMKNPKREDINLVMPEVRSLISVALNYYTPHQRPQEDEYGKISRYAWGRDYHKVIHKKLKELANWLESLGENVKARYYADTGPVQDKVWAQKAGIGWIAKNGNVITRKYGSWVFLAEILTNLQLESDRPSTQHCGTCTRCLQACPTGAITEPFIVDANRCIAYHTIENRAEELPADITPNLQGWVAGCDICQDICPWNQRFAQATNVKDFQPYPGNLAPKLVELAQISNEEWDKRFTASALRRIKPEMLRRNARANLDKSRHNNDPESNNF

SEQ ID NO: 74525 - protein, 324 aa, Aphanizomenon flosaquae
  REGION 1..324: note = tr|A0A1B7X2S5|A0A1B7X2S5_APHFL Epoxyqueuosine reductase OS=Aphanizomenon flos-aquae WA102 OX=1710896; GN = queG PE=3 SV=1
MPECTSISSIVVKAKAKELGFHEVGITAVGDLDPTETEKLPAWLKMGYHADMEWMENPQRQQISLIMPDVRSLISVALNYYTPHERPHGNEYGKISRYAWGRDYHRIIHKKLKALAIWLESQGKEIKTRYYADTGPVQDKVWAQKAGIGWIAKNGNVITRKYGSWVFLAEILTNIDLESDRPSSQHCGTCTRCLQACPTGAITAPFVVDANRCIAYHTIENRSPELPPDITPHLQGWVAGCDICQDVCPWNQRFAQTTDVTDFQPYPGNLAPKLVELAQISKEEWDTKFTASALRRIKPEMLRRNARANLDKSRHNNDPEDNNF

SEQ ID NO: 74526 - protein, 328 aa, unidentified
  source 1..328: note = Aphanocapsa feldmannii
  REGION 1..328: note = tr|A0A524RVJ2|A0A524RVJ2_9CYAN Epoxyqueuosine reductase OS=Aphanocapsa feldmannii 277cI OX=2507554; GN = queG PE=3 SV=1
MKRGTASRPPAAAMTVRGLAEALKQRARAEGFGPVGIALLETATSLPARTAALRRWLEAGHGASMGWMRDPRRQSIEALLPGVRSVLAVGLNYWVEQRQQDGVPRIGRYGWGRDYHRVIDRRLRAVGRWLSEQQPGCRWRACVDSAPLMDKAWAEAAGLGWIGKHSNLINRSAGSWLLLGHLLTDLCLEGDTAAQPLCGSCSLCLDACPTDAISEPFVVDSRRCIGFHTVENREASLPREISSQLQGWVAGCDICQEVCPWNRDPRPSCDPQLQPRDWVLQAGADALLNRSDGEWDAALRGSALRRIKPWMWRRNIRAAMEGAVPGTD

SEQ ID NO: 74527 - protein, 309 aa, unidentified
  source 1..309: note = Aphanocapsa feldmannii
  REGION 1..309: note = tr|A0A524RFI5|A0A524RFI5_9CYAN tRNA epoxyqueuosine(34) reductase QueG (Fragment); OS = Aphanocapsa feldmannii 288cV OX=2507555 GN=queG PE=3; SV = 1
AEALKQRARAEGFGPVGIALLETATSLPARTAALRRWLEAGHGASMGWMRDPRRQSIEALLPGVRSVLAVGLNYWVEQRQQDGVPRIGRYGWGRDYHRVIDGRLRAVGRWLSEQQPGCRWRACVDSAPLMDKAWAEAAGLGWIGKHSNLINRSAGSWLLLGHLLTDLCLEGDTAAQPLCGSCSLCLDACPTDAISEPFVVDSRRCIGFHTVENREASLPREISSQLQGWVAGCDICQEVCPWNRDPRPSCDPQLQPRDWVLQAGADALLNRSDGEWDAALRGSALRRIKPWMWRRNIRAAMEGAVPGTD

SEQ ID NO: 74528 - protein, 323 aa, unidentified
  source 1..323: note = Aphanothece cf.
  REGION 1..323: note = tr|A0A2T1EVL3|A0A2T1EVL3_9CHRO Epoxyqueuosine reductase OS=Aphanothece cf. minutissima CCALA 015; OX = 2107695 GN=queG PE=3 SV=1
MTDPGSLSALAAALRARAEGLGFAPVGLAAVPGSRRLPLRTAALERWLAAGHQAGMGWMEDPRRRRIEALLPGVRSVLAVGWNYHVAHGRAPGSLRVARYGWGRDYHRVIDGRLRQLGRWLEQAAPGSTWRACVDSAPLLDKAWAEEAGLGWIGKNGNLIHRRRGSWMLLGHLLTSLDLPPDRPAEPLCGACTACIDACPTGALDEPFVVDARRCIAYHTIENRQEALPAAIAGRLEGWVAGCDICQEVCPWNRRPLPVATDADVQPRPWLLDLRGAEALGWSDGDWDERLRASALRRIRPAMWRRNIRAALAGGWGQRGTAP

SEQ ID NO: 74529 - protein, 306 aa, unidentified
  source 1..306: note = Aphanothece hegewaldii
  REGION 1..306: note = tr|A0A2T1LXH0|A0A2T1LXH0_9CHRO Epoxyqueuosine reductase OS=Aphanothece hegewaldii CCALA 016 OX=2107694; GN = queG PE=3 SV=1
MVIEEQIKEKAIALGFHKVGIAAVGEEKQAVSHLQTWLAMGYHGDLEWMANPKRQNIKECYPEVRSVICVALNYYTPHQHSTEKEYGKISRYGWGRDYHKVLQKKLKALSRWLESHEEGIQCRYYVDTGPIQDKVWAQQAGIGWIAKNGNVISREYGSWVFLGEVLTNLELIPDVPHTEHCGTCRRCLDACPTGAIVQPFVVDANLCIAYHTIENRAEQLPEAIASKLSGWVAGCDICQDVCPWNQRFSQSTDIADFQPYPGNITPSLKELAELSPESWNERFTGSALRRIKPEMWRRNARANLDV

SEQ ID NO: 74530 - protein, 314 aa, unidentified
  source 1..314: note = Aphanothece sacrum
  REGION 1..314: note = tr|A0A401IBQ0|A0A401IBQ0_APHSA Epoxyqueuosine reductase OS=Aphanothece sacrum FPU1 OX=1920663 GN=queG; PE = 3 SV=1
MNAIEWTQLIKEKAIDLGFHQVGIADVNTSFNDEAVNHLETWLGLGYQANMDWMANGKRLDIHNCMPSVKSVICVALNYYTSPQHSNHKEDGKISRYGWGRDYHKVMTKKLKAFSQWLETQAENIETRYYVDTGPIQDKVWAQRAGIGWIAKNGNVITKEYGSWVFLGEILTNLTLIPDQPHTQHCGTCTRCLEACPTGAIPQPFVVDANRCIAYHTIENRAKTLPDTITPHLDGWVAGCDICQDVCPWNQRFAEETDIEDFQPYPQNIAPKLTELANLSLEEWNSRFRSSALRRIKLEMWHRNARANLNREGI

SEQ ID NO: 74531 - protein, 305 aa, unidentified
  source 1..305: note = Apibacter adventoris
  REGION 1..305: note = tr|A0A2S8AB74|A0A2S8AB74_9FLAO Epoxyqueuosine reductase OS=Apibacter adventoris OX=1679466 GN=queG PE=3; SV = 1
MNKEQLTYFIKKRAYELSFLECGISPSGFLEEEAPNLERWLKNEYHGKMKYMENHFDKRLNPSLLVEEAKSVLTFSYNYFPKKLQNPETYQIAKYAYGEDYHIVIREKLLKLVEEIKVMVGDFAYRVFTDSAPVMERAWAQKSGIGWIGKNSLLLSKKKGSYFFLAEIICDLELVYDNPFKTDHCGSCTRCIDACPTQAINEPRIIDSKKCISYLTIELKDEIGKEFNGKMNDWIFGCDICQDVCPWNRFSTPNSEEKFQPAPHLLNFTKKDWIHLEETTFNKLFKKSAIKRTKFSGLKRNIFMS

SEQ ID NO: 74532 - protein, 329 aa, unidentified
  source 1..329: note = Apibacter mensalis
  REGION 1..329: note = tr|A0A0X3AR79|A0A0X3AR79_9FLAO Epoxyqueuosine reductase OS=Apibacter mensalis OX=1586267 GN=queG PE=3; SV = 1
MIFNFILLKVEIYIFKHINYELNKDQLTYFIKEKSKEYFFIGCGISRSKFLDEEAPKLEKWLKEGYHGSMKYLENNFDKRLDPGLLVEGAKSVISLLYNYYPQEKQDTESYHIAKYAYGEDYHQVIREKLQKLVQEIQDKVGQFSYRVFTDSAPILERAWAQKSGLGWIGKNSLLLSKQKGSFFFLAEIICDLELIYDEAFPTNHCGSCTRCIDACPTHAIIAERVIDSTRCISYLTIELKDQIGEEFDGKLKDWIFGCDICQDVCPWNRFSTPHNEEKFIPKPELLSYTKNDWNDINQETFKIIFKNSAVKRTKFSGFYRNILFNKKS

SEQ ID NO: 74533 - protein, 310 aa, unidentified
  source 1..310: note = Apibacter sp.
  REGION 1..310: note = tr|A0A563D8T6|A0A563D8T6_9FLAO Epoxyqueuosine reductase OS=Apibacter sp. AL1 OX=2509005 GN=queG PE=3 SV=1
MILNKEQLTQFIKQKSQELSFLDCGISKSGFLEEEAPRLEKWLKEGNQGKMSYLENHFDKRLNPSLLVDGAKSVISFSYNYYPSETQKPDTYKIAKYAYGEDYHIVIREKLEFLIHLIKEKVGDFSYRVFTDSAPVMERAWAKKSGLGWIGKNSLLLSKQKGSFFFLAEIICDLELEYDSPFKTNHCGSCTRCIDACPTQAIISEKVIDSRKCISYLTIELKDEIGEEFKGKMNDWIFGCDICQDVCPWNRFSKTNTEIRFQPSSDLLDFTYKDWEDLEEETFRKIFKYSAIKRAKYTGLKGNINFIKKK

SEQ ID NO: 74534 - protein, 308 aa, unidentified
  source 1..308: note = Apibacter sp.
  REGION 1..308: note = tr|A0A2S8A557|A0A2S8A557_9FLAO Epoxyqueuosine reductase OS=Apibacter sp. wkB309 OX=1679467 GN=queG PE=3; SV = 1
MNKEQLTYFIKEKAKEYSFIGCGISRSRFLEEEAPKLEKWLKEGYHGNMKYLENNFDKRLNPGLLVDGAKSVISFLYNYYPQEKQNTESYHIAKYAYGEDYHLVIREKLQKFVEEIQDKVGQFSYRVFTDSAPVMERTWAQKSGLGWIGKNSLLLSKQKGSFFFLAEIICDLELNYDEAFPTNHCGSCTRCMDACPTQAIISERVIDSTKCISYLTIELKDQIGKEFDGKLKDWIFGCDICQDVCPWNRFSTPHKEDKFNPHPDLLSYTKNDWNDINEEAFKILFKNSAVKRTKFSGFQRNILFNKKT

SEQ ID NO: 74535 - protein, 389 aa, Aquabacter spiritensis
  REGION 1..389: note = tr|A0A4R3M1J9|A0A4R3M1J9_9RHIZ Epoxyqueuosine reductase OS=Aquabacter spiritensis OX=933073 GN=queG PE=3; SV = 1
MAPAAAIPPPSDLPGLKARFATLAAAEGFDAFGVADPDAAPDAGPRLAAWIAARRHGEMEWMADTEDRRAHPRALWPDIRALIMLGFNYGPDEDPRAVLAARTKGAISVYARGEDYHDLIKAKLKRLARALLAAAGAGDVKVFVDTAPLMEKPLAMAAGLGWQGKHTNLVSRARGSWLFLGAIATTLPLPPDAPAADHCGACRACLDACPTRAFPAPYQIDARRCVSYLTIEHKGPIPRDLRPLMGNRIYGCDDCLAACPWNKFAQEGREMRLAARAENRAPDLSDLARLDEAGFRARFAKSPIKRTGRARMVRNVLIAMGNSGEPGFAAEAEARLVDEDPLVRGAAVWAVSRLVPAPAFAALAARHVGAETDPDVAEEWRVAGVQAAA

SEQ ID NO: 74536 - protein, 392 aa, Aquabacterium commune
  REGION 1..392: note = tr|A0A4R6R821|A0A4R6R821_9BURK Epoxyqueuosine reductase OS=Aquabacterium commune OX=70586 GN=queG PE=3; SV = 1
MRHESADTAWNPDEVLASLRQWATELGFSQIGVADVDLSSAEAPLMAWLGRGFHGEMHYMAAHGLKRARPAELVPGTVRVITARMDYLPQALPDGWQAVSWERMATPSAAVVSLYAHGRDYHKVLRNRLQKLAERLAEAIGPFGHRAFTDSAPVLEVELASRSGLGWRGKHSLLLSRQSGSTFFLGEIYVDVPLPLTQPETAHCGQCTACIDVCPTGAIVEEGVVDARRCISYLTIELDGPIPEAMRPHIGNRIYGCDDCQLICPWNKFAQRARLPDFDTRIGLDRATLLQLWAWDEATFLRSTEGSAIRRIGFARWQRNIAVAMGNALAARADATGQPTGHLPDEPTDEPLRQAIRAALQAWLAQPPALGEQQAMVAEHVRWALAQVPADR

SEQ ID NO: 74537 - protein, 393 aa, unidentified
  source 1..393: note = Aquabacterium olei
  REGION 1..393: note = tr|A0A2U8FVW9|A0A2U8FVW9_9BURK Epoxyqueuosine reductase OS=Aquabacterium olei OX=1296669 GN=queG PE=3; SV = 1
MRHEIRSPRQPDQAGSSDAPAASQPLSDPRAVLGALREWAAELGFSQIGVADVDLSSAEPGLLDWLARGFHGEMHYMASHGLKRARPAELVPGTVRVITARMDYLPTSLPEGWQRVEWRRLADPSQAGVSMYARGRDYHKVLRARLQKLADRLAAQIGPFGHRVFTDSAPVLEVELASRSGLGWRGKHTLLLSRDAGSTFFLGEIYVDVALPLTEPETAHCGACQACMTVCPTQAIVGEQQVDARRCISYLTIEHPGPVPLALRPLMGNRIYGCDDCQLACPWNKFARRARVPDFDVRPALAAPDLLGLWQWDEATFLRLTEGSPIRRIGHVRWQRNLAVAMGNALASPALAADTREDLVQALRRWADTTPLAGDDHALVAEHVAWALSQSPS

SEQ ID NO: 74538 - protein, 378 aa, Aquabacterium sp.
  REGION 1..378: note = tr|A0A5C8BBW7|A0A5C8BBW7_9BURK tRNA epoxyqueuosine(34) reductase QueG (Fragment); OS = Aquabacterium sp. OX=1872578 GN=queG PE=3 SV=1
MAQLRQWATTLGFSQIGVASVDLSSAEPGLLAWLARGFHGEMHYMASHGLKRARPAELVPGTVRVITARMDYLPASVAAEGWQAVEWARLQRPDAAAVSMYARGRDYHKVLRARLQKLADQLAGLLGPLGYRVFTDSAPVLEVELASRSGVGWRGKHTLLLSREAGSTFFLGEIYVDVPLPLTEPVTAHCGACRSCMDLCPTQAIVGERQVDARRCISYLTIEHDGPIPHELRPLMGNRIYGCDDCQLACPWNKFAQRARVPDFDVRPALNDPTLLQLWQWDEATFLRLTEGSPIRRIGHARWQRNIAVAMGNALAAWRDRDLTADETALRDQLVQALQAWLDTPMVTGGGSGAGGRARALGAGPATRSAVTRDQRWI

SEQ ID NO: 74539 - protein, 384 aa, Aquabacterium sp.
  REGION 1..384: note = tr|A0A480APM8|A0A480APM8_9BURK Epoxyqueuosine reductase OS=Aquabacterium sp. W35 OX=2315236 GN=queG PE=3; SV = 1
MGDRRGQGQAGPVEVERSRPPVDPAALLLQVQAWGQALGFSQIGVADVDLASAEPGLLAWLAAGHHGRMAYMAAHGLKRARPAELVPGTLRVITARMDYLPRTTNNITADDWQAQEAARLAQPQQAVVSVYARGRDYHKVLRQRLQTLADQLQQAVGPVGHRVFTDSAPVLEVELAARSGIGWRGKHTLLLHREAGSMFFLGEIYIDLALPLTPPVSGHCGACSACITACPTQAIVAPHRLDARRCISYLTIELDGAIPAEFRAAIGNRIYGCDDCQLACPWNKFAQRSPLPDFDERHGLGSASLLQLWDWDEAAFLRHTEGSAIRRIGIGRWRRNLAVALGNAWRATGDAALADALQHALPAADALLAEHIGWALAQRALPAV

SEQ ID NO: 74540 - protein, 389 aa, Aquamicrobium aerolatum
  REGION 1..389: note = tr|A0A1I3NT26|A0A1I3NT26_9RHIZ Epoxyqueuosine reductase OS=Aquamicrobium aerolatum DSM 21857 OX=1121003; GN = queG PE=3 SV=1
MACDLSPVQQDRLRGFLNAEAEKLGFDVISITKPGATPLAYGRLHEFIEAQRHGSMEWMAETADRRGDPRSLWPDVRSVIMLAMNYGPDHDPRALLQRKDRAAISVYARHRDYHDVIKGKLKELAQKFAARTGAQVKVFVDTAPVMEKPLAEAAGIGWQGKHTNLVSRDFGSWLFLASIFTEADLAADAPDPRGQCGSCRACLDACPTGAFPAPYQIDARRCISYLTIENKGPIPHEFREAIGNRIYGCDDCLAACPWNKFARTASEAKLVAREDLREPRIADLIGLDDAGFRALFSGSPVKRIGRDRFIRNVLIAAGNSGEMALVPQVRTLLGDASPLVRGAAVWALSRLLSATEFEADTRDMMLLETDAEVLAEFGAPESYKEEVLP

SEQ ID NO: 74541 - protein, 386 aa, Aquamicrobium defluvii
  REGION 1..386: note = tr|A0A011UTH9|A0A011UTH9_9RHIZ Epoxyqueuosine reductase OS=Aquamicrobium defluvii OX=69279 GN=queG PE=3; SV = 1
MRTSISDPGKLRALIDREALRAGFDLCAVTSPDSIPKAPARLAQFVADRFHGSMEWMEETFERRARPSVLWPEVRSIIVLAMNYGPDHDPRGILSLRDRAAISVYARNRDYHDVMKGRLKEIAGKIVSRAGGDVKVFVDTAPVMEKPLAEAAGLGWQGKHTNLVSRTHGSWLFLGSIFTTAELEPDERDVDRCGSCRACLDACPTHAFPVPYRLDARRCISYLTIENKGPIPLEFREAMGNRIYGCDDCLAACPWNKFARTASEAKLAARADLREPRLADLLELDDPAFRALFSGSPIKRIGRDRFIRNVLIAAGNSGETGLIGQVRALAADASPLVRGAAIWALSRLLPWGEFAALAHPALRDETNADVRAEWVQGMDMAEKARA

SEQ ID NO: 74542 - protein, 388 aa, Aquamicrobium sp.
  REGION 1..388: note = tr|A0A4U6BIH0|A0A4U6BIH0_9RHIZ Epoxyqueuosine reductase OS=Aquamicrobium sp. LC103 OX=1120658 GN=queG; PE = 3 SV=1
MGASRKPVASDRLRDFLEDEARKAGFAEIAVTTPDATPLAPARLGEYLALGRHASMEWMAETAERRSDPRKLWPDVRSVVVLAMNYGPDKDPLELLGKRERGAISAYARHRDYHDVIKGRLKEIAQKLAARSGADVKVFVDTAPVMEKPLAEAAGLGWQGKHTNLVSRAHGSWLFLGSIFTTAELRADAPERDHCGSCRACLDICPTAAFPAPYQLDARRCISYLTIEHKGPIPHEFRAAMGNRIYGCDDCLAVCPWNKFAQAASEAKLVARADLEEPALGELLALDDAEFRTFFSGSPIKRIGRDRFIRNVLTAAGNSASDALAEPCRRHLLDPSPLVRGAAVWALSQLLDEASFMELAAGARNEEDDDVKAEWSRAAARSHEGALQ

SEQ ID NO: 74543 - protein, 358 aa, Aquaspirillum sp.
  REGION 1..358: note = tr|A0A1U9JN35|A0A1U9JN35_9NEIS Epoxyqueuosine reductase OS=Aquaspirillum sp. LM1 OX=1938604 GN=queG PE=3; SV = 1
MCPEPAQNRDYPELAQQIKAWAYELGFSGVSIGRAALPESVEQSLLDWLAAGFHGEMDYMARHGVLRARPAELVPGALTVISVRLPYRDPAAADMHAVLADGEKAAIARYALGRDYHKTLRNRLQKLADRLVAAVGPVGYRVFTDSAPLMEVALASQSGLGWRGKHTLLIQRDEGSFFFLGELLTDLPLPLDAPTDAHCGRCTRCLDACPTQAIVAPYQLDARRCISYLTIELAGSIPEPLRALIGNRVYGCDDCQLVCPWNRFAVPTSEADFAVRHGLDHASLASLFAWEASDFTQRMAGSPIYRIGHERWLRNLAVGLGNAPATPAVLAALLARRDHPSALVREHVGWALARQGVI

SEQ ID NO: 74544 - protein, 378 aa, unidentified
  source 1..378: note = Aquibacillus sp.
  REGION 1..378: note = tr|A0A516KDW1|A0A516KDW1_9BACI Epoxyqueuosine reductase OS=Aquibacillus sp. TKL69 OX=2594883 GN=queG; PE = 3 SV=1
MYYDELKEEIIAYSKSIGIDKIGFASVDVFSELKERLKRQQELGYQSGFEKGTNEERTEPKRLLPEAQSIIAIALAYPSRMKDAPKSVKGDRRGLFCRASWGRDYHDVLRDKLSQLAAYLEKRVPGFYHKMMVDTGELSDRAVAERAGIGFSGKNSMIITPEFGSYVYLGEMITNLPIPPDEPIEDSCGTCTKCIDACPTGALVTGGQLNAQRCIAFLTQTKDFLPDEYRSKIGNRLYGCDTCQLVCPKNHKKDFHLHPEMEPDPEIVKPRLIPLLKLSNREFKETYGEISGSWRGKKPIQRNAIIALAHYKEEGAVEDLIRVMKEDPRPVIRGTAAWALGKIGTDQAFEAIEQAKEKEEDEQVIQEMEKGLHFQVKI

SEQ ID NO: 74545 - protein, 358 aa, Aquicella lusitana
  REGION 1..358: note = tr|A0A370GCH0|A0A370GCH0_9COXI Epoxyqueuosine reductase OS=Aquicella lusitana OX=254246 GN=queG PE=3 SV=1
MQQLSHHIKQWGLALGFQQVGITDADLSTYEDRFLNWLAKGLHGKMDYMEKHGLKRSRPAELLPQTVRIISVRMDYLPPDTSIMTVLNDAKKGYISRYALGRDYHRLMRKRLEKLAKKMNEAAGQLGYRVFCDSAPVLEKPIAEKAGLGWIGKHTNLINSKAGSWFFLGEIYTDLPLIIDQPVEKSHCGSCTACLKICPTQAIIGPYQLDARRCISYLTIELRESIPIELRPLIGNRIYGCDDCQLVCPWNKFAKTTREADFHPRHDLQAPPLLDLFTWTEAEFMHKTEGSAIRRIGYECWLRNIAVALGNAPFDPTIVQALRERMEHVSAMVREHIEWALARQLAKNRKELTPTLQD

SEQ ID NO: 74546 - protein, 352 aa, Aquicella siphonis
  REGION 1..352: note = tr|A0A5E4PDK9|A0A5E4PDK9_9COXI Epoxyqueuosine reductase OS=Aquicella siphonis OX=254247 GN=queG PE=3 SV=1
MHSIKDKIRQWGRELGFQQIGIADTDLAHYEQRFLQWLAQGMHGKMDYMEKHGSKRARPGELIPGTLRIISARLDYLPPDTHCMQVLRDTQKGYISRYALGRDYHRLMRKRLDHLAEKISLLAGEFGYRAFCDSAPVLEKPIAEKAGLGWIGKHTNLIHPKTGSWFFLGEIYTDLPLPIDEPMTKSHCGSCTACLDVCPTQAIIGPYQLDARRCISYLTIELRDAIPAELRPLIGNRIYGCDDCQLVCPWNKFAKPTQEQDFHPRHDFSSPDLIELFAWTEEIFLKKTEGSAIRRIGHACWLRNIAVALGNAPRSEAVIHSLRSRLQHPSAMVREHTTWALERQLTAAKERT

SEQ ID NO: 74547 - protein, 341 aa, unidentified
  source 1..341: note = Aquicoccus porphyridii
  REGION 1..341: note = tr|A0A5A9Z7Q9|A0A5A9Z7Q9_9RHOB Epoxyqueuosine reductase OS=Aquicoccus porphyridii OX=1852029 GN=queG; PE = 3 SV=1
MGDDLKTRLVKQAQAEGFAAARVCRPWDVPHVMGNLRGFLAEGYHGSMGWLAERVHWRGDPATLWPEARSVIVLAENYGGGEVEPAPDHAGTVSIYARNRDYHDVLKKRLKRVARWLIEEAGGELKVFVDTAPVPEKPLGQAAGLGWQGKHTNLVSRELGSWFFIGSIFTTLDLPTDTREVDHCGSCRACLDACPTNAFPAPYKIDARRCISYLTIEHKGPVDEELRPMLGNRIYGCDDCLAACPWNKFAVAAHEVKYHAREDLIAPPLAELARLDDAQFRQKFSGSPIKRIGRGRFVRNVLYAVGNSGDPGLIPVAEALVDDEEPVVADAAHWALGRLRG

SEQ ID NO: 74548 - protein, 346 aa, unidentified
  source 1..346: note = Aquicoccus sp.
  REGION 1..346: note = tr|A0A4U7JCG7|A0A4U7JCG7_9RHOB Epoxyqueuosine reductase OS=Aquicoccus sp. SCR17 OX=2541728 GN=queG PE=3; SV = 1
MKAALQNRAVEEGFDLCRVCRPGDIPQVPARLGDFLERGRHGQMDWLEARASWRGDPRVLWPEARSVIMLAESYTPEHDPLAVLERPDRAAISVYAQNRDYHDTVKKRLKRLARWLLEEAGRAGHEGAEVKVFVDTAPVAEKPLGEAAGLGWQGKHTNLLSRDLGNWFFIGSVFTTLGLEPDSPETDHCGSCRACLDACPTDAFPAPYQLDARRCISYLTIEHRGPVPVELREKMGNRIYGCDDCLAVCPWNKFAVEAREMKYRAREDLVAPRLADLARLDDAGFRAMFSGSPIKRIGRDRFVRNVLYAVGNSGDAALLPVARDLTGDADPVVAEAAGWAVARLGG

SEQ ID NO: 74549 - protein, 374 aa, unidentified
  source 1..374: note = Aquificaceae bacterium
  REGION 1..374: note = tr|A0A432EXB7|A0A432EXB7_9AQUI Epoxyqueuosine reductase OS=Aquificaceae bacterium OX=2053503 GN=queG; PE = 3 SV=1
MENDNSSKQVSDRKPIKTEVENALSSRTLQDLALKITIWGKELGFQKIGFSDIDLGKTEQQLQAWVKQGFHADMEWMHHHGSKRTRPAELVENTLSIISVRMDYLPPDGVDPELLLNHPEAAYISRYALGRDYHKLLRKRLQQLATKIQQEIGDFGYRVFVDSAPVMEKPIAAKAGLGWVGKHSNILSKESGSWFFLGEIYTDLPLQASQPVSDHCGSCSACIDVCPTQAIIAPYVVDARRCISYLTIELKGAIPEEFRHAIGNRIYGCDDCQLICPWNRFADYTQQADFAIRNKLDCSHLLTLFSWCEDDFLHRLQGSPIRRIGYERWLRNIAIALGNNPKNKLIISRLKEKRASCTPLVKEHIDWAIQQQSS

SEQ ID NO: 74550 - protein, 314 aa, Aquiflexum balticum
  REGION 1..314: note = tr|A0A1W2H1Q5|A0A1W2H1Q5_9BACT Epoxyqueuosine reductase OS=Aquiflexum balticum DSM 16537 OX=758820; GN = queG PE=3 SV=1
MSNSSQLQKDKYAGIIKAHAKTLGFDFCGIAKAEFLEEEAPKLEAWLNSNYHGQMAYMANHFDKRLDPTKLVEGAKTVVSLVYNYYPDQKLSETKEDFKIAKYAYGKDYHFVIKDKLKSFLQHLKEEIGDIHGRAFVDSAPIMERQWAQKSGLGWLGKNSLLLNRQMGSFFFLAELVLDIDVSPDTPMMKDYCGTCTKCIDACPTDAIVQPGVVDGSKCISYFTIELKENIPSEMKGKFENWIFGCDICQDVCPWNSFSQPHQESQFNPHPDMKEMRKKDWIEITEETFKKVFAKSAVKRTGYNGFLRNIKFNL

SEQ ID NO: 74551 - protein, 309 aa, unidentified
  source 1..309: note = Aquimarina aggregata
  REGION 1..309: note = tr|A0A162YRB3|A0A162YRB3_9FLAO Epoxyqueuosine reductase OS=Aquimarina aggregata OX=1642818 GN=queG PE=3; SV = 1
MDSRRKHTQFIKAEAKRLGFLSCGISKAGFLEEEAPRLEKWLHKNMHGQMQYMENHFDKRLDPTKLVEESKSVVSLLLNYYPSETQKDPEAPKISKYAYGTDYHFVIKDKLKELLHTIQEEVGEVHGRAFVDSAPVLDKAWAAKSGLGWIGKNSNLITQRVGSFYFIAELIIDLELEYDTPVTDHCGTCTACIDACPTQAIVEPYVVDGSKCISYFTIELKEEIPQDYRGKFDDWMFGCDVCQDVCPWNRFSKAHNEPLFNPKPELLEMTKKDWEEITQDVFSKVFQKSAVKRTKFSGLNRNIQFLKNK

SEQ ID NO: 74552 - protein, 308 aa, unidentified
  source 1..308: note = Aquimarina algiphila
  REGION 1..308: note = tr|A0A554VI88|A0A554VI88_9FLAO Epoxyqueuosine reductase OS=Aquimarina algiphila OX=2047982 GN=queG PE=3; SV = 1
MNSKAKHTQLIKAEAKRLGFLSCGVSKAEFLEQEAPRLEQWLNNNMHGQMQYMENHFDKRLNPTLLVDDAKSVISLLLNYFPSEVQQDSEAPKISKYAYGTDYHFVIKDKLKQLLSFIQEEIGDVYGRAFVDSAPVLDKAWAAKSGLGWIGKNSNLLTQQVGSFYFIAELIVDLELEYDTPVTDHCGTCTACIDACPTQAIVEPYVVDGSKCISYFTIELKEEIPNGYKGQFDDWMFGCDVCQDVCPWNRFSKPHNEPLFHPKPELLEMTKKDWQEITQEVFSKVFQKSAVKRTKFSGLQRNIRFLED

SEQ ID NO: 74553 - protein, 307 aa, unidentified
  source 1..307: note = Aquimarina amphilecti
  REGION 1..307: note = tr|A0A1H7N9E3|A0A1H7N9E3_9FLAO Epoxyqueuosine reductase OS=Aquimarina amphilecti OX=1038014 GN=queG PE=3; SV = 1
MSNIALHTQLIKTEAKRLGFLSCGISRAEFLEEEAPRLEKWLHQNMNGQMSYMENHFDKRLDPTKLVPDSKSVISLLLNYFPSETQKDSEAPKISKYAYGHDYHHVIKSKLKQLQEFISEQIGEVHGRAFVDSAPVLDKAWAARSGLGWIGKNSNLLTQKVGSYYFIAELIIDLDLDYDTPVTDHCGTCTACIDACPTQAIVDPYVVDGSKCISYFTIELKEEIPADYKGKFDNWMFGCDVCQDVCPWNRFSKPHSEPLFNPNPELLEMTKKDWEEITQDVFSKIFQKSAVKRTKFSGLNRNIQFLK

SEQ ID NO: 74554 - protein, 309 aa, unidentified
  source 1..309: note = Aquimarina atlantica
  REGION 1..309: note = tr|A0A023BWE5|A0A023BWE5_9FLAO Epoxyqueuosine reductase OS=Aquimarina atlantica OX=1317122 GN=queG PE=3; SV = 1
MNPKAKYTQRIKSEAKRLGFLSCGISKAEFLEQEAPRLEKWLNQNMHGEMRYMENHFDKRLDPTKLVDDSKSVISLLLNYFPSEQQKDPEAPKLSKYAYGTDYHFVIKDKLKQLLQFIQEEIGEVHGRAFVDSAPVLDKAWAAKSGLGWIGKNSNLLTQQVGSFYFIAELIIDLDLEYDTPVTDHCGTCTACIDACPTQAIVEPYVVDGSKCISYFTIELKEEIPNSYKNQFDNWMFGCDVCQDVCPWNRFSKPHNEPLFNPKPELLEMSKKDWEEITQEVFSKVFQKSAVKRTKFSGLQRNIDFLYGS

SEQ ID NO: 74555 - protein, 307 aa, Aquimarina brevivitae
  REGION 1..307: note = tr|A0A4Q7PEL6|A0A4Q7PEL6_9FLAO Epoxyqueuosine reductase OS=Aquimarina brevivitae OX=323412 GN=queG PE=3; SV = 1
MKSIEKHTVLIKSEAKRLGFLSCGVAKAGFLEEEAPRLEAWLQKGMHGEMQYMENHFDKRLDPTKLVEGSKSVISLLLNYFPSETQKDPEAPKISKYAYGKDYHFVIKDKLKALLHFIQENIGEVHGRAFVDSAPVLDKAWAAKSGLGWIGKNSNLLTKQVGSFYFIAELIVDLELAYDTPVTDHCGSCTACIDACPTQAITEPYVVDGSKCISYFTIELRDELPTKYQGKFDNWMFGCDVCQDVCPWNRFSKPHSEPLFDPNPALLTMNKQDWIELTQEVFADIFKKSAVKRTKYSGLMRNIKFLK

SEQ ID NO: 74556 - protein, 307 aa, Aquimarina sp.
  REGION 1..307: note = tr|A0A2D9Y019|A0A2D9Y019_9FLAO Epoxyqueuosine reductase OS=Aquimarina sp. OX=1872586 GN=queG PE=3 SV=1
MTLKEKHTALIKSQALKLGFISCGISKAGFLEEEAPRLEHWLNKNMHGEMKYMENHFDKRLDPTKLVEGSKSVVSLLLNYFPSDTQKDPEAPKISKYAYGTDYHFVIKDKLKSLLNYINEEIGDINGRAFVDSAPVLDKAWAAKSGLGWIGKNSNLLTKKVGSFYFIAELIIDLELEYDTPVTDHCGACTACIDACPTNAIVEPYKVDGSKCISYFTIELKEELPNDYKGQFDNWMFGCDVCQDVCPWNRFSKPHNEPLFNPKPELLEMNKREWKELTQEVFSDLFKKSAVKRTKYSGLIRNIKFLE

SEQ ID NO: 74557 - protein, 308 aa, Aquimarina sp.
  REGION 1..308: note = tr|A0A5B1BAS9|A0A5B1BAS9_9FLAO Epoxyqueuosine reductase OS=Aquimarina sp. RZ0 OX=2607730 GN=queG PE=3; SV = 1
MTLKSKYTKIIKEEARRLGFLSCGISKAAFLEEEAPRLEKWLQKNMNGQMSYMENHFDKRLDPTLLVEGSKSVISLLLNYFPSASQKDPDAPKISKYAYGHDYHHVIKGKLKQLLEFISEEIGEVHGRAFVDSAPVLDKAWAAKSGLGWVGKNSNLITQKVGSYYFIAELILDLELEYDTPVTDHCGTCTACIDACPTQAIVDPYVVDGSKCISYFTIELKDEIPATVQGKFDNWMFGCDICQDVCPWNRFSKSHNEPLFDPNPELLEMTQKDWEEITQEVFSKVFQKSAVKRTKFSGLTRNIQFLKK

SEQ ID NO: 74558 - protein, 318 aa, Aquimarina spongiae
  REGION 1..318: note = tr|A0A1M6E9Y9|A0A1M6E9Y9_9FLAO Epoxyqueuosine reductase OS=Aquimarina spongiae OX=570521 GN=queG PE=3; SV = 1
MSFEIINFLLSQKAKYTNLIKTEAKRLGFLSCGISKAAFLEEEAPRLESWLKKEMHGEMKYMENHFDKRLDPTKLVEGSKSVVSLLLNYFPSTSQTDPEAPKISKYAYGTDYHFVIKEKLKQLLHFIQEEIGDVHGRAFVDSAPVLDKAWAAKSGLGWIGKNSNLLTQQVGSFYFIAELIIDLELDYDTPVTDHCGTCTACIDACPTQAIVEPYVVDGSRCISYFTIELKDQIPESFRGSFDDWMFGCDICQDVCPWNRFSKPHNEPLFNPKPELLEMTKKDWEEITQEVFSKVFQKSAVKRTKFSGLQRNIQFLKEK

SEQ ID NO: 74559 - protein, 344 aa, unidentified
  source 1..344: note = Aquimixticola soesokkakensis
  REGION 1..344: note = tr|A0A1Y5R709|A0A1Y5R709_9RHOB Epoxyqueuosine reductase OS=Aquimixticola soesokkakensis OX=1519096; GN = queG PE=3 SV=1
MALTKEALVARAGDEGFSKVGFARPQLPDAMARLKTFVEEGRHGQMAWMADRMHWRGAPDALWPEAKSVVMLAEVYTPDVDPMAVVGQPDRGAISVYARGKDYHDLVKKRLKRVGRWMIEQGAGEIKVFVDTAPVMEKPLAQAAGLGWQGKHTNLLARDLGSWFFLGAIFTTHDFAPDPEESEHCGSCTACLDACPTDAFPAPFQIDARRCISYLTIEHHGPVDLALRAKLGNRIYGCDDCLAACPWNKFAQDARELRYAGGPATDAPALAQLARLDDAGFRAQYSGSPIKRIGRDRFVRNVLYAIGNSGDAALREVARSLTADEDPVVAEAARWAVGRLAQAQ

SEQ ID NO: 74560 - protein, 364 aa, Aquimonas voraii
  REGION 1..364: note = tr|A0A1G6XL60|A0A1G6XL60_9GAMM Epoxyqueuosine reductase OS=Aquimonas voraii OX=265719 GN=queG PE=3 SV=1
MKAPIDEAEGSAAPALPEREELERWARALGFAAIGVSGIDLGEDEAHLLDWLAQGCHGEMDYMQRHGTVRSRPEALVPGTLRVISVRMDYLPEGQAEAEAVLADPQRAYVSRYALGRDYHKLMRARLQKLADRVTEAIGPFGYRVFTDSAPVLEKALARNAGLGWIGKHSNLIDSKSGSWFFLGEILTDLPLPIDAPASNHCGTCTRCLAACPTAAIVAPYRVDARRCISYLTIELHGPIPEEFRAAMGNRIYGCDDCQLACPWNKFAKLSAEPDFRARHALDSSSLVELFGWSEEEFLRKTEGSAIRRIGHERWLRNIAVALGNAPPSPTVREALARQQQHPSALVREHVAWALQRQEAALRG

SEQ ID NO: 74561 - protein, 379 aa, Aquisalibacillus elongatus
  REGION 1..379: note = tr|A0A3N5AYU0|A0A3N5AYU0_9BACI Epoxyqueuosine reductase OS=Aquisalibacillus elongatus OX=485577; GN = EDC24_2921 PE=4 SV=1
MDVNQLKQDLIEYSKEIGIQEIGFTTTDTFETLKQRLVVQQSLKFQSGFEKGSIEERTTPTTLMPKAQSIISIALAYPSRMKDAPKSKKGDRRGIFARASWGKDYHDVLREKLNLLGEFLQSRIDGAAYKAMVDTGELSDRAVAERAGVGFVGKNCALITEDYGSWVYLGEMITNIPFEPDEPIEEGCGDCNICVDSCPTGALVQGGQLNASRCVAYQTITKDFLPDEFREKLGNRLYGCDTCQIVCPKNKKKDFHIHPELEPEPERVKPKLIPLLKISNREFKETYGYMAGSWRGKKPIQRNAIVALAHYKDETAVDTLADLMVNDPRPVIRGTAAWAIGKIGREDAAQMIEEAMVKESDDEVLFEMEKGLDLCKQKA

SEQ ID NO: 74562 - protein, 397 aa, Aquisalimonas asiatica
  REGION 1..397: note = tr|A0A1H8R047|A0A1H8R047_9GAMM Epoxyqueuosine reductase OS=Aquisalimonas asiatica OX=406100 GN=queG PE=3; SV = 1
MGCSIPAGARPAHGRPLVDTGASCPRRGTLAPMNATSDHALADHDLQTLAGDIRGWARALGFQQVGITDTRLETAEQRLDQWLAEGRQGDMDWMARHGRKRTRPEQLLPGTRRVISVRMDYHPADTAADGDATLNDPARAFVSRYALGRDYHKLMRKRLQQLASRIEDASGSAGYRVFVDSAPVMEKPLAEKAGLGWIGKHTLLLNHQAGSWFFLGELYTDLPLPVDTPATDHCGTCRACIDVCPTGAITGPYQLDARRCVSYLTIEHKGSIPESLRPLMGNRIFGCDDCQMVCPWNKFARPTDESAFHPRHGLDAASLITLFQWDEQTFLRNTEGSAIRRLGHERWLRNLAVALGNAPSGPAVIEALRHRRDHPSPLVREHVAWALQRHQPQGDHS

SEQ ID NO: 74563 - protein, 397 aa, Aquisphaera giovannonii
  REGION 1..397: note = tr|A0A5B9WBS0|A0A5B9WBS0_9BACT Epoxyqueuosine reductase OS=Aquisphaera giovannonii OX=406548 GN=queG_2; PE = 4 SV=1
MTPSELSQALKAEALRLGFDGVGIAPAVSPPGYEHYLDWLRAERHAGMRYMERQAEARRHPGSVLDGVRSVVMLSAVYGRPGRGGEAAPSDDPARGKIARYALGEDYHRVLWIKLDALLGWLEGVHPGVRGRGVVDTAPLLERDYARLAGLGWVGKNTMLIDRRLGSFTFLGALLVDVELAPDEPHARGHCGTCTRCLDACPTDAFAGPYQLDASRCISYWTIEHRGPVPGPIAERLDGWVFGCDVCQDVCPWNRKAPGTRMPELDGTAEVADGPRPDLLAWLDRDEDAWSEALRGTALKRAKRAGLVRNAALVLGTRRVAEAVPSLGRRLADEAEEPAARAAAAWALGSIGGDRARDALMRGRHASPDSVREAVVAAEAAIDLRDAATEGRPARPA

SEQ ID NO: 74564 - protein, 442 aa, Aquisphaera giovannonii
  REGION 1..442: note = tr|A0A5B9W9D3|A0A5B9W9D3_9BACT Epoxyqueuosine reductase OS=Aquisphaera giovannonii OX=406548 GN=queG_1; PE = 4 SV=1
MARLDEHPTVVRHRARAERAEAGPLDAAWLRRLCLEAGADDVGFVSIDRAEVADQRAEILAAFPGTRALISIACRLHPEPIRSPARSVSNQEFHANYEHLNDVARRIVRGLADAGVPALNPSSAFPMEMDRYPGKIWVVSHKPIAVAAGLGQVGVHRCVIHPVFGSFINLGTILVARDVSSQAAPVDFNPCLSCKLCVAACPVGAIGADGHFNFSACVTHNYREFMSGFTDWVSTIADSKDGRDYRRRVPASESASMWQSLSFKANYKAAYCVAVCPAGEDVIGPFLDDRGKFLKDVVDPLTAKEEPIYVVPGSDAESHVARRFPRKTIRRVRGVTATSVRGFLFGMRLTFQREASRGLSAVYHFTFTGREPAEATVTIRDRAIRVEDGLIGEPDFRVVADGDAWLGVLAGDRSLIWSILRRRIRARGPLRLLAAFRRCFPR

SEQ ID NO: 74565 - protein, 362 aa, Aquitalea magnusonii
  REGION 1..362: note = tr|A0A3G9G8D5|A0A3G9G8D5_9NEIS Epoxyqueuosine reductase OS=Aquitalea magnusonii OX=332411 GN=queG PE=3; SV = 1
MTEKSYQKLDYPELAGQIKAWAQDLGFAAARISKAALPPQAEAQLQAWLDEGCHGQMDYMARHGSLRVKPADLVPGTLSIVSVRLPYWPAQAQASEEVLADGRLAYLSRYALGRDYHKVLRARLQKLADKVAEHIGPFGYRVFTDSAPVAEVALAAQSGLGWRGKHTLLLNREQGSLFFLGELFTDLPLPADPAEEGHCGRCTRCIDICPTQAITAPYKVDARRCISYLTIELKTAIPPEFRSMIGNRVYGCDDCQLTCPWNRFAVNTVEPDFAVRHGLDQVSLLELFGWSEAMFKEKLAGSPIYRIGYAKWLSNLAVGLGNAPYDPQIVLALQQRLDYPDELVAEPVRWALQQQRLRQLDE

SEQ ID NO: 74566 - protein, 361 aa, Aquitalea magnusonii
  REGION 1..361: note = tr|A0A0F3KP87|A0A0F3KP87_9NEIS Epoxyqueuosine reductase OS=Aquitalea magnusonii OX=332411 GN=queG PE=3; SV = 1
MTEKSYQKLDYPELAGQIKAWAQDLGFAAARISKAQLPAQAEAQLQAWLDEGCHGQMDYMARHGSLRVKPADLVPGTLSIVSVRLPYWPAEALASEDVLADGRLAYLSRYALGRDYHKVLRARLQKLADKVAEHIGPFGYRVFTDSAPVAEVALAAQSGLGWRGKHTLLLNREQGSLYFLGELFTDLPLPADVSEPEHCGRCTRCIDVCPTQAITAPYKVDARRCISYLTIELKTAIPLEFRPMIGNRVYGCDDCQLTCPWNRFAVHTREPDFAVRHGLDQVSLLELFGWSEAMFKEKLAGSPIYRIGYAKWLSNLAVGLGNAPYDPDIVAALQQRQDYPDELVAEPVRWALERQRQAQGK

SEQ ID NO: 74567 - protein, 363 aa, Aquitalea sp.
  REGION 1..363: note = tr|A0A3N7D1W1|A0A3N7D1W1_9NEIS Epoxyqueuosine reductase OS=Aquitalea sp. FJL05 OX=2153366 GN=queG PE=3; SV = 1
MTEKSYQNMDYPELARQIKAWARELGFADARIGHARLPAEAEHKLQAWLDEGCHGEMDYMARHGALRVKPAELLPGTLTIISVRMHYWPADAQASESVLQDGRLAYLSRYALGRDYHKVIRARLQKLADQIRQAIGDFGYRVFTDSAPVAEVALAAQSGLGWRGKHTLLLNRKQGSLFFLGELFTDLPLPVNEEEDGHCGRCTRCIDICPTQAITAPYKVDARRCISYLTIELKSAIPLELRPLIGNRVYGCDDCQLVCPWNRFAVNTAEADFAVRHGLDHVSLLELFGWSEAMFKEKLAGSPIYRIGYPKWLSNLAVGLGNAPYDPAIVAALEGHQHADEALVAEPVRWALQQQRLRAADSQ

SEQ ID NO: 74568 - protein, 363 aa, Aquitalea sp.
  REGION 1..363: note = tr|A0A4P6THP0|A0A4P6THP0_9NEIS Epoxyqueuosine reductase OS=Aquitalea sp. USM4 OX=1590041 GN=queG PE=3; SV = 1
MTEKSYQKLDYPELAGQIKAWAQDLGFAAARISKAQLPVQAEVQLQAWLDEGCHGQMDYMARHGSLRVKPADLVPGTLSIVSVRLPYWPAEALASEDVLADGRLAYLSRYALGRDYHKVLRARLQKLADKVAEHIGPFGYRVFTDSAPVAEVALAAQSGLGWRGKHTLLLSREQGSLYFLGELFTDLPLPADVSEPEHCGRCTRCIDVCPTQAITAPYKVDARRCISYLTIELKTAIPLEFRPMIGNRVYGCDDCQLTCPWNRFSVHTREPDFAVRHGLDQVSLLELFGWSEAMFKEKLAGSSIYRIGYAKWLSNLAVGLGNAPYDPDIVAALQQRQDYPDELVAEPVRWALACQHQRQPQAK

SEQ ID NO: 74569 - protein, 311 aa, unidentified
  source 1..311: note = Arachidicoccus rhizosphaerae
  REGION 1..311: note = tr|A0A1H4CCB8|A0A1H4CCB8_9BACT Epoxyqueuosine reductase OS=Arachidicoccus rhizosphaerae OX=551991; GN = queG PE=3 SV=1
MDLETRTHIIKTIAAALGFEHCGIAKAAPLDQDARRLEAWLNKGMHGNMHYMENYFELRTDPTKLVPGARSVITLLKNYYPSETQKPDRPKISKYAYGNDYHEIIRARLHEFIHQLREKIGDVQGRGFVDSAPVLERTWAGRSGLGWVGKNGMLINKGAGSYHFIASLIIDWELIYDQPLAKDFCGSCTRCIDACPTDAILPDKVIQGNKCISYFTIELKDLLLPGDLKSDFQNWAFGCDICQEVCPWNRFSTPHKDAAFTPIAEILDFTTEQWLDLTEDAFKKIFRLSPLKRSKYQGIMRNLKFISQDGI

SEQ ID NO: 74570 - protein, 310 aa, unidentified
  source 1..310: note = Arachidicoccus sp.
  REGION 1..310: note = tr|A0A191TGY5|A0A191TGY5_9BACT Epoxyqueuosine reductase OS=Arachidicoccus sp. BS20 OX=1850526 GN=queG; PE = 3 SV=1
MNKAQRTHFVKQTAQECGFEFCGIAKAAKLGEDARRLEAWLNKGMHGTMHYMEKYFELRTDPTKLVPNAKSVITLLKNYYPETSQNTDAPKVSKYAYGNDYHETIKVQLNVFLDRLKASFGEFQGRGFVDSAPVLERAWAEKSGLGWLGKNGMLINKGAGSFYFIATLIVDVELEYDAPLAKDFCGTCTRCIDECPTDAILPNKVVDGSKCISYFTIELKDALLPDDMRPKFDNWLFGCDVCQDVCPWNRFSKPTNDEAFKPIAEILNFTEKDWSDLTEDGFRQIFKHSPLKRSKYKGIMRNLKFIMSEP

SEQ ID NO: 74571 - protein, 308 aa, unidentified
  source 1..308: note = Arachidicoccus sp.
  REGION 1..308: note = tr|A0A386HLN8|A0A386HLN8_9BACT Epoxyqueuosine reductase OS=Arachidicoccus sp. KIS59-12 OX=2341117; GN = queG PE=3 SV=1
MNIRERTHIIKQIAAELGFDFCGIAQAVKLDEDARRLEAWLNKGMHGNMHYMEKYFELRVDPTQLVPGAKSVITLLKNYYPEAKQNIEAPKISKYAYGNDYHEIIKEKLNLFFDKLNDTFGEIHGRGFVDSAPVLERTWAQKTGLGWIGKNGMLINKGSGSFFFIASLIIDWELEYDLPMAKDFCGSCTRCIDACPTEAILPEKVINGSKCISYFTIELKDLLIPDQMRPKFDNWMFGCDICQDVCPWNRFSKPTTDTAFKPIFEILNFSEKEWNDLSEESFRAIFKHSPIKRSKYKGIMRNLKFISS

SEQ ID NO: 74572 - protein, 382 aa, unidentified
  source 1..382: note = Arboricoccus pini
  REGION 1..382: note = tr|A0A212R249|A0A212R249_9PROT Epoxyqueuosine reductase OS=Arboricoccus pini OX=1963835 GN=queG PE=3 SV=1
MTIRISKAELPGRIRERAEALGFSSIRFTKADLPPVVQDRYRQAIGLGRHGSMAWLAAEPDRRSSPVHLWPEARSAITLAMNYGPSADPRPELEAKGRAYISVYARHRDYHEVIKGRLKELGQWLHRVGGGEIKVFVDTAPLLEKPLAQQAGLGWQGKHTNLVSRQFGSWLFLGEILTSIDLPSDPPEADHCGQCRRCLDVCPTAAFPAPYQLDARRCISYLTIEHKGPIDREFRHLLGNRIYGCDDCLAACPWNKFASAASEVKLAALPDRVTPSLEELSHLDDASFRVRFSGSPIKRIGRDRFMRNVVLAMGNSGDARFVQPLTRRLGDASPLVRGAAVWALAQLVSQAELESFASAHAGESDPSVREEWRQASRDKAFA

SEQ ID NO: 74573 - protein, 339 aa, Archangium gephyra
  REGION 1..339: note = tr|A0A0G3A7K1|A0A0G3A7K1_9DELT Epoxyqueuosine; OS = Archangium gephyra OX=48 GN=AA314_08605 PE=4 SV=1
MTPLPTAHLRQLTEQVGFDLVGFARAEPIPPEFLFGWLESGCAADMDWMGTRAAERLDVSKLLPGARTVIAFATNYYRDEPRAVDSPIARYARSRDYHSTLRDKLKAFRKLFSDAYPEVHHYGSVDSGPLMEKVWAARAGLGYVGKNGCFITEPFGSWVLLSALVLDAEVDAYAGGPASDRCGHCRKCIMSCPTGALLGQGRVDARACLSYQTIENRHAEVPESFRVEMDNIVFGCDICQDVCPLNRSPVFTPNERFAPRAVAELGVMELAALTPEDYERLIPGTPLARAKYDGLRRNAVYALGAVKQAEARSLLEKLSQDSSEQVRHAAQWALRHLDA

SEQ ID NO: 74574 - protein, 339 aa, Archangium sp.
  REGION 1..339: note = tr|A0A1Q3H6X1|A0A1Q3H6X1_9DELT tRNA epoxyqueuosine(34) reductase QueG OS=Archangium sp. Cb G35; OX = 1920190 GN=BO221_48240 PE=4 SV=1
MTPLPTAHLRQLSEQAGFDLVGFARAEPIPPEYLFGWLESGCAADMDWMGSRAAERLDVSKLLPGARTVIAFATNYYRDEPRAEDSPIARYARSRDYHSTLRDKLKAYRKLFSDAYPGVQHYGSVDSGPLMEKVWAARAGLGYVGRNGCFITEPFGSWVLLSALILDAEVDAYAGGPASDRCGHCRKCLMSCPTGALLGQGRVDARACLSYQTIENRHAEVPESFRVEMDNIVFGCDICQDVCPLNRSPVFTPNERFSPRAVAELGVMELAALTPEQYEQLIPGTPLARAKYDGLRRNAVYALGAMKQAEARSLLETLSQDPSEQVRHAAQWALRHLDA

SEQ ID NO: 74575 - protein, 339 aa, unidentified
  source 1..339: note = Archangium violaceum
  REGION 1..339: note = tr|A0A084SXY1|A0A084SXY1_9DELT [Fe-S]-binding protein OS=Archangium violaceum Cb vi76 OX=1406225; GN = Q664_10070 PE=4 SV=1
MTPLPSAHLRQLSEQVGFDLVGFARAEPIPPEFLFGWLESGCAADMDWMGSRAAERLDVSKLLPGARTVIAFATNYYRDEPRAEDSPIARYARSRDYHSTLRDKLKAYRKLLSAAYPGVHHYGSVDSGPLMEKVWAARAGLGYVGKNGCFITAPFGSWVLLSALILDAEVDSYAGGPASDRCGHCRKCIMSCPTGALLGHGRVDARACLSYQTIENRHAEVPESFRVEMDNIVFGCDICQDVCPLNRGPVFTPNERFSPRAVAELGVMELAALTPEQYEQLIPGTPLARARYDGLRRNAVYALGAMKQAEARSLLETLSQDPSEQVRHAAQWALRHLDA

SEQ ID NO: 74576 - protein, 308 aa, Arcicella aurantiaca
  REGION 1..308: note = tr|A0A316EB28|A0A316EB28_9BACT Epoxyqueuosine reductase OS=Arcicella aurantiaca OX=591202 GN=queG PE=3; SV = 1
MQNPTKYTQQIKQKAHELGFDFCGISKAGFLEEEAPRLENWLKANQHGKMQYMENHFDKRLDPRLLVDDAKSVVSLLFNYYPDQRLPEGKDDIKLSKYAYGTDYHFVIKDKLKHFLSFIHQEIGEVGGRAFVDSAPVMDKVWAKKGGLGWIGKHSNLINKKQGSFFFIAELIIDLELEYDHEIKDYCGTCTRCIDACPTGAIVEPFVVDGSKCISYFTIELKEAIPIDMRGKFDNWVFGCDVCQDVCPWNRFSKPHQEPHFNLHPDLQHFTNADWQEITEDVFKEIFKKSPLKRTKFDGLRRNVEFLG

SEQ ID NO: 74577 - protein, 313 aa, unidentified
  source 1..313: note = Arcticibacter pallidicorallinus
  REGION 1..313: note = tr|A0A2T0TXM6|A0A2T0TXM6_9SPHI Epoxyqueuosine reductase OS=Arcticibacter pallidicorallinus OX=1259464; GN = queG PE=3 SV=1
MYNNAGRYSQLIKEEARRLGFMFCGISKAGFLDKEAPRLENWLKNGYHGKMSYMENHFDKRLDPTKLVEGSRSVISLALNYYTDEKQHDPAAPRISKYAYGADYHDVIKSKLKDLLQFIKEHIGDVSGRAFVDSAPVLDRAWAIQSGFGWIGKNSNLINKKSGSFFFLAELITDLDLQYDLASDKDYCGTCTKCLDACPTDAIVSPQVVDGSKCISYLTIELKDELPNEFKGKTDNWMFGCDICQDVCPWNRFSSRHDEPAFEPSFDLLKMSASDWEEITEDVFKQLFKGSPIKRTKFTGLKRNIEFLKPIKQ

SEQ ID NO: 74578 - protein, 311 aa, unidentified
  source 1..311: note = Arcticibacter svalbardensis
  REGION 1..311: note = tr|R9GW83|R9GW83_9SPHI Epoxyqueuosine reductase; OS = Arcticibacter svalbardensis MN12-7 OX=1150600 GN=queG; PE = 3 SV=1
MYNNPQKYSQLIKQEASRLGFMFCGISKAGFLEEEAPRLENWLKHNYNGKMAYMENNFDKRLDPRKLVEGARSVISLALNYYSDSLQSNAETLKISKYAYGKDYHDIIKGKLKELLSFIRLEIGDVAGRAFVDSAPVLDRVWAKKAGFGWIGKNSNLINKKSGSFFFLAELIVDLDLNYDISADKDYCGTCTKCIDACPTQAIVAQSIVDGSKCISYLTIELKEELPSEFKGKMDNWIFGCDICQDVCPWNRFSTNHSEPGFNPHPDFFNMKKFDWKEITEDVFKKLFKGSAVKRTKFIGLKRNIDFLNID

SEQ ID NO: 74579 - protein, 314 aa, unidentified
  source 1..314: note = Arcticibacterium luteifluviistationis
  REGION 1..314: note = tr|A0A2Z4G718|A0A2Z4G718_9BACT Epoxyqueuosine reductase OS=Arcticibacterium luteifluviistationis; OX = 1784714 GN=queG PE=3 SV=1
MLRNSFNNAQLIKNKAHELGFDFCGISKAGFLEKEAPRLEKWLNQNYNGKMAWMANHFDKRLDPTKLVPGAKSVISVMLNYYPEKRLPEGDDDLKISKYAYGKDYHYVLKDKLKALFNFINEEIGEVDGRIFVDSAPVMDKVWAEKSGLGWVGKHSNLLNKEMGSFFFLGEIICDLVLEEDGPVKDYCGTCTACIDACPTDAIVEPYVVDGSKCISYYTIELKEAIPEEAKGKMENWIFGCDICQDVCPWNRFSKPNTTPDFNLKPELAGFTNSDWEEITEEVFRELFRHSPIKRTKLEGVRRNVNFIKPNTKD

SEQ ID NO: 74580 - protein, 351 aa, unidentified
  source 1..351: note = Ardenticatenia bacterium
  REGION 1..351: note = tr|A0A2U2S5H4|A0A2U2S5H4_9CHLR Epoxyqueuosine reductase OS=Ardenticatenia bacterium OX=2099665 GN=queG; PE = 3 SV=1
MANTSHVSTLIKEYAAALGFDLVGIAPATRVPHAEAYGAWVEAGYAGDMAYMTREPERRQDPRLVLPEARSVVVVAVSYFTADPPAALWDDPARGRVARYAWGQDYHDVLTPRLRQLAGFLQRHVDGTVLWRAYVDTGPLLERDLALMAGLGFIGKNTCLIHPEWGSYLFLGELLVSAELAYDAPITTGICGRCTRCLDACPTGALVAPYRLDSRKCISYLTIELRTAIPQALRAPMGNWIFGCDVCQSVCPWTRRFARTGRQDFLSFEPARCVPSLLELLALDEAQFRARFGRTPVRRSKWHGLLRNVVVALGNCGDPAAIPALQHAATESHPLVREHAAWALHRIRSAG

SEQ ID NO: 74581 - protein, 306 aa, unidentified
  source 1..306: note = Arenibacter algicola
  REGION 1..306: note = tr|A0A221UWK8|A0A221UWK8_9FLAO Epoxyqueuosine reductase OS=Arenibacter algicola OX=616991 GN=queG PE=3; SV = 1
MKNIHEHTQLIKAEAKRLGFLSCGISKAEFLEEEAPRLENWLKKNMHGEMGYMENHFDKRLDPTKLVEGSKSVISLLLNYFPGESQKENTYKLSKYAYGQDYHHVIKSKLKELQNFISEEIGEVSGRAFVDSAPVLDKAWAAKSGLGWIGKHSNLLTQQVGSFYFIAELIVDLELEYDHRVTDHCGTCTACIDACPTQAIVEPYVVDGSKCISYLTIELKNEIPSEFQGKMDDWMFGCDVCQDVCPWNRFSKSHREPLFNPNPDLLSMTKKDWEEITEDVFKKVFQKSAVKRTKFSGLKRNIEFLK

SEQ ID NO: 74582 - protein, 317 aa, Arenibacter echinorum
  REGION 1..317: note = tr|A0A327R6M7|A0A327R6M7_9FLAO Epoxyqueuosine reductase OS=Arenibacter echinorum OX=440515 GN=queG PE=3; SV = 1
MYLYCLPKDNFLKNTHKHTQLIKTQAKRLGFLSCGISKAEFLEEEAPRLENWLNKNMHGEMGYMENHFDMRLDPTKLVEGSKSVISLLLNYFPEESQNENTFKISKYAYGQDYHHVIKSKLKELQNFISEEIGEVSGRAFVDSAPVLDKAWAAKSGLGWIGKHSNLLTQQVGSFYFIAELIVDLELEYDHRVTDHCGTCTACIDACPTQAIIEPYVVDGSKCISYLTIELKNEIPTDFKGKMDDWMFGCDVCQDVCPWNRFSKPHREPLFNPNPELLSMTKKDWDEITEDVFKKVFQKSAVKRTKFSGLKRNIEFLK

SEQ ID NO: 74583 - protein, 306 aa, Arenibacter nanhaiticus
  REGION 1..306: note = tr|A0A1M6GN28|A0A1M6GN28_9FLAO Epoxyqueuosine reductase OS=Arenibacter nanhaiticus OX=558155 GN=queG; PE = 3 SV=1
MTAHQKNTELIKTEAKRLGFLSCGISKAEFLEEEAPRLEKWLNNNMNGEMQYMENHFDKRLDPTKLVEGSKSVVSLLLNYYPEEKQVDGTYKISKYAYGQDYHHVIKTKLRQLQEFISEEIGAVDGRAFVDSAPVLDKAWAAKSGLGWIGKHSNLITQKVGSFYFIAELILDLELEYDAPVTDHCGSCTACLDACPTQAIVAPYVVDGSKCISYFTIELKNEIPSGFQGKFDDWMFGCDVCQDVCPWNRFSKPHSEPLFQPNPELLSMTKKDWEEITEDVFRKVFQKSPVKRTKFSGLERNIKFLK

SEQ ID NO: 74584 - protein, 306 aa, Arenibacter palladensis
  REGION 1..306: note = tr|A0A1M5CG51|A0A1M5CG51_9FLAO Epoxyqueuosine reductase OS=Arenibacter palladensis OX=237373 GN=queG; PE = 3 SV=1
MKNIHKHTQLIKAEAKRLGFLSCGISKAQFLEEEAPRLEKWLNKNMHGEMGYMENHFDKRLDPTKLVEGSKSVISLLLNYFPGEVQEENTFKVSKYAYGQDYHHVIKSKLKELQNFISEEIGEVNGRAFVDSAPVLDKAWAAKSGLGWIGKHSNLLTQQVGSFYFIAELIVDLELEYDHRVTDHCGTCTACIDSCPTQAIIEPYVVDGSKCISYLTIELKNEIPSEFKGKMDDWMFGCDVCQDVCPWNRFSQSHREPLFHPHPELLSMTKKDWEEITEDVFKKVFQKSAVKRTKFSGLKRNIEFLK

SEQ ID NO: 74585 - protein, 306 aa, Arenibacter palladensis
  REGION 1..306: note = tr|A0A543W931|A0A543W931_9FLAO Epoxyqueuosine reductase OS=Arenibacter palladensis OX=237373 GN=queG; PE = 3 SV=1
MKNIHEHTQLIKAEAKRLGFLSCGISKAEFLEEEAPRLENWLKKNMHGEMGYMENHFDKRLDPTKLVEGSKSVISLLLNYFPGESQKENTYKLSKYAYGQDYHHVIKSKLKELQNFISEEIGEVSGRAFVDSAPVLDKAWAAKSGMGWIGKHSNLLTQQVGSFYFIAELIVDLELEYDHRVTDHCGTCTACIDACPTQAIVEPYVVDGSKCISYLTIELKNEIPSEFQGKMDDWMFGCDVCQDVCPWNRFSKSHREPLFNPNPDLLSMTKKDWEEITEDVFKKVFQKSAVKRTKFSGLKRNIEFLK

SEQ ID NO: 74586 - protein, 306 aa, Arenibacter sp.
  REGION 1..306: note = tr|A0A318IB04|A0A318IB04_9FLAO Epoxyqueuosine reductase OS=Arenibacter sp. ARW7G5Y1 OX=2135619 GN=queG; PE = 3 SV=1
MKNILKHTQLIKTEAKRLGFLSCGISKAEFLEEEAPRLEKWLNKNMQGEMGYMENHFDKRLDPTNLVEGSKSVISLLLNYFPEETQNENTFKLSKYAYGQDYHHIIKSKLKELQEFIGKEIGEVNGRAFVDSAPVLDKAWAAKSGLGWIGKHSNLLTQQVGSFYFIAELIVDLELEYDHRVTDHCGTCTACIDACPTQAIVEPYVVDGSKCISYLTIELKNEIPTDFKGKMDDWMFGCDVCQDVCPWNRFSKPHREPLFHPHPDLLSMTKKDWEEITDDVFKKVFQKSAVKRTKFSGLKRNIEFLK

SEQ ID NO: 74587 - protein, 306 aa, Arenibacter sp.
  REGION 1..306: note = tr|A0A372H1W0|A0A372H1W0_9FLAO Epoxyqueuosine reductase OS=Arenibacter sp. P308M17 OX=2303391 GN=queG; PE = 3 SV=1
MNSIHEHTQLIKTEAKRLGFLSCGISKAEFMEEEAPRLEKWLNNNMHGEMGYMENHFDLRLDPTKLVEGSKSVISLLLNYFPEATQKEDTFKVSKYAYGQDYHHVIKSKLRELQNFISEEIGEVYGRAFVDSAPVLDKAWAAKSGLGWIGKHSNLLTRQVGSFYFIAELIVDLELEYDHRVTDHCGSCTACMDACPTQAIVEPYVVDGSKCISYLTIELKNEIPSEFKGKMDDWMFGCDVCQDVCPWNRFSKPHREPLFNATPELLSFTKKDWEEITEDVFRKVFQKSAVKRTKFSGLKRNIEFLE

SEQ ID NO: 74588 - protein, 306 aa, Arenibacter troitsensis
  REGION 1..306: note = tr|A0A1X7HYP8|A0A1X7HYP8_9FLAO Epoxyqueuosine reductase OS=Arenibacter troitsensis OX=188872 GN=queG; PE = 3 SV=1
MKNIHKHTQLIKAEAKRLGFLSCGISKAQFLEEEAPRLEKWLNKNMHGEMGYMENHFDKRLDPTKLVEGSKSVISLLLNYFPGEVQNENTFKVSKYAYGQDYHHVIKSKLRELQNYISEEIGEVNGRAFVDSAPVLDKAWAAKSGLGWIGKHSNLLTQQVGSFYFIAELIVDLELEYDQRVTDHCGTCTACIDACPTQAIVQPYVVDGSKCISYLTIELKNEIPSEFKGKMDDWMFGCDVCQDVCPWNRFSKSHREPLFDPNPQLLSMTKKEWEEITEDVFKKVFQKSAVKRTKFSGLKRNIEFLK

SEQ ID NO: 74589 - protein, 376 aa, Arenicella xantha
  REGION 1..376: note = tr|A0A395JN61|A0A395JN61_9GAMM Epoxyqueuosine reductase OS=Arenicella xantha OX=644221 GN=queG PE=3 SV=1
MTSPTSNSHESLSTEQLNALAKQIKDWGLDLGFDAVGISDTDLSEHEAHLENWVAAGMHGEMDYMHKHGVKRTQPSKLVEGTRRVISVRMDYAPADIRNAETMLAQDSIGYISRYALGRDYHKVLRARLKKLAQRIQEKIGDFGYRVFTDSAPVMEKAIAEKAGLGWIGKHSNLLDSKTGSWFFLGELYVDLPLPTDQTATNHCGSCQRCIDVCPTQAIIGPYQVDARLCISYLTIELKGAIPTELRAKMGNRIYGCDDCQFVCPWNKFAQTTKEPDFTPRAELTDQKLVDLFGWTEEQFLRNTEGTAIRRIGYESWLRNIAIALGNASPTAASIKALKARRESATELVKEHIDWALTQHQAANLPTSAEELSTHK

SEQ ID NO: 74590 - protein, 351 aa, unidentified
  source 1..351: note = Arenimonas caeni
  REGION 1..351: note = tr|A0A2P6M769|A0A2P6M769_9GAMM Epoxyqueuosine reductase OS=Arenimonas caeni OX=2058085 GN=queG PE=3 SV=1
MREPADMNALARSIRDWGAELGFQQVGIAGIDLSRDMEHLRDWLARGQHGTMDYMARHGDKRGRPEELVPGTLRVVSVRFDYGTGEDAAAWATLAEGERAYVARYALGRDYHKLMRNRLQKLADRIAAQTGPFGYRVFVDSAPVLERALARDAGLGWIGKHTCLINKDAGSWFFLGEIYTDLPLPVDAPASAHCGTCTRCIEVCPTGAIVAPYRVDARRCISYLTIELRESIPEELRPLMGNRIFGCDDCQLACPWNKFAVRHEVPDFAPRNELDSATLAELFAWEEDEFLRRTEGSAIRRTGHAGWLRNIAVALGNAPTTPAVLAALASRREHPDPMVREHVAWALARHE

SEQ ID NO: 74591 - protein, 353 aa, Arenimonas composti
  REGION 1..353: note = tr|A0A091BC06|A0A091BC06_9GAMM Epoxyqueuosine reductase OS=Arenimonas composti TR7-09 = DSM 18010; OX = 1121013 GN=queG PE=3 SV=1
MPDLAALAADIRIWARELGFQQTGIAGVELGEDEAHLQAWLARGFHGGMDYMARHGDKRARPGELVPGTLRVISVRMDYGTGDEDAAWARLADGEAAYVARYALGRDYHKLMRNRLQKLADRIAGAIGPFGHRVFVDSAPVLERALARDAGLGWIGKHTCLINRDAGSWFFLGELYTDLALPVDEPASAHCGTCTRCLQVCPTGAIVAPYQVDARRCISYLTIENRDAIPEELRPLIGNRIFGCDDCQLACPWNKFAVAHGEADFAPRNGLDGARLVELFAWTEEEFLKRTEGSAIRRTGYRGWLRNIAVALGNAPTTPSVLAALASRRDEPDEMVREHVAWALARHPKVVLD

SEQ ID NO: 74592 - protein, 354 aa, Arenimonas donghaensis
  REGION 1..354: note = tr|A0A087MKK1|A0A087MKK1_9GAMM Epoxyqueuosine reductase OS=Arenimonas donghaensis DSM 18148 = HO3-R19; OX = 1121014 GN=queG PE=3 SV=1
MHDRADMDQLALAIKAWGSELGFQQVGIAGITLDQDAAHLRDWLAKGQHGRMDYMARHGDKRARPEELVPGTVRVVSVRLDYGTADDGAAWDTLAEGERAYVARYALGRDYHKLMRNRLQKLADRIAEETGPFGYRAFVDSAPVLERALARDAGLGWIGKHSCLINRSAGSWFFLGEIYTDLPLPVDAPASAHCGTCTRCIEVCPTGAIVAPYRVDARRCISYLTIELREAIPEELRPLIGNRIFGCDDCQLACPWNKFAQRHDEPDFRARNDLDQASLADLFAWEEDEFLRRTEGSAIRRTGHEGWLRNIAVALGNAPTTPGVLAALASRRDHASALVREHVAWALARHEGRD

SEQ ID NO: 74593 - protein, 354 aa, Arenimonas malthae
  REGION 1..354: note = tr|A0A091BKN2|A0A091BKN2_9GAMM Epoxyqueuosine reductase OS=Arenimonas malthae CC-JY-1 OX=1384054 GN=queG; PE = 3 SV=1
MRDPADMTALARAIRAWGAELGFQQVGIAGIELGEDEAHLRDWLAKGQHGAMDYMARHGDKRSRPAELVPGTLRVLSARMDYGTGDDTAAWATLERGEDAYVARYALGRDYHKVMRNRLQKLADRIAGEIGPFGYRAFVDSAPVLERALARDAGLGWIGKHSCLINKSAGSWFFLGEIYTDLPLPVDVPASAHCGTCTRCLQVCPTQAIVAPYRVDARRCISYLTIELKEAIPEELRPLMGNRIFGCDDCQLACPWNKFAVRHDEPDFVARNGLERASLAELFAWEEEEFLRRTEGSAIRRTGHEGWLRNIAVALGNAPTTPAVLAALASRRDHPSALVREHVAWALARHEREK

SEQ ID NO: 74594 - protein, 350 aa, unidentified
  source 1..350: note = Arenimonas metalli
  REGION 1..350: note = tr|A0A091BTC2|A0A091BTC2_9GAMM Epoxyqueuosine reductase OS=Arenimonas metalli CF5-1 OX=1384056 GN=queG; PE = 3 SV=1
MPDLAALAERIKTWSRELGFQQLGVAGIELGEDAAHLRRWLDEGLHGRMEYMARHGDLRARPEELVPGTLRVLSVRMDYGTGDDAAAWDTLAEGERAYVARYALGRDYHKVMRNKLQKLADRIAGEIGPFGYRAFVDSAPVLERALARDAGLGWIGKHTCLINRDAGSWFFLGEILTDLPLPVDAPASAHCGTCTRCITVCPTGAIVAPYRVDARRCISYLTIELKEAIPEELRPLMGNRIFGCDDCQLACPWNKFAVKHAQPDFQPRHGLDAAGLAELFAWDEATFLQRTEGSAIRRTGHAGWLRNIAVALGNAPTTPGVLAALASRREDPDPMVREHVAWALSRHPKA

SEQ ID NO: 74595 - protein, 351 aa, Arenimonas oryziterrae
  REGION 1..351: note = tr|A0A091B9N0|A0A091B9N0_9GAMM Epoxyqueuosine reductase OS=Arenimonas oryziterrae DSM 21050 = YC6267; OX = 1121015 GN=queG PE=3 SV=1
MPNLPALAEDIKRWGRELGFQQVGITGIELAPDEGHLQDWLEQGQHGEMDYMARHGDKRSRPAELQPGTLRVVSVRMDYGTGEDEEAWRTLAQGERAYVARYALGRDYHKVMRNRLQKLSDRIADAIGPFGYRVFVDSAPVLERALARNAGLGWIGKNACVINRNAGSWFFLGEIFIDLPVPVDTPASAHCGTCTRCIDICPTQAIIAPNRIDARRCISYLTIELKGSIPEEFRAAIGNRIFGCDDCQLICPWNKFATRFDEPDFRARNDLDRATLVELFAWTETEFLQRTEGSAIRRTGYEGWLRNIAVALGNAPRSAEVLSALESRREDASEIVREHVAWALAHSTQKD

SEQ ID NO: 74596 - protein, 292 aa, Arenimonas sp.
  REGION 1..292: note = tr|A0A352QQU9|A0A352QQU9_9GAMM tRNA epoxyqueuosine(34) reductase QueG OS=Arenimonas sp.; OX = 1872635 GN=queG PE=4 SV=1
  VARIANT 227..228: note = Xaa can be any naturally occurring amino acid
MRDPADMTALARAIRAWGAELGFQQVGIAGVELGEDEAHLRDWLAKGQHGAMDYMARHGDKRSRPAELVPGTLRVLSVRMDYGTGDDAAAWATLERGEDAYVARYALGRDYHKVLRNRLQKLADRIAGEIGPFGYRAFVDSAPVLERALARDAGLGWIGKHSCLINKSAGSWFFLGEIYTDLPLPVDVPASAHCGTCTRCLQVCPTQAIVAPYRVDARRCISYLTIXXLRRTEGSAIRRTGHEGWLRNIAVALGNAPTTPAVLAALASRRDHPSALVREHVAWALARHEAQK

SEQ ID NO: 74597 - protein, 356 aa, Arenimonas sp.
  REGION 1..356: note = tr|A0A1D2RWT2|A0A1D2RWT2_9GAMM Epoxyqueuosine reductase OS=Arenimonas sp. SCN 70-307 OX=1660089 GN=queG; PE = 3 SV=1
MHAPADMPALARSIKDWGAELGFQQVGIAGIDLDKDAEHLRDWLAKGQHGTMDYMARHGDKRSRPGELVPGTLRVVSVRMDYGTGEDAAAWATLAEGERAYVARYALGRDYHKLMRNRLQKLADRIAAETGPFGYRVFVDSAPVLERALARDAGLGWIGKHSCLINKDAGSWFFLGEIYTDLPLPVDAPASAHCGTCTRCIEVCPTGAIVAPYRVDARRCISYLTIELREAIPEELRPLMGNRIFGCDDCQLACPWNKFAERHSVPDFMPRNQLDTATLAELFAWDEDEFLRRTEGSAIRRTGHAGWLRNIAVALGNAPGSPAVLAALATRREHPDPMVREHVAWALQRHGKPGSA

SEQ ID NO: 74598 - protein, 307 aa, unidentified
  source 1..307: note = Arenitalea lutea
  REGION 1..307: note = tr|A0A1M6EZB6|A0A1M6EZB6_9FLAO Epoxyqueuosine reductase OS=Arenitalea lutea OX=1178825 GN=queG PE=3 SV=1
MNSKSKYTELIKTEAKRLGFLSCGVSKAEFLEAEAPRLEKWLNNQMHGEMHYMENHFDKRLDPTKLVEGSKSVISLLLNYYPSEEQNKNSFKISKYAYGTDYHFVIKDKLKSLLHVIQDEIGDVHGRAFVDSAPVLDKAWAAKSGLGWIGKHSNLLTQQVGSFYFIAELIIDLELEYDTVTTDHCGSCTACIDACPTEAITEPFVVDGSKCISYFTIELKENIPTEFKGKMDDWMFGCDVCQDVCPWNRFSKSHKEPLFNPHPELLSMSKKEWEEITEETFQKVFKNSAVKRTKFSGLKRNINFLKD

SEQ ID NO: 74599 - protein, 323 aa, unidentified
  source 1..323: note = Armatimonadetes bacterium
  REGION 1..323: note = tr|A0A399X699|A0A399X699_9BACT tRNA epoxyqueuosine(34) reductase QueG OS=Armatimonadetes bacterium OX=2033014 GN=queG PE=4 SV=1
MDCSGAHDGGGLKRRALEEGFDAAGICDAQPPPHYGAYVRWLQQGFHATMAYLDRHRALKNHPQNLLPGVRSILAVALNYNQPAEQRPGHPRVARYALGRDYHKIIRPKLRRVGEWAVRELGGNYRVCVDSAPILERDYAQLAGLGWYGKNTCLIDSRRGSWFLIGLLLLTERFRPDAPAVGGCGSCRLCIDACPTGAIVPAEEGWRVDARRCVSYLTIEHRGPIDPGIQARIGDWTFGCDVCQEVCPFNQPRPQQPFRAPATETADLLRRTELPPLDRLATLSEDEWDPLTRGSALRRAGFEGLRRNAEINLRNCRRPDFPR

SEQ ID NO: 74600 - protein, 314 aa, unidentified
  source 1..314: note = Armatimonadetes bacterium
  REGION 1..314: note = tr|A0A1Y0H8K9|A0A1Y0H8K9_9BACT tRNA epoxyqueuosine(34) reductase QueG OS=Armatimonadetes bacterium Uphvl-Ar2 OX=2004468 GN=CCB81_09580 PE=4 SV=1
MESLESQLKSKARKLGFGLVGITDAAPPLSYEAYRQWVADGHHGTMAYMARSHELRADLNTLLPGVQSVVAVGAFYRQPEELPADHPKFARYALGRDYHKVLRGRLRTLDRWLHAEEGQGRICVDSAPVLEREYAHRAGLGWYGKNTMLINTHAGSWFVIGLLLSTRKLAPDAPAQGGCGTCRACIDACPTGAIVHRHGRWQVDARDCISYLTIEHRGEIESDREAKLDDWVFGCDVCQEVCPFNTVRPHQPGRAPVLTIEDFRARTWPPVEELAHLTSEAWDTLTAGSPVRRAGYDGLRRHARRARRMRDARV

SEQ ID NO: 74601 - protein, 363 aa, unidentified
  source 1..363: note = Aromatoleum aromaticum
  REGION 1..363: note = tr|Q5P217|Q5P217_AROAE Epoxyqueuosine reductase; OS = Aromatoleum aromaticum (strain EbN1) OX=76114 GN=queG; PE = 3 SV=1
MKNPNHQGASGHAAPHESLATVAEQLNIWARELGFAAVGIADIDLAGAELGLEAWLASGFHGEMDYMARHGMKRARPAELVPGTLRVISVRMNYWPQAAAAQATLDEPAQAYVSRYALGRDYHKLMRNRLQKLAERIATEAPHGYRVFVDSAPVLEVELATRAGLGWRGKHTLTLDRSAGSFFFLGEIFTDLPLPVDVPTKPHCGSCRACLDACPTGAIVEPYRVDARRCISYLTIELKEAIPEDLRPLIGNRIYGCDDCQLVCPWNRFAQLTAEPDFAPRHGLDRASLVELFAWTEADFSTRMAGSAIYRIGFERWLRNLAVALGNAPTSPAIVAALRARADDPSELVREHVAWALKRHDAA

SEQ ID NO: 74602 - protein, 323 aa, unidentified
  source 1..323: note = Arsenicibacter rosenii
  REGION 1..323: note = tr|A0A1S2VP95|A0A1S2VP95_9BACT Epoxyqueuosine reductase OS=Arsenicibacter rosenii OX=1750698 GN=queG; PE = 3 SV=1
MQQHLNATARHTALIKQQAVALGFDFCGISAAGFLDDEAPRLENWLKQERHGQMGYMANHFDKRLDPRLLVDGAKSVITVLLNYFPEAPLAEGADDLKISKYAYGEDYHFVLKDKLKSLLTFIQENVGEVGGRAFVDSAPVMDKAWAQRSGAGWMGKHTNIINRKMGSFFFIGELILDLELTPDGPIGDYCGTCTRCIDACPTGAIVEPYVVDGSRCISYFTIELKEAIPATVSGQFDNWIFGCDICQDVCPWNRFAKPHQTPAFDPHPTLRQLTKTDWQDITEDVFREVFRRSAVKRTKLEGLQRNIAFVQQTSQAANLDLD

SEQ ID NO: 74603 - protein, 364 aa, unidentified
  source 1..364: note = Arsenicitalea aurantiaca
  REGION 1..364: note = tr|A0A433X8P4|A0A433X8P4_9RHIZ tRNA epoxyqueuosine(34) reductase QueG OS=Arsenicitalea aurantiaca OX=1783274 GN=queG PE=4 SV=1
MALGFTALGVTRADARPDLPGRLDAALAAGWHGDMAWMEETALRRGHPNALWPEARSILMLGFNYGPQSDPLADLARRSTGNISVYARNRDYHELIKGRLKELAGLLARRSGAEVKVFVDTAPLMEKPLAEAAGIGWQGKHSVLVSRDAGSWLFLGAILTTAELPADPPHPESCGSCTRCLDICPTNAFPAPFRLDARRCLAYLTIEHQGQIPVAFRAALGNRIYGCDDCLAVCPWNKFARATAESRLAAREDLRAPALSDLVALDDWGFRALFAGSPIKRLGLARFLRNVLIAIGNSADPALLPAARARLADEDARVRGAAIWAVRRLEDPDAVAQLAARHAPVEPDPAVRAEWTAPLVSQEP

SEQ ID NO: 74604 - protein, 377 aa, unidentified
  source 1..377: note = Arsukibacterium ikkense
  REGION 1..377: note = tr|A0A0M2V2A2|A0A0M2V2A2_9GAMM Epoxyqueuosine reductase OS=Arsukibacterium ikkense OX=336831 GN=queG; PE = 3 SV=1
MATDYQQLALQIKRWAQELGFQQLGITATDLSSEEPRLEAWLAQGYHGDMHYMSEHGMLRARPADLLPGTLRVLSVRMDYLPAQAGFATNLANPAKAYISRYALGRDYHKLVRNRLKQLAQKISNEIPELGFRPFVDSAPVLERPLAQRAGLGWVGKHSLLLNHGVGSWFFLGELLLDIPLPVDEPHQGDCGSCVACITSCPTGAIVAPYVVDGRRCISYLTIELKTAIPEELRPLIGNRIYGCDDCQLVCPENREAPVSIEADFQRRSQWQDQDLLQLFAWDESTFLRLTEGSAIRRIGFERWQRNIAVALGNAPYQPDIAAALHAAKPAASELVTEHIDWALAQQKRKSWQAENILPRSTERLVRIIQKGLPRDA

SEQ ID NO: 74605 - protein, 377 aa, unidentified
  source 1..377: note = Arsukibacterium sp.
  REGION 1..377: note = tr|A0A0M2VCB8|A0A0M2VCB8_9GAMM Epoxyqueuosine reductase OS=Arsukibacterium sp. MJ3 OX=1632859 GN=queG; PE = 3 SV=1
MAIDYQLLATQIKQWALELGFQQLGITGTDISSEEPRLAAWLAQGFHGDMQYMAEHGMLRARPAELLPGTLRVLSVRMDYLPGQAGFATNLADPTKAYISRYALGRDYHKLVRKRLKQLAEKIKLAVPELGFRPFVDSAPVLERPLAQRAGLGWVGKHSLLLNHGSGSWFFLGELLVDIPLPVDEPHQGDCGSCVACITSCPTGAIVAPYVVDGRRCISYLTIELKTAIPEELRPLIGNRIYGCDDCQLVCPQNRDAPLSIESDFQRREQWQDQGLLQLFAWDETTFLRHTEGSAIRRIGFERWQRNIAVALGNAPYEANIVASLQAAKATSTALVLEHINWAVAQQQRKSWQAANLLPRATERLVRIIQKGLPRDA

SEQ ID NO: 74606 - protein, 341 aa, unidentified
  source 1..341: note = Arthromitus sp.
  REGION 1..341: note = tr|F9VLR1|F9VLR1_ARTSS Iron-sulfur cluster-binding protein OS=Arthromitus sp. (strain SFB-mouse-Japan); OX = 1029718 GN=SFBM_1309 PE=4 SV=1
MIINKMDNELRKTLIDYMNSLDILYGFTECRKFIELYDYLKIKSDRRYLTEFESLDIEDRINPFLYLENGETIISIAVPYYRENSSYNQMFSKYTQGEDYHKVVLSYLEKISHFIELSGYEYRLFCDTNNLPERYIAYLCGIGHIGRNSMVYTSKYGSYVFLGEIITNAKLSMKNSCEYYEKKFNDIGLFEKCGICNKCLHRCPNKVLFDKNFRCCVSNLTQQKKLGLHDIEGLNGMIFGCDICQDKCPKNKNVEYSSIDRFDALEFIKNISDEDIVNMNNSFFKKNFKKVACSWRGKKILQRNSLIKNRYNKDFLCRLSLENNDELNNYKNLFLDNNFEE

SEQ ID NO: 74607 - protein, 309 aa, unidentified
  source 1..309: note = Arthrospira maxima
  REGION 1..309: note = tr|B5VYS7|B5VYS7_LIMMA Epoxyqueuosine reductase; OS = Arthrospira maxima CS-328 OX=513049 GN=queG PE=3 SV=1
MAASVDRSQIQQYLLDLGFDQVGFTPATSTPEEVEGLRLWLKAGYQADLAWMDNPKRQDIRLVMPEVRSLICVAINYYTPHQHKHEPQYAKISRYGWGRDYHRILHKKLKQFCQWLKQQGEHIEARYYADTGPIQDKLWAQRAGLGWIAKNGNLITRNYGSWVFLGEVLTNLVLEYDRPHTEHCGTCTRCLSACPTNAIAQPFVVDANRCIAYHTIENRAETLPPEIATNLHNWVAGCDICQDVCPWNQRFAKPTKEAAFNPYPENLAPTLEELATISDETWSERFTASALRRIKPYMWRRNAQANMKS

SEQ ID NO: 74608 - protein, 309 aa, unidentified
  source 1..309: note = Arthrospira platensis
  REGION 1..309: note = tr|D4ZNR3|D4ZNR3_ARTPN Epoxyqueuosine reductase; OS = Arthrospira platensis (strain NIES-39 / IAM M-135); OX = 696747 GN=queG PE=3 SV=1
MAASVDRSQIQQYLLDLGFDQVGFTPATTTPEEVEGLRLWLQAGYQADLAWMDNPKRQDIRLVMPEVRSLICVAINYYTPHQHKNEPEYAKISRYGWGRDYHRILHKKLKQFCQWLKQQGEDIEARYYADTGPVQDKLWAQRAGLGWIAKNGNLITRNYGSWVFLGEVLTNLVLEYDRPHTEHCGTCTRCLSACPTNAIAEPFVVDANRCIAYHTIENRAENLPPEIATNLNNWVAGCDICQDVCPWNERFAKPTKEAAFNPYPENLAPTLEELATISDETWNERFTASALRRIKPYMWRRNAQANMKF

SEQ ID NO: 74609 - protein, 309 aa, unidentified; identical to SEQ ID NO: 74607
  source 1..309: note = Arthrospira platensis
  REGION 1..309: note = tr|K1W1H5|K1W1H5_ARTPT Epoxyqueuosine reductase; OS = Arthrospira platensis C1 OX=459495 GN=queG PE=3 SV=1

SEQ ID NO: 74610 - protein, 281 aa, Arthrospira sp.
  REGION 1..281: note = tr|A0A328V2C0|A0A328V2C0_9CYAN tRNA epoxyqueuosine(34) reductase QueG (Fragment); OS = Arthrospira sp. O9.13F OX=1982223 GN=queG PE=4 SV=1
STPEEVEGLRLWLKAGYQADLAWMDNPKRQDIRLVMPDVRSLICVAINYYTPHHHKHEPQYAKISRYGWGRDYHRILHKKLKQFCQWLKQQGEHIEARYYADTGPIQDKLWAQRAGLGWIAKNGNLITRNYGSWVFLGEVLTNFVLEYDRPHTEHCGTCTRCLSACPTNAIAQPFVVDANRCIAYHTIENRAETLPPEIETNLNNWVAGCDICQDVCPWNQRFAKPTKEAAFNPYPENLAPTLEELATISDETWSERFTASALRRIKPYMWRRNAQANMKS

SEQ ID NO: 74611 - protein, 300 aa, unidentified
  source 1..300: note = Asaccharospora irregularis
  REGION 1..300: note = tr|A0A1M5JHF6|A0A1M5JHF6_9FIRM Epoxyqueuosine reductase OS=Asaccharospora irregularis DSM 2635; OX = 1121321 GN=SAMN04488530_101136 PE=4 SV=1
MDKLKLREFCNSIGLKCMGIAGVGPYYDLEKKLIDRIEKNYITGMEEEALEKRINPKLTLEDANSVIVIAFPYYIGECGNSNISKYCYGKDYHIVVKDKLQQICDYIDKEVEGFNYKIFSDNGPLVDRYMAYLSGIGYFGINNNIITDQYGSYVFIGYIINNYEFVLDKPTDKTCLKCGKCVKYCPGNALLGNYNMDPRKCLSYISQKKGDLSKDEEKKLNKNKKVFGCDICQEVCPHNIGIKTTDIDEFKEDLIKVIDHEEINNISNKEFKRRYKDRAFSWRGKNIIKRNLEIISKEFE

SEQ ID NO: 74612 - protein, 353 aa, Asaia bogorensis
  REGION 1..353: note = tr|A0A0P0YEH9|A0A0P0YEH9_9PROT Epoxyqueuosine reductase OS=Asaia bogorensis NBRC 16594 OX=1231624; GN = queG PE=3 SV=1
MSKSIEDRIADHARHLGFDAIGFCDATLPEEARTRLRQFVEDGRHGTMSWMEQRIDQRGDPKALWPEVRSVISLGLSYAPKADPAETLDQPDTGTISVYARHRDYHDVLKGMLKHLAQFVVRQDVGGDGTQVKVFVDTAPVMEKPLAEQAQLGWQGKHTNVVSRDHGSWLLLGEIYTTLDLTPSPPRAGSCGSCTRCLTACPTDAFPRPYALDARRCIAYLTIEHDGPIPVEFRKSMDNRIYGCDDCLNACPWNRFAATSRHMKLQPRADLMAPRLDDLARLDDAGFRSFFSGSPIKRIGRNRFVRNVLIALGNSRNTDHLALIETLTGDENPMVAEAAEWARAELLGNEDNE

SEQ ID NO: 74613 - protein, 353 aa, Asaia platycodi
  REGION 1..353: note = tr|A0A060QLC0|A0A060QLC0_9PROT Epoxyqueuosine reductase OS=Asaia platycodi SF2.1 OX=1382230 GN=queG PE=3; SV = 1
MSKSIEDRIADHARHLGFDAIGFCDATLPEEARTRLKQFVEDGRHGTMSWMEQRIDQRGDPKALWPEVRSVISLGLSYAPEADPAETLDQPDKGTISVYARHRDYHDVLKGMLKHLAQFVVRQEVGGDGTQVKVFVDTAPVMEKPLAEQAQLGWQGKHTNVVSRDHGSWLLLGEIYTTLDLTPSPPRAGSCGSCTRCLTACPTDAFPRPYALDARRCIAYLTIEHDGPIPVEFRKAMGNRIYGCDDCLNACPWNRFAATSRHMKLQPRADLMAPRLEDLARLDDAGFRSFFSGSPIKRIGRNRFVRNVLIALGNSHNTDHLALIETLTGDENPMVAEAAEWARAELLGQEDNE

SEQ ID NO: 74614 - protein, 353 aa, Asaia sp.
  REGION 1..353: note = tr|A0A433WZB5|A0A433WZB5_9PROT Epoxyqueuosine reductase OS=Asaia sp. W19 OX=2067395 GN=queG PE=3 SV=1
MSKSIEDRIADHARHLGFDAIGFCDASLPEEARTRLRQFVEDGRHGTMSWMEQRIEQRGDPKALWPEVRSVISLGLSYAPEADPAETLDQPDTGTISVYARHRDYHDVLKGMLKHLAQFVVRQDVGGDGTQVKVFVDTAPVMEKPLAEQAQLGWQGKHTNVVSRIHGSWLLLGEIYTTLELTPSPPRAGSCGSCTRCLTACPTDAFPRPYALDARRCIAYLTIEHDGPIPVEFRKAMGNRIYGCDDCLNACPWNRFAATSRHMKLQPRADLMAPRLDDLARLDDAGFRSFFSGSPIKRIGRNRFVRNVLIALGNSGNRAHLPLVTHLTQDESPIVADAAAWAQTELQEAASNE

SEQ ID NO: 74615 - protein, 347 aa, unidentified
  source 1..347: note = Ascidiaceihabitans donghaensis
  REGION 1..347: note = tr|A0A2R8B900|A0A2R8B900_9RHOB Epoxyqueuosine reductase OS=Ascidiaceihabitans donghaensis OX=1510460; GN = queG PE=3 SV=1
MDDLKDRLVARALEEGFVMARVCRPDAVPDVPARLSAFVDAGFHGQMGWMADRIAWRGDPSALWPDARSVLMLAESYAPEFDPRDVLAMSEKGAISVYAQNRDYHDIVKKRLKRLARWLIAEAGGEVKVFVDTAPVPEKALGMAAGLGWQGKHTNLVSRDWGNWAFLGSVFTTLDLIPDTPEVDHCGSCRACLDACPTDAFPAPYQLDARRCISYLTIEHKGPVAEELRSLMGNHIYGCDDCLAACPWNKFAVAASDIRYAARDDLAAPDLAALVGLDDAAFRAKFSGSPVKRIGRDRFVRNVLYAIGNSGVLTFRDAAQALCEDPDATVSDAARWAVTQLDKTCRT

SEQ ID NO: 74616 - protein, 375 aa, Asticcacaulis benevestitus
  REGION 1..375: note = tr|V4RRF9|V4RRF9_9CAUL 4Fe-4S ferredoxin-type domain-containing protein OS=Asticcacaulis benevestitus DSM 16100 = ATCC BAA-896 OX=1121022 GN=ABENE_05425 PE=4; SV = 1
MTLADAIRTEAHSLGFSAARFAALPEVWAASERLKVFVEAGFHGDMRWMEETLERRQHPQNMWHGAQSALVLGYNYGPDSDPLELLDKTGAANISVYARGDDYHDLIKKKLKQLAGWIVNETGCELKVFVDTAPLMEKPLAALAGIGWQGKHTNVVSREFGSWLFLGVILLDRVIADDAPERDHCGSCQACLDICPTQAFVGPYRLDARKCLSYLTIEYRGPWPETYRRAMGNRIYGCDDCLAACPWNKFAQATHETKLQARQGFDNLKLTDLAGLDDASFRTLFSKSPIKRIGRESFLRNVNYAMGNHFRKTGSAEVETALRQGMTDENPVVRGAAIWALKQGLSVASFSAIRSEVSVCEHDDRVLAEWEGRYD

SEQ ID NO: 74617 - protein, 376 aa, unidentified
  source 1..376: note = Asticcacaulis biprosthecum
  REGION 1..376: note = tr|F4QL17|F4QL17_9CAUL Epoxyqueuosine reductase; OS = Asticcacaulis biprosthecum C19 OX=715226 GN=queG PE=3; SV = 1
MIDLAQAIRQEAQSLGFAAARFAALPDVWDAADRLSAFVAAGYHGDMAWMEETLDRRRHPRNMWPDAQSALVLAYNYGPDSNPLELLAEPETANISVYARGDDYHDLIKKKLKQLATWIVNQTGCELKVFVDTAPLMEKPLAQLAGLGWQGKHTNLVSRDLGSWFFLGVILFDCVFEAGQPERDHCGSCQACLTACPTDAFTGPYQLDARRCLSYLTIEFRGAWPESFRHAMGNRIYGCDDCLAACPWNKFATAAADIKLQTRQGFDKLLLTDLAGLDDTAFRALFSKAPIKRIGRTSFLRNVQYALGNAVKSSKNPELLVAIHRGLTDREPVIRGAAVWALNQTGDADAIEQASELYRDSEADEAVKRAWEGRYD

SEQ ID NO: 74618 - protein, 388 aa, Asticcacaulis excentricus
  REGION 1..388: note = tr|A0A3G9G474|A0A3G9G474_9CAUL Epoxyqueuosine reductase OS=Asticcacaulis excentricus OX=78587 GN=queG; PE = 3 SV=1
MDAPPDNPAAHRETGFKADITARAKALGFSSVGFTNLPQAWDAAQRLKAFIAAGFHGEMTWMEETLERRLHPQNMWNGAKSAIVLGFNYGPDSDPLLGLSERDLANISVYARGDDYHDVIKKKLKQLASDIVAAYGCELKVFVDTAPLMEKPLAQLAGLGWQGKHTNLVSREFGSWLFLGSILTDMELPQSLTERDHCGSCRACLDACPTDAFVGPYQLDARECLSYLTIEFRGHWPDRFRAAMGNRVYGCDDCLAACPWNKFAVEASEAKLKAREGFNALSLVELAQLDDAAFRTLFSKSPIKRIGLATFLRNVHYALGNSFDDLVDPDKVAVLTRNLNHDSPVVRGSAVWALSRGLSAEDFRALRAQHLPQEDDPDVWSEWSRHVA

SEQ ID NO: 74619 - protein, 388 aa, Asticcacaulis excentricus
  REGION 1..388: note = tr|E8RLK5|E8RLK5_ASTEC Uncharacterized protein; OS = Asticcacaulis excentricus (strain ATCC 15261 / DSM 4724 / VKM B-1370 / CB 48) OX=573065 GN=Astex_2088 PE=4 SV=1
MDMRPDSPAAHKVTGFKADITTRAMALGFSSVGFTNLPQEWDAAQRLKAFIGAGYHGEMKWMEETLERRLHPQNMWNGAKSAIVLGFNYGPDSDPLLGLSERDLANISVYARGDDYHDVIKKKLKQLATDIVAAYGCELKVFVDTAPLMEKPLAQLAGLGWQGKHTNLVSREFGSWLFLGSILTDMELPQSLIERDHCGSCRACLDACPTDAFVGPYQLDARECLSYLTIEFRGHWPDRFRTAMGNRVYGCDDCLAACPWNKFAVAASEAKLKAREGFNALSLVELAQLDDAAFRALFSKSPIKRIGLATFLRNVHYAMGNSFDDLVDPDKIAALTRNLSHDSPVVRGSAVWALSRGLSAEDFGALRSQHLPQEDDPDVWSEWSRHVA

SEQ ID NO: 74620 - protein, 359 aa, Asticcacaulis sp.
  REGION 1..359: note = tr|A0A258B7M3|A0A258B7M3_9CAUL tRNA epoxyqueuosine(34) reductase QueG (Fragment); OS = Asticcacaulis sp. 32-58-5 OX=1970317 GN=B7Z26_08220; PE = 4 SV=1
MKAKPKTLPPELFSAAFKAAVRAEALALGFADLRYLNIPSSWAASERLRAFVKAGLHGQMHWIEDTLDRRAHPTAMWPDAKSAIVLGFNYGPDSDPLEQLEHPQTANISVYARGDDYHDLIKKKLKALGGFIAQNFDCQLKVFVDTAPLMEKPLAHLSGLGWQGKHTNLVSRQFGSWLFLGVILTDRVLESDRFEPDHCGSCQACLTACPTEAFIGPYQLDARKCLSYLTIEYKGGWPEVFRHQMGNRIYGCDDCLAACPWNKFAQTTQEIKLAQRDGFDQLRLVDLARLDDEAFRALFAKSPIKRIGLASFLRNVHYAIGNAVAGTKDAEMIAVLNDNLTREQSVVRASAVWALKQAM

SEQ ID NO: 74621 - protein, 390 aa, Asticcacaulis sp.
  REGION 1..390: note = tr|V4QPT4|V4QPT4_9CAUL 4Fe-4S ferredoxin-type domain-containing protein OS=Asticcacaulis sp. YBE204; OX = 1282363 GN=AEYBE204_02275 PE=4 SV=1
MQPPHPRRAAPNPLPKGARGLIEQKALDLGFATVGFVNLPQTWDAAERLKAFVAEGYHGAMTWMEETLERRQHPQNMWNGAKSAIVLGFNYGPDSDPLLGLGTPDIANISVYARGDDYHELIKKKLKLLATDVVKLAGCEVKVFVDTAPLMEKPLAQLAGLGWQGKHTNLVSREFGSWMFLGVILTDMELPEDAAEKDHCGSCRSCLDVCPTNAFVAPYQLDARSCLSYLTIEYRGPWPKRFREQMGNRIYGCDDCLAACPWNKFAQSATEAKLMARDGATAMPLFELAQLDDPAFRALFSKSPIKRIGLATFLRNVHYAIGNSFGELVDFEKIDPLVRNLRHESPVVRGSAVWALSRGLPPQDFEYLRDMCLADETDPDVLAEWRQDIA

SEQ ID NO: 74622 - protein, 377 aa, Asticcacaulis taihuensis
  REGION 1..377: note = tr|A0A1G4T4H8|A0A1G4T4H8_9CAUL Epoxyqueuosine reductase OS=Asticcacaulis taihuensis OX=260084 GN=queG; PE = 3 SV=1
MSDLAASIRQQAHVLGFSAARFAALPDVWAASERLQVFVEAGFHGEMTWMEETLERRKHPRNMWSGAQSALVLGYNYGPDSDPLALLAETDTASISVYARGDDYHELIKKKLKQLATWIVGQIGCELKVFVDTAPLMEKPLAALAGLGWQGKHTNLVSREFGSWLFLGVILLDRVIAEDTPERDHCGSCRACLDICPTNAFEGPYRLDARKCLSYLTIEYRGPWPEIYRRAMGNRIYGCDDCLAVCPWNKFASATHEIKLQVREGFESLKLTDLVGLDDASFRALFSKSPVKRIGRESFLRNVHYALGNHFRVSRHPETGAVLERSLDEENPVVRGAAVWALKQGLGPEAFARLRVQKVAGETDADVLKEWEGGHAQ

SEQ ID NO: 74623 - protein, 305 aa, unidentified
  source 1..305: note = Atelocyanobacterium thalassa
  REGION 1..305: note = sp|D3ENT3|QUEG_ATETH Epoxyqueuosine reductase; OS = Atelocyanobacterium thalassa (isolate ALOHA) OX=1453429; GN = queG PE=3 SV=1
MLSITEEIKNKGRDIGFHKIGIANPHIAYQDNAVSNLQGWLSSGYQADMTWMDNPKRFDITQCMPDIQSVITVALNYYTPHQHSSNSRYGKVSRYAWGKDYHKVLSQKLKLFCKWLNNRGIKTTCYVDTGPIQEKVWAERSGVGWIAKNGNVITKEFGSWVFLGVVLTNLSLTSDTPHAKYCGTCRKCLDICPTKAIVHPFVVDSRRCIAYNTIENRSNDFPEYIKNNLNGWIAGCDLCQDVCPWNKRFSKETNIQDFYPQPGNISLDLKEISNLTEIQWQQKFSSSSLKRIKVKAWRRNAKANL

SEQ ID NO: 74624 - protein, 379 aa, unidentified
  source 1..379: note = Atlantibacter hermannii
  REGION 1..379: note = tr|A0A447LU33|A0A447LU33_ATLHE Epoxyqueuosine reductase OS=Atlantibacter hermannii OX=565 GN=yjeS PE=3; SV = 1
MSQPLDLTLLAQKIKQWGTELGFQHVGITDTDLSPHEPALQAWLDKQYHGEMEWMARHGMMRARPHELLPGTLRVISVRMNYLPADAAFARTLKEPSLGYISRYALGRDYHKLMRNRLKKLGETIQAQYASLNFRPFVDSAPVLERPLAAKAGLGWTGKHSLILDRNAGSFFFLGELLVDIPLPVDKPVEEGCGRCVACMTICPTGAIVEPYTVDARRCISYLTIELEGAIPEEFRPLIGNRIYGCDDCQLICPWNRFSQLTDEADFSPRQALHNPKLIELFGWSEAHFLKMTEGSAIRRIGHIRFLRNIAVALGNAEWDPANIDALTKRKGEHPLLDEHIEWAIAQQLTKRNANAVDVQSSQKQRLVRVIEKGLPRDA

SEQ ID NO: 74625 - protein, 379 aa, unidentified; identical to SEQ ID NO: 74624
  source 1..379: note = Atlantibacter hermannii
  REGION 1..379: note = tr|H5UZB0|H5UZB0_ATLHE Epoxyqueuosine reductase; OS = Atlantibacter hermannii NBRC 105704 OX=1115512 GN=queG; PE = 3 SV=1

SEQ ID NO: 74626 - protein, 379 aa, unidentified
  source 1..379: note = Atlantibacter subterranea
  REGION 1..379: note = tr|A0A427UU88|A0A427UU88_9ENTR Epoxyqueuosine reductase OS=Atlantibacter subterranea OX=255519 GN=queG; PE = 3 SV=1
MSEPLDLNLLAQNIKQWGAELGFQHVGITDTDLSPHEPALQAWLDKQYHGEMEWMARHGMMRARPHELLPGTLRVISVRMNYLPTNAAFARTLKDPSLGYISRYALGRDYHKLMRNRLKKLGETIQQQYASLNFRPFVDSAPVLERPLAAKAGLGWTGKHSLILDRNAGSFFFLGELLVDIPLPVDQPVEEGCGRCVACMTICPTGAIVEPYTVDARRCISYLTIELEGAIPEEFRPLIGNRIYGCDDCQLICPWNRFSQLTVEADFSPRQALHSPKLIELFGWSEAHFLKMSEGSAIRRIGHVRFLRNIAVALGNAAWDEANIAALTKRKGEHPLLDEHIDWAIAQQLTRRNADAVEVQLPQKQRLVRVIEKGLTRDA

SEQ ID NO: 74627 - protein, 389 aa, Atopobacter sp.
  REGION 1..389: note = tr|A0A421BHA1|A0A421BHA1_9LACT tRNA epoxyqueuosine(34) reductase QueG OS=Atopobacter sp. AH10; OX = 2315861 GN=queG PE=4 SV=1
MKAEEYKQAIRHYAMEELNIQKIGFTDASPFLEYEEGLRKKQREGLLSGFEHPIIEERIYPDRIFDQPKTILSLALAYPTKPKEKLERKKGERRGAFARVSWGVDYHTLMAKKLALLEDYIKELIPGVRCKSMVDTGELIDVAVAQRAGLGFIGYNGLLVTKEYGSYVYLGDMILSVALPPDKAMANQCGECRRCVQFCPTGALLGNGSMNPHRCLSFQTQNKQFMGKEFRRKMSHVIYGCDICQQVCPYNRGMDFHLHPEMEDDPQTIFPELTELLTLSNREFKEKFGHLSGAWRGKKPLQRNAIIALANYKDKTAVPSLLELMEKDARPVIVGTSAWAVAEIIATSSVELERFFKEVQERFPEDEDFQTEMNQALHRLREKETDRSS

SEQ ID NO: 74628 - protein, 385 aa, Atopostipes suicloacalis
  REGION 1..385: note = tr|A0A1M4Y2D3|A0A1M4Y2D3_9LACT Epoxyqueuosine reductase OS=Atopostipes suicloacalis DSM 15692 OX=1121025; GN = SAMN02745249_01583 PE=4 SV=1
MVNVALKELIREKAYDIGIDKIGFTHAEPFYELEESLKKQHKKGHQSGFEHKILKERIYPELIFDQPETIISIALAYPSKIKNQPKRVRGERRGEFARASRGRDYHFVLQEHIDQLVDYMKNVLGEEAEFKSMVDTGELIDVAVASRAGIGFIGRNGLLITKEFGSYVYLGEIITNIPFEPDPPVGYNCGDCWRCINGCPTQALLGNGEMNAKKCLSYQTQTKSYMPENYRKSMRHVIYGCDICQIVCPYNQGIDFHLHEEMEPDYERVHPRLEPMLTISNKKFREQFGQMAGSWRGKKPLQRNAIIALANYRDRRSIPTLLKLIEDDPRPMIRGTAAWAISKIMVKNPNKEIISFLQEALTIEEDSETIDEFTQAIKRLEENIE

SEQ ID NO: 74629 - protein, 324 aa, Aulosira laxa
  REGION 1..324: note = tr|A0A1Z4U6S8|A0A1Z4U6S8_9CYAN Epoxyqueuosine reductase OS=Aulosira laxa NIES-50 OX=1541988 GN=queG PE=3; SV = 1
MNSSSITTSDVVKKKAQELGFHKVGIAAVDGVDETAAQRLQAWLALGYNAEMAWMANPKRQDIHLIMPEARSLICVALNYYTPHQRPEGKEYGNISRYGWGRDYHKVMHKKLKALNNWVQSLSENIQARYYADTGPVQDKLWAQKSGIGWIAKNGNVITREYGSWVFLGEIITNLELECDRPATEHCGTCTRCLEACPTSAITQPYVVDANRCIAYHTIENRAEQLPPNVKPHLQGWVAGCDICQDVCPWNQRFAKSTDVEQFNPYPGNLAPKLLELAEISEEEWERQFTASALRRIKPEMLRRNARANLDASRQQNDADSDYF

SEQ ID NO: 74630 - protein, 381 aa, Aurantimonas manganoxydans
  REGION 1..381: note = tr|Q1YEV5|Q1YEV5_AURMS Epoxyqueuosine reductase; OS = Aurantimonas manganoxydans (strain ATCC BAA-1229 / DSM 21871 / SI85-9A1) OX=287752 GN=queG PE=3 SV=1
MTARETLTDFIRKDAGRLGFSAVGIAPGTGDVAAGPRLDEFIAKGRYGTMGWMPETAERRRSARALWPDVRSIVVLGMNYGPQDDPLAILQRPDRGAISVYARHRDYHDVIKGRLKELAGRMVAKARQSGLGEHDAKVFVDTAPVMEKPLGEMAGLGWQGKHTNLVSREHGSWLFLGSIFTTLEMTPDAPGRDLCGSCRACQDVCPTDAFPEPYKLDARRCISYLTIETRKPVPQEFRAAMGNRIYGCDDCLAVCPWNKFAGKASEAKLIAREDLNAPTLADLLALDDAAFRALFSGSPIKRIGRDKFVSNCLIAAGNSGDATLLGAVREHLTDAAPLVRAMAIWALARLSPEDALQRRSAALDREDDPVVRSEWHALQGP

SEQ ID NO: 74631 - protein, 381 aa, Aurantimonas sp.
  REGION 1..381: note = tr|A0A2D9K8I4|A0A2D9K8I4_9RHIZ Epoxyqueuosine reductase OS=Aurantimonas sp. OX=1872654 GN=queG PE=3 SV=1
MTARETLTDFIRKDAGRLGFSAVGIAPGTGDVAAGPRLDEFIAKGRYGTMGWMPETAERRRSARALWPDVRSIVVLGMNYGPQDDPLAILERPDRGAISVYARHRDYHDVIKGRLKELAGRMVARARQSGLGDHDAKVFVDTAPVMEKPLGEMAGLGWQGKHTNLVSREHGSWLFLGSIFTTLEMTPDAPGRDLCGSCRACQDVCPTDAFPEPYKLDARRCISYLTIETRKPVPQEFRAAMGNRIYGCDDCLAVCPWNKFAGKASEAKLIAREDLNAPKLADLLALDDAAFRALFSGSPIKRIGRDKFVSNCLIAAGNSGDAALLGAVREHLADAAPLVRAMAIWALARLSPEDALQRRPAALDREDDPVVRSEWHALKGP

SEQ ID NO: 74632 - protein, 376 aa, Aurantimonas sp.
  REGION 1..376: note = tr|A0A0Q6EPE3|A0A0Q6EPE3_9RHIZ Epoxyqueuosine reductase OS=Aurantimonas sp. Leaf443 OX=1736378; GN = ASG48_12000 PE=4 SV=1
MTPDALKAFARTDAARLGFDAFGVAPGTGDVTAADRLDAFVEAGRHGTMDWLPETAGRRRSARALWPDVRSILVLGMNYGPDEDPLSILERRERGAISVYARHRDYHDVIKGRLKELGQRLLARAGQGEMKVFVDTAPVMEKPLGQMAGLGWQGKHTNLVSRDFGSWLFLGSVFTTLDLLPDAPGRDLCGSCTACQTACPTDAFPQPYQLDARRCLSYLTIETRNPIPRAFRAAMGNRIYGCDDCLAVCPWNKFAVSAREAKLVARQDLKAPALADLLALDETGFRTLFSGSPIKRVGHAKFVSNCLVAAGNSGKAELLPAVLARLADPAPLVRAMAVWALARLSARDALERRADALHNEEDAMVRSEWHVLAQED

SEQ ID NO: 74633 - protein, 379 aa, unidentified
  source 1..379: note = Aureibacillus halotolerans
  REGION 1..379: note = tr|A0A4R6TR27|A0A4R6TR27_9BACI Epoxyqueuosine reductase OS=Aureibacillus halotolerans OX=1508390; GN = EV213_12157 PE=4 SV=1
MLKEDLIAYSKTIGIDDIGFASADPFLTLKERLKQQQALNYQSGFEESDIEKRTHPELLLPQAKSIIAIALAYPSKMKNTPKSTKEDPRGLFCRASWGEDYHTVLRDRLDKLQAYLQERVPEAYVTSMVDTGELSDRAVAERAGIGFSAKSCAIISPIYGSYIYLGEMITSVPFEPDTPVEDGCGTCNICVEACPTGALVQGGQLDAKKCISFLTQTKGFLQDEYRKVIGNRLYGCDTCQTVCPKNRGVDFHTQPEFEPDPEKVKPLLKPLLTISNREFKDTYGRMSGSWRGKKPIQRNAILALAIYKDDTALPLLEELIKSDPRPVIRGTAAWSYGKIAANKQPEALRFLSERLEVEEDEEVREEIQKGLRFEKEITP

SEQ ID NO: 74634 - protein, 309 aa, unidentified
  source 1..309: note = Aureicoccus marinus
  REGION 1..309: note = tr|A0A2S7T7E0|A0A2S7T7E0_9FLAO Epoxyqueuosine reductase OS=Aureicoccus marinus OX=754435 GN=queG PE=3; SV = 1
MIQQSLREKHTEMIKTEAQRLGFLSCGVSKADFLEEEAPRLEQWLKQGMHGQMHYMENHFDKRLDPRLLVPGAQSVISLLLNYYPDEQQNEESYKISKYAYGEDYHFVIRDKLKELLAFIRDHIGEVDGRGFVDSAPVLDKAWAAKSGLGWIGKHSNLLSQKVGSFYFIAELIVDLPLVYDTPVTDHCGSCTACIDACPTQAIIAPYQVDGSKCISYFTIELKDELPSAMSGQFDDWMFGCDVCQDVCPWNRFSSPHAEPRFNPHPELLSMTKRDWEEITEEVFRKVFKKSAVKRTKFSGLNRNITFLE

SEQ ID NO: 74635 - protein, 386 aa, Aureimonas altamirensis
  REGION 1..386: note = tr|A0A0B1Q2R7|A0A0B1Q2R7_9RHIZ 4Fe-4S ferredoxin; OS = Aureimonas altamirensis OX=370622 GN=LA66_17235 PE=4; SV = 1
MSPPAEDRFRSFLETEARRLGFDAVGIASARTDDVVVERFDTFVEEGRYGTMGWIAETAARRRGVTSMWAEARSVIVLGMNYGPGFDPLEALENKAQGVISVYARNRDYHDVIKGRLKELAGRLMGRIRQMRPDENHSVKVFVDTAPLLEKPLGQAAGLGWQGKHTNLVSREHGSWLFLGSIATTLSLTPDTAATDACGSCRACQDICPTDAFPAPYQLDARRCISYLTIETKALVPRALRPAMGNRIYGCDDCLAVCPWNKFASTAREARLQARDDLKAPSLESLMRLTDADFRVFFSGSPVKRIGRDKFVSNCLIAAGNSGLAALLPEVTRLLRDEAALVRAMAVWAFGRLSPAGALAARDAALVYENDDLVRGEWHALVETSR

SEQ ID NO: 74636 - protein, 389 aa, Aureimonas altamirensis
  REGION 1..389: note = tr|A0A1M6N890|A0A1M6N890_9RHIZ Epoxyqueuosine reductase OS=Aureimonas altamirensis DSM 21988 OX=1121026; GN = SAMN02745911_3683 PE=4 SV=1
MDALPPPAEDRFRSFLETEAHRLGFDAVGVASARTDEVVVERFDTFVEEGRYGTMGWIAETAERRRGVTSMWAEARSVIVLGMNYGPGFDPLEALENKAQGVISVYARNRDYHDVIKGRLKELAGRLMGRIRQMRPDESHSVKVFVDTAPLLEKPLGQAAGLGWQGKHTNLVSREHGSWLFLGSIATTLALTPDTAASDACGSCRACQDICPTDAFPAPYQLDARRCISYLTIETKALVPRALRPAMGNRIYGCDDCLAVCPWNKFASTAREARLQARDDLNAPSLESLMRLTDADFRALFSGSPVKRIGRDKFVSNCLIAAGNSGLDALLPQVTRLLGDEAALVRAMAVWAFGRLSPSGALAARDAALVNEDDDLVRGEWHALVETSR

SEQ ID NO: 74637 - protein, 384 aa, unidentified
  source 1..384: note = Aureimonas flava
  REGION 1..384: note = tr|A0A3A1WGI1|A0A3A1WGI1_9RHIZ Epoxyqueuosine reductase OS=Aureimonas flava OX=2320271 GN=queG PE=3 SV=1
MADTLPSAALRRFLEADARRLGFEAVGVARAAQDALAGERLDAFVAAGHHGTMDWLPETVERRRSVTALWPAARSVIVLGLNYGPDEDPLAILRRADRGAISVYARHRDYHDVVKGKLKELAGRLVARAGPGADGRAHDAKVFVDTAPLMEKPLGQAAGLGWQGKHTNLVSRHFGSWLFLGSVVTTIALEPDRAGADLCGSCRACQDACPTGAFPAPYRIDARRCISYLTIETRAPVPRSLRPSMGNRIYGCDDCLAVCPWNKFAATAREAKLRARDDLRAPRLADLLALDDAAFRRLFSGSPVKRIGRDKFVSNCLIAAGNSGDPALLDPVRRRLADAASAVRAMAVWALATLARDEALAMRPAAVHNEADHDVRSEWHAIDA

SEQ ID NO: 74638 - protein, 363 aa, Aureimonas frigidaquae
  REGION 1..363: note = tr|A0A0P0Z097|A0A0P0Z097_9RHIZ Iron-sulfur cluster-binding protein OS=Aureimonas frigidaquae; OX = 424757 PE=4 SV=1
MGVAPAAGRDASGARLEQFVNEGLHGTMDWMADTLERRRTVGALWHEARSVIVLGMNYGPAHDPLADLQRRDRGVISVYAQNRDYHDVIKGRLKELAAKLLARARQVLPGEEHGVKVFVDTAPLMEKPLGEAAGLGWQGKHTNLVSREFGSWLFLGSILTTLDLSPDAPGRDLCGSCTACQDICPTKAFPAPYRLDARRCISYLTIETRRPIPRALRAAMGNRIYGCDDCLAVCPWNKFAQAAREARLIGRPELRAPALRDLMALDDAGFRDGFAGSPVKRIGRDKFVSNCLIAAGNAADPSLLPDVEARLDDAAPIVRAMAVWAYGRLAPDRAAARSRQALADEPDAGVRAEWLAVGGTDAA

SEQ ID NO: 74639 - protein, 387 aa, unidentified
  source 1..387: note = Aureimonas jatrophae
  REGION 1..387: note = tr|A0A1H0IT95|A0A1H0IT95_9RHIZ Epoxyqueuosine reductase OS=Aureimonas jatrophae OX=1166073 GN=queG PE=3; SV = 1
MADPLSPAALRRFLDADARRLGFDAVGVARASENTAAAAGLEAFVDAGFHGTMGWLPETASRRRSVGSLWPEARTVIVLGLNYGPDEDPLAINARPDRGAISVYARHRDYHDVVKGKLKELAGRLLARAGTQADGEPHGVKVFVDTAPLMEKPLGQAAGLGWQGKHTNLVSRAHGSWLFLGSILTTLDLAPDEPGEDSCGSCRRCQDACPTHAFPEPYRLDARRCISYLTIETRHVVPRDLRAPIGNRVYGCDDCLAVCPWNKFASAAREAKLRARDDLRAPALSELLALDDRAFRALFAGSPIKRIGRDKFVSNCLIAAGNSADPALLPPVRERLGDAAPLVRAMAVWALARLAPADALAARAAALHNERDDLVRSEWDAIDRQDA

SEQ ID NO: 74640 - protein, 391 aa, unidentified
  source 1..391: note = Aureimonas phyllosphaerae
  REGION 1..391: note = tr|A0A1I2GY89|A0A1I2GY89_9RHIZ Epoxyqueuosine reductase OS=Aureimonas phyllosphaerae OX=1166078; GN = SAMN05216566_1055 PE=4 SV=1
MADALPLPALRRFLDADARRLGFDAVGVATPAEDALAGERLDAFLAAGHHGTMAWLPETAERRRAVTALWDEARSVVVLGLNYGPDEDPLAVNARTDRGAISVYARHRDYHDVVKGKLKELAGRMVARAGARPDGRPHDAKVFVDTAPLMEKPLGQAAGLGWQGKHTNLVSREFGSWLFLGSIATTIAFEPDAPGVDSCGSCRSCQDACPTGAFPQPYRIDARRCISYLTIETRAPVPRALRPLMGNRIYGCDDCLAVCPWNKFARTAREAKLQAREDLRAPRLEALLRLDDAAFRTLFSGSPVKRIGRDKFVSNCLIAAGNAGRPDLLPDVRRRLGDAAPVVRAMAVWALGRLAPEEALAARGEALAHEMNDEVRMEWDAIEGGRTNESC

SEQ ID NO: 74641 - protein, 403 aa, Aureimonas sp.
  REGION 1..403: note = tr|A0A0S2EIV5|A0A0S2EIV5_9RHIZ 4Fe-4S ferredoxin-type domain-containing protein OS=Aureimonas sp. AU20 OX=1349819 GN=M673_00745 PE=4 SV=1
MADPLSPSALRQFLDDDACRLGFSALGVAPAAEQGLSGARLDAFIADGFHGTMGWLPETAERRRSVEALWPEARAVIVLGLNYGPDEDPLALLDRPDRGAISVYARHRDYHDVIKGKLKELAGRLVARAGSRPDGRLHDAKVFVDTAPLMEKPLGEAAGLGWQGKHTNLVSRAFGSWLFLGSIATTIPLLPDRPGRDLCGSCRACQDACPTQAFPEPYRLDARRCISYLTIETRHPIPRAFRAPMGNRIYGCDDCLAVCPWNKFAQSAAEAKLRAREDLKAPALADLLELDDASFRALFSGSPVKRVGRDKFVSNCLIAAGNSGLPALLPSVERHLADPAPIVRAMAVWALAKLDPLRCLDLRPSALAGEEDQMVREEWDAALDALEIPPSAPGPTFPQRSHA

SEQ ID NO: 74642 - protein, 379 aa, Aureimonas sp.
  REGION 1..379: note = tr|A0A0Q6EI51|A0A0Q6EI51_9RHIZ Epoxyqueuosine reductase OS=Aureimonas sp. Leaf460 OX=1736384 GN=queG; PE = 3 SV=1
MNLHVTAPTALRAFLDADARRLGFDSLGIAAAGEGGVAGGRLEAFVAEGRHGTMGWMPETLERRRSARSLWPEVRSIIVLGMNYGPEEDPRALQGRPERGAISVYARNRDYHDVIKGRLKELGQRLIAKAGGGEMKVFVDTAPVMEKPLGEAAGLGWQGKHTNLVSRDFGSWLFLGSIFTTLDLVPDAPGRDLCGSCTACQEACPTDAFPRPYQLDARRCISYLTIETARPVPAEFRAAMGNRIYGCDDCLAACPWNKFASAAREAKLVAREELKAPPLADLLELDDAAFRAFFSGSPVKRAGRDKFVSNCLIAAGNSADPALLPAVRRRLEDEAGLVRAMAVWALSRLAPAEALAMRDAARHKEADAVARAEWDALLA

SEQ ID NO: 74643 - protein, 400 aa, Aureimonas ureilytica
  REGION 1..400: note = tr|A0A175RH20|A0A175RH20_9RHIZ 4Fe-4S ferredoxin; OS = Aureimonas ureilytica OX=401562 GN=NS365_19730 PE=4 SV=1
MADPLSLSALRRFLDEDARRLGFSSLGVAPAFDEGVSGARLEAFIASGFHGTMGWLPETAERRRSVNALWPEARAVIVLGLNYGPDENPLDLLQRPDRGAISVYARHRDYHDVIKGKLKELAGRLVARAGVQADGQPHDVKVFVDTAPLMEKPLGQAAGLGWQGKHTNLVSRTFGSWLFLGSIATTIPLEPDRAGQDLCGSCRACQDACPTQAFPEPYRLDARRCISYLTIETRRPIPREFRAAMGNRIYGCDDCLAVCPWNKFAQEASEAKLRAREDLKAPSLASLLALDDAGFRALFAGSPVKRIGRDKFVSNCLIAAGNSGDLAFVPLVTPHLSDAAPLVRAMAVWALGQLGAPDLASMRKAALAHEDDPLVREEWAATIALPSDIFSPASSGDLTR

SEQ ID NO: 74644 - protein, 400 aa, Aureimonas ureilytica
  REGION 1..400: note = tr|A0A147DAY7|A0A147DAY7_9RHIZ 4Fe-4S ferredoxin; OS = Aureimonas ureilytica OX=401562 GN=NS226_00425 PE=4 SV=1
MADPLSLSALRRFLDEDARRLGFSSLGVAPAFDEGVSGARLEAFIASGFHGTMGWLPETAERRRSVNALWPEARAVIVLGLNYGPDENPLDLLHRPDRGAISVYARHRDYHDVIKGKLKELAGRLVARAGVQTDGRPHDVKVFVDTAPLMEKPLGQAAGLGWQGKHTNLVSRTFGSWLFLGSIATTIPLEPDRAGQDLCGSCRACQDACPTQAFPEPYRLDARRCISYLTIETRRPIPREFRAAMGNRIYGCDDCLAVCPWNKFAQEASEAKLRAREDLKAPSLASLLALDDAGFRALFAGSPVKRIGRDKFVSNCLIAAGNSGDLSFVPLVTPHLSDAAPLVRAMAVWALARLGAPDLASMREAALTHEDDPLVREEWAATIALPSDISSLASSGDLTR

SEQ ID NO: 74645 - protein, 307 aa, Aureitalea marina
  REGION 1..307: note = tr|A0A2S7KRB0|A0A2S7KRB0_9FLAO Epoxyqueuosine reductase OS=Aureitalea marina OX=930804 GN=queG PE=3 SV=1
MNKSHYTTLIKEEASRLGFLACGISKAEFLEEEAPRLENWLEQNMHGSMNYMENHFDKRLDPRLLVPGAKSVVSLLYNYYPDKEPEWNGPKISKYALGVDYHKVIRKKLKALLRFIQESIGQVDGRAFVDSAPVLDKAWAAKSGLGWMGKHSNLLTKQMGSFYFIAELIIDLDLDYDTPVTDHCGSCTACIDACPTQAIVEPYVVDGSKCISYLTIELKESIPEGFRGKMDDWIFGCDVCQDVCPWNRFSQSHREPLFNASPQLLSMTRTDWMDLTHDVFEELFPRSAVKRTGYEGLRRNIRFADET

SEQ ID NO: 74646 - protein, 307 aa, Aureitalea sp.
  REGION 1..307: note = tr|A0A2S0HUF7|A0A2S0HUF7_9FLAO Epoxyqueuosine reductase OS=Aureitalea sp. RR4-38 OX=2094025 GN=queG PE=3; SV = 1
MSRPATNTDLIKSEATRLGFLSCGISKAGFLEEEAPRLEKWLNDNMQGEMSYMENHFDKRLDPTLLVPGAKSVVSLLLNYFPKQTQREDSYKISKYAYGTDYHFVIKDKLKQLLNFIREEIGDVHGRAFVDSAPVLDKAWAAKSGLGWMGKHSNLLTKQLGSFYFIAELIIDLDLEYDTPVTDHCGSCTACIDACPTQAIVEPYVVDGSKCISYFTIELKNEIPSKFSGKFDDWMFGCDVCQDVCPWNRFSRAHREPLFDPNPELLQLSKGDWEEITEEVFMRLFKNSAVKRTGFKGLKRNISFLKD

SEQ ID NO: 74647 - protein, 381 aa, unidentified
  source 1..381: note = Auricoccus indicus
  REGION 1..381: note = tr|A0A1Q1G0F2|A0A1Q1G0F2_9STAP tRNA epoxyqueuosine(34) reductase QueG OS=Auricoccus indicus; OX = 1849491 GN=BVH56_02355 PE=4 SV=1
MNYYQLKRDIIDYAHSIGIDDIGFTSAEPFEELRPKLEEYYAKGYDSGFEVGTIDERINPKLSLPSAQSIIAIAVGYPNKLKDAPRSTKNERRGIFARASWGQDYHTLLNDRLNKLEAYIKRRVPEAECMNMVDTGVLSDRAVAERAGLGFTGRNGFVINPKLGTWTYLGEMLINLPFPSDNPIIDSCGDCTICVDRCPTGALLGEGGLDSKKCISFQTQLKGMMDVHYRKKIGNRLYGCDTCQQVCPLNKGINTTHEDIAVEPNVVQPLLIPLLRMSNREFKETYGHLAGAWRGKKPIQRNAMIALANFKDDSAIPELKKVISEDVRPMIVATAYWAIAEIEGVSSIEFIERALQKETEQIVLDELNDIMNTLRREQYAD

SEQ ID NO: 74648 - protein, 348 aa, Azoarcus communis
  REGION 1..348: note = tr|A0A2U8GQ34|A0A2U8GQ34_9RHOO Epoxyqueuosine reductase OS=Azoarcus communis OX=41977 GN=queG PE=3 SV=1
MAALAEHVRLWARELGFGAITVADTGLESAEPGLERWLEAGFHGEMHYMARHGLKRARPAELLPGTLRVISVRMDYWPDARPAEAVLSDPTLAYVSRYALGRDYHKVMRSRLQKLADRIAGASPSAYRVFVDSAPVLEVELGAKSGLGWRGKHTLLIDRSLGSFFFLGEIFTDLPLPVDEPVSAHCGTCVACIDACPTGAIVAPYRLDARRCISYLTIELHGSIPEAFRPLIGNRIYGCDDCQLVCPWNRFARRAVETDFEVRNGLDSASLVELFGWTEEAFGRLTAGSPIHRIGHERWLRNIAVALGNGPGTPEVVAALSARADHPSEIVREHVAWALMRHQKGAEA

SEQ ID NO: 74649 - protein, 348 aa, Azoarcus communis
  REGION 1..348: note = tr|A0A323UTL8|A0A323UTL8_9RHOO Epoxyqueuosine reductase OS=Azoarcus communis SWub3 = DSM 12120; OX = 1121029 GN=queG PE=3 SV=1
METTMSVLATQLRAWAQDLGFGALTIADVQLGDAESGLQQWLDAEYHGEMDYMARHGMKRARPAELVPGTLRVVSVRMNYWPDAAPAERVLCDDGLAYISRYALGRDYHKVLRARLQRLADRLVAAAPSSYRVFVDSAPVLEVELGTRGGLGWRGKHTLLIDRTAGSYFFLGEIYTDLPLPVGDRVGAHCGRCEACIDACPTGAIVAPFRLDARRCISYLTIEHPGSIPMEFRSLIGNRIYGCDDCQLVCPWNRFAVVTDEPDFKVRHGLDAPGLVALFAWSAEDFRERTAGSPIHRIGHERWLRNVAVALGNSSGGAEVVAALKARAHDDSPLVREHVAWALGRLIE

SEQ ID NO: 74650 - protein, 298 aa, Azoarcus indigens
  REGION 1..298: note = tr|A0A4R6DXS0|A0A4R6DXS0_9RHOO Epoxyqueuosine reductase OS=Azoarcus indigens OX=29545 GN=C7389_110179; PE = 4 SV=1
MARHGLMRARPAELVPGAVRVITARLNYWPGGREPGEVLADAKLAYISRYALGRDYHKVLRARLQVLAERIHERAPHGYRVFTDSAPVMEVALAAKGGLGWRGKHTLLLDRSVGSYFFLGEIFTDLPLPLTSEVSPHCGSCSACIEACPTGAIVGPYRLDARRCISYLTIELKGAIPEPLRPLIGNRIYGCDDCQLVCPWNRFAKSTEVPDFLPRHGLDGVELCELFMWSEADFNERMAGSPIRRIGYIAWLRNIAVALGNAQASPEVIAALQARANHASQLVREHVEWALARLIEAE

SEQ ID NO: 74651 - protein, 352 aa, Azoarcus sp.
  REGION 1..352: note = tr|A1K4V7|A1K4V7_AZOSB Epoxyqueuosine reductase; OS = Azoarcus sp. (strain BH72) OX=62928 GN=queG PE=3 SV=1
MTGADAEHLAGLVQRIREWGKALGFSAVTIGGVDLADAEPGLMDWLAAGFHGEMDYMARHGLKRARPAELLPGTLRVISARMDYLPDAADARAALDDPARAYVSRYALGRDYHKVLRKRLQQLADRIAAEVPHGYRVFVDSAPVLEVELASRSGAGWRGKHTLLLDRTGSWFFLGELFTDLPLPVDAPVQPHCGSCSACIGACPTGAIVAPYQVDARRCISYLTIELQGAIPEALRPLLGNRIYGCDDCQLACPWNRFAQLSAEPDFAPRHRLDEATLCELFAWSAEDFATRTAGSAIHRIGHERWLRNIAVALGNAPATPEVIAALRSRADDESALVREHVAWALAQHGVG

SEQ ID NO: 74652 - protein, 373 aa, Azoarcus sp.
  REGION 1..373: note = tr|A0A2I6SB41|A0A2I6SB41_9RHOO Epoxyqueuosine reductase OS=Azoarcus sp. SY39 OX=2067960 GN=queG PE=3 SV=1
MCGEAAAGIIDGVNVLNHAQASDGPVDADGAAFVARIRAWGAELGFDAVAVTGVDLREAEPGLAAWLAAGFHGEMDYMARHGMKRARPAELLPDTVRVISARMNYWPDAADAEAALADPARAYVSRYALGRDYHKLMRARLAKLAKRIEAEVPHGHRVFVDSAPVLEVELATRAGLGWRGKHTLLLNREAGSTFFLGEIFTDLPLPVDAPQAEHCGTCTACIDACPTGAIVAPYEVDARLCISYLTIELKGAIPEELRPMIGNRIYGCDDCQLVCPWNRFARITAEPDFAPRNALDAATLVELFAWTEADFHERTAGSAIHRIGYERWSRNLAVALGNAPTTPEIVAALRARAEDRSELVREHVCWALEQHAG

SEQ ID NO: 74653 - protein, 340 aa, Azoarcus tolulyticus
  REGION 1..340: note = tr|A0A1N6WUI6|A0A1N6WUI6_9RHOO Epoxyqueuosine reductase OS=Azoarcus tolulyticus OX=34027 GN=queG PE=3; SV = 1
MKVWAGELGFADLAVSGVDLSSAEPGLEAWLADGFHGDMDYMARHGMMRARPAELVPGTLRVVSVRMNYWPQAADAQAALDDPQRAYVSRYALGRDYHKLMRNRLQKLAERIAAEAPHGFRVFVDSAPVLEVELASRSGLGWRGKHTLLLNRRAGSYFFLGEIFTDLPLPLDAPETPHCGSCRACLDACPTGAIVAPYRVDARRCISYLTIELKGAIPEALRPLIGNRIYGCDDCQLACPWNRFARLGAEADFAPRHRLDEASLVELFAWSESEFRDRMAGSAIHRIGFERWSRNLAVALGNAPGTPAVLAALRARADDPLELVREHVAWALERHGLRQG

SEQ ID NO: 74654 - protein, 363 aa, Azomonas agilis
  REGION 1..363: note = tr|A0A562J1R1|A0A562J1R1_9GAMM Epoxyqueuosine reductase OS=Azomonas agilis OX=116849 GN=queG PE=3 SV=1
MSAPSASPTPTPLSSTQLSALSQNIKHWAQALGFQQVGISGVDPGIQAEYLEQWVAAGYHGEMHYMAAHGRKRAYPAELEPGTLRLICVRMDYLPADTQMAQCLSNPEQAYISRYALGRDYHKLIRKRLQQLAERIQATIGPFGHRAFVDSAPVLEKAFAQQAGLGWMGQNTLLINPKAGSWFFLGELFVNLPLPVDPPYTKNHCGSCQSCLKRCPTGALLGNGLMDARRCISYLSIELKGSIPEPLRPLMGNRIYGCDDCQIACPWNRFARPTSEADFLPRHQLETSSLMQLFQWTEAEFLTRTEGSPIRRAGYERWSRNLAVALGNVPSNPAIQQALKQRLNSASPLVAEHINWALKQHTI

SEQ ID NO: 74655 - protein, 410 aa, Azonexus fungiphilus
  REGION 1..410: note = tr|A0A495WCG2|A0A495WCG2_9RHOO Epoxyqueuosine reductase OS=Azonexus fungiphilus OX=146940 GN=queG PE=3; SV = 1
MAERPDQCPRQRRLAGAEVALEVDHQARLQRQREVGAETLGRRLVGQIENGGNIRAMHDQDSTVDIAALKARIRELGRGLGFAEIGIARAEPGAAVDRLRAWLAAGMHGEMDYMARHAELRADPQLLQPGTLTVISAAVDYLPHAKSADAPGQAAISRYAQGRDYHKVVRGRLQKLASAIGELAGPYGYRVFSDSAPVMEVEYARQAGIGWRGKHTLLLSRQGSWRFLGEIYCDLPLPPDAPVDEHCGSCRACLDACPTGAIVAPYVVDARRCISYLTIELAGAIPEEFRPLLGNRIYGCDDCQSCCPWNRFAQLGDREFAPRHGLDSASLVTLFAWTEQQFDDRLAGNPIRRIGHERWLRNIAVGLGNGPCTVDALQALKMRADDPSPLVREHVAWALARLERKQAAAD

SEQ ID NO: 74656 - protein, 350 aa, Azonexus hydrophilus
  REGION 1..350: note = tr|A0A1R1I587|A0A1R1I587_9RHOO Epoxyqueuosine reductase OS=Azonexus hydrophilus OX=418702 GN=queG PE=3; SV = 1
MHDGDSTMNGTELKASIRRIGQELGFAEIGVTRADPGAAVDGLRAWLADGLHGEMDYMARHLELRANPQQLQPGTITVISAAVDYLPHAKTTEAPAQAAISRYAQGRDYHKVVRSRLQKLATAIGELAGPFGYRVFSDSAPVMEVEFARQAGLGWRGKHTLLLSKQGSWRFLGEIYCDLPLPPDTPIDEHCGSCTRCLSACPTGAIIAPYKVDARRCISYLTIELAGAIPEEFRPLLGNRIYGCDDCQTCCPWNRFARLGDREFAPRHGLDSASLIELFAWSEAQFDERLAGNPIRRIGHERWLRNIAVALGNGPATVDALNALKMRADHPSALVREHVSWALKALGERN

SEQ ID NO: 74657 - protein, 448 aa, Azorhizobium caulinodans
  REGION 1..448: note = tr|A8I1X5|A8I1X5_AZOC5 Epoxyqueuosine reductase; OS = Azorhizobium caulinodans (strain ATCC 43989 / DSM 5975 / JCM 20966 / NBRC 14845 / NCIMB 13405 / ORS 571); OX = 438753GN=queG PE=3 SV=1
MRLSPPQPSPASGRGSEVTRVQRCHAQHGKSPLPLAGKGWEGAKRRLSSPRRGSPPMSAPARKTAPLSPSDLKDQLRALALEEGFDAFGIADPDAVGDAGTRLRHWVAEERYGDMGWMAETLDRRVHARAMWPEALRVVMLGMNYGPDEDPRTVLAERSLGAISVYARGEDYHDIIKPKLKRLARALLALAGTGDVKVFVDTAPLMEKPLAMAAGLGWQGKHTNLVSRARGSWLFLGAIATTLDLPVDAPMGDHCGQCRACLDACPTAAFPAPYQIDARRCVSYLTIEHKGPIPRDLRPLMGNRIYGCDDCLAACPWNKFAELGREAKLAARDENRAPDLADLATLDDAAFRARFPKSPIKRVGRGRFLRNVLTAIGNSGDPALVASARAHLGDPDALVRGAAVWALSRLLPAAEFATLAAVQAGAEADAEVAAEWTAALEADAPPRT

SEQ ID NO: 74658 - protein, 300 aa, Azorhizobium sp.
  REGION 1..300: note = tr|A0A257XV80|A0A257XV80_9RHIZ tRNA epoxyqueuosine(34) reductase QueG (Fragment); OS = Azorhizobium sp. 12-66-6 OX=1970318 GN=B7Z45_05140 PE=4; SV = 1
MRDLARAEGFDAFGVADPDAAGAAGPRLRAWLAAGHHGDMDWLAETVERRVHVRAMWPDALRVIMLGLNYGPDEDPRAVLAQRSQGAISVYARGEDYHELIKAKLKRLARALLAQAGSGDVKVFVDTAPLMEKPLAQAAGLGWQGKHTNLVSRERGSWLFLGAIATTLDLPADPPAADHCGQCRACLDACPTAAFTAPYRIDARRCVSYLTIEHKGPIPRDLRPLMGNRIYGCDDCLAACPWNKFAATGREMKLAARAENRAPDLAALAALDDTAFRARFAKSPIKRTGRTRMMRNVLVA

SEQ ID NO: 74659 - protein, 421 aa, Azorhizobium sp.
  REGION 1..421: note = tr|A0A258K9K5|A0A258K9K5_9RHIZ Epoxyqueuosine reductase OS=Azorhizobium sp. 32-67-21 OX=1970319 GN=queG; PE = 3 SV=1
MVCAPEVAADLPRPAERQHSGHAGFPDLCGPRLLTTAPAPEGPLPDRLKDRLRDLARNEGFDAFGVADPDAIPQAGPRLAEWVAQGCHGDMGWMGETLERRAAPRALWPDMRAIVMLGYNYGPDEDPRAVLARRAHGAISVYARGEDYHELIKAKLKRIARALLADAGGGDVKVFVDTAPLMEKPLAQAAGLGWQGKHTNVVSRERGSWLFLGAIATTLPLPADPPSRDHCGGCRACLDACPTAAFPAPYRLDARRCVSYLTIEHRGPIPRDLRPLMGNRIYGCDDCLAACPWNKFAQEGRDLKLAARAENRAPALADLVALDDDAFRARFARSPIKRTGRVRMVRNVLVAIGNSGDASFIPQVRARLTDDAPLVRGAAVWALERLLASPDFADIAAQHMCSETDPDVLGEWRAGLERHAA

SEQ ID NO: 74660 - protein, 358 aa, Azospira oryzae
  REGION 1..358: note = tr|A0A2W5FSV2|A0A2W5FSV2_9RHOO Epoxyqueuosine reductase OS=Azospira oryzae OX=146939 GN=queG PE=3 SV=1
MQGDSLCCARLEGAALVQAIKRWGRELGFQRVGVTHADLGDAEARLLDWLAHGYHGDMDYMARHGVKRSRPSALVPGTVSVICARMNYLPPQARASRSVLDDPERAFVSRYALGRDYHKVVRSRLTQLARRIARHVEGFAWRAFADSAPVMEVELASRAGVGWRGKHTLLLARDAGSWFFLGEIYTNLSLPADPPEADHCGTCTRCIDACPTQAIIAPYRIDARRCISYLTIEHKGEIPEALRPLMGNRIYGCDDCQLVCPWTRFAKTSREPDFAVRNGLDDASLAALFGWSEQQFLERFAGSPIRRLGYERWLRNIAVALGNAPSTPAVVAALEARRDHPSALVRVHVAWALARHGR

SEQ ID NO: 74661 - protein, 372 aa, Azospira oryzae
  REGION 1..372: note = tr|G8QLB7|G8QLB7_AZOOP Epoxyqueuosine reductase; OS = Azospira oryzae (strain ATCC BAA-33 / DSM 13638 / PS); OX = 640081 GN=queG PE=3 SV=1
MQQTEAGTPARPAAAGEAAPDWPGLAARLKAWGRELGFAEVAIGRAEIGEAGQRLLAWLEQGHHGSMDYMAKHAPLRLDPGQLVPGVQTVISVRLPYLPRGAEPEQVLADPALGYVSRYALGRDYHKVIRNRLQKLADRLQAEIGDFGYRVFSDSAPVMEVEFARKSGLGWRGKHTLLLTREGSWHFLGEIYTDLPLPADAEVSDHCGACTRCIDACPTRAIVAPYQVDARRCISYLTIELDGAMPEELRPLLGNRIYGCDDCQLCCPWNRFGQLGDAEFTTRQGLDAARLSALMAWSEADFLERMAGSPIRRIGIERWRRNIAVALGNGPATEEARAALAARREDDSAVVREHVAWAERQLEKKTPPTGGV

SEQ ID NO: 74662 - protein, 372 aa, Azospira sp.
  REGION 1..372: note = tr|A0A5H2YJ95|A0A5H2YJ95_9RHOO Epoxyqueuosine reductase OS=Azospira sp. I09 OX=1765049 GN=queG PE=4 SV=1
MQQTGAGTPARPAAAGEATPDWPGLAARLKAWGRELGFAEVAIGRAEIGEAGQRLLAWLEQGRHGSMDYMAKHAPLRLDPGQLVPGVQTVISVRLPYLPRGAEPEQVLADPALGYVSRYALGRDYHKVIRNRLQKLADRLQAEIGDFGYRVFSDSAPVMEVEFARKSGLGWRGKHTLLLTREGSWHFLGEIYTDLPLPADAEVSDHCGACTRCIDVCPTRAIIAPYQVDARRCISYLTIELDGAMPEELRPLLGNRIYGCDDCQLFCPWNRFGQLGDVEFTPRQGLDSARLSALMAWSEADFLERMAGSPIRRIGIERWRRNIAVALGNGPATEEARTALAARREDDSAVVREHVAWAERQLEKKTPPTGGV

SEQ ID NO: 74663 - protein, 369 aa, Azospira sp.
  REGION 1..369: note = tr|A0A2R5EFT1|A0A2R5EFT1_9RHOO Epoxyqueuosine reductase OS=Azospira sp. I13 OX=1765050 GN=queG PE=3 SV=1
MTQTGADAANSTVPAARDWAGLIARLRGWARELGFANLTISRAEVGSAGQGLLQWLEQGYHGTMDYMAKHAPLRLDPDLLVSGVQTVLSVRLPYLPEGRSPGEVLADAELGYVSRYALGRDYHKVVRNRLQKLADRLQAEVGPFGYRVFSDSAPVMEVEFGRKSGLGWRGKHTLLLTREGSWHFLGEIYTDLPLPPDAPVSDHCGACTRCIEVCPTRAIVAPYEVDARRCISYLTIEQDGPIPEDLRPLLGNRIYGCDDCQLFCPWNRFGQLGDPDFTPRQGLDSARLSTLMVWSEADFLERLAGSPIRRIGIASWRRNIAVALGNGPATAEAKAALAARRNDDSPLVREHVAWAQRQLESKTPPEGGV

SEQ ID NO: 74664 - protein, 360 aa, Azospirillum brasilense
  REGION 1..360: note = tr|A0A4D8PUD4|A0A4D8PUD4_AZOBR Epoxyqueuosine reductase OS=Azospirillum brasilense OX=192 GN=queG PE=3; SV = 1
MSDPDTSTREAIRDRALSLGFDAVGFARAELGEEARARLAEFLSQGRHGDMGWMEDKANRRVHPQALWPEARTVIALGTSYAPAEDPRALLAHPDRGIVSVYAKNRDYHDLIKGRLKTLGQWIAHRFKAELKVFVDTAPVMEKPLAEKAGLGWQGKHTNLVSRTHGSWLFLGEVYTTLELPPDPPGVDRCGQCRRCLDACPTAAFPAPNQLDARRCISYLTIEHKGPIPEELRPLMGNRIYGCDDCLAACPWNKFAQRSREAAFLPRAELTAPRLADLAQLDDAGFRQVFSGSPIKRIGRDRFVRNVLVALGNTGDARHTAAAERAAERLLEDPSEVVRDAAGWALARLRAARPPSDPSD

SEQ ID NO: 74665 - protein, 391 aa, Azospirillum brasilense
  REGION 1..391: note = tr|G8AK97|G8AK97_AZOBR Epoxyqueuosine reductase; OS = Azospirillum brasilense Sp245 OX=1064539 GN=queG PE=3; SV = 1
MPDPITSTREAIRDRALSLGFDAVGFARAELGEEAKARLAEFLSQGRHGDMGWMEDKADRRVHPQALWPEARTVIALGTSYAPAEDPRALLAHPDRGIVSVYARNRDYHDLIKGRLKTLGQWIAHRFKAELKVFVDTAPVMEKPLAEKAGLGWQGKHTNLVSRTHGSWLFLGEVYTTLELPPDPPAVDRCGQCRRCLDACPTAAFPAPNQLDARRCISYLTIEHKGPIPEELRPLMGNRIYGCDDCLAVCPWNKFARRSREAAFLPRAELTAPRLADLAQLDDAGFRQVFSGSPIKRIGRDRFVRNVLVALGNSGDARHAALAERAAERLLEDPSEVVRDTAGWALARAQGRPTPFGPFRLSQSRPPGSDDRVTDSPIINDRASASVAPSP

SEQ ID NO: 74666 - protein, 356 aa, Azospirillum doebereinerae
  REGION 1..356: note = tr|A0A3S0WK67|A0A3S0WK67_9PROT Epoxyqueuosine reductase OS=Azospirillum doebereinerae OX=92933 GN=queG; PE = 3 SV=1
MAGAEPAPADPTRLRERIRDRALSLGFDAVGFAPAALGGDAREKLAAFLAEGRHGDMGWMAERADQRAHPQTLWAEARTVIALGTSYAPHEDPRRMLGHPERGIVSVYARNRDYHDLIKGRLKTLAQWLHSQTKAGVKVFVDTAPVMEKPLAERAGLGWQGKHTNLVSRDHGSWLFLGEVYTTLELPADATGRDRCGSCTACQTACPTDAFPAPYQLDARRCVSYLTIENKGPIPDALKPLMGNRIYGCDDCLSACPWNKFARTTREPAFLPRAELTAPRLADLAQLDDAGFRQVFSGSPVKRIGRDRFVRNVLVALGNSGDPRLRFVAEGLLDDPSDVVRDSARWAVERLGGAAV

SEQ ID NO: 74667 - protein, 361 aa, unidentified
  source 1..361: note = Azospirillum humicireducens
  REGION 1..361: note = tr|A0A160JG47|A0A160JG47_9PROT Epoxyqueuosine reductase OS=Azospirillum humicireducens OX=1226968; GN = queG PE=3 SV=1
MAAAKPATVQSDPSRLREAIRDRALRIGFDAVGFAPAALGPEARERLARFVAEGRHGDMGWMAERSDQRSHPQSLWDEARTVIALGTSYAPHDDPRRLAEHPDRGIVSVYARNRDYHDLIKGRLKTLAQWLAHQTKAGVKVFVDTAPVMEKPLAAQAGLGWQGKHTNLVSRDHGSWLFLGEIYTTLELPPDPPARDRCGSCDRCQVACPTEAFPAPYQIDARRCISYLTIEHKGPIPDELKPLMGNRIYGCDDCLAACPWNKFARATAEPAFLPRAELTAPRLADLAQLDDAGFRQVFSGSPIKRIGRDRFVRNVLVAIGNSGDPALIAVAERLRQDDSDVVREAAGWAAARLAATARTPI

SEQ ID NO: 74668 - protein, 353 aa, Azospirillum lipoferum
  REGION 1..353: note = tr|A0A1X7Q5P7|A0A1X7Q5P7_AZOLI Epoxyqueuosine reductase OS=Azospirillum lipoferum OX=193 GN=queG PE=3; SV = 1
MAGAERPPSDPALLRERIRDRALALGFDAVGFAPAALGPEARAKLAAFLAAGRHGDMGWMAERGDQRSHPRDLWDEARTVIALGTSYAPHADPRGLLEHPDRGIVSVYARNRDYHDLIKGRLKTLGHWLHHQTKAGVKVFVDTAPVMEKPLAERAGLGWQGKHTNLVSRDHGSWLFLGEIYTTLELPADEPGRDRCGSCTACQTACPTNAFPAPYQLDARRCISYLTIENKGPIPDDLKPLIGNRVYGCDDCLAACPWNKFARATREPAFLPRAELTAPRLADLAQLDDPGFRQVFSGSPVKRIGRDRFVRNVLVALGNSGDRRLRPAAEALIDDPSDVVRDSARWAMERLTR

SEQ ID NO: 74669 - protein, 362 aa, Azospirillum lipoferum
  REGION 1..362: note = tr|G7Z8T2|G7Z8T2_AZOL4 Epoxyqueuosine reductase; OS = Azospirillum lipoferum (strain 4B) OX=862719 GN=queG; PE = 3 SV=1
MAAAKPTPLASADPARLRDAIRDRALAVGFDAVGFAPAALGPEARERLARFVAEGRHGDMGWMAERSDQRSHPQSLWDEARTVIALGTSYAPHDDPRRLAEHPDRGIVSVYARNRDYHDLIKGRLKTLAQWLAHQTKAGVKVFVDTAPVMEKPLAAQAGLGWQGKHTNLVSRDHGSWLFLGEIYTTLELPPDPPARDRCGSCDRCQTACPTAAFPAPYQIDARRCISYLTIEHKGPIPDELKPLMGNRIYGCDDCLAACPWNKFARATGEPAFLPRAELTAPRLADLAQLDDAGFRQVFSGSPIKRIGRDRFVRNVLVAIGNSGDPALRPVAAALCEDPSDVVREAAGWAAARLSGAADTHA

SEQ ID NO: 74670 - protein, 361 aa, Azospirillum oryzae
  REGION 1..361: note = tr|A0A1X7H6W6|A0A1X7H6W6_9PROT Epoxyqueuosine reductase OS=Azospirillum oryzae OX=286727 GN=queG PE=3; SV = 1
MAAAKSGTLPSDPARLREAIRDRALAVGFDAVGFAPAALGPEARERLARFVAEGRHGDMGWMAERSDQRSHPQSLWDEARTVIALGTSYAPHDDPRRLAEHPDRGIVSVYARNRDYHDLIKGRLKTLAQWLAHQTKAGVKVFVDTAPVMEKPLAAQAGLGWQGKHTNLVSRDHGSWLFLGEIYTTLELPPDPPARDRCGSCDRCQTACPTAAFPAPYQIDARRCISYLTIEHKGPIPDEFKPLLGNRIYGCDDCLAACPWNKFARATVEPAFLPRAELTAPRLADLAQLDDASFRQVFSGSPIKRIGRDRFVRNVLVAIGNSGDPTLKPVAEALCQDASDVVREAAGWAADRLSRAANAHP

SEQ ID NO: 74671 - protein, 362 aa, Azospirillum oryzae
  REGION 1..362: note = tr|A0A5A9G604|A0A5A9G604_9PROT Epoxyqueuosine reductase OS=Azospirillum oryzae OX=286727 GN=queG PE=3; SV = 1
MAAAKPAPLASADPARLRDAIRDRALAVGFDAVGFAPAALGPEARERLARFVAEGRHGDMGWMAERSDQRSHPQSLWDEARTVIALGTSYAPHDDPRRLAEHPDRGIVSIYARNRDYHDLIKGRLKTLAQWLAHQTKAGVKVFVDTAPVMEKPLAAQAGLGWQGKHTNLVSRDHGSWLFLGEIYTTLELPPDPPARDRCGCCDRCQVACPTAAFPAPYQIDARRCISYLTIEHKGPIPDELKPLMGNRIYGCDDCLAACPWNKFARATSEPAFLPRAELTAPRLADLAQLDDAGFRQVFSGSPIKRIGRDRFVRNVLVAIGNSGDPALKPVAEALCLDASDAVREAAGWAVAQLSGATNEHA

SEQ ID NO: 74672 - protein, 362 aa, unidentified
  source 1..362: note = Azospirillum palustre
  REGION 1..362: note = tr|A0A2B8AWJ0|A0A2B8AWJ0_9PROT Epoxyqueuosine reductase OS=Azospirillum palustre OX=2044885 GN=queG PE=3; SV = 1
MAAAKPAPLSSAGPARLRDAIRDRALAAGFDAVGFAPAALGPEARERLAQFVAEGRHGDMGWMAERSDQRSHPQSLWDEARTVIALGTSYAPHDDPRRLAEHPDRGIVSVYARNRDYHDLIKGRLKTLAQWLAHQTKAGVKVFVDTAPVMEKPLAAQAGLGWQGKHTNLVSRDHGSWLFLGEIYTTLDLPPDPPARDRCGSCDRCQVACPTAAFPAPYQIDARRCISYLTIEHKGPIPDDLKPLMGNRIYGCDDCLAACPWNKFARATREPAFLPRAELTAPRLADLAQLDDAGFRQVFSGSPIKRIGRDRFVRNVLIAIGNSGDPSLRPVAEALAQDVSDVVREAAGWAAARLSGATSPDA

SEQ ID NO: 74673 - protein, 356 aa, Azospirillum sp.
  REGION 1..356: note = tr|D3NWF9|D3NWF9_AZOS1 Epoxyqueuosine reductase; OS = Azospirillum sp. (strain B510) OX=137722 GN=queG PE=3; SV = 1
MAAAKAGPPPSADPARLRDAIRARALAAGFDAVGFAPAALGPEARERLARFVAEGRHGDMGWMAERADQRSHPQALWDEARTVIALGTSYAPHEDPRRLLDHPERGIVSVYARNRDYHDLIKGRLKTLAQWLAHQTKAGVKVFVDTAPVMEKPLAAQAGLGWQGKHTNLVSRDHGSWLFLGEIYTTLELPPDPPGRDRCGSCDRCRTACPTAAFPAPYQLDARRCISYLTIEHKGAIPDDLKPLMGNRIYGCDDCLAACPWNKFARATREPAFLPRAELTAPRLADLAQLDDAGFRQLFSGSPIKRIGRDRFVRNVLVAIGNSGDPMLKPVAESLIDDGSEIVREAAGWAAVRLGG

SEQ ID NO: 74674 - protein, 354 aa, Azospirillum sp.
  REGION 1..354: note = tr|A0A2U1YS87|A0A2U1YS87_9PROT Epoxyqueuosine reductase OS=Azospirillum sp. TSO5 OX=716760 GN=queG PE=3; SV = 1
MASADPARLRDAIRDRALAVGFDAVGFAPAALGPEARERLAQFVAEGRHGDMGWMDERSDQRSHPQSLWDEARTVIALGTSYAPHDDPRRLADHPDRGVVSVYARNRDYHDLVKGRLKTLAQWLAHQTKAGVKVFVDTAPVMEKPLAAQAGLGWQGKHTNLVSRDHGSWLFLGEIYTTLELPPDPPARDRCGSCDRCQTACPTAAFPAPYQIDARRCISYLTIEHKGPIPDDLKPLMGNRIYGCDDCLAACPWNKFARATSEPAFLPRAELTAPRLADLAQLDDAGFRQVFSGSPIKRIGRDRFVRNVLVAIGNSGDPALRPVAEALREDASDVVSEAAGWAAARLSSAENSHA

SEQ ID NO: 74675 - protein, 360 aa, Azospirillum thiophilum
  REGION 1..360: note = tr|A0A0F2KV82|A0A0F2KV82_9PROT Epoxyqueuosine reductase OS=Azospirillum thiophilum OX=528244 GN=queG; PE = 3 SV=1
MAIAPARLRDAIRNRALAAGFDAVGFAPAALGPEARERLARFIAEGRHGDMGWMAERSDQRSHPQALWEEARTVIALGTSYAPHEDPRRLLEHPDRGIVSVYARNRDYHDLIKGRLKMLAQWLASSKAHGAKAGVKVFVDTAPVMEKPLAAQAGLGWQGKHTNLVSRDHGSWLFLGEIYTTLELPPDPPGHDRCGSCDRCQVACPTAAFPAPYQLDARRCISYLTIEHKGPIPDELKPLMGNRIYGCDDCLAACPWNKFARATTEPAFLPRAELTAPRLADLAQLDDAGFRQVFSGSPIKRIGRDRFVRNVLVAIGNSGDVRLRPVAETLRLDASDVVREAAGWAAARLARLDESEAADG

SEQ ID NO: 74676 - protein, 354 aa, Azotobacter beijerinckii
  REGION 1..354: note = tr|A0A1H9CGZ6|A0A1H9CGZ6_9GAMM Epoxyqueuosine reductase OS=Azotobacter beijerinckii OX=170623 GN=queG; PE = 3 SV=1
MSARAPDPARLAQSIKDWGHELGFQQVGIAGIDLHEHEAHLQRWLAAGYQGEMDYMAAHGDKRSRPAELVPGTLRVVSLRMDYLPGDTRMAKRLAAPEQAYLSRYALGRDYHKLIRKRLQQLAERIQGEIGPFGYRAFVDSAPVLEKALAEQAGLGWIGKNTLLLNKKAGSWFFLGELYVDLPLPMDAPHAGEHCGRCTACLDACPTGAFVGPKVLDARRCISYLTIELKGPIPVELRPLIGNRVFGCDDCQLVCPWNRFARPTAESDFQPRHGLDNAELAALFLWSEAEFLARSEGSPLRRAGYQRWLRNLAVGLGNAPSTVPVLAALEARREHPSALVREHVLWALRRHGRD

SEQ ID NO: 74677 - protein, 354 aa, Azotobacter beijerinckii
  REGION 1..354: note = tr|A0A1H6U5H2|A0A1H6U5H2_9GAMM Epoxyqueuosine reductase OS=Azotobacter beijerinckii OX=170623 GN=queG; PE = 3 SV=1
MSARAPDPARLAQSIKDWGHELGFQQVGIAGIDLHEHEAHLQRWLAAGYQGEMDYMAAHGDKRSRPAELVPGTLRVVSLRMDYLPGDTRMAERLAAPEQAYLSRYALGRDYHKLIRKRLQQLAERIQGEIGPFGYRAFVDSAPVLEKALAEQAGLGWIGKNTLLLNKKAGSWFFLGELYVDLPLPVDAPHAGEHCGRCTACLDICPTGAFVGPKVLDARRCISYLTIELKGPIPVELRPLIGNRVFGCDDCQLVCPWNRFARPTAESDFQPRHGLDNAELAALFLWSEAEFLARSEGSPLRRAGYQRWLRNLAVGLGNAPSTVPVLAALEARREHPSALVREHVLWALRRHGRD

SEQ ID NO: 74678 - protein, 354 aa, Azotobacter chroococcum
  REGION 1..354: note = tr|A0A4Q9UUN6|A0A4Q9UUN6_9GAMM Epoxyqueuosine reductase OS=Azotobacter chroococcum OX=353 GN=queG PE=3; SV = 1
MSATPPDPARLAQSIKDWGRELGFQQVGIAGLELGEHEAHLRRWLAAGYQGEMDYMAAHGDKRSRPAELVPGTLRVISLRMDYLPGDTRMAERLAAPEQAYLSRYALGRDYHKLIRKRLQQLAERIQAEIGPFGYRAFVDSAPVLEKALAEQAGLGWIGKNTLLLNKKAGSWFFLGELYVDLPLPVDAPHAGEHCGRCSACLDSCPTGAFVGPRQLDARRCISYLTIELKGPIPVELRPLIGNRVFGCDDCQLVCPWNRFARPTAEGDFQPRHGLDNAELAALFRWSEAEFLARSEGSPLRRAGYERWLRNLAVGLGNAPSTIPVLEALEVRREHPSELVREHVLWALRQHGRA

SEQ ID NO: 74679 - protein, 354 aa, Azotobacter chroococcum
  REGION 1..354: note = tr|A0A0C4WVM4|A0A0C4WVM4_9GAMM Epoxyqueuosine reductase OS=Azotobacter chroococcum NCIMB 8003 OX=1328314; GN = queG PE=3 SV=1
MSATPPDPARLAQSIKDWGRELGFQQVGIAGLELGEHEAHLQRWLAAGYQGEMDYMAAHGDKRSRPAELVPGTLRVVSLRMDYLPGDTRMAERLAAPEQAYLSRYALGRDYHKLIRKRLQQLAERIQGEIGPFGYRAFVDSAPVLEKALAEQAGLGWIGKNTLLLNKKAGSWFFLGELYVDLPLPTDEPHAGEHCGRCSACLEACPTGAFVGPRLLDARRCISYLTIELKGPIPVELRPLVGNRVFGCDDCQLVCPWNRFARPTAEGDFQPRHGLDNAELAALFRWSEAEFLARSEGSPLRRAGYERWLRNLAVGLGNAPSTIPVLEALEARREHPSALVREHVLWALRRHGRV

SEQ ID NO: 74680 - protein, 354 aa, Azotobacter vinelandii
  REGION 1..354: note = tr|C1DLP6|C1DLP6_AZOVD Epoxyqueuosine reductase; OS = Azotobacter vinelandii (strain DJ / ATCC BAA-1303); OX = 322710 GN=queG PE=3 SV=1
MSANTPDLVRLAQSIKDWGRELGFQQVGIAGIELSRHEAHLRRWLAAGYQGEMDYMAAHGDKRSRPAELVPGTLRAISLRMDYLPADTRMAERLAAPEKAYLSRYALGRDYHKLIRKRLQHLAERIQGEIGPFGHRAFVDSAPVLEKALAEQAGLGWIGKNTLLLNKKAGSWFFLGELYVDLPLPTDAPHVGEHCGRCSACLDSCPTGAFVGPRLLDARRCISYLTIELKGSIPEELRPLVGNRVFGCDDCQLVCPWNRFARPTREGDFQPRHGLDNAELAALFLWSEAEFLARSEGSPLRRAGYERWLRNLAVGLGNAPSTIPVLEALEARREHPSALVREHVLWALRRHGRD

SEQ ID NO: 74681 - protein, 354 aa, Azotobacter vinelandii; identical to SEQ ID NO: 74680
  REGION 1..354: note = tr|M9YFC8|M9YFC8_AZOVI Epoxyqueuosine reductase; OS = Azotobacter vinelandii CA6 OX=1283331 GN=queG PE=3 SV=1

SEQ ID NO: 74682 - protein, 377 aa, unidentified
  source 1..377: note = Bacillaceae bacterium
  REGION 1..377: note = tr|A0A3E0JV50|A0A3E0JV50_9BACI Epoxyqueuosine reductase OS=Bacillaceae bacterium OX=1889774 GN=queG PE=3; SV = 1
MDFAVLKQEIIEYSKQIGIDKIGFASADVFETLKERLIVQQQLGYQSGFEEPDIEKRTNPELLLPKAKSIISIALAYPSKMKNAPRSTKKERRGLFCRASWGTDYHVILKDRLKKLERFILEKVDGAQVKSMVDTGELSDRAVAERAGIGWSGKNCMIITPEFGSYVYLGEMITNIPFSPDSPIEDRCGSCNICVDSCPTGALVQGGQLDSKKCIAFLTQTKGFLPDEYRGKIGNRLYGCDTCQLVCPENKGKDFHIHSEMEPDPEIAKPKLKPLLHISNREFKEKFGHIAGSWRGKKPIQRNAIIALAHYKDRTALPDLIKLMHEDSRPIIRGTAAWAIGRIGDQSVLFELEKALEKEQDEEVKNEIVKGIEMLKA

SEQ ID NO: 74683 - protein, 378 aa, unidentified
  source 1..378: note = Bacillaceae bacterium
  REGION 1..378: note = tr|A0A261QDS6|A0A261QDS6_9BACI Epoxyqueuosine reductase OS=Bacillaceae bacterium SAS-127 OX=2015203; GN = queG PE=3 SV=1
MNYDVLKQEIIAYSREIGIDKIGFASAAPFVELKDRLIRQQELNYASGFEEKDIEKRVDPAKIFDQPRSIIAIALAYPSKMKEVVKGKRGERRGIFCRASWGEDYHNVLRDRLSQLEVFIQSKVPESRFRSMVDTGELADRAVAERAGIGWSGKNCSIITPEFGSYVYLGEMITNLPFEPDQPIEDRCGTCTKCIDACPTGALVQGGQLNSNRCIAFLTQTKDFLPEEFRDHLGNRLYGCDTCQTVCPENKGMDFHFHEEMEPSGEEVKPLLEPLLQISNKEFKERFGYMSGSWRGKKPIQRNAMIALAHFKEASALPSLIDVLTKDVRPVMRGTAAWTIAKIGGPEAKDALVKAKEKETELEVIKEIDQGLASLNQY

SEQ ID NO: 74684 - protein, 381 aa, unidentified
  source 1..381: note = Bacilli bacterium
  REGION 1..381: note = tr|A0A0K0GAP6|A0A0K0GAP6_9FIRM Uncharacterized protein OS=Bacilli bacterium VT-13-104 OX=1637974; GN = WH51_08690 PE=4 SV=1
MRTEELQQEIREYAMKIGIDKIGFATADVFTELKERLRRQQELNYQSGFEKGTIEERTEPVRLLPEAQSIISIALAYPSRMKNAPKSTKEERRGLFARASWGIDYHEVLRDRLNKLADFIHEKVPEAITKIMVDTGELSDRAVAERAGIGFSGKNTSIITPEFGSFVYLGEMITNIPFIPDNPVEDSCGDCRKCLDACPTGALVGEGGQLNANRCIAFLTQTKDYLEDEFRIKLGNRLYGCDTCQQVCPKNKEIDFHTHPEFEPDPEISKPKLIPMLRISNREFKEKFGSISGSWRGKKPLQRNALIALAHYKDKTAVTEIIEVMKNDPRPVIRGTAAWSLGKIGTEEAFLAIKEAIKVEKDDRVKYEMEKGLEFAETAFK

SEQ ID NO: 74685 - protein, 382 aa, Bacillus aerius
  REGION 1..382: note = tr|A0A3A9DE58|A0A3A9DE58_9BACI Epoxyqueuosine reductase OS=Bacillus aerius OX=293388 GN=queG PE=3 SV=1
MDVKKLKQDVIEFAQEIGIDKIRFASADTFETLKERLIENRTLGYESGFEEPDLEKRTNPDLLLPKAKSIIAIALAYPSKMKDAPRSKKGERRGIFCRASWGKDYHHVLREKLDQLEEFLKAQRSDVRTKSMVDTGELSDRAVAERAGIGWSGKNCMIITPEFGSYVYLAEMITNIPFEPDERIEDQCGSCNKCIEACPTGALVNPGQLNSQRCIAFQTQTKGFLPDEFRTKIGNRIYGCDTCQMVCPKNKGVDFHLHPEMEPDPEIAKPLLKPLLTMSNREFKEKFGHVAGSWRGKKPIQRNAIIALAHFKETDALPELIELMHKDPRPVIRGTAAWAVGKIGGADVMGELERALAHEQDEEAKAEIQKGIGLLKETSATN

SEQ ID NO: 74686 - protein, 382 aa, Bacillus aerophilus
  REGION 1..382: note = tr|A0A410KXP9|A0A410KXP9_9BACI tRNA epoxyqueuosine(34) reductase QueG OS=Bacillus aerophilus; OX = 293389 GN=queG PE=4 SV=1
MHVGQLKEELIQYANEIGVDKIRFASADTFDSLKDRLILHESLGYLSGFEEPDIEKRTNPALLLPKAKSIVAIALAYPSKMKDAPRSTKDARRGIFCRASWGTDYHVVLKKKLDMLEEFLRSKHEDIRTKSMVDTGELSDRAVAERAGIGFSAKNCMIITPEFGSYVYLAEMITNVPFEPDEKIEDQCGTCNKCVDSCPTGALVNPGQLNSQRCISFLTQTKGFLPDEFRSKIGNRLYGCDTCQTVCPINKGKDFHLHPEMEPDPEIAKPLLKPLLTISNREFKEKYGHVSGSWRGKKPIQRNAILALAHFKDTSALPDLVDLMHKDPRPVIRGTAAWAIGKIGDGQQLSELEKALERESDEEAKQEIIKGIELLQTPLNTK

SEQ ID NO: 74687 - protein, 379 aa, Bacillus akibai
  REGION 1..379: note = tr|W4QX65|W4QX65_BACA3 Epoxyqueuosine reductase; OS = Bacillus akibai (strain ATCC 43226 / DSM 21942 / JCM 9157 / 1139) OX=1236973 GN=queG PE=3 SV=1
MTLAQLKDELIAYSKTIGVDKIGFASADPFLQLKDRLLTQQQLGFQSGFEEPDIEKRVNPAKVLTEARTIISIALAYPSKMSNPPKNTKEDRRGIFCRASWGRDYHDVLRDRLKKIEQFLLERIPEAKTVSMVDTGELSDRAVAERAGIGWSGKNCAIITPEFGSYVYLGEIITTIPFDPDTPITEQCGTCTKCIDACPTDALVQGGQLDSNKCIAFLTQTKDFLPDQYRKKLGNRIYGCDTCQQVCPENKGKDFHHHPEMEPDPEIAKPKLIPLLTISNRDFKEKFGHVSGSWRGKKPIQRNAIIALAHFKDQKALPVLADLAKKDPRPVIRGTAAWAIGVIGSLEEKKLLNQLKNIEKDDKVLGEIEKGLNILENKE

SEQ ID NO: 74688 - protein, 380 aa, unidentified
  source 1..380: note = Bacillus albus
  REGION 1..380: note = tr|A0A1J9U4M6|A0A1J9U4M6_9BACI Epoxyqueuosine reductase OS=Bacillus albus OX=2026189 GN=queG PE=3 SV=1
MDFEQLKQDVIAYSKTIGIDKIGFASASPFEELKQRLIQQQQLNYQSGFEEPDIEKRTNPQLLLPGAKSIIAIALAYPSKLKNAPLSKRGERRGIFCRASWGQDYHLVLRDRLQKLEAYLIEKLPNIEVKSMVDTGELSDRAVSERAGIGWSGKNCAIITPEFGSYVYLGEMITNVPFPPDQPIEDQCGSCTKCIDICPTGALIQGGQLDSKKCIAFLTQTKGFLPEEYRDKIGNRIYGCDTCQTVCPKNKGMDFHNHPEMEPDPELVKPLLTPLLTISNRDFKEKYGIMSGSWRGKKPLQRNAILALAHFKEASAIPDLIGVMKDDPRPVLRGTAAWALGKIGGDGVGEAIEKAMQREKDEEVLHEMNRGLELLAQKKE

SEQ ID NO: 74689 - protein, 388 aa, Bacillus alcalophilus
  REGION 1..388: note = tr|A0A4S4JXW1|A0A4S4JXW1_BACAO Iron-sulfur cluster-binding protein OS=Bacillus alcalophilus ATCC 27647 = CGMCC 1.3604 OX=1218173 GN=AJ85_13405 PE=4 SV=1
MINAQLKKELLAYSVSIGIDKIGFASADPFTTLKERLIKQRELGYQSGFEESDIEKRVDPSLTLPKAQTIISIAVAYPSKMKNPPKSTKEERRGIFCRASWGMDYHDVLRERLGKVEEFIKAKVPDAKTVSMVDTGVLSDRAVAERAGIGWSAKNCAIITPEFGSYVYLGNIITTVAIEPDTPITDQCGSCTKCIDACPTGALIQGGQLDSQKCVAFLTQTKGFIADEYRKKIGNRLYGCDTCQQVCPKNKGIDEHRHPELEPDPEIAKPKLIPLLTMSNREFKEKFGHVSGAWRGKKPIQRNAILALGHFKDKNALPVLKKLLKEDPRPVIRGTAAWAIGKIGHVEGEIWLKTAKEKEKDEQVLVEIEKGLNLLENTNFTDGNQMNV

SEQ ID NO: 74690 - protein, 382 aa, Bacillus altitudinis; identical to SEQ ID NO: 74686
  REGION 1..382: note = tr|A0A5C2CHB0|A0A5C2CHB0_9BACI Epoxyqueuosine reductase OS=Bacillus altitudinis OX=293387 GN=queG PE=4; SV = 1

SEQ ID NO: 74691 - protein, 386 aa, Bacillus amyloliquefaciens
  REGION 1..386: note = tr|A0A4V7TKN4|A0A4V7TKN4_BACAM Epoxyqueuosine reductase OS=Bacillus amyloliquefaciens OX=1390 GN=queG; PE = 3 SV=1
MNIHKLKEELIEYAKSIGVDKIGFTTADTFDSLRDRLILQESLGYLSGFEEPDIEKRVTPSLLLPKAKSIVAIALAYPSKMKDAPRSTRDGRRGIFCRASWGKDYHDVLREKLDLLENFLQSKHEDIRTKSMVDTGELSDRAVAERAGIGFSAKNCMITTPEYGSYVYLAEMITNLPFEPDVPIEDMCGSCTKCLDACPTGALVNPGQLNAQRCISFLTQTKGFLPDEFRTKIGNRLYGCDTCQTVCPINKGKDFHLHPQMEPDPEIAKPLLKPLLTISNREFKEKFGHVSGSWRGKKPIQRNAILALAHFKDASSLPELTALMHQDPRPVIRGTAAWAIGKIGDPEYAAELEKALHKEQDEEAIQEIKKGMELLSVSDKTKTGQS

SEQ ID NO: 74692 - protein, 389 aa, Bacillus amyloliquefaciens
  REGION 1..389: note = tr|I2C2U2|I2C2U2_BACAM Epoxyqueuosine reductase; OS = Bacillus amyloliquefaciens Y2 OX=1126211 GN=queG PE=3; SV = 1
MQKMNIHKLKEELIEYAKSIGVDKIGFTTADTFDSLRDRLILQESLGYLSGFEEPDIEKRVTPSLLLPKAKSIVAIALAYPSKMKDAPRSTRDGRRGIFCRASWGKDYHDVLREKLDLLENFLQSKHEDIRTKSMVDTGELSDRAVAERAGIGFSAKNCMITTPEYGSYVYLAEMITNLPFEPDVPIEDMCGTCTKCLDACPTGALVNPGQLNAQRCISFLTQTKGFLPDEFRTKIGNRLYGCDTCQTVCPINKGKDFHLHPQMEPDPEIAKPLLKPLLTISNREFKEKFGHVSGSWRGKKPIQRNAILALAHFKDASSLPELTALMHQDPRPVIRGTAAWAIGKIGDPDYAEELEKALQKEQDEEAIREIEKGLELLSVSDKTKTGRS

SEQ ID NO: 74693 - protein, 380 aa, Bacillus anthracis
  REGION 1..380: note = sp|Q81YT7|QUEG_BACAN Epoxyqueuosine reductase; OS = Bacillus anthracis OX=1392 GN=queG PE=3 SV=1
MDFEQLKQDVIAYSKTIGIDKIGFASASPFEELKQRLIQQQQLNYQSGFEEPDIEKRTNPQLLLSGAKSIIAIALAYPSKLKNAPLSKRGERRGIFCRASWGQDYHLVLRDRLQKLEAYLIEKLPDIEVKSMVDTGELSDRAVSERAGIGWSGKNCSIITPEFGSYVYLGEMITNVPFPPDQPIEDQCGSCTKCIDICPTGALIQGGQLDSKKCIAFLTQTKGFLPEEYRDKIGNRIYGCDTCQTVCPKNKGMDFHNHPEMEPDPELVKPLLTPLLTISNRDFKEKYGIMSGSWRGKKPLQRNAILALAHFKEASAIPDLIGVMKDDPRPVLRGTAAWALGKIGGDGVGEAIEKAMQREKDEEVLHEMNRGLELLAQKKE

SEQ ID NO: 74694 - protein, 380 aa, Bacillus anthracis
  REGION 1..380: note = tr|A0A2A8L0U7|A0A2A8L0U7_BACAN Iron-sulfur cluster-binding protein OS=Bacillus anthracis OX=1392; GN = queG PE=3 SV=1
MDFEQLKQDVIAYSKTIGIDKIGFASASPFEELKQRLIQQQQLNYQSGFEEPDIEKRTNPQLLLPGAKSIIAIALAYPSKLKNAPLSKRGERRGIFCRASWGQDYHLVLRDRLQKLEAYLIEKLPDIEVKSMVDTGELSDRAVSERAGIGWSGKNCSIITPEFGSYVYLGEMITNVPFPPDQPIEDQCGSCTKCIDICPTGALIQGGQLDSKKCIAFLTQTKGFLPEEYRDKIGNRIYGCDTCQTVCPKNKGMDFHNHPEMEPDPELVKPLLTPLLTISNRDFKEKYGIMSGSWRGKKPLQRNAILALAHFKEASAIPDLIGVMKDDPRPVLRGTAAWALGKIGGDGVGEAIEKAMQREKDEEVLHEMNRGLELLAQKKE

SEQ ID NO: 74695 - protein, 380 aa, Bacillus aquimaris
  REGION 1..380: note = tr|A0A1J6W0F2|A0A1J6W0F2_9BACI Epoxyqueuosine reductase OS=Bacillus aquimaris OX=189382 GN=queG PE=3 SV=1
MDFDQLKQDIIEYSKEIGIDKIGFTTADSFSEMKNRLIRQEILGYQSGFEEKDIEKRVDPSLIFDGPKSIIAIALAYPSRMKDAPQSKRGERRGIFCRASWGTDYHHVLRDRLATLEDYIVSRVPQARFKSMVDTGELVDRAVAERAGIGWSGKNCSIITPEFGSYVYLGEMVTNLPFEPDEPMEDQCGTCNKCVDVCPTGALIEGGQLDAQKCIAFLTQTKGFLADEYRVKLGNRLYGCDTCQTVCPENKGKDFHFHKEMEPDPEIAKPLLKPLLTISNREFKERYGHVSGSWRGKKPIQRNAIIALAHYKDETAIEDLIEVMKNDVRPVMRGTAAWALGKIGGSEAEEALLTQQVIEEDDEVLAEIEKGMVMLAPDAG

SEQ ID NO: 74696 - protein, 377 aa, Bacillus aquimaris
  REGION 1..377: note = tr|A0A5D4UE55|A0A5D4UE55_9BACI Epoxyqueuosine reductase OS=Bacillus aquimaris OX=189382 GN=queG PE=3 SV=1
MDMDQLKQDIIDYSKEIGIDKIGFTTAGAFSEMKNRLLRQEMLGYQSGFEEKDIEKRVDPSLIFESPKSIIAIALAYPSKMKNAPQSKRGERRGIFCRASWGTDYHHVLRDRLSKLEEYIVSRVPQARFKSMVDTGELVDRAVAERAGIGWSGKNCSIITPEFGSYVYLGEMVTNLPFAPDTPMEDQCGTCNKCVDVCPTGALIEGGQLDAQKCIAFLTQTKGFLADEYRVKLGNRLYGCDTCQTVCPENKGMDFHFHEEMEPDPEIAKPLLKPLLTISNREFKEKYGHVSGSWRGKKPIQRNAIIALAHYKDTTAIDDLIDVLKKDVRPVIRGTSAWALGKIGGVEAEVALLAQQSVETDEEVLNEIQKGLNLITK

SEQ ID NO: 74697 - protein, 378 aa, Bacillus aryabhattai
  REGION 1..378: note = tr|A0A264YV43|A0A264YV43_9BACI Epoxyqueuosine reductase OS=Bacillus aryabhattai OX=412384 GN=queG PE=3; SV = 1
MDFQQLKKEVIAYSKEIGIDKIGFASASTFETLKDRLLKQQELGYASGFEEPDIEKRTNPTLLVPKAKSIIAIALAYPSKMPGAPRSTKEDRRGIFCRASWGQDYHTILRDRLQKLESFLKEKVQGVEVKSMVDTGELSDRAVAERAGIGWSGKNCAIITPEFGSYVYLGEIVTNIPFEPDQPIEDQCGTCNKCVEVCPTGALVTGGQLNSQRCIAFLTQTKGFLADEFRDKIGNRLYGCDTCQTVCPENKGKDFHFHPEMEPDPEIAKPKLKPLLTMSNREFKEKYGHVSGSWRGKKPIQRNAIIALAHFKDETAIPDLIKVMKEDVRPVIRGTAAWALGKIGNDEVLPLLEQLKEKESDEEAKQEFEKGIALLVKS

SEQ ID NO: 74698 - protein, 378 aa, Bacillus aryabhattai
  REGION 1..378: note = tr|A0A1G7FF05|A0A1G7FF05_9BACI Epoxyqueuosine reductase OS=Bacillus aryabhattai B8W22 OX=1358420 GN=queG; PE = 3 SV=1
MNAYQLKEEIISYSKEIGIDKIGFASASMFDELKNRLLAQQELGYASGFEEPDIEKRVDPTLVVPKARSIISIALAYPSKLKDAPKSTKEDRRGIFCRASWGQDYHTVLRDRLQKLEAFIKEKVPAAILQSMVDTGELSDRAVAERAGIGWSGKNCAIITPEFGSYVYLGEMITDIPFPPDKPIEDGCGTCNKCVDACPTGALVTGGQLNSQRCIAFLTQTKGFLAEEFRSKLGNRLYGCDTCQTVCPENKGKDFHFHPEMEPDPELAKPKLKPLLTMSNREFKEKFGHVSGSWRGKKPIQRNAIIALAHFKDQTAVPDLIELIKNDVRPVIRGTAAWALGKIGDKEALDTLMNLREKEKDQEVIEEMSKGIEMLQEI

SEQ ID NO: 74699 - protein, 377 aa, Bacillus asahii
  REGION 1..377: note = tr|A0A398B895|A0A398B895_9BACI Epoxyqueuosine reductase OS=Bacillus asahii OX=228899 GN=queG PE=3 SV=1
MYMKELKKELIAYSQEIGIDKIGFTTASTFDSLRNRLLEQQTLDYQSGFEEPNIEKRVRPELIIEHPQSIISIALAYPSKMKDAPLSTKGERRGIFCRASWGTDYHVVLREKLQLLESFIKEKVPNALTKTMVDTGELSDRAVAERAGIGWSGKNTMIITPEFGSYVYLGDLITNVPFEPDQPMEDQCGTCNKCVDVCPTGALVQGGQLNAKRCIAFLTQTKGFLPDEFRSKIGNRLYGCDTCQTVCPKNKGIDFHIHAEMEPDPDIAKPLLKPLLTISNKEFKEKYGHVSGSWRGKKPIQRNVILALAHFKDETALPELIQVMEEDPRPVIRGTAAWAIGKIGGGEAEGILQRALDKEKDEDVLAEIKKGLMLAAY

SEQ ID NO: 74700 - protein, 377 aa, Bacillus asahii
  REGION 1..377: note = tr|A0A3T0KM22|A0A3T0KM22_9BACI Epoxyqueuosine reductase OS=Bacillus asahii OX=228899 GN=queG PE=3 SV=1
MYMKELKKELIAYSKEIGIDKIGFTTASTFDSLRNRLLEQQTLDYQSGFEEPNIEKRVRPELIIEHPQSIISIALAYPSKMKDAPLSTKGERRGIFCRASWGTDYHVVLREKLQLLESFIKEKIPNALTKSMVDTGELSDRAVAERAGIGWSGKNTMIITPEFGSYVYLGDLITNVPFEPDQPMEDQCGTCNKCVDVCPTGALVQGGQLNAKRCIAFLTQTKGFLPDEFRSKIGNRLYGCDTCQTVCPKNKGIDFHIHAEMEPDPDIAKPLLKPLLTISNKEFKEKYGHVSGSWRGKKPIQRNAILALAHFKDETALPELIQVMKEDPRPVIRGTAAWAIGKIGGGEAEGILQSALDKEKDEDVLAEIKKGLMLAAH

SEQ ID NO: 74701 - protein, 386 aa, Bacillus atrophaeus
  REGION 1..386: note = tr|A0A080UM08|A0A080UM08_BACAT Epoxyqueuosine reductase OS=Bacillus atrophaeus OX=1452 GN=queG PE=4 SV=1
MNIRQLQEELIEYAKSIGVDKIGFTTADTFESLKDRLILQESLGYLSGFEEPDVEKRVTPTLLLPKAKSIVAIALAYPSKMKDAPRSTKDARRGIFCRASWGKDYHDVLREKLDLLEAFLQSKHEEIRTKSMVDTGELSDRAVAERAGIGFSAKNCMITTPEYGSYVYLAEMITNVPFEPDVPIEDMCGSCTKCLDACPTGALVNPGQLNAQRCISFLTQTKGFLPDEFRTKIGNRLYGCDTCQTVCPINKGKDFHLHPQMEPDPEIAKPLLKPLLTISNREFKEKFGHVSGSWRGKKPIQRNAILALAHFKDQSALPELAALMHQDPRPVIRGTAAWAIGKIGDQEYAEELNRALAKEKDEEAKREIEKGIDLLKAANKTKQGLS

SEQ ID NO: 74702 - protein, 386 aa, Bacillus atrophaeus; identical to SEQ ID NO: 74701
  REGION 1..386: note = tr|A0A0H3DX37|A0A0H3DX37_BACA1 YhbA OS=Bacillus atrophaeus (strain 1942) OX=720555 GN=BATR1942_02050 PE=4; SV = 1

SEQ ID NO: 74703 - protein, 382 aa, unidentified
  source 1..382: note = Bacillus australimaris
  REGION 1..382: note = tr|A0A0P7FLM7|A0A0P7FLM7_9BACI Epoxyqueuosine reductase OS=Bacillus australimaris OX=1326968; GN = AKG37_11965 PE=4 SV=1
MHVGELKEELIQYAKEIGVDKIRFASADTFDSLKDRLILHESLGYLSGFEEPDIEKRTNPSLLLPKAKSIVAIALAYPSKMKDAPRSTKDARRGIFCRASWGTDYHVVLKKKLDMLEEFLRSKHVDIRTKSMVDTGELSDRAVAERAGIGFSAKNCMIITPEFGSYVYLAEMITNVPFEPDEKIEDQCGTCNKCVDSCPTGALVNPGQLNSQRCISFLTQTKGFLPDEFRSKIGNRLYGCDTCQIVCPINKGKDFHLHPEMEPDPEIAKPLLKPLLTISNREFKEKYGHVSGSWRGKKPIQRNAILALAHFKDASALPVLVELMHKDPRPVIRGTAAWAIGKIGDNQQLPELEKALERESDDEAKQEIEKGIELLQTPLNTK

SEQ ID NO: 74704 - protein, 382 aa, Bacillus azotoformans
  REGION 1..382: note = tr|K6DYX1|K6DYX1_BACAZ Epoxyqueuosine reductase; OS = Bacillus azotoformans LMG 9581 OX=1131731 GN=queG PE=3; SV = 1
MDIAKLKDEIIAYSKEIGIEKVGFTSADPFVELKQRLYTQQKLNYQSGFEESDIEKRTNPKLLLSGAESIISIALAYPSKLKDAPRSIREERRGLFCRASWGTDYHHILRDRLNKLEEFILEKIPDAQIKSMVDTGELSDRAVAERAGIGWSGKNCAVITPEFGSYVYLGEMITTIPFPSDQPIEDMCGTCTKCLEACPTGALVQGGQINATKCIGFLTQTKGFIEDEYRVKIGNRVYGCDTCQMVCPHNKGKNFDFHVEMDPDPEVVKPKLKSLLFISNKEFKEKFGPLAGSWRGKKPIQRNAIIGLAHYKDETAINDLAKVLSEDTRPVLRGTAAWAIGKIGAPEGKSILERAKEKEKDEQVLHEIDKGLKLLETSIERS

SEQ ID NO: 74705 - protein, 382 aa, Bacillus azotoformans
  REGION 1..382: note = tr|A0A072NR71|A0A072NR71_BACAZ Epoxyqueuosine reductase OS=Bacillus azotoformans MEV2011 OX=1348973; GN = queG PE=3 SV=1
MDIAKLKDEIIAYSKEIGIDKIGFTSADPFVELKQRLYTQQKLNYQSGFEESDIEKRTNPKLLLSGAESIISIALAYPSKLKDAPRSTREERRGLFCRASWGTDYHHILRDRLNKLEEFILEKIPDAQIKSMVDTGELSDRAVAERAGIGWSGKNCAVITPEFGSYVYLGEMITTIPFPSDQPIEDMCGTCTKCLEACPTGALVQGGQINATKCIGFLTQTKGFIEDEYRVKIGNRVYGCDTCQMVCPHNKGKDFHFHVEMDPDPEVVKPELKSLLFISNKEFKEKFGPLAGSWRGKKPIQRNAIIGLAHYKDETAINDLAKVLSEDTRPVLRGTAAWAIGKIGAPEGKSILERAKEKEKDEEVLHEIDKGLKLLETSIERS

SEQ ID NO: 74706 - protein, 377 aa, unidentified
  source 1..377: note = Bacillus bacterium
  REGION 1..377: note = tr|A0A3D0E4K9|A0A3D0E4K9_9BACI Epoxyqueuosine reductase OS=Bacillus bacterium OX=2053512 GN=queG PE=3; SV = 1
MDYKKLKHEIIAYSREIGIDKIGFTSADPFVEMKNLLIRQEELGYQSGFEHKNIEERTHPELIFDEPRAIIAIALAYPSKMNDAPRGEPGNRRGIFCKASWGVDYHVLVREKLEQLAAFIDSKIRDARFKLMVDTGELVDRAVAERAGIGWSGKNCSIITPEFGSYVYLGEMITNLPFEPDEPMQDQCGECTKCLDACPTGALVQPGQLDAQSCIAFLTQTKGLLPDEFRDKVGNRLYGCDTCQVVCPKNKGVDFHLHPEMEPDPDIAKPLLKPLLDISNREFKEKYGEVSGSWRGKKPIQRNAIIALAHFKEASAVNDLIKILNEDVRPEIRGTAAWTLGKIGGEKAREALMLAQAGEENPLVLGEIDKGLQFFEK

SEQ ID NO: 74707 - protein, 380 aa, unidentified
  source 1..380: note = Bacillus bacterium
  REGION 1..380: note = tr|A0A506Q2W7|A0A506Q2W7_9BACI Epoxyqueuosine reductase OS=Bacillus bacterium OX=2053512 GN=queG PE=3; SV = 1
MDFEQLKQDVIAYSKTIGIDKIGFASASPFEELKQRLIQQQQLNYQSGFEEPDIEKRTNPQLLLPGAKSIIAIALAYPSKLKNAPLSKRGERRGIFCRASWGQDYHLVLRDRLQKLEAYLIEKLPDIEVKSMVDTGELSDRAVSERAGIGWSGKNCAIITPEFGSYVYLGEMITNVPFPPDQPIEDQCGSCTKCIDICPTGALIQGGQLDSKKCIAFLTQTKGFLPEEYRDKIGNRIYGCDTCQTVCPKNKGMDFHNHPEMEPDPELVKPLLTPLLTISNRDFKEKYGIMSGSWRGKKPLQRNAILALAHFKEASAIPDLIGVMKDDPRPVLRGTAAWALGKIGGDGVGEAIEKAMQRENDEEVLHEMNRGLELLAQKKE

SEQ ID NO: 74708 - protein, 376 aa, Bacillus badius
  REGION 1..376: note = tr|A0A162Y4D6|A0A162Y4D6_BACBA Epoxyqueuosine reductase OS=Bacillus badius OX=1455 GN=queG PE=3 SV=1
MDYRALKQEIIEYSREIGIDKIGFASAAPFTELKDRLLRQQALDYQSGFEEKDINKRVEPSRIFDEPRSIIAIALAYPSKMRESVKGKQGARRGIFCRASWGEDYHTVLRDRLSKLEAFIAAKAPEARFRSMVDTGELSDRAVAERAGIGWSGKNTSIITPEFGSYVYLGEMITNLPLEPDKPIENRCGTCTKCLDACPTGALVQGGQLNVKRCIAFLTQTKDFMPAEFRDKLGNRLYGCDTCQTVCPENKGIDFHLHEEMEPDPEAVKPLLEPLVSMSNKEFKQTFGSMSGSWRGKKPIQRNAIIALAHFKEESALPSLMDVLFHDVRPVLRGTAAWAIAKIGGEKAREALILAKEKESDPAVKEEIEKGISLLN

SEQ ID NO: 74709 - protein, 376 aa, Bacillus badius
  REGION 1..376: note = tr|A0A0C2Y6F2|A0A0C2Y6F2_BACBA Epoxyqueuosine reductase OS=Bacillus badius OX=1455 GN=queG PE=3 SV=1
MDYRALKQEIIEYSREIGIDKIGFASAAPFTELKDRLLRQQALDYQSGFEEKDINKRVEPSRIFDEPRSIIAIALAYPSKMRESVKGKQGARRGIFCRASWGEDYHTVLRDRLSKLEAFIAAKAPEAHFRSMVDTGELSDRAVAERAGIGWSGKNTSIITPEFGSYVYLGEMITNLPLEPDKPIENRCGTCTKCLDACPTGALVQGGQLNAKRCIAFLTQTKDFMPAEFRDKLGNRLYGCDTCQTVCPENKGIDFHLHEEMEPDPEAVKPLLEPLVSMSNKEFKQTFGSMSGSWRGKKPIQRNAIIALAHFKEESALPSLMDVLFHDVRPVLRGTAAWAIAKIGGEKAREALILAKEKESDSAVKEEIEKGISLLN

SEQ ID NO: 74710 - protein, 377 aa, Bacillus bataviensis
  REGION 1..377: note = tr|A0A561CEI0|A0A561CEI0_9BACI Epoxyqueuosine reductase OS=Bacillus bataviensis OX=220685 GN=queG PE=3; SV = 1
MDNHELKEELIAYSKEIGIDKIGFTTASPFSQLKNRLLRQQELGYQSGFEEPDIDKRVTPEMLLEGAQSIISIALAYPAKMTIRVESKKGERRGIFSRASWGLDYHHILRDRLTKLEEFIINKIPNAKLKSMVDTGELSDRAVAERAGIGWSGKNCSIITPEFGSYVYLGEMITNIPFEPDTPIEDNCGSCTKCLDACPTGALIQGGQINANRCISFLTQTKELIPDEFREKIGNRVYGCDSCQTACPINKGINFHFHEEMEPDPVVAKPLLKPILKLSNREFKKRFGSISGAWRGKKPIQRNAIIALAHFKDESAVPDLIDVLQTEASPVTRGTAAWALGKIGGETAYAALRKAKELETDIEVQSEIEKGLNFYNN

SEQ ID NO: 74711 - protein, 376 aa, Bacillus bataviensis
  REGION 1..376: note = tr|K6BU59|K6BU59_9BACI Epoxyqueuosine reductase; OS = Bacillus bataviensis LMG 21833 OX=1117379 GN=queG PE=3; SV = 1
MDVQKFKQELIAYSKEIGIDKIGFTTADPFSELKNRLIRQQELGYHSGFEEPDIEKRVTPTLLLDEPRSIISIALAYPSKMKDRVVSKKGERRGIFSRASWGLDYHHLLRDKLKKLEEFIKMKVPDARLKSMVDTGELSDRAVAERAGIGWSGKNCAIITPEFGSYVYIGEMITSIPFEPDTPIEDQCGSCTKCLEACPTGALVQGGQINAQRCISFLTQTKGFIPDEFREKIGNRVYGCDSCQTACPHNKVKNFHFHEEMEPDPEVAKPLLRPILQLSNREFKNKFGDVSGSWRGKKPIQRNAMIALAHFKDESAVSDLIEVLKNEASPVARGTAAWALGKIGGETAFAALEKAKAVETDSAVQIEIEKALSLNK

SEQ ID NO: 74712 - protein, 381 aa, Bacillus beveridgei
  REGION 1..381: note = tr|A0A1D7QWS9|A0A1D7QWS9_9BACI Iron-sulfur cluster-binding protein OS=Bacillus beveridgei OX=632773; GN = BBEV_2104 PE=4 SV=1
MKASELKNKLIEKSRELEIDKIGFASADPFVTLKSRLEDQQSLGFETGFEKGSVKERTEPERLLPEAKTIVSIAMAYPSKLKNPPRSVKGDRRGVFCRASWGEDYHHILKRKLKALEAYLHELMPDERTAVMVDTGELSDRAVAERAGIGWSAKNCAIITPEFGSYVYLGEMLMTAYVEPDTPLEDQCGSCTKCIDACPTDALIQGGQLDSSKCIAYLTLTKSMIPKEYRQKLGNRLYGCDTCQVVCPENKGKNHTHHEEMTPDPEKAKPQLIPLLSLSNKEFKRTFGEVSGSWRGKKPIQRNALIALANFKDVSAVPAIEEVLKNDQRPVMRATAAWALSEIKGDEAMPRLEAHLDDETADEVIAEIADVMKHLSRTTRL

SEQ ID NO: 74713 - protein, 380 aa, unidentified
  source 1..380: note = Bacillus bombysepticus
  REGION 1..380: note = tr|A0A023P1K8|A0A023P1K8_9BACI Epoxyqueuosine reductase OS=Bacillus bombysepticus str. Wang OX=1330043; GN = queG PE=3 SV=1
MDFEQLKQDVIAYSKTIGIDKIGFASASPFEELKQRLIQQQQLNYQSGFEEPDIEKRTNPQLLLPGAKSIIAIALAYPSKLKNAPLSKRGERRGIFCRASWGQDYHLVLRDRLQKLEAYLIEKLPDIEVKSMVDTGELSDRAVSERAGIGWSGKNCSIITPEFGSYVYLGEMITNVPFPPDKPIEDQCGGCTKCIDICPTGALIQGGQLDSKKCIAFLTQTKGFLPEEYRDKIGNRIYGCDTCQTVCPKNKGMDFHNHPEMEPDPELVKPLLTPLLTISNRDFKEKYGIMSGSWRGKKPLQRNAILALAHFKETSAIPDLIGVMKDDPRPVLRGTAAWALGKIGGDGVGEAIEKAMEREKDEEVLHEMNRGLELLAQKKE

SEQ ID NO: 74714 - protein, 385 aa, Bacillus boroniphilus
  REGION 1..385: note = tr|W4RUE4|W4RUE4_9BACI Iron-sulfur cluster-binding protein OS=Bacillus boroniphilus JCM 21738 OX=1294265; GN = JCM21738_5091 PE=4 SV=1
MDMVNLKKDIIEYSKTIGIDKIGFASPSAFEEMKVRLYRQQELQYQSGFEEKDIEKRTEPSLIFDHPKSIISIALAYPSKMKTKVVSKKWERRGIFCRASWGIDYHVVLRDRLKKLEDYIASKVPGSMFKSMVDTGELVDRAVAERAGIGWSGKNCSIITPEFGSYVYLGEMITNIPFEPDTPMEDRCGSCNKCVEVCPTGALVQGGQLDAQKCIAFVTQTKGFLADEFREKLGNRLYGCDTCQTVCPENKGKDFHFHEEMEPDPEIAKPLLKPLLTMSNRDFKEKFGHVSGSWRGKKPIQRNAIIALAHYKDDTAMPELIKVMQDDPRPVLRGTAAWALGKIGGSVALDALKHASAVERDEEVLNEISKGLEFFKDNLESNITV

SEQ ID NO: 74715 - protein, 379 aa, Bacillus butanolivorans
  REGION 1..379: note = tr|A0A2A7WDQ8|A0A2A7WDQ8_9BACI tRNA epoxyqueuosine(34) reductase QueG OS=Bacillus butanolivorans OX=421767 GN=queG PE=4 SV=1
MDMNTLKQEVIIYSKEIGIDKIGFTSASNFTELKSRLIRQQELDYQSGFEESDIEKRVRPELIFDKPQSIISIALAYPSKLKNAPQSTKSERRGIFCRASWGTDYHTVLRNKLQLLEDFIKDKVPGAMVKSMVDTGELSDRAVAERAGIGWSAKNSMIITPEFGSYVYLGDMITNLPFIPDQPMEDQCGTCNKCVDVCPTGALVQGGQLNSKRCIAFLTQTKGFLPDEFRTKIGNRLYGCDTCQTVCPKNKGMDFHFHEEMEPDPEVAKPLLKPLLTISNRDFKETYGYVSGSWRGKKPIQRNAILALAHFKDETSLPELIQIMKEDPRPVLRGTAAWAIGKIGRKQVVSILEETLMNETDEEVRAEIEKGLQFTLEHQ

SEQ ID NO: 74716 - protein, 379 aa, Bacillus butanolivorans
  REGION 1..379: note = tr|A0A0M0ERC8|A0A0M0ERC8_9BACI Iron-sulfur cluster-binding protein OS=Bacillus butanolivorans; OX = 421767 GN=AKG34_02730 PE=4 SV=1
MDMNSLKQEVIIYSKEIGIDKIGFTSASNFTELKSRLIRQQELDYQSGFEEPDIEKRVRPELIFDKPQSIISIALAYPSKLKNAPQSTKSERRGIFCRASWGTDYHTVLRNKLQLLEDFIKDKVPGAMAKSMVDTGELSDRAVAERAGIGWSAKNSMIITPEFGSYVYLGDMITNLPFIPDQPMEDQCGTCNKCVDVCPTGALVQGGQLNSKRCIAFLTQTKGFLPDEFRTKIGNRLYGCDTCQTVCPKNKGMDFHFHEEMEPDPEVAKPLLKPLLTISNRDFKETYGYVSGSWRGKKPIQRNAILALAHFKDETSLPELIQIMKEDPRPVLRGTAAWAIGKIGRKQVVSILEEALMNETDEEVRAEIEKGLQFTLEHQ

SEQ ID NO: 74717 - protein, 380 aa, unidentified; identical to SEQ ID NO: 74503
  source 1..380: note = Bacillus caldolyticus
  REGION 1..380: note = tr|A0A2H5KH22|A0A2H5KH22_BACCL Epoxyqueuosine reductase OS=Bacillus caldolyticus OX=1394 GN=queG PE=3; SV = 1

SEQ ID NO: 74718 - protein, 382 aa, unidentified
  source 1..382: note = Bacillus camelliae
  REGION 1..382: note = tr|A0A2N3LPP2|A0A2N3LPP2_9BACI tRNA epoxyqueuosine(34) reductase QueG OS=Bacillus camelliae; OX = 1707093 GN=queG PE=4 SV=1
MIMDLLQFKEDLIQYSKSIGIDKIGFTTADPFTEMKNRLLKQQELQYQSGFEEKDIDKRTNPSLIFDKPQSIISIALAYPSKMENAPKGKVGERRGIFCKASWGEDYHHILRRKLSELEAFIMEYNPEARCKSMVDTGELVDRAVAERAGIGWSGKNCSIITPEFGSYVYLGEMITNIPFEPDTPMEDQCGSCTKCLDACPTGALVQGGQLNAQKCIAFLTQTKGFLAEEFRVKLGNRLYGCDTCQSVCPKNKGIDFHFHEEMEPEPNLVKPELTPLLSISNREFNDSFGKMSGSWRGKKPIQRNALIALAHFKETSAVPDIITVLKNDPRPVLRGTAAWALGKIGGDEAKNALLEAKANESDEEVLKEVIEGLSKLINEDI

SEQ ID NO: 74719 - protein, 383 aa, unidentified
  source 1..383: note = Bacillus campisalis
  REGION 1..383: note = tr|A0A0M2SP10|A0A0M2SP10_9BACI Iron-sulfur cluster-binding protein OS=Bacillus campisalis OX=1408103; GN = WQ57_23270 PE=4 SV=1
MDIRQLQEEVIAYSKTIGIDKIGFASPSPFTEMKSRLLRQQELGYQSGFEEKDIEKRVRPDLIFDQPHSIIAIAVAYPSKMKVRVVSKKGQRRGIFCRASWGVDYHHVLRNKLKKLEEFILSKVPEARFKSMVDTGELVDRAVAERAGIGWSGKNCSILTPEFGSYVYLGEMITNLPFIPDAPMEDQCGSCTKCLDACPTGALVQGGQLDSQRCIAFLTQTKGFLPDEFRDKLGNRLYGCDSCQTACPVNKGKDFHFHPETEPDPEVAKPLLKPILHISNKDFKEKFGPVSGSWRGKKPIQRNAILALAHFKDDSAVPDLIKVMQEDPRPVIRGTAAWSLGKIGGEGAKTALENALVQEKDEDVLVEVKKGLDFFRESQPATR

SEQ ID NO: 74720 - protein, 377 aa, Bacillus canaveralius
  REGION 1..377: note = tr|A0A2N5GFY0|A0A2N5GFY0_9BACI Epoxyqueuosine reductase OS=Bacillus canaveralius OX=1403243 GN=queG PE=3; SV = 1
MNSIELKQDIIAYSKTIGIDKIGFTSTNTFSEMKSRLLRQQELNYQSGFEEPDIEKRTDPSLLLDKSQSIIAIALAYPSKMKEQVLSKKGERRGIFCRASWGTDYHMILRDRLKKLEEYILSKVPEAKLKSMVDTGELVDRAVAQRAGIGWSGKNCSIITPEFGSYVYLGEMITNIPFEPDTPMEDQCGSCNKCVEVCPTGALIQGGQLNAQRCIAFLTQTKGFLPDEFRDKLGNRLYGCDTCQTVCPVNKGKDFHFHSEMEPDPEIAKPLLKPLLRIGNREFKEKYSKISGSWRGKKPIQRNALIALAHYKDETAIPDIIEVLKNDARPVIRGTAAWSLGKIGGNEAREALQHAVQTEKDEEVIKEIEKGLTFYVH

SEQ ID NO: 74721 - protein, 378 aa, unidentified
  source 1..378: note = Bacillus caseinilyticus
  REGION 1..378: note = tr|A0A1H3R1C1|A0A1H3R1C1_9BACI Epoxyqueuosine reductase OS=Bacillus caseinilyticus OX=1503961; GN = SAMN05421736_107152 PE=4 SV=1
MANAQLKKEIVAYSKHIGIDKIGFASVDPFLTLKNRLVQQQKLNYQSGFEKGTMEERTNPKIHLQEAKTIIAIALAYPSKMKNARRSVKGERRGLFCRASWGEDYHKILRKKLERLEQFVLANYPEEKCLSMVDTGELSDRAVAERAGIGWSGKNCAIITPEFGSYVYLGEMITTLAIEPDVPLEDQCGSCNKCVEACPTGALVQGGQLDAKKCIAFLTQTKDMLPEQYRKKIGNRLYGCDTCQVVCPKNKGKDFHHHPEMEPDPEIVKPKLLPLLAISNREFKEQFGAIAGSWRGKKPIQRNAIIALAHFKETAALPALHELLWKDPRPVIRGTAAWAIGEIAGAGSREQLEAAKKREKDTIVLKEIEKALESVKNG

SEQ ID NO: 74722 - protein, 379 aa, unidentified
  source 1..379: note = Bacillus cavernae
  REGION 1..379: note = tr|A0A433HED8|A0A433HED8_9BACI Epoxyqueuosine reductase OS=Bacillus cavernae OX=1674310 GN=queG PE=3 SV=1
MDYQKLKEEIIIYSKEIGIDKIGFTTADTFSEMKNRLIRQAELGFQSGFEEPDINKRVHPEQIFPEPRSIISIAIAYPSKMKDAPQSKRGERRGIFARASWGTDYHVILRDRLKQLEEFINSKVPEVVTKSMVDTGELADRAVAERAGIGWSGKNCSIITPEFGSYVYLGEMITSLPFEPDTPMEDRCGACNKCIDVCPTGALVAGGQLNAQRCIAFLTQTKGFLPDEFRTKIGNRLYGCDTCQTVCPENKRKDFHFHPETEPDPEIAKPLLKPLLSIGNREFKEKFGHVSGSWRGKKPIQRNAILALAHYKDETALPDLIKVMKEDTRPVIRGTAAWAIGKIGGQEAAAELHLALEAENDQEVINEIRKGLQLQEASQ

SEQ ID NO: 74723 - protein, 379 aa, Bacillus cellulosilyticus
  REGION 1..379: note = tr|E6TTI3|E6TTI3_BACCJ Iron-sulfur cluster binding protein OS=Bacillus cellulosilyticus (strain ATCC 21833 / DSM 2522 / FERM P-1141 / JCM 9156 / N-4) OX=649639 GN=Bc ell_1354 PE=4 SV=1
MANAQLKKEIIAYSKDIGIDKIGFATADPFITLKGRLLEQQTHGFESGFEKGTIEERTEPERLLPEAKTIISIALAYPSKMKHAPRSKMGERRGLFCRASWGEDYHNILREKLSLLESFIMEKVPSAICLSMVDTGELSDRAVAERAGIGWSGKNCAIITPEFGSYVYLGEMITTLNLPVDNPIEDQCGSCNKCVDACPTGALVQGGQLDSNKCIAFLTQTKDLLPEQYRKKIGNRLYGCDTCQVVCPENKGKDFHHHPEMEPDPEVVKPLLIPLLSISNREFKEKFGKISGSWRGKKPIQRNAIIALAHFKEKAAIPYLYELVKKDPRPVIRGTAAWAISEIGDKELVGQLGEALEKEQDPKAYDEMKKALNKLETVT

SEQ ID NO: 74724 - protein, 380 aa, Bacillus cereus
  REGION 1..380: note = tr|A0A2B9E1M8|A0A2B9E1M8_BACCE Epoxyqueuosine reductase OS=Bacillus cereus OX=1396 GN=queG PE=3 SV=1
MDFEQLKQDVIAYSKTIGIDKIGFASASPFEELKQRLIQQQQLNYQSGFEEPDIEKRTNPQLLLPGAKSIIAIALAYPSKLKNAPLSKRGERRGIFCRASWGQDYHLVLRDRLQKLEAYLIEKLPDIEVKSMVDTGELSDRAVSERAGIGWSGKNCAIITPEFGSYVYLGEMITNVPFPPDKPIEDQCGGCTKCIDICPTGALIQGGQLDSKKCIAFLTQTKGFLPEEYRDKIGNRIYGCDTCQTVCPKNKGMDFHNHPEMEPDPELVKPLLTPLLTISNRDFKEKYGIMSGSWRGKKPLQRNAILALAHFKEASAIPDLIGVMKDDPRPVLRGTAAWALGKIGGDGVGEAIEKAMEREKDEEVLHEMKRGLELLAQKKE

SEQ ID NO: 74725 - protein, 380 aa, Bacillus cereus
  REGION 1..380: note = tr|R8PM70|R8PM70_BACCE Epoxyqueuosine reductase; OS = Bacillus cereus VDM053 OX=1053249 GN=queG PE=3 SV=1
MDFEQLKQEVIAYSKTIGIDKIGFASASPFEELKQRLIQQQQLNYQSGFEEPDIEKRTNPQLLLPGAKSIIAIALAYPSKLKNAPLSKRGERRGIFCRASWGQDYHLVLRDRLQKLEAYLIEKLPDIEVKSMVDTGELSDRAVSERAGIGWSGKNCAIITPEFGSYVYLGEMITNVPFPPDQPIEDQCGSCTKCIDICPTGALVQGGQLDSKKCIAFLTQTKGFLPEEYRDKIGNRIYGCDTCQTVCPKNKGMDFHNHPEMEPDPELVKPLLTPLLTISNRDFKEKYGIMSGSWRGKKPLQRNAILALAHFKETAAIPDLIGVMKDDPRPVLRGTAAWALGKIGGDGIGEAIEKAMEREKDEEVLHEMNRGLELLAQKKE

SEQ ID NO: 74726 - protein, 377 aa, Bacillus circulans
  REGION 1..377: note = tr|A0A553SG27|A0A553SG27_BACCI tRNA epoxyqueuosine(34) reductase QueG OS=Bacillus circulans; OX = 1397 GN=queG PE=4 SV=1
MDYDQLKQDIIDYSKTIGIDKIGFTTASTFEEMRIRLIKQQELNYQSGFEEKDIEKRVNPSLLLDQPKSIISIALAYPSKMKERVTSKKGARRGIFCRASWGTDYHVVLRDRLSKLEKYIMERVPDALCKSMVDTGELVDRAVAQRAGVGWSAKNCAIITPEFGSYVYLGEMITNLPLTPDTPMEDQCGECNKCIDACPTGALIQGGQLDAQRCIAFQTQTKGFLAEEFREKLGNRIYGCDTCQTICPKNKGMDFHNHIEMEPDPEIAKPLLVPLLTISNKEFKEKYGHISGSWRGKKPIQRNAIIALAHFKEESAVPDIIGVMKNDPRPVIRGTAAWALGKIGGTESKQALEAISNSETDQEVLQEMQDALARLSS

SEQ ID NO: 74727 - protein, 377 aa, Bacillus circulans
  REGION 1..377: note = tr|A0A561H923|A0A561H923_BACCI Epoxyqueuosine reductase OS=Bacillus circulans OX=1397 GN=FHW50_11232; PE = 4 SV=1
MDYREFKKDIIAYSKTIGIDKIGFTSASTFEEMKVRLITQQELNYQSGFEEKDIEKRVNPSLLLHQPKSIISIALAYPSKMKERVVSKKGERRGIFCRASWGTDYHVVLKDRLQKLEDYIKERIPDALCKSMVDTGELVDRAVAQRAGIGWSGKNCAIITPEFGSYVYLGEMITNLPIEPDTPMEDQCGTCNKCIDVCPTGALVQGGQLNAQRCIAFQTQTKGFLAEEFREKLGNRIYGCDTCQTVCPKNKGMDFHNHPEMEPDPEIAKPLLQPLLFISNKEFKEKYGHISGSWRGKKPIQRNAIIALAHFKEEGAISDLITVMKKDPRPVIRGTAAWALGKIGGDESKTALELARQQEADHEVLKEMDDALQRLAK

SEQ ID NO: 74728 - protein, 383 aa, Bacillus clausii
  REGION 1..383: note = tr|A0A268NXM1|A0A268NXM1_BACCS tRNA epoxyqueuosine(34) reductase QueG OS=Bacillus clausii; OX = 79880 GN=queG PE=4 SV=1
MDYAQLKADLLAYSAEIGVDKLRIASADPFLSLKDRLIEHQEKGYASGFEHPVLEERVDPRLSLPSARTIISIAVAYPTKMKKAPKSIPGARRGVFSRSSWGQDYHTVLNDRLKKLEAFLRARVGETEMVRMVDTGALSDRAVAERAGIGWSAKNTFTITPEFGSFVFLGNLLTSLPFPLDEPLEDLCGSCTKCIDACPTGALVGPGELNAQACLSYQTQTKGFMPDEYREKIGNYLYGWDTCQLVCPYNKGIDSHHHQEMEPDPELCKPLLEPLLSISNRKFKEQFGHMAGSWRGKKPIQRNAIIALAHYKEKSALPKLCELLASDPRPVIRGTAAWAIGKIGGSEKEEKALLKAKETETDQLVQIEIEKGLDLLKKQNGSQ

SEQ ID NO: 74729 - protein, 383 aa, Bacillus clausii
  REGION 1..383: note = tr|Q5WI04|Q5WI04_BACSK 4Fe-4S ferredoxin-type domain-containing protein OS=Bacillus clausii (strain KSM-K16) OX=66692 GN=ABC1466 PE=4 SV=1
MDYAQLKADLLAYSAEIGVDKLRIASAEPFLSLKDRLIEHQEKGYASGFEHPVLEERVDPRLSLPSARTIISIAVAYPTKMKKAPKSIPGARRGVFSRSSWGQDYHTVLNDRLKKLEAFLRERVGETEMVRMVDTGALSDRAVAERAGIGWSAKNTFTITPEFGSFVFLGNLLTSLPFPLDEPLEDLCGSCTKCIDACPTGALVGPGELNAQACLSYQTQTKGFMPDEYREKIGNYLYGWDTCQLVCPYNKGIDSHHHQEMEPDPELCKPLLEPLLSISNRKFKEQFGHMAGSWRGKKPIQRNAIIALAHYKEKSALPKLCELLASDPRPVIRGTAAWAIGKIGGSEKEEKALLKAKETETDQLVQIEIEKGLDLLKKQNGSQ

SEQ ID NO: 74730 - protein, 376 aa, Bacillus coagulans
  REGION 1..376: note = tr|A0A412GRA5|A0A412GRA5_BACCO Epoxyqueuosine reductase OS=Bacillus coagulans OX=1398 GN=queG PE=3 SV=1
MDTAELKKEIIAFSKKIGIDKIGFASPDPFTELKQRLIRQQELGYQSGFEEKDIEKRVNPSLIFDSPQSIIAVALAYPSKIKDPPKGKKGARRGIFCRASWGEDYHTILRDKLSKLEDFLKEKVEGARCKSMVDTGELSDRAVAERAGIGWSGKNCSIITPEFGSYVYLGEMITNIPFEPDTPVEDQCGDCRKCLDVCPTGALVSAGQLNAKRCISFLTQTKDYLPDEFKGKIGNRVYGCDSCQTICPKNKGMDFHFHEEMEPEPETAKPLLEPILRLSNRAFKERFGHMAGSWRGKKPIQRNAMIALAHFKEESAVPELIRILQEDPRPVIRGTAGWALGKIGGEEAKAALLSAREQEEDPDARNEIEKGLAFFE

SEQ ID NO: 74731 - protein, 376 aa, Bacillus coagulans; identical to SEQ ID NO: 74730
  REGION 1..376: note = tr|A0A0B5WTW2|A0A0B5WTW2_BACCO Epoxyqueuosine reductase OS=Bacillus coagulans DSM 1 = ATCC 7050; OX = 1121088 GN=queG PE=3 SV=1

SEQ ID NO: 74732 - protein, 382 aa, Bacillus coahuilensis
  REGION 1..382: note = tr|A0A147KBE2|A0A147KBE2_9BACI Iron-sulfur cluster-binding protein OS=Bacillus coahuilensis p1.1.43; OX = 1150625 GN=Q75_02740 PE=4 SV=1
MNYSEFKKDIIAYSKTIGIDKIGFTTPNPFTEMKNLLIRQEELDYQSGFEEKDIEKRVNPSLLFNQPRSIISIALAYPSKMKEAPRSKEGERRGIFCRASWGTDYHVVLRDRLQKLETYILSRVPDARMKSMVDTGELVDRAVAERAGVGWSGKNCSIITPEFGSYVYLGEMITNLPFAPDEPMQEGCGTCNKCVDVCPTGALIQGGQLDAKRCIAFLTQTKGFLPDEFRGKIGNRLYGCDTCQTVCPKNKGIDVHHHIEMEPDPEIAKPLLLPLLTMSNREFNETYGHVSGSWRGKKPIQRNAILALAHFKERAAVEVLIHLLKTDPRPVIRGTAAWALGKIGGKEAYEALKLYREKEQDQEVVGEIEKGLRFFDPELAER

SEQ ID NO: 74733 - protein, 379 aa, Bacillus cohnii
  REGION 1..379: note = tr|A0A223KLD1|A0A223KLD1_9BACI Epoxyqueuosine reductase OS=Bacillus cohnii OX=33932 GN=queG PE=3 SV=1
MNFTKLKEEIIQYSKQIGIDKIGFTSASPFVELKERLRVQQENGYQSGFEESDIEKRTNPQLLLPQAKSIIAIAIAYPSKMKDAPRSTRKDPRGIFCRASWGTDYHLVLRDRLSKLEEFIKQKVPEATLKSMVDTGELADRAVAERAGIGWSGKNCAIITPEFGSYVYLGEMITNIPFDPDQSIEDRCGSCNKCVDACPTGALIQGGQLDSNKCIAFLTQTKGFLKEEYRTKLGNRLYGCDTCQTVCPENKGKDFHLHAELEPDPELVKPRLKPLLTMSNREFKEKYGHMSGSWRGKKPIQRNAIIALAHYRDKTAVPVLLELIENDPRPVIRGTAAWALGKIGEQSSLPRLMHLMEKEQDSDAREEMEKGIALLKSES

SEQ ID NO: 74734 - protein, 377 aa, unidentified
  source 1..377: note = Bacillus cucumis
  REGION 1..377: note = tr|A0A2N5H981|A0A2N5H981_9BACI Epoxyqueuosine reductase OS=Bacillus cucumis OX=1740721 GN=queG PE=3 SV=1
MDIQKFKKELIAYSTEIGIDKIGFTTAAPFTKLKSRLIKQQELGYQSGFEEPDIDKRVTPAMLLEGAQSIISIALAYPAKMNDRVESKKGDRRGIFSRASWGLDYHHILRERLNKLEKFIFSKLPEAKLKSMVDTGELSDRAVAERAGIGWSGKNCSIITSEFGSYVYLGEIITNIPFEPDLPIEDQCGSCTKCIDACPTGALIQGGQINANRCISFLTQTKELIPDEFRDKIGNRVYGCDSCQTACPVNKGVNFHLHEEMEADPEVAKPLLKPILKLSNREFKKRFGSVSGAWRGKKPIQRNAIIALAHFKDESAVPDLIDILKNEPSSVTRGTAAWALGKIGGEAALRALKKAKELEKDIDVQKEIEKGLNFYNN

SEQ ID NO: 74735 - protein, 380 aa, unidentified
  source 1..380: note = Bacillus cytotoxicus
  REGION 1..380: note = tr|A0A2S1A8E4|A0A2S1A8E4_9BACI Epoxyqueuosine reductase OS=Bacillus cytotoxicus OX=580165 GN=queG PE=3; SV = 1
MDFEKLKQDVIAYSKTIGIDKIGFASASPFEELKQRLIQQQQLNYQSGFEEPDIEKRTNPQLLLPGAKSIIAIALAYPSKLKNAPLSKRGERRGIFCRASWGQDYHLVLRDRLKKLETYLIEKLPGIEVKSMVDTGELSDRAVSERAGIGWSGKNCSIITPEFGSYVYLGEMITNVPFPPDQPIEDQCGSCTKCIDICPTGALVQGGQLNAKKCIAFLTQTKGFLPEEYRDKIGNRIYGCDTCQTVCPKNKGKDFHNHPEMEPDPELVKPLLIPLLTISNREFKEKYGIMSGSWRGKKPLQRNAILALAHFKETAAVPHLIDVMKDDPRPVIRGTAAWALGKIGGDGVGVAIERAMEREKDEEVLHEMKRGLELLAQKKE

SEQ ID NO: 74736 - protein, 380 aa, unidentified; identical to SEQ ID NO: 74735
  source 1..380: note = Bacillus cytotoxicus
  REGION 1..380: note = tr|A7GL15|A7GL15_BACCN Epoxyqueuosine reductase; OS = Bacillus cytotoxicus (strain DSM 22905 / CIP 110041 / 391-98 / NVH 391-98) OX=315749 GN=queG PE=3 SV=1

SEQ ID NO: 74737 - protein, 383 aa, Bacillus daliensis
  REGION 1..383: note = tr|A0A1H0I6F8|A0A1H0I6F8_9BACI Epoxyqueuosine reductase OS=Bacillus daliensis OX=745820 GN=queG PE=3 SV=1
MNADIKNKIIKYSKEIGIDKIGFASADPFVTMKERLRVQQENGFQSGFEKGTLEERTKPDLLLPQAKTVISIALAYPSKMKNAPRSVKGDRRGIFCRASWGEDYHHVLRRKLNLLEEFITNMYPEERCRSMVDTGELSDRAAAERAGIGWSGKNCAVITPEFGSYVYLGEMITTLSMEEDTPIEDQCGTCNKCVDACPTGALVQGGQLDATKCIAFLTQTKTMLPERYRKKLGNRLYGCDTCQTVCPENKGIDEHRHPEMEPDPEIVKPSLEPLLTISNKEFKNKYGKISGSWRGKKPIQRNALIALAVFKEETSLPSIIKVMNEDPRPVMRGTAVWALKEIAPTAETKHLLQSFKTKEEAPEVLEEVEKALADLSSQGGMYV

SEQ ID NO: 74738 - protein, 379 aa, unidentified
  source 1..379: note = Bacillus deserti
  REGION 1..379: note = tr|A0A2N5M4D5|A0A2N5M4D5_9BACI Epoxyqueuosine reductase OS=Bacillus deserti OX=673318 GN=queG PE=3 SV=1
MDYNQLKSDIIAYSKTIGIDKIGFTTSSTFDEMKNKLIRQQELGFQSGFEEPDINKRTDPGLILEKPRSIISIALAYPSKLKNAPLSKRGERRGIFCRASWGEDYHTVLRDRLQKLEEYIYRRVPNARCRSMVDTGELVDRAVAQRAGIGWSGKNCSIITPEFGSYVYLGEMITNLPLESDAPMEDRCGSCNKCIDVCPTGALVQGGQLNAQRCIAFLTQTKGFLPDEFRNKLGNRIYGCDTCQTVCPENKGKNFHFHPEMEADPEIAKPLLTPMLRMSNKEFKEKFGKISGAWRGKKPLQRNAIIALAHYKEESAIPELIEVLEKDPRPVIRGTAAWALGKIGGPGSRQALDKAKNTDQDAEVLEEIEKGMQLLSADQ

SEQ ID NO: 74739 - protein, 380 aa, unidentified
  source 1..380: note = Bacillus enclensis
  REGION 1..380: note = tr|A0A0V8HHK1|A0A0V8HHK1_9BACI Epoxyqueuosine reductase OS=Bacillus enclensis OX=1402860 GN=queG PE=3; SV = 1
MDFDQLKQDIIEYSKEIGIDKIGFTTANTFSEMKNRLIRQEMLGYQSGFEEKDIEKRVDPSLIFDGPKSIIAIALAYPSRMKDAPQSKRGERRGIFCRASWGADYHHVLRDRLAKLEDYIVSRIPEARFKSMVDTGELVDRAVAERAGIGWSGKNCSIITPEFGSYVYLGEMVTNLPFEPDEPMEDQCGTCNKCVDVCPTGALIEGGQLDAQKCIAFLTQTKGFLADEYRVKLGNRLYGCDTCQTVCPENKGKDFHFHQEMEPDPEIAKPLLKPLLTISNREFKEKYGHVSGSWRGKKPIQRNAIIALAHYKDETAVEDLINVMKNDVRPVMRGTAAWALGKIGGAEAEKALLAKQSVETDDEVLAEIEKGMRMLAPDAG

SEQ ID NO: 74740 - protein, 377 aa, Bacillus endophyticus
  REGION 1..377: note = tr|A0A329F324|A0A329F324_9BACI Epoxyqueuosine reductase OS=Bacillus endophyticus OX=135735 GN=queG PE=3; SV = 1
MDINQLKEEVIAYSKEIGIDKIGFASASTFQTLKNRLERHRELGYESGFEEKDLEKRTNPDLLLEEAKSIIAIAVAYPSKMKDAPRGTKEDRRGIFCRASWGHDYHNVLRDRLNKLEAFIKEKVPSARLKSMVDTGELSDRAVAERAGIGWSGRNCAIITPEFGSYVYLGEMVTTLPFEPDQPVEDGCGTCNKCIDVCPTGALVQGGQLNSHRCIAFLTQTKGFLPDEFRTKIGNRLYGCDTCQTVCPENKGKDFHLHAELEPDPEIAKPKLKPLLQMSNREFKEKYGHVSGSWRGKKPIQRNAIIALAHFKDETAVPELIKLLKGDVRPVIRGTAAWALGKIGTNEAVRELETALLKEKEEEVIEEIKKGLRLVNS

SEQ ID NO: 74741 - protein, 377 aa, Bacillus endophyticus
  REGION 1..377: note = tr|A0A3N6C0D7|A0A3N6C0D7_9BACI Epoxyqueuosine reductase OS=Bacillus endophyticus OX=135735 GN=queG PE=3; SV = 1
MDINQLKEEVIAYSKEIGIDKIGFASASTFQTLKNRLERHRELGYESGFEEKDLEKRTNPDLLLEEAKSIIAIAVAYPSKMKDAPRGTKEDRRGIFCRASWGHDYHNVLRDRLNKLEAFITEKVPSARLKSMVDTGELSDRAVAERAGIGWSGKNCAIITPEFGSYVYLGEMITTLPFEPDQPVEDGCGTCNKCIDVCPTGALVQGGQLNSNRCIAFLTQTKGFLPDEFRTKIGNRLYGCDTCQTVCPENKRKDFHLHAELEPDPEIAKPKLKPLLQMSNREFKEKYGHVSGSWRGKKPIQRNAIIALAHFKDETAVPELIKLLKADVRPVIRGTAAWALGKIGTDEAVSELETALLKEKEEEVIEEIKKGLRLVNS

SEQ ID NO: 74742 - protein, 373 aa, unidentified
  source 1..373: note = Bacillus endozanthoxylicus
  REGION 1..373: note = tr|A0A5J5I5U9|A0A5J5I5U9_9BACI tRNA epoxyqueuosine(34) reductase QueG OS=Bacillus endozanthoxylicus OX=2036016 GN=queG PE=4 SV=1
MNYSQLKQEVIEYSKTIGIDKIGFTTASPFNDLRNRLIRQRELNFQSGFEEKDIEKRTNPSLLMSGAQSIISIAVAYPSKMKNRTISKEGERRGIFSRASWGLDYHIVLRRRLEKLEEFIRDKVPEVRLKSMVDTGELADRAVAERAGIGWSGKNCAIITPEFGSYVYLGEMITSLPFEPDTPLEDQCGTCNKCIEACPTGALVAGGQINAQRCISFLTQTKEAIPEEFRNKIGNRLYGCDSCQTACPVNKGKDFHLHAEVEADPDIAKPLLQPLLSLSNRQFKEKFGHVSGAWRGKNPIQRNAVIALAHFKDQTALDDLIDILKHDPRPVMRETAAWAIGKIDGKNSRAALEEALEKETDEAVIFEINKVLS

SEQ ID NO: 74743 - protein, 377 aa, unidentified
  source 1..377: note = Bacillus filamentosus
  REGION 1..377: note = tr|A0A1X7FGH7|A0A1X7FGH7_9BACI Epoxyqueuosine reductase OS=Bacillus filamentosus OX=1402861 GN=queG PE=3; SV = 1
MDINQLKEEIIAYSKEIGIDKIGFASASAFQTLKNRLERHRELGYESGFEEPDLEKRTNPELLLEEAKSIIAIAVAYPSKMKDAPRGTKEDRRGIFCRASWGHDYHNVLRDRLNKLEAFITEKVPGARLKSMVDTGELSDRAVAERAGIGWSGKNCAIITPEFGSYVYLGEMITTLPLEPDQPVEDGCGTCNKCIDVCPTGALVQGGQLNSNRCIAFLTQTKGFLPDEFRTKIGNRLYGCDTCQTVCPENKGKDFHLHAELEPDPEIAKPKLKPLLQMSNREFKEKYGHVSGSWRGKKPIQRNAIIALAHFKDETAVPELIKLLKADVRPVIRGTAAWALGKIGTNEAVSELEMALLKEKEEEVIEEIKKGLRLVNS

SEQ ID NO: 74744 - protein, 377 aa, Bacillus firmus
  REGION 1..377: note = tr|A0A380XFZ7|A0A380XFZ7_BACFI Putative iron-sulfur cluster-binding protein OS=Bacillus firmus OX=1399 GN=queG; PE = 4 SV=1
MDFAQFKQEVIEYSRTIGIDKIGFTTAGTFDEMKNRLIRQQELQYHSGFEEPDIEKRVNPGLLMDKPRSIISIAVAYPSKMKVRVVSKRGERRGIFCRASWGKDYHHILRERLQKLEEFIKSRIPEAVCKSMVDTGELVDRAVAQRAGIGWSGKNCSIITPEFGSYVYLGEMITNLPFEPDKPMEDRCGSCNKCVDVCPTGALIQGGQLDAQKCIAFLTQTKGFLAEQYREKLGNRLYGCDTCQTVCPENKGKDFHLHDEMEPDPEVAKPLLRPLLFISNREFKEKYGPVSGSWRGKKPIQRNAIIALAHYKDETAAEDLIKVMREDPRPVIRGTAAWALGKIGGEKSLPALKQALHQEKDGEVIAEIEKGLSFFEQ

SEQ ID NO: 74745 - protein, 377 aa, Bacillus firmus
  REGION 1..377: note = tr|W7LAY8|W7LAY8_BACFI Iron-sulfur cluster binding protein OS=Bacillus firmus DS1 OX=1307436 GN=PBF_02465; PE = 4 SV=1
MDFAQFKQEVIEYSRTIGIDKIGFTTAGTFDEMKNRLIRQQELQYHSGFEEPDIEKRVNPGLLMDKPRSIISIAVAYPSKMKVRVVSKRGERRGIFCRASWGKDYHHILRERLQKLEEFIQSRIPEAICKSMVDTGELVDRAVAQRAGIGWSGKNCSIITPEFGSYVYLGEMITNLPFEPDKPMEDRCGSCNKCVDVCPTGALIQGGQLDAQKCIAFLTQTKGFLAEPYREKLGNRLYGCDTCQTVCPENKGKDFHLHEEMEPDPEVAKPLLRPLLFISNREFKEKYGPVSGSWRGKKPIQRNAIIALAHYKDETAAEDLIKVMSEDPRPVIRGTAAWALGKIGGEKSLTALKQALQQEKDGEVIAEIEKGLSYFEQ

SEQ ID NO: 74746 - protein, 378 aa, Bacillus flexus
  REGION 1..378: note = tr|A0A4P8XBT0|A0A4P8XBT0_9BACI Epoxyqueuosine reductase OS=Bacillus flexus OX=86664 GN=queG PE=3 SV=1
MDFQQLKKEVIAYSKEIGIDKIGFASASTFETLKDRLLRQQELGYASGFEEPDIEKRTNPTLLVPKAKSIIAIALAYPSKMPNAPRSTKEDRRGIFCRASWGQDYHTILRDRLQKLESFLKEKVQGVEVKSMVDTGELSDRAVAERAGIGWSGKNCAIITPEFGSYVYLGEIVTNIPFEPDQPIEDQCGTCNKCVEVCPTGALVTGGQLNSQRCIAFLTQTKGFLVDEFRDKIGNRLYGCDTCQTVCPENKGKDFHFHPEMEPDPEIAKPKLKPLLTMSNREFKEKYGHVSGSWRGKKPIQRNAIIALAHFKDETAIPDLIKVMKEDVRPVIRGTAAWALGKIGNDEVLPILEQLKEKEQDEEAKQEFEKGIALLVKS

SEQ ID NO: 74747 - protein, 376 aa, Bacillus foraminis
  REGION 1..376: note = tr|A0A4R2BLL2|A0A4R2BLL2_9BACI Epoxyqueuosine reductase OS=Bacillus foraminis OX=279826 GN=EV146_101479; PE = 4 SV=1
MNIHQLQQDIIEYSKTIGIDKIGFASPSPFMELKNRLLRQQELGYQSGFEEPDIEKRVRPDLLFDQPQSIIAIAVAYPSKMKIRVVSKKGERRGIFCRASWGKDYHHVLRERLKKLEDYIASRVPEAKFKSMVDTGELVDRAVAERAGIGWSGKNCSIITPEFGSYVYLGEMITNIPFVPDSPMEDQCGTCNKCIEACPTGALVQGGQLNSQKCIAFLTQTKGFLPDEFRDKIGNRIYGCDSCQTACPVNKGRDYHFHDEMEPDPETAKPLLKPILKISNREFKEKFGPVSGSWRGKKPIQRNAIIALAHYKDETAVPELIQVMKEDPRPVLRGTAAWSLGKIGGAKAKEALEQAAESEKDEEVLAEVAKGLSFFH

SEQ ID NO: 74748 - protein, 379 aa, Bacillus fortis
  REGION 1..379: note = tr|A0A443J2D8|A0A443J2D8_9BACI Epoxyqueuosine reductase OS=Bacillus fortis OX=254758 GN=queG PE=3 SV=1
MDYGKLKDEIIAYSREIGIDKIGFTSADPFIEMKNLLIRQEELGYQSGFEHKNIEERTHPELIFDEPRSIIAIALAYPSKMNNAPRGKPGARRGIFCKASWGVDYHVLVREKLEQLAAFIDSKVCDARFKLMVDTGELVDRAVAERAGIGWSGKNCSIITPEFGSYVYLGEMITNLPFAPDEPMHDQCGECTKCLDACPTGALVQPGQLDAQSCIAFLTQTKGLLPDEFRDKIGNRLYGCDTCQAVCPKNKGVDFHLHPGMEPDPDIAKPLLQPLLDISNREFKEKYGAVSGSWRGKKPIQRNAIIALGHFKDQSAVSDLIKVLNEDVRPEIRGTAAWSLGKIGGEQAKEALMRAQEMEEDPVVLEEIEKGLQFFELEM

SEQ ID NO: 74749 - protein, 382 aa, unidentified
  source 1..382: note = Bacillus freudenreichii
  REGION 1..382: note = tr|A0A3S4TW55|A0A3S4TW55_9BACI Epoxyqueuosine reductase OS=Bacillus freudenreichii OX=1783501 GN=queG; PE = 3 SV=1
MDYGKLKNEIIEYSKKIGIDKIGFTSADPFVEMKNLLIRQEELGYQSGFEHKNIEERTHPELIFDEPRSIIAIALAYPSKMKDAPRGEHGARRGIFCKASWGVDYHVLVREKLEQLASFIDDKVQDARFKLMVDTGELVDRAVAERAGIGWSGKNCSIITPEFGSYVYLGEMITNLPFAPDEPMEDQCGECTKCLDACPTGALIQPGQLDAQSCIAFLTQTKGLLPDEFRDKIGNRLYGCDTCQVVCPKNKGIDSDWHEQMKPDPEIAKPLLQPLLEISNREFKEKFGEVSGSWRGKKPIQRNAILALAHFKEQPAVGDLIKVLNEDVRPEIRGTAAWSLGKIGGIQAEKALIHAKSKEEHPEVLEEINKGLRFFESHENIK

SEQ ID NO: 74750 - protein, 380 aa, unidentified
  source 1..380: note = Bacillus gaemokensis
  REGION 1..380: note = tr|A0A073KLZ8|A0A073KLZ8_9BACI Epoxyqueuosine reductase OS=Bacillus gaemokensis OX=574375 GN=queG PE=3; SV = 1
MDFEQLKQDVIAYSKTIGIDKIGFASASPFEELKQRLIQQQQLNYQSGFEEPDIEKRTNPQLLLPGAKSIIAIALAYPSKLKNAPLSKRGERRGIFCRASWGQDYHLVLRDRLQKLEAYLIEKLPDIEVKSMVDTGELSDRAVSERAGIGWSGKNCAIITPEFGSYVYLGEMITNVPFPPDQPIEDQCGSCTKCIDICPTGALVQGGQLDSKKCIAFLTQTKGFLPEEYRDKIGNRIYGCDTCQTVCPKNRGKDFHNHPEMEPDPELVKPLLLPLLTISNRDFKEKYGIMSGAWRGKKPLQRNAILALAHFKETAAIPDLISVMKDDPRPVIRGTAAWALGKIAGEGVGEAIEKAMEREKDEEVLHEMNRGLELLAQKKQ

SEQ ID NO: 74751 - protein, 381 aa, Bacillus ginsengihumi
  REGION 1..381: note = tr|A0A0A6VDE3|A0A0A6VDE3_9BACI Iron-sulfur cluster-binding protein OS=Bacillus ginsengihumi OX=363870; GN = NG54_14705 PE=4 SV=1
MDITKLKKEVIAFSQLIGIDKIGFTTADPFTEMKQRLIRQQQLNYQSGFEEKDIEKRVNPSLIFDGPQSIIAIALAYPAKIENPPKGVKGDRRGVFCKASWGQDYHHILKEKLQQLETFIKEKVEGAQCKSMVDTGELVDRAVAERAGIGWSGKNCSIITPEFGSYVYLGEMITNIPFDPDVPMEDQCGECRKCLDVCPTGALVQPGQLNAKRCIAFITQTKGFVDDEFKEKIGNRLYGCDSCQTICPKNKGIDFHFHEEMEPDPEIAKPKLTPLLKISNREFKEVFGHVSGSWRGKKPIQRNAIIALAHFKEKSAVPDLIKVLREDSRPVMRGTAAWALGKIGGEEAKVALEVAELREEDSEALQEIRKGLAFFKENTAD

SEQ ID NO: 74752 - protein, 382 aa, unidentified
  source 1..382: note = Bacillus glycinifermentans
  REGION 1..382: note = tr|A0A1C3SAA2|A0A1C3SAA2_9BACI Epoxyqueuosine reductase OS=Bacillus glycinifermentans OX=1664069 GN=yhbA; PE = 3 SV=1
MNVKQLKEDVIEFAQQIGIDKIRFASADTFETLKERLIENRKLGYESGFEEPDLEKRTNPQLLLPKAKSIIAIALAYPSKMKNAPRSVKGDRRGIFCRASWGKDYHHVLREKLDQLEEFLQSQHEDVRTKSMVDTGELSDRAVAERAGIGWSGKNCMIITPEFGSYVYLAEMITNIPFEPDERIEDQCGSCNKCIEACPTGALVNPGQLNSQRCISFQTQTKGFLPDEFRTKIGNRIYGCDTCQMVCPKNKGVDFHLHPEMEPDPEIAKPLLKPLLTISNREFKEKFGHIAGSWRGKKPIQRNAIIALAHFKETGALPELVSLMHQDPRPVIRGTAAWAIGKIGEADMLEELEKALSREEDDEAKAEIQKGIRLLTETAMTK

SEQ ID NO: 74753 - protein, 382 aa, unidentified
  source 1..382: note = Bacillus glycinifermentans
  REGION 1..382: note = tr|A0A0T6BLU5|A0A0T6BLU5_9BACI Epoxyqueuosine reductase OS=Bacillus glycinifermentans OX=1664069 GN=queG; PE = 3 SV=1
MNVKQLKADVIEFAQQIGIDKIRFASADTFETLKERLIENRKLGYESGFEEPDLEKRTNPKLLLPKAKSIIAIALAYPSKMKNAPRSVKGERRGIFCRASWGKDYHHVLREKLDQLEEFLQSQHEDVRTKSMVDTGELSDRAVAERAGIGWSGKNCMIITPEFGSYVYLAEMITNIPFEPDERIEDQCGSCNKCIEACPTGALVNPGQLNSQRCISFQTQTKGFLPDEFRTKIGNRIYGCDTCQMVCPKNKGVDFHLHPEMEPDPEIAKPLLKPLLTISNREFKEKFGHIAGSWRGKKPIQRNAIIALAHFKETGALPELISLMHQDPRPVIRGTAAWAIGKIGEADMLEELEKALSREEDDEAKAEIQKGIQLLTETAMTK

SEQ ID NO: 74754 - protein, 383 aa, unidentified
  source 1..383: note = Bacillus gobiensis
  REGION 1..383: note = tr|A0A0M4FEC1|A0A0M4FEC1_9BACI Epoxyqueuosine reductase OS=Bacillus gobiensis OX=1441095 GN=queG PE=3; SV = 1
MDVTKLKQEVIEYAHQIGIDKIGFASADTFESLKQRLITQQALQYESGFEERDIEKRTNPDLLLPKARSIIAIALAYPSKMKNAPRGTRTDRRGIFCRASWGKDYHHVLREKLSKLEEYLREKREDIRTKSMVDTGELSDRAVAERAGIGWSGKNCAIITPEFGSYVYLGEMITNIPFEPDTPIEDKCGTCNKCVDVCPTGALIQGGQLNAKRCIAFLTQTKGFLPEEFRSKIGNRLYGCDTCQTICPENKGKDFHLHPEMEPDPEVVKPRLKPLLTISNREFKEKFGDISGSWRGKKPIQRNSIIALAHYKDITALPELASLLKNDPRPVIRGTAAWAIGKIGGEDYTNQLNEAWMAEGDEEAKKEIEKGLKMAMNTKSSQS

SEQ ID NO: 74755 - protein, 391 aa, Bacillus halodurans
  REGION 1..391: note = tr|A0A4Y7WZR9|A0A4Y7WZR9_BACHO Epoxyqueuosine reductase OS=Bacillus halodurans OX=86665 GN=queG PE=3 SV=1
MTPAQLKDELIAYSKTIGIDKIGFASADPFLTLKERLQTQQALGYQSGFEEPDIDKRVYPEKILPKARSIISIALAYPSKMKNPPKSKKGERRGVFCRASWGKDYHDILRDRLKKLEDFLLERVPDMKVLSMVDTGALSDRAVAERAGIGWSGKNCAVITPEFGSYVYLGDLVTTIPFPPDIPLTDQCGTCNKCVDACPTGALIQGGQLDSQKCIAFLTQTKGFLPEKYRKKLGNRLYGCDTCQQVCPANKGKNFHFHEEMEPDPEIAKPKLIPLLTMSNREFKEKFGHVSGSWRGKKPIQRNAILALAHFKEEAALPILADLLRQDPRPVIRGTAGWALGKIGGPEVETWLKDALKREKDEDVRAEISRGLEILAYGDSGNGKETEDSIR

SEQ ID NO: 74756 - protein, 391 aa, Bacillus halodurans
  REGION 1..391: note = tr|Q9KE38|Q9KE38_BACHD Epoxyqueuosine reductase; OS = Bacillus halodurans (strain ATCC BAA-125 / DSM 18197 / FERM 7344 / JCM 9153 / C-125) OX=272558 GN=queG PE=3 SV=1
MTPAQLKDELIAYSKTIGIDKIGFASADPFLTLKERLQTQQALGYQSGFEEPDIDKRVYPEKILPKARSIISIALAYPSKMKNPPKSKKGERRGVFCRASWGKDYHDILRDRLKKLEDFLLERVPDMKVLSMVDTGALSDRAVAERAGIGWSGKNCGVITPEFGSYVYLGDLVTTIPFPPDIPLTDQCGTCNKCVDACPTGALIQGGQLDSQKCIAFLTQTKGFLPEKYRKKLGNRLYGCDTCQQVCPANKGKNFHFHEEMEPDPEIAKPKLIPLLTMSNREFKEKFGHVSGSWRGKKPIQRNAILALAHFKEEAALPILADLLRQDPRPVIRGTAGWALGKIGGPEVETWLKDALKREKDEDVRAEISRGLEILAYGDSGNGKETEDSIR

SEQ ID NO: 74757 - protein, 381 aa, unidentified
  source 1..381: note = Bacillus halotolerans
  REGION 1..381: note = tr|A0A2S9WF75|A0A2S9WF75_9BACI tRNA epoxyqueuosine(34) reductase QueG OS=Bacillus halotolerans; OX = 260554 GN=queG PE=4 SV=1
MNVYQLKEELIEYAKSIGVDKIGFTTADTFDSLKDRLILQESLGYLSGFEEPDIEKRVTPTLLLPKAKSIVAIALAYPSRMKDAPRSTRTERRGIFCRASWGKDYHDVLREKLDLLEDFLRSKHEDIRTKSMVDTGELSDRAVAERAGIGFSAKNCMITTPEYGSYVYLAEMITNIPFEPDVPIEDMCGSCTKCLDACPTGALVNPGQLNAQRCISFLTQTKGFLPDEFRTKIGNRLYGCDTCQTVCPINKGKDFHLHPEMEPDPEIAKPLLKPLLTISNREFKEKFGHVSGSWRGKKPIQRNAILALAHFKDTSALPELTELMHKDPRPVIRGTAAWAIGKIGDNTYAEELEKALKNENDEEAKQEIEKGIELLKAGMTK

SEQ ID NO: 74758 - protein, 381 aa, unidentified
  source 1..381: note = Bacillus halotolerans
  REGION 1..381: note = tr|A0A3T0L766|A0A3T0L766_9BACI tRNA epoxyqueuosine(34) reductase QueG OS=Bacillus halotolerans; OX = 260554 GN=queG PE=4 SV=1
MNVYQLKEELIEYAKSIGVDKIGFTTADTFDSLKDRLILQESLGYLSGFEEPDIEKRVTPTLLLPKAKSIVAIALAYPSRMKDAPRSTRTERRGIFCRASWGKDYHDVLREKLDLLEDFLRSKHEDIRTKSMVDTGELSDRAVAERAGIGFSAKNCMITTPEYGSYVYLAEMITNIPFEPDVPIEDMCGSCTKCLDACPTGALVNPGQLNAQRCISFLTQTKGFLPDEFRTKIGNRLYGCDTCQTVCPINKGKDFHLHPEMEPDPEIAKPLLKPLLTISNREFKEKFGHVSGSWRGKKPIQRNAILALAHFKDTSALPELTELMHKDPRPVIRGTAAWAIGKIGDNTYAEELEKALEKENDEEAKQEIEKGIELLKAGMTK

SEQ ID NO: 74759 - protein, 382 aa, unidentified
  source 1..382: note = Bacillus haynesii
  REGION 1..382: note = tr|A0A1R1RWG0|A0A1R1RWG0_9BACI Epoxyqueuosine reductase OS=Bacillus haynesii OX=1925021 GN=queG PE=3 SV=1
MDVKKLKQDVIEFAQQIGIDKIRFASADTFETLKERLIENRTLGYESGFEEPDLEKRTNPDLLLPKAKSIIAIALAYPSKMKDAPRSKKGERRGIFCRASWGKDYHHVLREKLDQLEEFLKAQRSDIRTKSMVDTGELSDRAVAERAGIGWSGKNCMIITPEFGSYVYLAEMITNIPFEPDERIEDQCGSCNKCIEACPTGALVNPGQLNSQRCIAFQTQTKGFLPDEFRTKIGNRIYGCDTCQMVCPKNKGVDFHLHPEMEPDPEIAKPLLKPLLTMSNREFKEKFGHVAGSWRGKKPIQRNAIIALAHFKEADALPELIELMHKDPRPVIRGTAAWAVGKIGGADVMGELERALAHEQDEEAKAEIQKGIGLLKETSATN

SEQ ID NO: 74760 - protein, 382 aa, unidentified
  source 1..382: note = Bacillus haynesii
  REGION 1..382: note = tr|W7RK67|W7RK67_9BACI Epoxyqueuosine reductase; OS = Bacillus haynesii OX=1925021 GN=queG PE=3 SV=1
MDVKKLKQDVIEFAQQIGIDKIRFASADTFETLKERLIENRTLGYESGFEEPDFEKRTNPDLLLPKAKSIIAIALAYPSKMKDAPRSKKGERRGIFCRASWGKDYHHVLREKLDQLEEFLKAQRSDIRTKSMVDTGELSDRAVAERAGIGWSGKNCMIITPEFGSYVYLAEMITNVPFEPDERIEDQCGSCNKCIEACPTGALVNPGQLNSQRCIAFQTQTKGFLPDEFRTKIGNRIYGCDTCQMVCPKNKGVDFHLHPEMEPDPEIAKPLLKPLLTMSNREFKEKFGHVAGSWRGKKPIQRNAIIALAHFKEADALPELIELMHKDPRPVIRGTAAWAVGKIGGADVMGELERALAHEQDEEAKAEIQKGIGLLKETSATN

SEQ ID NO: 74761 - protein, 380 aa, Bacillus hemicellulosilyticus
  REGION 1..380: note = tr|W4QF88|W4QF88_9BACI Epoxyqueuosine reductase; OS = Bacillus hemicellulosilyticus JCM 9152 OX=1236971; GN = queG PE=3 SV=1
MTLAQLKDEIIAYSKSIGIDKIGFASADPFLQLKDRLLTQKQLGYQSGFEEPDIDKRVTPERLLPHAKTIISIALAYPSKMKNPPKNTREERRGIFCRASWGKDYHHILRERLQKLEQFIRERAPEARTVSMVDTGELSDRAVAERAGIGWSGKNCAIITPEFGSYVYLGDLITTLSIEPDVPLTDQCGSCTKCIDACPTGALVQGGQLNSQKCIAYLTQTKDFLTDQYRKKLGNRLYGCDTCQQVCPVNKGKDAHIHSEMEPDPEIAKPKLIPLLTMSNRSFKEKFGHVSGSWRGKKPIQRNAIIALAHFKDERSLPVLTDLVKNDPRPVIRGTAAWAIGVIGSYQEKKLLTELKKSECEEKVLEEIEKGLNIIENKSF

SEQ ID NO: 74762 - protein, 374 aa, unidentified
  source 1..374: note = Bacillus hisashii
  REGION 1..374: note = tr|A0A267TUY8|A0A267TUY8_9BACI Epoxyqueuosine reductase OS=Bacillus hisashii OX=996558 GN=queG PE=3 SV=1
METQALKKEIIDYAISIGIDKIGFATAAPFTTLKARLIRQQELNYQSGFEESDIDKRTNPALLFDNPQSIISIALAYPTKMNKHVRGTKGERRGLFARASWGEDYHLVLRDRLSKLEQFIYSKMPDARCKSMVDTGELSDRAVAERAGIGWSGKNCAIITPEYGSFVYLGEMITNIPFEPDTPIENMCGTCNKCIEACPTGALVQPGQINAKICISYLTQTKDFLPDEYRSVIGNRLYGCDTCQIVCPYNKGKDFHFHEEFEPEPEVAKPLLKPLLKISNKEFKEKYGRVSGAWRGKKPIQRNAIIALGHFKDETAIDELSDVIRNDPRPVIRGTAAWALGKIGTEKAKQILTKAKIEEKDEDVLQEIEVALAE

SEQ ID NO: 74763 - protein, 379 aa, Bacillus horikoshii
  REGION 1..379: note = tr|A0A1Y0CKN9|A0A1Y0CKN9_9BACI tRNA epoxyqueuosine(34) reductase QueG OS=Bacillus horikoshii; OX = 79883 GN=B4U37_05415 PE=4 SV=1
MNEENIKLKEELIAYSKQIGIDKIGFASAGVFTGLKERLITQQELNYQSGFEEPDIKKRTNPELIVPKAKSIIAIALAYPSKMKDAPRSTREERRGIFCRASWGVDYHDILREKLRLLEAFIKEKRPDALMKSMVDTGELSDRAVAERAGIGWSGKNCAIITPEFGSYVYLGEMITTLPFEPDTPLEDNCGTCNKCVEVCPTGALVQGGQLDSNKCIAFLTQTKGFLAEEYRTKLGNRLYGCDTCQTVCPENKGKDFHLHPEMEPDPEIVKPKLKPLLTISNREFKENFGKISGSWRGKKPIQRNAIIALAHYKDTSAIPDLLSLLENDPRPVIRGTAAWAVGRIGDKQALVSLQNYKATEKDPEVLKELENGINMLTE

SEQ ID NO: 74764 - protein, 379 aa, Bacillus horikoshii
  REGION 1..379: note = tr|A0A5D4SCQ0|A0A5D4SCQ0_9BACI tRNA epoxyqueuosine(34) reductase QueG OS=Bacillus horikoshii; OX = 79883 GN=queG PE=4 SV=1
MNEENIKLKEELIAYSKQIGIDKIGFASAGVFTGLKERLITQQELNYQSGFEEPDIEKRTNPELIMPKAKSIIAIALAYPSKMKDAPRSTREERRGIFCRASWGVDYHDILREKLRLIEAFIKEKHPDALMKSMVDTGELSDRAVAERAGIGWSGKNCAIITPEFGSYVYLGEMITTIPFEPDTPLEDNCGTCNKCVEVCPTGALVQGGQLDSNKCIAFLTQTKGFLAEEYRTKLGNRLYGCDTCQTVCPENKGKDFHLHPEMEPDPEIVKPKLKPLLTISNREFKENFGKISGSWRGKKPIQRNAIIALAHYKDTSAIPDLLSLLENDPRPVIRGTAAWAVGRIGDKQALVSLQNYKATEKDPEVLKELEKGIGMLTE

SEQ ID NO: 74765 - protein, 377 aa, Bacillus horneckiae
  REGION 1..377: note = tr|A0A2N0ZHJ4|A0A2N0ZHJ4_9BACI Epoxyqueuosine reductase OS=Bacillus horneckiae OX=549687 GN=queG PE=3; SV = 1
MKISTLKNDLIAYSKTIGIDKIGFTTASTFNGLRNRLMKQQELGYQSGFEEPDIEKRVNPALLMDEPQSIISIALAYPTKMKTRVVSKQGERRGIFCRASWGEDYHLVLKDRLTKLEAYLIEKVPDVKFKAMVDTGELSDRAVAERAGIGWSGKNCSIITPEFGSYVYLGEIITNIPFEPDTPLEDRCGTCNKCIDACPTGALVQGGQLNAQRCISFLTQTKGFLPDEFRDELGNRIYGCDTCQTVCPENKGKDFHFHSEMEPDPEIVKPLLKPLLRISNREFKEKFGRLSGSWRGKKPIQRNAIIALAHFKDKTAVKDLQELMSSDSRPVIRGTAAWSLGKIGGEDAYEALQKALKEEKDQEVIDEINKGLLFIEK

SEQ ID NO: 74766 - protein, 379 aa, Bacillus hwajinpoensis
  REGION 1..379: note = tr|A0A4U1ME87|A0A4U1ME87_9BACI Epoxyqueuosine reductase OS=Bacillus hwajinpoensis OX=208199 GN=queG PE=3; SV = 1
MINAQLKSDIVAYSKTIGIDKIGFAAADPFKSLKERLKRQQDLGYQSGFEESDIEKRTEPELLLNGATTIISIAIAYPSRMKESPRSKRGERRGLFCRASWGVDYHHVLREKLSLLDAYIKSKVPEASTSSMVDTGELSDRAVAERAGIGFSGKNTMTITEEFGSWVYLGEMITDLYMEPDEPVEEGCGDCNICVDACPTGALIEGGQLNANKCIAFLTQTKGFLPDEYRAKLGNRLYGCDTCQLVCPKNKGKDFHHHPELEPDPEMVKPKLIPLLTMSNREFKERFGNAAGSWRGKKPIQRNAILALAHYKDESSVDTLIELMEKDPRPVIRGTSAWALGKIGGDKAYQALYKEQMREKDKDAADEIAKGLSMLENKA

SEQ ID NO: 74767 - protein, 377 aa, Bacillus indicus
  REGION 1..377: note = tr|A0A084GIM5|A0A084GIM5_BACID Epoxyqueuosine reductase OS=Bacillus indicus OX=246786 GN=queG PE=3 SV=1
MNAAELKQDLIAYSKSIGIDKIGFAQATVFEELKQRLIVHEQKGYMSGFEEPDIEKRTNPDLLVPGAKSIISIALAYPSKLKDAPRSTKEDRRGIFCRASWGQDYHDVLRDRLKKLEAYILEKLPDAELKSMVDTGELSDRAAAERAGIGWSGKNCAIITPEFGSYVYLGEIITNIALPPDTPMEDRCGSCTICVDACPTGALVQGGQLDSSKCIAFLTQTKGFLEERYRKKLGNRLYGCDTCQTVCPENKGKDFHLHPEMEPDPEIAKPKLKPLLTMSNREFKEKFGHVSGSWRGKKPIQRNAIIALAHFKDTTAVPELTFLMQKDPRPVIRGTAAWALGVIGEAASLPDLKKALQQEQDEEARAEMEKGLALLQQ

SEQ ID NO: 74768 - protein, 376 aa, Bacillus infantis
  REGION 1..376: note = tr|A0A5D4QZH7|A0A5D4QZH7_9BACI tRNA epoxyqueuosine(34) reductase QueG OS=Bacillus infantis; OX = 324767 GN=queG PE=4 SV=1
MNYSELKQDIIDYSKTIGIDKIGFASASTFGEMKGRLIRQQELDYQSGFEEPDIDKRTEPALLLDEPMSIISIALAYPSKMKTRVVSKRGERRGIFCRASWGTDYHTVLRDRLGKLEAYINERLPEAKLKSMVDTGELVDRAVAERAGIGWSGKNCSIITPEFGSYVYLGEMITNLPLEPDEPIEDGCGSCNLCVDVCPTGALVGGGQLDSKRCIAFLTQTKGFLEKEFRVKIGNRLYGCDTCQTVCPKNKGMDFHFHEEMEPDPEIAKPLLKPLLHMSNREFKEKFGHVSGSWRGKKPIQRNAIIALAHYKDETAVYDLIQVMKSDPRPVIRGTAAWALGKIGGLEAREAVESALEKETDEDVLREMENSLYMFN

SEQ ID NO: 74769 - protein, 376 aa, Bacillus infantis
  REGION 1..376: note = tr|U5L8Z9|U5L8Z9_9BACI Iron-sulfur cluster-binding protein OS=Bacillus infantis NRRL B-14911 OX=1367477; GN = N288_05940 PE=4 SV=1
MNYSELKQDIIDYSKTIGIDKIGFASASTFGEMKSRLIRQQELDYQSGFEEPDIDKRTEPALLLDEPMSIISIALAYPSKMKTRVVSKRGERRGIFCRASWGTDYHTVLRDRLGKLEAYIRERLPEARLKSMVDTGELVDRAVAERAGIGWSGKNCSIITPEFGSYVYLGEMITNLPLEPDEPIEDGCGSCNLCVDVCPTGALVGGGQLDSKRCIAFLTQTKGFLEEEFRVKIGNRLYGCDTCQTVCPKNKGMDFHFHEEMEPDPEIAKPLLKPLLHMSNREFKDKFGHVSGSWRGKKPIQRNAIIALAHYKDESAVDDLIQVMVSDPRPVIKGTAAWALGKIGGLKAREAVEAALVKETDEEVRREMENSLYMFS

SEQ ID NO: 74770 - protein, 386 aa, unidentified
  source 1..386: note = Bacillus intestinalis
  REGION 1..386: note = tr|A0A0K6LTV5|A0A0K6LTV5_9BACI Epoxyqueuosine reductase OS=Bacillus intestinalis OX=1963032 GN=queG PE=3; SV = 1
MNVYQLKEELIEYAKSIGVDKIGFTTADTFDSLKDRLILQESLGYLSGFEEPDIEKRVTPKLLLPKAKSIVAIALAYPSRMKDAPRSTRTERRGIFCRASWGKDYHDVLREKLDLLEEFLRSKHEDIRTKSMVDTGELSDRAVAERAGIGFSAKNCMITTPEYGSYVYLAEMITNIPFEPDVPIEDMCGSCTKCLDACPTGALVNPGQLNAQRCISFLTQTKGFLPDEFRTKIGNRLYGCDTCQTVCPLNKGKDFHLHPEMEPDPEIAKPLLKPLLTISNREFKEKFGHVSGSWRGKKPIQRNAILALAHFKDASALPELTELMHKDPRPVIRGTAAWAIGKIGDHAYAEELEKALEKEKDEEAKLEIEKGIELLKASGMTKQGLS

SEQ ID NO: 74771 - protein, 379 aa, Bacillus kochii
  REGION 1..379: note = tr|A0A248TDV6|A0A248TDV6_9BACI tRNA epoxyqueuosine(34) reductase QueG OS=Bacillus kochii; OX = 859143 GN=queG PE=4 SV=1
MNIAELKEEIIRYSKTIGIDKIGFTTASTFDGLRNRLMKQQELGYQSGFEEPDIEKRVNPALLMDQPMSIISIALAYPTKMRERVVSKPGERRGIFCRASWGDDYHLVLKDRLSKLEAYLEELVPDVRFTSMVDTGALSDRAVAERAGIGWSGKNCSIFTPEFGSYVYLGETITNIPFEPDEPLESKCGTCTKCIDACPTGALVQGGQLNAQRCISFITQTKGFMPDEFREELGNRIYGCDTCQTICPENKGKDFHFHEEMEPDSEIVKPLLKPILHMSNREFKEKFGRLSGSWRGRKPIQRNSIIALAHFKDESAVGDLIMLMKKDPRPVIRGTAAWALGKIGGEEAEKALQAMQATEEDPEVQQEIEKGLKMFNPIM

SEQ ID NO: 74772 - protein, 377 aa, Bacillus koreensis
  REGION 1..377: note = tr|A0A0M0L7R4|A0A0M0L7R4_9BACI Epoxyqueuosine reductase OS=Bacillus koreensis OX=284581 GN=queG PE=3 SV=1
MNMLQLKQQIIDYSKEIGIDKIGFASASPFIELKDRLYQQQELNYQSGFEEPDIKKRTTPELLVPKARSIIAIALAYPSKMKDAPRSTKSERRGIFCRASWGRDYHDVLREKLKLLEEFVQGMVPDVMTKSMVDTGELSDRAVAERAGIGWSAKNCSIITPEFGSYVYLGEIVTNLPLEPDSPIEDRCGTCNKCVEACPTDALVTGGQLNSNRCIAFLTQTKGMLAEEFRDKLGNRLYGCDTCQTVCPENKGKDLHLHPEMEPDPEVAKPLLKPLLTISNRDFKETYGHVSGSWRGKKPIQRNAIIALAHFKDETAVPDLLNLLKDDPRPVIRGTAAWALAKIAPARIEEKLQEATVKETDEEVLLELEKALARLEQ

SEQ ID NO: 74773 - protein, 379 aa, Bacillus krulwichiae
  REGION 1..379: note = tr|A0A1X9M6M6|A0A1X9M6M6_9BACI Epoxyqueuosine reductase OS=Bacillus krulwichiae OX=199441 GN=queG PE=3; SV = 1
MTLAQLKDELIAYSKTIGVDKIGFASADPFAELKNRLLTQQQLGYQSGFEESDIEKRVYPEKLLQGARTIISIALAYPSKMSNSPRNTKEERRGIFCRASWGKDYHDILRDRLKKLEIFLKERAPEAKTISMVDTGELSDRAVAERAGIGWSGKNCATITPEFGSYVYLGELVTTLPFEPDTPMIEQCGSCTKCIDACPTGALVQGGQLDSNKCIAFLTQTKDFLPDQYRKKLGNRLYGCDTCQQVCPENKGKDFHNHPEMEPDPEIAKPKLIPLLTISNREFKERFGHISGSWRGKKPIQRNAIIALAHFKDQQALPILADLLKKDPRPVIRGTAAWAIGVIGSIEEKRLLDEVKNTEKDDKVLREIDKGLNIMEYKE

SEQ ID NO: 74774 - protein, 377 aa, unidentified
  source 1..377: note = Bacillus kyonggiensis
  REGION 1..377: note = tr|A0A4U1D5Z8|A0A4U1D5Z8_9BACI tRNA epoxyqueuosine(34) reductase QueG OS=Bacillus kyonggiensis; OX = 1037680 GN=queG PE=4 SV=1
MDYDQLKQEIIEYSETIGIDKIGFTTASTFDELKNRLIRQQELGYQSGFEEPDIEKRVNPSLLMEQPRSIIAIALAYPSKMNGRVTSKKGERRGLFSRASWGLDYHIILRERLKKLEEFIMEKVPDAKCKSMVDTGELSDRAVAERAGIGWSGKNCAIITPEFGSYVYLGEMITNLPFAPDDPMEDRCGDCNKCIDACPTGALVQGGQINAQRCIAFLTQTKDFIPEEFREKIGNRLYGCDSCQTSCPENKGKDYHFHDEMEAEPEVVKPLLKPILQLSNRQFREGFGQLSGSWRGKNPIQRNAIIALAHFKDDTAVNDLVQVMKEDARPVLRGTAAWALGKIGGEQAEQELLGAKEQETDANVLREIEKGLQMIKR

SEQ ID NO: 74775 - protein, 380 aa, Bacillus lehensis
  REGION 1..380: note = tr|A0A4Y7WHN5|A0A4Y7WHN5_9BACI tRNA epoxyqueuosine(34) reductase QueG OS=Bacillus lehensis; OX = 300825 GN=queG PE=4 SV=1
MDYERLKQKLVMYSQSIGVDKLRITTADPFLSLKDRLIQQQEQGYASGFEHPNIDERVDPSLTLKEVRTIISIAVAYPSKLPNAPKSEKGSRRGFFSRSSWGIDYHDVLNDRLKKIEEFLFEECGTVETVRMVDTGALSDRAVAERAGIGWSAKNTFIITPELGSYVFLGNILTTLPFPPDEPIEDLCGSCQKCIDACPTGALVEPGVLNAQACLSYQTQTKGFMPEEYRSKIGNHLYGWDTCQLVCPYNKHKDHHQHEEMKPDPEKVKPLLLPLLTMSNKTFKAEFGHMAGSWRGKKPIQRNAIIALAHYKEESALPTLCELLRNDPRPVIRGTSAWAIGKISNSEKEEKALEDAKKNEQDENVLSEIEKGLSFIREKK

SEQ ID NO: 74776 - protein, 350 aa, Bacillus lehensis
  REGION 1..350: note = tr|A0A060LRG1|A0A060LRG1_9BACI Electron transport protein OS=Bacillus lehensis G1 OX=1246626 GN=BleG1_1283; PE = 4 SV=1
MSLKDRLIQQQEQGYASGFEHPNIDERVDPSLTLKEVRTIISIAVAYPSKLPNAPKSEKGSRRGFFSRSSWGIDYHDVLNDRLKKIEEFLFEECGTVETVRMVDTGALSDRAVAERAGIGWSAKNTFIITPELGSYVFLGNILTTLPFPPDEPIEDLCGSCQKCIDACPTGALVEPGVLNAQACLSYQTQTKGFMPEEYRSKIGNHLYGWDTCQLVCPYNKHKDHHQHEEMKPDPEKVKPLLLPLLTMSNKTFKAEFGHMAGSWRGKKPIQRNAIIALAHYKEESALPTLCELLRNDPRPVIRGTSAWAIGKISNSEKEEKALEDAKKNEQDENVLSEIEKGLSFIREKK

SEQ ID NO: 74777 - protein, 381 aa, Bacillus lentus
  REGION 1..381: note = tr|A0A2X4WRD5|A0A2X4WRD5_BACLE Putative iron-sulfur cluster-binding protein OS=Bacillus lentus OX=1467 GN=queG; PE = 4 SV=1
MDYGKLKEDIIAYSKSIGIDKIGFASSDPFIEMKNLLIRQQELGYQSGFEEKDIEKRTHPELIFEGPRSIIAIALAYPSKLPDAPRGKKGERRGIFCRASWGIDYHVLVREKLEDLARYIEGRVKQSRFKLMVDTGELVDRAVAERAGIGWSGKNCSIITPEFGSYVYLGEMITNLPFEPDTPMLDQCGDCNKCRDACPTGALVQPGQLDAQRCIAFLTQTKGFMPDEFRTKIGNRLYGCDTCQTSCPINKGKDFREHPKMEPAPEVVKPLLIPLLKISNREFRESYGELSGSWRGKKPIQRNAILALAHFKDSSAVGDLIDVLRKDVRPVLRGTAAWALGKIGGDEAQEALLKAQLVEEDNEVLVEIEKGLEFFAVKDEV

SEQ ID NO: 74778 - protein, 382 aa, Bacillus licheniformis
  REGION 1..382: note = tr|A0A447SCZ2|A0A447SCZ2_BACLI Epoxyqueuosine reductase OS=Bacillus licheniformis OX=1402 GN=yhbA PE=3; SV = 1
MDVKKLKQDVIEFAQEIGIDKIRFASADTFETLKERLIENRTLGYESGFEEPDLEKRTNPDLLLPKAKSIIAIALAYPSKMKDAPRSKKGERRGIFCRASWGKDYHHVLREKLDQLEEFLKAQRSDVRTKSMVDTGELSDRAVAERAGIGWSGKNCMIITPEFGSYVYLAEMITNIPFEPDERIEDQCGSCNKCIEACPTGALVNPGQLNSQRCIAFQTQTKGFLPDEFRTKIGNRIYGCDTCQMVCPKNKGVDFHLHPEMEPDPEIAKPLLKPLLTMSNREFKEKFGHVAGSWRGKKPIQRNAIIALAHFKETDALPELIELMHKDPRPVIRGTAAWAVGKIGGADVMGELERALAHEQDEEAKAEIQKGIALLKETSATN

SEQ ID NO: 74779 - protein, 382 aa, Bacillus licheniformis
  REGION 1..382: note = tr|T5HIN3|T5HIN3_BACLI Epoxyqueuosine reductase; OS = Bacillus licheniformis CG-B52 OX=1368424 GN=queG PE=3; SV = 1
MDVKKLKQDVIEFAQQIGIDKIRFASADTFETLKERLIENRALGYESGFEEPDLEKRTNPDLLLPKAKSIIDIALAYPSKMKDAPRSKKGERRGIFCRASWGKDYHHVLREKLDQLEEFLKAQRSDVRTKSMVDTGELSDRAVAERAGIGWSGKNCMIITPEFGSYVYLAEMITNIPFEPDERIEDQCGSCNKCIEACPTGALVKPGQLNSQRCIAFQTQTKGFLPDEFRTKIGNRIYGCDTCQMVCPKNKGVDFHLHPEMEPDPEIAKPLLKPLLTMSNREFKEKFGHVAGSWRGKKPIQRNAIIALAHFKETDALPELIELMHKDPRPVIRGTAAWAVGKIGGADVMSELERALAHEQDEDAKAEIQKGIGLLKETSATN

SEQ ID NO: 74780 - protein, 379 aa, Bacillus litoralis
  REGION 1..379: note = tr|A0A179SQR1|A0A179SQR1_9BACI Epoxyqueuosine reductase OS=Bacillus litoralis OX=152268 GN=queG PE=3 SV=1
MNTEQLKKEVIEYSKEIGIDKIGFTSATMFEELKQRLMTQQELGYQSGFEESDIEKRVTPVKLLPKASSIISIALAYPSKLKNAPKSTREDRRGIFCRASWGQDYHTVLRDRLSKLENFLREKVPNIQIKSMVDTGELSDRAVAERAGIGWSGKNCSIITPEFGSYVYLGEMITNFPFPPDKPMEDQCGSCTKCLDVCPTGALVQGGQLDSSKCIAFLTQTKGFLPDEYRSKIGNRIYGCDTCQTVCPVNKGKDFHLHEEMEPDPEIAKPKLKPLLKISNRDFKEKYGHISGSWRGKKPLQRNAILALAHFKDTTALPDLIDLMHNDSRPVIRGTAAWAIGKIANNIDVAKELHKAYMTEKDEEVKEEISKGLAFIEKK

SEQ ID NO: 74781 - protein, 379 aa, Bacillus litoralis
  REGION 1..379: note = tr|A0A5C6VYZ6|A0A5C6VYZ6_9BACI Epoxyqueuosine reductase OS=Bacillus litoralis OX=152268 GN=queG PE=3 SV=1
MNIEQFKQEVIEYSKEIGIDKIGFTSAGLFEELKQRLITQQELGYQSGFEEPDIEKRVTPVKLLPKASSIISIALAYPSKLKDAPKSTKEDRRGIFCRASWGQDYHTVLRDRLKKLEEFLKKRIPDIQLKSMVDTGELSDRAVAERAGIGWSGKNCSIITPEFGSYVYLGEMITNFPFPPDQPMEDQCGSCRKCIDVCPTGALVQPGQLDSSKCIAFLTQTKGFLADEYRTKIGNRIYGCDTCQTVCPINKGKDFHFHEEMEPDPEIAKPKLKPLLTISNREFKEKYGHISGSWRGKKPLQRNAILALAHFKDKTATQDLIMLVHQDPRPVIRGTAAWALGKIGDASAEVELLKAFEKEKDEQVKEEIQKGLALLHETS

SEQ ID NO: 74782 - protein, 379 aa, unidentified
  source 1..379: note = Bacillus loiseleuriae
  REGION 1..379: note = tr|A0A0K9GQG9|A0A0K9GQG9_9BACI Epoxyqueuosine reductase OS=Bacillus loiseleuriae OX=1679170 GN=queG PE=3; SV = 1
MDIDAFKQEVIQYSKEIGIDKIGFTTASTFQEMKNLLIRQQELNYQSGFEEPDIDKRVDPTLIFNEPRSIISIALAYPSKMKNAPQSKKGERRGIFCRASWGQDYHVVLRKKLQLLEDFIKEKVPGAMAKSMVDTGELVDRAVAERAGIGWSGKNCAIITPEFGSYVYLGDMITNIPFASDQPIEDQCGTCNKCVDVCPTGALVQGGQLNAKRCIAFLTQTKGFLPDEFRTKIGNRLYGCDTCQTVCPKNKGMDFHFHEEMEPDPELVKPLLKPLLTISNREFKEKYGQASGSWRGKKPIQRNAILALAHFKDETALPDLISVMKEDPRPVIRGTAAWAIGKIGGDDSVSVLKEARERETDEEVLTEIEKGLSFSAITE

SEQ ID NO: 74783 - protein, 379 aa, unidentified
  source 1..379: note = Bacillus lonarensis
  REGION 1..379: note = tr|A0A1G6GJD7|A0A1G6GJD7_9BACI Epoxyqueuosine reductase OS=Bacillus lonarensis OX=1464122; GN = SAMN05421737_101138 PE=4 SV=1
MRYDELKQDLIEYSNKIGIDKIGFTTGDPFLLLKERLIAQQEKGYASGFEHADIDERVFPELSMDNVQSIISIAVAYPTKLRDAPKNVPGARRGMFSRSSWGNDYHVALKARAQKLVSFLHERVPEAASLTMVDTGALADRAVAERAGVGWSAKNTFIITEEFGSFVFLGNVLTSIPFEPDEPLEDLCGECTKCLDACPTGALVEPGVLNTQACLSYQTQTKDFMPDEYREKTGHFLYGWDTCQVVCPYNKGINYDHHVDMLPDPETVKPLLLPILTMSNKEFKEKFGYLAGAWRGKKPIQRNAILALAHFREKSALPTLKTLLHEDTRPVIRGTAAWAIGKIGQLVTEENALLEAKKREKDIEVIAEIDKGLNMLRAK

SEQ ID NO: 74784 - protein, 374 aa, Bacillus luciferensis
  REGION 1..374: note = tr|A0A1E2W294|A0A1E2W294_9BACI tRNA epoxyqueuosine(34) reductase QueG OS=Bacillus luciferensis; OX = 178774 GN=BED47_18840 PE=4 SV=1
MNIKEFQKKLISYSKEIGIDKIGFTTVDPFLTLKNRLYRQQELNYQSGFETKDIERRVDARKIMTEANSIIAIALAYPSKLKNPPKSKKGSTRGIFCRASWGEDYHVVVKKKLLQLESFILLHYPNANVQSMVDTGELVDRAVAERAGIGWSAKNCSIITPEFGSYVYLGEMITSLPFEPDSPIEEQCGECTKCIDVCPTSAIVSPGQLNAKNCIAFLTQSKEMIPVEFRKELGNRIYGCDTCQTVCPKNKGINFTHHTEMEPDPETVKPLLRSVLKVSNREFKSQFGQMSGSWRGKNPIQRNAIIALAHFKDESALDDLKELAKKDARPVIRGTAIWAIFEIEGKNSTPFIESCLQKEQDEIVLKEINAVLSR

SEQ ID NO: 74785 - protein, 380 aa, unidentified
  source 1..380: note = Bacillus luti
  REGION 1..380: note = tr|A0A1K0ALF3|A0A1K0ALF3_9BACI Epoxyqueuosine reductase OS=Bacillus luti OX=2026191 GN=queG PE=3 SV=1
MDFEQLKQDVIAYSKTIGIDKIGFASASPFEELKQRLIQQQQLNYQSGFEESDIEKRTNPQLLLPGAKSIIAIALAYPSKLKNAPLSKRGERRGIFCRASWGQDYHLVLRDRLQKLEAYLIEKLPEIEVKSMVDTGELSDRAVSERAGIGWSGKNCSIITPEFGSYVYLGEMITNVPFPPDQPIEDQCGSCTKCIDICPTGALIQGGQLDSKKCIAFLTQTKGFLPEEYRDKIGNRIYGCDTCQTVCPKNKGMDFHNHPEMEPDPELVKPLLTPLLTISNRDFKEKYGIMSGSWRGKKPLQRNAILALAHFKEASAIPDLIGVMKDDPRPVLRGTAAWALGKIGGDGVGEAIEKAMQREKDEEVLHEMNRGLELLAQKKE

SEQ ID NO: 74786 - protein, 381 aa, unidentified
  source 1..381: note = Bacillus manliponensis
  REGION 1..381: note = tr|A0A073K4S6|A0A073K4S6_9BACI Epoxyqueuosine reductase OS=Bacillus manliponensis OX=574376 GN=queG PE=3; SV = 1
MNFEQLKQDVIAYSKTIGIDKIGFASASPFEELKQRLIQQQQLGYQSGFEESDIEKRTNPQLLLPGAKSIIAIALAYPSKLKNAPVSKRGERRGIFCRASWGKDYHLVLRDRLEKLEAYLIERLPGIEVKSMVDTGELSDRAVSERAGIGWSAKNCSIITPEFGSYVYLGEMITNIPFPPDKPIEDQCGSCTKCIDICPTGALVQGGQLNSQKCIAFLTQTKGFLPEEYRDKIGNRIYGCDTCQTVCPKNKGIDFHNHPEMEPDPELVKPLLKPLLTISNREFKEKYGIMSGSWRGKKPLQRNAILALAHFKDTTAIPDLISLMKEDPRPVIRGTAAWALGKIGGEGVREEIQKAMGKEKDEEVIHEMNRGLELLAEKSSR

SEQ ID NO: 74787 - protein, 377 aa, Bacillus marisflavi
  REGION 1..377: note = tr|A0A0M0GS07|A0A0M0GS07_9BACI Epoxyqueuosine reductase OS=Bacillus marisflavi OX=189381 GN=queG PE=3; SV = 1
MDMEQLKSDIISYSKTIGIDKIGFTTADTFTEMKNRLIRQEMAGYQSGFEEPDIEKRVDPSLTFDQPRSIIAIALAYPSRMKDAPRSKRGERRGIFCRASWGTDYHHVLRDRLKKLEEYIVSRIPEARFRSMVDTGELVDRAVSERAGIGWSGKNCSIITPEFGSYVYLGEMITNLPFSPDKPIEDGCGTCNKCVDVCPTGALIEGGRLDAQKCIAFLTQTKGFLKDEYRLKLGNRIYGCDTCQTVCPENKGKDFHFHEEMEPDPEVAKPLLKPLLTISNRDFKETYGHISGSWRGKKPIQRNAIIALAHYKDETAIPDLIGVLKNDVRPVMRGTSAWALGKIGGQEAEEALKHQIEKEVDPEVLEEIQKGLQLMTE

SEQ ID NO: 74788 - protein, 377 aa, Bacillus marisflavi
  REGION 1..377: note = tr|A0A163ITJ7|A0A163ITJ7_9BACI Epoxyqueuosine reductase OS=Bacillus marisflavi OX=189381 GN=queG PE=3; SV = 1
MDMEQLKSDIISYSKTIGIDKIGFTTADTFTEMKNRLIRQEMAGFQSGFEEPDIDKRVDPSLTFDQPRSIIAIALAYPSRMKDAPRSKRGERRGIFCRASWGTDYHHILRDRLKKLEEYIVSRIPEARFRSMVDTGELVDRAVSERAGIGWSGKNCSIITPEFGSYVYLGEMITNLPFSPDKPIEDGCGTCNKCVDVCPTGALIEGGRLDAQKCIAFLTQTKGFLKDEYRVKLGNRLYGCDTCQTVCPENKGKDFHLHKEMEPDPEVAKPLLKPLLTISNRDFKETYGHISGSWRGKKPIQRNAIIALAHYKDETAIPDLIGVLRNDVRPVMRGTSAWALGKIGGQEAEEALKHQIEKEADPEVLEEIEKGLHMLTE

SEQ ID NO: 74789 - protein, 385 aa, Bacillus marmarensis
  REGION 1..385: note = tr|U6SKH9|U6SKH9_9BACI Epoxyqueuosine reductase; OS = Bacillus marmarensis DSM 21297 OX=1188261 GN=queG PE=3; SV = 1
MILAQLKEELIAYSKTIGVDKIGFTTADPFITLKDRLVTQQKLGYQSGFEEPDIDKRVHPEQNLEEARSIISIALAYPSKMKDAPKNTKDARRGIFCRASWGQDYHDVLRDRLSKIEKFLDEKVPQAKKVSMVDTGALSDREVAKRAGIGWTGKNCAIITPEFGSYVYLGEIITTIPFEPDTPITDQCGTCNKCVEACPTDALVQGGQLNSQACIAYLTQTKGFLPEPYREKLGNRLYGCDTCQQVCPENKGKDFHHHPEMEPDPEIAKPLLKPLLTISNREFKETFGHVSGSWRGKKPIQRNAIIALAHFKDESALPLLAELMKSDPRPVIRGTAAWAIGKISRMKENRRNEEETRLILAKEREKDDEVLREIDRALEMLENAR

SEQ ID NO: 74790 - protein, 378 aa, Bacillus megaterium
  REGION 1..378: note = tr|A0A2B8J5R6|A0A2B8J5R6_BACME Epoxyqueuosine reductase OS=Bacillus megaterium OX=1404 GN=queG PE=3 SV=1
MNAYQLKEEIISYSKEIGIDKIGFASASMFDELKNRLLAQQELGYASGFEEPDIEKRVDPTLVVPKARSIISIALAYPSKLKDAPKSTKEDRRGIFCRASWGQDYHTVLRDRLQKLETFIKEKVPAAILQSMVDTGELSDRAVAERAGIGWSGKNCAIITPKFGSYVYLGEMITDIPFPPDKPIEDGCGTCNKCVDACPTGALVTGGQLNSQRCIAFLTQTKGFLAEEFRSKLGNRLYGCDTCQTVCPENKGKDFHFHPEMEPDPELAKPKLKPLLTMSNREFKEKFGHVSGSWRGKKPIQRNAIIALAHFKDQTAVPDLIELIKNDVRPVIRGTAAWALGKIGDKEALDILMNLREKEKDQEVIEEMSKGIEMLQEI

SEQ ID NO: 74791 - protein, 378 aa, Bacillus megaterium
  REGION 1..378: note = tr|D5DA30|D5DA30_BACMD Epoxyqueuosine reductase; OS = Bacillus megaterium (strain DSM 319) OX=592022 GN=queG; PE = 3 SV=1
MNAYQLKEEIISYSKEIGIDKIGFASASMFDELKNRLLAQQELGYASGFEEPDIEKRVNPTLVVPKARSIISIALAYPSKLKDAPKSTKEDRRGIFCRASWGQDYHTVLRDRLQKLETFIKEKVPASILQSMVDTGELSDRAVAERAGIGWSGKNCAIITPEFGSYVYLGEMITDIPFPPDKPIEDGCGTCNKCVDACPTGALVTGGQLNSQRCIAFLTQTKGFLAEEFRSKLGNRLYGCDTCQTVCPENKGKDFHFHPEMEPDPELAKPKLKPLLTMSNREFKEKFGHVSGSWRGKKPIQRNAIIALAHFKDQTAVPDLIELIKNDVRPVIRGTAAWALGKIGDKEALDILMNLREKEKDQEVIEEMSKGIEMLQEI

SEQ ID NO: 74792 - protein, 376 aa, unidentified
  source 1..376: note = Bacillus mesonae
  REGION 1..376: note = tr|A0A3Q9QQT3|A0A3Q9QQT3_9BACI tRNA epoxyqueuosine(34) reductase QueG OS=Bacillus mesonae; OX = 1193713 GN=queG PE=4 SV=1
MDVNKLKQEIIAYSKTIGIDKIGFTTADPFTELKNRLIRQQELGYQSGFEEPDIEKRTNPALLLEEPRSILSIALAYPAKMKIRVESKKGERRGIFCRASWGLDYHHIIKDRLQKLEAFILTKVPDARLKSMVDTGELSDRAVAVRAGIGWSGKNCAVITPEFGSYVYIGEMITSIPFAPDTQVEDQCGSCTKCLDACPTGALVQGGQINAQRCISFLTQTKGLIPDEFRDKIGNRVYGCDSCQTACPYNKGKDFHFHDEMEPNPEVAKPLLTPILKLSNREFKLKFGQVSGAWRGKKPIQRNAMIALAHFKDETAVPDLIEVLEKEASPVAKGTAAWALGKIGGEQALEALKRAKESETDLEVLQEIEKGLSFIS

SEQ ID NO: 74793 - protein, 376 aa, Bacillus methanolicus
  REGION 1..376: note = tr|I3E778|I3E778_BACMM Epoxyqueuosine reductase; OS = Bacillus methanolicus (strain MGA3 / ATCC 53907); OX = 796606 GN=queG PE=3 SV=1
MDVRLLKKEIIEYSKTIGIDKIGFTSASPFTEMKNRLRIQQELNYQSGFEEQDIEKRVTPSLLMDSPQSIISIALAYPSKMKERVIGKKGERRGIFCRASWGTDYHIILKDRLKKLEEFIAEKVPGAQFKSMVDTGELVDRAVAQRAGIGWSGKNCSIITPEFGSYVYLGEMITNIRFEPDTPMEDRCGSCNKCVEACPTGALVQGGQLNAKRCIAFLTQTKGFLPEEFREKLGNRLYGCDTCQTVCPENKGKDFHFHPEMEPDPEIAKPLLKPLLHISNREFKERYGHVSGSWRGKKPIQRNAIIALAHFKDETAVNDLIKVLNEDPRPVIRGTAAWALGKIGGENAKNALLKAKETEADLEVLNEIEKGIELCS

SEQ ID NO: 74794 - protein, 376 aa, Bacillus methanolicus
  REGION 1..376: note = tr|I3E6A6|I3E6A6_BACMT Fe-S protein OS=Bacillus methanolicus PB1 OX=997296 GN=PB1_03780 PE=4 SV=1
MDVRLLKKEIIAYSKTIGIDKIGFTSASPFTEMKNRLRIQQVLNYQSGFEEPDIEKRVTPSLLLDSPQSIISIALAYPSKMKERVIGKKGERRGIFCRASWGTDYHIILKDRLKKLEEFIAKKVPGAQFKSMVDTGELVDRAVAQRAGIGWSGKNCSIITPEFGSYVYLGEMITNIPFEPDTPMEDRCGSCNKCVEACPTGALVQGGQLNAKRCIAFLTQTKDFLPEEFREKLGNRLYGCDTCQTVCPENKGKDFHLHPEMEPDPEIAKPLLKPLLHMSNREFKDKYGHISGSWRGKKPIQRNAIIALAHFKDETSISDLIQVLNEDPRPVIRGTAAWALGKIGGENAKKALLKAKKTEADQLVLNEIEKGLELCS

SEQ ID NO: 74795 - protein, 380 aa, unidentified
  source 1..380: note = Bacillus mobilis
  REGION 1..380: note = tr|A0A386UVG4|A0A386UVG4_9BACI Epoxyqueuosine reductase OS=Bacillus mobilis OX=2026190 GN=queG PE=3 SV=1
MDFEQLKQDVIAYSKTIGIDKIGFASASPFEELKQRLIQQQQLNYQSGFEEPDIEKRTNPQLLLPGAKSIIAIALAYPSKLKNAPLSKRGERRGIFCRASWGQDYHLVLRDRLQKLEAYLIEKLPDIEVKSMVDTGELSDRAVSERAGIGWSGKNCAIITPEFGSYVYLGEMITNVPFPPDQPIEDQCGSCTKCIDICPTGALIQGGQLDSKKCIAFLTQTKGFLPEEYRDKIGNRIYGCDTCQTVCPKNKGMDFHNHPEMEPDPELVKPLLTPLLTISNRDFKEKYGIMSGSWRGKKPLQRNAILALAHFKEASAIPDLIGVMKDDPRPVLRGTAAWALGKIGGDAVGEAIEKAMQREKDEEVLHEMNRGLELLAQKKE

SEQ ID NO: 74796 - protein, 380 aa, unidentified
  source 1..380: note = Bacillus mobilis
  REGION 1..380: note = tr|A0A1K0B8P6|A0A1K0B8P6_9BACI Epoxyqueuosine reductase OS=Bacillus mobilis OX=2026190 GN=queG PE=3 SV=1
MDFEQLKQDVIAYSKTIGIDKIGFASASPFEELKQRLIQQQQLNYQSGFEEPDIEKRTNPQLLLPGAKSIIAIALAYPSKLKNAPLSKRGERRGIFCRASWGQDYHLVLRDRLQKLEAYLIEKLPDIEVKSMVDTGELSDRAVSERAGIGWSGKNCAIITPEFGSYVYLGEMITNVPFPPDQPIEDQCGSCTKCIDICPTGALIQGGQLDSKKCIAFLTQTKGFLPEEYRDKIGNRIYGCDTCQTVCPKNKGMDFHNHPEMEPDPELVKPLLTPLLTISNRDFKEKYGIMSGSWRGKKPLQRNAILALAHFKEASAIPDLIGVMKDDPRPVLRGTAAWALGKIGGDGVGEAIEKAMQREKDEEVLHEMNRGLELLAQKKE

SEQ ID NO: 74797 - protein, 379 aa, Bacillus muralis
  REGION 1..379: note = tr|A0A1B3XK67|A0A1B3XK67_9BACI tRNA epoxyqueuosine(34) reductase QueG OS=Bacillus muralis; OX = 264697 GN=ABE28_004550 PE=4 SV=1
MDMNTFKQEVIIYSKKIGIDKIGFASATTFTELRSRLIRQQELNYQSGFEEPDIEKRVRPELIFDKPQSIISIALAYPSKLKNAPQSKKGERRGIFCRASWGTDYHAVLRKKLQLLEDFITDKAPGAISKSMVDTGELSDRAVAERAGVGWSAKNSMIITPEFGSYVYLGDLITNLPFEPDQPMEDQCGTCNKCVDVCPTGALVQGGQLNAKRCIAFLTQTKGFLPDEFRTKIGNRLYGCDTCQTVCPKNKGIDFHLHEEMEPDPELAKPLLKPLLTISNRDFKETYGHVSGSWRGKKPIQRNAILALAHFKDVTALPLLVKVMKEDPRPVIRGTAAWAVGKIGRHEAVSVLEEARMKETDEEVLEEIEKGLQFTLETQ

SEQ ID NO: 74798 - protein, 380 aa, Bacillus mycoides
  REGION 1..380: note = tr|A0A1D3MGM7|A0A1D3MGM7_BACMY Epoxyqueuosine reductase OS=Bacillus mycoides OX=1405 GN=queG PE=3 SV=1
MDFEQLKQDVIAYSKTIGIDKIGFASASPFEELKQRLIQQQQLNYQSGFEEPDIEKRTNPQLLLPGAKSIIAIALAYPSKLKNAPLSKRGERRGIFCRASWGQDYHLVLRDRLQKLEAYLIEKLPDIEVKSMVDTGELSDRAVSERAGIGWSGKNCAIITPEFGSYVYLGEMITNVPFPPDRPIEDQCGSCTKCIDICPTGALVQGGQLDSKKCIAFLTQTKGFLPEEYRDKIGNRIYGCDTCQTVCPKNKGMDFHNHPEMEPDPELVKPLLTPLLTISNRDFKEKYGVMSGSWRGKKPLQRNAILALAHFKETAAIPDLIGVMKDDPRPVLRGTAAWALGKIGGDGVGEDIEKAMEREKDEEVLHEMNRGLELLAQKKE

SEQ ID NO: 74799 - protein, 380 aa, Bacillus mycoides
  REGION 1..380: note = tr|A9VTN0|A9VTN0_BACMK Epoxyqueuosine reductase; OS = Bacillus mycoides (strain KBAB4) OX=315730 GN=queG PE=3; SV = 1
MDFEQLKQDVIAYSKTIGIDKIGFASASPFEELKQRLIQQQQLNYQSGFEEPDIEKRTNPQLLLPGARSIIAIALAYPSKLKNAPLSKRGERRGIFCRASWGQDYHLVLRDRLQKLEAYLIEKLPDIEVKSMVDTGELSDRAVSERAGIGWSGKNCAIITPEFGSYVYLGEMITNVPFPPDRPIEDQCGSCTKCIDICPTGALVQGGQLDSKKCIAFLTQTKGFLPEEYRDKIGNRIYGCDTCQTVCPKNKGMDFHNHPEMEPDPELVKPLLTPLLTISNRDFKEKYGIMSGSWRGKKPLQRNAILALAHFKETAAIPDLIGVMKDDPRPVLRGTAAWALGKIGGDGVGEAIEKAMEREKDEEVLHEMNRGLELLAQKKE

SEQ ID NO: 74800 - protein, 386 aa, unidentified
  source 1..386: note = Bacillus nakamurai
  REGION 1..386: note = tr|A0A150F972|A0A150F972_9BACI Epoxyqueuosine reductase OS=Bacillus nakamurai OX=1793963 GN=queG PE=3; SV = 1
MNIHKLKEELIEYAKSIGVDKIGFTTADTFDSLRDRLILQESLGYLSGFEEPDIEKRVTPTLLLPKAKSIVAIALAYPSKMKDAPRSTRDGRRGIFCRASWGKDYHDVLREKLDLLEKFLQSKHKDIRTKSMVDTGELSDRAVAERAGIGFSAKNCMITTPEYGSYVYLAEMITNLPFEPDVPIEDMCGSCTKCLDACPTGALVNPGQLNAQRCISFLTQTKGFLPDEFRTKIGNRLYGCDTCQTVCPINKGKDFHLHPQMEPDPEIAKPLLKPLLTISNREFKEKFGHVSGSWRGKKPIQRNAILALAHFKDTSALPELTALMHQDPRPVIRGTAAWAVGKIGDQAYAEELQKALHKEQDEEAKQEIEKGLELLSVSDKTKTTLS

SEQ ID NO: 74801 - protein, 379 aa, Bacillus nanhaiisediminis
  REGION 1..379: note = tr|A0A562QJB4|A0A562QJB4_9BACI Epoxyqueuosine reductase OS=Bacillus nanhaiisediminis OX=688079 GN=queG; PE = 3 SV=1
MTNAQLKEELIAYSKSIGVDKIGFTSADPFLQLKDRLQTQQKLGYQSGFEESDIEKRTQPKRLLEGARTIISIALGYPSKMNNPPKSTKEERRGVFCRASWGKDYHDVLRGRLQKIETFLQNRVPEARTISMVDTGELSDRAVAERAGIGWSGKNCAIITPEFGSYVYLGELVTTVSLEPDIPLTEQCGTCTRCIDACPTGALVQGGQLDSQKCIAYLTQTKNFLPEQYRKKLGNRLYGCDTCQQVCPENKGKDFHLHDEMEPDPEIAKPKLLPLLTMGNREFKEKFGHVSGSWRGKKPIQRNAIIALAHFKDHQALPVLHELMQKDPRPVIRGTAAWAIAQIGSIEEKNRLEQAKNKEIDEEVLLEIEKGISILENKS

SEQ ID NO: 74802 - protein, 379 aa, Bacillus nealsonii
  REGION 1..379: note = tr|A0A2N0Z780|A0A2N0Z780_9BACI tRNA epoxyqueuosine(34) reductase QueG OS=Bacillus nealsonii; OX = 115979 GN=queG PE=4 SV=1
MNYAQLKQDIIEYSKTIGIDKIGFTSASTFEEMKIRLVEQQALDYQSGFEEKDIDKRVDPSLLMDKPKSIISIALAYPSKMKERVVSKKGARRGIFCRASWGTDYHVVLKNRLQKLEEFILERVPEALCKSMVDTGELVDRAVAQRAGIGWSGKNCAIITPEFGSYVYLGEMITNLPFLPDASMEDQCGSCNKCIEVCPTGALIQGGQLNAQRCIAFQTQTKGFLAEEFREKLGNRIYGCDTCQTVCPKNKGIDFHNHPEMEPDPEIAKPLLQPLLHISNKEFKEKYGHISGSWRGKKPIQRNALIALAHYKEESAVEDIILVMNKDPRPVLRGTAAWALGKIGGQSAKEALTNGLIIEKDQEVLAEIEAAFARISSEG

SEQ ID NO: 74803 - protein, 377 aa, Bacillus nealsonii
  REGION 1..377: note = tr|R9C012|R9C012_9BACI Iron-sulfur cluster-binding protein OS=Bacillus nealsonii AAU1 OX=1202533; GN = A499_18574 PE=4 SV=1
MDFRELKKDIIEYSKTIGIDKIGFTSASTFEEMKVRLIRQQELNYQSGFEEKDIEKRVNPSLLLEQPKSIISIALAYPSKMKERVVSKKGARRGIFCRASWGTDYHVVLNDRLKKLEDYIKERIPDALCKSMVDTGELVDRAVAQRAGIGWSGKNCAIITPEFGSYVYLGEMITNLPLDPDTPMEDQCGTCNKCVEVCPTGALIQGGQLNAQRCIAFQTQTKGFLAEEFREKLGNRIYGCDTCQTVCPKNKGIDFHNHPEMEPDPEIAKPLLQPLLFISNKEFKEKYGYISGSWRGKKPIQRNAIIALAHFKEEGAVGDLITVMKKDPRPVIRGTAAWALGKIGGDESKTALQTATQQEEDQEVLQEIQDALQRLAH

SEQ ID NO: 74804 - protein, 376 aa, unidentified
  source 1..376: note = Bacillus notoginsengisoli
  REGION 1..376: note = tr|A0A417YER5|A0A417YER5_9BACI Epoxyqueuosine reductase OS=Bacillus notoginsengisoli OX=1578198 GN=queG; PE = 3 SV=1
MDYRQLREEVIAYSKTIGIDKIGFTAAEPFGELKNRLIRQQELGYQSGFEEPDIEKRTNPELLMEKPRSIIAIALAYPSKMNERVVSKKGERRGIFCRASWGLDYHHILRAKLAKLEEFILEKVPGARLKSMVDTGELADRAVAERAGIGWSGKNCSIITPEFGSYVYLGEMITSIPFEPDTPLEDQCGSCRKCLDACPTGALVQGGQLNAQRCISFLTQTKDFIPEEFREKIGNRIYGCDSCQTACPMNKGRDFHFHEEMEPDPEVAKPLLKPILSLSNREFKERFGKVAGSWRGKKPIQRNAIIALAHFKDDTAVSELENLIRKDPRPVMRGTAAWALGKIGGSESAFILQKALAEENDEEVLTEIKKGIEMIK

SEQ ID NO: 74805 - protein, 379 aa, unidentified
  source 1..379: note = Bacillus obstructivus
  REGION 1..379: note = tr|A0A1L8ZJ46|A0A1L8ZJ46_9BACI Epoxyqueuosine reductase OS=Bacillus obstructivus OX=1914540 GN=queG PE=3; SV = 1
MNISQLKQEIISYSKVIGIDKIGFTTADTFTEMKNRLIRQQELGYQSGFEEKDIEKRVNPSLIFDQPKSIIAIALAYPSKMSESPQGKKGDRRGIFCRASWGVDYHTILREKLKQLEEFILEKVPEARFKSMVDTGELVDRAVAQRAGIGWSGKNCSIITPEFGSYVYLGEMITNLPFEPDEPMEDQCGSCNKCIDVCPTGALVQGGQLNAQRCIAFLTQTKGFLEEEFRDKLGNRIYGCDTCQTICPKNKGMDFHFHEEMEPDPELAKPRLTPLLTISNREFKDNFGEMSGSWRGKKPIQRNAIIALAHFKEQSSVPELIQVLNEDPRPVIRGTAAWALGKIGGEDASMALEHSNEKETDPDVLNEIEKAIRKTKGEV

SEQ ID NO: 74806 - protein, 378 aa, Bacillus oceanisediminis
  REGION 1..378: note = tr|A0A4R8G986|A0A4R8G986_9BACI Epoxyqueuosine reductase OS=Bacillus oceanisediminis OX=665099; GN = DFO72_10730 PE=4 SV=1
MNFAQFKQEVIEYSKTIGIDKIGFTAAGTFDEMKNRLIRQQELQYQSGFEEPDIEKRVNPGLLLDKPKSIISIAVAYPSKMKVRVVSKRGERRGIFCRASWGKDYHHILRERLQKLEGFIQSRIPEAICKSMVDTGELVDRAVAQRAGIGWSGKNCSIITPEFGSYVYLGEMITNLPFEPDKPMEDRCGSCNKCVDVCPTGALIQGGQLDAQKCIAFLTQTKGFLPEPYREKLGNRLYGCDTCQTVCPENKGKDFHLHEEMEPDPEVAKPLLRPLLFISNREFKEKYGPVSGSWRGKKPIQRNAIIALAHYKDETAVEDLIKVMTEDPRPVIRGTAAWALGKIGGEKSLAALEQALQQEKDGEVIAEIEKGLSFIEKR

SEQ ID NO: 74807 - protein, 377 aa, Bacillus oceanisediminis
  REGION 1..377: note = tr|A0A160M850|A0A160M850_9BACI Epoxyqueuosine reductase OS=Bacillus oceanisediminis 2691 OX=1196031; GN = A361_06380 PE=4 SV=1
MDFAQFKQEVIEYSKTIGIDKIGFTAASTFDEMKNRLIRQQELQYQSGFEEPDIEKRVNPSLLLDKPKSIISIAVAYPSKMKVRVVSKRGERRGIFCRASWGKDYHHILRERLQKLEGFIQSRIPEALCKSMVDTGELVDRAVAQRAGIGWSGKNCSIITPEFGSYVYLGEMITNLPFEPDKPMEDRCGSCNKCVDVCPTGALIQGGQLDAQKCIAFLTQTKGFLAEPYREKLGNRLYGCDTCQTVCPENKGKDFHLHEEMEPDPEVAKPLLRPLLFISNREFKEKYGPVSGSWRGKKPIQRNAIIALAHYKDETAVEDLIKVMTEDPRPVIRGTAAWALGKIGGEKSLAALEKALQQEKDGEAIAEIEKGLSFIEK

SEQ ID NO: 74808 - protein, 379 aa, Bacillus okhensis
  REGION 1..379: note = tr|A0A0B0IAQ5|A0A0B0IAQ5_9BACI Epoxyqueuosine reductase OS=Bacillus okhensis OX=333138 GN=queG PE=3 SV=1
MSLAQLKDELIAYSKTIGVDKIGFASADPFLQLKDRLLIQQELGYQSGFEEPDIEKRVQPGKLVEGARTIISIALAYPSKMKDPPKSTREDRRGIFCRASWGKDYHDVLRERLKKIEEFLEERLPESRTISMVDTGELSDRAVAERAGIGWSGKNCAIITPEFGSYVYLGEVVTTIPFEPDTPITEQCGTCNKCVDACPTGALIQGGQLDSNKCIAFLTQTKNFLPDQYRKKLGNRLYGCDTCQQVCPENKGKDFHIHPEMEPDSEIAKPKLIPLLTMSNREFKEKFGHVSGSWRGKKPIQRNAIIALAHFKDKKALPVLIDLLKKDPRPVIRGTAAWAIGEIGSLEEHNILNNAKNAEKDDDVVREIEKGLNLIENKH

SEQ ID NO: 74809 - protein, 391 aa, Bacillus okuhidensis
  REGION 1..391: note = tr|A0A0M0KM81|A0A0M0KM81_9BACI Epoxyqueuosine reductase OS=Bacillus okuhidensis OX=136160 GN=queG PE=3; SV = 1
MTPAQLKDELIAYSKTIGIDKIGFASADPFLTLKERLQTQQALGYQSGFEEPDIDKRVYPEKILPKARSIISIALVYPSKMKNPPKSKKGERRGVFCRASWGKDYHDILRDRLKKLEDFLLERVPDMKVLSMVDTGALSDRAVAERAGIGWSGKNCAVITPEFGSYVYLGDLVTTIPFPPDIPLTDQCGTCNKCVDACPTGALIQGGQLDSQKCIAFLTQTKGFLPEKYRKKLGNRLYGCDTCQQVCPANKRKDFHFHEEMEPDPEIAKPKLIPLLTMSNREFKEKFGHVSGSWRGKKPIQRNAILALAHFKEEAALPILADLLRQDPRPVIRGTAGWALGKIGGPEVETWLKDALKREKDEDVRAEISRGLEILAYGDSGNGKETEDSIR

SEQ ID NO: 74810 - protein, 380 aa, unidentified
  source 1..380: note = Bacillus oleivorans
  REGION 1..380: note = tr|A0A285CQH9|A0A285CQH9_9BACI Epoxyqueuosine reductase OS=Bacillus oleivorans OX=1448271 GN=queG PE=3; SV = 1
MNFDLLKKDIIAYSKEIGIDKIGFTSASAFDEMKNRLIRQQELGFQSGFEEKDIDKRVYPDLIFNKPKSIIAIALAYPSKMKDASQSKKGARRGLFARASWGRDYHDVLREKLSQLEAYIKERVPEAVCKSMVDTGELVDRAVAERAGIGWSGKNCAIITPEFGSYVYLGEMITNLPFEPDEPIEEGCGDCNLCVDACPTGALVQGGQLNAQKCIAFLTQTKGFLPDEYRSKLGNRLYGCDTCQLVCPKNKKMDFHLHEEFEPDPEIAKPLLQPLLHLTNREFKDTYGHVSGSWRGKKTIQRNAIIALAHYKEESAVPDLIYLMKEDPRPVIRGTAAWALGKIGAPEGKAAIETQLVHEKDLDVRAEMEKGLAFFEQINI

SEQ ID NO: 74811 - protein, 380 aa, unidentified; identical to SEQ ID NO: 74694
  source 1..380: note = Bacillus pacificus
  REGION 1..380: note = tr|A0A1J9YF74|A0A1J9YF74_9BACI Epoxyqueuosine reductase OS=Bacillus pacificus OX=2026187 GN=queG PE=3; SV = 1

SEQ ID NO: 74812 - protein, 380 aa, unidentified
  source 1..380: note = Bacillus pacificus
  REGION 1..380: note = tr|A0A5C4ZJ42|A0A5C4ZJ42_9BACI Epoxyqueuosine reductase OS=Bacillus pacificus OX=2026187 GN=queG PE=3; SV = 1
MDFEQLKQDVIAYSKTIGIDKIGFASASPFEELKQRLIQQQQLNYQSGFEEPDIEKRTNPQLLLPGAKSIIAIALAYPSKLKNAPLSKRGERRGIFCRASWGQDYHLVLRDRLQKLEAYLIEKLPDIEVKSMVDTGELSDRAVSERAGIGWSGKNCSIITPEFGSYVYLGEMITNVPFPPDQPIEDQCGNCTKCIDICPTGALIQGGQLDSKKCIAFLTQTKGFLPEEYRDKIGNRIYGCDTCQTVCPKNKGMDFHNHPEMEPNPELVKPLLTPLLTISNRDFKEKYGIMSGSWRGKKPLQRNAILALAHFKEASAIPDLIDVMKDDPRPVLRGTAAWALGKIGGDGVGEAIEKAMQREKDEEVLHEMNRGLELLAQKKE

SEQ ID NO: 74813 - protein, 382 aa, unidentified; identical to SEQ ID NO: 74778
  source 1..382: note = Bacillus paralicheniformis
  REGION 1..382: note = tr|A0A1Q8GKI0|A0A1Q8GKI0_9BACI Epoxyqueuosine reductase OS=Bacillus paralicheniformis OX=1648923 GN=queG; PE = 3 SV=1

SEQ ID NO: 74814 - protein, 382 aa, unidentified
  source 1..382: note = Bacillus paralicheniformis
  REGION 1..382: note = tr|A0A5A9T7I8|A0A5A9T7I8_9BACI Epoxyqueuosine reductase OS=Bacillus paralicheniformis OX=1648923 GN=queG; PE = 3 SV=1
MDVKKLKQDVIEFAQEIGIDKIRFASADTFETLKERLIENRTLGYESGFEEPDLEKRTNPDLLLPKAKSIIAIALAYPSKMKDAPRSKKGERRGIFCRASWGKDYHHVLREKLDQLEEFLKAQRSDVRTKSMVDTGELSDRAVAERAGIGWSGKNCMIITPEFGSYVYLAEMITNIPFEPDERIEDQCGSCNKCIEACPTGALVNPGQLNSQRCIAFQTQTKGFLPDEFRTKIGNRIYGCDTCQMVCPKNKGVDFHLHPEMEPDPEIAKPLLKPLLTMSNREFKEKFGHVAGSWRGKKPIQRNAIIALAHFKETDALPELIELMHKDPRPVIRGTAAWAVGKIGGADVMGELERALAHEQDEEAKVEIQKGIGLLKETSATN

SEQ ID NO: 74815 - protein, 380 aa, unidentified
  source 1..380: note = Bacillus paramycoides
  REGION 1..380: note = tr|A0A1J9W3K4|A0A1J9W3K4_9BACI Epoxyqueuosine reductase OS=Bacillus paramycoides OX=2026194 GN=queG PE=3; SV = 1
MDFEQLKQEVIAYSKTIGIDKIGFASASPFEELKQRLIQQQQLNYQSGFEEPDIEKRTNPQLLLPGAKSIIAIALAYPSKLKNAPLSKRGERRGIFCRASWGQDYHLVLRDRLQKLEAYLIEKLPDIEVKSMVDTGELSDRAVSERAGIGWSGKNCAIITPEFGSYVYLGEMITNVPFPPDQPIEDQCGSCTKCIDICPTGALIQGGQLDSKKCIAFLTQTKGFLPEEYRDKIGNRIYGCDTCQTVCPKNKGMDFHNHPEMEPDPELVKPLLTPLLTISNRDFKEKYGIMSGSWRGKKPLQRNAILALAHFKETAAIPDLIGVMKDDPRPVLRGTAAWALGKIGGDGVGEAIEKAMGREKDEEVLHEMNRGLELLAQKKE

SEQ ID NO: 74816 - protein, 380 aa, unidentified; identical to SEQ ID NO: 74694
  source 1..380: note = Bacillus paranthracis
  REGION 1..380: note = tr|A0A4U1D4Q9|A0A4U1D4Q9_9BACI Epoxyqueuosine reductase OS=Bacillus paranthracis OX=2026186 GN=queG PE=3; SV = 1

SEQ ID NO: 74817 - protein, 380 aa, unidentified
  source 1..380: note = Bacillus paranthracis
  REGION 1..380: note = tr|A0A1J9Y8F3|A0A1J9Y8F3_9BACI Epoxyqueuosine reductase OS=Bacillus paranthracis OX=2026186 GN=queG PE=3; SV = 1
MDFEQLKQDVIAYSKTIGIDKIGFASASPFEELKQRLIQQQQLNYQSGFEEPDIEKRTNPQLLLPGAKSIIAIALAYPSKLKNAPLSKRGERRGIFCRASWGQDYHLVLRDRLQKLEAYLIEKLPDIEVKSMVDTGELSDRAVSERAGIGWSGKNCSIITPEFGSYVYLGEMITNVPFPPDQPIEDQCESCTKCIDICPTGALIQGGQLDSKKCIAFLTQTKGFLPEEYRDKIGNRIYGCDTCQTVCPKNKGMDFHNHPEMEPDPELVKPLLTPLLTISNRDFKEKYGIMSGSWRGKKPLQRNAILALAHFKEASAIPDLIGVMKDDPRPVLRGTAAWALGKIGGDGVGEAIEKAMQREKDEEVLHEMNRGLELLAQKKE

SEQ ID NO: 74818 - protein, 376 aa, unidentified
  source 1..376: note = Bacillus persicus
  REGION 1..376: note = tr|A0A1H8DR60|A0A1H8DR60_9BACI Epoxyqueuosine reductase OS=Bacillus persicus OX=930146; GN = SAMN05192533_10920 PE=4 SV=1
MDILQLQQDIIDYSKEIGIDKIGFASPSPFSEMKSRLIHQQELQYQSGFEEQDIEKRVRPDLIFDHPQSIIAIAVAYPSKMKVRVVSKKGERRGIFCRASWGEDYHHILRRKLKLLEEYIAAKVPEAKFKSMVDTGELVDRAVAERAGIGWSGKNCSIITPEFGSYVYLGEMITNLPFKPDSPMEDQCGSCTKCLDACPTGALVQGGQLNSQRCIAFLTQTKGFLPEEFREKIGNRLYGCDSCQTACPVNKGKDFHFHAETEPDAELAKPLLKPILHISNREFKEKFGPVSGSWRGKKPIQRNAVIALGHFKDETAVPDLIKVLTEDPRPVLRGTAAWSLAKIGGAEAITALEKSAEVEKDDEVLSEIRTGLSLFR

SEQ ID NO: 74819 - protein, 376 aa, unidentified
  source 1..376: note = Bacillus praedii
  REGION 1..376: note = tr|A0A4R1B4Q7|A0A4R1B4Q7_9BACI Epoxyqueuosine reductase OS=Bacillus praedii OX=1742358 GN=queG PE=3 SV=1
MDFSQLKKEIIEYSKTIGIDKIGFTTASTFDELRNRLIRQQELQYQSGFEEKDIEKRVNPALLMDSPRSIIAIALAYPSKMNERVTSKKGERRGIFSRASWGEDYHLILRDRLKKLEAYIIERVPEAKCKSMVDTGELVDRAVAERAGIGWSGKNCSIITPEFGSYVYLGEMITTIPFEPDQPIEDQCGTCNKCLEACPTGALVQGGQINAQKCIAFLTQTKGFIEEQYREKIGNRVYGCDSCQTACPENKGKNFHFHEEMEPDPEIVKPLLKPMLQISNREFKEKFGPLAGSWRGKKPIQRNAIIALAHFKDETAVDELIEVMNKDSRAVIRGTAAWALGKIGGETAKAVLENARETESDEEVLVEIERGLAFFK

SEQ ID NO: 74820 - protein, 379 aa, Bacillus pseudofirmus
  REGION 1..379: note = tr|A0A1Q8TWZ6|A0A1Q8TWZ6_BACPF tRNA epoxyqueuosine(34) reductase QueG OS=Bacillus pseudofirmus; OX = 79885 GN=BTR23_18370 PE=4 SV=1
  VARIANT 120: note = Xaa can be any naturally occurring amino acid
MAYAQLKDEIIAYSKSIEIDKIGFTSANPFLTLKDRLTTHRELGYESGFEEPDLLKRVDPKYITPEARSIIAIALAYPSKMQNPPKSIKGERRGTFCRASWGEDYHHILKEKLQLLENFXLEKVPNVHMKSMVDTGELSDRAVAERAGIGWSGKNCAIITPEFGSYVYLGEMITSIPFPPDQPLEDQCGSCQRCIDACPTSALVQGGQLNSQKCIAYLTQTKGFLPEQFRTKLGNRLYGCDTCQQVCPENRGKDFRLHGEMEPDPEIAKPLLLPLLSLSNREFKERFGHVSGAWRGKKPIQRNAIIALAHFKEEKAIEPLTELLKKDPRPVIRGTAAWALAIIGGKSVEKQLKYAKDQEKDMDVVGEINRGLEIIAQGP

SEQ ID NO: 74821 - protein, 385 aa, Bacillus pseudofirmus
  REGION 1..385: note = tr|D3FV53|D3FV53_BACPE Epoxyqueuosine reductase; OS = Bacillus pseudofirmus (strain OF4) OX=398511 GN=queG; PE = 3 SV=1
MILAQLKEELIAYSKTIGVDKIGFTTADPFLDLKDRLVTQQNLGYQSGFEEPDINKRVHPNQNLEEARSIISIALAYPSKMKDAPKNTKDARRGIFCRASWGQDYHDVLRDRLSKIEKFLEEKVPQAKKVSMVDTGALSDREVARRAGIGWSGKNCAIITPEFGSYVYLGEIITTIPFEPDTPMTDQCGTCNKCVDACPTDALVQGGQLNSQACIAYLTQTKGFLPEPYREKLGNRLYGCDTCQQVCPENKGKDVHHHPEMEPDPEIAKPLLKPLLTISNREFKETFGHVSGSWRGKKPIQRNAIIALAHFKDESALPILAELMKSDPRPVIRGTAAWAIGKISRMNENRRNEEKIKLISAKEREKDDEVLREIDRALEMLENAQ

SEQ ID NO: 74822 - protein, 380 aa, Bacillus pseudomycoides
  REGION 1..380: note = tr|A0A2B7E6K3|A0A2B7E6K3_9BACI Epoxyqueuosine reductase OS=Bacillus pseudomycoides OX=64104 GN=queG PE=3; SV = 1
MNFEQLKQDVIAYSKTIGIDKIGFASASPFEELKQRLIQQQQLNYQSGFEEPDIEKRTNPQLLLPGAKSIIAIALAYPSKLKNAPLSKRGERRGIFCRASWGQDYHLVLRDRLQKLEAYLIEKLPDIEVKSMVDTGELSDRAVSERAGIGWSGKNCSIITPEFGSYVYLGEMITNVPFPPDQPIEDQCGSCTKCVDICPTGALVQGGQLDSKKCIAFLTQTKGFLPEEYRDKIGNRIYGCDTCQTVCPKNRGKDFHNHPEMEPDPELVKPLLTPLLTISNRDFKEKYGIMSGSWRGKKPLQRNAILALAHFKETTATPDLISVMKDDPRPVIRGTAAWALGKIGGEGVGEAIEKAMEREKDEEVLHEMNRGLEMLAEKKQ

SEQ ID NO: 74823 - protein, 380 aa, Bacillus pseudomycoides
  REGION 1..380: note = tr|C3BFM0|C3BFM0_9BACI Epoxyqueuosine reductase; OS = Bacillus pseudomycoides DSM 12442 OX=527000 GN=queG; PE = 3 SV=1
MNFEQLKQDVIAYSKTIGIDKIGFASASPFEELKQRLIQQQQLNYQSGFEEPDIEKRTNPQLLLPGAKSIIAIALAYPSKLKNAPLSKRGERRGIFCRASWGQDYHLVLRDRLQKLEAYLIEKLPDIEVRSMVDTGELSDRAVSERAGIGWSGKNCSIITPEFGSYVYLGEMITNVPFPPDQPIEDQCGSCTKCIDICPTGALVQGGQLDSKKCIAFLTQTKGFLPEEYRDKIGNRIYGCDTCQTVCPKNRGKDFHNHLEMEPDPELVKPLLTPLLTISNRDFKEKYGIMSGSWRGKKPLQRNAILALAHFKETTAIPDLIGVMKEDPRPVIRGTAAWALGKIGGEGVGESIEKAMEREKDEEVLHEMNRGLEMLAEKKQ

SEQ ID NO: 74824 - protein, 382 aa, Bacillus pumilus
  REGION 1..382: note = tr|A0A2T0CGH7|A0A2T0CGH7_BACPU tRNA epoxyqueuosine(34) reductase QueG OS=Bacillus pumilus; OX = 1408 GN=queG PE=4 SV=1
MHVGELKEELIQYAKEIGVDKIRFASADTFDSLKDRLILHESLGYLSGFEEPDIEKRTNPSLLLPKAKSIVAIALAYPSKMKDAPRSTKDARRGIFCRASWGTDYHVVLKKKLDMLEEFLRSKHVDIRTKSMVDTGELSDRAVAERAGIGFSAKNCMIITPEFGSYVYLAEMITNVPFEPDEKIEDQCGTCNKCVDSCPTGALVNPGQLNSQRCISFLTQTKGFLPDEFRSKIGNRLYGCDTCQIVCPINKGKDFHLHPEMEPDPEIAKPLLKPLLTISNREFKEKYGHVSGSWRGKKPIQRNAILALAHFKDTSALPVLIDLMHKDPRPVIRGTAAWAIGKIGDEELLPELEKALERESDEEAKQEIVKGIEFLQTPLNTK

SEQ ID NO: 74825 - protein, 382 aa, Bacillus pumilus
  REGION 1..382: note = tr|A8FBB2|A8FBB2_BACP2 Epoxyqueuosine reductase; OS = Bacillus pumilus (strain SAFR-032) OX=315750; GN = BPUM_0845 PE=4 SV=2
MHVGELKEELIQYAKEIGVDKIRFASADTFDSLKDRLILHESLGYLSGFEEPDIEKRTNPSLLLPKAKSIVAIALAYPSKMKDAPRSTKDARRGIFCRASWGTDYHVVLKKKLDMLEEFLRSKHVDIRTKSMVDTGELSDRAVAERAGIGFSAKNCMIITPEFGSYVYLAEMITNVPFEPDEKIEDQCGTCNKCVDSCPTGALVNPGQLNSQRCISFLTQTKGFLPDEFRSKIGNRLYGCDTCQIVCPINKGKDFHLHPEMEPDPEIAKPLLKPLLTISNREFKEKYGHVSGSWRGKKPIQRNAILALAHFKDTSALPVLIELMHKDPRPVIRGTAAWAIGKIGDDQQLPELEKALERESDEEAKEEIVKGIELLQTPLNTK

SEQ ID NO: 74826 - protein, 383 aa, Bacillus safensis
  REGION 1..383: note = tr|A0A5C0WCQ6|A0A5C0WCQ6_9BACI Epoxyqueuosine reductase OS=Bacillus safensis OX=561879 GN=queG PE=4 SV=1
MIHVGELKEELIQYAKEIGVDKIRFASADTFDSLKDRLILHESLGYLSGFEEPDIEKRTNPSLLLPKAKSIVAIALAYPSKMKDAPRSTKDARRGIFCRASWGTDYHVVLKKKLDMLEEFLRSKHVDIRTKSMVDTGELSDRAVAERAGIGFSAKNCMIITPEFGSYVYLAEMITNVPFEPDEKIEDQCGTCNKCVDSCPTGALVNPGQLNSQRCISFLTQTKGFLPDEFRSKIGNRLYGCDTCQTVCPINKGKDFHLHPEMEPDPEIAKPLLKPLLTISNREFKEKYGHVSGSWRGKKPIQRNAILALAHFKDTSALPVLIELMHKDPRPVIRGTAAWAIGKIGDDQQLPELEKALERESDEEAKEEIVKGIELLQTPLNTK

SEQ ID NO: 74827 - protein, 383 aa, Bacillus safensis
  REGION 1..383: note = tr|A0A561RUT9|A0A561RUT9_9BACI Epoxyqueuosine reductase OS=Bacillus safensis OX=561879 GN=FHW57_2996; PE = 4 SV=1
MIHVGELKEELIQYAKEIGVDKIRFASADTFDSLKDRLILHESLGYLSGFEEPDIEKRTNPSLLLPKAKSIVAIALAYPSKMKDAPRSTKDARRGIFCRASWGTDYHVVLKKKLDMLEEFLRSKHVDIRTKSMVDTGELSDRAVAERAGIGFSAKNCMIITPEFGSYVYLAEMITNVPFEPDEKIEDQCGTCNKCVDSCPTGALVNPGQLNSQRCISFLTQTKGFLPDEFRSKIGNRLYGCDTCQIVCPINKGKDFHLHPEMEPDPEIAKPLLKPLLTISNREFKEKYGHVSGSWRGKKPIQRNAILALAHFKDTSALPVLIELMHKDPRPVIRGTAAWAIGKIGDDQQLPELENALERESDEEAKEEIVKGIELLQTPLNTK

SEQ ID NO: 74828 - protein, 382 aa, unidentified
  source 1..382: note = Bacillus salacetis
  REGION 1..382: note = tr|A0A3A1QQZ6|A0A3A1QQZ6_9BACI Epoxyqueuosine reductase OS=Bacillus salacetis OX=2315464 GN=queG PE=3; SV = 1
MDFDKLKQDIIEYSKEIGIDKIGFTTAGTFSEMKNRLLRQEMLGYQSGFEEKDIEKRVDPSLIFDGPKSIIAIALAYPSRMKNAPQSKRGERRGIFCRASWGTDYHHVLRDRLSKLEDYIKSRVPQAQFKSMVDTGELVDRAVAKRAGIGWSGKNCAVITPEFGSYVYLGEMITNLPFAPDEPMEDQCGTCNKCVDVCPTGALVEGGQLNAQRCIAFLTQTKGFLPDEFRNKLGNRLYGCDTCQTVCPENKGKDFHNHWEMEPDPEIAKPLLKPLLTISNKEFKEKYGHVSGSWRGKKPIQRNAIIALAHYKDETAIPDLIAVMQNDVRPVIRGTAAWALGKIGGEEAGKALQKILAQEKDEEVITEIHKGLEILSGDLKQL

SEQ ID NO: 74829 - protein, 378 aa, Bacillus salarius
  REGION 1..378: note = tr|A0A428MWI2|A0A428MWI2_9BACI Epoxyqueuosine reductase OS=Bacillus salarius OX=284579 GN=queG PE=3 SV=1
MTGEELKEKIIAYSKEIGIDKIGFTSTDPFLTLKDRLIEQQRLNYQSGFEEPDIDKRVTPKRLLPEAKTIIAIALAYPSKLENAPKSTKGDRRGLFCRASWGEDYHRVLQDRLDKLEAYIAELVPEARCQSMVDTGELSDRAVAERAGIGWSGKNCAIITPEFGSYVYLGEMITTLSLEPDNEITDQCGTCNKCVDACPTDALVQGGQLDANKCIAFLTQTKDFLPERYRKKIGNRLYGCDTCQTVCPENKGMDHHNHEEFEPDPEVVKPQLLPLLTISNREFKEKYGPIAGSWRGKKPIQRNAVIALGTYKAEEGVETLVYLLNNDPRPVIRGSAAWSLGQIATDEAVQALEHAHRQETSEKVIEEIDYMLEEFSVK

SEQ ID NO: 74830 - protein, 378 aa, Bacillus salarius
  REGION 1..378: note = tr|A0A3R9P7B8|A0A3R9P7B8_9BACI Epoxyqueuosine reductase OS=Bacillus salarius OX=284579 GN=queG PE=3 SV=1
MTGAELKEKIIAYSKEIGIDKIGFASTDPFLTLKDRLIEQQRLNYQSGFEEPDIDKRVTPTRLLPEAKTIIAIALAYPSKLENAPKSVKGDRRGLFCRASWGEDYHRVLRDRLDKLEAYIAEIAPEARCQSMVDTGELSDRAVAERAGIGWSGKNCAIITPEFGSYVYLGEMITTLSLEPDNEITDQCGTCNKCVDACPTGALVQGGQLDSNKCIAFLTQTKDFLPERYRKKIGNRLYGCDTCQTVCPENKGMDHHNHEEFEPDPEVVKPQLLPLLTLSNREFKEKFGPIAGSWRGKKPIQRNAVLALGTYKAKEGVKTLIHLLKNDPRPVIRGSSAWSLGQIGTEEAVHALEEANTHETSEKVLEEISKVLDPISVK

SEQ ID NO: 74831 - protein, 380 aa, unidentified
  source 1..380: note = Bacillus salsus
  REGION 1..380: note = tr|A0A1H0VRX5|A0A1H0VRX5_9BACI Epoxyqueuosine reductase OS=Bacillus salsus OX=930152; GN = SAMN05216565_107163 PE=4 SV=1
MNYQQLKEEIIAYSKTIGIDKIGFTSATVFGGLKARLITQQQLGYQSGFEESDVEKRTNPDLLLSGAQSIIAIALAYPSKLKNAPRSTKEERRGIFCRASWGQDYHHILRDRLTKLEAFIQEKVPEAKMKSMVDTGELSDRAVAERAGIGWSGKNCAIITPEFGSYVYLGEMVINIPFEPDTPMEDRCGSCNKCVEVCPTNALVQGGQLDSTKCIAFLTQTKGFLADEYRTKIGNRLYGCDTCQTVCPENKGKDFHLHEEMEPDPEIVKPVLKGLLQISNKEFKEKYGVISGSWRGKKPIQRNAIIALAHFKDETAIPDLQTVLENDPRPVIRGTAAWALGKIGNKEAIPILEKAASREKDEEVQEEINKGMAMLLGIKK

SEQ ID NO: 74832 - protein, 385 aa, Bacillus selenatarsenatis
  REGION 1..385: note = tr|A0A0A8XEJ6|A0A0A8XEJ6_9BACI Iron-sulfur cluster-binding protein OS=Bacillus selenatarsenatis SF-1; OX = 1321606 GN=SAMD00020551_4779 PE=4 SV=1
MDTASLKQDIIEYSKTIGIDKIGFAAPSTFEEMKVRLYRQQELQYQSGFEEKDIEKRTEPSLIFDRPKSIISIALAYPSKMKTKVVSKKGERRGIFCRASWGTDYHKVLRDRLKKLEEYIASKVPEARFKSMVDTGELVDRAVAERAGIGWSGKNCSIITPEFGSYVYLGEMITSIPFEPDTPMEDRCGSCNKCVEVCPTGALVQGGQLDAQKCIAFVTQTKGFLADEFREKLGNRLYGCDTCQTVCPENKGKDFHFHEEMEPDPEIAKPLLKPLLTISNRDFKETFGHVSGSWRGKKPIQRNAIIALAHYKDDTAIPELIKVMQDDPRPVLRGTAAWALGKIGSSEALDALKHASAVEKDEEVLKEISKGLEFFKDNSESNITV

SEQ ID NO: 74833 - protein, 397 aa, Bacillus selenitireducens
  REGION 1..397: note = tr|D6XXM2|D6XXM2_BACIE Iron-sulfur cluster binding protein OS=Bacillus selenitireducens (strain ATCC 700615 / DSM 15326 / MLS10) OX=439292 GN=Bsel_2564 PE=4 SV=1
MNRQMLKQRMIEYSKEIGIDKIGFASADPFVTLKERLRRSSDAGYASGFEEGTLEERTEPERLLPAAKTIVSIAMAYPSKMKNPPRSVKGERRGIFCRASWGEDYHHVLRRKLQELERFVQACDPDIRTALMVDTGALSDRAVAERAGIGWSAKNCAVITPEFGSYVYLGEMIMTVDLEPDQPLEDQCGSCTACIDACPTGALVQGGQLNAQRCIAYLTQTKGVLPKEFRKKIGNRLYGCDTCQTVCPENKGKHTDHHKEMQPDPEKVKPKLIPLLQMSNRQFKETYGSMAGSWRGKKPIQRNALIGLANFKDESALPEIEKVLHGDPRPEIRATAAWALAEIAGASARERLINQLSHDESEIVQEEIHDIMKHLPTANRLVKQEHEKGGLASDAEK

SEQ ID NO: 74834 - protein, 376 aa, Bacillus shackletonii
  REGION 1..376: note = tr|A0A0Q3X212|A0A0Q3X212_9BACI Epoxyqueuosine reductase OS=Bacillus shackletonii OX=157838; GN = AN964_18005 PE=4 SV=1
MDFTKFKKELIQYSKSIGIDKIGFTTADPFTEMKNRLIKQQELQYQSGFEEKDIEKRTNPSLIFDKPQSIISIALAYPSKMKDAPKGKAGERRGIFAKASWGEDYHHILRRKLTELEAFIMDYYPEARCKSMVDTGELVDRAVAQRAGIGWSGKNCSIITPEFGSYVYLGEMITNIPFEPDAPMEDQCGTCTKCLDACPTGALVQGGQLNAQRCIAFLTQTKGFLAEEFRVKLGNRLYGCDTCQSVCPKNKGIDFHFHEEMEPDPNLAKPELTPLLSISNREFNESFGKMSGSWRGKKPIQRNALVALAHFKETSAVPEIITVLKNDPRPVLRGTAAWALGKIGGEEAKNALLTAKEKESDEEVLKEVEDGLSKLG

SEQ ID NO: 74835 - protein, 386 aa, Bacillus siamensis
  REGION 1..386: note = tr|A0A268DWG6|A0A268DWG6_9BACI Epoxyqueuosine reductase OS=Bacillus siamensis OX=659243 GN=queG PE=3 SV=1
MNIHKLKEELIEYAKSIGVDKIGFTTADTFDSLRDRLILQESLGYLSGFEEPDIEKRVTPSLLLPKAKSIVAIALAYPSKMKDAPRSTRDGRRGIFCRASWGKDYHDVLREKLDLLENFLQSKHEDIRTKSMVDTGELSDRAVAERAGIGFSAKNCMITTPEYGSYVYLAEMITNLPFEPDVPIEDMCGSCTKCLDACPTGALVNPGQLNAQRCISFLTQTKGFLPDEFRTKIGNRLYGCDTCQTVCPINKGKDFHLHPQMEPDPEIAKPLLKPLLTISNREFKEKFGHVSGSWRGKKPIQRNAILALAHFKDASSLPELTALMHQDPRPVIRGTAAWAIGKIGDPEYAKELEKALHKEQDEEAIQEIEKGLELLSVSDKTKTGRS

SEQ ID NO: 74836 - protein, 386 aa, Bacillus siamensis
  REGION 1..386: note = tr|A0A2K9KE46|A0A2K9KE46_9BACI Epoxyqueuosine reductase OS=Bacillus siamensis OX=659243 GN=queG PE=3 SV=1
MNIHKLKEELIEYAKSIGVDKIGFTTADTFDSLRDRLILQESLGYLSGFEEPDIEKRVTPSLLLPKAKSIVAIALAYPSKMKDAPRSTRDGRRGIFCRASWGKDYHDVLREKLDLLENFLQSKHEDIRTKSMVDTGELSDRAVAERAGIGFSAKNCMITTPEYGSYVYLAEMITNLPFEPDVPIEDMCGSCTKCLDACPTGALVNPGQLNAQRCISFLTQTKGFLPDEFRTKIGNRLYGCDTCQTVCPINKGKDFHLHPQMEPDPEIAKPLLKPLLTISNREFKEKFGHVSGSWRGKKPIQRNAILALAHFKDASSLPELTALMHQDPRPVIRGTAAWAIGKIGDPAYAKELEKALHKEQDEEAIQEIEKGLELLSVSDKTKTGPS

SEQ ID NO: 74837 - protein, 379 aa, Bacillus simplex
  REGION 1..379: note = tr|A0A270AQR5|A0A270AQR5_9BACI tRNA epoxyqueuosine(34) reductase QueG OS=Bacillus simplex; OX = 1478 GN=B8W99_04895 PE=4 SV=1
MDMNSFKQEVILYSKEIGIDKIGFTSATAFTELKGRLIRQQELDYQSGFEEADIEKRVRPELIFDKPQSIISIALAYPSKLKDAPQSTKSERRGIFCRASWGTDYHTVLRNKLQLLENFIKDKVPGAMMKSMVDTGELSDRAVAERAGIGWSAKNSMIITPEFGSYVYLGDMITNLPFEPDQPMEDQCGTCNKCVDVCPTGALVQGGQLNSKRCIAFLTQTKGFLPDEFRTKIGNRLYGCDTCQTVCPKNKGMDFHFHEEMEPDPELAKPLLKPLLTISNRDFKETYGHVSGSWRGKKPIQRNAILALAHFKDKTALPQLIQVMKDDPRPVIRGTAAWAVGKIGRQQAVSILEEARMKEKDEEVLAEIEKGLQFTLETK

SEQ ID NO: 74838 - protein, 379 aa, Bacillus simplex
  REGION 1..379: note = tr|A0A223EF69|A0A223EF69_9BACI tRNA epoxyqueuosine(34) reductase QueG OS=Bacillus simplex NBRC 15720 = DSM 1321 OX=1349754 GN=BS1321_07900 PE=4 SV=1
MDMNTFKQEVILYSKEIGIDKIGFTSATAFTELKGRLIRQQELDYQSGFEEADIEKRVMPELIFDKPQSIISIALAYPSKLKDAPQSTKSERRGIFCRASWGTDYHTVLRNKLQLLEDFIKDKVPGAVTKSMVDTGELSDRAVAERAGIGWSAKNSMIITPEFGSYVYLGDMITNLPFEPDQPMEDQCGTCNKCVDVCPTGALVQGGQLNSKRCIAFLTQTKGFLPDEFRTKIGNRLYGCDTCQTVCPKNKGMDFHFHEEMEPDPELAKPLLKPLLTISNRDFKETYGHVSGSWRGKKPIQRNAILALAHFKDETALPQLIQVMKDDPRPVIRGTAAWAVGKIGRKQAVSILEEARMKETDEEVLAEIEKGLQFTLETK

SEQ ID NO: 74839 - protein, 377 aa, Bacillus smithii
  REGION 1..377: note = tr|A0A0H4NWP5|A0A0H4NWP5_9BACI Epoxyqueuosine reductase OS=Bacillus smithii OX=1479 GN=queG PE=3 SV=1
MDYNQLKQDIIAYSKQIGIDKIGFASAEPFTELKNRLIRQQELQFQSGFEEPDIDKRTNPALIFDQPRSIIAIALAYPSKMKETPKGKKGLRRGTFCKASWGLDYHVILRNRLKQLEEFIRSKVPEARMKSMVDTGELSDRAVAERAGIGWSGKNCSIITPEFGSYVYLGEMITNLPFEPDQPLESRCGTCTKCLDACPTGALVQGGQLNAKKCIAFLTQTKDFLPDEYRDKIGNRLYGCDTCQTVCPENKGIDFHLHEEMEPDPETAKPLLEPLLDISNKEFKEKFGMVSGSWRGKKPIQRNAIIALAHFKEETAIPSLVEVLQKDVRPVIRGTAAWAIGKIGGDQAKSALLEAKQTETDPDVLKEIEKGLQYFSS

SEQ ID NO: 74840 - protein, 377 aa, Bacillus smithii
  REGION 1..377: note = tr|G9QJ17|G9QJ17_9BACI Putative iron-sulfur cluster-binding protein OS=Bacillus smithii 7_3_47FAA; OX = 665952 GN=HMPREF1015_02178 PE=4 SV=1
MDYNQLKQDIIAYSKQIGIDKIGFASAEPFTELKNRLIRQQELQFQSGFEEPDIDKRTNPALIFDQPRSIIAIALAYPSKMKETPKGKKGLRRGTFCKASWGLDYHVILRNRLKQLEEFIRSKVPEARMKSMVDTGELSDRAVAERAGIGWSGKNCSIITPEFGSYVYLGEMITNLPFEPDLPLESRCGTCTKCLDACPTGALVQGGQLNAKKCIAFLTQTKDFLPDEFRDKIGNRLYGCDTCQTVCPENKGIDFHLHEEMEPDPETAKPLLEPLLDISNKEFKEKFGMVSGSWRGKKPIQRNAIIALAHFKEETAIPSLVEVLQKDVRPVIRGTAAWAIGKIGGDQAKSALLEAKQTETDPDVLKEIEKGLQYFSS

SEQ ID NO: 74841 - protein, 381 aa, unidentified
  source 1..381: note = Bacillus solani
  REGION 1..381: note = tr|A0A0Q3QKM2|A0A0Q3QKM2_9BACI Epoxyqueuosine reductase OS=Bacillus solani OX=1637975 GN=AN957_07810; PE = 4 SV=1
MDFSQFKKEIIEYSKTIGIDKIGFTTASTFDELRNRLIRQQELQYQSGFEEKDIEKRVNPALLMDSPRSIIAIALAYPSKMNERVTSKKGERRGIFSRASWGEDYHLILRDRLKKLEAYIIERVPEAKCKSMVDTGELVDRAVAERAGIGWSGKNCSIITPEFGSYVYLGEMITTIPFEPDQPIEDQCGTCNKCLEACPTGALVQGGQINAQKCIAFLTQTKGFIEEQYREKIGNRVYGCDSCQTACPENKGKNFHFHEEMEPDPEIVKPLLKPILQISNREFKEKFGPLAGSWRGKKPIQRNAIIALAHFKDETSVEELIEVMMKDSRAVIRGTAAWALGKIGGEIAKLALEKAREAESDEEVLVEIERGLAFFKNDSRI

SEQ ID NO: 74842 - protein, 383 aa, unidentified
  source 1..383: note = Bacillus solimangrovi
  REGION 1..383: note = tr|A0A1E5LCF8|A0A1E5LCF8_9BACI tRNA epoxyqueuosine(34) reductase QueG OS=Bacillus solimangrovi; OX = 1305675 GN=BFG57_18100 PE=4 SV=1
MTNAQLKIDLIAYSKSIGIDKIGFASTDSFLELKERLKLQQSLQYDSGFEEPNIEKRTEPNMIMPQARSIVSIALAYPSKMKNAPRSTRKDPRGIFCRASWGTDYHHILREKLAKLEQFLQERVADVVCKSMVDTGELSDRAVAERAGIGWSAKNTAIITPEFGSYVYLGEMITTIPFEPDTPIEEQCGTCTKCIDACPTGAIVQGGQLNAQRCIAFLTQTKGFLAEEFRVKLGNRLYGCDTCQTVCPKNKGKDFHFHPEMEPDPEIVKPRLQPLLTISNREFKEKFGAISGSWRGKKPIQRNAIIAIAHYKDQSALPLLEKLLVEDPRPVIRGTAAWAIGKIGGHEVKEALNQALEKEQDQEVCDEIQKAITRIPYYHTNES

SEQ ID NO: 74843 - protein, 382 aa, Bacillus sonorensis
  REGION 1..382: note = tr|M5P751|M5P751_9BACI Epoxyqueuosine reductase; OS = Bacillus sonorensis L12 OX=1274524 GN=queG PE=3 SV=1
MDMKQLKQDVIEFAQQIGIDKIRFASADTFETLKDRLIENRALGYESGFEEPDIEKRTNPQLLLPKAKSIIAIALAYPSKMKNAPRSVKGERRGIFCRASWGKDYHHVLREKLDQLEEFLKSQHEDVRTKSMVDTGELSDRAVAERAGIGWSGKNCMIITPEFGSYVYLAEMITNIPFEPDERIEDQCGSCNKCIEACPTGALVNPGQLNSQRCIAFQTQTKGFLPDEFRTKIGNRIYGCDTCQMVCPKNKGVDFHLHPEMEPDPEIAKPLLKPLLTMSNREFKEKFGHVAGSWRGKKPIQRNAIIALAHFKETSALPELVSLMHQDPRPVIRGTAAWAIGKIGETDMLEELETAYSREEDEEAKAEIQKGIRLLKETAMTK

SEQ ID NO: 74844 - protein, 379 aa, unidentified
  source 1..379: note = [Bacillus] sp.
  REGION 1..379: note = tr|A0A150YIF8|A0A150YIF8_9BACI Epoxyqueuosine reductase OS=[Bacillus] sp. KCTC 13219 OX=1811976; GN = A0U40_07195 PE=4 SV=1
MNVTDLQTELILYAKSIGVDKIGFTTASPFLELKNRLRRQQQLGYQSGFEEQDIDKRTEPLRLLDQAESIIAIALAYPSKMKDAPLGKKGERRGIFCRASWGIDYHVAVRERLQLIEEWLRKHVPDVKIKSMVDTGELVDRAVAERAGIGWSGKNCSIITPEFGSYVYLGELITNIPFAPDQPMEDECGECRLCIDVCPTGAIVEGGQLNAQRCIAFLTQTKGFLPDEFRGKIGNRLYGCDTCQTVCPKNKGKANWIHEEFMPDPELAKPLLEPLLTISNKEFKARFGHVSGSWRGKKPIQRNSILALAHFKEQQAVPELLQVMKKDERPVIRGTAAWALGKIGGQGIQEELLAAKEREQDAEVLAEIDKGLALLTEID

SEQ ID NO: 74845 - protein, 263 aa, Bacillus sp.
  REGION 1..263: note = tr|A0A3D5TYR4|A0A3D5TYR4_BACSP tRNA epoxyqueuosine(34) reductase QueG (Fragment) OS=Bacillus sp. OX=1409 GN=queG PE=4 SV=1
MDFEQLKQDVIAYSKTIGIDKIGFASASPFEELKQRLIQQQQLNYQSGFEEPDIEKRTNPQLLLPGAKSIIAIALAYPSKLKNAPLSKRGERRGIFCRASWGQDYHLVLRDRLQKLEAYLIEKLPDIEVKSMVDTGELSDRAVSERAGIGWSGKNCSIITPEFGSYVYLGEMITNVPFPPDKPIEDQCGGCTKCIDICPTGALIQGGQLDSKKCIAFLTQTKGFLPEEYRDKIGNRIYGCDTCQTVCPKNKGMDFHNHPEMEP

SEQ ID NO: 74846 - protein, 406 aa, Bacillus sp.
  REGION 1..406: note = tr|A0A2W0HZH6|A0A2W0HZH6_9BACI Epoxyqueuosine reductase OS=Bacillus sp. YSP-3 OX=2045244 GN=queG PE=3; SV = 1
MLEKQRVHRVLITILYPNERKGVVFVTGAQLKEEIAAYSKSIGVDKVGFASVDPFLTLKDRLVRHRELGYESGFEEQDLEKRTRPELLLPEAKTIIAIAIAYPSKMKDAPVSKKGERRGIFCRASWGEDYHHVLRRKLRQIEAFIEERVPGSRSVSMVDTGELSDRAVAERAGIGWSGKNCAIISHEFGSYMYLGEMITTVALEPDQPIEDQCGTCNKCVDACPTGALVQGGQLDSGKCIAYLTQTKDFLPDRFRKKLGNRLYGCDTCQVVCPENKGKDFHHHEELEPDPEVVKPKLEPLLTITNREFKDTYGRIAGSWRGKKPIQRNAIIALAHFKEESALPVLYDLMLEDPRPVIRGTAAWAAGVIGGGEESESVLKQAKLRETDPQVLAEIDKGLEILLNKEI

SEQ ID NO: 74847 - protein, 380 aa, Bacillus sporothermodurans
  REGION 1..380: note = tr|A0A150KSX7|A0A150KSX7_9BACI Epoxyqueuosine reductase OS=Bacillus sporothermodurans OX=46224 GN=queG; PE = 3 SV=1
MNVKQLKDEIITYSKEIGIDKIGFTTADPFTEMKNRLIRQQELGYQSGFEEKDIEKRVDPSLIFEEPKSIIAIALAYPSRMNDAPKGKKGERRGIFCRASWGVDYHTILRDKLRQLEQFIAEKVPEARFKSMVDTGELVDRAVAERAGIGWSGKNCSIITPEFGSYVYLGEMITNLPFEPDEPIEDQCGSCTKCLDACPTGALVQGGQLNAQRCIAFLTQTKGFLEDEFRVELGNRLYGCDTCQTSCPKNKGMNFHFHEEMEPNPEIAKPKLTPLLTISNREFKEDFGPVSGSWRGKKPIQRNAIIALAHFKEESAVPDLIKVLTDDPRPVLRGTAAWALGKIGGTDAKESLHKAEKTERDPEVLKEIEKGISLCSMKAK

SEQ ID NO: 74848 - protein, 380 aa, Bacillus sporothermodurans
  REGION 1..380: note = tr|A0A2T6EGJ9|A0A2T6EGJ9_9BACI Epoxyqueuosine reductase OS=Bacillus sporothermodurans OX=46224 GN=queG; PE = 3 SV=1
MNVKQLKDEIISYSKEIGIDKIGFTTADPFTEMKNRLIRQQELGYQSGFEEKDIEKRVDPSLIFEQPKSIIAIALAYPSRMNDAPKGKKGERRGIFCRASWGVDYHTILRDKLRQLEQFIAEKVPEARFKSMVDTGELVDRAVAERAGIGWSGKNCSIITPEFGSYVYLGEMITNLPFEPDEPIEDQCGSCTKCLDACPTGALVQGGQLNAQRCIAFLTQTKGFLEDEFRVELGNRLYGCDTCQTSCPKNKGMNFHFHEEMEPNPEIAKPKLTPLLTISNREFKEDFGPVSGSWRGKKPIQRNAIIALAHFKEESAVPDLIKVLTDDPRPVLRGTAAWALGKIGGTDAKESLHKAEKTERDPEVLKEIEKGISLCSMKAK

SEQ ID NO: 74849 - protein, 382 aa, Bacillus stratosphericus
  REGION 1..382: note = tr|A0A4Y9JWB0|A0A4Y9JWB0_9BACI tRNA epoxyqueuosine(34) reductase QueG OS=Bacillus stratosphericus OX=293386 GN=queG PE=4 SV=1
MHVGELKEELIQYAKEIGVDKIRFASADTFDSLKDRLILHESLGYLSGFEEPDIEKRTNPSLLLPKAKSIVAIALAYPSKMKDAPRSTKGARRGIFCRASWGTDYHVVLKKKLDMLEEFLRSKHVDIRTKSMVDTGELSDRAVAERAGIGFSAKNCMIITPEFGSYVYLAEMITNVPFEPDEKIEDQCGTCNKCVDSCPTGALVNPGQLNSQRCISFLTQTKGFLPDEFRSKIGNRLYGCDTCQTVCPINKGKDFHLHPEMEPDPEIAKPLLKPLLTISNREFKEKYGHVSGSWRGKKPIQRNAILALAHFKDTSALPVLIELMHKDPRPVIRGTAAWAIGKIGDDQQLPELEKALERESDEEAKEEIVKGIELLQTPLNTK

SEQ ID NO: 74850 - protein, 393 aa, Bacillus stratosphericus
  REGION 1..393: note = tr|M5RKT5|M5RKT5_9BACI Iron-sulfur containing oxidoreductase subunit OS=Bacillus stratosphericus LAMA 585 OX=1236481 GN=C883_505 PE=4 SV=1
MKKQRKEVCKVIHVGQLKEELIQYANEIGVDKIRFASADTFDSLKDRLILHESLGYLSGFEEPDIEKRTNPALLLPKAKSIVAIALAYPSKMKDAPRSTKDARRGIFCRASWGTDYHVVLKKKLDMLEEFLRSKHEDIRTKSMVDTGELSDRAVAERAGIGFSAKNCMIITPEFGSYVYLAEMITNVPFEPDEKIEDQCGTCNKCVDSCPTGALVNPGQLNSQRCISFLTQTKGFLPDEFRSKIGNRLYGCDTCQTVCPINKGKDFHLHPEMEPDPEIAKPLLKPLLTISNREFKEKYGHVSGSWRGKKPIQRNAILALAHFKDTSALPDLVDLMHKDPRPVIRGTAAWAIGKIGDGQQLSELEKALERESDEEAKQEIIKGIELLQTPLNTK

SEQ ID NO: 74851 - protein, 381 aa, Bacillus subterraneus
  REGION 1..381: note = tr|A0A0D6ZD83|A0A0D6ZD83_9BACI Iron-sulfur cluster-binding protein OS=Bacillus subterraneus OX=285983; GN = UB32_05090 PE=4 SV=1
MDTASLKKEIIAYSKTIGIDKIGFASPSTFEEMKVRLYRQQELRYQSGFEEKDIEKRTEPSLIFDKPKSIISIALAYPSKMGPKVISKKGERRGIFSRASWGTDYHTVLRDRLKKLEEYIALKMPEARFKSMVDTGELVDRAVAERAGIGWSGKNCSIITPEFGSYVYLGEMITNIPFEPDHPMEDRCGSCNKCVDVCPTGALVQGGQLNAQKCIAFVTQTKGFLAEEFREKLGNRLYGCDTCQTVCPENKGKDFHFHTEMEPNPEIAKPLLKPLLSISNREFKEKFGHVSGSWRGKKPIQRNAIIALAHYRDETAIPELITVMKDDPRPVLRGTAAWALGKIGGQDALEALQHAFSVEKDEEVLQEIRKGLYFFAEKKQG

SEQ ID NO: 74852 - protein, 385 aa, Bacillus subterraneus
  REGION 1..385: note = tr|A0A3R9ED84|A0A3R9ED84_9BACI tRNA epoxyqueuosine(34) reductase QueG OS=Bacillus subterraneus; OX = 285983 GN=queG PE=4 SV=1
MDMAALKQDIIAYSKTIGIDKIGFAAPDAFEEMKVRLYRQQELNYQSGFEEKDIEKRTEPSLIFDRPKSIISIALAYPSKMKTSVVSKKGERRGIFCRASWGTDYHAVLRDRLRKLEEYIAGKVSGAIFKSMVDTGELVDRAVAERAGIGWSGKNCSIITPEFGSYVYLGEMITNIPFEPDTPMEDRCGSCNKCVDVCPTGALVQGGQLDAQKCIAFVTQTKGFLADEFRDKLGNRLYGCDTCQTICPENKGKDFHLHAEMEPDPEIAKPLLKPLLTISNRDFKERFGHVSGSWRGKKPIQRNAIIALAHYKDDTAIPELITILKEDPRPVLRGTTAWALGKIGGRDALEALNRASKVEKDAEVLEEISKGLEFFKNDSETNIHV

SEQ ID NO: 74853 - protein, 386 aa, Bacillus subtilis
  REGION 1..386: note = tr|A0A0A0TN50|A0A0A0TN50_BACIU Epoxyqueuosine reductase OS=Bacillus subtilis OX=1423 GN=queG PE=3 SV=1
MNIHKLKEELIEYAKSIGVDKIGFTTADTFDSLRDRLILQESLGYLSGFEEPDIEKRVTPSLLLPKAKSIVAIALAYPSKMKDAPRSTRDGRRGIFCRASWGKDYHDVLREKLDLLENFLQSKHEDIRTKSMVDTGELSDRAVAERAGIGFSAKNCMITTPEYGSYVYLAEMITNLPFEPDVPIEDMCGSCTKCLDACPTGALVNPGQLNAQRCISFLTQTKGFLPDEFRTKIGNRLYGCDTCQTVCPINKGKDFHLHPQMEPDPEIAKPLLKPLLTISNREFKEKFGHVSGSWRGKKPIQRNAILALAHFKDASSLPELTALMHQDPRPVIRGTAAWAIGKIGDQEYAAELEKALYKEQDEEAIQEIKKGLELLSVSDKTKTGQS

SEQ ID NO: 74854 - protein, 407 aa, Bacillus subtilis
  REGION 1..407: note = tr|M4KT49|M4KT49_BACIU 4Fe-4S ferredoxin-type domain-containing protein OS=Bacillus subtilis XF-1; OX = 1233100 GN=C663_0916 PE=4 SV=1
MISTYYKRCIVLSQRKEAVQNMNVYQLKEELIEYAKSIGVDKIGFTTADTFDSLKDRLILQESLGYLSGFEEPDIEKRVTPKLLLPKAKSIVAIALAYPSRMKDAPRSTRTERRGIFCRASWGKDYHDVLREKLDLLEDFLKSKHEDIRTKSMVDTGELSDRAVAERAGIGFSAKNCMITTPEYGSYVYLAEMITNIPFEPDVPIEDMCGSCTKCLDACPTGALVNPGQLNAQRCISFLTQTKGFLPDEFRTKIGNRLYGCDTCQTVCPLNKGKDFQLHPEMEPDPEIAKPLLKPLLTISNREFKEKFGHVSGSWRGKKPIQRNAILALAHFKDASALPELAELMHKDPRPVIRGTAAWAIGKIGDPAYAEELEKALEKEKDEEAKLEIEKGIELLKASGMTKQGLS

SEQ ID NO: 74855 - protein, 382 aa, unidentified
  source 1..382: note = Bacillus swezeyi
  REGION 1..382: note = tr|A0A5D4QLG9|A0A5D4QLG9_9BACI Epoxyqueuosine reductase OS=Bacillus swezeyi OX=1925020 GN=queG PE=3 SV=1
MDVKKLKRDVVEYAQQIGIDKIRFASADTFETLKERLIENRALGYESGFEEPDIEKRTNPDLLLPKAKSIIAIALAYPSKMKDAPRSTKGERRGIFCRASWGKDYHHVLREKLDQLEEFLTSQRSDVRTKSMVDTGELSDRAVAERAGIGWSGKNCMIITPEFGSYVYLAEMITNIPFEPDERVEDQCGSCNKCIDACPTGALVNPGQLNSQRCIAFQTQTKGFLPDEFRTKIGNRIYGCDTCQMVCPINKGKDFHLHPEMEPDPEIAKPLLKPLLTMKNREFKEKFGHVAGSWRGKKPIQRNAIIALAHFKETSALPELVSLLHKDPRPVIRGTAAWAIGKIGEADVKNELEKALIREQDEEAKAEIEKGIQLLKETSATN

SEQ ID NO: 74856 - protein, 382 aa, unidentified
  source 1..382: note = Bacillus swezeyi
  REGION 1..382: note = tr|A0A1R1QNK9|A0A1R1QNK9_9BACI Epoxyqueuosine reductase OS=Bacillus swezeyi OX=1925020 GN=queG PE=3 SV=1
MDVKKLKQDVIEYAQQIGIDKIRFASADTFETLKERLIENRTLGYESGFEEPDIEKRTNPDLLLPKAKSIIAIALAYPSKMKDAPRSTKGERRGIFCRASWGKDYHHVLREKLDQLEEFLTSQRSDVRTKSMVDTGELSDRAVAERAGIGWSGKNCMIITPEFGSYVYLAEMITNIPFEPDERVEDQCGSCNKCIDACPTGALVNPGQLNSQRCIAFQTQTKGFLPDEFRTKIGNRIYGCDTCQMVCPINKGKDFHLHPEMEPDPEIAKPLLKPLLTMKNREFKEKFGHVAGSWRGKKPIQRNAIIALAHFKETSALPELVSLLHKDPRPVIRGTAAWAIGKIGEADVKDELEKALIREQDEEAKAEIEKGIQLLKETSATN

SEQ ID NO: 74857 - protein, 381 aa, Bacillus taeanensis
  REGION 1..381: note = tr|A0A366XZN0|A0A366XZN0_9BACI tRNA epoxyqueuosine(34) reductase QueG OS=Bacillus taeanensis; OX = 273032 GN=queG PE=4 SV=1
MNVDKLKEEIIAYSKTIGIDKIGFATAEPFIELKERLKRQQQLNYQSGFEHSNIEERTHPELLMPGAKSFIAIAVAYPSKIKNPPKNEKENRRGIFARASWGRDYHDVLRDRLNKLASFIIERVPRADIQSMVDTGALSDRAVAERAGIGFSGKNCAIITPEFGSYVYLGEMVTNIPFSPDQPIEDSCGSCNLCIEACPTGALVQGGQLDSNKCLSFLTQTKDFLSLEYRDKIGNRLYGMDTCQIVCPRNKGIDFHLHHELEPDPEIAMPKLKPLLKMSNREFKEKFGHISGSWRGKKPIQRNAILALAHFKDKTAVGDLIQLMKEDPRPVIRGTAAWALGKIGDERALKSLKEAKEKEKDEKVLIEIDTGLKMLNNQPIS

SEQ ID NO: 74858 - protein, 386 aa, Bacillus tequilensis
  REGION 1..386: note = tr|A0A2X0YFQ3|A0A2X0YFQ3_9BACI Epoxyqueuosine reductase OS=Bacillus tequilensis OX=227866 GN=yhbA PE=3; SV = 1
MNVYQLKEELIEYAKSIGVDKIGFTTADTFDSLKDRLILQESLGYLSGFEEPDIEKRVTPKLLLPKAKSIVAIALAYPSRMKDAPRSTRTERRGIFCRASWGKDYHDVLREKLDLLEEFLKSKHEDIRTKSMVDTGELSDRAVAERAGIGFSAKNCMITTPEYGSYVYLAEMITNIPFEPDVPIEDMCGSCTKCLDACPTGALVNPGQLNAQRCISFLTQTKGFLPDEFRTKIGNRLYGCDTCQTVCPLNKGKDFHLHPEMEPDPEIAKPLLKPLLTISNREFKEKFGHVSGSWRGKKPIQRNAILALAHFKDASALPELTDLMHKDPRPVIRGTAAWAIGKIGDPAYAEELEKALEKETDEEAKLEIEKGIELLKATGMTKQGLS

SEQ ID NO: 74859 - protein, 376 aa, unidentified
  source 1..376: note = Bacillus terrae
  REGION 1..376: note = tr|A0A429X6X2|A0A429X6X2_9BACI Epoxyqueuosine reductase OS=Bacillus terrae OX=1914933 GN=queG PE=3 SV=1
MNYEALKDEVIAYSKKIGIDKIGFTSGDPFIEMKNRLIRQEELGYQSGFEHKNIEERTHPELIFDEPRSIIAIALAYPSKMKDAPRGERGARRGIFCKASWGVDYHVLVREKLEQLASFIDSKADHARFKLMVDTGELVDRAVAERAGIGWSGKNCSIITPEFGSYVYLGEMITNLPFAPDEPMQDQCGECTKCLDACPTGALVQPGQLDAQRCIAFLTQTKGVLPDEFRDKIGNRLYGCDTCQTICPKNKGVDFHLNPDMEPDSQIAKPLLQPLLDISNREFKEKYGEVSGSWRGKKPIQRNAILALGHFKERSAVSDLIKVLNEDVRPEIRGTAAWSLGKIGGEQAKEALIRAQARESDSLVLEEIDKGLQLLE

SEQ ID NO: 74860 - protein, 374 aa, Bacillus thermoamylovorans
  REGION 1..374: note = tr|A0A2U8EFB6|A0A2U8EFB6_9BACI Epoxyqueuosine reductase OS=Bacillus thermoamylovorans OX=35841 GN=queG; PE = 3 SV=1
METQALKKEIIDYAKSIGIDKIGFATADPFTTLKARLIRQQELNYQSGFEESDIDKRTNPALLFDNPQSIISIALAYPTKMNEHVRGTKGERRGLFARASWGEDYHLVLRDRLSKLEQFIYSKMPDARCKSMVDTGELSDRAVAERAGIGWSGKNCAIITPEYGSFVYLGEMITNIPFEPDTPIENMCGTCNKCIEACPTGALVQPGQINAKICISYLTQTKDFLPDEYRSVIGNRLYGCDTCQIVCPYNKGKDFHFHEEFEPEPEVAKPLLKPLLKISNKEFKEKYGRVSGAWRGKKPIQRNAIIALGHFKDETAIDELSDVIRNDPRPVIRGTAAWALGKIGTEKAKQILTKAKIEEKDEDVLREIEVALAE

SEQ ID NO: 74861 - protein, 374 aa, Bacillus thermoamylovorans
  REGION 1..374: note = tr|A0A0D0EQQ2|A0A0D0EQQ2_9BACI Epoxyqueuosine reductase OS=Bacillus thermoamylovorans OX=35841 GN=queG; PE = 3 SV=1
METQALKKEIIDYAKSIGIDKIGFATAAPFTTLKARLIRQQELNYQSGFEESDIDKRTNPALLFDNPQSIISIALAYPTKMNKHVRGTKGERRGLFARASWGEDYHLVLRDRLSKLEQFIYSKMPDARCKSMVDTGELSDRAVAERAGIGWSGKNCAIITPEYGSFVYLGEMITNIPFEPDTPIENMCGTCNKCIEACPTGALVQPGQINAKICISYLTQTKDFLPDEYRSVIGNRLYGCDTCQIVCPYNKGKDFHFHEEFEPEPEVAKPLLKPLLKISNKEFKEKYGRVSGAWRGKKPIQRNAIIALGHFKDETAIDELSDVIRNDPRPVIRGTAAWALGKIGTEKAKQILTKAKIEEKDEDVLQEIEVALAE

SEQ ID NO: 74862 - protein, 378 aa, unidentified
  source 1..378: note = Bacillus thermocopriae
  REGION 1..378: note = tr|A0A410XGZ0|A0A410XGZ0_9BACI Epoxyqueuosine reductase OS=Bacillus thermocopriae OX=1215031 GN=queG; PE = 3 SV=1
MDVEALKEEIIQYSRTIGIDKIGFAHADPFFELKERLRQQQQLGYESGFEEPDIEKRTNPSLLLPEARSIIAIALAYPSKLKNAPRSTKKERRGIFCRASWGQDYHIILRERLQKLEQFILTRVPDAKVKSMVDTGELSDRAVAERAGIGWSGKNCSIITPEFGSYVYLGEMITNIPFPPDAPIEDQCGTCTRCIDACPTGALVQGGQLNAKRCIAFLTQTKTFIPDEFRDKIGNRLYGCDTCQLVCPKNKGKDFHFHPEMEPDPEVVKPLLKPILHMTNRQFKETFGHLSGAWRGKKPIQRNAIIALAHYKDESAIDDLLILLQKDSRPVIRGTAAWALGKIGNYEVVPMLKKAKEREQDEDVIREIEKALAMLENV

SEQ ID NO: 74863 - protein, 448 aa, unidentified
  source 1..448: note = Bacillus thermozeamaize
  REGION 1..448: note = tr|A0A1Y3PFI4|A0A1Y3PFI4_9BACI Epoxyqueuosine reductase OS=Bacillus thermozeamaize OX=230954 GN=queG; PE = 3 SV=1
MEKKDGHTTPACSPESGRAAGRWAALKEELKAYAKTIGIDKIGFASAEPFTELKERLVRHRELGYESGFEEPDLERRTNPQLLMPGARSIIAIALAYPTRMDHPPASRKGAYRGFFARAAWGEDYHRVLRRKLEELAAYLRHRVEGVQTEIMVDTGALSDRAVAERAGIGWSGKNTAIITPEFGSWVYLGEMLTNLPFPPDIPITQSCGECTRCIDACHTGALVAPGQLDAKRCVSYLTQTKDFLAEEYREIIGNRLYGCDTCQLVCPYNKGLNFTHQEAFAPDPEVVKPLLQPILKMSNRMFRERFGMSAASWRGKKPLERNAILALAHYRDASAIPLLLEKLEDPRPVIRGTAAWAVGKIAAGQEEAVRRRVQQALEQAYRQETVPEVSQEIEKGLRFLKEKDPASMADAGTGSEKPDGAIGQCDGVAGETGVGQDPAALSANLPL

SEQ ID NO: 74864 - protein, 380 aa, Bacillus thuringiensis
  REGION 1..380: note = tr|A0A437SQD0|A0A437SQD0_BACTU Epoxyqueuosine reductase OS=Bacillus thuringiensis OX=1428 GN=queG PE=3; SV = 1
MDFEQLKQDVIAYSKTIGIDKIGFASASPFEELKQRLIQQQQLNYQSGFEEPDIEKRTNPQLLLPGAKSIIAIALAYPSKLKNAPLSKRGERRGIFCRASWGQDYHLVLRDRLQKLEAYLIEKLPNIEVKSMVDTGELSDRAVSERAGIGWSGKNCSIITPEFGSYVYLGEMITNVPFPPDQPIEDQCGSCTKCIDICPTGALIQGGQLDSKKCIAFLTQTKGFLPEEYRDKIGNRIYGCDTCQTVCPKNKGMDFHNHPEMEPDPELVKPLLTPLLTISNRDFKEKYGIMSGSWRGKKPLQRNAILALAHFKEASAIPDLIGVMKDDPRPVLRGTAAWALGKIGGEGVGEAIEKAMQREKDEEVLHEMNRGLELLAQKKE

SEQ ID NO: 74865 - protein, 380 aa, Bacillus thuringiensis
  REGION 1..380: note = tr|V5M3R2|V5M3R2_BACTU Epoxyqueuosine reductase; OS = Bacillus thuringiensis YBT-1518 OX=529122 GN=queG PE=3; SV = 1
MDFEKLKQDVIAYSKTIGIDKIGFASASPFEELKQRLIQQQQLNYQSGFEEPDIEKRTNPQLLLPGAKSIIAIALAYPSKLKNAPLSKRGERRGIFCRASWGQDYHLVLRDRLQQLEAYLIEKLPDIEVKSMVDTGELSDRAVSEHAGIGWSGKNCAIITPEFGSYVYLGEMITNVPFPPDKPIEDQCGGCTKCIDICPTGALIQGGQLDSKKCIAFLTQTKGFLPEEYRDKIGNRIYGCDTCQTVCPKNKGMDFHNHPEMEPDPELVKPLLTPLLTISNRDFKEKYGIMSGSWRGKKPLQRNAILALAHFKEASAIPDLIGVMKDDPRPVLRGTAAWALGKIGGDGVGEAIEKAIEREKDEEVLHEMKRGLELLAQKKE

SEQ ID NO: 74866 - protein, 377 aa, unidentified
  source 1..377: note = Bacillus timonensis
  REGION 1..377: note = tr|A0A4S3PNH3|A0A4S3PNH3_9BACI Epoxyqueuosine reductase OS=Bacillus timonensis OX=1033734 GN=queG PE=3; SV = 1
MDIVKFQQELIDYSKTIGIDKIGFASASPFDELKSRLLRQQELGYQSGFEPKDIEKRTNPELLLPGAKSIIAIALAYPAKLKDAPRSTRSERRGMFARASWGEDYHHILRDRLQKLESFILEKLPDAKLQSMVDTGELSDRAVAERAGIGWSGKNCAIITPEFGSYVYLGEMITNIPFAPDTPIEDQCGSCRACLDACPTGALVQGGQLNAQRCVSFLTQTKDFLPDEFRTKIGNRLYGCDSCQTACPKNKGIDFHFHEEMEPHPEVVKPLLKPILSISNRDFKETYGALSGSWRGKKPIQRNAIIALAHFKDRSAIPELKQVLKEDPRPVLRGTAAWALGKIGDESAIDILKEASLKEKDEQVLDEIEKGLNMLGK

SEQ ID NO: 74867 - protein, 380 aa, unidentified
  source 1..380: note = Bacillus toyonensis
  REGION 1..380: note = tr|A0A2A8HDL6|A0A2A8HDL6_9BACI Epoxyqueuosine reductase OS=Bacillus toyonensis OX=155322 GN=queG PE=3; SV = 1
MDFEQLKQDVIAYSKTIGIDKIGFASASPFEELKQRLIQQQQLNYQSGFEESDIEKRTNPQLLLPGAKSIIAIALAYPSKLKNAPLSKRGERRGIFCRASWGQDYHLVLRDRLQKLEAYLIEKLPDIEVKSMADTGELSDRAVSERAGIGWSGKNCAIITPEFGSYVYLGEIITNVPFPPDQPIEDQCGSCTKCIDVCPTGALIQGGQLDSKKCIAFLTQTKGFLPEEYRDKIGNRIYGCDTCQTVCPKNKGMDFHNHPEMEPDSELVKPLLTPLLTISNRDFKEKYGIMSGSWRGKKPLQRNAILALAHFKEASAIPDLIGVMKDDPRPVLRGTAAWALGKIGGDGVGEAIEKAMEREKDEEVLHEMNRGLALLAQKKE

SEQ ID NO: 74868 - protein, 380 aa, unidentified
  source 1..380: note = Bacillus toyonensis
  REGION 1..380: note = tr|A0A2B5DKI0|A0A2B5DKI0_9BACI Epoxyqueuosine reductase OS=Bacillus toyonensis OX=155322 GN=queG PE=3; SV = 1
MDFEQLKQDVIAYSKTIGIDKIGFASASPFEELKQRLIQQQQLNYQSGFEESDIEKRTNPQLLLPGAKSIIAIALAYPSKLKNASLSKRGERRGIFCRASWGQDYHLVLRDRLQKLEAYLIEKLPDIEVKSMVDTGELSDRAVSERAGIGWSGKNCAIITPEFGSYVYLGEIITNVPFPPDQPIEDQCGSCTKCIDVCPTGALIQGGQLDSKKCIAFLTQTKGFLPEEYRDKIGNRIYGCDTCQTVCPKNKGMDFHNHPEMEPDPELVKPLLTPLLTISNRDFKEKYGIMSGSWRGKKPLQRNAILALAHFKEASAIPDLIGVMKDDPRPVLRGTAAWALGKIGGDGVGEAIEKAMEREKDEEVLHEMNRGLALLAQKKE

SEQ ID NO: 74869 - protein, 380 aa, unidentified
  source 1..380: note = Bacillus tropicus
  REGION 1..380: note = tr|A0A4Y6F534|A0A4Y6F534_9BACI Epoxyqueuosine reductase OS=Bacillus tropicus OX=2026188 GN=queG PE=3 SV=1
MDFEQLKQDVIAYSKTIGIDKIGFASASPFEELKQRLIQQQQLNYQSGFEEPDIEKRTNPQLLLPGAKSIIAIALAYPSKLKNAPLSKRGERRGIFCRASWGQDYHLVLRDRLQKLEAYLIEKLPDIEVKSMVDTGELSDRAVSERAGIGWSGKNCSIITPEFGSYVYLGEMITNVPFPPDQPIEDQCGSCTKCIDICPTGALIQGGQLDSKKCIAFLTQTKGFLPEEYRDKIGNRIYGCDTCQTVCPKNKGMDFHNHPEMEPDPELVKPLLTPLLTISNRDFKEKYGIMSGSWRGKKPLQRNAILALAHFKEASAIPDLIGVMKDDPRPVLRGTAAWALGKIGGDGVGEAIEKAMQREKDEEVLHEMNRGLELLVQKKE

SEQ ID NO: 74870 - protein, 380 aa, unidentified; identical to SEQ ID NO: 74694
  source 1..380: note = Bacillus tropicus
  REGION 1..380: note = tr|A0A5C5A0F8|A0A5C5A0F8_9BACI Epoxyqueuosine reductase OS=Bacillus tropicus OX=2026188 GN=queG PE=3 SV=1

SEQ ID NO: 74871 - protein, 380 aa, Bacillus trypoxylicola
  REGION 1..380: note = tr|A0A161QKC1|A0A161QKC1_9BACI Epoxyqueuosine reductase OS=Bacillus trypoxylicola OX=519424; GN = AZF04_19960 PE=4 SV=1
MTNAQFKEELIAYSKTIGIDKIGFTSADPFLSLKERLLTQKKLGYESGFEEPDIEKRTDPTLTLSSARSIISIAVAYPAKMKNPPKSKKGERRGVFCRASWGMDYHQVLRDRLSKLEEFIKKQIPHAEMVSMVDTGALSDRAVALRAGIGWSAKNCAIITPEFGSYVYLGNLITSVPIEPDTPLTEQCGSCTKCIDACPTGALVQGGQLNAQKCISFLTQTKGLIEDQYRKKIGNRLYGCDTCQQVCPKNKGIDIHHHQELEPDPEIAKPLLIPLLKISNREFKEKFGHISGSWRGKKPIQRNAILALAHFKEEAALDDLKSLMESDPRPVIRGSAAWAIGKIGREDTKEWLMDALKKEQEEEVLGEIKKGLDLLSKISH

SEQ ID NO: 74872 - protein, 382 aa, unidentified
  source 1..382: note = Bacillus urumqiensis
  REGION 1..382: note = tr|A0A2P6MEM5|A0A2P6MEM5_9BACI tRNA epoxyqueuosine(34) reductase QueG OS=Bacillus urumqiensis; OX = 1548213 GN=queG PE=4 SV=1
MTPTDVKQKALKQRLKEEAAAIGIDKIGFASADPFVTMKERLTVQQQKGYASGFEKGSIAERTEPDLLLPEAKTILSIAVAYPSKLKDAPPSRKGSRRGVFCRASWGEDYHHVLRRKLEKLQAFIEAEIPGVRVRSMVDTGELSDRAAAIRSGIGWSGKNCAVITPEFGSYVYLGEMILDYAIEPDQPLESQCGTCNKCVDACPTGALIQGGQLDSSKCIAFLTQTKDMLPEQYRKKLGNRLYGCDTCQTVCPENKGMDHHHHEELEPEPEKVKPLLQSMLFLSNKEFKQTYGKMAGSWRGKKPIQRNAVLALGTLKEEAAVPDLQKVLLEDVRPVLRAAAAWSLGQIQTADAQHALHTASEKETDPMVEKEILEARMIGEE

SEQ ID NO: 74873 - protein, 386 aa, Bacillus vallismortis
  REGION 1..386: note = tr|A0A1W6HG94|A0A1W6HG94_BACVA Epoxyqueuosine reductase OS=Bacillus vallismortis OX=72361 GN=queG PE=3; SV = 1
MNIHKLKEELIEYAKSIGVDKIGFTTADTFDSLRDRLILQESLGYLSGFEEPDIEKRVTPSLLLPKAKSIVAIALAYPSKMKDAPRSTRDGRRGIFCRASWGKDYHDVLREKLDLLENFLQSKHEDIRTKSMVDTGELSDRAVAERAGIGFSAKNCMITTPEYGSYVYLAEMITNLPFEPDVPIEDMCGTCTKCLDACPTGALVNPGQLNAQRCISFLTQTKGFLPDEFRTKIGNRLYGCDTCQTVCPINKGKDFHLHPQMEPDPEIAKPLLKPLLTISNREFKEKFGHVSGSWRGKKPIQRNAILALAHFKDASSLPELTALMHQDPRPVIRGTAAWAIGKIGDPDYAGELEKALQKEQDEEAIREIEKGLELLSVSDKTKTGRS

SEQ ID NO: 74874 - protein, 386 aa, Bacillus vallismortis
  REGION 1..386: note = tr|A0A410WJM1|A0A410WJM1_BACVA Epoxyqueuosine reductase OS=Bacillus vallismortis OX=72361 GN=queG PE=3; SV = 1
MNVYQLKEELIEYAKSIGVDKIGFTTADTFDSLKDRLILQESLGYLSGFEEPDIEKRVTPTLLLPKAKSIVAIALAYPSRMKDAPRSTRTERRGIFCRASWGKDYHDVLREKLDQLEEFLRSKHEDIRTKSMVDTGELSDRAVAERAGIGFSAKNCMITTPEYGSYVYLAEMITNIPFEPDVPIEDMCGSCTKCLDACPTGALVNPGQLNAQRCISFLTQTKGFLPDEFRTKIGNRLYGCDTCQTVCPLNKGKDFHLHPEMEPDPEIAKPLLKPLLTISNREFKEKFGHVSGSWRGKKPIQRNAILALAHFKDESALPELTDLMHKDPRPVIRGTAAWAIGKIGDRAYAEELEKALEKEKDEEAKLEIEKGIGLLNASGMTKQGLS

SEQ ID NO: 74875 - protein, 386 aa, unidentified; identical to SEQ ID NO: 74873
  source 1..386: note = Bacillus velezensis
  REGION 1..386: note = tr|A0A5C2MAR8|A0A5C2MAR8_9BACI tRNA epoxyqueuosine(34) reductase QueG OS=Bacillus velezensis; OX = 492670 GN=queG PE=4 SV=1

SEQ ID NO: 74876 - protein, 386 aa, unidentified
  source 1..386: note = Bacillus velezensis
  REGION 1..386: note = tr|S6FIB7|S6FIB7_9BACI Epoxyqueuosine reductase; OS = Bacillus velezensis UCMB5033 OX=1338518 GN=queG PE=4; SV = 1
MNIHKLKEELIEYAKSIGVDKIGFTTADTFDSLRDRLILQESLGYLSGFEEPDIEKRVTPSLLLPKAKSIVAIALAYPSKMKDAPRSTRDGRRGIFCRASWGKDYHDVLREKLDLLENFLQCKHEDIRTKSMVDTGELSDRAVAERAGIGFSAKNCMITTPEYGSYVYLAEMITNLPFEPDVPIEDMCGTCTKCLDACPTGALVNPGQLNAQRCISFLTQTKGFLPDEFRTKIGNRLYGCDTCQTVCPINKGKDFHLHPQMEPDPEIAKPLLKPLLTISNREFKEKFGHVSGSWRGKKPIQRNAILALAHFKDASSLPELTALMHQDPRPVIRGTAAWAIGKIGDPDYAGELEKALQKEQDEEAIREIEKGLELLSVSDKTKTGRS

SEQ ID NO: 74877 - protein, 379 aa, Bacillus vietnamensis
  REGION 1..379: note = tr|A0A0N8GG86|A0A0N8GG86_9BACI Epoxyqueuosine reductase OS=Bacillus vietnamensis OX=218284 GN=queG PE=3; SV = 1
MDMDQLKQDIIAYSKEIGIDKIGFTTADTFSEMKNRLLRQEMLGYQSGFEEKDIEKRVDPSLIFGQPKSIIAIALAYPSKMKNAPQSKRGERRGIFCRASWGTDYHHVLRDRFSKLEEYIVSRVPQARFKSMVDTGELVDRAVAERAGIGWSGKNCSIITPEFGSYVYLGEMVTNLPFAPDTPMEDQCGTCNKCVDVCPTGALIEGGQLDSRKCIAFLTQTKGFLADEYRVKLGNRLYGCDTCQTVCPENKGMDFHFHEEMEPDPEIAKPLLKPLLTIGNREFKEKYGHVSGSWRGKKPIQRNAIIALAHFKDETAVDDLIHVLEKDVRPVMRGTAAWALGTIGGESTEQALLIQQTVETDEEVLEEIQKGLNLIRQKG

SEQ ID NO: 74878 - protein, 378 aa, Bacillus vietnamensis
  REGION 1..378: note = tr|A0A5D4K7D5|A0A5D4K7D5_9BACI Epoxyqueuosine reductase OS=Bacillus vietnamensis OX=218284 GN=queG PE=3; SV = 1
MDFDGLKQDIIEYSKEIGIDKIGFTTADTFSEMKNRLLRQEMLGYQSGFEEKDIEKRVDPSLIFDGPKSIIAIALAYPSRMKDAPQSKRGERRGIFCRASWGTDYHAVLRDRLAKLEDYIRSKVPQAQFKSMVDTGELVDRAVAERAGIGWSGKNCAIITPEFGSYVYLGEMITNLPFAPDEPIEENCGTCNKCVDVCPTGALIEGGQLNAQRCIAFLTQTKGFLPDEFRTKLGNRLYGCDTCQTVCPENKGKDFHNHWEMEPDPEIAKPLLKPLLTISNRDFKEKYGHVSGSWRGKKPIQRNAIIALAHYKDEAAISELISVMENDVRPVIRGTAAWAAGKIGGKEAEEALQRLLEKEKDEEVISEIYKGLEMLSAT

SEQ ID NO: 74879 - protein, 376 aa, Bacillus vireti
  REGION 1..376: note = tr|W1SGP1|W1SGP1_9BACI Epoxyqueuosine reductase; OS = Bacillus vireti LMG 21834 OX=1131730 GN=queG PE=3 SV=1
MDVKMLKQELIAYSKEIGIDKIGFTSADPFTELKNRLIRQQELGFQSGFEEPDIDKRVTPGLLLEEPRSIISIALAYPSKMTVRVEGKKGERRGIFSRASWGLDYHHILKDRLKKLEEFIITKQPDARLKSMVDTGELSDRAVAERAGIGWSGKNCAIITPEFGSYVYIGEMITSLPFESDTPIEDQCGSCTKCLEACPTGALVQGGQINAQRCISFLTQTKGFIPDEFRDKIGNRVYGCDSCQTACPHNKGKNFHFHDEMEPDPEVAKPLLKPILKLSNREFKNQFGDVSGSWRGKKPIQRNAIMALAHFKDETAVPNLIEVLENEASPVSRGTAAWALGKIGGETALIALKSALSSESDKNVLTEIEKGLKFYS

SEQ ID NO: 74880 - protein, 379 aa, Bacillus wakoensis
  REGION 1..379: note = tr|W4Q1A6|W4Q1A6_9BACI Epoxyqueuosine reductase; OS = Bacillus wakoensis JCM 9140 OX=1236970 GN=queG PE=3 SV=1
MTHAQLKDELIAYSKTIGVDKIGFASADPFLQLKDRLLIQQERGYQSGFEEPDIEKRTEPKKLVEGARTIISIALAYPSKMKNPPKSTRDERRGIFCRASWGKDYHDVLRDRLKKIELFLQEKVPDGKTISMVDTGELSDRAVAERAGIGWSGKNCAIITPEFGSYVYLGELVTTIGFEPDQPITDQCGTCNKCVEACPTGALIQGGQLDSQKCIAFLTQTKTFLPDQYRKKLGNRLYGCDTCQQVCPENKGKDFHLHPEMEPDPELAKPKLIPLLTISNREFKETFGHVSGSWRGKKPIQRNAIIALAHFKDKKALPVLTELLYKDPRPVIRGTAAWAIGEIGSTSEETILNKAKKTEKEAEVIREIEKGLNLLNNKH

SEQ ID NO: 74881 - protein, 388 aa, unidentified
  source 1..388: note = Bacillus weihaiensis
  REGION 1..388: note = tr|A0A1L3MV22|A0A1L3MV22_9BACI Epoxyqueuosine reductase OS=Bacillus weihaiensis OX=1547283 GN=queG PE=3; SV = 1
MNSEQLKQEVIAYSKEIGIDKIGFTSASMFEELKQRLINQQELGYQSGFEEPDIEKRVTPIKLLPKASSIISIALAYPSKLKDAPKSTKEDRRGIFCRASWGQDYHMVLRDRLAKLEAFLKEKLPDVEVKSMVDTGELSDRAVAERAGIGWSGKNCAIITPEFGSYVYLGEMITNVPFPPDQPMEDQCGTCRKCLDVCPTGALVQPGQLDSSKCIAFLTQTKGFLADEYRTKIGNRIYGCDTCQTVCPVNKGKDFHFHEEMEPDPELAKPKLKPLLTMSNREFKETFGHMSGSWRGKKPLQRNAILALAHFKDTTALKDLLKLAKEDPRPVIRGTAAWAIGKIGDQTMKDELKALLLNEKDEQVIEEMNKGLRLLGEEVEPEVGKSTS

SEQ ID NO: 74882 - protein, 380 aa, unidentified
  source 1..380: note = Bacillus wiedmannii
  REGION 1..380: note = tr|A0A2B5NBI0|A0A2B5NBI0_9BACI Epoxyqueuosine reductase OS=Bacillus wiedmannii OX=1890302 GN=queG PE=3; SV = 1
MDFEQLKQDVIAYSKTIGIDKIGFASASPFEELKQRLIQQQQLNYQSGFEESDIEKRTNPQLLLPGAKSIIAIALAYPSKLKNAPLSKRGERRGIFCRASWGQDYHLVLRDRLQKLEAYLIEKLPDIEVKSMVDTGELSDRAVSERAGIGWSGKNCAIITPEFGSYVYLGEIITNVPFPPDQPIEDQCGSCTKCIDVCPTGALIQGGQLDSKKCIAFLTQTKGFLPEEYREKIGNRIYGCDTCQTVCPKNKGMDFHNHPEMEPDPELVKPLLTPLLTISNRDFKEKYGIMSGSWRGKKPLQRNAILALAHFKEAAAIPDLIGVMKDDPRPVLRGTAAWALGKIGGDGVDEAIEKAMQREKDEEVLHEMNRGLELLAQKKE

SEQ ID NO: 74883 - protein, 380 aa, unidentified
  source 1..380: note = Bacillus wiedmannii
  REGION 1..380: note = tr|J8XNM8|J8XNM8_9BACI Epoxyqueuosine reductase; OS = Bacillus wiedmannii OX=1890302 GN=queG PE=3 SV=1
MDFEQLKQDVITYSKTIGIDKIGFASASPFEELKQRLIQQQQLNYQSGFEESDIEKRTNPQLLLPGAKSIIAIALAYPSKLKNAPLSKRGERRGIFCRASWGQDYHLVLRDRLQKLEAYLIEKLPDIEVKSMVDTGELSDRAVSERAGIGWSGKNCAIITPEFGSYVYLGEIITNVPFPPDQPIEDQCGSCTKCIDVCPTGALIQGGQLDSKKCIAFLTQTKGFLPEEYREKIGNRIYGCDTCQTVCPKNKGMDFHNHPEMEPDPELVKPLLTPLLTISNRDFKEKYGIMSGSWRGKKPLQRNAILALAHFKEASAIPDLIGVMKDDPRPVLRGTAAWALGKIGGDGVGEAIEKAMQREKDEEVLHEMNRGLELLAQKKE

SEQ ID NO: 74884 - protein, 376 aa, unidentified
  source 1..376: note = Bacillus wudalianchiensis
  REGION 1..376: note = tr|A0A1B9AU68|A0A1B9AU68_9BACI Epoxyqueuosine reductase OS=Bacillus wudalianchiensis OX=1743143 GN=queG; PE = 3 SV=1
MNYRLLKQEIIEYSREIGIDKIGFASAAPFTELKDRLLRQQELGYQSGFEEKDINKRVDPSLIFDEPRSIIAIALAYPSKMKETVKGRKGERRGIFCRASWGEDYHTILRDRLGKLEAFIAAKVPDARFRSMVDTGELSDRAVAERAGIGWSGKNSSIITPEFGSYVYLGEMITNLPFEPDHPIENRCGTCTKCLDACPTGALVQGGQLNSKRCIAFLTQTKDFMPVEFREKLGNRLYGCDTCQTVCPENKGMNFHLHEEMEPEPETVKPLLEPLLQMGNKEFKQRFGYMSGSWRGKKPIQRNAIIALAHFKEEEALPSLIDVLHNDVRPVLRGTAAWAIAKIGGEKARQALVLAISEEKDMEVKEEIERGISSMK

SEQ ID NO: 74885 - protein, 383 aa, unidentified
  source 1..383: note = Bacillus xiamenensis
  REGION 1..383: note = tr|K2MJ07|K2MJ07_9BACI 4Fe-4S ferredoxin-type domain-containing protein OS=Bacillus xiamenensis; OX = 1178537 GN=BA1_10901 PE=4 SV=1
MIHVGQLKEELIQYANEIGVDKIRFASADTFDSLKDRLILHESLGYLSGFEEPDIEKRTNPALLLPKAKSIVAIALAYPSKMKDAPRSTKDARRGIFCRASWGTDYHVVLKKKLDMLEEFLRSKHEDIRTKSMVDTGELSDRAVAERAGIGFSAKNCMIITPEFGSYVYLAEMITNVPFEPDEKIEEQCGTCNKCVDSCPTGALVNPGQLNSQRCISFLTQTKGFLPDEFRSKIGNRLYGCDTCQIVCPINKGKDFHLHPEMEPDPEIAKPLLKPLLTISNREFKEKYGHVSGSWRGKKPIQRNAILALAHFKDTSALPDLVELMHKDPRPVIRGTAAWAIGKIGDEQQLSELEKALERESDEEAKQEIIKGIELLQTPLNTK

SEQ ID NO: 74886 - protein, 377 aa, unidentified
  source 1..377: note = Bacillus zeae
  REGION 1..377: note = tr|A0A398AWP9|A0A398AWP9_9BACI tRNA epoxyqueuosine(34) reductase QueG OS=Bacillus zeae; OX = 1917180 GN=queG PE=4 SV=1
MDIRKLKNEIIDYSKSIGIDKIGFASSSPFTEMKNKLLIQQELGYQSGFEEKDIEKRVNPALIMEAPQSIIAIALAYPSKMGEKVESKKGQRRGIFCRASWGLDYHVLVKEKLKQLEAFISEKLPEARFQSMVDTGELVDRAVAERAGIGWSGKNCSIITPEFGSYVYLGEMVTNIPFEADQPLEDRCGTCNKCVEACPTGALVQGGQLNSQSCIAFLTQTKGFLADEYRERLGNRLYGCDSCQTACPDNKGKDFHFHTEMEPDPETVKPLLKPLLHMSNRDFKERFGPLSGSWRGKKPIQRNAIIALAHFKDETAVPDLITVMREDPRPVLRGTAAWALGKIGGEEAKAALLKVAASEKDEEVLEEIDKGLQFFPI

SEQ ID NO: 74887 - protein, 382 aa, unidentified
  source 1..382: note = Bacillus zhangzhouensis
  REGION 1..382: note = tr|A0A081LB08|A0A081LB08_9BACI Epoxyqueuosine reductase OS=Bacillus zhangzhouensis OX=1178540; GN = BA70_02585 PE=4 SV=1
MHVGELKEELIQYAKEIGVDKIRFASADTFDSLKDRLILHESLGYLSGFEEPDIEKRTNPSLLLPKAKSIVAIALAYPSKMKDAPRSTKDARRGIFCRASWGTDYHVVLNKKLDMLEEFLRSKHVDIRTKSMVDTGELSDRAVAERAGIGFSAKNCMIITPEFGSYVYLAEMITNVPFEPDEKIEDQCGTCNKCVDSCPTGALVNPGQLNSQRCISFLTQTKGFLPDEFRSKIGNRLYGCDTCQIVCPINKGKDFHLHPEMEPDPEIAKPLLKPLLTISNREFKEKYGHVSGSWRGKKPIQRNAILALAHFKDTSALPVLIELMHKDPRPVIRGTAAWAIGKIGDKQQLSELEKALERESDEEAKQEIIKGIELLQTPLNTK

SEQ ID NO: 74888 - protein, 379 aa, unidentified
  source 1..379: note = Unknown
  REGION 1..379: note = tr|A0A0J8YFP6|A0A0J8YFP6_9GAMM Epoxyqueuosine reductase OS=bacteria symbiont BFo1 of Frankliniella occidentalis OX=1628855 GN=queG PE=3 SV=1
MSHPLDFNQLALDIKQWGLALGFQQVGICDTDLTLEEPRLQAWLDKQYHGEMDWMARHGMMRARPHELLPGTLRVISVRMNYLPAKAAFASTLKNPRLGYVSRYALGRDYHKVLRNRLKKLGDMIREHCEQAEFRPFVDSAPLLERPLAAKAGLGWTGKHSLILNREAGSWFFLGELLINLPLPVDQPVEENCGRCVACITTCPTGAIVEPYTVDARRCISYLTIELEGAIPEEFRPLIGNRIYGCDDCQLICPWNRYGQLTDEDDFSPRAVLHAPPLTDLFAWDEAKFLRVTEGSAIRRIGHLRWLRNIAVALGNAPWDQAHLSALQARLGENSMLDEHIHWAIACQLARRDENTIEVQSSQQKRLVRVVEKGLPRDA

SEQ ID NO: 74889 - protein, 321 aa, unidentified
  source 1..321: note = Bacteriodetes bacterium
  REGION 1..321: note = tr|A0A522FVJ2|A0A522FVJ2_9BACT tRNA epoxyqueuosine(34) reductase QueG OS=Bacteriodetes bacterium OX=2507565 GN=queG PE=4 SV=1
MIIFNIIFGPFVKNLPKSLITSFSRDIGFDKIGFASVEPFVKEKEVFRKWIAEGRHATMKYLERNIDERFDPLLILEGCKTAVVTAINYYNPDNELFRELKTGKISRYAWGKDYHKIIKLKLIQLADKIKELFPESTNLSFVDSGSLPEKLLAQRAGVGWQGKNSLILTREFGSWIFLGVILTTVEFEPDEPHKDLCGDCTKCLDRCPTSAIIKPGLVDASLCISYWTIETKPNVEIPLDIVNNSQSRIYGCDICQEVCPWNRFAKPTKDDGFQVKDNHTELSKEFIENLTNEEFKTIFKDRPVRRIKLKGLKRNVCMIRE

SEQ ID NO: 74890 - protein, 174 aa, unidentified
  source 1..174: note = Bacteriodetes bacterium
  REGION 1..174: note = tr|A0A521W374|A0A521W374_9BACT tRNA epoxyqueuosine(34) reductase QueG (Fragment); OS = Bacteriodetes bacterium OX=2507565 GN=queG PE=4 SV=1
VWAQHAGIGWEGKHTNVITQEFGSWVFLGEIILSLELEFDFPATDHCGDCTLCIEACPTDAIVEEYVVDSTKCISYVTIEHRGEVAGELGEKFDNWIYGCDICQDVCPWNHKFSQPTDMNEFEPREFNKAPLLSEIVEMTQEEFSKKFKASPIKRTKVSGLRRNAEVILKNPKL

SEQ ID NO: 74891 - protein, 363 aa, unidentified
  source 1..363: note = Bacterioplanes sanyensis
  REGION 1..363: note = tr|A0A222FPE5|A0A222FPE5_9GAMM Epoxyqueuosine reductase OS=Bacterioplanes sanyensis OX=1249553 GN=queG; PE = 3 SV=1
MPDYIRLDSPADDSDQALASLRQQLDMWGKELGFQQIGVTDTNLAQHETYLQQWLEQGYHGEMGFMADHGSMRSHPEQLQPGTIRVISARMDYLAPDIRITEQLQDRSLAYVSRYALGRDYHKLIRKRLTQLGKQLQSAAGEMGFRAFVDSAPVLERALANKAGLGWVGKNTMLINRRAGSYFFLGEILTDLPLPIDPAYDKEHCGRCQACLDICPTQAFVGPYVLDARRCISYLTIELDGPIPEELRPGMGNRIFGCDDCQIGCPWNRFSNTSPERDFTPRHQLDKATLLELFRWDEDTFLSNTEGMPIRRTGYRNWLRNIAVALGNGPYSLEVEQALVTRRASVDALVQEHIDWALTQLKS

SEQ ID NO: 74892 - protein, 330 aa, Bacteriovorax sp.
  REGION 1..330: note = tr|T0CCD4|T0CCD4_9PROT Epoxyqueuosine reductase; OS = Bacteriovorax sp. BAL6_X OX=1201290 GN=queG PE=4 SV=1
MIKKDDIQNILSTQGLEVWGVVAESKPKSLERFKTWIKDGLHGALSYLADDRAIKREDLKNYYPDIKSTLVIAFDYSHIARSAKKFYDSGESNGLKIANYVVGFQGRDYHYEVRDKLQVIGEELQKLDPELEFKFSLDTQPILERDFAYQSGLGWYGKNSMLINRHIGSYFIIGSLLLNKEVEAPNDKFETDHCGKCTRCADACPTDAIDLEKRTIIADKCISTFTIEHFKEIEAPVGFDKAHGEIFGCDICQDVCPWNMRLERKLETDSEAFKESGKQFIDFFLTRPVSVIIEELEAMSNREYRRQFKGTPLERTGRVGMLKNLKYYLD

SEQ ID NO: 74893 - protein, 334 aa, Bacteriovorax sp.
  REGION 1..334: note = tr|T0RC22|T0RC22_9PROT Epoxyqueuosine reductase; OS = Bacteriovorax sp. Seq25_V OX=1201288 GN=queG PE=4 SV=1
MKELVSILENSNARKWGLVTDPEALSFKNFHEWVERGDHGVLSYLEGERKDLRENISNYFPEFKSALVFAFDYSVSAKMTKDFYQTGESNGYKIANYVLGFEGEDYHYYLRRSLEAIANKIKEIFPEVNIMHSLDTQPVLERDLAQKAGLGWFGKNSMMIDREIGSYFIIGSLFLDVDLSTHGLQVPLIDTDHCGNCRKCIEACPTDAINAETRTITANKCISTFTIEIFKEAQAPEGMEKGNGEIFGCDICQDVCPWNKKALGKLNYTSDDFQSFKSKNSYAFENFLTPSLSSMIQGLESVSNREYRRQLKGTPLERTGRVGMLKNLKFYKKN

SEQ ID NO: 74894 - protein, 350 aa, Bacteriovorax stolpii
  REGION 1..350: note = tr|A0A2K9NQT5|A0A2K9NQT5_9PROT tRNA epoxyqueuosine(34) reductase QueG OS=Bacteriovorax stolpii; OX = 960 GN=queG PE=4 SV=1
MHDGSRLCGRLSYRCYRDHPSILRMDWLNSYGVVDFGYTEDPVPTTLEYYNQWVAANLHAPLHYLEGERQEKRQDLKNHWQDFQSAVVFLFSYHPTHSELQNLYQKNPNWNGLKLASYTLGFEGWDYHNLLREKLESIGECLKKDHGVEFRLTLDTHPVLERDLAKRAGLGWFGKNSMLINRHQGSFFIIGSLLLDKKLDLKTKAYETDHCGQCTRCIDACPTEAIDPVSRTIIAKDCISTFTIEQFKLDTIPSEKMTLKEGTLFGCDICQDVCPWNKRVDRQNSVSLSGWSDQQKKILDFFLLRPVEKVHQNLEEMSGKEFERVMEKTSFARSGRRGLLKNIRFYLKKD

SEQ ID NO: 74895 - protein, 358 aa, unidentified
  source 1..358: note = Unknown
  REGION 1..358: note = tr|A0A539D1F0|A0A539D1F0_9BACT 4Fe-4S ferredoxin-type domain-containing protein OS=bacterium; OX = 1869227 GN=FD125_2515 PE=4 SV=1
MPADPRDSIRDAAAALGFDICRFASASEPWNAGERLAHFVEAGRHGDMGWMETTLERRAHPTAMWDGARTAVVLGLNYGPEHDPLPEMEDRSAGYISVYARGDDYHEVIKGRLKTLAGQIAARTGQDVKVFVDTAPLMEKPLAQRAGLGWQGKHTNLLSRNHGNWLFLGVILSAAEFEPDASEGEHCGTCTACLDVCPTNAFPAPFQLDARRCLSYLTIEFAGPWPEEFRTATGSRIYGCDDCLAVCPWNKFAAASQEARVQAREALVSPRLADLAGLDDAAFRALFSKSPVKRIGRKRFIRNVLYAIGNSGDASLIPAAERLLDDPDAVVRDAAEWAVGRLREEQGAVLPPPPGEGG

SEQ ID NO: 74896 - protein, 387 aa, unidentified
  source 1..387: note = Unknown
  REGION 1..387: note = tr|A0A522QBN2|A0A522QBN2_9BACT tRNA epoxyqueuosine(34) reductase QueG OS=bacterium OX=1869227; GN = queG PE=4 SV=1
MLRWAKGAGVDNAGLAELRRRLDDEAACCGIDRLRIAAARPDAVARERLAAAFERGDLATWHFDGERARMAADPEAVLPGARAVVCVAVGYDTEPPAARSPLTGRISRYAWSEDYHRTLRRALERLEALLRPFGRARAVCDTVPFAERAFAERSGLGWVGRHTGVIVPGLGALAFLGEIVTDIPLPPDEPIRKSCGSCRRCVDVCPTGALRGDFTIDATRCIGDLNQRLDAIPRAMRPLMGDWVWGCDLCTVACPPSHVAPKIGRPAFSPAPGISPYPALAAILRLRSGEFKRTYRASAMGWRGGAILRRNAAVCLGNTLDRSVVPDLEGAFAEDPHALVRGHAAWALGRIGSPRALRALAARLPLERDAGVRDEIDAALAGNHLRS

SEQ ID NO: 74897 - protein, 348 aa, unidentified
  source 1..348: note = Blackallbacteria sp.
  REGION 1..348: note = tr|A0A2M7G261|A0A2M7G261_9BACT tRNA epoxyqueuosine(34) reductase QueG OS=bacterium (Candidatus Blackallbacteria) CG17_big_fil_post_rev_8_21_14_2_50_48_46; OX = 2014261GN=queG PE=4 SV=1
MQQRRIEPFLKDPIQVEAKAIGFDLVGVCSPEPVPHLDFYAEWLASGYAGEMHYLERHAPLKADLKSLLPEVRSVVVVACNYYSEAEPNSDFQVARYARGDDYHGLMKAMLERFAEALRTHYPALEARAFVDSGPLLERELAVRAGLGWFGKNTCLIAPGQGSWFLLGALLTNLPLPFSAPFETLHCGSCTRCLDICPTEALLAPHTLDARRCIAYLTIETREEIPLELREGIGGHVFGCDLCQEVCPWNQRFAQPTPHQAFSARPWTSEKSLAELLLLSPREFELEIAPRSPIKRPKYRGFIRNLAVVAGNSGQTALIPVLKTGLERHGQDPMLVSHFNWALERLQN

SEQ ID NO: 74898 - protein, 310 aa, unidentified
  source 1..310: note = Stahlbacteria sp.
  REGION 1..310: note = tr|A0A523Z8P1|A0A523Z8P1_9BACT tRNA epoxyqueuosine(34) reductase QueG OS=bacterium (Candidatus Stahlbacteria) OX=2528828 GN=queG PE=4 SV=1
MNIKSMIKEKAKDIGFDLVGVTDLSPSKYKKEYENWLLKGMHADMDYLVKTKMVRLSPLLRYRWAKSILMVGMNYYPGQPLNSKKDKILISRYAMGRDYHVVLNEKLFELSNFIISTTGVRQTKYYTDTGPLLEKELAQRAGLGWIGKNTILITEEFGSWIFLGEILLDIEVEPDEPGKDRCEDCDLCSKYCPSQALIPSYILNNNLCTAFHTVMNKGKLPDWFPSSGNPYIFGCDICQEVCPFNRDVKRTKISDFLPREKLVNPDIQWLSGLKEEEFKHNFKNTPVEWSGFDIFMRNVNAFLKKKHEYI

SEQ ID NO: 74899 - protein, 384 aa, unidentified
  source 1..384: note = Unknown
  REGION 1..384: note = tr|A0A3A9G0I2|A0A3A9G0I2_9BACT Epoxyqueuosine reductase OS=bacterium 1XD42-44 OX=2320106 GN=queG PE=3; SV = 1
MHTDSLKQEIIAYSKQIGIDKIGFASADVFTELKERLRKQQELDYQSGFEKGSIEERTEPTRLLPEAKSIISIALAYPTRMKGAPRSTKEERRGLFARASWGVDYHVVMRERLEKLAAFIQERVPDGKNKVMVDTGELSDRAVAERAGIGFSGKNTSIITPEFGSFVYLGELITNVPFTPDEPVDDGCGSCTKCIDACPTGAIVQGGQLNAKRCIAFLTQTKDFLPEEFRSKIGNRVYGCDTCQMVCPKNLKVDFHIHPEFEPEHEVAKPKLIPMLKLSNREFKQTFGHISGSWRGKKPIQRNSLIALGHYKDTTAVADMIEVMRRDPRPVIRGTAAWSLGKIGTEEAFQAIKEAMLEEEDEQVLVEMEKGLAFAQLKDTAKKR

SEQ ID NO: 74900 - protein, 272 aa, unidentified
  source 1..272: note = Unknown
  REGION 1..272: note = tr|A0A3A9G3F7|A0A3A9G3F7_9BACT Epoxyqueuosine reductase OS=bacterium 1XD42-8 OX=2320102 GN=D7X25_00020; PE = 4 SV=1
MEGIGQRIEKITDTWGICPFEGIPLLPVRSRKRLPEGAKSIIVLLFGYYTEEYPQRNIARYAVADDYHTILLPKLQGLADELAEAFPGEAFVPFIDASPIAEVEAACRAGLGQPGKNGLLINPCYGSYCFIGEVVTTALLDRGTLKGPALCTGCDACIRACPTGALSEKGFCLEKCRSYITQKKGELADWESQEIRLGGKVWGCDCCVDACPRNRQARQSRVPEFYENREPVLTLEVVEKLYPVKAYGWRGQKVLYRNLSLLGNNKKNENDK

SEQ ID NO: 74901 - protein, 314 aa, unidentified
  source 1..314: note = Unknown
  REGION 1..314: note = tr|A0A0M9DUQ2|A0A0M9DUQ2_9BACT Epoxyqueuosine reductase OS=bacterium 336/3 OX=1664068 GN=queG PE=3 SV=1
MNHEKLRYTLLIKQKAKELGFDFCGISKADFLEDQAPRLEQWLKQNMHGEMAYMNNHFDKRLDPRLLVDDAKSVISVLLNYFPKQDLAQENDFKISKYAYGTDYHFVLKDKLKSLLEFMHTEIGEIGGRAFVDSAPVMDKVWAEKSGLGWVGKHSNLLNRNMGSFFFIGELIVDLDLEYDAPTKDYCGTCTRCIDACPTDAIVNPYVVDGSKCISYFTIELKDQIPQEMKGKFENWIFGCDICQDVCPWNRFASPHQTQAFEPHEDLEKMSKKEWIDITEETFNKVFKNSAVKRTKLKGLQRNINFLQASDDNE

SEQ ID NO: 74902 - protein, 375 aa, unidentified
  source 1..375: note = Unknown
  REGION 1..375: note = tr|A0A1H9HLJ6|A0A1H9HLJ6_9BACT Epoxyqueuosine reductase OS=bacterium A52C2 OX=1855383; GN = SAMN05216548_10679 PE=4 SV=1
MRRLIADLAAEEGFDALGIARPDAIPLAPDRLRAALADGHHGSMGWMDETADRRGSPSVLWPEVRSVIMLGMNYGPEHDPRENLLRPDVGNISVYARNRDYHDLIKGALKRIATRFAARAGADVKVFVDTAPVMEKPLAEAAGLGWQGKHTNLVSRELGSWLFLGSIFTTADLPPDDAGDTRCGSCSACLSACPTDAFPAPYRLDARRCISYLTIEHAGPIDPALRPLIGNRIYGCDDCLAACPWNKFAEASRQIKLMAREDLLAPSLRELSRLDDATFRTFFSGSPVKRIGRDRFVRNVLIAIGNSGETGLADEAVRLLEDAAPAVRAMAVWALRRLDPARAAFLRERHLTDEAEPEVRAEWLRGDDEAEQEAA

SEQ ID NO: 74903 - protein, 249 aa, unidentified
  source 1..249: note = Unknown
  REGION 1..249: note = tr|A0A1V5UJP8|A0A1V5UJP8_9BACT Epoxyqueuosine reductase OS=bacterium ADurb.Bin243 OX=1866936 GN=queG; PE = 4 SV=1
MRQKFIKGLKNHTMISNLQLSADGANNFKLLDRYCKDAGISIFKACPVKAVAGSFHPSLNENPYTARMTAAISMAFHLSDAVLEGIFDRPTPHYAMHYNRINSFLDDTALRVTAIIQNSGYNAMPVPASQIIDKSSQRGYLNHKIVAAAAGAGFIGRNNLLVTPQFGSRVRLVSVLTDAPLEFTEPLEDGCGDCFACLASCPAQAIKESPENFELAKCIEQISRFQRLMFVAKGICGVCVKACAGRKNK

SEQ ID NO: 74904 - protein, 265 aa, unidentified
  source 1..265: note = Unknown
  REGION 1..265: note = tr|A0A1V5T5V4|A0A1V5T5V4_9BACT Epoxyqueuosine reductase OS=bacterium ADurb.Bin270 OX=1866926 GN=queG; PE = 4 SV=1
MREIIKNRALELGFCAVGVTSADPVEEISGLEGAISSGRIAGMSWLARNPAMRCDPKSLLKSAKSVICLAYPYGENGVVAADDEQGGVPSGLREDESGNPFQKVARFARGVEYHAFIRKKLEEITAEIEKRNPGADFKICVDTSPILEKALAARAGIGWIGKNTLLINERFGSWILLGEIMTDIEIPTDHPVADLCGECDLCIRSCPTFALLEPRRLDARNCLSYLSIEREVRVGGWFSELLKGRYGCDLCQELCPYNSRKSTGC

SEQ ID NO: 74905 - protein, 340 aa, unidentified
  source 1..340: note = Unknown
  REGION 1..340: note = tr|A0A1V5PIA4|A0A1V5PIA4_9BACT Epoxyqueuosine reductase OS=bacterium ADurb.Bin363 OX=1866927 GN=queG; PE = 4 SV=1
MILADIIKKEAYNSGIHLTGITTADDLSEETLRIQYCLKEDLIPVRTGLNEKKIKKFCSPSIFMPGAKSIIMTALCYYEEEKEILYDEPVGEIAPYTWRNNYKFLRKKLQKLVKFIKTYSSGNFKVFVNGPLAEKPLAVRAGIGFYGKNGIIYTHNYGSKVVLGGIITDIELPPDKSEKTDKCNTCNLCMRHCPTGAIIKPYIINRKKCIQYLSQTIHEVIPENYRKLWENRLYGCSTCQDICPQNKKVIPLRDLSPYGITGSTIPVIPLLKLTEKEFREKYRDNQISASWVDFNAIRRNALLALANSGDNRALPVLRKALNDTCLQVREIVEWGLRHKR

SEQ ID NO: 74906 - protein, 447 aa, unidentified
  source 1..447: note = Unknown
  REGION 1..447: note = tr|A0A1V5MF08|A0A1V5MF08_9BACT Epoxyqueuosine reductase OS=bacterium ADurb.Bin425 OX=1866929 GN=queG_1; PE = 4 SV=1
MKEVGGSLRSDTEMQPTELKEIVSEDGTLDYDALKQFALNLGADDVGFVEIDRPSIADEKYELEKIFPAAKSFISIVVRMNQEPIRSSARSIANLEFHHQGEEVNSITRKLVTKLERLGIRALNPSMGFPMEMQRFPGRVWLISHKPIAEAAGLGKKGIHRNVIHPRFGNFILLGTVAIDARISRYDKPIDYNPCFECKLCVSACPVGAIAPTGEFDFSACYTHNYREFMGGLTDWVGTIADSRDRKEYQAKVAPNETASMWQSLSFGPNYKAAYCMSVCPAGDDVIGQFLSGRKEFLDTVLKPLQKKEEPIYVVPDTDAEEYVKKRFPHKTIRFVNNSLIPNTIESFISGLRSVFQRKRASDVDINLHFTFTGKEPAIAGVQISKGKLKVSRTHEGKADLKVTADSSFWIDFLNHRCSIPLGLITGKLRLAGNPVHLLKFQKCFPV

SEQ ID NO: 74907 - protein, 426 aa, unidentified
  source 1..426: note = Unknown
  REGION 1..426: note = tr|A0A1V5M216|A0A1V5M216_9BACT Epoxyqueuosine reductase OS=bacterium ADurb.Bin425 OX=1866929 GN=queG_2; PE = 4 SV=1
MNIDPVSLKERIIETGLSLGFNRLVFASIEPLSAAKQATYKAFLANGYAASMDYLAREPERRFLPQRTFEQARTVLTVSVGYYNSPPPPPANDKTVYGRVAGYAVGRDYHVVMRAKLKELHAFIEKECGRKVAFRTVADDAAYFEQAFAERHGLGFVGKNTLVILPQLGGSYNLIGELFLDLELPADEPYVGTCGACFRCGVTCPTGAIKELSLAGSALPELEREGDTAYGVNMTVDAKTYLVDARACLSFLTIENKGGIELSLRDKLGDWVFGCDICQEVCPYNSRLQKEKKQAIWPEFRPEAGVGHYLDLFALFAIKDQDEFHQRFLSSPVRRPKLRGMRRNALVVIGNQLALGAASLAFVINTLRQYLLAETDEMLIEHGLWMLSRASKDSARASCGLDLESVKNSLYRRLSPEGKRLAERYL

SEQ ID NO: 74908 - protein, 335 aa, unidentified
  source 1..335: note = Unknown
  REGION 1..335: note = tr|A0A1V5LWC0|A0A1V5LWC0_9BACT Epoxyqueuosine reductase OS=bacterium ADurb.Bin429 OX=1866930 GN=queG; PE = 4 SV=1
MLTAEVIKQHAKAMGADLVGIASIDRFEGAPIQQDPRQIMPEAKSVIAVAFRVNRGSLRGIEEGTFFSNYSAMGYGGITYLFMPLVVMNMARMIEDEGYEAIPYGHQSDWRAIDQEGNLQGISRPVVPGRAAPDVAVHLRIAAYLAGLGEIGYSKVFLTPQFGPRQRVGIIITEAELEPDPIYDGPQLCNRCMACVRECPGQAISATETVKVTLAGHEVEWGALDCTACDIAFRGGKVLTDPDHEPVYVDGGMYGQQIAASEITPFHKKPRNLYNTGQAVCGGRGCMRACMISLEARDVLENRFHEKFRRRKPWRVDWTTEPETEQPDGYISDTD

SEQ ID NO: 74909 - protein, 314 aa, unidentified
  source 1..314: note = Unknown
  REGION 1..314: note = tr|A0A1V5KNK9|A0A1V5KNK9_9BACT Epoxyqueuosine reductase OS=bacterium ADurb.Bin478 OX=1866932 GN=queG; PE = 3 SV=1
MPLSDELKAFIVQRAHTLGFAQVGVARAEPLPAQGLLAWLHAGLHGGITYMDRDPDLRLDPRMLLPGAASVIVLSSNYYFPVEDKKDSARGIIARYARGDDYHTVLSAKLRQLVQEIRKHAPAAQTRIAVDSAPVLEKEWAHRSGIGWRGKHSCIISPQYGSWIFLSEIILDLELPADQPMEERCGSCRLCLDACPTGALIRPYVVDSRKCISAITQLKPDQPIPIEHQAAMGNHLFGCDLCQAICPWNQGQLPPTTEAGFSPRPYFTNPLLTDLAGWDEAQFLQRTSRSPIKKVKYAGFMRNVQVALRNGKQL

SEQ ID NO: 74910 - protein, 318 aa, unidentified
  source 1..318: note = Unknown
  REGION 1..318: note = tr|A0A2H6EGV3|A0A2H6EGV3_9BACT Epoxyqueuosine reductase OS=bacterium BMS3Abin03 OX=2005711 GN=queG PE=3; SV = 1
MKLTNDIVVEKAKKIGFDLIGFVRADELKEESHHLKEWLAKGFQAGMEYMERNIDKRKDVSLILPEAKSIISLAVNYYTGKKHSNQKGKGKLSRYAWGKDYHLIIWEMLKALESELKDADPSFKSKSYVDTGPVMDKAWAVKSGIGWMGKHSNIINRNYGSWFFIASIITNYEFDYSNTIPGFCGSCTACIDACPTKAIVQPYVVDSNKCISYLTIENKGGISSEYSDRFDNWLFGCDVCQDVCPWNQKFSQSSRITEFQPVNEQTELDLSEILAMENPDFKNRFAESPVLRTKLKGLKRNAKYLLKGRYDMRNIIKM

SEQ ID NO: 74911 - protein, 315 aa, unidentified
  source 1..315: note = Unknown
  REGION 1..315: note = tr|A0A2H6EKY0|A0A2H6EKY0_9BACT Epoxyqueuosine reductase OS=bacterium BMS3Abin04 OX=2005712 GN=queG PE=3; SV = 1
MLINNYTVIELAKELGFDLIGFSKAAELDYEIETLEDWLSKGYNAGMKYMERNIDKRKDVSKILPGAQSVISLAINYFNNEEFFCSPQHGKVSRYAWGTDYHYIIWDKLKILESKLKKIDPNFVSKFYVDTGPVMDKVWAVKSGLGWMGKHSNLISRVMGSWLFIADIITNYGFEYNEPASDLCGTCTACIEACPTDAIIDNYLIDSNRCISYLTIENKGDIPDEFKGKFENWIFGCDICQDVCPWNKKFSRQTKEKEFLEIKNKELPLKEILEMNREEFKTKFKDSPITRAKLNGLQRNAKFLIDSSSGEISGE

SEQ ID NO: 74912 - protein, 355 aa, unidentified
  source 1..355: note = Unknown
  REGION 1..355: note = tr|A0A2H6ETA3|A0A2H6ETA3_9BACT Epoxyqueuosine reductase OS=bacterium BMS3Abin05 OX=2005713 GN=queG_1; PE = 3 SV=1
MNASSQKNWPVITENIKSKLRTLGCDLVGIAPVADFPELERFEKWLQLGFEGEMDYLHRHLDKSLHPEAILPSVQSVLVCGMNYDTTRPRSIDQRDDAHGWISRYAWGDDYHGILEAVLVRAVEWLQVQFPDMEYRLYADTGPTRDRIWAKYAGLGWFGKNSNLVNLKSGSFFFIGEIFLSLPLKPDKPAAERCGSCTRCIESCPTGAIVEPGVIDSRKCISYLTIELRGFIPEKFRGPIGRQLFGCDICQDVCPWNRKNSKTQKRAFEPRAPFFNPGLTEFYRTVRDEFTNRFRKSAIKRTKQKGLLRNISVAMGNTGNPAFLPELEEMAVHQDPAVKAHAEWAIQKIETEEIR

SEQ ID NO: 74913 - protein, 230 aa, unidentified
  source 1..230: note = Unknown
  REGION 1..230: note = tr|A0A2H6EY54|A0A2H6EY54_9BACT Epoxyqueuosine reductase OS=bacterium BMS3Abin05 OX=2005713 GN=queG_2; PE = 4 SV=1
MSETAQNNFEEIKHLAEQGGAVKVGIAGIEPKLKRYFDLTPGEFQSWPYAISVAVRLSRAVLESLDDRPTHLYKWHYKQANAVLDGIAFAITNKIQEMGYRALPIAASQILDWKKQNAHVSHRHTAVAAGLGWFGRNNLLVTKEFGAQVRLVTVLTNLPLPAAREQAAFGCGECRRCVDECPVDVLGESSGDFDFDRCFSLLDYFSRKKGIGVMICGLCQKVCPGSTKLW

SEQ ID NO: 74914 - protein, 218 aa, unidentified
  source 1..218: note = Unknown
  REGION 1..218: note = tr|A0A2H6F6A0|A0A2H6F6A0_9BACT Epoxyqueuosine reductase OS=bacterium BMS3Abin06 OX=2005714 GN=queG PE=4; SV = 1
MYDELKTIALSAGATAFGVGHVEDLRTHYDALPLDQTEGMAHGISIGIRVSSSVLKSCIIGPTRLYLHHYRMINWVLDQTTLRISLAIQDKGYNALPIPASQIVDWEKQTAHLSHKMIALRAGIGWIGRNNMLVHSDCGSKIRIATVLTDMPLKTDSPIERDCGECKKCIEICPVSAIKESYKDWNKVACLEKLKYFAKAHNVGQYICGLCVKVCNPS

SEQ ID NO: 74915 - protein, 220 aa, unidentified
  source 1..220: note = Unknown
  REGION 1..220: note = tr|A0A2H6FBI6|A0A2H6FBI6_9BACT Epoxyqueuosine reductase OS=bacterium BMS3Abin07 OX=2005715 GN=queG PE=4; SV = 1
MREGIREMLRKAGATVIGFASVADGLSEDIRHLSFAISIGVNGNLRESNLDHLKKLQKKTALFLRGKGYRFFCIPPDSDRINDSFASKLYPLFTHKIAATCAGIGWIGRNGLLISPTYGPRLSLATVLTDARFKTDLPIENCLCGDCMLCVDHCPSKAITGETWSRNAPYPDMIKADKCRSHKEKSRPVNGKPNCGLCINICPYGRGYIEIKSEVMEETQ

SEQ ID NO: 74916 - protein, 227 aa, unidentified
  source 1..227: note = Unknown
  REGION 1..227: note = tr|A0A2H6FG89|A0A2H6FG89_9BACT Epoxyqueuosine reductase OS=bacterium BMS3Abin08 OX=2005716 GN=queG PE=4; SV = 1
MNPDSLKDLLLSSGATLTGIGDVTEALSGDIRHLTRGIAIAVRKDLNRDTVEFLLGLQGLIEAWLRKRNYRFLSIPPDSDRRNGKFISRLYEFFSHKTAATCAGLGWIGKNGLIINSRYGPKLSWATVLTDTPFMTDRPITRSLCGNCNLCVRHCPSSALTGTSWSIGEPFSEIVIYSRCSSLKKKRTVFNNKPNCGLCINICPYARKVYKNNKRERIYLKESRSCQ

SEQ ID NO: 74917 - protein, 217 aa, unidentified
  source 1..217: note = Unknown
  REGION 1..217: note = tr|A0A2H6FSD4|A0A2H6FSD4_9BACT Epoxyqueuosine reductase OS=bacterium BMS3Abin10 OX=2005718 GN=queG PE=4; SV = 1
MNNELRDIAISSGMSAFGVGSIDDLRPHFEALPTEQTEGLSYGISIGVRVSDAVLKGIIVGPTRHYLHHYKMLNLLLDQTSLEIALAIQAKGYNALPIPASQIVDWKKQTAHLSHKMIALRAGMGWIGRNNLLVHPQFGSRIRIATVLTDMPLKTDTVLQRDCAGCSECLKACPVSAIGKSHEQWDKTACLEKLKYFAKVHNVGQYICGLCVKVCKP

SEQ ID NO: 74918 - protein, 363 aa, unidentified
  source 1..363: note = Unknown
  REGION 1..363: note = tr|A0A2H6G300|A0A2H6G300_9BACT Epoxyqueuosine reductase OS=bacterium BMS3Abin11 OX=2005719 GN=queG PE=3; SV = 1
MKPKTHPADELLPVELADLAQQIRLWGQELGFQQVGITDISLQKAENYLQNWLSMNHHGEMEYMARHGLKRSRPGELIHGTTRVISVRMDYLPHVVRTAVGQLKKIDRAYISRYALGRDYHKLIRSRLQKLVRRIQAGLEGFNYRVFTDSAPVLEKALAEKAGIGWIGKHSNLINRKAGSWFFLGEIYTDLPLPIDTVVEEHCGSCQTCIDICPTQAIIAPYQVDARLCISYLTIEYRGVIKEKLRPLLGNRIYGCDDCQLCCPWNRFGKLSKEADFQPRHGLDDTALLDLFSWNESEFMKNLEGSPIRRIGYRPWQRNIAIALGNAAFDPVIVKVLEEKLPSASGIVAEHIGWAIAQQKDRE

SEQ ID NO: 74919 - protein, 244 aa, unidentified
  source 1..244: note = Unknown
  REGION 1..244: note = tr|A0A2H6GKN3|A0A2H6GKN3_9BACT Epoxyqueuosine reductase OS=bacterium BMS3Abin14 OX=2005722 GN=queG PE=4; SV = 1
MNRDTVLLRDRLIHQAKVLGADDAGVCLASDLLNGPSHRKLPRPEGLLDHHYLLVLALRHPLHEPALDYFVRKDGARYGNSEGNRRLMRISDRIGRWLGEEGLSSQDLHYYVEKGGVFLKGAAVLAGLGTIGANNLLIHPSFGTRVRFRARLVDFPLTPSTPIDCNPCSDCVHSCLTVCPERALDSDGFTRDKCQLQLDRDISNAVILSGDADGSAKREVHYCRICEFSCTYTGGVPSHVKSKR

SEQ ID NO: 74920 - protein, 372 aa, unidentified
  source 1..372: note = Unknown
  REGION 1..372: note = tr|A0A2H6HAG7|A0A2H6HAG7_9BACT Epoxyqueuosine reductase OS=bacterium BMS3Bbin01 OX=2005724 GN=queG PE=4; SV = 1
MTDRVAHDLRAIAVAEGLSGFGICTAEPFEDVRVSIEERKAGGLAGRLTFTFANPERSTDVRSSFPWARRLVVGAAPYVADSGSPSLRTAREGRIARFATRDAYAPLRQALGSIAEHLRARGHEAEVLVDDNRLVDRGAGVRAGVGWWGKNTMVLAPGVGPWLLLGSVVTDSPLETTGPMLRTCGTCSACLPACPTGALIGPGILDARRCLAAIVQAPGVIPREYREAIADRIYGCDDCLEACPPGRRHLLNAGGSRAGIVDLPTILRSSDRTILDRYGHFYIPRRQARYLRRNALVAIGNTGDSSFVSLLAGYVAHPDWLLRLHSAWALGRIGGPFAIAILKAAQRQEVHDEVREEIALALRELRGHEQVR

SEQ ID NO: 74921 - protein, 370 aa, unidentified
  source 1..370: note = Unknown
  REGION 1..370: note = tr|A0A2H6HGP3|A0A2H6HGP3_9BACT Epoxyqueuosine reductase OS=bacterium BMS3Bbin02 OX=2005725 GN=queG PE=4; SV = 1
MEQDGTPVHAVAMAAGAVGCGVASVEPFADALTTMQERRSSGMSGSLGFTFRDPATATDILKTFPWARRLVVVATTYLPEAGSPSGPAPGTGRVARFATHHHYERLAEVLGAIALNLRTSGHRAEAIHDDNRLVDRAAAVRAGVGWWGKNTMVLTPGHGPWILLGSVVTDADLPLDTAMSRSCGTCSACLPACPTGALVEPGVLDVRLCLAYLLQTPGAIPRELREAVGDRIYGCDDCLDVCPPGNRSLSLATADRGRVDLLAVLAASDRELESATEHWYVPKRRMDYVRRNALVALGNSGDDRHVYVVAGWLGNGSSTLRSHAAWALGQIGGDQARRALDAAATVESDSGVLAEIQHAVVRCAGRPAVR

SEQ ID NO: 74922 - protein, 399 aa, unidentified
  source 1..399: note = Unknown
  REGION 1..399: note = tr|A0A2H6HUU6|A0A2H6HUU6_9BACT Epoxyqueuosine reductase OS=bacterium BMS3Bbin04 OX=2005727 GN=queG PE=4; SV = 1
MSQHSNNATPSPSSTVNSSELPELIKLAASNLGFDFAVIAPYQPPPNADRFPEWIAHGYHGSMSWMTKHPERRMDPRLQWPGGKSILSVGMNYHRPLPPDAPNPDDPSRGRFARYAWGLDYHDLILPRLKALGRTIDYLAGQQIASRAYVDTGPLLERPIAAGAGAGFIGKHTLLIHWRHGSYFLLGELLLDKELAPDIPKKGIIGCGGCHKCIDACPTGALDDPYVNQSNRCISYLTIEHWGAIPHELRSRIGNWVFGCDLCQETCPYNARNLMPTVEPFFEPRIPDWGVPKLLDLMALDDQQFRTWFKGSPVKRSKRRGLLRNVAVALGNWGSDEAIPALAEVMENEPEPLIRSHAAWALGQLDQYSSARLTLEKSRVSEGDEDVSEEIERALAGGS

SEQ ID NO: 74923 - protein, 218 aa, unidentified
  source 1..218: note = Unknown
  REGION 1..218: note = tr|A0A2H6IS74|A0A2H6IS74_9BACT Epoxyqueuosine reductase OS=bacterium BMS3Bbin09 OX=2005732 GN=queG PE=4; SV = 1
MYDKLKEIANDQSILAFGVADTENLREHYDGLPMDQTEGLNNGISIGMAVSGAVLKGCIMGPTRHYLHNYRMTNWNLDMTAARIAAVIQDEGFRAMPIPASQIVDWEAQTAHLSHKMIALRAGLGWIGRNNLLVHPKWGSKIRISTILTDMPLKTDTPIERDCGFCKKCIDVCPVKAIKDSHKDWNKAACLVKLKYYAQNYGVGQYICGLCLKVCDSV

SEQ ID NO: 74924 - protein, 372 aa, unidentified
  source 1..372: note = Unknown
  REGION 1..372: note = tr|A0A2H6J1Y7|A0A2H6J1Y7_9BACT Epoxyqueuosine reductase OS=bacterium BMS3Bbin10 OX=2005733 GN=queG PE=4; SV = 1
MPELKDQIRAQASEAGFDVIRFTTPGAIPDAGAHLMAFLGQGRHGDMHWMEETAQRRASPLSLWGDARSVIVLGLNYGPESDPLEALKQTSNGIISVYARGKDYHGLIKKKLKRVAGWLHRERGCEVKVFVDTAPVMEKPLAQSSGAGWQGKHTNLVSRGFGSWLFLGSIFTTETIAPDEGESDHCGACRACLDICPTDAFPAPYELDARRCISYLTIEHQGAIALEFRAAIGNRIFGCDDCLAVCPWNKFARASAEARLGARAETDNPPLGDMLMLDDAAFRSRFAGTPVKRTGRDRFIRNVLIAAGNSGNKKLLPRVEPLLGDASALVRAMAVWAGARLMDKERFAAARESLEGRERDAHVKAEWRSAGP

SEQ ID NO: 74925 - protein, 381 aa, unidentified
  source 1..381: note = Unknown
  REGION 1..381: note = tr|A0A2H6JAV6|A0A2H6JAV6_9BACT Epoxyqueuosine reductase OS=bacterium BMS3Bbin12 OX=2005735 GN=queG PE=3; SV = 1
MNRPAKSITPEAPARCPDPAALAADIRRWGMELGFQALGITDTDLSAAETRLLDWLARDRHGEMDWMARHGVRRSRPARLVPGTIRVISVRMDYWPGAAADARTVLDDPARAYLSRYALGRDYHKVLRRRLQRLAERIAAITGPFGYRVFTDSAPVLEKPLAQKAGLGWIGKHTNLLGARAGSWFFLGELYTDLPLPVDAPARERCGTCTACLDACPTGAILAPYQLDARRCIAYLTIELPGAIPVELRPLLGNRIYGCDDCQLACPWNRFAQPTPEADFLPRHGLDAATLAELFAWDEAAFLRNTEGGPIRRIGHERWLRNLAVALGNAPPTPEAATALRARTAHPSALVREHVAWALARHASASDPGGTDPAHSLAGDA

SEQ ID NO: 74926 - protein, 305 aa, unidentified
  source 1..305: note = Unknown
  REGION 1..305: note = tr|A0A101VUK6|A0A101VUK6_9BACT Epoxyqueuosine reductase OS=bacterium BRH_c32 OX=1734400 GN=APF79_12825; PE = 4 SV=1
MINNKLISELALKYGFGLVGFSSVTLLSKETARLKEWIECGNHAGMDYMERNLEKKENIKEILRSAESVISLGMFYDSGEKHEYKPGFGKVSRYAWGTDYHFIMWEHLEEMIDELKEIDSSFEGIFYVDTGPVMDKVWAVKSGLGWQGKNTNIINKESGSFFFIANIITNKKFEYSVPSADYCGTCRACIDACPTNALNPYHIDARKCISYLTIENKGEISKEFTGKFENWIFGCDICQDVCPWNEKFSVFTSEPKFHSAGNKELELKQVLNMENDKFKKKFEVSPIKRSKLKGLIRNAEFLTIE

SEQ ID NO: 74927 - protein, 357 aa, unidentified
  source 1..357: note = Unknown
  REGION 1..357: note = tr|A0A2M7YTF9|A0A2M7YTF9_9BACT 4Fe-4S ferredoxin-type domain-containing protein OS=bacterium CG_4_9_14_3_um_filter_65_15 OX=1975567 GN=CO151_08060 PE=4; SV = 1
MAADTQISMEWNQLRGLLAELCPVHGLDLAGAVALPCRLPHAERFRDWLQQDRHGGLDYMLRDPGARLDPTRRDPAAGTLLVFGQGYTRGWPADDPDPVAGGAGRTGQPWTAGVARYARGRDYHDVLRSAIKGVVAGMKELRPELQARVSCDSGPYLEREYAWLAGLGFFGRNTCLIHERLGSGLFLGVAVTNLVLDGAPDTAEPQAEPLYAAVPRRLRVHKAYLTACGSCTRCLDACPTGALDPELGLDASACISTWTIEKRGQVPEHSRSATRGILFGCDICQTVCPWNQRAAGRDLPPVDAAYGTMPEHAERGLADLAVMEDEEFRRRFRRTPLWRCHPEGLRRNAQRLLEEKS

SEQ ID NO: 74928 - protein, 153 aa, unidentified
  source 1..153: note = Unknown
  REGION 1..153: note = tr|A0A3A9B2Z7|A0A3A9B2Z7_9BACT Uncharacterized protein OS=bacterium D16-63 OX=2320119 GN=D7X10_00585 PE=4; SV = 1
MSDRGHGGPRELDLARCILFNNQRFAPGAQEGIWASMGERIHGCDACQEVCPRNRDVLAAARAKDPFLEALAEEFDLERVLTLDEAHYEAVVRPIIYNYIKDLDIFRRNAAVALGNTGDAAHLPALRQARDACDNPDVLKAIDWAIGLLEGAA

SEQ ID NO: 74929 - protein, 365 aa, unidentified
  source 1..365: note = Unknown
  REGION 1..365: note = tr|A0A2G6NVS8|A0A2G6NVS8_9BACT 4Fe-4S ferredoxin-type domain-containing protein OS=bacterium DOLJORAL78_65_58 OX=2044882 GN=CSA17_04325 PE=4 SV=1
MMAAPVPVTAEDLARLLARECPPAGIELAGAVALPCPLPHKDRWLRWVAEGRDGNLEYLRRDPEQRADPTRRNLDARSLLIMAHRYTAGWPKDRSEPAAGGWAPEEASWLGRVSRYARGRDYHVVLLKAMRRVLQGLKQEWPDLAAHASTDTGPYLEREYAWLAGLGFLGHNRCLIHETLGSGLFLGVALTNLEIAGLPPGGAPAPEPLFALAARQRRPITTAPWDRCGNCSRCLDACPTGALDLVHGLDAHLCLSSWTIEWRGRAPQGREHEQGGILFGCDICQAVCPWNRKADRKAEGLPDPVADYAPLEEHRELTLADLVDLSDDEFRRRFRRTPIWRCHPEGIRRNAARVRSNLRKGADPT

SEQ ID NO: 74930 - protein, 365 aa, unidentified; identical to SEQ ID NO: 74929
  source 1..365: note = Unknown
  REGION 1..365: note = tr|A0A2G6G316|A0A2G6G316_9BACT 4Fe-4S ferredoxin-type domain-containing protein OS=bacterium DOLZORAL124_64_63 OX=2044883 GN=CSB20_04720 PE=4 SV=1

SEQ ID NO: 74931 - protein, 358 aa, Escarpia laminata
  REGION 1..358: note = tr|A0A497TJJ4|A0A497TJJ4_9BACT Epoxyqueuosine reductase OS=bacterium endosymbiont of Escarpia laminata; OX = 1221601 GN=queG PE=3 SV=1
MDQAPIPNHGQLAANIKIWGAELGFQQVGITDTELSLAEARFNDWLQKGFHGEMSYMARHGSKRSRPAELEPGTRRIISVRLDYLPEPTRKSREILESPTQAFISRYALGRDYHKLMRKRLQQLAQKISGKIGDFGYRVYVDSAPVLEKPLAEKAGLGWIGKHSNLINRQAGSWFFLGEIYTDLPLPIDQPASNHCGSCRACLDICPTQAIVEPYVVDARRCISYLTIEQQGPIPESLRSSIGNRIYGCDDCQQVCPWNRFAKLGREQDFAPRNGLDSATLAELFEWDETNFLKRTEGSAIRRIGHQAWLRNIAVALGNAPPSETIKSALKVREHDPAELVREHVRWALARQRNKSPG

SEQ ID NO: 74932 - protein, 358 aa, Escarpia laminata
  REGION 1..358: note = tr|A0A497TQZ1|A0A497TQZ1_9BACT Epoxyqueuosine reductase OS=bacterium endosymbiont of Escarpia laminata; OX = 1221601 GN=queG PE=3 SV=1
MDQTPIPNHEQLAANIKIWGAELGFQQVGITDTELSLAEARFNDWLQKGFHGEMSYMARHGSKRSRPAELEPGTRRIISVRLDYLPEPTRKSREILESPTQAFISRYALGRDYHKLMRKRLQQLAQKISGKIGDFGYRVYVDSAPVLEKPLAEKAGLGWIGKHSNLINRQAGSWFFLGEIYTDLPLPIDQPASNHCGNCRACLDICPTQAIVEPYVVDARRCISYLTIEQQGPIPESLRSSIGNRIYGCDDCQQVCPWNRFAKIGREQDFAPRNGLDSATLAELFEWDETNFLKRTEGSAIRRIGHQSWLRNIAVALGNAPPSETIKSALKVREHDPAELVREHVRWALARQRSKSPG

SEQ ID NO: 74933 - protein, 323 aa, unidentified
  source 1..323: note = Unknown
  REGION 1..323: note = tr|U5S4Z9|U5S4Z9_9BACT Putative reductive dehalogenase subunit A (Fragment) OS=bacterium enrichment culture clone WBC-2_2350_ORF_3 OX=1412196 GN=rdhA PE=4 SV=1
REHGFAQIVRRSSTGDWSGEPGDWGPVLLAAVKEKNKHLAEISDIERLDYTWSSTLQVAMDRWHINLAPGKFEPAPISATKVEMSPAEATAKIKKMARWLGAEQVGICEVTEDMKPFFYSIGRKHGNYSGPVANYEEDEGREIPWPYPYKYCIVLADKCDTDTLSALEGPLVEASARVSCSICDFLPHYLESIIRALGYDAKANPFSDTDIIEAPFAVKAGLGELGRSGLLVSPWGAQLRLLEVFTNMPLVPDMPIDFGLQEFCKVCKKCAENCPSQAISMDDEPSEVITTVKSIRWLQDEKKCLARRLAYGCAKCQSVCPWS

SEQ ID NO: 74934 - protein, 245 aa, unidentified
  source 1..245: note = Unknown
  REGION 1..245: note = tr|U5S4V6|U5S4V6_9BACT Putative reductive dehalogenase subunit A (Fragment) OS=bacterium enrichment culture clone WLculture_2314_ORF_3 OX=1412312 GN=rdhA PE=4; SV = 1
LEAADYTWSNAFQIAMDRWHITLEPGRYQQAPIAATKVELSPEEMTARIKKICRWFGCEQVGICEVTEDMKPFFYSVGRTRGTYTTGHANYVDNGREIPWPYPYKYCIVMADKCDTDTLNALTGPLVEASAKIACSQSDFAPHYLESIIRSLGHDAKANIFSDTDIMDTPFAVKAGLGELGRSGLVISPWGAQMRIMEVFTNLPLVPDKPIDFGLQEFCKVCKKCADNCPASAISMDDEPSEVDT

SEQ ID NO: 74935 - protein, 297 aa, unidentified
  source 1..297: note = Unknown
  REGION 1..297: note = tr|A0A132HYG1|A0A132HYG1_9BACT (Fe-S)-binding protein OS=bacterium F083 OX=1768114 GN=F083_776 PE=4 SV=1
MLPAATVKQLALDVGFHACGIAAATPLTADELGLHRWIAEGNHADMRYMERHVAMRHDPALLVPGAQTVISLLLGYKPSCYMCGDNRIAMYAYGDDYHTGIKQMLFRLIAAIRQVQPGFEAKPCVDTVPVADKHWAVRAGLGWLGRNTLLINPTYGSLCFLAELVTVTLVDSYDLPVANRCGDCHRCLDACPNRALQSGPNGGSRLDARRCTSYHTVESRASRLPESLQRRGYAFGCDCCQLVCPYNMQAPVSVQIGDAQLSELQSLEHADEATFRRLTRHRALNRINYAQWQRNIR

SEQ ID NO: 74936 - protein, 384 aa, unidentified
  source 1..384: note = Unknown
  REGION 1..384: note = tr|A0A202DMW3|A0A202DMW3_9BACT tRNA epoxyqueuosine(34) reductase QueG (Fragment) OS=bacterium F11 OX=1932698 GN=BVX98_03025 PE=4 SV=1
QLRAHSLGFDHLSATTPTIPEKDRDEYKAWVAAGLAGGMAYMERDPDRRVDLTTTYPGIKTVLTLGVSYYQGTLPPKPGQEYGRVARYAWGLDYHDVISERLQRFLASLHDMLGEDTGSVITIDSKPILERALAQSSGLGFIGKNTVLIIPRRTHSYHVGSWVFLTEILLTIPMDEEISPFPIVNGCGQCSLCLTHCPTQAFERPYRLQSDRCISYLTIENKGFIPREMRSKLDDWIFGCDVCQDVCPYNTKAFETRWPEFQANRGTGPWISLREIFEVGDQATFKKKWGLTPLNRAKRKGLLRNACVVAGNSEEDNLVPYLINLLDDPEPMVRGHALWGLSKLTSPKVGKKMAEGMLRREEDALVREECEGVLGGPAHIKCNS

SEQ ID NO: 74937 - protein, 315 aa, unidentified
  source 1..315: note = Unknown
  REGION 1..315: note = tr|A0A2H5VV36|A0A2H5VV36_9BACT Epoxyqueuosine reductase OS=bacterium HR09 OX=2035404 GN=queG PE=4 SV=1
MERAHHEAKEALRAYALQTLGFDLFGVAPAEPMEGQRHLAAWLALGFHGEMAYMARTANLRGDPRALLPGAQSVICVACTYHDPPDPPQQPGYARVARYARRRDYHKVMRKKLLQLGRYGRQMFPETQFRVVVDSGPLLEKEVAQRAGLGWIGKNTCLINRRLGSELLLGELITTVALPPDSPETDHCGSCTACLAACPTEALRGPYQLDARRCISYLTIEHKSAFDADHPPQLSGYLFGCDLCQTCCPWNRHAPPQVNPHLPTRSHLATLSVSELAGFDADAWAKLAEGTPLRRLTYERLRRNLGALDSTAKQE

SEQ ID NO: 74938 - protein, 396 aa, unidentified
  source 1..396: note = Unknown
  REGION 1..396: note = tr|A0A2H5W2L6|A0A2H5W2L6_9BACT Epoxyqueuosine reductase OS=bacterium HR10 OX=2035405 GN=queG PE=4 SV=1
MTLERLTREIKERARALGFHGVGITDVRPLEEAEARYHHWLREGLAADLQYMQTSAGQRAHPARVWPEARAVLVLVVNYYSGEFDALPRGHGRIARYAWGRDYHDVIPARLRQLVAEIEQLLRRPVRARCFTDAVPLLERALARRAGLGRIGWNACLITEAFGSWVFLSEILLDVELAPDPPETRACVSTFDCHRSCPTGALRPDGLVDARLCISYHTIENRGVIPRALRSKLGDWLFGCDVCQEVCPHNARVPITDWPEFHLEAGVGKTLALADVLAIASDEAFRQRFRGTALRRAKRRGLLRNAAIVAANTGYEEAIPQLRRLAREDPDEIIRGHALWALGVLDPAGSRAILERARRDVHPFVREEAEWALEASAGGEPSEGSANMKPSGAIAV

SEQ ID NO: 74939 - protein, 359 aa, unidentified
  source 1..359: note = Unknown
  REGION 1..359: note = tr|A0A2H5W5N5|A0A2H5W5N5_9BACT Epoxyqueuosine reductase OS=bacterium HR11 OX=2035406 GN=queG PE=4 SV=1
MEALPPWDDTSWIVAQAYLVGFDVVGVAAVDETASATESMFYWLAQGLQADMDWLQRTRAVRLDPRRRWPDLRAVVVVASGYPAWPTLQAPPEGYGRVSCYAWGRDYHRVLGRRLERLVAWARRRWPDDWFRWYVDTGPVAEKVWAVRAGVGWIGKHGNVIHPRLGSWTFLGVVLTSRPLRPAPHQAVADRCGTCTRCMDVCPTRAILAPGVVSAHRCISYWTIEHPGPIPEAVRPWIGSYLFGCDDCQTVCPWNRWAQTAGSFVPVVQRRRISLREALWMDEAAFHRTFAGTPVHRLGWWRLRRNALVVIGNHGDASLMEDLRRFLAVETDPVLREHAEWALDRLTRRHVSVASPVHR

SEQ ID NO: 74940 - protein, 370 aa, unidentified
  source 1..370: note = Unknown
  REGION 1..370: note = tr|A0A2H5WKI0|A0A2H5WKI0_9BACT Epoxyqueuosine reductase OS=bacterium HR14 OX=2035409 GN=queG PE=4 SV=1
MATGETSHAPHSLTEWVKAYARALGFDLVGIAPAVRPPHAEAFLLWLQQGYAGEMDYMERTAEQRLNPAELLPNAKSAVVVGLNYTPPELPPTDYRIARYALGEDYHTVIRSKLENLLSAFQALCPEAQGRVCVDSAPVLERELAWLAGLGWYGKNTCLINTHRGSYFFIGVLLLNVELDYDHPAFGGCGNCRRCLDACPTGALVEPYRLDARRCISYLTIELRDGIPEPLREPMGEWLFGCDICQEVCPFNHPRPHQPLRATPTQEPRFAPRPMPSLAEILEMDEEAFRERFRGSPIKRARWRGLVRNALIVAGNRTDPALLPLVERYCQHPDPMLREHAEWAKRRILQACSAPTPRHSIQDTPSVAEE

SEQ ID NO: 74941 - protein, 359 aa, unidentified
  source 1..359: note = Unknown
  REGION 1..359: note = tr|A0A2H5WSK2|A0A2H5WSK2_9BACT Epoxyqueuosine reductase OS=bacterium HR15 OX=2035410 GN=queG PE=4 SV=1
MEREQLSAWIKAYAQALGFELVGIAPAVRPPHADKLLWWLQQGYAGEMEYMERTAEQRIEPQLLLPGAKSAVVVGLNYTPSQLPETDYRIARYALGEDYHTVIRSKLETLLSAIRALLTECEGRVCVDSAPVLERDLAWLAGLGWYGKNTCLINTHRGSYFFIGVLLLTVELEYDHPAFGGCGRCRKCIDACPTGAIREPYVLDASRCISYLTIEQKGAIPGELREPMGEWLFGCDLCQEVCPFNQPRPHQPLRATPTNEPRLQPRSLPRLEEILMMNEEEFRRRFQGSPIRRAKWRGLVRNALIVAGNRGDPRYLPLIERFLNHPDPLLREHADWAHKQLQNSAINSAQAPRQAVSYG

SEQ ID NO: 74942 - protein, 303 aa, unidentified
  source 1..303: note = Unknown
  REGION 1..303: note = tr|A0A2H5X0S4|A0A2H5X0S4_9BACT Epoxyqueuosine reductase OS=bacterium HR16 OX=2035411 GN=queG PE=4 SV=1
MAYLARTADARCDPQQVLPGAKSAVVVGLNYAPAVSPVTDDPTRGIFARYALGDDYHEVMERKLRQLLEFIRQHRPDCRAKVYVDAGPVLERDLAWRAGLGWFGKNTMLINTRRGSYFLLGEILLDIELEYDHPAFGGCGKCNRCIEACPTGAIVAPYVLDARRCISYLTIELRGSIPEELRPKMGNRIFGCDICQEVCPFNQPRPHAPLRSAPTGEPGFTPREVTLTPKLTDLLRMNEEEFRSAFRNSPVKRAKWRGFRRNVAVAVGNSSDPDALPVLQQELQRETDPMVREHLQWAMERCR

SEQ ID NO: 74943 - protein, 394 aa, unidentified
  source 1..394: note = Unknown
  REGION 1..394: note = tr|A0A2H5X9H0|A0A2H5X9H0_9BACT Epoxyqueuosine reductase OS=bacterium HR17 OX=2035412 GN=queG PE=3 SV=1
MGVASLTPQQLALMVKQRGRELGFDLIGIAPVQSPPTYPHYEQWLAQGFHGAMAYMERGKEKRKDLRLILPDAKSVIVGAINYFAPDEQLPVRGEPHGLVSRYAWGADYHDVVLCKLEALLDYLRALLGDSVRGKAYVDTGPILERDAAVQAGLGWIGKNTCLINPHKGSWLFLGELIVNVELAPDAPFVRNHCGKCTRCLTACPTGAFVGPYRLDARRCISYLTIELRGSIPRELRPLMGTWIFGCDICQEVCPWNRKATPTHEDAFKPRPWAAPELLDLLTLTEEEFRERFKGSPLKRAKRSGLVRNASVAVGNLREVRAVPLLIRLLERDPDPVVREHAAWALGRIGTSAALAALQDALTVEANERVRTEIVLSLQEAGAAVVAPSSSVPL

SEQ ID NO: 74944 - protein, 326 aa, unidentified
  source 1..326: note = Unknown
  REGION 1..326: note = tr|A0A2H5XGM2|A0A2H5XGM2_9BACT Epoxyqueuosine reductase OS=bacterium HR18 OX=2035413 GN=queG PE=3 SV=1
MPGFDVHAQQRLAQALKQEARRLGFDACGISKAEPLDEEARRLEAWLKAGFHGSMHWMENHFDKRIDPTKLVEGAQSIISVLHNYYQPVAHDPSPETGKISRYAWGDDYHEVLKEKLYQLFAWLQAQVGEVHGRAFVDSAPVMDKAWARRSGLGWMGKNTNLINRRMGSFFFIGELIVDVPLPPDGPIPDYCGSCTRCIDACPTGALVQPYVLDARRCISYLTIEHRSDDIPAELQEKMGNWIFGCDICQDVCPWNKFKYATSEPRFMPRPGLPDTPLHRWEELDLEAFRKKFRKSAVQRAKFEGFKRNVRIALQNAHPVLRPGSF

SEQ ID NO: 74945 - protein, 331 aa, unidentified
  source 1..331: note = Unknown
  REGION 1..331: note = tr|A0A2H5XVF5|A0A2H5XVF5_9BACT Epoxyqueuosine reductase OS=bacterium HR20 OX=2035415 GN=queG PE=3 SV=1
MDAELSTAALTKELKDYCHRLGFDAVGIARAEALDDQREHLNTWLTRGYHATMHYMERTSQKRLDPRQILPSARSIVVVAMSYDTPYRHTDQPNRGKISRYGWGDDYHDVLLPKLRAAAAWLANRVPNAESKVYVDTGPVMEKQWARRAGIGWQGKNTNVISRTMGSFFFLGVLLTSVELEADAPIPDYCGTCTACLDACPTGALVEPYVLDASRCISYWTIETKPDVEFPESIRRNLDGWLFGCDVCQDVCPWNRFRKETRETAFFPRNDETSLALEQILAMTPEEFRQRFRGSPLKRPKLAGLQRNARMLQAAAECSQQSDVHAHDHSR

SEQ ID NO: 74946 - protein, 337 aa, unidentified
  source 1..337: note = Unknown
  REGION 1..337: note = tr|A0A2H5Y2G9|A0A2H5Y2G9_9BACT Epoxyqueuosine reductase OS=bacterium HR21 OX=2035416 GN=queG PE=3 SV=1
MGVSAEERRRRTEAVKDAARHLGFCEVGIARAEPLHEEFGRYLAWLERGYHGAMAYLERNLDRRADVRAILPGAQSVVVVAYNYYVPAGYEAFEREPHRYGKISRYAWGEDYHEVLRPKLEALALVISRIVPGAESRIAVDTSPVLEKAWAVRAGIGWQGKHTNIISRRYGSWLFLGVVITTAELEPDTPMKDYCGSCTACLRACPTGALVEPYVLDARRCLSYWTIETKPEMPIPTEIAERMEGWIFGCDICQEVCPWNRFQKPSQDSAFAPRQGETCLELDTLLAMTPEEFRQRFRRSPLKRPKYAGLRRNAHAWKRVVSQAVAHDDDEPERSAP

SEQ ID NO: 74947 - protein, 345 aa, unidentified
  source 1..345: note = Unknown
  REGION 1..345: note = tr|A0A2H5Y9H6|A0A2H5Y9H6_9BACT Epoxyqueuosine reductase OS=bacterium HR22 OX=2035417 GN=queG PE=3 SV=1
MDLKTRLKAHAQALGFDLVGVARAGPTPSADRYEEWVRAGRAATMAYLTRPDAIEKRRDLRNLWPEARSVIVVAMNYYAGEHPPPDDQPRGRVARYAWGDDYHEVIAERLRSLLEFLNREAGGSVRGKIYVDAGPVLERAWAVQAGLGWIGKNSMLIHPRLGSYLFLGVLLVDLDLEPDPPFPFDHCGTCTRCIDACPTGCIRPDRTLEAGRCLSYLTIERREGIPEDLRPAIGDWLFGCDICQEVCPWNQRFARPTREPAFQPREGIARMLLEEVLRMDEAAFRARFRRSAIHRAKWRGLVRNALVVAGNLRARALVPWIPMWREHEDPMLREHAEWAMQAMSR

SEQ ID NO: 74948 - protein, 135 aa, unidentified
  source 1..135: note = Unknown
  REGION 1..135: note = tr|A0A2H5YBP5|A0A2H5YBP5_9BACT Epoxyqueuosine reductase OS=bacterium HR23 OX=2035418 GN=queG_2 PE=4 SV=1
MNRKARPASLPEFQPNPAHQRLDLLDILSLSEEAFQERFRGTSIRRATRVGLQRNACVVLGNLSDPSAVPDLARVLREGETLVRGHSAWALGRIGGTRAVHVLEEALRHEQDPWVAEEIRLALQEAGARAPATAS

SEQ ID NO: 74949 - protein, 217 aa, unidentified
  source 1..217: note = Unknown
  REGION 1..217: note = tr|A0A2H5YBR0|A0A2H5YBR0_9BACT Epoxyqueuosine reductase OS=bacterium HR23 OX=2035418 GN=queG_1 PE=4 SV=1
MPRIERARIDALAQQVGLALVGCASADAFLEARDVALERLRQGLMGTLPWYHEERILRGTDPQVILPGARCIIAVAVSYWTPAEPAPRPLTGRVARYAWGQDYHKALKERLRALMRLLEREVGPFRWKVYVDDGPLLEREVARRAGMGWFGKNTNILTPIGSWVFLGEVITDLVIPPSPPLKKTCGRCSACLPACPTGALIAPYVLDSRRCIAYLTI

SEQ ID NO: 74950 - protein, 406 aa, unidentified
  source 1..406: note = Unknown
  REGION 1..406: note = tr|A0A2H5YRX7|A0A2H5YRX7_9BACT Epoxyqueuosine reductase OS=bacterium HR26 OX=2035421 GN=queG PE=4 SV=1
MKTLTRDRLKALAHEAGLAITAVTTADAFPEIAEVLVERIREGHMTGLDWFTEDRARFSADPRNLHPTARSIISVGVPYWQPDIQPPQDDVPRGRISRYAWGRDYHKTLRARMERLHALLEAELNRRIEARFLVDTARIVDRAAAARAGLGWYGKNTMVLVPGYGSWVMLGELVVDVEIEPDAPLRPRCGRCTACIDVCPTGALVGPYTLHTPRCISFLTIELRGPIPRELRPLMDNWVFGCDLCQEICPYTSAARPVADPDFQPERIEHCFPALDWLLRMTEEEFREVYRGRAVLRAKRSGLARNAAVALGNVGRPADLAVLEEVLTRHDLPLVRGHAAWAMARINADAARPALQAALEREADPYVREEIRQTLDAPPPPRNQRPPVAAARPVRLLVRRTPAAAR

SEQ ID NO: 74951 - protein, 392 aa, unidentified
  source 1..392: note = Unknown
  REGION 1..392: note = tr|A0A2H5Z0L3|A0A2H5Z0L3_9BACT Epoxyqueuosine reductase OS=bacterium HR27 OX=2035422 GN=queG PE=4 SV=1
MQLTRDELRQLAAQAGLSLVAVTTAEPFPHLADLLKARIRAGYLRGMDWFDERRADIAADPRNLHPTARSIVSVALPYWIPDIQPPNDGVARGRIARYAWGIDYHRVLRERMRRLHALLEARVGRTLEARFLVDTARIVDREVAARSGLGWQGKNTMILVPRHGSWVLLGELVLDIEIDPDQPLRPRCGRCQRCLDACPTGALVAPYELYAPRCISYLTIEHRGPIPWELRPLMGNWVFGCDVCQEVCPYTSAALPADDPIVRPERIEHCFPSLEWLLRMSEEEFRVVYQRRPVLRAKRAGLARNAAVALGNIGDSRHLAVLEETVLAHDQPLVRSHAAWAMARIDYSASLPVLRTALQHETDPLARTELQQLLDAPPEPVSQSSAVLPRSR

SEQ ID NO: 74952 - protein, 392 aa, unidentified
  source 1..392: note = Unknown
  REGION 1..392: note = tr|A0A2H5Z4W8|A0A2H5Z4W8_9BACT Epoxyqueuosine reductase OS=bacterium HR28 OX=2035423 GN=queG PE=4 SV=1
MRLTRDELRALAREAGLTLVAVTTAEPFPGLAELLRARIRAGFLQGMEWFNEQRAEVAADPRNLHPTARSIISVGLPYWLPDIQPPDDGIVRGRIARYAWGLDYHRVLRHRLQRLHQLLEARLGRRIEARYLVDTARIVDREVAVRAGLGWQGKNTLVIVPHHGSWVLLAELVVDIDLEPDEPLRPRCGRCRRCLDACPTGALVGPYALYAPRCISYLTIEHRGPIPWELRPLMGNWVFGCDICQEVCPYTAAAQPTDDDVVRPERLEHCYPSLEWLLRMTEEEFRSIYRGRPVLRAKRAGLARNATVALGNVGDARHLETLEEALLGHDQPLVRSHAAWAMARIDFALSEPVLRRARDRETDPLAREELERLLISPPEPLNRSSAVLPQSR

SEQ ID NO: 74953 - protein, 401 aa, unidentified
  source 1..401: note = Unknown
  REGION 1..401: note = tr|A0A2H5ZFG6|A0A2H5ZFG6_9BACT Epoxyqueuosine reductase OS=bacterium HR29 OX=2035424 GN=queG PE=4 SV=1
MEAKARVLELARAEGFATVRVARAEPLRKAFTAARAAWEEGRLADMAWMTPEWLARATDPETFLAGAKSVIVAGLPCHSPEPDPPADSPPGARGRVARYAWGRDYHRTFEKRLRRLARAIREEFGADARATVDYGPLLERPFALAAGMGWLGKSTMLLVPGFGPWMLLGAVATTLELEPDPRIGKTCGACVRCIVACPTGAISPDGRIDSRLCISYHTIENRGPIPRGLRAKFGSWVFGCDECLEGCPVGTHRFESHPDFLPPTYDHAYPRLAELIGLDDEEFRRRFQGRPLMRAKRDGLVRNACVALGNVGLPEDVPALIRALEDRSPLVRGHAAWALGRCIERFADSVAPAADEARAALEARAPLETDPWVREEIALALTVSAPAPAASAGPGGGPHVG

SEQ ID NO: 74954 - protein, 378 aa, unidentified
  source 1..378: note = Unknown
  REGION 1..378: note = tr|A0A2H5ZLS2|A0A2H5ZLS2_9BACT Epoxyqueuosine reductase OS=bacterium HR30 OX=2035425 GN=queG PE=4 SV=1
MESMVEGTVDPELIRAMAKEAGFALCRFAEAGVAPHAEAFESWLARGAHGTMTYLERTRQARVQPRAMLPDTRTVIVLGSPFASRGCSLPNWREELRGRIAAYALGADYHDVIRWRLRNFCQRIKSVYPNAVCYAEVDTGPVLERDWAWASGVGWFGKNTNILNPHFGSLFFLAVVMTNLEVPPDAQVPDRCGRCVRCIPACPTGALDGDYGLDARRCISYWTIEHRGSIPQRVRATLGEWVFGCDICQDVCPWNEKKARRLWLEPSTELHPFLPELLSLTDEEFRQRYRRTALWRAKREGIARNAAVVLGNSGNPDAVPFLARALASDPSAVVRAHAAWALGQIGTTAALDALLHHLRRETDPTVIAETQGALRAAA

SEQ ID NO: 74955 - protein, 321 aa, unidentified
  source 1..321: note = Unknown
  REGION 1..321: note = tr|A0A2H6A272|A0A2H6A272_9BACT Epoxyqueuosine reductase OS=bacterium HR33 OX=2035428 GN=queG PE=4 SV=1
MTPELKAGLVKRKALELGFDAVGVTDLSPPPHGEALRRWIHEGMAGTMRYMERQLEARLRPETILPGATRAVVVTKHYLTSDPPARKGKGRVAKYARGRDYHKALRPALENLAGYIRSLGGPGTLAKPYCDAGPVPERELAQRAGLGWIGKNTMLIDPKRGSYSFIAAILTDLDLATDPPFEADRCGSCNRCLEACPTEAFAAERVLDSRKCISYLTIEYKGDTVEPHLADRFGDWIFGCDICQDVCPWNIKFAEPPGDDLLEPDPNMALLDLEEIMSLSDSEFRKRFGRTAIMRAGREAMQRNAAIVRRLQSGGAYAGRP

SEQ ID NO: 74956 - protein, 391 aa, unidentified
  source 1..391: note = Unknown
  REGION 1..391: note = tr|A0A2H6ADK2|A0A2H6ADK2_9BACT Epoxyqueuosine reductase OS=bacterium HR36 OX=2035431 GN=queG PE=3 SV=1
MVTLPLALRRNLKDQLKAQARQLGFDLLGIALADQPATWPHFQDWLRRGFAGRMAYMHRQAQARSHPRHVFPEVRSVIMAGLNYKPRQLASTLALSGSTGRVSCYAWARDYHRVLRRKLQQLLRWLQNQVPDCQGRAVVDSAPLLERDFARRAGLGWFGKNTMLINTRLGSFLFLGALLVNLEFEPDPPLDTFHCGTCTACLEACPTQAILAPHLLDARRCISYLTIELRGPIPLELRRAIGDWVFGCDICQDVCPWNRKSPPGRCPDLVPRSDLVALDLLELFSLTEAQFRAKFAGTALMRARRDGLLRNAAIVLGNRKDASAVPALCLALNDPAAVVRGAAAWALGQIATADALEALRKRLDKEADESVRAEIANALRELTFLPSASVQ

SEQ ID NO: 74957 - protein, 377 aa, unidentified
  source 1..377: note = Unknown
  REGION 1..377: note = tr|A0A2H6AJY5|A0A2H6AJY5_9BACT Epoxyqueuosine reductase OS=bacterium HR37 OX=2035432 GN=queG_2 PE=3 SV=1
MDTVALTRSIKEKALEIGFDLVGISPVGPFPESQFFKEWLSKGFNGEMKYMERNSERREDLRRVFPEARSVISCGLNYNTEYPYSINRVDKQRGWISRYAWGDDYHEVIKDRLSKLLGFIREVSPVEVKALIYVDTGPVLERVYGRYGGIGWIGKNTCLINQKIGSWIFIGEIITNLELNYDSPVPDRCGTCRRCIDACPTGALVKPYVLDSRLCISYLTIELRGKIPVELREKVGNNVFGCDICQDVCPWNRRAKFSRETSFLPREGLLNPELSSLLELAEEDFKKVFRKSPVKRAKRGGFIRNVLVAMGNSGNKRFIPHVKRLLKDADPLVRAHAVWALWKLEGKDALETIKGLLAKEHDPMVREEILNVMNQGL

SEQ ID NO: 74958 - protein, 248 aa, unidentified
  source 1..248: note = Unknown
  REGION 1..248: note = tr|A0A2H6AJ78|A0A2H6AJ78_9BACT Epoxyqueuosine reductase OS=bacterium HR37 OX=2035432 GN=queG_1 PE=4 SV=1
MIDISSTYEKLKTLLKEEGFNLICRINVEEYDKETPSTRRISNILPEAKSAIIVAFAGKGFWEKLKRFLEENPRFARSTENWIDEYTVLKITEVTAILKPRVSKCKVVFPFSQPGLNLDFMKLGELGGIGTKSLLGILIHPTYGSWISIRGAILTDAEFNSYDGPLANFTPCKECQKPCINACPAKAISLNGWNYKACLHFRLSTDICSSNCISRRACPYGMEHQYSEEQLAHHQRAVLKDVKKYWCD

SEQ ID NO: 74959 - protein, 385 aa, unidentified
  source 1..385: note = Unknown
  REGION 1..385: note = tr|A0A2H6B0Y7|A0A2H6B0Y7_9BACT Epoxyqueuosine reductase OS=bacterium HR40 OX=2035435 GN=queG PE=3 SV=1
MELVAEVKARARALGFDVVRVTQARLPEDVRREYRAFLAAGRAGDMDWLVATADRREDPTRLWPEARSAVVCGMNYAPAGEPLANLSRPEVGNISVYARGRDYHEVLKGRLKQLAGWLAARAGARVKVFVDTAPLLEKPLAQQAGLGWQGKHTNLVSRQFGSWLFLGEILTDLELPADPPERDRCGSCRRCLDICPTGAILGPRRLDPTLCVSYLTIEHKGPIPRSLRPLLGNRIYGCDDCLAVCPWNKFARTASRGLFAHRSELDAPPLADLVRLDQAGFRALFRGTAIRRIGLARLLRNVLLAIGNSGRPELSSAASSRLTDPSPLVRGAAVWAVGRLAAPEELAALACRHLPGERDPTVREEWESALAEVTAQARSARLSGS

SEQ ID NO: 74960 - protein, 311 aa, unidentified
  source 1..311: note = Unknown
  REGION 1..311: note = tr|A0A3L8A2X3|A0A3L8A2X3_9BACT tRNA epoxyqueuosine(34) reductase QueG OS=bacterium J10(2018); OX = 2320122 GN=queG PE=4 SV=1
MNSKPSICSDAVTSEALRLGATAIGLARAEPVDTTAAARYDAWIAAGCHGDMGYMARNTGLRNDPRGLLPSARTVIVAAFNYFPRHQQPAENPQFAYYAYGRDYHEVVRERLGMLAHFIKENYGGETRVCVDTAPMHERYWAQKAGIGFEGINSQLIIPGQGSYFFLGEVLTSVNFTPSEPCDTDCGRCGACMRACPSGAIKGDGTIDASRCLSYLTIEYRGDLPADTPAGNRIYGCDTCQQVCPHNRHAQPTEIADFAPSDQFLALDKQRLAALTPESFNILFRHSAVKRTKLCGLLRNLTLISDKKKSI

SEQ ID NO: 74961 - protein, 356 aa, unidentified
  source 1..356: note = Unknown
  REGION 1..356: note = tr|A0A4S1HMS7|A0A4S1HMS7_9BACT Epoxyqueuosine reductase OS=bacterium M00.F.Ca.ET.141.01.1.1 OX=2563898; GN = queG PE=3 SV=1
MSPAPAPVDPAQAVQRIRALARAHGFQRCGIAGIELGEDEAHLADWLGQGLYGTMDWMARHGTLRARPAELLPGTVRVISVGMDYSHKDDTEAWATLADPGRAYVARYALGRDYHKLMRNRLQKLATQINDEVAPLGYRVFVDSAPVLERALARNAGLGWIGKHTCLIDRHGGSWFFIGEIYIDIPLPIDTPATAHCGTCTRCIDVCPTQAITGPQRLDARRCISYLTIEHDGAIPEDMRPLIGNRIYGCDDCQLVCPWNKFAKRTDEADFRARNNLDSARLDQLFAWDEGEFLRRTEGSPIRRSGHERWLRNIAVALGNAPSSAEALAALHTRVDDPSPLVREHVQWALDQHTVR

SEQ ID NO: 74962 - protein, 384 aa, unidentified
  source 1..384: note = Unknown
  REGION 1..384: note = tr|A0A4S1HQR8|A0A4S1HQR8_9BACT Epoxyqueuosine reductase OS=bacterium M00.F.Ca.ET.141.01.1.1 OX=2563898; GN = queG PE=3 SV=1
MRTSTSDAAKLRALIDAEARRAGFDAVAVTTPDAIPLAPARLAEFVADGFHGSMDWIAETIARRSEPSTLWPDVRSIVVLAMNYGPDRDPRDLLSKHDRGAISVYAQNRDYHEVMKGRLKEIAGKIVARAGGDVKVFVDTAPVMEKPLAEAAGLGWQGKHTNLVSREHGSWLFLGTIFTTAELAPDEAGIDHCGSCRACLDACPTDAFPAPYRLDARRCISYLTIENKGPIPHEFREAIGNRIYGCDDCLAACPWNKFASAASEAKLAARDDLREPALADLLTLDDAAFRAFFSGSPIKRIGRDRFVRNVLIAVGNSGEGALAGIVRDLLGDASPLVRGAAIWALARLVPETEYAERAANGLETEDDAMVREEWRLARPTRTHA

SEQ ID NO: 74963 - protein, 383 aa, unidentified
  source 1..383: note = Unknown
  REGION 1..383: note = tr|A0A4S1AQC3|A0A4S1AQC3_9BACT Epoxyqueuosine reductase OS=bacterium M00.F.Ca.ET.146.01.1.1 OX=2563899; GN = queG PE=3 SV=1
MRTSTSEKLRALIDAEARRAGFEAVAVTRPNAIPLAPARLAEFVSDGFHGSMEWIAETLQRRAEPSTLWPEVRSIVVLAMNYGPDHDPRDILEKRNRGAISVYAQNRDYHDVMKGRLKEIAGKLVARAGGDVKVFVDTAPVMEKPLAEAAGLGWQGKHTNLVSRAHGSWLFLGTIFTTAELESDKAEIDHCGSCRACLDACPTNAFPAPYRLDARRCISYLTIENKGPIPREFREKIGNRIYGCDDCLAACPWNKFASAASEAKLAARNDLREPKLSELLALDDAAFRAFFSGSPIKRIGRDRFVRNVLIAAGNSGDASLAPVVRGLLGDASPLVRGAAIWALSRLLPDREFGELAATASKTEIDTAVQEEWQAALATSAAAD

SEQ ID NO: 74964 - protein, 384 aa, unidentified
  source 1..384: note = Unknown
  REGION 1..384: note = tr|A0A4S1BLQ4|A0A4S1BLQ4_9BACT Epoxyqueuosine reductase OS=bacterium M00.F.Ca.ET.152.01.1.1 OX=2563900; GN = queG PE=3 SV=1
MRTSTSDAAKLRALIDAEARRAGFDAIAVTSPDAIPLAPARLAEFVGDGFHGSMDWIAETLLRRSEPSTLWPEVRSIVVLAMNYGPDHDPRELQARRDRGAISVYAQNRDYHEVMKGRLKEIAGKIVARAGGDVKVFVDTAPVMEKPLAEAAGLGWQGKHTNLVSRQHGSWLFLGTIFTTAELAADRAEIDHCGSCRACLAACPTDAFPAPYRLDARRCISYLTIENKGPIPHEFREKIGNRIYGCDDCLAACPWNKFASAASEAKLAARDDLREPGLADLLRLDDAAFRAFFSGSPVKRIGRDRFIRNVLIATGNSGEAGLAGIVRDLLGDPSPLVRGAAIWALARLVPETEYAERAASGLKTESDAAVRDEWARPVPARAHA

SEQ ID NO: 74965 - protein, 415 aa, unidentified
  source 1..415: note = Unknown
  REGION 1..415: note = tr|A0A4S0YQY0|A0A4S0YQY0_9BACT Epoxyqueuosine reductase OS=bacterium M00.F.Ca.ET.155.01.1.1 OX=2563901; GN = queG PE=3 SV=1
MNRSPESPMCPVSDAPASGGEAHAERQFDEAALRSLAQDIKTWGRELGFGAIGISDTDLRAAEAPLAAWLEAGCHGEMDYMAKHGMKRARPAELVAGTLRVITARIAYLPAEALNGKPPASELQEAPPGRDWRAAEHARLTDPSAAVVSIYARGRDYHKVMRNRLQQLSEKIQAQIGAFGYRVFTDSAPVLEVELAQKAGTGWRGKHTLLLQRDAGSLFFLGEIYVDVPLPTDAETSPETAPQEPGSHCGSCTRCIGACPTGAIVGPYKVDARLCISYLTIELKGSIPVEMRPLIGNRVYGCDDCQLVCPWNKFAQAAPVADFDVRHGLDRASLVELFGWSADEFDARMQGSAIRRIGYERWLRNLAVGMGNALRASRDTLSAEAREAIVDALERRADDASALVREHVQWALEAA

SEQ ID NO: 74966 - protein, 384 aa, unidentified
  source 1..384: note = Unknown
  REGION 1..384: note = tr|A0A4S0ZVF6|A0A4S0ZVF6_9BACT Epoxyqueuosine reductase OS=bacterium M00.F.Ca.ET.156.01.1.1 OX=2563902; GN = queG PE=3 SV=1
MRTSTSDAAKLRALIDAEARRAGFDAVAVTSPDAIPLAPARLAEFVADGFHGSMDWIAETIARRSEPSTLWPNVRSIVVLAMNYGPDHDPRDLLSKRDRGAISVYAQNRDYHEVMKGRLKEIAGKIVARAGGDVKVFVDTAPVMEKPLAEAAGLGWQGKHTNLVSREHGSWLFLGTIFTTAELAPDEAEIDHCGSCRACLDACPTDAFPAPYRLDARRCISYLTIENKGPIPHEFREAIGNRIYGCDDCLAACPWNKFASAASEAKLAARDDLREPALADLLALDDAAFRAFFSGSPIKRIGRDRFVRNVLIAAGNSGEGALADIVRDLLGDASPLVRGAAIWALARLVPETEYAERAANGLETEDDAMVRDEWRLARPTRTHA

SEQ ID NO: 74967 - protein, 383 aa, unidentified; identical to SEQ ID NO: 74963
  source 1..383: note = Unknown
  REGION 1..383: note = tr|A0A4S0ZEV8|A0A4S0ZEV8_9BACT Epoxyqueuosine reductase OS=bacterium M00.F.Ca.ET.156.01.1.1 OX=2563902; GN = queG PE=3 SV=1

SEQ ID NO: 74968 - protein, 383 aa, unidentified
  source 1..383: note = Unknown
  REGION 1..383: note = tr|A0A4S0WK68|A0A4S0WK68_9BACT Epoxyqueuosine reductase OS=bacterium M00.F.Ca.ET.157.01.1.1 OX=2563903; GN = queG PE=3 SV=1
MRTSTSEKLRALINAEARRAGFEAVAVTRPDTIPLAPARLAEFVSDGFHGSMEWIAETLQRRAEPSTLWPEVRSIVVLAMNYGPDHDPRDILEKRNRGAISVYAQNRDYHDVMKGRLKEIAGKLVARAGGDVKVFVDTAPVMEKPLAEAAGLGWQGKHTNLVSRAHGSWLFLGTIFTTAELESDKAEIDHCGSCRACLDACPTNAFPAPYRLDARRCISYLTIENKGPIPREFREKIGNRIYGCDDCLAACPWNKFASAASEAKLAARNDLREPKLSELLALDDAAFRAFFSGSPIKRIGRDRFVRNVLIAAGNSGDASLAPVVRGLLGDASPLVRGAAIWALSRLLPDREFGELAATASKTEIDTAVQEEWQAALATSAAAD

SEQ ID NO: 74969 - protein, 383 aa, unidentified; identical to SEQ ID NO: 74968
  source 1..383: note = Unknown
  REGION 1..383: note = tr|A0A4V3NAM5|A0A4V3NAM5_9BACT Epoxyqueuosine reductase OS=bacterium M00.F.Ca.ET.159.01.1.1 OX=2563904; GN = queG PE=3 SV=1

SEQ ID NO: 74970 - protein, 384 aa, unidentified; identical to SEQ ID NO: 74964
  source 1..384: note = Unknown
  REGION 1..384: note = tr|A0A4S2K9W3|A0A4S2K9W3_9BACT Epoxyqueuosine reductase OS=bacterium M00.F.Ca.ET.162.01.1.1 OX=2563905; GN = queG PE=3 SV=1

SEQ ID NO: 74971 - protein, 356 aa, unidentified; identical to SEQ ID NO: 74961
  source 1..356: note = Unknown
  REGION 1..356: note = tr|A0A4S0YM94|A0A4S0YM94_9BACT Epoxyqueuosine reductase OS=bacterium M00.F.Ca.ET.163.01.1.1 OX=2563906; GN = queG PE=3 SV=1

SEQ ID NO: 74972 - protein, 383 aa, unidentified; identical to SEQ ID NO: 74963
  source 1..383: note = Unknown
  REGION 1..383: note = tr|A0A4S0Y6G3|A0A4S0Y6G3_9BACT Epoxyqueuosine reductase OS=bacterium M00.F.Ca.ET.163.01.1.1 OX=2563906; GN = queG PE=3 SV=1

SEQ ID NO: 74973 - protein, 383 aa, unidentified
  source 1..383: note = Unknown
  REGION 1..383: note = tr|A0A4S1HBP6|A0A4S1HBP6_9BACT Epoxyqueuosine reductase OS=bacterium M00.F.Ca.ET.168.01.1.1 OX=2563907; GN = queG PE=3 SV=1
MDVADEKQRIRARKLTDFIRQEALSLGFDLCRVTAPDSIPLAPERLREFLGKGYHGTMAWMEETEARRAEPKTLWSDVRSIVMFGLNYGPDEDPRNLLSKPDKAAISVYARNRDYHDVIKGRLKEIATRFAARAGEDVKVFVDTAPVMEKPLAASAGLGWQGKHTNLVSRSHGSWLFLGSMFTTADLCLDEAEKDHCGSCRACLDACPTAAFPAPYQLDARRCISYLTIEHKGPIPHEFRPMMGNRIYGCDDCLAACPWNKFAASASEMKLQAREDLKEPSIDFLLTLDDAAFRSFFSGSPVKRIGRSRFIRNVLIAAGNSGNRQFVERCKALAEMDPSPEVRGMAAWALSRLMDRQEFRTYSATRAPETDPEAEMEWQLAEA

SEQ ID NO: 74974 - protein, 153 aa, unidentified
  source 1..153: note = Unknown
  REGION 1..153: note = tr|A0A4S1GNZ9|A0A4S1GNZ9_9BACT tRNA epoxyqueuosine(34) reductase QueG (Fragment) OS=bacterium M00.F.Ca.ET.168.01.1.1 OX=2563907 GN=queG PE=4 SV=1
YGPDHDPRKLQARRDRGAISGYAQNRDYHDIMKGRLKEVAGKIVAKAGGDVKVFVDTAPVMEKPLAEAAGLGWQGKHTNLVSRVHGSWLFLGTIFTTAELEPDKAEIDHCGSCRACLDVCPTDAFPAPYRLDARRCISYLTIENKGPIPVEFR

SEQ ID NO: 74975 - protein, 356 aa, unidentified; identical to SEQ ID NO: 74961
  source 1..356: note = Unknown
  REGION 1..356: note = tr|A0A4S0R5M2|A0A4S0R5M2_9BACT Epoxyqueuosine reductase OS=bacterium M00.F.Ca.ET.177.01.1.1 OX=2563908; GN = queG PE=3 SV=1

SEQ ID NO: 74976 - protein, 385 aa, unidentified
  source 1..385: note = Unknown
  REGION 1..385: note = tr|A0A4S0QB34|A0A4S0QB34_9BACT Epoxyqueuosine reductase OS=bacterium M00.F.Ca.ET.177.01.1.1 OX=2563908; GN = queG PE=3 SV=1
MRTSTSDKTRLRALIDAEARRAGFDAVAVTRPDAIPLAPARLAEFVASGFHGSMDWIAETIERRAEPSSLWPQVRSIIVLAMNYGPDRDPRDVLKKRDRGAISVYAQNRDYHDVMKGRLKEIAGKIVARAGGDVKVFVDTAPVMEKPLAEAAGLGWQGKHTNLVSRAHGSWLFLGTIFTTAELEPDRPEEDHCGSCRACLDVCPTDAFPAPYRLDARRCISYLTIENKGPIPREFREKIGNRIYGCDDCLAACPWNKFASAASEAKLAARAELREPPLSELLLLDDAAFRSFFSGSPIKRIGRDRFVRNVLIAAGNSGDASLTSIVHGLLEDGSPLVRGAAVWALSRLMPARDFATHAASALQTEGDAAVRDEWFLAQRHSAEVS

SEQ ID NO: 74977 - protein, 383 aa, unidentified; identical to SEQ ID NO: 74973
  source 1..383: note = Unknown
  REGION 1..383: note = tr|A0A4S0MWX6|A0A4S0MWX6_9BACT Epoxyqueuosine reductase OS=bacterium M00.F.Ca.ET.179.01.1.1 OX=2563909; GN = queG PE=3 SV=1

SEQ ID NO: 74978 - protein, 375 aa, unidentified
  source 1..375: note = Unknown
  REGION 1..375: note = tr|A0A4S0LL37|A0A4S0LL37_9BACT tRNA epoxyqueuosine(34) reductase QueG OS=bacterium M00.F.Ca.ET.180.01.1.1 OX=2563910 GN=queG PE=4 SV=1
MNVDQLKQDVIDYAHSIGIDSIGFTTADPFDELKQKLVDYHEKGYASGFEESDIGLRTEPKLTLPTARSIIAIAVGYPNKLKGAPRSVRGDRRGMFARASWGQDYHSIMRKRLDKLAEYLETRVPDVEIKSMVDTGVLSDRAVAERAGLGYVGRNGFVINPDLGTWTYLGEMLVSVPFPPDDPIIDSCGDCTICVDRCPTGALVGDGQLNSQKCISFLTQTKGYMQDEYRYKIGNRLYGCDTCQQVCPRNRGINTQHDDIVLEPEILKPRLVPLLQMSNKEFKNTYGHLAGAWRGKKPIQRNAILALAHFKEETAIPELQEVALNDPRPMIRATAYWAIGQIQGEQARPFIEAHYDSELEEVQHEMLKGLDMRRE

SEQ ID NO: 74979 - protein, 415 aa, unidentified; identical to SEQ ID NO: 74965
  source 1..415: note = Unknown
  REGION 1..415: note = tr|A0A4S0J1T7|A0A4S0J1T7_9BACT Epoxyqueuosine reductase OS=bacterium M00.F.Ca.ET.191.01.1.1 OX=2563911; GN = queG PE=3 SV=1

SEQ ID NO: 74980 - protein, 383 aa, unidentified; identical to SEQ ID NO: 74973
  source 1..383: note = Unknown
  REGION 1..383: note = tr|A0A4S0GPB7|A0A4S0GPB7_9BACT Epoxyqueuosine reductase OS=bacterium M00.F.Ca.ET.194.01.1.1 OX=2563912; GN = queG PE=3 SV=1

SEQ ID NO: 74981 - protein, 384 aa, unidentified; identical to SEQ ID NO: 74966
  source 1..384: note = Unknown
  REGION 1..384: note = tr|A0A4V3LPZ9|A0A4V3LPZ9_9BACT Epoxyqueuosine reductase OS=bacterium M00.F.Ca.ET.199.01.1.1 OX=2563913; GN = queG PE=3 SV=1

SEQ ID NO: 74982 - protein, 356 aa, unidentified; identical to SEQ ID NO: 74961
  source 1..356: note = Unknown
  REGION 1..356: note = tr|A0A4S0EV19|A0A4S0EV19_9BACT Epoxyqueuosine reductase OS=bacterium M00.F.Ca.ET.199.01.1.1 OX=2563913; GN = queG PE=3 SV=1

SEQ ID NO: 74983 - protein, 384 aa, unidentified; identical to SEQ ID NO: 74964
  source 1..384: note = Unknown
  REGION 1..384: note = tr|A0A4R9ZN29|A0A4R9ZN29_9BACT Epoxyqueuosine reductase OS=bacterium M00.F.Ca.ET.205.01.1.1 OX=2563914; GN = queG PE=3 SV=1

SEQ ID NO: 74984 - protein, 383 aa, unidentified; identical to SEQ ID NO: 74963
  source 1..383: note = Unknown
  REGION 1..383: note = tr|A0A4R9TYD6|A0A4R9TYD6_9BACT Epoxyqueuosine reductase OS=bacterium M00.F.Ca.ET.221.01.1.1 OX=2563915; GN = queG PE=3 SV=1

SEQ ID NO: 74985 - protein, 383 aa, unidentified; identical to SEQ ID NO: 74963
  source 1..383: note = Unknown
  REGION 1..383: note = tr|A0A4R9U5A5|A0A4R9U5A5_9BACT Epoxyqueuosine reductase OS=bacterium M00.F.Ca.ET.222.01.1.1 OX=2563916; GN = queG PE=3 SV=1

SEQ ID NO: 74986 - protein, 383 aa, unidentified; identical to SEQ ID NO: 74963
  source 1..383: note = Unknown
  REGION 1..383: note = tr|A0A4R9T5H0|A0A4R9T5H0_9BACT Epoxyqueuosine reductase OS=bacterium M00.F.Ca.ET.227.01.1.1 OX=2563917; GN = queG PE=3 SV=1

SEQ ID NO: 74987 - protein, 415 aa, unidentified; identical to SEQ ID NO: 74965
  source 1..415: note = Unknown
  REGION 1..415: note = tr|A0A4V3KDS8|A0A4V3KDS8_9BACT Epoxyqueuosine reductase OS=bacterium M00.F.Ca.ET.228.01.1.1 OX=2563918; GN = queG PE=3 SV=1

SEQ ID NO: 74988 - protein, 375 aa, unidentified; identical to SEQ ID NO: 74978
  source 1..375: note = Unknown
  REGION 1..375: note = tr|A0A4R9SD77|A0A4R9SD77_9BACT tRNA epoxyqueuosine(34) reductase QueG OS=bacterium M00.F.Ca.ET.229.01.1.1 OX=2563919 GN=queG PE=4 SV=1

SEQ ID NO: 74989 - protein, 383 aa, unidentified
  source 1..383: note = Unknown
  REGION 1..383: note = tr|A0A4R9RJJ1|A0A4R9RJJ1_9BACT Epoxyqueuosine reductase OS=bacterium M00.F.Ca.ET.230.01.1.1 OX=2563920; GN = queG PE=3 SV=1
MRTSTSEKLRALINAEARRAGFEAVAVTRPDTIPLAPARLAEFVSDGFHGSMEWIAETLQRRAEPSTLWPEVRSIVVLAMNYGPDHDPRDILEKRNRGAISVYAQNRDYHDVMKGRLKEIAGKLVARVGGDVKVFVDTAPVMEKPLAEAAGLGWQGKHTNLVSRAHGSWLFLGTIFTTAELESDKAEIDHCGSCRACLDACPTNAFPAPYRLDARRCISYLTIENKGPIPREFREKIGNRIYGCDDCLAACPWNKFASAASEAKLAARNDLREPKLSELLALDDAAFRAFFSGSPIKRIGRDRFVRNVLIAAGNSGDASLAPVVRGLLGDASPLVRGAAIWALSRLLPDREFGELAATASKTEIDTAVQEEWQAALATSAAAD

SEQ ID NO: 74990 - protein, 375 aa, unidentified
  source 1..375: note = Unknown
  REGION 1..375: note = tr|A0A4V3KF65|A0A4V3KF65_9BACT tRNA epoxyqueuosine(34) reductase QueG OS=bacterium M00.F.Ca.ET.230.01.1.1 OX=2563920 GN=queG PE=4 SV=1
MLDTTNELNALKGWIKAQAKALGFADCGFVHPANPIFVKQLDALQTWLAQGKHGDMLFFEDNHDKRANPALLVDKTQSIISVRLDYLVTPPPKRSVPDNERPNSAIIARYARGRDYHKTMRGLLKTLARLIQDKLTTDYPQYANDFVFRPFSDSAPIFERALAEQAGLGWTGKHTLLIHPQAGSFFVLGELFTSLPLAEDKKQIETISSHCGSCRACIHVCPTHAIRKTPTGHYDVDARLCISYLTIELNGKIPVELRPKIGNRIFGCDDCQLICPWNKFARLATIEDFNPRHRLDDMSLLELWAWDAQDFLTKTEGSPIRRTGYDNFMRNVAVALGNAPFSQAIIDKLQEKRPMLSENTQEHIDWATQQQLSKS

SEQ ID NO: 74991 - protein, 374 aa, unidentified
  source 1..374: note = Unknown
  REGION 1..374: note = tr|A0A5J4E0Y2|A0A5J4E0Y2_9BACT Epoxyqueuosine reductase OS=bacterium MnTg02 OX=2080452 GN=queG PE=4 SV=1
MPDDLKARVKSMALEVGFDEVRVTTTRSIPHAGERLMHFLGEGRHGDMEWMESTAARRASPHLLWPEAKSIIVLGMNYGPDKDPLDILKDKQAGAVSVYAQGKDYHDIIKKKLKRVAGWLHRSSGMAVKVFVDTAPLMEKPLGEAAGLGWQGKHTNLVSRKFGSWLFLGSIMTTAELQPDQPEKDHCGSCRLCLDICPTDAFPAPYELDARRCISYLTIEHKGHIPEALRAPMGNRIFGCDDCLAVCPWNKYAQTAREVRLKAREGAGDISLAALLKLDDTNFRARFAGSPVKRTGRDRFIRNTLIAAGNSGDASLLPDIERLLNDASPLVRAMAVWALKQLTSADEFSALSSRFAGDESDTDVRAEWTRAARL

SEQ ID NO: 74992 - protein, 283 aa, unidentified
  source 1..283: note = Unknown
  REGION 1..283: note = tr|A0A5J4ECC1|A0A5J4ECC1_9BACT Epoxyqueuosine reductase OS=bacterium MnTg04 OX=2080454 GN=queG PE=4 SV=1
MDYLPDAADAWQTLAQGNHAYVSRYALGRDYHKLLRPRLAKLAERIRQSIGELGYRVFVDSAPVLEKALARNSGLGWIGKHTNLINREAGSWFFLGEIFVDLPLPPDQPVANHCGSCRACLDVCPTQAIIAPYQVDARRCISYLTIENRGAIPIEFRQAMGNRIYGCDDCQLVCPWNKFAKLSCERDFQPRHELDRKKLVELFSWSEEEFLRKTQGSAIRRAGYAGWLRNLAVALGNADPSNEVIATLNSRKDHPDEMVREHIEWALEKQISGKTLHKSSGNM

SEQ ID NO: 74993 - protein, 306 aa, unidentified
  source 1..306: note = Unknown
  REGION 1..306: note = tr|A0A132H7E8|A0A132H7E8_9BACT Iron-sulfur cluster binding protein OS=bacterium P201 OX=1768112 GN=AUK64_125; PE = 4 SV=1
MDSGWIVAEAERMGFDACGIAQATALEEESAHVEQWLESDCEGEMGYLTRNKEKRYDPRLLVEGTKSIVTVLYNYYPKKRIGDSDKFKIAKYAYGADYHDVLKRKMHQLLEGIEAQTGKLEGTRLFVDSAPVLDRAWAVRCGLGFIGKNTTLIHPKKGSFFFIGHLFLPIELEGTGKPLTNCCGRCTKCLDACPSGALEAPFHIDARKCISYLTIEYKGSLAGIDPKTFNGWMYGCDICQDVCPYNRFALPNREPDFQPSERLIAMHDEDWKSLSKEDFDALFKHSAVQRAGYEGLKRNIDFLSYL

SEQ ID NO: 74994 - protein, 416 aa, unidentified
  source 1..416: note = Unknown
  REGION 1..416: note = tr|A0A4Q2RFF3|A0A4Q2RFF3_9BACT Epoxyqueuosine reductase OS=bacterium RmlP001 OX=2316527 GN=queG PE=3 SV=1
MGGGRDGEDLVRAGEVAPLLPHPAGRPRAGHHPEPGLRGPGFLTDAEGAKRRIAARAAALGFDACRVASPDAVPEAAARLRAWLAAGHHGTMDWMAETAERRASPRALWGDVRSVVMLGLNYGPETDPRAALARRDAGAVSVYARHRDYHDVVKGKLKELAGFMTRLEAGTDVKVFVDTAPVMEKPLAEAAGLGWAGKHTNLVSRDFGSWLFLGSVFTTLALPPDAPGGDACGSCRACLDACPTGAFPAPRQLDARRCISYLTIEHKGPVAPELRPLMGNRIYGCDDCLAACPWNKFAQAGRDAKLKARDDLAAPSLDALSRLDDAGFRALFSGSPIKRIGVDRFLRNVLIAIGNSGDAGLVPRALALLRHPSPLVRGMAVWAGRRLLGIEALLAASAGACAGETDPHVLAEWECP

SEQ ID NO: 74995 - protein, 387 aa, unidentified
  source 1..387: note = Unknown
  REGION 1..387: note = tr|A0A4Q2UAP2|A0A4Q2UAP2_9BACT Epoxyqueuosine reductase OS=bacterium RmlP026 OX=2316528 GN=queG PE=3 SV=1
MAAARGPPDVDADIKARIAARAAALGFDGCRVASPDAVPEAAARLRAWLAAGRHGTMDWMSDTAERRGSPAALWPEVRSVIMLGLNYGPEDDPRAVLDRRHAGAVSVYARHRDYHDVVKGKLKDLAGFVARQGGVDARGAATEVKVFVDTAPVMEKPLAEAAGLGWAGKHTNLVSRDFGSWLFLGSIFTTLPLAPDPPGGDACGSCRACLDACPTGAFPAPRQLDARRCISYLTIEHKGAIDPELRPLMGNRIYGCDDCLAACPWNKFAQAGRDAKLRARDDLAAPSLDALSRLDDAGFRALFSGSPIKRIGVDRFLRNVAIAIGNSGDAALAPRAVALLAHPSPLVRAMAVWAGRRLLGTEGLALASPSCRAAEADADVLAEWERP

SEQ ID NO: 74996 - protein, 393 aa, unidentified
  source 1..393: note = Unknown
  REGION 1..393: note = tr|A0A177PVV0|A0A177PVV0_9BACT Uncharacterized protein OS=bacterium SCGC AG-212-C10 OX=1799370; GN = AYO38_07680 PE=4 SV=1
METVTAKDRVLQMAHEEGFALVRIAGADVLEQSRAAALEREERGLLDGLAWMTDEWLTRATDPVLFLDGARSIVLCALPYARGDGDPGSDGVTRGRVAAYAGGRDYHRVFEKKLRRIAARIRDEFTAGARATVDYGPLLERPLAQVAGIGWQGKSTMLLAPGFGPWVLLGAVATTVELEPDAPLRKSCGSCVRCVVSCPTGALGSDGSVLDARLCISYHTIENRGVIPVELRPKFGAWIFGCDACLESCPVGAGSTASHPDFVPRSPGDLRPDLNELLLLDESAFLERFRGRPLMRAKRDGLVRNACIAMGNTGAVHDLPALLAALHDRSPLVRGHAAWAAAHLCRRLGDASSAAGAADVLRARLDVESEAWVREELAAAIISCDAPLPGGTS

SEQ ID NO: 74997 - protein, 310 aa, unidentified
  source 1..310: note = Unknown
  REGION 1..310: note = tr|A0A0S8HWM3|A0A0S8HWM3_9BACT Uncharacterized protein OS=bacterium SM23_31 OX=1703762 GN=AMJ80_10490; PE = 4 SV=1
MQDLIKITQNIKSKALALGFDKVGTARAVTLDGTFLSKWLSRNYHGTMSWMSRTAGIRLNPKKYLPGARSVIAVAVNYYTEDPPRPPGSAQVSRYALGRDYHLVLGKMLESLLEYIHELLPDVKGKIAVDDAPVMDKIWAYKAGIGWIGKHSNLITRELGSYVFLGEILLTAGLQYDEPIQDYCGSCTRCIDACPTGAILDDKVLDSNKCISYRTIEYRGDFTEEWEGKNQDWIFGCDVCQEVCPWNIVAAPTNIPDFLLADGKRFPLLSNILQLTPEEFQMNYKDSPIKRSKWEGLLRNAEYVRKGYLG

SEQ ID NO: 74998 - protein, 314 aa, unidentified
  source 1..314: note = Unknown
  REGION 1..314: note = tr|A0A424SHC8|A0A424SHC8_9BACT tRNA epoxyqueuosine(34) reductase QueG OS=bacterium TMED144; OX = 1986778 GN=queG PE=4 SV=1
  VARIANT 65: note = Xaa can be any naturally occurring amino acid
  VARIANT 162: note = Xaa can be any naturally occurring amino acid
MKSELSKFIKEEAFKIGFNKIGIAKPEVIKEDAKNLDLWLDNGNHAEMEWIKNRRDERIDIKKYXPEAKSIISLGINYFAGKNQDQIKSGFKFSNYAWGDDYHLVIKKKLRLLLHQIKNYNTIIDGIACVDTSPVMEKYWAQRSGIGWQGKHTNLITRDYGXWIFLGELILNIELEYDASFDDDLCGTCTACIDSCPTSALTDYQLDSRKCISYWSIEHRGDFKEKHNIDLHDWIYGCDICQEVCPWNITFAQITDKKSFHPRSEIFDWTEKEWKQMDQKKFSSLFKNSSVKRAKFSGLSRNINKNLINKGEAK

SEQ ID NO: 74999 - protein, 392 aa, unidentified
  source 1..392: note = Unknown
  REGION 1..392: note = tr|A0A1Z8ML46|A0A1Z8ML46_9BACT Epoxyqueuosine reductase OS=bacterium TMED15 OX=1986651 GN=queG PE=3 SV=1
MTKINQLELKKTQLNQWIRKQAEKMGFDLVGIVPADPPKLIDRYREWLNLGYAGEMEYLHRHFPLKQDPKNLLPEVKSVISLGLNYYTVEPDAVRKLDPTRGQISRYAWGEDYHDVIRKRLKRLVKKIEKRLKRETKSRVFVDSGPILERDYAQTAGLGWIGKNTNLINWQKGSWYFLAEILISLDLGVDVLPARGSCGSCTLCIEACPTDAIVAPNQVDARSCISYLTVELKEAIPMDLRPGLGNLIFGCDICQEVCPWNTKSQPTSVKEFQPRKGNLLPKLADLIGITQNEFSQKFKGSPIKRTKRRGLLRNVVVAMGNSKDPSMVEPLQSAIWDVEPLVRQHAAWALGQIATPLAETILKKKLQNEENIEVIIEIESALQIIESENIKD

SEQ ID NO: 75000 - protein, 326 aa, unidentified
  source 1..326: note = Unknown
  REGION 1..326: note = tr|A0A1Z9ISA6|A0A1Z9ISA6_9BACT tRNA epoxyqueuosine(34) reductase QueG OS=bacterium TMED161; OX = 1986652 GN=CBD21_01490 PE=4 SV=1
MRLKNYILSYKLDISYFTKLIKDECLSVGFSKVGIAEVKYYSEDKSHLENWLNKNRNASMHWMKNNQEKRTNISNYYSESKSVISVALNYFNGSPRDNHPPPYISNYASGVDYHIIIKSKLKKVLEKINNLDSSIHGFYCADTSPIMEKAWAQRAGLGWIGKHTNLITKEFGSWVFLGELIINKTLEYDKEFSQDLCGNCNLCIQTCPTDALVDSFQLDANKCISYVTIEKRGDFEEENKIDLNEWIFGCDICQDVCPWNIKFSSNTTEEDFKDRFDLKDKDYNYWEKLDEEEFRKIFKNSPVKRTKFSGLKRNVLLAKEQAQNDL

SEQ ID NO: 75001 - protein, 322 aa, unidentified
  source 1..322: note = Unknown
  REGION 1..322: note = tr|A0A1Z9KRA5|A0A1Z9KRA5_9BACT tRNA epoxyqueuosine(34) reductase QueG OS=bacterium TMED181; OX = 1986654 GN=CBD41_03950 PE=4 SV=1
MEAPMIPTPNNRDNSELEDLLQEARNLGFYSLGVSRAGVSPHADRFMNWIDNGMHAGMEWMKKNTERRLDPTLTLEGAQSIVMVCLPYSDQPELNDSAPRIARYARGRDYHKVMAPLLKKLSHYISDSGKWKTWYCVDSSPILERDWAEISGLGWIGKNGLLIDREIGSWFFLGGIVTDRTYPTTTPVTDHCGSCTRCIDACPTSAIVKPRSIDARKCISYWTIEHRGELPKEASLHGWLFGCDICQEVCPWNSRPARISPEIHEDLKPRSAPESAEKILDLSHEQYLEFFAGTPVTRTGLQGLQRNAQQLIREKGDQEKTT

SEQ ID NO: 75002 - protein, 303 aa, unidentified
  source 1..303: note = Unknown
  REGION 1..303: note = tr|A0A1Z9L4R8|A0A1Z9L4R8_9BACT Epoxyqueuosine reductase OS=bacterium TMED190 OX=1986655 GN=queG PE=3 SV=1
MLKLTKNIKNKAYELGFQKIGIAKPDFYSQDSERLNKWLTLGYHGKMDWMKKRVNERENIYTYFPEAKSIISLGLNYFHGKSTNEFKISNYAWGKDYHDIIKKKLIKLSDFIKLNKKNVKALMCVDTSPIMEKSWAQKAGIGWIGKHTNLITRDYGSWIFLAEIILDIDLIFDPIFEDDLCGSCTACIDYCPTNAIVDEYVLDSRKCISYLTIEHRGDFPVEHQGNLDSWIYGCDICQEVCPWNEKFSQKSIEDDFKPNPEILKKKKKDWKNLTLDEYKKIFKGSPVKRTKYSGLKRNISKNL

SEQ ID NO: 75003 - protein, 312 aa, unidentified
  source 1..312: note = Unknown
  REGION 1..312: note = tr|A0A1Z9NIH5|A0A1Z9NIH5_9BACT tRNA epoxyqueuosine(34) reductase QueG OS=bacterium TMED217; OX = 1986780 GN=CBD77_02865 PE=4 SV=1
MSISAEYIKEKAYELGFHKVGIAKASQTKKEKKNLDDWLSQKKHGEMMWMEKRKSERGNIFNYFPEARTVVSLGYNYYLGKDQSHLESSYKFSNYAWGEDYHDVIKTKLFSLLKTINKKSPEAKGLVCVDTAPIMEKVWAQRAGLGWQGKHTNLISTDYGSWLFLGEIILDIDLEIDEPFSKDLCGTCTACIDACPTQALDEYVLDSSKCISYLTIEHRGDFLEDKNDLNDWIYGCDICQEVCPWNISFSQISDDAYFEPREKIENNTDQEWENLSHLEFNAIFKKSSVKRTKFSGLKRNIDNVKARRSSKR

SEQ ID NO: 75004 - protein, 361 aa, unidentified
  source 1..361: note = Unknown
  REGION 1..361: note = tr|A0A3R7VAH9|A0A3R7VAH9_9BACT 4Fe-4S ferredoxin-type domain-containing protein OS=bacterium TMED221 OX=1986656 GN=CBD81_003075 PE=4 SV=1
  VARIANT 324: note = Xaa can be any naturally occurring amino acid
  VARIANT 348: note = Xaa can be any naturally occurring amino acid
  VARIANT 354: note = Xaa can be any naturally occurring amino acid
MKEKNLFNYLESHNIDVPENINLAVISLPSLIDKSVLIQEAKSNNRHANMKFTFSNPKYSGLGDKFGWAKSCIIISYNYFPRSSNNHSFRAGDGAIALFALEDHYKPLNKFINELSNLFNNEGIQSQQFIDSPQHYDRMFFNSSGLGWQGKSTMMLSPGIGPWQLIGNLYTEEQFLGTEKKSFSCGSCNMCQISCPTGALDEEYRLDSNKCLSYWLQSPDIIPEDMRINIGNRFYGCDECLISCPPGQTKEFDISETNTVDLKKILTMSNEDLVDKYSWFYIPKRNGDFLKRNALIALANNPDEDALKIIYTLLKSDSEIIRFXAIWAIWKISQFKDIENYYDVDLEXSDLVKXEYLRLIK

SEQ ID NO: 75005 - protein, 305 aa, unidentified
  source 1..305: note = Unknown
  REGION 1..305: note = tr|A0A1Z9RW84|A0A1Z9RW84_9BACT tRNA epoxyqueuosine(34) reductase QueG OS=bacterium TMED250; OX = 1986657 GN=CBE10_01995 PE=4 SV=1
MNDFTAEIKQKANELGFEKIGIAEVGPINKEKSNLEDWILRGNHASMDWIDKRKSERGNIYNYFPEAVSIISVGMNYFTGYSQKDLSSKLKFSNYAWGEDYHSVLKTRLRILLEWIEFASVEIKGIVCVDTSPVMEKVWAEKAGIGWQGKHTNLISRDYGSWLFLGEIILNISLKYDKPFTEDLCGSCTACIDECPPGALTDYEIDSNKCISYQTIEYRGEFDESSVDLDSWIYGCDICQEVCPWNKKFSKITQDKSFYPRSKIIENTITDWEKLNEEDFRKLFKGSSVKRTKHTGLKRNINKNL

SEQ ID NO: 75006 - protein, 304 aa, unidentified
  source 1..304: note = Unknown
  REGION 1..304: note = tr|A0A424SRH5|A0A424SRH5_9BACT tRNA epoxyqueuosine(34) reductase QueG OS=bacterium TMED46; OX = 1986782 GN=queG PE=4 SV=1
  VARIANT 116: note = Xaa can be any naturally occurring amino acid
  VARIANT 119: note = Xaa can be any naturally occurring amino acid
  VARIANT 182: note = Xaa can be any naturally occurring amino acid
  VARIANT 201: note = Xaa can be any naturally occurring amino acid
  VARIANT 279: note = Xaa can be any naturally occurring amino acid
MKISSKSIKKKAEELGFQKVGIARAEKTPKEKSDLDSWLMQGNHATMDWIAKRKDERGNIHTYFPEARSVIAVGMNYYTGNEQDDLKSDYKFSNYAWGDDYHIVMKKRLFQLLNWXTEXNSKVKGLVCVDTSPVMDKVWAQRAGIGWLGKHTNLISRDHGSWLFLGELILDLKLEYDRPFEXDLCGTCMACIESCPTQALXEYKIDARKCISYLTIEHRGDLPEGKSDLHGWIYGCDVCQEVCPWNEKFSIKTGLDEFKPREEIANFKRDDWDNLSEEXFKKIFKGSAVKRTKYVGLKRNIGQN

SEQ ID NO: 75007 - protein, 306 aa, unidentified
  source 1..306: note = Unknown
  REGION 1..306: note = tr|A0A1Z8KKW3|A0A1Z8KKW3_9BACT tRNA epoxyqueuosine(34) reductase QueG OS=bacterium TMED6; OX = 1986783 GN=CBB66_06835 PE=4 SV=1
  VARIANT 26: note = Xaa can be any naturally occurring amino acid
  VARIANT 28: note = Xaa can be any naturally occurring amino acid
  VARIANT 42: note = Xaa can be any naturally occurring amino acid
  VARIANT 50..51: note = Xaa can be any naturally occurring amino acid
  VARIANT 58: note = Xaa can be any naturally occurring amino acid
  VARIANT 62: note = Xaa can be any naturally occurring amino acid
  VARIANT 74: note = Xaa can be any naturally occurring amino acid
  VARIANT 87: note = Xaa can be any naturally occurring amino acid
  VARIANT 99: note = Xaa can be any naturally occurring amino acid
  VARIANT 117: note = Xaa can be any naturally occurring amino acid
  VARIANT 223: note = Xaa can be any naturally occurring amino acid
MNLSHNIKQKAFELGFSKIGIAKAQXYXSDKINLNNWIDSGXHGSMDWIXXRKEERSXIFKXYPKAKSVISVAXNYFTGNSKDYFSXHKISNYAWGDDXHTLLKSKLYILLDYIKKXDNNLNGICCVDTSPISEKVWAQRAGLGWIGKHTNLITKDFGTWVFLGEIVTDFELDYDKVFSTNLCGSCTACIEACPTDAIIGDYKLDANKCISYQTIENKLDIPXDFKGKMDDWIYGCDICQEVCPWNHRFSVLTNEFSFKPRDFLKSNDANILYNLNQEEFSKFFKDSAMKRTKLAGLKRNIDFLKN

SEQ ID NO: 75008 - protein, 309 aa, unidentified
  source 1..309: note = Unknown
  REGION 1..309: note = tr|A0A1Z8Z1B6|A0A1Z8Z1B6_9BACT tRNA epoxyqueuosine(34) reductase QueG OS=bacterium TMED80; OX = 1986784 GN=CBC40_07220 PE=4 SV=1
  VARIANT 163: note = Xaa can be any naturally occurring amino acid
  VARIANT 167: note = Xaa can be any naturally occurring amino acid
  VARIANT 170: note = Xaa can be any naturally occurring amino acid
  VARIANT 172..173: note = Xaa can be any naturally occurring amino acid
  VARIANT 178..179: note = Xaa can be any naturally occurring amino acid
  VARIANT 201: note = Xaa can be any naturally occurring amino acid
  VARIANT 210: note = Xaa can be any naturally occurring amino acid
  VARIANT 218: note = Xaa can be any naturally occurring amino acid
  VARIANT 227: note = Xaa can be any naturally occurring amino acid
MIINSEDIKKKAIDLGFHKVGIAKASQTKKEEEQLNQWLNNNKHATMEWIEKRKSERGNIFNYFSEAKSVISLGMNYYVGKDQSDLDSNFKFSNYAWGDDYHSIIKSKLFELLKFIKEPNPGVKGLVCVDTAPVMEKVWAQRAGLGWQGKHTNLISTDYGSWXFLGXIIXDXXLEYDXXFEQDLCGSCTACIDACPTKALXEYELDANKXISYLTIEXRGDFLDGYXDLDGWIYGCDICQEVCPWNISFAEISKEEYFRPRAEILNKTDQNWIDIDQLDFSKTFKKSSAKRTKLSGLKRNIDYVNKAKK

SEQ ID NO: 75009 - protein, 402 aa, unidentified
  source 1..402: note = Unknown
  REGION 1..402: note = tr|A0A1Z9BV94|A0A1Z9BV94_9BACT tRNA epoxyqueuosine(34) reductase QueG OS=bacterium TMED88; OX = 1986661 GN=CBC48_01940 PE=4 SV=1
MAGSRHIRRGVFHSARNRPCSASMVARFGAPSGFMSDQAQSHSSPTLTDRIESLALALGFDRVGRAAASSGPDTARFADWLHRGYAGEMEYLERRSAERLDPSVLMPGVRTILVVGLFYEPREGSPEPDNANSRPRGRVAAYAGGEDYHTVLIDRLRTLAEGLSALAGRRVAARCYVDTGPVQERVFAARAGIGWVGKNTLVIDPDLGSKMLLGVILTDLDLEPSVPLNDHCGTCRACLDACPSEAFPEPYVLDATRCIAYTTIEKRGEIPLEQRSDQGDWVFGCDVCQDVCPWNRKRRVGDLPDPLVLRERLGPRPEWAAPALAELLALDEETWSERVRGTAVKRARYQGLIRNALVAAGNSRDPSLRSAVVRHARGSDSLLAEHARWALGQIEGAQGSSN

SEQ ID NO: 75010 - protein, 318 aa, unidentified
  source 1..318: note = Unknown
  REGION 1..318: note = tr|A0A0A1PR26|A0A0A1PR26_9BACT Epoxyqueuosine reductase OS=bacterium YEK0313 OX=1522316 GN=queG PE=4 SV=1
MAWMAETAERRADPAVLWPDARSVIMLGLNYGPDENPLDGLGERTAGLLSVYARGDDYHDLVKSRLKAIGRWLAEATGCELKVFVDTAPVMEKPLAAAAGLGWQGKHTNLVSRGFGSWLFLGSIMTTLAIPPDRPERDHCGSCRACLDACPTAAFPAPYQLDARRCISYLTIEHKGPIPRAFRKAMGNRIYGCDDCLAVCPWNKFAETGREMKLAAREALRRPRLAELARLDDAAFRALFTRSPVKRIGRDRFVRNVLIAIGNSAEPALADTAQALVADASPLVRGAAIWALRQLAPARLAGIDASLEPDPTVREEWT

SEQ ID NO: 75011 - protein, 314 aa, unidentified
  source 1..314: note = Bacteroidales bacterium
  REGION 1..314: note = tr|A0A356YUT8|A0A356YUT8_9BACT tRNA epoxyqueuosine(34) reductase QueG OS=Bacteroidales bacterium OX=2030927 GN=queG PE=4 SV=1
MTASADIRLSALIRDKATELGFDLCGIARVRKLSECKEVLTKWCAEGLNDKMTYLIRDPDKRADPGILFPGAKSMIVTGLNYYTDKRQKHLYVPLISIYALGKDYHDLITARLEKLLTYVKSFVPDAEGRAFCDDAPVLEKPWAVEAGLGWRGKHSIVINDTIGSFFFIGVLILNIELDYDKHVEGDKCGNCRACIDSCPTGAINIDRTIDARRCIANLTIGNRGPVPEEIIPYMGRMVYSCDICQDVCPWNKNAKPHNVAEFMIVDELADMTKEEWLSLDNAKFDTLFKGTPVERVKFDRFKRNIEAISKNLK

SEQ ID NO: 75012 - protein, 330 aa, unidentified
  source 1..330: note = Bacteroidales bacterium
  REGION 1..330: note = tr|A0A1G7Q177|A0A1G7Q177_9BACT Epoxyqueuosine reductase OS=Bacteroidales bacterium KHT7 OX=1855373; GN = SAMN05216518_11579 PE=4 SV=1
MDCKQKISAFIKAEAKRLGFCACGLAKAQPVSIEAQRMLRESLDKDYCADMDYLRNYFEIRTNPQLLVDGAQTVVSVALNYYPEKKLDDSQLQFAYYAYGKDYHDVMKEKLRHLLESVAKYLDEQTDDIRAELLGDASEFSGRAFCDTAPILEKYWAQQSGIGWIGKHTQVVIPFFGSYVFLGELVINLECSADEPLKERCGKCQRCLNACPTKALKENRMLDARKCLSYLTIENREDIPEEASEAMQSCVYGCDRCIKACPWNRFASPTREEGLMPNEAFMNMTPADWENLDVETYRKIFKGSAVKRAKFEGLQRNIKCVLDNLKRKKQ

SEQ ID NO: 75013 - protein, 307 aa, Bacteroides caccae
  REGION 1..307: note = tr|A0A174MJ11|A0A174MJ11_9BACE (Fe-S)-binding protein OS=Bacteroides caccae OX=47678 GN=queG PE=4 SV=1
MEALLPTEIIKAEALRLGFSACGAAPAEAVSEKVADTFRQWLADGCQGEMAYMQNYEDKRLDPRLLVEGARTVISVALNYYPETKLPENEYQIAWYAYGKDYHDVMKAKLKTLLEFIQNNYSAGGRAFCDTAPVLERYWAWLAGLGWIGKNTQLIIPQAGSCFFLGELIIDLPADRYDSPQENRCGSCTRCLNACPTKALEAPFRLNSAKCLSYLTIEYRGELPLDTGQKMGKMIYGCDECQRACPWNRFATPSRTIEFSPSASLLTMRKEDWHRLSEEQYRTLFKGSAVKRAKYQGLMRNIRSAKK

SEQ ID NO: 75014 - protein, 307 aa, Bacteroides caccae
  REGION 1..307: note = tr|I8UUE3|I8UUE3_9BACE 4Fe-4S ferredoxin-type domain-containing protein OS=Bacteroides caccae CL03T12C61; OX = 997873 GN=HMPREF1061_03883 PE=4 SV=1
MEALLPTEIIKAEALRLGFSACGAAPAEAVSEKVADTFRQWLADGCQGEMAYMQNYEDKRLDPRLLVEGARTVISVALNYYPETKLPENEYQIAWYAYGKDYHDVMKAKLKTLLEFIQNNYSAGGRAFCDTAPVLERYWAWRAGLGWIGKNTQLIIPQAGSCFFLGELIIDFPADRYDSPQENRCGSCTRCLNACPTKALEAPFRLNSAKCLSYLTIEYRGELPPDTGQKMGKMIYGCDECQRACPWNRFATPSRTIEFSPSASLLTMRKEDWHRLSEEQYRTLFKGSAVKRAKYQGLMRNIRSAKK

SEQ ID NO: 75015 - protein, 317 aa, unidentified
  source 1..317: note = [Bacteroides] coagulans
  REGION 1..317: note = tr|A0A2U1E3N3|A0A2U1E3N3_9FIRM Epoxyqueuosine reductase OS=[Bacteroides] coagulans OX=46507; GN = C7381_10470 PE=4 SV=1
MDNKFLKLKENLNLLGFEEFGIIPTACYIQPHFIPSMVDYYNENQIKNNFDMSAFNSIIVLLMNYRPENLKSGRMSIGSNEKDYHIVFKEKISELGNMMDLGNFLGYSDTGPLFDRTLALKAGLGFIGKNGCLINPRIGSFFFIGYVLTDLKFEKFIPYKDSEFKNTLCEHCTRCIEACPTSAIGEGEFRPMRCLSHLTQTKKPDPDLEGKIKTFYGCDICQKVCPYNSDKASGMIEFLSGDDMSYEDLFTLSNKEFKKIYGEKAFFWRGRSIIKRNAIIRAHNLKDESIVKYLEEELKKDNITKEYILKYFLDFIK

SEQ ID NO: 75016 - protein, 318 aa, Bacteroides coprosuis
  REGION 1..318: note = tr|F3ZQH2|F3ZQH2_9BACE Uncharacterized protein; OS = Bacteroides coprosuis DSM 18011 OX=679937 GN=Bcop_0331; PE = 4 SV=1
MSLNYSKKELTHKIKSIAIELGFSACGVAKAEKVDSKITTYFQNWIEKGYHADMDYLANYYDKRMDPQILVPGTKSIISLALNYYPEKFIPEKEYQIAWYAYGKDYHFLIKDKLTQLFKAIHDITPIEGRVFCDTAPVLERYWAWKAGLGWIGKNTQLIIPHAGSSFFLGELFINLDLEYDTPQPDRCGNCNKCLVACPTNALQAPRIMNANKCISYQTIENRGEIDSHIIPLLENKIYGCDDCIKVCPWTRFSQPTTIKEFAISNELLNMTKEKWSTLSVQEYQELFRKSAVKRAKFSGIQRNINAVHQRDPFLSDK

SEQ ID NO: 75017 - protein, 247 aa, Bacteroides faecichinchillae
  REGION 1..247: note = tr|A0A4S4HE75|A0A4S4HE75_9BACE tRNA epoxyqueuosine(34) reductase QueG (Fragment); OS = Bacteroides faecichinchillae OX=871325 GN=queG PE=4 SV=1
MNKLLSSEQIKAEATRLGFSACGLAPAESVNESAATFFRQWLANGCQAEMAYMQNYEDKRLDPRLLVEGARTVISVALNYYPETKLPIEEYQIAWYAYGKDYHDVMKKKLNALLEFIILSSTSSETIVPATSPLTVSGRIFCDTAPILERYWAWRAGLGWIGKNTQLIIPHAGSCFFLGEVIINIVADNYDIPQKSRCGSCTRCMDACPTKALEAPFRLNSERCLSYLTIEYHGDLSPNIGQKMDKK

SEQ ID NO: 75018 - protein, 96 aa, Bacteroides faecichinchillae
  REGION 1..96: note = tr|A0A4S4HDY2|A0A4S4HDY2_9BACE tRNA epoxyqueuosine(34) reductase QueG (Fragment); OS = Bacteroides faecichinchillae OX=871325 GN=E5981_17955; PE = 4 SV=1
IEYHGDLSPNIGQKMDKKIYGCDECQHICPWNRYSTPCKTEEFHPSPSLLQMKKSDWQSLTEEQYKTLFKGSAVKRAKYSGLMRNIRIVKESPESK

SEQ ID NO: 75019 - protein, 326 aa, Bacteroides faecis
  REGION 1..326: note = tr|A0A3E5GCA3|A0A3E5GCA3_9BACE Epoxyqueuosine reductase OS=Bacteroides faecis OX=674529 GN=queG PE=3 SV=1
MKKLLSSDRIKAEALRLGFSACGLAPAEAVDETVATAFRQWLADGCQAEMAYMQNYEDKRLDPRLLVEGARTVISVALNYYPATKIPEGEYQIAWYAYGKDYHDVMKVKLKELFEFIQKEVSSSEAEITTPPVQGRIFCDTAPILERYWAWRSGLGWIGKNTQLIIPRSGSFFFLGEIIIDLEADSYDSPQRNQCGSCTRCLDACPTKALEGPFRLNSERCLSYLTIEYRGDLKPETGKKMGNKIYGCDECLKACPWNRFARPCRTAEFQPSPSLLSMRKDDWHSLSEEQYKNVFKGSAVKRAKYNGLMRNIQAIHSKSTRNNSTN

SEQ ID NO: 75020 - protein, 321 aa, Bacteroides faecis
  REGION 1..321: note = tr|A0A1H2YM50|A0A1H2YM50_9BACE Epoxyqueuosine reductase OS=Bacteroides faecis MAJ27 OX=1077285 GN=queG; PE = 3 SV=1
MKKLLSSDRIKAEALRLGFSACGLAPAEAVDETVATAFRQWLADGCQAEMAYMQNYEDKRLDPRLLVEGARTVISVALNYYPATKIPEGEYQIAWYAYGKDYHDVMKVKLKELFEFIQKEVSSSEAEITTPPVQGRIFCDTAPILERYWAWRSGLGWIGKNTQLIIPRSGSFFFLGEIIIDLEADSYDSPQRNQCGSCTRCLDACPTKALEGPFRLNSERCLSYLTIEYRGDLKPETGKKMGNKIYGCDECLKACPWNRFARPCRTVEFQPSPSLLSMRKDDWHSLSEEQYKNVFKGSAVKRAKYNGLIRNIQAIHSSFSY

SEQ ID NO: 75021 - protein, 309 aa, Bacteroides fragilis
  REGION 1..309: note = tr|A0A380YSV7|A0A380YSV7_BACFG Putative iron-sulfur cluster-binding protein OS=Bacteroides fragilis OX=817; GN = queG PE=4 SV=1
METKINSKALKAEALRLGFSACGIAPAEPIDQAHQNALKMWLDADRQAGMTYMANHFDKRCDPALLVEGTRCVVSVALNYYPATRIPDEEYQFAWYAYGKDYHDLMREKLATLFRFIQESDVPELNGRMFCDTAPVPERYWAWRAGLGWIGKNTQLIIPHAGSTFFLGELFLNTEADTYDRPQPNRCGRCNRCLQACPTKALETPYSLNAHRCLSYLTIENKSEIPDSIAPFMGNRVYGCDECQKACPWNRFATPCRTPELQPSPEFMNMKKEDWKQLSEEKYRALFKGSAVKRAKYSGLIRNIRQMED

SEQ ID NO: 75022 - protein, 309 aa, Bacteroides fragilis
  REGION 1..309: note = tr|A0A015XGA6|A0A015XGA6_BACFG Epoxyqueuosine reductase OS=Bacteroides fragilis str. S36L11 OX=1339327; GN = queG PE=4 SV=1
METKINSKALKAEALRLGFSACGIAPAEPIDQAHQNALKMWLDADRQAGMTYMANHFDKRCDPALLVEGTRCVVSVALNYYPATRIPDEEYQFAWYAYGKDYHDLMREKLAALFRFIQESDVPELNGRMFCDTAPVPERYWAWRAGLGWIGKNTQLIIPHAGSTFFLGELFLNAEADTYDRPQPNRCGRCNRCLQACPTKALETPYNLNAHRCLSYLTIENKSEIPDSIAPFMGNRVYGCDECQKACPWNRFATPCRTPELQPSPEFMNMKKEDWKQLSEEKYRALFKGSAVKRAKYSGLIRNIRQMED

SEQ ID NO: 75023 - protein, 330 aa, Bacteroides graminisolvens
  REGION 1..330: note = tr|A0A3D2SG37|A0A3D2SG37_9BACE Epoxyqueuosine reductase OS=Bacteroides graminisolvens OX=477666 GN=queG; PE = 3 SV=1
MTHDNFNQKQSFSVEAKISYSNMIKAEALRLGFSACGIAPAEEINAENKMFLKEWLVNGYQGSMDYMANNLEKRSDPNLLVEGTKSIVSVALNYYPQQLLDDSQYQFAWYAYGKDYHDIMRKKMNELMEYINREIAIVNGRVFCDTAPVLDRYWAWRAGLGWIGKNTQLIIPKAGSSFFLGELFIDIELAYDTPLKDRCGNCNRCQQACPTQAFEAPHKLDARKCLSYVTIESREDIPIELRKKMGNRIYGCDECQRVCPWTRFAIPCQTTELQPAPEFMQMTREEWHNLSEETYRKLFKGSAVKRAKYSGLVRNIEAAGYPNNSGANPD

SEQ ID NO: 75024 - protein, 330 aa, Bacteroides graminisolvens
  REGION 1..330: note = tr|A0A069D6V2|A0A069D6V2_9BACE Epoxyqueuosine reductase OS=Bacteroides graminisolvens DSM 19988 = JCM 15093 OX=1121097 GN=queG PE=3 SV=1
MTHNNFNQKQSFSVEAKISYSNMIKAEALRLGFSACGIAPAEEINAENKMFLKEWLVNGYQGSMDYMANNLEKRSDPNLLVEGTKSIVSVALNYYPQQLLDDSQYQFAWYAYGKDYHDIMRKKMNELMEYINREIAIVNGRVFCDTAPVLDRYWAWRAGLGWIGKNTQLIIPKAGSSFFLGELFIDIELAYDTPLKDRCGNCNRCQQACPTQAFEAPHKLDARKCLSYVTIESREDIPIELRKKMGNRIYGCDECQRVCPWTRFAIPCQTTELQPAPEFMQMTREEWHNLSEETYRKLFKGSAVKRAKYSGLVRNIEAAGYPNNSGANPD

SEQ ID NO: 75025 - protein, 308 aa, unidentified
  source 1..308: note = Bacteroides luti
  REGION 1..308: note = tr|A0A1M4Z048|A0A1M4Z048_9BACE Epoxyqueuosine reductase OS=Bacteroides luti OX=1297750 GN=queG PE=3 SV=1
MDKEVLSQQIKAEALRLGFSACGIARADAVGESMAYLEQWLADGNQAGMVYMNNHFDKRCDPRLLVEGTKSIVSVALNYYPSRKLREEQLQFAYYAYGKDYHEVMKAKLTELFTFINEYLTPVNGRVFCDTAPVLDRYWAQKAGLGWIGKNTQLIIPSAGSYFFLGEIFLDIELDYDSPIQSKCGNCTRCLDACPVKALEKPFLLNSNRCISYLTIEHKGEIEPGIAPKMGNHLYGCDDCQKCCPWNRFASPHQIADFEPSDALLSMEEEDWKALTVEQYRVLFKGSAVKRAKYDGLMRNLKAILPDE

SEQ ID NO: 75026 - protein, 322 aa, Bacteroides nordii
  REGION 1..322: note = tr|A0A413VS16|A0A413VS16_9BACE tRNA epoxyqueuosine(34) reductase QueG OS=Bacteroides nordii; OX = 291645 GN=queG PE=4 SV=1
MGEVILSAKQIKAEALRLGFSACGVAPAEAVNKTVSNAFCHWHSHGMQAGMNYMGNHLEKRLDPRLLVEGTRSIVSVALNYYPSRFLREDQYQFAWYAYGKDYHDIMKARLTALQEYISAHSPLPLQSRIFCDTAPVLERYWAWRAGLGWIGKNTQLIIPHAGSCFFLGEIFLSAEADEYDQPLTSRCGNCTRCLDACPTKALEAPFLLNSGRCLSYLTIEHREAIPPAEGKKMGNKIYGCDECQKACPWNRFSTPCQTPELQPTDTFMQMEKKNWHALTEEQYRMIFKGSAVKRAKYTGLMRNIHQVESNDKDEVQTLPDV

SEQ ID NO: 75027 - protein, 318 aa, Bacteroides nordii
  REGION 1..318: note = tr|I9SFF2|I9SFF2_9BACE 4Fe-4S ferredoxin-type domain-containing protein OS=Bacteroides nordii CL02T12C05; OX = 997884 GN=HMPREF1068_00374 PE=4 SV=1
MGEVILSAKQIKAGALRLGFSACGVAPAEAVNETVSNAFCHWHSHGMQAGMNYMGNHLEKRLDPRLLVEGTRSIVSVALNYYPARFLREDQYQFAWYAYGKDYHDIMKARLTALQEYISARSPLPLQSRIFCDTAPVLERYWAWRAGLGWIGKNTQLIIPHAGSCFFLGEIFLSAEADEYDQPLKSRCGNCTRCLDACPTKALEAPFLLNSGRCLSYLTIEHRETIPPTEGKKTGNKIYGCDECQKACPWNRFSTPCQTPELQPTDAFMQMEKENWHALTEEQYRTLFKGSAVKRAKYTGLMRNIHQVESNNKNEVQK

SEQ ID NO: 75028 - protein, 312 aa, Bacteroides salyersiae
  REGION 1..312: note = tr|A0A4Q5FPW5|A0A4Q5FPW5_9BACE tRNA epoxyqueuosine(34) reductase QueG OS=Bacteroides salyersiae OX=291644 GN=queG PE=4 SV=1
MEVKTLSASQIKAEALRLGFSACGMAPAEPVNTAIADAFSRWQAQGMQANMNYMGNYLDKRLDPRLLMEGVRTILSVALNYYPARQLREDQYQFAWYAYGKDYHDLMKTRLTALQAYISAHSPLPLQSRVFCDTAPVLERYWAYRAGLGWIGKNTQLIIPHAGSCFFLGELFLDMEVDEYDQPQKNRCGNCTRCIQACPTKALEAPFLLNSRRCLSYLTIENRDAIPLLEGKKMGNKIYGCDECQKACPWNKFATPCQAPDLQPTELFMQMEKEDWHTLTEEQYRTLFKGSAVKRAKYAGLMRNIHQVESNE

SEQ ID NO: 75029 - protein, 312 aa, Bacteroides salyersiae
  REGION 1..312: note = tr|I9TAW1|I9TAW1_9BACE 4Fe-4S ferredoxin-type domain-containing protein OS=Bacteroides salyersiae CL02T12C01 OX=997887 GN=HMPREF1071_01584 PE=4 SV=1
MEVKTLSASQIKAEALRLGFSACGMAPAEPVNTAIADAFSRWQAQGMQANMNYMGNYLDKRLDPRLLMEGVRTILSVALNYYPARQLREDQYQFAWYAYGKDYHDLMKTRLTSLQAYISAHSPLPLQSRVFCDTAPVLERYWAYRAGLGWIGKNTQLIIPHAGSCFFLGELFLDMEVDKYDQPQKNRCGNCTRCIQACPTKALEAPFLLNSRRCLSYLTIENRDAIPLLEGKKMGNKIYGCDECQKACPWNKFATPCQAPDLQPTELFMQMEKEDWHTLTEEQYRTLFKGSAVKRAKYAGLMRNIHQVESNE

SEQ ID NO: 75030 - protein, 317 aa, Bacteroides sp.
  REGION 1..317: note = tr|A0A351YGW5|A0A351YGW5_9BACE tRNA epoxyqueuosine(34) reductase QueG OS=Bacteroides sp.; OX = 29523 GN=queG PE=4 SV=1
MNEELTAIHTRQIKAEALRLGFSACGVSPATAVDSLHGDAFRQWLEEGHQAGMDYMARHMEKRLDPRLLVDGAQSIVSVALNYYPALPPDDGGYRLAWYAYGEDYHTVMKDKLHALLHYVATLLPGVSGRAFCDTAPLLERYWAWRGGLGWTGRNTQLIIPGAGSAFFLGELVIDRPLAYDTPQRDRCGNCTRCLRACPTGALHAPHRLDARRCLSYLTIEHRGPIPPEAAAHLSPCIYGCDRCQEACPWNRFARPAGEPRLHPRPALLAMRRPDWEKLSPEDYRTLFKGSAVKRAKYEGLTRNIRCCSTDTGKESS

SEQ ID NO: 75031 - protein, 176 aa, Bacteroides sp.
  REGION 1..176: note = tr|A0A0S8JMA4|A0A0S8JMA4_9BACE Epoxyqueuosine reductase (Fragment) OS=Bacteroides sp. SM23_62 OX=1703352; GN = AMS26_22250 PE=4 SV=1
MENPQENSRKIKQKALELGFLQAGIARADHLADDAPRLRRWLDMGYHGSMGYMEKHFEKRVDPRELVEGARSVVVVLQNYFTREKQHDESAPRISKYAYGKDYHHIVRKKLHSLYAYMGEHIGAHTGRIFVDSAPVLERAWGRLAGLGWIGKHSLLLNRKYGSWFFIGVIITDLEL

SEQ ID NO: 75032 - protein, 220 aa, Bacteroides thetaiotaomicron
  REGION 1..220: note = tr|A0A174NTE8|A0A174NTE8_BACT4 (Fe-S)-binding protein OS=Bacteroides thetaiotaomicron OX=818 GN=queG_2; PE = 4 SV=1
MTNKEIKKLCRSFGADLVGVASVERFVNAPKGYHPTDVMPTAKSVISLGMVLPKDILEQDIRTYTDIRNEAVKKMDKVAADVAAELKGLKYKAVSIVSLSGKFVDGHFRSRVSLKHAAELAGLGVIARNYLLTNNKYGNLLWFTAVVTSLELEPDPLATYQVCNNCNLCVDLCPSGALTDENNFSQKGCRKVCYITVKGVLELRCWQCRNVCPYKHGIND

SEQ ID NO: 75033 - protein, 321 aa, Bacteroides thetaiotaomicron
  REGION 1..321: note = tr|R9H3T1|R9H3T1_BACT4 4Fe-4S ferredoxin-type domain-containing protein OS=Bacteroides thetaiotaomicron dnLKV9 OX=1235785 GN=C799_03617 PE=4 SV=1
MEKLLSSDRIKAEALRLGFSACGLAPAEAVDETVATAFRQWLADGCQAEMAYMQNYEDKRLDPRLLVEGARTVISVALNYYPATKIPENEYQIAWYAYGKDYHDVMKEKLKELFEFIEKEVSFSEAEITSPSVQGRIFCDTAPILERYWAWRSGLGWIGKNTQLVIPHAGSCFFLGEVVIDLEADSYNSPQRNQCGSCTRCLDACPTKALEEPFRLNSERCLSYLTIEYRGDLKPETGKKMGNKIYGCDECLKACPWNRFARPCRTVEFQPSPSLLSMRKDDWHSLSEEQYKNVFKGSAVKRAKYNGLIRNIQAIHSSFSY

SEQ ID NO: 75034 - protein, 306 aa, Bacteroides uniformis
  REGION 1..306: note = tr|A0A1Q6I0J9|A0A1Q6I0J9_BACUN tRNA epoxyqueuosine(34) reductase QueG OS=Bacteroides uniformis; OX = 820 GN=BHV79_11095 PE=4 SV=1
MPTECLRQWVAEAGGAACGVADAVAVADDEFARFDKWLARGMHGGMRYMENYRELRRDPQLLLPGAKSVVVAAFSYYHSDQTEGNLASIAAYAHGDDYHEVVRERLGRVAARIMAAYGGETRVCVDTAPMLERYWAVRAGVGFVGRNRLLIVPGAGSYVFIGSVLATVRFMPDAPNEGTCDGCGRCIAACPGKALSEEGVDARRCLSYLTIEHRGEFPDGTNLHGRLYGCDICQRVCPHNRSLPDTPIAEFHPREALRTLTPETIIRMGQSEFSAIMRRSAIKRTKLAGLQRNALHLLRDDDNIKQ

SEQ ID NO: 75035 - protein, 225 aa, Bacteroides xylanolyticus
  REGION 1..225: note = tr|A0A2S6HBD1|A0A2S6HBD1_9BACE Epoxyqueuosine reductase QueG OS=Bacteroides xylanolyticus OX=384636; GN = BXY41_12318 PE=4 SV=1
MKEELREKVLGLGANLCGFAGIERFAGAPKGFHPCDIFPDCKSVVAFGIALPKGIYIGDSRLIYSYFNNFACPQVDSIAYHTAVVLENTYHGVGVPLPSDGPYDYWDEDKMEGRGLLSMKHVAYLSGMGTFGKSTLLLNREYGNRLVIGCVLTNLEIESDEFASGICLEHCDLCIRNCPVGAINENGVRQKTCRTNSYGKTKRGFDTVECNRCRTTCPMCFGLHT

SEQ ID NO: 75036 - protein, 352 aa, Bacteroides xylanolyticus
  REGION 1..352: note = tr|A0A2S6HQ05|A0A2S6HQ05_9BACE Epoxyqueuosine reductase QueG OS=Bacteroides xylanolyticus OX=384636; GN = BXY41_109143 PE=4 SV=1
MMSKKSDSDNSIAKLIQQKALDLGYEKCGIIPVEMMAGYEEKFHERTQKVPESQPFYQNQQRLIRFQEDFDWAKSIVVLVKRYSKYHIPESLRGHIAKHYLTDSRINENTKEFQSSTALEQYMKELGLRTETNRKFGIVGVRWAALQAGLGMIRRNNFFYTESGSYISLEAFLTDCEMELIEKPNLPPCPPNCNRCMKACSTASLSDAYTMNPLRCISFLTTFGGRDLPNEPLASDFGDWIYGCDMCQDACPMNHNKWTGQNEFPGLSELEPYLTMENILEMDEDFYRQNIQPKFFYLSPDELWKWQVNVLNFMDNRYEDHFAPAIIKAQKSNYEQVRKMAGLISTKHGLHT

SEQ ID NO: 75037 - protein, 314 aa, unidentified
  source 1..314: note = Bacteroidetes bacterium
  REGION 1..314: note = tr|A0A497D5Q8|A0A497D5Q8_9BACT Epoxyqueuosine reductase OS=Bacteroidetes bacterium OX=1898104 GN=queG; PE = 3 SV=1
MNKSLLTGFIKAEALRNNFSACGISRTQHLSDEKLKMEAWLAKGMHGNMHYLEKNKEKRYDPSKLVDNARSVITVLYNYYPNEKLPENDNYKLSKYAYGKDYHYIIKEKLRALLAAVEEKTGRRTARIFVDSAPVLDRAWARQSGLGFIGKNTMLINNKMGSFFFIGHIIIDLELDYDNPETGNYCGTCTLCIDACPTQALQPFQLDARKCISYITIENRDKIPEDFRGKMNNWIFGCDICQDICPWNRFSIPHTEPLFEPSEALASMKKVNWESLDKSQFKTLFKNSAVERAGFNGLKRNIDFVAENTNFRPE

SEQ ID NO: 75038 - protein, 310 aa, unidentified
  source 1..310: note = Bacteroidetes bacterium
  REGION 1..310: note = tr|A0A142L1J4|A0A142L1J4_9BACT Epoxyqueuosine reductase OS=Bacteroidetes bacterium UKL13-3 OX=1690483; GN = queG PE=3 SV=1
MISAAQHTFLIKQKAAALGFSFCGISKATFLEQEAPRLEKWLKEGKNGQMQYMENYFDKRLDPRLLVDGAKSVISFLYNYYSEIKQDDTEAPKISKYAYGEDYHFVLKDKLQELLQYIRETIGEVNGRAFVDSAPVLERAWAVQSGLGWVGKNSNIINKGSGSFFFLSELILDLELEYDKPATDHCGTCTACIDACPTDAIVQPHTVDGSKCISYFTIELKDAIPTQMKGTFDNWMFGCDVCQDVCPWNRFSKPHHEPRFVSNESLLSMKKQDWLDITEDVFSQVFKNSPVKRTKYNGLKRNIDFLFNND

SEQ ID NO: 75039 - protein, 316 aa, unidentified
  source 1..316: note = Bacteroidetes oral
  REGION 1..316: note = tr|D7JH48|D7JH48_9BACT Iron-sulfur cluster-binding protein OS=Bacteroidetes oral taxon 274 str. F0058; OX = 575590 GN=HMPREF0156_01642 PE=4 SV=1
MPVGLVDSTIFLLPLPKLIGRMDTKLITDKIVAAALDVGFSACGVTDTQPLNEQGKHLQNWLRLGYNGTMKYMENNLDKRLNPSLLAEASKSAIVVLLNYKPERTIATDKPQVSKYAYGTDYHFVVKNKLNRLLRRIQTEIADCRGVAYVDSAPVLEKALAVKAGLGWIGKNSLLINKQFGSMTFIGTLFVDIPLCYNTHIVPDGCGNCRRCMDACPTQAIVAPRVIDASRCVSYLNKTHRGTVPEDLQTLVGNRIWGCDCCIDVCPYNKQTPVHNTQELMPRDELFELDLAAISKRQLKKLIMRLPPRNQSGTGS

SEQ ID NO: 75040 - protein, 313 aa, unidentified
  source 1..313: note = Bacteroidetes sp.
  REGION 1..313: note = tr|A0A3N0ZL03|A0A3N0ZL03_9BACT tRNA epoxyqueuosine(34) reductase QueG; OS = Bacteroidetes/Chlorobi group bacterium MS-B_bin-24; OX = 2382228 GN=queG PE=4 SV=1
MEQLKNIIKNRAFELGFCEIGFARYEKLEKEIQNYIQWLKNGYSATMTYLEKNIDKREDVKLIIDDVRTIIVTAYPYYNKFKHSSNLFKISRYAWGEDYHKILADKLTKLVDFISDKINDFKYKIYVDTGPLLEKSWAVRAGIGWQGKNSMIISRTYGSYIFLGIILTNIEFEPDKPIKDYCGTCTKCIESCPTNAIVQPKVVDSRKCISFWTIEAKPEYEIPSSIDLNGWIFGCDICQEVCPWNNKVKITDDVAFFPRYNQTNLDKNFLENLTPEIFKERFKGSPIKRAKFEGLKRNFLHIIKNIEYEQINQ

SEQ ID NO: 75041 - protein, 326 aa, unidentified
  source 1..326: note = Bacteroidetes sp.
  REGION 1..326: note = tr|A0A3N0ZG92|A0A3N0ZG92_9BACT tRNA epoxyqueuosine(34) reductase QueG; OS = Bacteroidetes/Chlorobi group bacterium Naka2016; OX = 2382229 GN=queG PE=4 SV=1
MAFLKRNGDLILNKEININFLKNNIKEFSYSLGFDKVGFARFRFLSKEIEKYKNWLANGYQASMDYLEKNIDKRENIGLILSDVKSLIVFAHSYFTNVNHSKSNFKISRYAWGDDYHDILEKKIRKVANFISEQVDTFKFKIYVDTGPILEKIWAVEAGIGWQGKNSLVLSQELGSYFFIGIMLTNLDFLPDTTVVDRCGKCRKCIDACPTNAIVSPKVVDSRRCISFWTIEKKIHEEIPHQLDFKGWIFGCDICQEVCPWNNKAKITNELAFYPRNGKTNLEEEDLMKLTIENFKEVFRKSPIKRAKFEGLMKNYLHLRGLNEFE

SEQ ID NO: 75042 - protein, 315 aa, unidentified
  source 1..315: note = Bacteroidia bacterium
  REGION 1..315: note = tr|A0A524PBW8|A0A524PBW8_9BACT tRNA epoxyqueuosine(34) reductase QueG OS=Bacteroidia bacterium; OX = 2044936 GN=queG PE=4 SV=1
MRQNWNLDSSDNLNTRIKTRASELGFDRCGIVPAVFLEKEYTRFGSWIKQGFQAGMDYLERNSEKRADPGKLVENAKSVIVVLMRYASIPVFENKSPKFSRYALGRDYHLVLKEKLHELLDFIEEEVPGTRGRVFVDSAPVMERSLAVRAGLGWIGRNSMLINRNLGSYTFIGEIITDLETEYDEPFGTSHCGSCSRCIDSCPTGAILPDRSIDSNKCISYVTIEHRGPITELFRNKMNGWAFGCDICQEVCPWNSKPGSPVNPQFEPKPEFINYTPAMWRELDKGAFDEIFKDSPLLRTGYKGFTRNLEFIDPA

SEQ ID NO: 75043 - protein, 306 aa, unidentified
  source 1..306: note = Bacteroidia bacterium
  REGION 1..306: note = tr|A0A1M3FR75|A0A1M3FR75_9BACT tRNA epoxyqueuosine(34) reductase QueG OS=Bacteroidia bacterium 44-10 OX=1895721 GN=BGO34_18305 PE=4 SV=1
MTFSEEIKQYALSLGFDACGICRATDSGEEERYMRWLAENGNAGMTYMARNIDKRLDPRLLVEGARSVISVALNYYPHEKLPDEVPQFAYYAYGKDYHDIVREKLSRLFEFVKSRYAGVSGRYFSDSAPVLERFWAAQAGLGFIGKNTLLIIPGKGSYFFLGELIIDMELEYDSPITRNCGKCRRCLDACPTGAIERPHYLNANKCISYQTIENRDEISPGIVPLLSNNVYGCDICQKVCPWNRYARPHTTPGLMPSDEFLSLDLKKLIDMDEEDYRRIFHKSAVKRAKFSGLKRNVIAISKTPDK

SEQ ID NO: 75044 - protein, 393 aa, unidentified
  source 1..393: note = Baia soyae
  REGION 1..393: note = tr|A0A4R2S4Q7|A0A4R2S4Q7_9BACL Epoxyqueuosine reductase OS=Baia soyae OX=1544746 GN=EDD57_11939 PE=4 SV=1
MNAMELKQKLIEKANEIGIDKIGFTTADPFVELKQKLVQHRESGYESGFEEPDLNLRTIPTLTLPEAKSIIAIAIAYPSKMSNPPRSEPGAYRGIFARASWGQDYHDVLREKLAQLEAYLLELVPTARTQSMVDTGALSDRAVAERAGIGWSAKNTSILTEEFGSWIYLGEMITDLYLPPDDSVLDGCGDCTLCLDVCPTGALVEPGQLDSTKCIAFLTQTKGSIDEFYREKIGNRLYGCDTCQTVCPKNRKRNFTHHTEFEPDPELVKPLLQPLLTMSNREFKEKYGYMSGSWRGKKPIQRNAIIALAHFQDRSAIPLLKDLLGQDPRPVIRGMSAWALSKIGGAEIEEILNQAFDKEQDEEVLREIRLGLERIQKSATSPKTKEDYHDYSL

SEQ ID NO: 75045 - protein, 314 aa, Balneola sp.
  REGION 1..314: note = tr|A0A2E6N4S4|A0A2E6N4S4_9BACT tRNA epoxyqueuosine(34) reductase QueG OS=Balneola sp.; OX = 2024824 GN=queG PE=4 SV=1
MISQEQKRWTQFIRNRALELGFDAIGFAQATYLEDDDRRLSTWLEEGRNGTMSWMENYHEKRVDPRILVPGTQSVISLLVSYNTKDVPSHLNQGVSFAKYAQGRDYHRVIKKKLKLLYQQVQQEIPIAEGRYFVDSAPVLERSWAQRSGLGWIGKNGNLLNKKLGSYFFIADILLNIPLVYDHATSDHCGTCRRCIDACPTNAIYEPQKVDGSKCLSHWNIEHAGEIPTFFQEKMGRWIFGCDICQEVCPWNTKALLGHWPEFRPNKHWIRLSPQEWTQLKRKDYEDYFNGTAVRRVNYEDFLRNASIILNNNQ

SEQ ID NO: 75046 - protein, 311 aa, Balneola sp.
  REGION 1..311: note = tr|A0A1B6Y7H5|A0A1B6Y7H5_9BACT Epoxyqueuosine reductase OS=Balneola sp. EhC07 OX=1849360 GN=queG PE=3; SV = 1
MDSKNLTEAVKNYALQLGFDACGFSKAEFLETEARRLEEWLVQQRHGTMSWMENNFDKRVDPTKLVPGAKSVVSVIGSYYSPEHDHQSSGNPKIAKYALGRDYHKVFKKKLKDLFNYTESLVGNIEGRFFVDSAPVLDKAWAVRSGLGWMGKNSNILNKDIGSFFFIGEMILDVEFNYSSGTTDHCGTCTRCIDACPTDAIYEPYRIDSNKCISYLTIELKEQIPQELQSSLGEWMYGCDICQDVCPWNKDPSLTQMADLKPRTKLLNKNIDFWNEIDNPQYDALFEGSAIRRAKFEKFKMNAGIVYNNLK

SEQ ID NO: 75047 - protein, 99 aa, unidentified
  source 1..99: note = Balneolaceae bacterium
  REGION 1..99: note = tr|A0A359E6M8|A0A359E6M8_9BACT tRNA epoxyqueuosine(34) reductase QueG (Fragment); OS = Balneolaceae bacterium OX=2053516 GN=DEG32_12075 PE=4; SV = 1
RLDEWLTQNKNGSMSWMENHFEKRVDPTLLVPGSKTVVSVLASYYHPSHDKQIGVKNEPLIAKYAHGRDYHKVLKKKLKKLFNFTEELLGGLEGRIFVD

SEQ ID NO: 75048 - protein, 178 aa, unidentified
  source 1..178: note = Balneolaceae bacterium
  REGION 1..178: note = tr|A0A356WYR8|A0A356WYR8_9BACT tRNA epoxyqueuosine(34) reductase QueG (Fragment); OS = Balneolaceae bacterium OX=2053516 GN=DD671_00410 PE=4; SV = 1
MLKQQKITEQIRAHALHLGFDACVFAKAQYLPTEARRLDEWLSQNKNGTMGWIENYFDKRVDPTKLVPGSKTVVSVLASYHHPKHNEQIGVKDEPLISKYAQGRDYHKVLKKKLKHLFQFTEELLGGLEGRIFTDSAPVLDKVWAKRAGLGWIGKNSNLLNKDIGSFFFIGEMIIDAE

SEQ ID NO: 75049 - protein, 317 aa, Barnesiella intestinihominis
  REGION 1..317: note = tr|K0WRG3|K0WRG3_9BACT 4Fe-4S ferredoxin-type domain-containing protein OS=Barnesiella intestinihominis YIT 11860 OX=742726 GN=HMPREF9448_02593 PE=4 SV=1
MASCSKPSEWREIIRNEALRIGFDACGFARVEEVDVDMRDSYRQWLASGKQAQMGYLDNYVELRDNPALLYPGARTMICVALNYYPVRFQSGESPRFAYYAYGWDYHDVMRDKLRQLAVFVSSYSGDTGRVCCDTAPVRERYWAVRAGLGFIGKNAQLIIPGKGSFFFLGELITSLDLPPDSPVVARCGDCSRCMDSCPTGALYAPGSVDARLCISCQTIENKGDIAPFVADRMGDRVYGCDTCQQCCPWNKSARPSVHHEFAPSEEFLALDASRFETMTPDDFNRIFRHSAVKRAKYAGLKRNFEIWKKNRKSPIE

SEQ ID NO: 75050 - protein, 314 aa, Barnesiella sp.
  REGION 1..314: note = tr|A0A1Y4GUR1|A0A1Y4GUR1_9BACT tRNA epoxyqueuosine(34) reductase QueG OS=Barnesiella sp. An22; OX = 1965590 GN=B5F38_03415 PE=4 SV=1
MDSSSAPFEWREQIRSEALRLGFDACGFARVDEVEPRAREAYRRWLDEGRQAQMDYLGNYLDLRDHPALLYPGARTIVCVALNYYPARFQPQEHPQFAYYAYGRDYHEVMRDKLRQLAAFVAPLSGDAGRVCCDTAPVRERYWAVQAGLGFIGRNAQLIIPGKGSYFFLGELLTTLALPPDKPLSNRCGDCLLCREHCPVGALDEPGQVDARRCISCQTIENRGEIPPAVADRMGNRVYGCDTCQQCCPWNRAATPSTHPEFAPSDELLALDAARFEALTPDDFNRIFRHSAVRRAKYAGLMRNFAVWKKNRKS

SEQ ID NO: 75051 - protein, 319 aa, Barnesiella sp.
  REGION 1..319: note = tr|A0A4Y9IXA7|A0A4Y9IXA7_9BACT tRNA epoxyqueuosine(34) reductase QueG OS=Barnesiella sp. WM24; OX = 2558278 GN=queG PE=4 SV=1
MLSRVLSNGLNRRDMSLLPSTCSEELREAASRLGVSRLGIASVHDVDEEQLKRYEEWIAEGCHGEMSYLDRYHDVRRNPGGLLPGAASVIVCAFNYFPALFQRGDVPQFAYYSYGKDYHEVVRDRLRKLACHIEELYGGETRVCVDTAPIPERYWAVEAGLGFRGVNSQLIIPGMGSYFFLGEILTTAGFAPDARFKGDCGSCGACVRSCPGSAIKDGKIDARRCLSYLTIEYRGESLPEGTSLGNHLYGCDVCQQVCPHNRACVPTDIEEFAPSEGFLSLDRDSIAGLTPEKFSALFRHSAVKRTKLKGLMRNLDYLD

SEQ ID NO: 75052 - protein, 314 aa, Barnesiella viscericola
  REGION 1..314: note = tr|W0EU21|W0EU21_9BACT (Fe-S)-binding protein; OS = Barnesiella viscericola DSM 18177 OX=880074; GN = BARVI_07725 PE=4 SV=1
MDSSSAPFEWKEQIRSEALRLGFDACGFACADEVDSQSRDAYRRWLDEGKQAQMDYLGNYLDLRDNPALLYPGARTVICVALNYYPARVQPRENPQFAYYAYGLDYHEVMREKLRRLAAFVTTLSGDPGRVCCDTAPLRERYWAVQAGLGFIGKNAQLIIPGKGSYFFLGELLTTLALPPDTPLTNRCGDCSLCREHCPTGALSQPGQVDARLCISCQTIENRGEIPPEVAAQMGNRVYGCDTCQQSCPWNRAATPSTHPEFAPSDEFLALDAVRFEAMTPADFNRIFRHSAVRRAKYAGLMRNFIVWKKNREQ

SEQ ID NO: 75053 - protein, 382 aa, unidentified
  source 1..382: note = Bartonella apis
  REGION 1..382: note = tr|A0A1U9MCK6|A0A1U9MCK6_9RHIZ Epoxyqueuosine reductase OS=Bartonella apis OX=1686310 GN=BBC0178_018090; PE = 4 SV=1
MPISTSKDKAKLKDFLVLREFLVKEAAAQGFDAIAITGCNNQKAAHHLVEALHQGYHGTMEWMVETAKRRMEPVNLWPDVKSVIMLAMNYGPDAHEFHQRPDKSSGNISYYARHRDYHELIKGRLKQIASRFVSRFGGDVKVFVDTAPVMEKPLAQLAGLGWQGKHTNLVSREFGSWLFLGSIFTDVELTFNEPEVDHCGSCHACLSACPTHAFPAPYQLDARRCISYLTIELKEQIPLSFRKAIGNRIYGCDDCLSACPWNKFARNTREIKLKAREDLIAPKLDFLLKLDDAAFRSFFTASPVKRIGRNRFIRNCLIAAGNSADRKLVSVVKPHLKDPDPLVAGMAVWALKQLLTKAEFDELAKRSITFSSNPDVLKEWED

SEQ ID NO: 75054 - protein, 382 aa, unidentified
  source 1..382: note = Bartonella apis
  REGION 1..382: note = tr|A0A1R0FA98|A0A1R0FA98_9RHIZ Epoxyqueuosine reductase OS=Bartonella apis OX=1686310 GN=PEB0149_013370; PE = 4 SV=1
MPISTSSDKAKLKDFLVLRDFLTKEAAALGFDAIAITGSNNQKAAHHLVEALQHGYHGTMEWMLETAERRMEPANLWPDVKSVIMLAMNYGPDAHEFHQRPDKSSGNISYYARHRDYHELIKGRLKQIASRFVSRFGGDVKVFVDTAPVMEKPLAQLAGLGWQGKHTNLVSREFGSWLFLGSIFTDVELPVNEPEVDHCGSCHACLSACPTHAFPAPYQLDARRCISYLTIELKEQIPLSFRKAIGNRIYGCDDCLSACPWNKFARTTREIKLKAREDLIAPKLDFLLKLDDAAFRSFFTASPVKRIGRNRFIRNCLIAAGNSADRSLVSVVKPHLQDPDPLVAGMAVWALKQLLPKAEFDELAKRSITFSSNPDVLKEWED

SEQ ID NO: 75055 - protein, 379 aa, unidentified
  source 1..379: note = Bartonella tamiae
  REGION 1..379: note = tr|J1K041|J1K041_9RHIZ Epoxyqueuosine reductase; OS = Bartonella tamiae Th239 OX=1094558 GN=queG PE=3 SV=1
MLIMPTSTFERQIKLKKFLQKEAENQGFNLLGITNQISDQAGIRLNHALDEGYHGTMEWMRETQQRRISPQNLWPEAQSIIMLAMNYGPDYNPLKKNENKNCGNISVYARHRDYHDIMKGRLKQIASRFAARSGAHVKIFVDTAPVMEKPLAQAAGLGWQGKHTNLVNKDYGSWLFLGSIFTDIPLPLDKFEKDHCGSCSACLTICPTDAFPAPYQLDARRCISYLTIELKEQIPLNFRKAIGNRIYGCDDCLSVCPWNKFARKTHEIKLQARDDLINPPLAMLLELDDPKFRRFFSASPVKRIGRHRFIRNCLIAAGNSGDSTLIMPVEKLLEDESPLVAGMAVWAMKQLVSHEYFVIMRQEYTKRQHDPSVLMEWES

SEQ ID NO: 75056 - protein, 349 aa, unidentified
  source 1..349: note = Bathymodiolus platifrons
  REGION 1..349: note = tr|A0A1Z5HE94|A0A1Z5HE94_9GAMM Epoxyqueuosine reductase OS=Bathymodiolus platifrons methanotrophic gill symbiont OX=113268 GN=queG PE=3 SV=1
MDMTMNELSRQIKQWGNELGFQQVGISDTDLQKAEQRLHEWLAKGYHADMDYMHKHGLKRSRPALLQPETVSIISVRMDYLPEPHEAMETTLNNPIAGFISRYALGRDYHKVLRKRLQKLAKRIEQEVGVFGYRAFVDSAPVLEKAIAEKAGLGWIGKHSNIINKKAGSWFFLGEIYTSLPLVPDSPSSNHCGLCTSCLDICPTQAIVTPYQVDARRCISYLTIELKGSIPEDLRPLMGNRIYGCDDCQLICPWNRFARISKETDFSPRHNLNAQHLIELFNWTEEEFLHKTEGSAIRRIGHQQWLRNIAVALGNAPASTTIRQALHLKVNHKDELVREHVAWALAQSS

SEQ ID NO: 75057 - protein, 323 aa, Bauldia litoralis
  REGION 1..323: note = tr|A0A1G6EHT7|A0A1G6EHT7_9RHIZ Epoxyqueuosine reductase OS=Bauldia litoralis OX=665467; GN = SAMN02982931_04554 PE=4 SV=1
MAETAGRRGAPRSLWPEARSVVMLGLNYGPDSDPMASLARHDRATISVYARNRDYHDLVKGKLKQVAGRFAAREGVGVKVFVDTAPLMEKPLAAAAGIGWQGKHTNLVSRDFGSWLFLGAILTDIDLPPGEPEVDHCGSCRACLDICPTAAFPAPYRLDARRCISYLTIEHKGPIPHEFRAAMGNRIYGCDDCLAVCPWNKFAQVTQQAKLAARDDLDAPPLADLAVLDDAGFRALFSGSPIKRIGRDRFVRNVLVAIGNSGEAELRTAAMRLLDDAAPLVRGAAVWALARLDPAAAVAERASRMADESDPDVLEEWHAIDRD

SEQ ID NO: 75058 - protein, 350 aa, Bdellovibrio bacteriovorus
  REGION 1..350: note = tr|A0A150WTS6|A0A150WTS6_BDEBC Epoxyqueuosine reductase OS=Bdellovibrio bacteriovorus OX=959; GN = AZI85_16395 PE=4 SV=1
MTPQEMTSLIDETLQELGFSHFGFTSLSKPLSFDYYKEWLKEGLHGDMKYLEEHAPIKEEPQIKWPRARSALVFAIPYYPHPEKKADFPLKQARVSLYAQGMDYHFWFKARMAELCKKLQEILPEEEFLPFTDSSPVLERDLAKRAGLGWVGKNTCLIHPKKGSLFFIGEIYTSLDLNTTFEPLPDFCGTCRRCIDVCPTNALLEPKKMDARKCISYLTIESRQVPAPELREKIGDWFFGCDLCQTVCPWNQKVFKGQLNIEKNLSLNTQQADDLSEDLRYILTASGKKLTKDFLGTPLARAGSFGLKRNALIVVANRKIVSLKNEVSELLSHEKLGELAAWTLAILNTD

SEQ ID NO: 75059 - protein, 349 aa, Bdellovibrio bacteriovorus
  REGION 1..349: note = tr|W5WY74|W5WY74_BDEBC Iron-sulfur cluster-binding protein OS=Bdellovibrio bacteriovorus W OX=765869; GN = BDW_06735 PE=4 SV=1
MNAQEITQFIESRLSDTGFSHFGIAKLARPLTFDFYQSWLNENLYGSMNYLKEHASIKENPQSKWPEARSCLVFAMPYFPHPEPQENPPLEAARMSMYSKGMDYHFWFRGRMQELCNELKGLFPSEEFLAFTDSSPLLERDLAQRAGLGWYGKNTCIIHPKKGSLFFIGEIITSLSFEANIAPLPDFCGKCTRCIDICPTEALIAPQKMDASRCISYLTIESRNVPAPDLREKIGDWFFGCDLCQTTCPWNQKVFKNQLSTHLIEEISEDHEEKLIKEMRYILESSGKKLSKDFLGTPLARAGSFGLKRNALIVIANRKLTGLEDAIIPLLDHEKLGELAQWTLDQLNG

SEQ ID NO: 75060 - protein, 370 aa, unidentified
  source 1..370: note = Bdellovibrio exovorus
  REGION 1..370: note = tr|M4V7U2|M4V7U2_9PROT Iron-sulfur cluster-binding protein OS=Bdellovibrio exovorus JSS OX=1184267; GN = A11Q_1077 PE=4 SV=1
MTDFQDSLNDSLSSRLKSAALSLGFSQAAISPLKSPLSIAFYEKWLSQGHHADMAYLQNHLPFKQDPTLLGKELKSVISVTHSYYPAVQPSPLTVPARTALYSQNEDYHFWVKEKLQKLSSELSQLYPDSVFLPYVDSGPILERDLAYQNGLGWFGKNTCLIHPQHGSLFFIAEILTTLAIKNESLDGSPAEGSPIEPLPDFCGKCQKCLDICPTGALSSPRVLEADKCISYLTIESKSVPALELRNKIGDWFFGCDLCQTTCPWNQKVFRKSNIDHGNRTSTDLHSNLTAERRTELIEYFQFLLQASHKQIQKHHYGSPLLRAGAKGLKRNALIVIANQQLHELTEVVKALQTPELVELKEWTLEQLTS

SEQ ID NO: 75061 - protein, 368 aa, Bdellovibrio sp.
  REGION 1..368: note = tr|A0A317JP10|A0A317JP10_9PROT tRNA epoxyqueuosine(34) reductase QueG OS=Bdellovibrio sp.; OX = 28201 GN=queG PE=4 SV=1
MGMSIDEILSNLKKELALDDIQWIPLAAPLRLQEYDDWLARGLHGEMKYLERHRDLKADPTRLLSDSRSVIMVSKSYVPNERPHDRLKGLRIAAYAQATDYHLWFKDLLEACKLKLEKLFPSHSFRCGTDSLPFLERDFAVQAALGWWGKNTCVIHPRRGSFFFLGEILSSVERAAVCGGAEATCGVGTDLVQGLAPLPDFCGHCDRCLQICPTGALEKPRQLNPLKCIAYWTIEAREVAPVGLREKFGDWFFGCDLCQTVCPWNQKPLRGSAATGVKTDLATEEILPSVDEAELRQDLVFLLTASDQEIRALVRGTPLERSKPQGLRRNAMIVLAHRQLRDLKGLLTRWREDAGLAELAEWAEAKLD

SEQ ID NO: 75062 - protein, 349 aa, Bdellovibrio sp.
  REGION 1..349: note = tr|A0A514XIX2|A0A514XIX2_9PROT tRNA epoxyqueuosine(34) reductase QueG OS=Bdellovibrio sp. ZAP7; OX = 2231053 GN=queG PE=4 SV=1
MTPQEIKPLLDPFLAELGVSHFGWAPLQNPLSFDFYRSWIEEGLHGEMKYLAEHAPIKENPKSKWGRAESALVFAMPYFPHPEKLENFPLKSARVSLYAQGMDYHFWFKQRMQKLCEELTKLFPQEEFLAFTDSSPLLERDLAKKAALGWVGKNTCVIHPKKGSLFFIGEIVTSLKVTTEIAPLPDFCGTCTRCLDICPTGALIEPKKMDARKCISYLTIESRQIPEEALREKIGDWFFGCDLCQTVCPWNQKIFKGQLSIEKSLTLDTESAESLKKELSYILTASGKKLTKDFFGTPLARAGSFGLKRNAMIVAANRKIKGLQPEIEALKEHEKLGELAQWALLKLQS

SEQ ID NO: 75063 - protein, 383 aa, unidentified
  source 1..383: note = Bdellovibrionaceae bacterium
  REGION 1..383: note = tr|A0A2D6JK23|A0A2D6JK23_9PROT tRNA epoxyqueuosine(34) reductase QueG OS=Bdellovibrionaceae bacterium OX=2026715 GN=queG PE=4 SV=1
MSLSVIRSLTRNYVLGLESFLLNSEEIKDLGLKFFDQVGFSSLHTNISIDQYRKWLEEEKYGNMNFLKEHLSFKEKPQNISANLNSAILVTKSYFPHPKKMDLGFKSSKLKIASYAQGEDYHHWLKKDLERMLEELKKQFPEEEFLCFTDSGPVLERDLAYRAGLGWIGKNTCLIHSTKGSLFFIGEILTSLKLDQNKQQAHPDRCGKCTRCIDACPTDALTERSLDATKCISYLSIEHKTEISSEYNKLMGPWFYGCDICQAVCPWNEKLLGQNFLGTKAELGVAAETVLDLEKEDREVLIKDIKDLLNLSNKKIQKRFFGSPMNRANANMHKRNAIRLALYFELSELIDVFKELANNTQSQMLQSYAEFAVNELVKNQSGN

SEQ ID NO: 75064 - protein, 345 aa, unidentified
  source 1..345: note = Bdellovibrionaceae bacterium
  REGION 1..345: note = tr|A0A2D5ZWX5|A0A2D5ZWX5_9PROT tRNA epoxyqueuosine(34) reductase QueG OS=Bdellovibrionaceae bacterium OX=2026715 GN=queG PE=4 SV=1
  VARIANT 4: note = Xaa can be any naturally occurring amino acid
MILXTLQPLATELGFSQIGMATLQRPFSMDVYLNWLKEGHHGSMQYLQTHAPLKENPDQVLGEARSAIVVTLEYLPHPEPDDRLSKIEHLKIAQYAKGKDYHHYLKQRLENLVEKLRQTYPHHQFLTFTDSGPVLERDLAYRAGLGWVGKNSCLIHKNKGSYFFIGEILTTLTEDTEAAPHPDHCGKCRRCIDACPTDAILENRTLDARRCISYLTIESRETPAMDLRKGIGDWLFGCDICQQVCPWNEKNLGDLVKPQKQDRQKVFDELRFLLTSSNKSLQKHFKNTPLSRAGGFGLKRNAILVAVNLRATELIQEIETFKEHPKLGELANWALTELGQTQLSQ

SEQ ID NO: 75065 - protein, 345 aa, unidentified
  source 1..345: note = Bdellovibrionales bacterium
  REGION 1..345: note = tr|A0A3B9XEV1|A0A3B9XEV1_9PROT tRNA epoxyqueuosine(34) reductase QueG OS=Bdellovibrionales bacterium OX=2053517 GN=queG PE=4 SV=1
MTNSFTEILKPLLQEAGFEHYGFSPLENPFSIGAYEDWIHKGYHGEMEYLKTHLPFKKEPTRHFKGLQSAIVVAKPYFPNSTTPTPLRIAEYAKSRDYHLTFKEELDAVAEKLKAQFLGEEFLCFTDSAPLLERDLAYRAGLGWIGKNTCLIDRKQGSLFFLGEILTSLSLEAPKERTLDFCGKCSKCIEICPTNALEENRILNAKKCISYLTIESKKIPDQDLRKQMGDWFFGCDLCQTVCPWNEKKYGKDLMQSLTEPVRFSKTSEEIESLRKILTKSNKELLSEFKESPLSRARGFGLKRNALIVIANQNVTELKDEVEHASRQWPRLKELCDWVLESFHED

SEQ ID NO: 75066 - protein, 368 aa, unidentified
  source 1..368: note = Bdellovibrionales bacterium
  REGION 1..368: note = tr|A0A1F3YBX3|A0A1F3YBX3_9PROT tRNA epoxyqueuosine(34) reductase QueG OS=Bdellovibrionales bacterium RIFOXYD1_FULL_55_31 OX=1797404 GN=A2603_07865; PE = 4 SV=1
MNQILNEEARSADFATFGAVDIRLANEEFQKHVDSFSRWLEAGMAGSMSYLARGKERRADPRRVFSGAKSVFCVGVPYDPRPLGAEDPARGPRFARYLRGRDYHSEVADRLERLMTAVNMRWVESAQSPVRAPLGWKVCVDTSAVLERAWACLAGLGWIGKNTLLIHPKLGSYLFLGLVLLDHETGQAPQIVPDSCGHCQCCLQACPGKALKRGTTLDSRLCVSYWTLEYRGELVTEQMHSFGTWIAGCDVCQEACPFNIRISRAAVARDSRDLCPTLTWEALLEESPDEYRERVRDCALDRVKPEQFSRNLAIALGNALALDSSGLGGRLFEKIRTRLAGESAGPARAWWEKCLKLAHSDYSPNRKP

SEQ ID NO: 75067 - protein, 353 aa, Beggiatoa alba
  REGION 1..353: note = tr|I3CBK5|I3CBK5_9GAMM Epoxyqueuosine reductase; OS = Beggiatoa alba B18LD OX=395493 GN=queG PE=3 SV=1
MANIKRWGQALGFQQVGICDIDLSLAEQQLSQWLANAYQGDMYFMEKHGLKRSRPDWLVPNTLRVITVRMDYLPETQGQMLAQLHQLDKAYIARYALGRDYHKVLRQRLKVLADRIRAVVQGEEYRVFVDSAPVLEKPLAEKAGLGWIGKHTNLIHRQAGSYFFLGEIYVDIPLPVDAPTAGHCGRCQTCLTVCPTRAIVAPYQLDARRCIAYLTIEYRGSIPVELRALMGNRVYGCDDCQLFCPWNRFAQLTQEQDFLPRQGLEQALLVDLFQWTEAEFLRKTEGSPIRRIGYECWLRNLAVALGNVPMTSEIVRVLQARLQVDSPLVREHVVWALAQHDKKLSESGFLGLT

SEQ ID NO: 75068 - protein, 349 aa, unidentified
  source 1..349: note = Beggiatoa leptomitoformis
  REGION 1..349: note = tr|A0A2N9YEX4|A0A2N9YEX4_9GAMM Epoxyqueuosine reductase OS=Beggiatoa leptomitoformis OX=288004 GN=queG; PE = 3 SV=1
MLDYNVFASNIKQWGIELGFQQVGISDIDLTTAEQTLIQWLNDGYHGDMAFMAKHGTKRSRPAELVPDTLRVISVRMDYLPESQMQMLAVLNQSGSAYISRYALGRDYHKVLRQRLKQLAIRITKEIDGQIYRVFVDSAPVLEKPLAEKAGLGWIGKHTNLINRQVGSYFFLGEIYVDLPLPVDVPVNAHCGRCQACLTICPTQAIIAPYQLDARRCIAYLTIEFKGSIPIELRPLIGNRIYGCDDCQLVCPWNRFAQLTTESDFLPRQALINPPLITLFNWTEAEFLQQTEGSAIRRIGYESWLRNIAVALGNATPTTDIIACLQQRLSVPSTIVREHVEWALQRLQR

SEQ ID NO: 75069 - protein, 392 aa, Beijerinckia indica
  REGION 1..392: note = tr|B2IDU1|B2IDU1_BEII9 Epoxyqueuosine reductase; OS = Beijerinckia indica subsp. indica (strain ATCC 9039 / DSM 1715 / NCIB 8712) OX=395963 GN=queG PE=3 SV=1
MDQTQEKAFKIALLNEARAQGFTLCRVTHPGALPDAPVRLRAWLDKGAAGDMDWMRETEARRADPRILWPEVQSIIMLGMNYGPAEPPLAHLFEPERGNISVYARGRDYHDVIKGRLKLLAGWLLAHARKTRLVAEEPALKVFIDTAPVMEKPLAAAAGLGWQGRHSNLVSREAGSWLFLGSIFTTLPLSPDRPESDHCGSCHACLDICPTSAFPQPYVLDARRCISYLTIEHKGPIPPEFRKKIGNRIYGCDDCLAVCPWNKFAKAASETKLLARAEWTAPPLHLLLGLNDAAFRRFFAGSPIKRIGRVRFLRNVLIAAGNSGDRSLIVSVRTLLDDEAPLVRGAAIWALAELLPRTEFLTLAGRLAPREKDMSVLLEWVQAGVTEKGVFA

SEQ ID NO: 75070 - protein, 380 aa, Beijerinckia sp.
  REGION 1..380: note = tr|A0A1H4WRI1|A0A1H4WRI1_9RHIZ Epoxyqueuosine reductase OS=Beijerinckia sp. 28-YEA-48 OX=1882748 GN=queG; PE = 3 SV=1
MSPSFIDALRQRAAELGFDQCRIAAPDAIPQAPARLQQWLGEGAHGEMDWMAETAERRSDPRALWSEVRSVIVLAVNYGPDTDPLASLDQKSQATISVYARNRDYHEHIKGRLKMLAQFLISRADAEADVKVFVDTAPVMEKPLAAAAGIGWQGKHTNLVSRDHGSWLFLGTIFTTLPLPIDPPESDHCGSCRACLDICPTKAFPAPYRLDARRCISYLTIEHKGSIDPQLRTAMGNRIYGCDDCLAACPWNKFAEVAREAKFQARDDLVAPPLTELAALDDAAFRTKFSGSPIKRIGRDRFVRNVMIAIGNSADAALVPVARARLDDASPLVRAMAVWALQQLLPSHQFAALHQQVAARELDPVVLAEWAANATSRTMS

SEQ ID NO: 75071 - protein, 421 aa, unidentified
  source 1..421: note = Beijerinckiaceae bacterium
  REGION 1..421: note = tr|A0A539CVQ1|A0A539CVQ1_9RHIZ Epoxyqueuosine reductase OS=Beijerinckiaceae bacterium OX=1978229 GN=queG; PE = 3 SV=1
MGRERDGKELVRKDKIAAGLPLPARGPAAGRDPEPGLRGSRFLGAAFKARLREQARSLGFDVCRITHPGAIPQAPQQLEAWLASGAAGSMEWLASTQARRSDPRKLWPETASIIMLGMNYGPADDPLAALAQKSAANISVYTRNRDYHGLIKGRLKLLGSWLAKEAKGTEIKVFVDTAPVMEKPLAQAAGLGWSGKHSNLVSRDFGSWLFLGAIFTNLPFSPDSPEVDHCGTCAACLDICPTKAFPRPYVLDARRCISYLTIEHKGHIGREFRPLMGNRIFGCDDCLAVCPWNKFAVFAREAKLQAREALAAPQIADLLRLDDAAFRVLFSGSAVKRIGFDRFTRNVLIAAGNSGNPALAGPVMEKLESPSALVRAMAVWALGRLVASDRLAELERRFRGAETDATVAAEWAAATGAGAGA

SEQ ID NO: 75072 - protein, 348 aa, unidentified
  source 1..348: note = Beijerinckiaceae bacterium
  REGION 1..348: note = tr|A0A5E4H2Q5|A0A5E4H2Q5_9RHIZ Epoxyqueuosine reductase OS=Beijerinckiaceae bacterium RH CH11 OX=2572038; GN = queG PE=3 SV=1
MKTKLAARARDLGFDLCRVAAPDAIPLAPERLRAFIEAGRAGDMAWLAETEPRRADPRVLWPDVRAIVMLGLNYGPERDPLETLADRSAANVSVYARGRDYHEVIKGKLKQLAGWLVAEARRAGEADADVKVFVDTAPVMEKPLAEAAGLGWQGKHTNLVSRELGSWLFLGSIFTTLPLAPDAPEGDHCGSCRACLDACPTDAFPAPYQLDATRCISYLTIEHQGAIPHEFRKAIGNRIFGCDDCLAVCPWNKWAQAGRDMKLAAKPELEAPRIADWLALDDAGFRATFANTPVRRLGYARFKRNLLIAAGNSGDAALAALVRAHVGAPSPLVDEAARWAMGELAASV

SEQ ID NO: 75073 - protein, 311 aa, Belliella baltica
  REGION 1..311: note = tr|I3Z3L7|I3Z3L7_BELBD Epoxyqueuosine reductase; OS = Belliella baltica (strain DSM 15883 / CIP 108006 / LMG 21964 / BA134) OX=866536 GN=queG PE=3 SV=1
MINSKEKYAQMIKTQAKNLGFDFCGIAKAEFLEDEAPKLEAWLNQNYHGQMAYLANHFDKRLDPTKLVDGAKTVVSLIYNYFPESTLPESPSDLKIAKYAYGKDYHFVIKDKLNTLLQNLQEEIGEIGGRAFVDSAPVMERQWAQKAGLGWTGKNSLLLNKKMGSFFFLAELIIDLEVAPDLPMTIDYCGTCTKCVDACPTDAIVGSGVVDGSRCISYFTIELKEQIPYEVKGKFENWIFGCDICQDVCPWNRFSKPHQEAEFLPHPDLQQMKRKDWEEITAETFNRVFQKSAVKRTKLEGLIRNIDFVKK

SEQ ID NO: 75074 - protein, 313 aa, unidentified
  source 1..313: note = Belliella buryatensis
  REGION 1..313: note = tr|A0A239BRL4|A0A239BRL4_9BACT Epoxyqueuosine reductase OS=Belliella buryatensis OX=1500549 GN=queG PE=3; SV = 1
MSLLYSKDKYAQIIKTQAKNLGFDFCGISKAGFLEEEAPRLENWLNQNYHGQMGYLANNFDKRLDPTKLVEGAKTVVSLIYNYYPAKKLSEDPQDYKIAKYAYGKDYHFVIKDKLRDFLQKLNEEIGEIGGRAFVDSAPVMERQWAQKSGLGWTGKNSLLLNRQMGSFFFLAELIIDLEVSPDTPMAKDYCGTCTKCIDACPTDAIVKPGVVDGSKCISYFTIELKDQIPTEVKGKFENWVFGCDICQDVCPWNRFSKPHQEPEFNPHPELMSFSKKDWEEITQETFNKVFQKSAVKRPKLEGLRRNISFVKK

SEQ ID NO: 75075 - protein, 313 aa, Belliella pelovolcani
  REGION 1..313: note = tr|A0A1N7KR12|A0A1N7KR12_9BACT Epoxyqueuosine reductase OS=Belliella pelovolcani OX=529505 GN=queG PE=3; SV = 1
MSLTISKEKYAQIIKSQANRLGFDFCGIAKADFLEEEAPKLENWLNQNYHGEMAYLANHFDKRLDPRRLVDGAKTVVSLIYSYYPESKLPENTEDYKLAKYAYGKDYHFVIKDKLKSLLQSLQEEIGEINGRAFVDSAPVMERQWAQKAGLGWLGKNSLLLNRKMGSFFFLAELIIDLEVAPDHAMTQDYCGTCTKCIDACPTDAIIEPGVVNGAQCISYFTIELKESIPSEVKGKFENWIFGCDICQDVCPWNRFSKPHQEPEFNLHPELMAFSKKDWEEITQETFNKVFQKSALKRTKLEGLRRNISFVKK

SEQ ID NO: 75076 - protein, 383 aa, Bellilinea caldifistulae
  REGION 1..383: note = tr|A0A0P6XHC2|A0A0P6XHC2_9CHLR Epoxyqueuosine reductase OS=Bellilinea caldifistulae OX=360411 GN=queG; PE = 3 SV=1
MVGNSPDLKEFIKAEAIRLGFDLVGFTDPSPPTSFPSFQKWLNQGMHGEMAYLSRPDAVARRADPSLILPGVRTILVVALRYPRPEDAPPASSKPFGKVAAYAWGEDYHTIIPSRLRELVTALQGKIGRSFEWKILTDSGPVLERDLAQRAGLGWVGKNTCLINPRIGSYFLLGELFLTLDLEPDSPFPADHCGSCQRCIQACPTHCILPDRTLDARRCISYLTIENKTEIPPDLRPALDNWVFGCDICQQVCPWNIRFASPHHDPAFSPKEDTARPVLSREILLSQAEFKQKFSQSPVLRAKRRGYLRNVAVALGNSLRSENLSALITSLKSDEEPLVRSHSAWAIGRIGGEQARTALQEALKTETHPQVVQEICSALQNLP

SEQ ID NO: 75077 - protein, 343 aa, Belnapia rosea
  REGION 1..343: note = tr|A0A1G6KIX4|A0A1G6KIX4_9PROT Epoxyqueuosine reductase OS=Belnapia rosea OX=938405 GN=queG PE=3 SV=1
MTKDLIRAEAQRLGFDAVGFAAATLPAEARARLDRFLAEGMHGTMGWMEARAEQRAHPRALWPEAISIVSLGLSYAPAEDPLANLSRRDRGNISIYARNRDYHDVLKSRLKALARWMVATWPEALVKVFVDTAPVMEKPLAQEAGLGWQGKHTNLVSRQHGSWLFLGEVYTTLSLPADPPGADRCGRCSACLDICPTRAFPEPRRLDARRCISYLTIEHRGPIPEEHRAPMGNRIYGCDDCLAVCPWNKFARAHSEPGFAPRASLDAPRLAELAMLDDAGFRALFTASPVKRIGRDRFVRNVLVAIGNSGDPALRATAQALAEDPDPVVAEAARWAAQRLEAA

SEQ ID NO: 75078 - protein, 324 aa, Bergeyella zoohelcum
  REGION 1..324: note = tr|A0A376C190|A0A376C190_9FLAO Epoxyqueuosine reductase OS=Bergeyella zoohelcum OX=1015 GN=queG_1 PE=3; SV = 1
MKPSQKEAISQKIKTFAEALGFMACGISKAGFLEDAAPRLEEYLKNNRHGEMRYMENYFDKRLDPTLLVPGAKSVISFLYNYYPEEKIDAQNGFQIAKYAYGLDYHDVLKEKLRTLVVMLEEEIGAFEHRVFVDSAPVLERAWAERAGLGWIGKNGNLLAKKSGSFFFLGEIICDLELIYDHPTTDHCGNCRKCIDACPTQAIIAPKVLDGSKCISYLTIELKNEISTEFTGKMGDWIFGCDICQDVCPWNRFSVSNPASWLQPHPKLLELNKKDWQDLTQETFSQIFRKNPVKRTKYTGLMRNIEFVMKQDMKDSEDEKMMKL

SEQ ID NO: 75079 - protein, 324 aa, Bergeyella zoohelcum
  REGION 1..324: note = tr|K1LLE8|K1LLE8_9FLAO Epoxyqueuosine reductase; OS = Bergeyella zoohelcum ATCC 43767 OX=883096 GN=queG PE=3; SV = 1
MKPSQKEAISQKIKTFAEALGFMACGISKAGFLEDAAPRLEEYLKNNRHGEMRYMENYFDKRLDPTLLVPGAKSVISFLYNYYPEEKIDAQNGFQIAKYAYGLDYHDVLKEKLRTLVAMLEEEIGAFEHRVFVDSAPVLERAWAERAGLGWIGKNGNLLAKKSGSFFFLGEIICDLELIYDHPTTDHCGNCRKCIDACPTQAIIAPKVLDGSKCISYLTIELKNEISTEFTGKMGDWIFGCDICQDVCPWNRFSVSNPASWLQPHPKLLELNKKDWQDLTQETFSQIFRKNPVKRTKYTGLMRNIEFVMKQDMKDSEDEKMMKL

SEQ ID NO: 75080 - protein, 380 aa, Bermanella marisrubri
  REGION 1..380: note = tr|Q1N267|Q1N267_9GAMM Epoxyqueuosine reductase; OS = Bermanella marisrubri OX=207949 GN=queG PE=3 SV=1
MPSLYLLNPCTTNLMTQTPDSISNIDWHQLTAQIKQWAYELGFAQVGITDVNMEQHAKALKDWLAKGYHGEMSYMADHGNKRYTPDALVPGTLRIISVRMNYMPEDVQTLEILDHPSKAYISRYALGRDYHKLIRKRLTQLGKRIESLFSQLSNDVAYRAFVDSAPVLERGIAQKAGLGWIGKNAMLINPKAGSYFFLGELFTNLPLIMDEPYDDMNCGSCTACFAACPTDAIVDNHVVDARKCISYLTIELKSSIPTELRSKIGNRIFGCDDCQLCCPWTKFTDNTQETDFTPRHQLDDVELLELFHWDESTFLQKTEGMPLRRSGFELWQRNIAVALGNAAQSEHIIQALEEKRANSTEMVQEHIDWAIEQQIAKRKQ

SEQ ID NO: 75081 - protein, 359 aa, Bermanella sp.
  REGION 1..359: note = tr|A0A2D4S6G9|A0A2D4S6G9_9GAMM Epoxyqueuosine reductase OS=Bermanella sp. OX=2024825 GN=queG PE=3 SV=1
MITPEQSQTLANNIKTWGEELGFAQVAITDVDLKEHGERLVEWLEKGYHGEMAYMADHDDMRYRPEKLHPGTFRIITLRMDYMAPEVETIRVLNNPDQAYISRYALGRDYHKLMRKRITQLGKKIEQAISELDLEPNFRAFVDSAPVLERGLAQKAGMGWIGKNAMLINPKAGSYFFLGELFTNLPLPLDKPYQDMNCGSCTACITECPTGAIVDNHVVDGRKCISYLTIELKTAIPEKLRSKMGNRIFGCDDCQLCCPWNKFTKASQEQDFTPRHNLDTATLLELFAWDETTFLSKTEGTPIRRAGHERWLRNIAVALGNAPYSQEIITALNDKAHFDSALVQEHANWALQQQLNKTD

SEQ ID NO: 75082 - protein, 365 aa, Bermanella sp.
  REGION 1..365: note = tr|A0A1Y5DI04|A0A1Y5DI04_9GAMM Epoxyqueuosine reductase OS=Bermanella sp. 47_1433_sub80_T6 OX=1856278; GN = queG PE=3 SV=1
MTTSVSINANELAQQIKAWGQELGFQQVGITNVDLGEHGERLQEWLKKDYHGEMFYMADHGDKRYRPEKLVPDTLRIITVRMDYMPPEIETLKILNSPNQAYISRYALGRDYHKLMRKRITQLGKKIEAAVGHFGYRAFVDSAPVLERGLAQKSGQGWIGKNAMLINPKAGSYFFLGELFTDLPLPIDEPFEEMHCGSCRACLDFCPTGAIVDNHIVDGRKCISYLTIELKGSIPEDLRPKMGNRIFGCDDCQLCCPWNKFSKPTAESDFTPRHHLDSATLIELFSWDEQTFLSKTEGTPIRRAGHERWLRNIAVGLGNAPSNENIINALNSRLDFESELVHEHVVWALDQHKLKNKIQVSNATR

SEQ ID NO: 75083 - protein, 315 aa, unidentified
  source 1..315: note = Bernardetia litoralis
  REGION 1..315: note = tr|I4AHK3|I4AHK3_BERLS Uncharacterized Fe-S protein; OS = Bernardetia litoralis (strain ATCC 23117 / DSM 6794 / NBRC 15988 / NCIMB 1366 / Sio-4) OX=880071; GN = Fleli_0990PE=4 SV=1
MNPISLHQKTEYFKNVAFEAGFLHCGISKATFLEKEARDLEKWLTQGKNGQMQWIENYFDIRLDPRLLVDNAKSVLTFAYNYYPPLPLERENNYKISKYAYGRDYHKVIKKKLKHLLNHLKEEFGDFNGRAFVDSAPIMEKIWAKKSGITWQGKHTNAINPKTGSFFFLATLVIDIELEYDNPTKDRCGNCTLCLDACPTDALSLENPYQIDGSKCISYFTIELKDKIPSEMQGKFEDWIFGCDICQDVCPWNKRKSAQIAHTENDFLPSELLQEMTKKDWHELTNELFDTLFLGTPIKRTKFEGLKRNIEFVKK

SEQ ID NO: 75084 - protein, 347 aa, unidentified
  source 1..347: note = Unknown
  REGION 1..347: note = tr|A0A0N1AM37|A0A0N1AM37_9PROT Epoxyqueuosine reductase OS=beta proteobacterium AAP51 OX=1523421 GN=queG; PE = 3 SV=1
MRVWARELGFSQIGISGIDLASAEAGLSAWLAAGFHGGMGYMAHHGLKRARPAELVPGTVCVITARMDYLPRNAPPQWAQQEWQALASPQQAVVSVYARGRDYHKVLRQRLQRLAERLAAEVGPLGHRVFTDSAPVLEVELATRAGLGWRGKHTLALQRDAGSMFFLGEIYLDLPLPLDEPASAHCGSCQACITACPTQAIVAPYRLDARRCISYLTIEHAGSIPVEFRPLMGNRIYGCDDCQLACPWNKYAQRSPLPDFDVRDGLHDTTLLQLWAWDEAEFLRRTEGSAIRRIGITRWRRNLAVALGNAWRVQGDAAIARALQAALLQADDLVAEHIRWALAQRAA

SEQ ID NO: 75085 - protein, 358 aa, unidentified
  source 1..358: note = Unknown
  REGION 1..358: note = tr|B6BTT3|B6BTT3_9PROT 4Fe-4S ferredoxin-type domain-containing protein OS=beta proteobacterium KB13; OX = 314607 GN=KB13_1171 PE=4 SV=1
MLDKAYWKDISKKIIATGKELGFNDVGISDTVINQNQRLYKEWIDAKNHGAMSYLEDHQDIKFDPENILANTKSIISVRLDYLPLNENLIDLINQKDKAYIARYALGRDYHKTLKKKLNHFGSLIESIILESDFDFKFRAITDSAPSPEIEIATQAGLGWRGKNTLLLNKNNGSWFFLGELYTNAPLVFNQTSSTNHCGSCSACIDICPTQAIEKPYYLNASKCISYWTIEHKGTIPISFRKKIGNRIYGCDDCQIICPWNKFAKKSTEIDFFVRHKLNNISLMGCFLMDNHRFNEYFNGSAIRRIGYEKWISNVAIALGNAGHDQKIIDALIKRSEDPSNLIKEHVLWAISEQEAKK

SEQ ID NO: 75086 - protein, 447 aa, unidentified
  source 1..447: note = Betaproteobacteria bacterium
  REGION 1..447: note = tr|A0A536TQ83|A0A536TQ83_9PROT Epoxyqueuosine reductase OS=Betaproteobacteria bacterium OX=1891241; GN = queG PE=3 SV=1
MFNQGVAGTLDCTKPAQLTQHAAHQRRLASPELAGKRNDHAAAKSRRERRTGSQSGVRVRQVALQRFYNRGVFHREVRCPVSAMSATPVPRQVDLAALARDIRGWGIELGFAEIGIADTALAAEEVRLSAWLATGRHGEMHYMARHGLRRARPADLVPGTIRVISARLDYQPPRARDAASVLADSRRAYISRYALGRDYHRVLRRKLQRLADRITAAVGSFRYRVFTDSAPVLEVALAAKAGLGWRGKHTLLLTRHAGSYFFLGEIYTDLPLPVAAAASEHCGSCHACIDACPTGAIVAPYELDARRCISYLTIELEGSIPEALRPLIGNRVYGCDDCQLVCPWNKYAQASAEPDFAVRNGLDEADLVALFAWTADEFATRMEGSAIRRIGYERWLRNLAVGLGNADYDDDVVAALAARADDPSPLVREHVAWALARQRSKSPAQAA

SEQ ID NO: 75087 - protein, 370 aa, unidentified
  source 1..370: note = Betaproteobacteria bacterium
  REGION 1..370: note = tr|A0A142LIH0|A0A142LIH0_9PROT Epoxyqueuosine reductase OS=Betaproteobacteria bacterium UKL13-2; OX = 1690485 GN=queG PE=3 SV=1
MNEIDFQQLAADIKVWGKSLGFQEVGITDTNLSNEAVLLEGWLASGYHGSMDYMARYLGANGSGQDTVPHRAIPASIVPGTVRIITTRLNYDTLVACDGWEVLSDPSKAFISRYALGRDYHKVVRAKLVALAETIAEKVPSLAYRVFADSAPVMEVALATKAGIGWRGKHTLLLNREAGSLFFLGEIYINLPLPIDAPTTEHCGTCTRCIDVCPTNAIVAPYVVDARRCISYLTIENKDAIPIEFREAIGNRIYGCDDCQLTCPWNKYAAPTGEKDFMIRHQLDNITLGELWDWNETTWLERMRGSAIRRIGFERWQRNLAVAIGNALRADKLPVAEADSLRQRLRFARTSATPLVAEHIDWALACDDRD

SEQ ID NO: 75088 - protein, 384 aa, unidentified
  source 1..384: note = Bhargavaea beijingensis
  REGION 1..384: note = tr|A0A1G7G7A4|A0A1G7G7A4_9BACL Epoxyqueuosine reductase OS=Bhargavaea beijingensis OX=426756 GN=queG; PE = 3 SV=1
MDTVTLQQELRAFAREAGIDKIGFTTADPFREMKNRLRRQQEAGFQSGFEKGSLEERTDPALLLEEPESIIAIAVAYPSKLDGAPKGSKGARRGMFCRASWGQDYHDVLKEKLALLEAFILERVPGARLRSMVDTGELVDRAVAERAGIGWSGKNCSIITPEFGSYVYLGEMITNIPFEPDEPIEDGCGDCTLCLDICPTGALIEGGRLNAQRCIAFLTQTKGSLPEEFRTEIGNRVYGCDTCQTICPKNKGMHNRIQEAFRPDPELVKPLLEPLLNLSNREFKETFGHMSGSWRGKNPIQRNAIYALGHFREESAMPELSHILREDVRPYMRGASAYALGKIGTEEAETVLRHAESREREEEVLEEIRAALRRIEDQKKEVRE

SEQ ID NO: 75089 - protein, 384 aa, Bhargavaea cecembensis
  REGION 1..384: note = tr|A0A163EE05|A0A163EE05_9BACL Epoxyqueuosine reductase OS=Bhargavaea cecembensis OX=394098 GN=queG PE=3; SV = 1
MDTVTLQRELRAFAREAGIDKIGFTTADPFREMKNRLRRQQESGFQSGFEKGSLDERTDPALLLEEPESIIAIAVAYPSKLDDAPKGKKGARRGMFCRASWGQDYHDVLREKLALLEAFILERVPDARLRSMVDTGELVDRAVAERAGIGWSGKNCSIITPEFGSYVYLGEMITNIPFEPDEPIEDGCGDCTLCLDICPTGALIEGGRLDAQRCIAFLTQTKGSLPEEFRTEIGNRVYGCDTCQTICPKNKGMHNRIHEAFRPDPELAKPLLEPLLNLSNREFKETFGHMSGSWRGKNPIQRNAIYALGHFREQSALPELSRVLREDVRPYMRGASAYALGKIGTEEAETALHHAESREKEEEVLEEIRGALRHIADQKKEVHE

SEQ ID NO: 75090 - protein, 384 aa, Bhargavaea cecembensis
  REGION 1..384: note = tr|M7NCI7|M7NCI7_9BACL Epoxyqueuosine reductase; OS = Bhargavaea cecembensis DSE10 OX=1235279 GN=queG PE=3; SV = 1
MDTVTLQRELRAFAREAGIDKIGFTTADPFREMKNRLRRQQESGYQSGFEKGSLDERTDPALLLEQPESIIAIAVAYPSKLDDAPKGKKGARRGMFCRASWGQDYHDVLREKLALLEAFILERVPGARLRSMVDTGELVDRAVAERAGIGWSGKNCSIITPEFGSYVYLGEMITNIPFEPDEPIEDGCGDCTLCLDICPTGALIEGGRLNAQRCIAFLTQTKGSLPEEFRTEIGNRVYGCDTCQTICPKNKGMHNRIHEAFRPDPELAKPLLEPLLNMTNREFKETFGHMSGSWRGKNPIQRNAIYALGHFREQSALPELSRILREDVRPYMRGASAYALGKIGTEQAETALRHAESREKEEEVLIEIRAALRRIADQKKEVHE

SEQ ID NO: 75091 - protein, 384 aa, unidentified
  source 1..384: note = Bhargavaea ginsengi
  REGION 1..384: note = tr|A0A1H7CDZ1|A0A1H7CDZ1_9BACL Epoxyqueuosine reductase OS=Bhargavaea ginsengi OX=426757 GN=queG PE=3; SV = 1
MDTVTLQRELRAFAREAGIDKIGFTTADPFREMKNRLRRQQEAGFQSGFEKGSLDERTDPALLMEEPESIIAIAVAYPSKLDDAPKGTKGARRGMFCRASWGQDYHDVLREKLALLEAFILERVPGARLRSMVDTGELVDRAVAERAGIGWSGKNCSIITPEFGSYVYLGEMITNIPFEPDEPIEDGCGDCTLCLDICPTGALIEGGRLNAQRCIAFLTQTKGSLPEEFRTEIGNRVYGCDTCQTICPKNKGMHNRIHEAFRPDPELAKPLLEPLLSLSNREFKEAFGHMSGSWRGKNPIQRNAVYALGHFREQTALPELSRILREDVRPYMRGASAYALGKIGTAEAETVLQHAESREREEEILEEIRAALSLIADQKKEVHE

SEQ ID NO: 75092 - protein, 379 aa, Biostraticola sp.
  REGION 1..379: note = tr|A0A4U2UN12|A0A4U2UN12_9ENTR Epoxyqueuosine reductase OS=Biostraticola sp. BGMRC 2031 OX=2575567; GN = queG PE=3 SV=1
MSYPFDLMELARLIKHWGLALGFQHIGICDTDLAAHEPELQAWLDKQYHGDMAWMARHGMLRARPAELLPGTLRVISAGMNYLPADAAFARTLKNPRLGYVSRYALGRDYHKVLRHRLQQLGDRIREWCAEVNFRPFVDSAPILERPLAAKAGLGWVGKHSLLLNREAGSWFFLGELLIDIPLPTDAPAAEGCGRCVACLTACPTGAIVAPYTVDARRCISYLTIELDGSIPEALRPLMGNRIYGCDDCQLICPWNRFAPLTAEKDFSPRVVLQSSRLLELFAWDEATFLRTTEGSPIRRIGHRRWLRNIAVALGNAPYEDHIVLALQNRLGGDPMVDEHIVWALCQQRQRRGASGVEVQPAGHKRLIRSIEKGLPRDA

SEQ ID NO: 75093 - protein, 359 aa, Biostraticola tofi
  REGION 1..359: note = tr|A0A4R3Z3V7|A0A4R3Z3V7_9ENTR Epoxyqueuosine reductase OS=Biostraticola tofi OX=466109 GN=queG PE=3 SV=1
MGFQQIGICDTDLSDQEPLLQAWLDNQYHGEMDWMARHGMMRARPHELLPGTLRVISVRMNYLPARAAFASTLKNPRLGYVSRYALGRDYHKVLRSRLKQLGEKIRAWCGQANYRPFVDSAPILERPLAAKAGLGWVGKHSLILNREAGSWFFLGELLIDLPLPVDGAVKEECGKCVACITTCPTGAIVAPYTVDARRCISYLTIELEGDIPEALRPLIGNRIYGCDDCQLICPWNRFSQLTDEADFSPRAALHAPELIDLFHWDEARFLRVTEGSAIRRIGHLRWLRNIAVALGNAPYEPAVLSALQSRSGENALLDRHIQWAVGEQLARREAQSVKVQTAQQQRLVRSIEKGLSRDA

SEQ ID NO: 75094 - protein, 307 aa, Bizionia algoritergicola
  REGION 1..307: note = tr|A0A5D0R389|A0A5D0R389_9FLAO Epoxyqueuosine reductase OS=Bizionia algoritergicola OX=291187 GN=queG; PE = 3 SV=1
MTNTSKYSQIIKTEAKRLGFLSCGISQAGFLETEAPRLETWLNKNMNGEMSYMENHFDKRLDPTKLVEGSKSVVSLLLNYYPSETQKEDTYKLSKYAYGTDYHFIIKDKLKTLLQTIQEEIGEVGGRAFVDSAPVLDKAWAAKSGLGWIGKHSNLLTQQVGSFYFIAELIIDLELEYDAVTTDHCGTCTKCIDACPTQAITEPYVVDGSKCISYFTIELKENIPTEFKGQFNDWMFGCDICQDVCPWNRFSKAHSEPLFNPHPELLEMTKKDWEEITEDTFRKVFQKSAVKRTKFSGLTRNIDFLKD

SEQ ID NO: 75095 - protein, 308 aa, Bizionia argentinensis
  REGION 1..308: note = tr|G2EFS7|G2EFS7_9FLAO Epoxyqueuosine reductase; OS = Bizionia argentinensis JUB59 OX=1046627 GN=queG PE=3; SV = 1
MINNKAKYTALIKAEAKRLGFLSCGISPAGFLEEEAPRLENWLNKNMNGEMSYMENHFDKRLDPTKLVEGSKSVVSLLLNYYPEETQQNETYKLSKYAYGTDYHFVIKDKLKSLLQTIQDEIGEVGGRAFVDSAPVLDKAWASKSGLGWVGKHTLLLSQQSGSFHFIAELIIDLELEYDSITTDHCGTCTKCIDACPTNAIAEPYVVDGSKCISYFTIELKDNIPTEFKGQIEDWMFGCDICQDVCPWNRFSKAHSEPLFNPHPDLLEMTKKDWEEITEDTFKKVFKKSAVKRTKFAGLTRNIDFIKG

SEQ ID NO: 75096 - protein, 307 aa, Bizionia echini
  REGION 1..307: note = tr|A0A1I4ZSN6|A0A1I4ZSN6_9FLAO Epoxyqueuosine reductase OS=Bizionia echini OX=649333 GN=queG PE=3 SV=1
MTNKSKYSQIIKDEAKRLGFLSCGISQAGFLEEEAPRLESWLKNKSHGDMQYMENHFDKRLDPTKLVEGSKSVVSLLLNYYPSETQHADTYKISKYAYGTDYHFVIKDKLKELLQTIQEEIGEVGGRAFVDSAPVLDKAWAAKSGLGWIGKHSNLLTQQVGSFYFIAELVIDLELEYDAVTTNHCGTCTKCIDACPTQAITEPYVVDGSKCISYFTIELKENIPTEFKGKFNDWMFGCDICQDVCPWNRFSKAHSEPLFNPHPELLDMTKKDWEEITEDTFRKVFQKSAVKRTKFSGLTRNIDFLLE

SEQ ID NO: 75097 - protein, 308 aa, Bizionia myxarmorum
  REGION 1..308: note = tr|A0A5D0RCV3|A0A5D0RCV3_9FLAO Epoxyqueuosine reductase OS=Bizionia myxarmorum OX=291186 GN=queG PE=3; SV = 1
MIDNRSKYTAMIKTEAKRLGFLSCGISKAQFLEEEAPRLENWLNKNMNGEMSYMENHFDKRLDPTKLVEGSKSVVSLLLNYYPSEFQNDDTYKISKYAYGTDYHFIIKDKLKSLLHFIQEEIGEVDGRAFVDSAPVLDKAWAAKSGLGWVGKHTLLLTQKSGSFHFIAELIIDLELEYDSITTDHCGSCTKCIDACPTQAITEPYVVDGSKCISYFTIELKENIPTEFKGQFNDWMFGCDICQDVCPWNRFSKAHSEPLFNPHPELLEMSKQDWEEITEETFQKVFKKSALKRTKFTGLTRNIDFLKS

SEQ ID NO: 75098 - protein, 308 aa, Bizionia paragorgiae
  REGION 1..308: note = tr|A0A1H4BUL5|A0A1H4BUL5_9FLAO Epoxyqueuosine reductase OS=Bizionia paragorgiae OX=283786 GN=queG PE=3; SV = 1
MNSKANYTQWIKTEAKRLGFLSCGISKAEFLETEAPRLEDWLNKNRNGEMSYMENHFDKRLDPTKLVDDSKSVISLLLNYYPSQTQTDPEAPKLSKYAYGHDYHHIIKGKLKELTHFIQEEIGEVSGRAFVDSAPVLDKAWAAKSGLGWIGKHSNLLTQKVGSFYFIAELIIDLDLEYDTPTTDHCGTCTACIDACPTQAIVDPYVVDGSKCISYFTIELKDQLPEAMKGQFDDWMFGCDVCQDVCPWNKFSKPHNEPLFNPHPDLLAMTKKDWEEITEDVFKKVFQKSAVKRTKFSGLKRNIAFLKE

SEQ ID NO: 75099 - protein, 309 aa, Bizionia saleffrena
  REGION 1..309: note = tr|A0A5D0QTE4|A0A5D0QTE4_9FLAO Epoxyqueuosine reductase OS=Bizionia saleffrena OX=291189 GN=queG PE=3; SV = 1
MATNKTTYTKGIKAEAERLGFLSCGISKAGFLETEAPRLEDWLNKNRNGQMTYMENHFDKRLDPTKLVDDAKSVISLLLNYYPSETQKDPEAPKLSKYAYGHDYHHIIKGKLKELTHFIQDEIGEVSGRAFVDSAPVLDKAWAAKSGLGWIGKHSNLLTQKVGSFYFIAELIIDLDLDYDAPVTDHCGTCTACIDACPTQAIVDPFVVDGSKCISYFTIELKDQLPNAMKGQFDDWMFGCDVCQDVCPWNKFSKPHNEPLFNPHPELLEMTKQDWEEITEDVFKKVFQKSAVKRTKFSGLKRNIEFLKE

SEQ ID NO: 75100 - protein, 331 aa, unidentified
  source 1..331: note = Blastocatellia bacterium
  REGION 1..331: note = tr|A0A3B9MLQ6|A0A3B9MLQ6_9BACT Epoxyqueuosine reductase OS=Blastocatellia bacterium OX=2052146 GN=queG; PE = 3 SV=1
MQASVTACSQNDTADKTSARELSRRIKDRAFVEGFEKVGVVPARVLDAAHERLTTWLERGYHAGMAWMARDPQTRTNPRKLFPEARSVVVVALNYYTPYKHAEDPATGKVSRYAWGDDYHDVVGAKLRSLLAWIKEEVPQAEGKVCVDIQPMMDKAWAVEAGLGWIGKHTNLITPEYGSWVFIGELLLNIDLEYDKTRVDDHCGSCTLCIDACPTAAINEPYVVDSNKCISYATIELRDAELPRDIAQHLEGWFYGCDICQDVCPWNRFEQVTNEDRFQPRTGNVNATLTEAFELTPQTYAQRFRGSAMKRAKLSGLQRNARALLGANGAK

SEQ ID NO: 75101 - protein, 386 aa, unidentified
  source 1..386: note = Blastocatellia bacterium
  REGION 1..386: note = tr|A0A321L5V1|A0A321L5V1_9BACT tRNA epoxyqueuosine(34) reductase QueG OS=Blastocatellia bacterium AA13 OX=2169413 GN=queG PE=4 SV=1
MSDLLSRIKAVSREVGFEVIGVTSVEPMLRDLAALSGWCSSGYAADMSYMTRQPELNASPGRLVHWARSIITLGVNYYTAAPEFRHENRYGRVARYAWGLDYHDVVKAKLGELSDRIRSLMDDAGFQARGFVDAVPLLERAAAERAGLGFFGKNTNLLRPSQGSWFFLAELFVNIDLPATGEPRQVSCGTCSRCMPACPTNAFAGPYLLDSRLCISYLTIENKGPIPRELREAIGEWLFGCDVCQEVCPFNRFAEDTNWRHLRAEHGKGQRIDLIELLGISTDARFREWCKGTPLTRPKRRGLLRNAAVAAANIGCEAAVPVLSMLIVDDPEPLIRGHALWALARLELKRASKFADAALRNDNDSFVREEAEAILSGCFARQESKK

SEQ ID NO: 75102 - protein, 353 aa, Blastochloris sp.
  REGION 1..353: note = tr|A0A348G4R2|A0A348G4R2_9RHIZ Epoxyqueuosine reductase OS=Blastochloris sp. GI OX=2233851 GN=queG PE=4; SV = 1
MRVTGPDAATESGARLAAWLAAGFHGTMDWMAATANRRPAPRLVWPDVASVIMLGVNYGPAEDPRAATARPARGAISVYAQGDDYHDVIKGAQKRLAQWLVASAGGDVKVFVDTAPVMEKPLAQAAGLGWQGKHTNVVARDFGSWLFLGAIFTTLKLPADSPERDHCGSCKACLDACPTQAFPRPYLLDARRCISYLTIENKGLIPHEFRVAIGNRIYGCDACLAACPWNKFAVEGRTLRLAAREALKAPPLAELVRLDDAAFRALFAKSPVKRIGRARFARNVLIAIGNSGELALAAEALRLLDDAEPLVRGAAVWALGRLDPEAAAAEAAVRAAVEPDAGVRAEWQYFART

SEQ ID NO: 75103 - protein, 326 aa, Blastochloris viridis
  REGION 1..326: note = tr|A0A0S4Q6C7|A0A0S4Q6C7_BLAVI Epoxyqueuosine reductase OS=Blastochloris viridis OX=1079 GN=queG PE=4; SV = 1
MDWMMATANRRPAPRLLWPEVNSVIMLGLNYGPTAHRGAGRAQPDRGAISTYAQGDDYHDVIKGALKRLAQWLVARGGGDVKVFVDTAPVMEKPLAAAAGLGWQGKHTNLVSREFGSWLFLGAIFTTLALPVDQPEHGHCGSCRACLDACPTAAFPAPYQLDARRCVSYLTIENKGPIPPEFRALIGNRIYGCDDCLAACPWNKFAVAGRALRLAAREALIAPPLAELASLDDAAFRALFAKSPIKRIGRDRFVRNVLIAIGNSGDPALAATAEALLGDAAPAVRGMAAWALGRLDTAAAVAMAPERLARESDDDVRAEWCAVLEG

SEQ ID NO: 75104 - protein, 364 aa, Blastochloris viridis
  REGION 1..364: note = tr|A0A182D0M4|A0A182D0M4_BLAVI Epoxyqueuosine reductase OS=Blastochloris viridis OX=1079 GN=queG PE=3; SV = 1
MARAGGEGFDSIGIADPDAIAGAGERLAAWLAAGRHGGMDWMMATANRRPAPRLLWPEVNSVIMLGLNYGPTAHRGAGRAQPDRGAISTYAQGDDYHDVIKGALKRLAQWLVARGGGDVKVFVDTAPVMEKPLAAAAGLGWQGKHTNLVSREFGSWLFLGAIFTTLALPVDQPEHGHCGSCRACLDACPTAAFPAPYQLDARRCVSYLTIENKGPIPPEFRALIGNRIYGCDDCLAACPWNKFAVAGRALRLAAREALIAPPLAELASLDDAAFRALFAKSPIKRIGRDRFVRNVLIAIGNSGDPALAATAEALLGDAAPAVRGMAAWALGRLDTAAAVAMAPERLARESDDDVRAEWCAVLEG

SEQ ID NO: 75105 - protein, 381 aa, unidentified
  source 1..381: note = Blastomonas fulva
  REGION 1..381: note = tr|A0A222WYN7|A0A222WYN7_9SPHN Epoxyqueuosine reductase OS=Blastomonas fulva OX=1550728 GN=queG PE=3 SV=1
MVSGKKNLETDIAAEAARLGFADCAIAPASLGPQTSARLQDWLAEGCHGDMLWMEARSDQRADPATLWSDVRSVIMLGMSYAPARDPFALAEHPGLGRISVYAQGGDYHKTVKTALKALARWLVEQSDDVQVKVFVDTAPVMEKPLAMAAGLGWQGKHTNLVSREHGSWLFLGAIYTTLELAPSGASADLCGSCTACQDVCPTNAFPAPYRLDARRCISYLTIEHAGPIPAELRAGIGNHVYGCDDCLAVCPWNKFADAAHRNQAFLPRAELAAPSLADLLALDDAQFRAVFSGSPIKRSGRVRMVRNAAVAAGNSGDPALAPAVAALLDDADPVVRGAAVWALAELDPARWEAERAARIAHEQDADVQAEWRLADAPAPV

SEQ ID NO: 75106 - protein, 381 aa, Blastomonas natatoria
  REGION 1..381: note = tr|A0A2V3V5K3|A0A2V3V5K3_9SPHN Epoxyqueuosine reductase OS=Blastomonas natatoria OX=34015 GN=queG PE=3; SV = 1
MASGKRNLEAEIAAEAARLGFADCGFAPAVLGPQNALRFQQWLDQGFHGDMLWMEARADQRAEPRALWSDVRSVIMLGMSYAPGRDPFALAEHPDRARISVYAQGGDYHKTVKSALKALARWIVELADDVEVKVFVDTAPVMEKPLAMAAGLGWQGKHSNLVSRSHGSWLFLGAIYTTLDLAPSGAGQDRCGSCTACQDICPTDAFPAPYRLDARRCISYLTIEHAGPIPVELRAGIGNHVYGCDDCLAVCPWNKFADAAHRNRAFLPRAELVAPSLADLLGLDDAGFRALFSGSPIKRSGRGRMVRNALIAAGNSGDAALVAPVAALLEDSDPVVRGAAVWALGRLDPERASAERAARAVSESDPQVQAEWRLADAPQPV

SEQ ID NO: 75107 - protein, 381 aa, Blastomonas sp.
  REGION 1..381: note = tr|A0A2D6GYQ4|A0A2D6GYQ4_9SPHN Epoxyqueuosine reductase OS=Blastomonas sp. OX=1909299 GN=queG PE=3 SV=1
MASGKRNLEAEIAAEAAKLGFADCGFAPAALGPENAARFQAWLDAGCHGDMLWMEGRSHQRAEPKVLWSDVRSVIMLGMSYAPGRDPFALEAQADRGRISVYAQGGDYHKTVKSALKALARWIVAQAEDVQVKVFVDTAPVMEKPLAMAAGLGWQGKHTNLVSRSHGSWLFLGAIYTTLELAPSGAGRDRCGSCTACQDICPTDAFPAPYRLDARRCISYLTIEHEGPIPAELRAGIGNHVYGCDDCLAGCPWNKFADAAHRNQAFLPRAELVAPSLADLLSLDDAAFRALFSGSPIKRSGRGRMVRNALIAAGNSGDGALIAPVAVLLDDADPVVRGAAVWALSRLDPARAGAERAARAAHETDPQVIAEWQLADAPQPV

SEQ ID NO: 75108 - protein, 381 aa, Blastomonas sp.
  REGION 1..381: note = tr|A0A1B3N9W1|A0A1B3N9W1_9SPHN Epoxyqueuosine reductase OS=Blastomonas sp. RAC04 OX=1842535 GN=queG PE=3; SV = 1
MVSGKKNLEADIAAEAARLGFADCAIAPASLGPQTAARLQDWLAKGCHGDMLWMEARSDQRADPATLWSDVRSVIMLGMSYAPGRDPFALAEHPGLGRISVYAQGGDYHKTVKTALKALARWLVEQSDDVQVKVFVDTAPVMEKPLAMAAGLGWQGKHTNLVSREHGSWLFLGAIYTTLELAPSGASADLCGSCTACQDVCPTNAFPAPYRLDARRCISYLTIEHAGPIPAELRAGIGNHVYGCDDCLAVCPWNKFADAAHRNQAFLPRAELAAPSLADLLALDDAQFRSVFAGSPIKRSGRVRMLRNALIASGNSNDSTLIAPVAALLDDPEPVVRGAAVWALAGLDSARWAAERAARMAQEQDADVAAEWRLADAPAPV

SEQ ID NO: 75109 - protein, 380 aa, unidentified
  source 1..380: note = Blastopirellula cremea
  REGION 1..380: note = tr|A0A368KXN3|A0A368KXN3_9PLAN tRNA epoxyqueuosine(34) reductase QueG OS=Blastopirellula cremea OX=1031537 GN=queG PE=4 SV=1
MPLPASELTALIRQEALTVGFSAVGVCPAVSPTGVTRLHDWLDAGYAGEMQYLEDRREAYSHPQYVLEGVHSIVMLALTYKSDPIPLLKPGEGRVSRYAFGELDYHDWIHARLKQLKRAIEGFAPGAKVRGVVDTAPLLEREFAQQAGLGWFGKNTMLLNKQLGSLFFLSAILIDQPLVYDEPHTASHCGTCTACLDACPTDAFVKPHVLDATRCISYLTIELRAEIPPELRSGLEDWVFGCDVCQDVCPWNNKAPLTQHEAFFPNPDRAPLELRSLFSMTDDDFRARFRNTPLWRSRRRGILRNAAIVLGNRPHADQVTALSQGLNDEEWLVRGAAAWALGQHDFPAVMSILRERSESETDPRVQVEIDRALARRSMSP

SEQ ID NO: 75110 - protein, 379 aa, Blastopirellula marina
  REGION 1..379: note = tr|A0A2S8F155|A0A2S8F155_9PLAN tRNA epoxyqueuosine(34) reductase QueG OS=Blastopirellula marina OX=124 GN=queG PE=4 SV=1
MPTSPTDLTSLIRDEAHQLGFSAIGICPAVTPTGLHRFHDWLDAGYAGQMQYLEDRRDAYAHPKHVLEGVQSIVMLALNYKSQPIPPLAPGQGRVSRYAFGELDYHDWIHARLKLLKKAIAQWEPEASVRGVVDTAPLLEREFAQLAGLGWIGKNTMLLNKQLGSLFFLAAILIDRELDYDEPHSASHCGTCTACLSACPTDAFPKPGVLDATRCISYLTIELRDEIPVELRNDMHDWVFGCDVCQDVCPWNNKSPASSHAAFFPASERAPLDLRTLYTMTDDDFRDHFRKTPLWRTKRRGILRNAAIVLGNQPHTDNLPALSRGLSDAEWLVRGASAWALGKHHFPEALQQLSQRQPVEENEHVQREINQALANQPSN

SEQ ID NO: 75111 - protein, 385 aa, Blastopirellula marina
  REGION 1..385: note = tr|A3ZV21|A3ZV21_9PLAN 4Fe-4S ferredoxin-type domain-containing protein OS=Blastopirellula marina DSM 3645 OX=314230 GN=DSM3645_24650 PE=4 SV=1
MKSFPQPSTLTHSLKNAARRLGFLHVGACPAVSPTGIDAFRDWLAAGYAGEMQYLADRVEAYADPGHVLAGARSIVMLTLPYRTDDARPTAAGQGRVSRYAWGEVDYHDLIHGKLKALKREFQQLSADADIRGVVDTAPLLERDFAQLAGLGWIGKNTLLLNKHAGSLFFLAALLTSIELDYDDPHDASHCGTCTACLDVCPTDAFPAPHVLDATRCISYLTIELRGPIPRDLRPGLGEWVFGCDLCQDVCPWNSKAPQSAEPTFIPQSGSNPLELIPLFDLDDDTFRARFRKSPIWRPRRRGLLRNAAIALGNRPTPTAVPALIKGLNDDEPLIRGASAWALGKYDCDASRQALKNRATLETDPEVIEEIQLGLQERNCRKIAP

SEQ ID NO: 75112 - protein, 380 aa, Blastopirellula sp.
  REGION 1..380: note = tr|A0A2G2JQS3|A0A2G2JQS3_9PLAN tRNA epoxyqueuosine(34) reductase QueG OS=Blastopirellula sp.; OX = 2024826 GN=queG PE=4 SV=1
MPESELTLSDQIKQEALALGFMHCGICPAVTAPNYQHFQEWLAAGYAGQMSYLEDRVAAYQDPGHVLDGAKSILMLSLNYRTIEPVTPQAGQGRLSRYAWGEVDYHDLIHKKLKQLKRKFIEIHPAVTVRGVVDTAPLLEREYAQMAGLGWVGKNTLLLNQQRGSLFFLAALLTDVELDYDTPQQTDHCGTCTACLDSCPTDAFVKPYVLDATKCISYLTIELREPIPVELRRGMGDWMFGCDVCQDVCPWNRKSPESELIEFQPIPAHDPIDLISLFDLDDEQFRTRFRKTPLWRSKRRGILRNAAIVLGNNPAPRAIAALTKGLNDIEPLIRGASAWALGSYSQKEAVPLLSDRLEREEDQQVISEIRQALSTFQDLS

SEQ ID NO: 75113 - protein, 373 aa, Blastopirellula sp.
  REGION 1..373: note = tr|A0A2E0AT52|A0A2E0AT52_9PLAN tRNA epoxyqueuosine(34) reductase QueG OS=Blastopirellula sp.; OX = 2024826 GN=queG PE=4 SV=1
MADFSTDLQATAKQLGFTLTGICPAVSPDGFSHLREWLDAGYAGSMHYLEQRYDAYAHPTHVLDGARSILMLAVDYQTEPPHQTAAGQGRVARYAWGTADYHDLIHDRLKQLKKWYLQQHPQAHVRGVVDTAPLMEREFAQLAGLGWVGKNTLLLNRQAGSWFFLAALLTDEELAYDAPHQTDHCGSCTACLDACPTAAFPQPYVMDASRCLSYLTIELRDPIPHELRSEIGDWVFGCDICQEVCPWNRHAPTSTEAALLPTTDANPMDLIALFELDDTTFRERFRKTPLWRPKRRGILRNAAMVLGNQRAPQAIPALSRGLADEEPLVRAAAAWALGEIGGAIAQQLLEDRQALEREEVVSAEIARALALHD

SEQ ID NO: 75114 - protein, 233 aa, Blautia coccoides
  REGION 1..233: note = tr|A0A4R2JGZ1|A0A4R2JGZ1_9FIRM Epoxyqueuosine reductase QueG OS=Blautia coccoides OX=1532 GN=EV205_12329; PE = 4 SV=1
MITREKVKEIMFSLGADLCGIASIDRFGDAPKGYHPLDVLPTCESVISFGCRFPIGTLICKSAIPYTRVRNSITPKMDAIALDFCIEMEKNQIVCVPIPTNEDQWDKNTGRYRSIVSQKHAAQAAGLGTIGRHSLLITPEFGSMVWLGTVLCEQGFEPDEMKEPLCNNCNLCVEICPVNALEKWEIKQQSCWEFAFGDNEEEKVWEISCHKCRDICPYNLGYQNSFLKQNNEG

SEQ ID NO: 75115 - protein, 276 aa, Blautia producta
  REGION 1..276: note = tr|A0A4P6LXC3|A0A4P6LXC3_9FIRM Epoxyqueuosine reductase OS=Blautia producta OX=33035 GN=queG PE=4 SV=1
MPEERRMDMNSRAMTELIVKKAIAFGAASAGIANIRDLKTAPAFVMMPQRPHIDRVGAVENTTGLPEGVVDWKDEMHSMLVIAYEHPEEKPYLDCWLDGKNPPGNLELIKINKKLKTFIESEMPGVTAMPLNYYVEKGGVWLKDSAAVAGLGILGKNNLLITKEFGPRVRLRAMFLSADLPSTGPIDWDPCAGCDMPCRKSCPQNAFGTIAYDPEQYGGLAKLPGRDGSYSLLTCDRQMAEDEDNEIKTPTEVPDYGTAGSIIKYCRECELNCRIR

SEQ ID NO: 75116 - protein, 383 aa, unidentified
  source 1..383: note = Unknown
  REGION 1..383: note = tr|A0A1U9VF79|A0A1U9VF79_9RALS Epoxyqueuosine reductase OS=blood disease bacterium A2-HR MARDI; OX = 1944648 GN=queG PE=3 SV=1
MSENPTSLPEPGLDARLPADEAGMAALVAQIRSWGTGLGFDAIRIADVDLSHAEDGLRTWLAQGFHGDMDYMANHGMLRARPAELVAGTVRAIVARMPYVPHRGAAPPAGGDWRAIEWDRLRRPEDATISLYARGRDYHKVLRQRLQKLAEQIAGAVGPYGYRVFTDSAPVLEVALATNGGLGWRGKHTLLLDRDAGSMFFLGEILIDLPLPVDPPVTPRCGHCTRCIEVCPTQAIVAPYVVDARRCISYLTIEHKGAIPVELRAAMGNHVYGCDDCQLVCPWNKFAVHASLPDFDVRNGFDAVALVDLFGWTEDEFNQRLEGSPIRRIGHERWLRNIAVALGNALRAPQPEPARARLRAALQARADDPSPLVREHVAWALAQ

SEQ ID NO: 75117 - protein, 376 aa, unidentified
  source 1..376: note = Unknown
  REGION 1..376: note = tr|G2ZKW1|G2ZKW1_9RALS Epoxyqueuosine reductase; OS = blood disease bacterium R229 OX=741978 GN=queG PE=3 SV=1
MPEPGLDARLPADEAGMAALVAQIRSWGTGLGFDAIRIADVDLSHAEDGLRTWLAQGFHGDMDYMANHGMLRARPAELVAGTVRAIVARMPYVPHRGAAPPAGGDWRAIEWDRLRRPEDATISLYARGRDYHKVLRQRLQKLAEQIAGAVGPYGYRVFTDSAPVLEVALATNGGLGWRGKHTLLLDRDAGSMFFLGEILIDLPLPVDPPVTPRCGHCTRCIEVCPTQAIVAPYVVDARRCISYLTIEHKGAIPVELRAAMGNHVYGCDDCQLVCPWNKFAVHASLPDFDVRNGFDAVALVDLFGWTEDEFNQRLEGSPIRRIGHERWLRNIAVALGNALRAPQPEPARARLRAALQARADDPSPLVREHVAWALAQ

SEQ ID NO: 75118 - protein, 371 aa, Bordetella sp.
  REGION 1..371: note = tr|A0A1E3ZAV4|A0A1E3ZAV4_9BORD Epoxyqueuosine reductase OS=Bordetella sp. SCN 67-23 OX=1660091 GN=queG; PE = 3 SV=1
MSASPPFAPVSTQDGPDLAALAETIRGWGRELGFSAVGFADLDLDEAGQRLAAWVAEGMHGEMDYMERHLPLRQDPAQLVSGARSAIMVRMDYAPLDGPALAARQRQALDAGDRAVVATYALGRDYHKVLRQRLQRLADRIAGHVGPFGYRVFTDSAPVMEVELARKAGLGWRGKHTLLLSRDGSWFFLGEILTDLPLPADRLETPHCGQCRRCIDACPTGAIVAPYVVDARRCISYLTIELKGSIPEALRQAIGTRVYGCDDCQTACPWNKYARACAEGDFAPRHGLDTASLLDLFAWTERDFDERTQGSAIRRIGYERWLRNLAVALGNAPASGEARAALRERADHPSELVREHVRWALACQSRGKREV

SEQ ID NO: 75119 - protein, 379 aa, unidentified
  source 1..379: note = Bosea lathyri
  REGION 1..379: note = tr|A0A1H6D284|A0A1H6D284_9BRAD Epoxyqueuosine reductase OS=Bosea lathyri OX=1036778; GN = SAMN04488115_11472 PE=4 SV=1
MSGERLKRAVVERALAEGFAVIRVAGSDAIPQAADQLEAWLAEGHHGDMDWLEERRDQRADPRKLWSEVRSVVMLGMNYAGEGDPLAMLAEREKAAISLYARRRDYHDVIKGKLKSVAGLLAARGGADVKVFVDTAPVMEKPLAQAAGLGWQGKHTVLVSREHGSWLLLGAIYTTATLPADVPESDHCGSCTRCLDICPTNAFPQPYQLDARRCIAYLTIEHRSHIDVELRPGIGNRVFGCDDCLAVCPWNKFAEAAQETRLALKGELEALPLADLARLDDAAFRALFAGTPVKRTGRDRFIRNVLIAIGNSGRPDLAASAAGLVSDASPLIRAMAAWALIRLDPCAARHVVHSALAAETDPAVRREWLTLPPETDRAA

SEQ ID NO: 75120 - protein, 359 aa, unidentified
  source 1..359: note = Bosea lupini
  REGION 1..359: note = tr|A0A1H7P316|A0A1H7P316_9BRAD Epoxyqueuosine reductase OS=Bosea lupini OX=1036779; GN = SAMN04515666_103331 PE=4 SV=1
MLRVASVDAIPEAPARLAGWLEAGHHGDMTWLTERTAERADPATLWPAARSIVMLGMSYAGEGDPLAVLAQRDRGAISLYARRRDYHDVIKGKLKSIAGVLAARGDAEVKVFVDTAPVMEKPLAQAAGLGWQGKQTVLVSRQHGAWLFLGAIYTSADLPPDEPERDRCGSCTRCLDICPTKAFPAPYQLDSRRCIAYLTIEHQGHIDAEFREGIGNRVFGCDDCLAVCPWNKFAEAAHETRLALKGELDALPLADLAGLDDAAFRALFAGTPVKRTGRDRFIRNVLIAIGNSGDPTLVANAEALLDDPSSLVRAMAAWALWQLVPSRAAELAPARLARETDPEVRAEWAQPFPNQLEPA

SEQ ID NO: 75121 - protein, 412 aa, Bosea sp.
  REGION 1..412: note = tr|A0A521LGQ3|A0A521LGQ3_9BRAD Epoxyqueuosine reductase OS=Bosea sp. OX=1871050 GN=queG PE=3 SV=1
MVRPDQIAAELSPAAGRPGAGHGAERPLRQSGLLSGAALKRAVAERALSEGFAVIRVAAADAIPQAPERLKTWLEAGYHGEMGWMDERTAERADPRRLWGEVRSIVMLGMNYAGEDDPLATLAEPGKAAISLYARRRDYHDVIKGKLKTVAGLLAARAGADVKVFVDTAPVMEKPLAQAAGLGWQGKHTVLVSREHGSWLLLGAIYTTADLPPDAPETDHCGSCRRCLDICPTNAFPAPYRLDARRCIAYLTIEHPGHIDADLRPGIGNRVFGCDDCLAVCPWNKFASASLETRLALKSELAELSLAELARLDDPAFRTLFAGTPVKRTGHARFLRNVLIAIGNSGLPHLADSAAPHLAHPSPLVRAMAVWALGRLAPQRAADIAATSLQGESDAQVRAEWSMVADSTEDAA

SEQ ID NO: 75122 - protein, 379 aa, Bosea sp.
  REGION 1..379: note = tr|A0A101K4K6|A0A101K4K6_9BRAD Epoxyqueuosine reductase OS=Bosea sp. WAO OX=406341 GN=queG PE=3 SV=1
MSGEKLKAAVFARAKSEGFSAVRVASVDSIPQAPARLAGWLDAGNHGDMAWMTERTAERAAPGVLWPEARSVVMLGMSYAGEGDPLAVLGQRDRGAISLYARRRDYHDVIKGKLKSVAGVLAARGEVDVKVFVDTAPVMEKPLAEAAGLGWQGKHTVLVSRTHGSWLFLGAIYTTAELPPDAPESDHCGSCTRCLDICPTAAFPAPYQLDARRCIAYLTIEHQGHIATEFREGIGNRIFGCDDCLAVCPWNKFAQAAQETRLALRDELDALPLAKLAALDDAAFRKLFAGTPVKRTGRDRFIRNVLIAIGNSGEPALAASAEALIDDPSPLVRAMATWALLRLAPERAAALAPARLACEPDADVRTEWARPDLRKLEPA

SEQ ID NO: 75123 - protein, 359 aa, Bosea thiooxidans
  REGION 1..359: note = tr|A0A1T5GZC7|A0A1T5GZC7_9BRAD Epoxyqueuosine reductase OS=Bosea thiooxidans OX=53254; GN = SAMN05660750_04610 PE=4 SV=1
MIRVAGADAIPEAPGRLLAWLDSGYQGEMGWMAERRDQRADPRRLWSEVRSVVMLGMNYAGEGDPLAVLAQPDKAAISLYARRRDYHDVIKGKLKSVAGLLAARAGADVKVFVDTAPVMEKPLAQAAGLGWQGKHTVLVSREHGSWLLLGAIYTTAELPADAPERDHCGSCRRCLDICPTDAFPAPYQLDARRCIAYLTIEHPGHIDAALRPGIGNRVFGCDDCLAVCPWNKFAQTAQETRLALKDELDGLDLAALARLDDAGFRKLFAGTPVKRTGRDRFLRNVLIAIGNSGRAALAESALPHLADPSPLVRAMAAWALGRLDPERAGELAAAKLDSESDPQVRAEWHALTPQTEDAA

SEQ ID NO: 75124 - protein, 358 aa, Bosea thiooxidans
  REGION 1..358: note = tr|A0A0Q3I0V9|A0A0Q3I0V9_9BRAD Epoxyqueuosine reductase OS=Bosea thiooxidans OX=53254 GN=ARD30_06500; PE = 4 SV=1
MRVAGADAIPEAPGRLLAWLDSGYQGEMGWMAERRDQRADPRRLWSEVRSVVMLGMNYAGEGDPLAVLAQPDKAAISLYARRRDYHDVIKGKLKSVAGLLAARAGADVKVFVDTAPVMEKPLAQAAGLGWQGKHTVLVSREHGSWLLLGAIYTTAELPADAPERDHCGSCRRCLDICPTDAFPAPYQLDARRCIAYLTIEHPGHIDAALRPGIGNRVFGCDDCLAVCPWNKFAQTAQETRLALKDELDGLDLAALARLDDAGFRKLFAGTPVKRTGRDRFLRNVLIAIGNSGRAALAESALPHLADPSPLVRAMAAWALGRLDPERAGELAAAKLDSESDPQVRAEWHALTPQTEDAA

SEQ ID NO: 75125 - protein, 379 aa, unidentified
  source 1..379: note = Bosea vaviloviae
  REGION 1..379: note = tr|A0A0N1F2S8|A0A0N1F2S8_9BRAD Epoxyqueuosine reductase OS=Bosea vaviloviae OX=1526658 GN=queG PE=3 SV=1
MKADRLKQAVLARAVAEGFSVARVAAVDAIPDAPARLAAWLAQGHHGEMGWMEERSDQRADPQRLWSEAKSVVMLGMSYAPDSDPLAILSQNDKAAISLYARRRDYHDVIKGKLKSVAGLLAAQGGVDVKVFVDTAPVMEKPLAQAAGLGWQGKHTVLVSREHGSWLFLGAIYTTAELPADAPETDHCGSCRRCLDICPTDAFPAPYQLDSRRCIAYLTIEHAGHIDEGLRAGIGNRVFGCDDCLAVCPWNKFAEAAQETRLALRDGLDALPLADLAGLDDAAFRTLFSGTPVKRTGRDRFIRNVLIAIGNSGRPELAVSAAALICDPSPLVRAMAAWALIKLDPVQAGTFAAAALASESDIDVRREWLALTPEPESAS

SEQ ID NO: 75126 - protein, 350 aa, unidentified
  source 1..350: note = Bosea vaviloviae
  REGION 1..350: note = tr|A0A1D7UA99|A0A1D7UA99_9BRAD tRNA epoxyqueuosine(34) reductase QueG OS=Bosea vaviloviae; OX = 1526658 GN=BHK69_08695 PE=4 SV=1
MPQVPERLQAWLEAGHHGDMSWMAERVTERAAPRQLWSEARRVVMLGMSYAPDSDPLAILSQPDKAAISLYARRRDYHDVIKGKLKSVAGLLAAKGGADVKVFVDTAPVMEKPLAEAAGLGWQGKHTVLVSREHGSWLFLGAIYTTAELPVDAPESDHCGSCRRCLDICPTDAFPAPYQLDARRCIAYLTIEHQGHIDAALRPGIGNRVFGCDDCLAVCPWNKFAAAAQETRLALKNGLDALPLAELAALDDAAFRTLFAGTPVKRTGRDRFIRNVLIAIGNSNRPELAASAEALVADASPLVRAMAAWALIRLAPVRAGHLAADALAGEADADVRHEWLALPSQPECIA

SEQ ID NO: 75127 - protein, 349 aa, unidentified
  source 1..349: note = Boseongicola aestuarii
  REGION 1..349: note = tr|A0A238J386|A0A238J386_9RHOB Epoxyqueuosine reductase OS=Boseongicola aestuarii OX=1470561 GN=queG; PE = 3 SV=1
MPLDDLKERLVKEAIQAGFAMARVCAPDAVPEVPERLSAFLKAGRHGQMAWLEDRANWRGDPSALWPEARSIVMLAEPYTPDHDPLDDLKNQDRGVVSVYARNKDYHDVVKKRLKRVARWLVAAADCEVKVFVDTAPVPEKALGQAAGLGWQGKHTNLLSRDLGNWFFLGAIFTTANLDPDTPETDHCGSCRRCLDICPTDAFPAPYQLDARLCISYLTIEHKGPVDEALRPKLGNRIYGCDDCLAACPWNKFASDARDHRYAARHDLSAPPLAKLANLDDASFRAFFSGSPIKRIGRDRFVRNVLYALGNSEDQSLIESARKCAVDADPTVRDAAIWAVRRLQAVSKK

SEQ ID NO: 75128 - protein, 343 aa, unidentified
  source 1..343: note = Boseongicola sp.
  REGION 1..343: note = tr|A0A4P7JFG7|A0A4P7JFG7_9RHOB Epoxyqueuosine reductase OS=Boseongicola sp. CCM32 OX=2552942 GN=queG; PE = 3 SV=1
MSDLRKALEAEATAAGFAKLGVCRPDAIPQAAGRLADYVARGRHGQMGWLEDRMAWRGDPTALWPDARSVIMLAEMYTPDSDPLADLEHSDRATISVYARNRDYHDLVKKRLKRVGRWLLAERPDEAIKVFVDTAPVMEKPLAQAAGLGWQGKHTNLLGRDLGSWFFLGAIFTTITLPPDEPETEACGSCTACLDICPTKAFPAPFQLDARRCISYLTIEHKGPVPHALRAQMGNRIYGCDDCLAVCPWNKFARDATELRYAARTDLQAPALEDLARLDDAGFRALFSGSPIKRIGRDRFVRNVLYAIGNSGLKRLEPAAQSLLGDPDAAVADAAAWAVERLR

SEQ ID NO: 75129 - protein, 342 aa, unidentified
  source 1..342: note = Boseongicola sp.
  REGION 1..342: note = tr|A0A5D0R8F9|A0A5D0R8F9_9RHOB tRNA epoxyqueuosine(34) reductase QueG OS=Boseongicola sp. HY14; OX = 2603819 GN=queG PE=4 SV=1
MKQALIDQALAEGFAKVGITRPDAVPEIAGRLDDFVRAGRHGQMGWMAERMHWRGNPAALWPEARSVIMLAEPYTPEHDPRDVPARRDRGAISVYAQNRDYHDIVKNRLKRVGRWLIEAAGPETEIKVFVDTAPVMEKPLAAAAGLGWQGKHTNLLSRDLGNWFFLGAIFTTLDLPEDAPGRENCGSCTACLDACPTDAFPAPFQLDARRCISYLTIEHHGPVDEDLRPFLGNHIYGCDDCLAACPWNKYAVAAHEARYHARDDLTAPRLAELAALDDTAFRAMFSGSPVKRVGRDRFLRNVCYAIGNSGDPSLIPALRPLLTDPDPTLAEAASWALARLSP

SEQ ID NO: 75130 - protein, 378 aa, Bowmanella sp.
  REGION 1..378: note = tr|A0A4Q9XPI1|A0A4Q9XPI1_9ALTE Epoxyqueuosine reductase OS=Bowmanella sp. JS7-9 OX=1605368 GN=queG PE=3; SV = 1
MSSLSASQLAEFAQQIKCWGQELGFAQVGIADVDLKRHERFLQDWLDNGYHGQMHYMQSHGMLRARPADLLPGTLRAICVRLDYLPPDASFAAGLADASSGYISRYALGRDYHKVLRNKLKKLGDLIQQQVPDCILRPFVDSAPVLEHALAEKAGIGWTGKHSLTLNEEAGSWFFLGELLISLPLPTDDPLQEQCGSCSACLTMCPTGAIVAPYVVDARKCISYLTIESDEAIPPELRPLLGNRIYGCDDCQLVCPWNREAPITAEADFNARKWLKNQPLLTLWSWNEDDFLRLTEGSPIRRIGYQRWRRNLAVALGNAPADLRIVDALQAAVVLADELLAEHIHWALARQQAGQGIAPSRQQQRLVRTVQKGLPRDA

SEQ ID NO: 75131 - protein, 357 aa, Brachymonas denitrificans
  REGION 1..357: note = tr|A0A1H8DW50|A0A1H8DW50_9BURK Epoxyqueuosine reductase OS=Brachymonas denitrificans DSM 15123; OX = 1121117 GN=queG PE=3 SV=1
MTPEALLSTIRSQAEALGFARIGVADVDLASAEAGLLAWLEAGFHGSMDYMANHGLRRARPAELVPGTVRVITARMDYLPAATPDDWRERELQRLTQPGEAVVSVYARGRDYHKVVRARLQKLSDQIAALVGPFGHRVFTDSAPVLEAELASRSGQGWRGKHTLVLSREAGSTFFLGEIYVDFPLPLTEPEPAHCGQCTACIDACPTGAIVAPYRLDARRCISYLTIEHAGSIPEDMRPLLGNRIYGCDDCQLVCPWNKFARRNALPDFEERHGLGHAQLLELWGWTEAQFLQRTEGSPIRRIGHARWLRNIAVALGNALRQASAAERETIRAALVQHADHPDAVVCETVQWALQQV

SEQ ID NO: 75132 - protein, 387 aa, unidentified
  source 1..387: note = Bradymonadaceae bacterium
  REGION 1..387: note = tr|A0A3D8N001|A0A3D8N001_9DELT tRNA epoxyqueuosine(34) reductase QueG OS=Bradymonadaceae bacterium TMQ3 OX=2283320 GN=queG PE=4 SV=1
MVKGNPDEPGSKERGALRDAIKVEAVRLGFEACAIVPAERLPTARAYQEWLSEGRHGTMHYMENHQPLRVDPRVLEPGTRSVIVLLSNYRQPTDLFEGGMRVASYAHGDDYHDFLWERMRALAAFVHNETGVDVATRPAVDSAPLLERDLARMAGLGWVGKNALLIRQGLGSFTIISEVLVALDLGEPAEPAADRCGRCTRCIDACPTGAIIAPQVIDARRCISYLTIELRGPIPRRLRPLIGNHLFGCDICQTVCPWNRRAPLSEDQNFAPREAYRALSPLELLGFDHPRYVETFRRSPMKRAKLGGLKRNAAVVVGNTGSVDDVPALTRYLEHEDDAVVRGHIAWALGRLGGERAAEALRAALAREEDSLVLDELDVALRMVSGA

SEQ ID NO: 75133 - protein, 387 aa, unidentified; identical to SEQ ID NO: 75132
  source 1..387: note = Bradymonadales bacterium
  REGION 1..387: note = tr|A0A5C6UVB4|A0A5C6UVB4_9DELT tRNA epoxyqueuosine(34) reductase QueG OS=Bradymonadales bacterium TMQ1 OX=2600174 GN=queG PE=4 SV=1

SEQ ID NO: 75134 - protein, 376 aa, unidentified
  source 1..376: note = Bradymonadales bacterium
  REGION 1..376: note = tr|A0A5B8Y2E1|A0A5B8Y2E1_9DELT tRNA epoxyqueuosine(34) reductase QueG OS=Bradymonadales bacterium YN101 OX=2292766 GN=queG PE=4 SV=1
MTLSQKIITRARELGFDRAAIVPARRLEHAEQYLEWLKEGRHGDMNYLDRYHDLRVDPAKMEEGTKSCVVLLKNYYREADKLAGGLRIARYAHGDDYHDVLWDRMRELAAFIHAESGAEVATRPATDTAPLLERDLAALAGLGWVGKNAMLINPEIGSFCFIAEVLVDQDLEPTDELVPDRCGTCSRCIDACPTNAIVSPGVIDARRCISYLTIELRGPIPRRLRPLVGDLLFGCDICQAVCPWNSKAVPTEDPKFQTRDKYRDLTPQELVCFELEDYVEYFSKSAMKRAKLRGLKRNAAVVIGNTGGEEDVELLGRRLLDDEDEPLVRGHIAWALGQIGGEEARRILERARQGEDEAYVLEEVREALAKGSSPRS

SEQ ID NO: 75135 - protein, 398 aa, unidentified
  source 1..398: note = Bradymonas sediminis
  REGION 1..398: note = tr|A0A2Z4FGK7|A0A2Z4FGK7_9DELT tRNA epoxyqueuosine(34) reductase QueG OS=Bradymonas sediminis; OX = 1548548 GN=queG PE=4 SV=1
MSSSEVSGAEQSSGEQPDANKPEGEPTLSDKIMARAIELGFDRAAIVPAGRLKHAEQYLEWLKEGRHGAMNYLDRHHELRVDPTKMEEGTRSVVVLLKNYYREADLLAGGLRIARYAHGDDYHDTLWERMRELAAFIHAETGADCGTRPATDTAPILERDLAALAGLGWVGKNAMLINPEIGSFSFIAEVLVDLDLEATHPMVPDRCGTCSKCIDACPTNAIISPAVIDARRCISYLTIELRGPIPRALRPLIGDHIFGCDICQVVCPWNSKAEPSEDASFQTREIYRSLTLQRLLCFDLPDYVEHFSKSAIKRAKLRGLRRNAAVVIGNTFAQSGDESIVELLGERLLKDEPEPLVRGHIAWALGQVGGDAAAQILCEAAGAEQDPYVQEEIRAAQR

SEQ ID NO: 75136 - protein, 376 aa, unidentified; identical to SEQ ID NO: 75134
  source 1..376: note = Bradymonas sp.
  REGION 1..376: note = tr|A0A4Y6PRB1|A0A4Y6PRB1_9DELT tRNA epoxyqueuosine(34) reductase QueG OS=Bradymonas sp. YN101; OX = 2589075 GN=queG PE=4 SV=1

SEQ ID NO: 75137 - protein, 378 aa, unidentified
  source 1..378: note = Bradyrhizobiaceae bacterium
  REGION 1..378: note = tr|A0A431P9X4|A0A431P9X4_9BRAD Epoxyqueuosine reductase OS=Bradyrhizobiaceae bacterium OX=2072420; GN = queG PE=3 SV=1
MTTAHAVDAVAIKAALTEEARTIGFGTIGITDPDAIAGARERLQTFLDAGSHGDMEWLANEPARRASPKVLWSDVRSVIMLGMNYGPDENPLALLDQKTRGAISVYARGDDYHDLIKKRLKTLARWLIVHAGGDVKVFVDTAAVMEKPLAQAAGLGWQGKHTNLVSREYGSWLFLGAIFTTLDLPRDATDIDHCGSCRACLDICPTNAFPAPYRLDARKCISYLTIEHKGAIPHEYREAIGNRIYGCDDCLSVCPWNKFAQEGHEAKLAARDELRGPALAELAKLDDASFRAMFTKSPVKRIGRDRFLRNVLTAIGNSSDKSLASEARRLLDDESPLVRGAAVWALSRLLPREEFSELAARSHDADEHVRSEWAAALA

SEQ ID NO: 75138 - protein, 355 aa, unidentified
  source 1..355: note = Bradyrhizobiaceae bacterium
  REGION 1..355: note = tr|F7QH38|F7QH38_9BRAD Iron-sulfur cluster-binding protein OS=Bradyrhizobiaceae bacterium SG-6C OX=709797; GN = CSIRO_0865 PE=4 SV=1
MQAFLDAGAHGDMDWLANEPSRRASPKVLWSEVRSVIMLGMNYGPDENPLALLEQTTRGNISVYARGDDYHDLIKKRLKSVARWLIAQAGGDVKVFVDTAAVMEKPLAHAAGLGWQGKHTNLVSREYGSWLFLGAIFTTLDLPRDDADVNHCGSCQACLDICPTDAFPAPYRLDARKCISYLTIEHKGAIPREHRAAIGNRIYGCDDCLSVCPWNKFAQEGHEAKLAARDELRAPSLAELSRLDDASFRALFTKSPVKRIGRDRFLRNVLTAIGNSGDISLAPEARRLLDDPNPLVRGAAVWALARLLSDREFSELAAASNDHDADVRNEWEMGLHSSGNVEGDSLSPPAGRGLG

SEQ ID NO: 75139 - protein, 391 aa, unidentified
  source 1..391: note = Bradyrhizobium arachidis
  REGION 1..391: note = tr|A0A1I7F3U1|A0A1I7F3U1_9BRAD Epoxyqueuosine reductase OS=Bradyrhizobium arachidis OX=858423 GN=queG; PE = 3 SV=1
MAGRRAGVADLRGPGFLNSDPTELKTALAREARALGFDCIGITEPGTIEKAGAHFLEFIASGGHGDMDWLANQPERRVDPRGLWADVRSVIMLGVNYGPDSDPLAILNERTRAAISVYAQGDDYHDLIKKRLKALARWLVATAPSEVKVFVDTAAVMEKPLAQAAHLGWQGKHTNLVSREFGSWLFLGAIYTTLELPRDVAEIDHCGSCRACLDICPTSAFPAPYQLDARRCISYLTIENKGPIPHEFRKAMGNRIYGCDDCLAACPWNKFAQEGREAKLAARDELRAPGLAELSRLDDAAFRALFTKSPVKRIGRDRFLRNVLIAIGNSGEAALADEARRLLDDASPLVRGAAVWALGQLASREELEALKAAAISNERDESVREEWRAAL

SEQ ID NO: 75140 - protein, 391 aa, Bradyrhizobium betae
  REGION 1..391: note = tr|A0A4Q1VEJ6|A0A4Q1VEJ6_9BRAD Epoxyqueuosine reductase OS=Bradyrhizobium betae OX=244734 GN=queG PE=3; SV = 1
MAGRRAGIADLRGPGFLNSDPTELKAALEREARALGFDCIGVTEPGTIDNAGKYFLDFIASGGHGDMDWLAAQPERRVDPRGLWQDVRSVIMLGVNYGPDQDPLAILQQRTRAAISVYAQGDDYHDLIKKRLKALARWLVATAPSEVKVFVDTAAVMEKPLAQTAGLGWQGKHTNLVSREFGSWLFLGAIYTTLELPRDDAEIDHCGSCRACLDICPTSAFPAPYKLDARRCISYLTIENKGPIPREFRKAIGNRIYGCDDCLAACPWNKFAQEGREAKLAARDELRAPSLAELARLDDTAFRALFTKSPVKRIGRDRFLRNVLIAIGNSGEAELVEEARRLLDDESALVRGAAVWALGQLMSREEFDAAKSAAMDSEHDESVREEWELAS

SEQ ID NO: 75141 - protein, 394 aa, Bradyrhizobium canariense
  REGION 1..394: note = tr|A0A1H1Z768|A0A1H1Z768_9BRAD Epoxyqueuosine reductase OS=Bradyrhizobium canariense OX=255045 GN=queG; PE = 3 SV=1
MAGGGAGVAHLRGSRFLNANVKLSPADLKAALASEARALGFDCVGVTDPDAIADAARHFHAFLDAGAHGDMDWLAAQPERRTDPRVLWPGVRSVIMLGVNYGPDENPLAILQQRARGAISVYAQGDDYHDVIKKRLKTLARWLVAASGAEVKVFVDTAAVMEKPLAHAAGLGWQGKHTNLVSREFGSWLFLGTIFTAAALPRDDAAVDHCGSCQACLDICPTAAFPAPYRLDARRCISYLTIESKGPIPHEFRKAIGNRIYGCDDCLAACPWNKFAQAGREAKLTARDELRAPSLAELVRLDDAAFRALFAKSPVKRIGRNRFIRNVLIAIGNAHDSALAVEAKRLLDDDNPLVRGAAVWALSQLMEPEAFAALASDAIGVETDESVQEEWRLA

SEQ ID NO: 75142 - protein, 396 aa, Bradyrhizobium canariense
  REGION 1..396: note = tr|A0A1X3FYZ7|A0A1X3FYZ7_9BRAD Epoxyqueuosine reductase OS=Bradyrhizobium canariense OX=255045 GN=queG; PE = 3 SV=1
MAGGRAGVADLRGPGLLNSDPTELKTALANEARALGFDCIGITEPGTIESAGKHFLEFIASGGHGDMDWLAAQPERRVDPRGLWQDVRSVIMLGVNYGPDQDPLAILQQRTRAAISVYAQGDDYHDLIKKRLKALARWLVATATCEVKPCEVKVFVDTAAVMEKPLAQAAHLGWQGKHTNLVSREFGSWLFLGAIYTTLELPRDDAEIDHCGSCRACLDICPTAAFPAPYRLDARRCISYLTIENKGPIPREFRKSIGNRIYGCDDCLAACPWNKFAQEGREAKLAARDALRAPGLAELARLDDAAFRALFTKSPVKRIGRDRFLRNVLIAIGNSGDAALADEARRLLEDESALVRGAAVWALGQLVPRDEFETMRATAIARERDDGVREEWELAS

SEQ ID NO: 75143 - protein, 393 aa, unidentified
  source 1..393: note = Bradyrhizobium centrolobii
  REGION 1..393: note = tr|A0A176YLT4|A0A176YLT4_9BRAD Epoxyqueuosine reductase OS=Bradyrhizobium centrolobii OX=1505087 GN=queG; PE = 3 SV=1
MAGRRAGVADLRGPRLLNPASDLSELKAALAREAQALGFDCIGVTAPGTIDNAGKYFLEFIASGGHGDMDWLAAQPERRVDPRGLWQDVRSVIMLGVNYGPDQDPLAILQDPTRAAISVYAKGDDYHDLIKKRLKALARWLVATVPSEVKVFVDTAAVMEKPLAQAAHLGWQGKHTNLVSREFGSWLFLGAIYTTLELPRDDAEIDHCGSCHACLDICPTAAFPAPYKLDARRCISYLTIENKGPIPREFRNAIGNRIYGCDDCLAACPWNKFAQEGREAKLAARDELRAPSLAELARLDDAAFRALFTKSPVKRIGRDRFLRNVLIAIGNSGDATLAVEARRLLDDASPLVRGAAVWALGQLLSRDEFDAMKLVAMGIEPDESVRQEWQAAS

SEQ ID NO: 75144 - protein, 385 aa, unidentified
  source 1..385: note = Bradyrhizobium daqingense
  REGION 1..385: note = tr|A0A562LJC7|A0A562LJC7_9BRAD Epoxyqueuosine reductase OS=Bradyrhizobium daqingense OX=993502 GN=queG; PE = 3 SV=1
MTRVDASVIKPSIDIDELRTALAREARALGFDCIGITAPGTIENAGKYFLEFIASGGHGDMDWLAAQPERRVDPRGLWQDVRSVIMLGVNYGPDQDPLAILEQRTHAAISVYAQGDDYHDLIKKRLKALARWLVATAPSEVKVFVDTAAVMEKPLAQTAGLGWQGKHTNLVSREFGSWLFLGAIYTTLDLPRDEAEIDHCGSCRACLDICPTAAFPVPYKLDARRCISYLTIENKGPIPREFRKAIGNRIYGCDDCLAACPWNKFAQEGREAKLAARDALRAPSLAELARLDDAAFRALFTKSPVKRIGRDRFVRNVLIAIGNSGDAALAGEARRLLEDASPLVRGAAVWALGQLVARDECAELRHAALDKESDESVREEWHAFS

SEQ ID NO: 75145 - protein, 392 aa, unidentified
  source 1..392: note = Bradyrhizobium diazoefficiens
  REGION 1..392: note = tr|A0A2A6N6S2|A0A2A6N6S2_9BRAD Epoxyqueuosine reductase OS=Bradyrhizobium diazoefficiens OX=1355477; GN = queG PE=3 SV=1
MARRRAGVADLCGPGFLSSADLSELKAKLTTEAKALGFDCIGVTEPGTIETAGKHFLEFIASGGHGDMDWLAAQPERRVDPRGLWQDVRSVIMLGVNYGPDADPLAILEQRTRAAISVYAQGDDYHDLVKKRLKALARWLVAAAPSEVKVFVDTAAVMEKPLAQAAHLGWQGKHTNLVSREFGSWLFLGAIYTTLDLPRDAAEIDHCGSCQACLDICPTAAFPAPYKLDARRCISYLTIENKGAIPREFRKAIGNRIYGCDDCLAACPWNKFAQAGREAKLAARDELRAPGLAELARLDDAAFRALFTKSPVKRIGRDRFLRNVLIAIGNSGEAALAEEARRLLGDESALVRGAAVWALAQLVARDAFEAMRSVAMGNEHDEGVREEWDLAT

SEQ ID NO: 75146 - protein, 392 aa, unidentified; identical to SEQ ID NO: 75145
  source 1..392: note = Bradyrhizobium diazoefficiens
  REGION 1..392: note = tr|Q89WH3|Q89WH3_BRADU Epoxyqueuosine reductase; OS = Bradyrhizobium diazoefficiens (strain JCM 10833 / IAM 13628 / NBRC 14792 / USDA 110) OX=224911 GN=queG PE=3 SV=1

SEQ ID NO: 75147 - protein, 398 aa, Bradyrhizobium elkanii
  REGION 1..398: note = tr|A0A1E3EHJ3|A0A1E3EHJ3_BRAEL Epoxyqueuosine reductase OS=Bradyrhizobium elkanii OX=29448 GN=queG PE=3; SV = 1
MAGGGASVAHLCGPRLLNPAVKLSPSDLKAALQREAHALGFDAIGFTAPDATSEAGKYFLEFLGSGGHGDMDWLAVNPERRTDPRLLWGGVRSIIMLGVNYGPDEDPLDILARRSRGAISVYAQGDDYHDVIKKRLKVLARCLAAITGDEVKVFVDTAAVMEKPLAQAAGIGWQGKHTNLVSREFGSWLFLGAIYSATELPRDDAEADHCGSCRACQDICPTAAFPAPYKLDARRCISYLTIENKGPIPHEFRESIGNRIYGCDDCLAVCPWNKFAQTGREQKLAARDALRAPALADLARLDDAVFRALFTKSPVKRIGRDRFIRNVLIAIGNSGDASLAAEARRLLDDASPLVRGAAVWALSQLITRDAFAALASRAGGEPDVTVQQEWRMGSVPSS

SEQ ID NO: 75148 - protein, 398 aa, Bradyrhizobium elkanii
  REGION 1..398: note = tr|A0A4Q4KFA3|A0A4Q4KFA3_BRAEL Epoxyqueuosine reductase OS=Bradyrhizobium elkanii OX=29448 GN=queG PE=3; SV = 1
MAGGGASVAHLCGPRLLNPAVRLSASDLKAALQREAHALGFDAIGFTAPDATSEAGKYFLEFLGSGGHGDMDWLAVNPERRTDPRVLWGGVRSIIMLGVNYGPDEDPLDILARRSRGAISVYAQGDDYHDVIKKRLKVLARWLATITGDEVKVFVDTAAVMEKPLAQAAGIGWQGKHTNLVSREFGSWLFLGAIYSATELPRDDAEADHCGSCRACQDICPTAAFPAPYKLDARRCISYLTIENKGPIPHEFRKSIGNRIYGCDDCLAVCPWNKFAQAGREQKLAARDALRAPALADLAQLDDAAFRALFTKSPVKRIGRDRFIRNVLIAIGNSGDASLAAEARRLLDDASPLVRGAAVWALSQLIARDEFATLASRAGGEPDVTVQQEWRMGSVPSS

SEQ ID NO: 75149 - protein, 372 aa, unidentified
  source 1..372: note = Bradyrhizobium erythrophlei
  REGION 1..372: note = tr|A0A1M7TWF0|A0A1M7TWF0_9BRAD Epoxyqueuosine reductase OS=Bradyrhizobium erythrophlei OX=1437360; GN = queG PE=3 SV=1
MRDDLKQALIEQARTLGFDCVGVTDPGATAKAGQYFLEFLSTGGHGDMDWLAANPQRRSDPRNLWASVRSVIMLGVNYGPDEDPLSILQQRSRGAISVYAQGDDYHDVIKKRLKALARWLAATAVCEVKVFVDTAAVMEKPLAQAAGLGWQGKHTNLVSREFGSWLFLGAIFTDADLPRDEPDTDHCGSCRSCLDICPTAAFPAPYKLDARRCISYLTIENKGPIPHEFRKAIGNRIYGCDDCLAVCPWNKFARVGHEAKLSARAALRAPELSSLARLDDAAFRSLFSKSPVKRIGRDRFIRNVLIAIGNSNDASLASEAERLLADASPIVRGAAVWALSQLAGRDRFAALACNAAAETDEGVHAEWIAGRS

SEQ ID NO: 75150 - protein, 395 aa, unidentified
  source 1..395: note = Bradyrhizobium erythrophlei
  REGION 1..395: note = tr|A0A1N6GIN0|A0A1N6GIN0_9BRAD Epoxyqueuosine reductase OS=Bradyrhizobium erythrophlei OX=1437360; GN = queG PE=3 SV=1
MAGGRAGVADLRGPRFLNETVKPSAADLKTALARGARSLGFDCIGVTDPEAIAAAGKHFREFLESGGHGSMDWLAASPERRTDPRVLWSGVRSIIMLGVNYGPDENPLEVLEKRSCGAISAYAQGDDYHDLIKKRLKTLARWLVATTGDEVKVFVDTAAVMEKPLAQAAGLGWQGKHTNLVSREFGSWLFLGAIFTASDLPRDESDIDHCGTCTACQDICPTAAFPAPYKLDARRCISYLTIENKGPIPHEFRKAIGNRIYGCDDCLAVCPWNKFAQAGRETKLAAREQLRAPQLSELARLDDTAFRALFAKSPVKRIGRDRFVRNVLIAIGNSNQAALAQEAERLLGDESPLVRGAAVWALSQLLGREKFCALASRAIAAEADDDVREEWQAAS

SEQ ID NO: 75151 - protein, 391 aa, unidentified
  source 1..391: note = Bradyrhizobium genosp.
  REGION 1..391: note = tr|A0A4V2E7B7|A0A4V2E7B7_9BRAD Epoxyqueuosine reductase OS=Bradyrhizobium genosp. SA-3 OX=508868 GN=queG; PE = 3 SV=1
MAGRRAGVADLRGPGFLSSAPAELKTALAREARALGFDCIGITAPGTIESAGKYFLEFIASGGHGDMDWLAASPERRVDPRGLWQDVRSVIMLGVNYGPDQDPLAILKQRTRAAISVYAQGDDYHDLIKKRLKALARWLVATAPSDVKVFVDTAAVMEKPLAQAAHLGWQGKHTNLVSREFGSWLFLGAIYTTLELPRDDAEIDHCGSCRACLDICPTAAFPAPYKLDARRCISYLTIENKGPIPHEFRKSIGNRIYGCDDCLAACPWNKFAQEGREAKLAARDELRAPGLAELARLDDASFRALFTKSPIKRIGRDRFVRNVLIAIGNSGEVALAAEARRLLQDASPLVRGAAAWALGQLMSEEEFAAMKSAAMDGESDESVRKEWHAAS

SEQ ID NO: 75152 - protein, 391 aa, unidentified
  source 1..391: note = Bradyrhizobium guangdongense
  REGION 1..391: note = tr|A0A410UY73|A0A410UY73_9BRAD Epoxyqueuosine reductase OS=Bradyrhizobium guangdongense OX=1325090; GN = queG PE=3 SV=1
MAGGRAGVAHLCGPGFLNTDPTELKAALAREARGLGFDCIGITEPGTIEKAGAHFLEFIASGGHGDMDWLASQPERRIDPRGLWEDVRSVIMLGVNYGPDQDPLAILQQRTRAAISVYAQGDDYHDLIKKRLKALARWLLATAPSDVKVFVDTAAVMEKPLAQAAHLGWQGKHTNLVSREFGSWLFLGAIYTTLELPRDRAEIDHCGSCRACLDICPTAAFPAAYKLDARRCISYLTIENKGQIPHEFRQAIGNRIYGCDDCLAACPWNKFAQEGREAKLAARDELRAPGLAELSRLDDAAFRALFTKSPVKRIGRDRFLRNVLIAIGNSGDAALAQEARRLLDDASPLVRGAAVWALAQLVGRDEFAAMKVIALSNEHDDSVREEWHTVS

SEQ ID NO: 75153 - protein, 396 aa, unidentified
  source 1..396: note = Bradyrhizobium guangzhouense
  REGION 1..396: note = tr|A0A4Q0RS61|A0A4Q0RS61_9BRAD Epoxyqueuosine reductase OS=Bradyrhizobium guangzhouense OX=1325095; GN = queG PE=3 SV=1
MAGRRAGVADLRGPGFLTNDPTELKAQLTREARALGFDCIGITEPGTIEQAGAHFLEFIASGGHGDMDWLAAQPERRVDPRGLWPDVRSVIMLGVNYGPDQDPLAILKQRTRAAISVYAQGDDYHDLIKKRLKALARWLVAAATREVKTCDVKVFVDTAAVMEKPLAQAAHLGWQGKHTNLVSREFGSWLFLGAIYTTLDLPRDSAEIDHCGSCQACLDICPTSAFPAPYKLDARRCISYLTIENKGPIPQEFRKAIGNRIYGCDDCLAACPWNKFAQEGREAKLAARDELRAPGLAELSRLDDAAFRALFTKSPVKRIGRDRFLRNVGIAIGNSGDVALAEEARRLLGDASPLVRGAAVWALSQLLGRDEVVAMKNVAVGLESDESVREEWHSAT

SEQ ID NO: 75154 - protein, 391 aa, unidentified
  source 1..391: note = Bradyrhizobium huanghuaihaiense
  REGION 1..391: note = tr|A0A562S5F5|A0A562S5F5_9BRAD Epoxyqueuosine reductase OS=Bradyrhizobium huanghuaihaiense OX=990078; GN = queG PE=3 SV=1
MAGRRAGVADLRGPGFLSSDLTELKAALEREARALGFDCVGVTAPGTIETAGQRFLEFIASGGHGDMDWLAAQPERRVDPRGLWADVRSVIMLGVNYGPDSDPLAILTQRTRAAISVYAQGDDYHDLIKKRLKALARWLVATVPSDVKVFVDTAAVMEKPLAQTAHLGWQGKHTNLVSREFGSWLFLGAIYTTLALPRDDAEIDHCGSCRACLDICPTAAFPAPYKLDARRCISYLTIENKGPIPHEFRKAIGNRIYGCDDCLAACPWNKFAQEGREAKLAARDELRAPSLAELARLDDAAFRTLFTKSPVKRIGRDRFLRNVLIAIGNSGDVALAKEARRLLDDGSALVRGAAVWAFGQLVSREEFEAMKLTAANNEHDDSVREEWRAAS

SEQ ID NO: 75155 - protein, 405 aa, unidentified
  source 1..405: note = Bradyrhizobium icense
  REGION 1..405: note = tr|A0A1B1U7X2|A0A1B1U7X2_9BRAD Epoxyqueuosine reductase OS=Bradyrhizobium icense OX=1274631 GN=queG PE=3; SV = 1
MAGGGTGVADLRGPRLLNQGVKLAAADLKSALVREAKALGFDCIGVTDPDAIGNAGKYFREFLDAGAHGDMDWLAAQPERRMDPRVLWPGVRSIIMLGFNYGPDDDPLALLEKRTRGAISAYAQGDDYHDVIKKRLKTLARWLVAASGEEVKVFIDTAAVMEKPLAQAAGLGWQGKHTNLVSREFGSWLFLGAIFTASDLPRDTVDTDHCGSCNACQEICPTAAFPAPYKLDARRCISYLTIENKGPIPHEFRKSIGNRIYGCDDCLAVCPWNKFAQQGRETKLAARAELRAPSLAELARLDDAAFRALFSKSPVKRIGRDRFVRNVLIAIGNAEQPSLASEAERLLDDASPLVRGAAVWAMSQLVNRERFEALAAKAIGSETDETVLEEWDLISSVMPRHRASP

SEQ ID NO: 75156 - protein, 397 aa, unidentified
  source 1..397: note = Bradyrhizobium icense
  REGION 1..397: note = tr|A0A533J7C1|A0A533J7C1_9BRAD Epoxyqueuosine reductase OS=Bradyrhizobium icense OX=1274631 GN=queG PE=3; SV = 1
MAGGRAGLAHLCGPRLLSTIEKLEAAEMKTALAREARALGFDCLGVTDPDAIGEAGHRFREFLESGAHGDMDWLAERPERRMHPRALWPGVRSIIMLGFNYGPDEDPLLALQKRTRGTISAYAQGDDYHDVIKKRLKTLARWLAATTGEEVKVFIDTAAVMEKPLAQAAGLGWQGKHTNLVSREFGSWLFLGAIFSASDLPRDEPDIDHCGSCNACQEICPTAAFPAPYKLDARRCISYLTIENKGPIPSEFRKAMGNRIYGCDDCLAVCPWNKFAQVGREAKLSARAELREPPLAELVRLDDSAFRALFAKSPVKRIGRDRFVRNVLIAIGNSGETALAVEAERLLDDASPLVRGAAVWALSQLLSPDAFVVQASRAAAEPDEIVRDEWRDCAVRP

SEQ ID NO: 75157 - protein, 391 aa, Bradyrhizobium japonicum
  REGION 1..391: note = tr|A0A4Y3YPS1|A0A4Y3YPS1_BRAJP Epoxyqueuosine reductase OS=Bradyrhizobium japonicum OX=375 GN=queG PE=3; SV = 1
MAGGRAGIADLRGPRLLNSDPTELKAALANEARALGFDCIGITASGTIENAGKHFLEFIASGGHGDMDWLAAHPERRVDPRGLWQDVRSVIMLGVNYGPDQDPLAILQQRTRAAISVYAQGDDYHDLIKKRLKALARWLVATAPSDVKVFVDTAAVMEKPLAQAAHLGWQGKHTNLVSREFGSWLFLGAIYTTLELPRDDAEIDHCGSCQACLDICPTSAFPAPYKLDARRCISYLTIENKGPIPREFRKAIGNRIYGCDDCLAACPWNKFAQEGREAKLAARDELRAPSLAELAGLDDAAFRALFTKSPVKRIGRDRFLRNVLIAIGNSGEAILAEEARRLLGDESALVRGAAVWALEQLVSRGEFEAMRSAAASNEHDDSVREEWQAAS

SEQ ID NO: 75158 - protein, 325 aa, Bradyrhizobium japonicum
  REGION 1..325: note = tr|A0A023XU72|A0A023XU72_BRAJP Iron-sulfur cluster binding protein OS=Bradyrhizobium japonicum SEMIA 5079; OX = 476282 GN=BJS_05146 PE=4 SV=1
MDWLAAHPERRVDPRGLWQDVRSVIMLGVNYGPDQDPLAILQQRTRAAISVYAQGDDYHDLIKKRLKALARWLVATAPSDVKVFVDTAAVMEKPLAQAAHLGWQGKHTNLVSREFGSWLFLGAIYTTLELPRDDAEIDHCGSCQACLDICPTSAFPAPYKLDARRCISYLTIENKGPIPREFRKAIGNRIYGCDDCLAACPWNKFAQEGREAKLAARDELRAPSLAELAGLDDAAFRALFTKSPVKRIGRDRFLRNVLIAIGNSGEAILAEEARRLLGDESALVRGAAVWALEQLVSRGEFEAMRSAAASNEHDDSVREEWQAAS

SEQ ID NO: 75159 - protein, 406 aa, Bradyrhizobium jicamae
  REGION 1..406: note = tr|A0A0R3M0Z5|A0A0R3M0Z5_9BRAD Epoxyqueuosine reductase OS=Bradyrhizobium jicamae OX=280332 GN=queG PE=3; SV = 1
MAGRRAGVADLRGPRLLNSKLSPADLKSALAREAQSLGFDCIGVTDPEGIGKAGKYFREFLAAGGHGDMDWLAAQPERRMNPRVLWPGVRSIVMLGVNYGPTEDPLALLARRTSGAISAYAQGDDYHDVIKKRLKALARWLVAASGEEVKVFIDTAAVMEKPLAQAAGVGWQGKHTNLVSREFGSWLFLGAIYTATDLPRDAADTDHCGSCNACQEICPTAAFPAPYKLDARRCISYLTIENKGPIPREFRKAIGNRIYGCDDCLAVCPWNKFAQEGREAKLAARVELQAPRLSDLAQLDDAAFRALFSKSPVKRIGRDRFIRNVLIAIGNADDASLAVEAERLLDDASPLVRGAAVWALSQLVAREKFDAMAAKAADAETNEDVRAEWRLATAACPSAGPLDFTQ

SEQ ID NO: 75160 - protein, 398 aa, Bradyrhizobium lablabi
  REGION 1..398: note = tr|A0A2H9V4T5|A0A2H9V4T5_9BRAD Epoxyqueuosine reductase OS=Bradyrhizobium lablabi OX=722472 GN=queG PE=3; SV = 1
MAGGRAGLAQLRGPRLLNASTKISPADLKLALAREAERLGFDCIGVTDPDSIGEAGKHFQKFLEAGAHGDMDWLAVNPERRMDPRVLWPGVRSVIMLGVNYGPDENPLALLAQRTRGTISAYAQGDDYHDVIKKRLKTLARWLVAATGEDVKVFVDTAAVMEKPLAQAAGLGWQGKHTNLVSREFGSWLFLGAIFSASDLPRDEADTDHCGTCTACQDICPTAAFPAPYKLDARRCISYLTIENKGSIPQEFRKAIGNRIYGCDDCLAVCPWNKFAQEGREAKLAAREELRSPSLAELARLDDAAFRALFAKSPVKRIGRDRFVRNVLIAIGNSADAKLADEAERLLNDQSPLVRGAAVWALSQLMGREAFAAMAAKASSREEDETVRGEWMQCAAHA

SEQ ID NO: 75161 - protein, 395 aa, Bradyrhizobium lablabi
  REGION 1..395: note = tr|A0A0R3MBP8|A0A0R3MBP8_9BRAD Epoxyqueuosine reductase OS=Bradyrhizobium lablabi OX=722472 GN=queG PE=3; SV = 1
MAGGRAGVANLRGPRLLNSKLSPADLKDALAREAQSLGFDCIGVTDPDAISQAGKYFREFLAAGGHGDMDWLAARPERRMDPRVLWPGVRSIIMLGVNYGPTEDPLALLAQRTSGAISAYAQGDDYHDVIKKRLKALARWLVAASGDEVKVFIDTAAVMEKPLAQAAGIGWQGKHTNLVSREFGSWLFLGAIFTASGLPRDSADTDHCGSCNACQEICPTAAFPAPYKLDARRCISYLTIENKGPIPHEFRKAIGNRIYGCDDCLAVCPWNKFAQEGREAKLAARAELRAPQLSDLARLDDTAFRALFSKSPVKRIGRDRFIRNVLIAIGNAEDPSLAAEAELLLDDASPLVRGAAVWALSQLVNRERFNALAAKALGAETNEDVRAEWRLATAA

SEQ ID NO: 75162 - protein, 391 aa, Bradyrhizobium liaoningense
  REGION 1..391: note = tr|A0A151FPE9|A0A151FPE9_9BRAD Epoxyqueuosine reductase OS=Bradyrhizobium liaoningense OX=43992 GN=queG; PE = 3 SV=1
MAGRRAGVADLRGPGFLSSDPTELKTALAREARALGFDCIGITAPGTIESAGKHFLEFIASGGHGDMDWLAAQPERRVDPRGLWQDVRSVIMLGVNYGPDSDPLAILEQRTRAAISVYAQGDDYHDLIKKRLKTLARWLVATAPSDVKVFVDTAAVMEKPLAQAAHLGWQGKHTNLVSREFGSWLFLGAIYTTLELPRDAAEIDHCGSCRACLDICPTAAFPAPYKLDARRCISYLTIENKGPIPREFRKAIGNRIYGCDDCLAACPWNKFAQEGREAKLAARDELRAPSLAELARLDDAAFRALFTKSPVKRIGRDRFLRNVLIAIGNSGEAALADEARRLLDDESPLVRGAAVWALEQLVAREEFQAMRLHALDREPDESIREEWKAAL

SEQ ID NO: 75163 - protein, 403 aa, unidentified
  source 1..403: note = Bradyrhizobium lupini
  REGION 1..403: note = tr|K5CWD9|K5CWD9_RHILU Epoxyqueuosine reductase; OS = Bradyrhizobium lupini HPC(L) OX=1229491 GN=queG PE=3; SV = 1
MLRPGTAPIYDAQQPAGETTIDVADEKQRIRARKLTDFIRQEALSLGFDLCRFTAPDSIPLAPERLREFLGKGYHGTMAWMEETEARRAEPKTLWSDVRSIVMFGLNYGPDEDPRNLLSRPDKAAISVYARNRDYHDVIKGRLKEIATRFAARAGEDVKVFVDTAPVMEKPLAAAAGLGWQGKHTNLVSRSHGSWLFLGSMFTTADLCLDEAEKDHCGSCRACLDACPTAAFPAPYQLDARRCISYLTIEHKGPIPHEFRPMMGNRIYGCDDCLAACPWNKFAASASEMKLQAREDLKEPSIDFLLTLDDAAFRSFFSGSPVKRIGRSRFIRNVLIAAGNSGNRQFVERCKALAEMDPSPEVRGMAAWALSRLMDRQEFRTYSATRAPETDPEAEMEWQLAEA

SEQ ID NO: 75164 - protein, 396 aa, unidentified
  source 1..396: note = Bradyrhizobium macuxiense
  REGION 1..396: note = tr|A0A560LZT5|A0A560LZT5_9BRAD Epoxyqueuosine reductase OS=Bradyrhizobium macuxiense OX=1755647 GN=queG; PE = 3 SV=1
MAGGGAGVAHLCGPRLLNPAVRLSPSDLKAALQREARALGFDAIGFTDPDATSEAGKYFLEFLGSGGHGDMDWLAANPERRADPRVLWGGVRSIIMLGVNYGPEDDPLDILGRRSHGAISVYAQGDDYHDVIKKRLKTLARWLATITGDEVKVFVDTAAVMEKPLAQAAGIGWQGKHTNLVSREFGSWLFLGAIYSATELPRDESDTDHCGSCRACQDICPTAAFPAPYKLDARRCISYLTIENKGPIPHEFRKAIGNRIYGCDDCLAVCPWNKFAQEGREQKLAARDALRAPALADLARLDDPAFRALFTKSPVKRIGRDRFIRNVLIAIGNSGDAKLAGEARRLLDDASPLVRGAAVWALSQLMARDEFAALASRAGGEPDLTVQREWHVAAAS

SEQ ID NO: 75165 - protein, 409 aa, unidentified
  source 1..409: note = Bradyrhizobium macuxiense
  REGION 1..409: note = tr|A0A109JB98|A0A109JB98_9BRAD Epoxyqueuosine reductase OS=Bradyrhizobium macuxiense OX=1755647 GN=queG; PE = 3 SV=1
MAGGGAGVAHLCGPRLLNQAVRLSPDDLKAALTREAHALGFDSIGITGPDAIAQAGRHFLEFLDSGGHGDMDWLASSPERRTDPRGLWNGVRSIIMLGVNYGPDDNPLDVLARRSHGAISVYAQGDDYHDVIKKRLKTLARWLAAMTGDEVKVFVDTAAVMEKPLAQAAGIGWQGKHTNLVSREFGSWLFLGAIYSATDLPRDISDTDHCGSCRACQDICPTAAFPAPYKLDARRCISYLTIENKGPIPHEFRKSIGNRIYGCDDCLAVCPWNKFAQEGREQKLAAREALRAPRLADLAQLDDPAFRALFSKSPVKRIGRDRFIRNVLIAIGNSGDADLAEVATRLLDDASPLVRGAAVWALSQLIGQDEFAALALRADAETESTVQQEWAAALTTSPHPEERTARLEG

SEQ ID NO: 75166 - protein, 391 aa, unidentified
  source 1..391: note = Bradyrhizobium manausense
  REGION 1..391: note = tr|A0A0R3DG04|A0A0R3DG04_9BRAD Epoxyqueuosine reductase OS=Bradyrhizobium manausense OX=989370 GN=queG; PE = 3 SV=1
MAGGRAGVANLRGPGFLSLDPTELKAQLAREARALGFDCIGITEPGTIEKAGAHFLEFIATGGHGDMDWLASQPERRVDPRGLWSDVRSVIMLGVNYGPDQDPLAILKQRTRAAISVYAQGDDYHDLIKKRLKALARWLVATAPSEVKVFVDTAAVMEKPLAQAAHLGWQGKHTNLVSREFGSWLFLGAIYTTLELPRDSAEIDHCGSCRACLDICPTAAFPAPYKLDARRCISYLTIENKGPIPQEFRKAIGNRIYGCDDCLAACPWNKFAQQGREAKLGARHELRAPELAELARLDDAAFRALFTKSPVKRIGRDRFLRNVLIAIGNSGDVTLADEARRLLDDANPLVRGAAVWALRQLLERDEFEAMQADALNKEPDQSVREEWQAAS

SEQ ID NO: 75167 - protein, 391 aa, unidentified
  source 1..391: note = Bradyrhizobium nanningense
  REGION 1..391: note = tr|A0A4Q0RX26|A0A4Q0RX26_9BRAD Epoxyqueuosine reductase OS=Bradyrhizobium nanningense OX=1325118 GN=queG; PE = 3 SV=1
MAGRRAGVADLRGPGFLSSDPTELKTALAREARALGFDCIGITAPGTIENAGRYFLEFIASGGHGDMDWLAAQPERRVDPRGLWSDVRSVIMLGVNYGPDQDPLAVLKQRTRAAISVYAQGDDYHDLIKKRLKALARWLVATAPSDVKVFVDTAAVMEKPLAQTAGLGWQGKHTNLVSREFGSWLFLGAIYTTLELPRDETEIDHCGTCQACLDICPTAAFPAPYKLDARRCISYLTIENKGPIPREFRKAIGNRIYGCDDCLAACPWNKFAQEGREAKLAARDELRAPNLAELARLDDAAFRALFTKSPVKRIGRDRFVRNVLIAIGNSGEVALAAEARRLLQDASPLVRGAAVWALAQLMSKEELAAMKSAALSGESDDSVREEWRAAS

SEQ ID NO: 75168 - protein, 393 aa, unidentified
  source 1..393: note = Bradyrhizobium neotropicale
  REGION 1..393: note = tr|A0A176YNY2|A0A176YNY2_9BRAD Epoxyqueuosine reductase OS=Bradyrhizobium neotropicale OX=1497615; GN = queG PE=3 SV=1
MAGRRAGVADLCGSGFLNSASELSELKTALAREARALGFDCIGITAPGAIESAGKYFLEFIASGGHGDMDWLAAQPERRVDPRGLWQDVRSVIMLGVNYGPDQDPLTILEERTRAAISVYAQGDDYHDIIKKRLKALARWLVATAPSEVKVFVDTAAVMEKPLAQAAHLGWQGKHTNLVSREFGSWLFLGAIYTTLELPQDEAEIDHCGSCHACLDICPTAAFPAPYKLDARRCISYLTIENKGPIPREFRKAIGNRIYGCDDCLAACPWNKFAQEGREAKLAARDELRAPRLAELARLDDAAFRALFTKSPVKRIGRDRFLRNVLIAIGNSGDAALAEDARRLLDDASPLVRGAAVWALRQLLSREEIATIETDAIANENDASVREEWQAAS

SEQ ID NO: 75169 - protein, 345 aa, unidentified
  source 1..345: note = Bradyrhizobium oligotrophicum
  REGION 1..345: note = tr|M4Z0X3|M4Z0X3_9BRAD 4Fe-4S ferredoxin-type domain-containing protein OS=Bradyrhizobium oligotrophicum S58 OX=1245469 GN=S58_01470 PE=4 SV=1
MSAERAAAFERFLAEGHHGDMDWLAREPSRRTDPATLWSDVRSVIMLGVNYGPDEDPRAVLAARSRGAISVYARGGDYHDIIKKNLKALARWLVATAGCDVKVFVDTAAVMEKPLAEAAGLGWQGKHTNLVSRGFGSWLFLGAIYTTLDLPADTSEQDHCGSCRACLDSCPTAAFPAPYQLDARRCISYLTIETKGPIPREFRKAIGNRIYGCDDCLAACPWNKFAQAGREAKLAAREALRAPSLAELAALDDAGFRALFTKSPVKRVGRDRFLRNVLIAIGNSGDATLVGAAERLTSDPNPLVRGAAAWALAQLLDAEGFARRAHAALGFEADDSVRAEWQAPR

SEQ ID NO: 75170 - protein, 391 aa, unidentified
  source 1..391: note = Bradyrhizobium ottawaense
  REGION 1..391: note = tr|A0A2U8P4K8|A0A2U8P4K8_9BRAD Epoxyqueuosine reductase OS=Bradyrhizobium ottawaense OX=931866 GN=queG; PE = 3 SV=1
MAGRRAGVADLRGPGFLNSDPTELKAALTREARALGFDCIGVTAPGTIESAGKYFLEFIASGGHGDMDWLAAQPERRVDPRGLWSDVRSVIMLGVNYGPDQDPLAILEQRTRAAISVYAQGDDYHDLIKKRLKALARWLVATAPSDVKVFVDTAAVMEKPLAQAAHLGWQGKHTNLVSREFGSWLFLGAIYTTLELPRDAAEIDHCGSCQACLDICPTAAFPAPYKLDARRCISYLTIENKGPIPHEFRKAIGNRIYGCDDCLAACPWNKFAQEGREAKLAARSELRAPGLAELARLDDAAFRALFTKSPVKRIGRDRFLRNVLIAIGNSGDVTLSEEARRLLEDASPLVRGAAVWALGQLVGREEFEAMKTAALDDERDDSVREEWQTVA

SEQ ID NO: 75171 - protein, 396 aa, Bradyrhizobium pachyrhizi
  REGION 1..396: note = tr|A0A0R3BUS7|A0A0R3BUS7_9BRAD Epoxyqueuosine reductase OS=Bradyrhizobium pachyrhizi OX=280333 GN=queG; PE = 3 SV=1
MAGGGAGVAHLCGPRLLNPAVRLSPSDLKAALQREAHALGFDAIGFTAPDATSEAGKYFLEFLGSGGHGDMDWLAANPERRADPRVLWGGVRSIIMLGVNYGPDDNPLDILARRSHGAISVYAQGDDYHDVIKKRLKVLARWLATITGDEVKVFVDTAAVMEKPLAQAAGIGWQGKHTNLVSREFGSWLFLGAIYSATELPRDDAEADHCGSCRACQDICPTAAFPAPYKLDARRCISYLTIENKGPIPHEFRKSIGNRIYGCDDCLAVCPWNKFAQAGREQKLAARDALRAPALADLARLDDAAFRALFTKSPVKRIGRDRFIRNVLIAIGNSGDASLAAEARRLLDDASPLVRGAAVWALSQLTAREAFAALASRAGGEPDVTVQQEWRAATAS

SEQ ID NO: 75172 - protein, 395 aa, unidentified
  source 1..395: note = Bradyrhizobium retamae
  REGION 1..395: note = tr|A0A0R3MVG0|A0A0R3MVG0_9BRAD Epoxyqueuosine reductase OS=Bradyrhizobium retamae OX=1300035 GN=queG; PE = 3 SV=1
MAGGRTGVTHLRGPRLLNKAVKLSASDLKSALVREAATLGFDCIGVTDPGALGNAGKYFREFLDAGAHGDMDWLATQPERRMDPRVLWPGVRSIIMLGVNYGPDENPLALLERRTRGAISAYAQGDDYHDVIKKRLKTLARWLVAASGEEVKVFIDTAAVMEKPLAQAAGLGWQGKHTNLVSREFGSWLFLGAIFTAAELPRDTADTDHCGTCNACQEICPTAAFPAPYKLDARRCISYLTIENKGPIPREFRKSISNRIYGCDDCLAVCPWNKFAQKGRETKLAARAELRAPSLGELARLDDAAFRALFSKSPVKRIGRDRFVRNVLIALGNAGDAALAIEAERLLGDASPLVRGAAVWALSQLMERERFDALAVRASKSEADESVRQEWLQAS

SEQ ID NO: 75173 - protein, 393 aa, unidentified
  source 1..393: note = Bradyrhizobium rifense
  REGION 1..393: note = tr|A0A5D3KBT9|A0A5D3KBT9_9BRAD Epoxyqueuosine reductase OS=Bradyrhizobium rifense OX=515499 GN=queG PE=3; SV = 1
MAGGRAGVADLRGPGFLNSDPTELKAALAREARALGFDCIGITEPGTIESAGQHFLEFIASGGHGDMDWLANQPERRVDPRGLWADVRSVIMLGVNYGPDSDPLAILRERTRAAISVYAQGDDYHDLIKKRLKALARWLVATAPSEVKVFVDTAAVMEKPLAQAAHLGWQGKHTNLVSREFGSWLFLGAIYTTLDLPRDGAEIDHCGSCQACLDICPTAAFPAPYKLDARRCISYLTIENKGPIPQDFRKAIGNRIYGCDDCLAACPWNKFAQEGREAKLAARDELRAPGLAELSRLDDAAFRALFTKSPVKRIGRDRFLRNVLIAIGNSGDVTLAEEARRLLDDTSPLVRGAAVWALGQLVEREEFEAAKSAALGGERDESVCKEWRAVSQT

SEQ ID NO: 75174 - protein, 391 aa, unidentified
  source 1..391: note = Bradyrhizobium sacchari
  REGION 1..391: note = tr|A0A560KLL5|A0A560KLL5_9BRAD Epoxyqueuosine reductase OS=Bradyrhizobium sacchari OX=1399419 GN=queG; PE = 3 SV=1
MAGRRAGVADLCGPGFLNADPTELKAALEREARALGFDCIGVTAPGTIEAAGKHFLEFIAAGGHGDMDWLAAQPERRVDPRGLWADVRSVIMLGINYGPDSDPLAILKQRTRAAISVYAQGDDYHDLIKKRLKALARWLVATAPSDVKVFVDTAAVMEKPLAQAAHLGWQGKHTNLVSRDFGSWLFLGAIYTTLELPRDDPEIDHCGSCRACLDICPTAAFPAPYRLDARRCISYLTIENKGPIPQEFRKSIGNRIYGCDDCLAACPWNKFAQEGREAKLAARDELRAPSLAELARLDDAAFRTLFTKSPVKRIGRDRFLRNVLIAIGNSGEATLAEEARRLLDDGSPLVRGAAVWALAQLVARDEFEALMTSAIANEHDESVREEWQAAS

SEQ ID NO: 75175 - protein, 391 aa, unidentified
  source 1..391: note = Bradyrhizobium shewense
  REGION 1..391: note = tr|A0A1C3XAL4|A0A1C3XAL4_9BRAD Epoxyqueuosine reductase OS=Bradyrhizobium shewense OX=1761772 GN=queG; PE = 3 SV=1
MAGRRAGIADLRGPGFLNSDPTELKAALTREARALGFDCIGVTAPGTIESAGKYFLEFIASGGHGDMDWLAAQPERRVDPRGLWGDVRSVIMLGVNYGPDQDPLAILEQRTRAAISVYAQGDDYHDLIKKRLKALARWLVATAPSDVKVFVDTAAVMEKPLAQTAGLGWQGKHTNLVSREFGSWLFLGAIYTTLELPRDDAEIDHCGSCQACLDICSTAAFPAPYKLDARRCISYLTIENKGPIPHEFRKAIGNRIYGCDDCLAACPWNKFAQEGREAKLAARSELRAPGLAELARLDDAAFRALFTKSPVKRIGRDRFLRNVLIAIGNSGEAALAEEARRLLEDASPLVRGAAVWALGQLVGRGEFEAMKAAALDHERDDSVREEWQTVA

SEQ ID NO: 75176 - protein, 409 aa, Bradyrhizobium sp.
  REGION 1..409: note = tr|A0A525I705|A0A525I705_BRASZ Epoxyqueuosine reductase OS=Bradyrhizobium sp. OX=376 GN=queG PE=3 SV=1
MVRPDQVPTVVPHFAERASAGRERQSELRRSRLLSGLRAKARELGFGLCRITAAAPPPGAADGLAEWLATGAQGDMAWMAETFARRADPKTLWPEARSVIALALNYGPSVDPRDALAHKDRGAISVYARHRDYHDVIKGRLKTLAAWLVVAARPDRAQVKVFVDTAPVMEKPLAAAAGLGWQGKHTNLVSREFGSWLFLGSIFTDLALTPDAPEADHCGQCRACLDACPTAAFPAPYKLDARRCISYLTIENQGAIAPEFRSLIGNRIYGCDDCLAVCPWNKFAQVGREAKLAQRDDLAAPPLAELAALDEAGFRARFAGGPIKRIGHARFLRNVMIAIGNSGDRSLIGAAKSGLASPHSLVRAMAVWALSRLASQAELAALAERFMPRERDDQTREEWRMALNSSPER

SEQ ID NO: 75177 - protein, 391 aa, Bradyrhizobium sp.
  REGION 1..391: note = tr|J3CK71|J3CK71_9BRAD Epoxyqueuosine reductase; OS = Bradyrhizobium sp. YR681 OX=1144344 GN=queG PE=3 SV=1
MAGGGAGVADLRGPGFLSSEPTELKAALAREARALGFDCIGITEPGTIESAGQRFLEFIASGGHGDMDWLAAQPERRVDPRGLWADVRSVIMLGVNYGPDSDPLTILKERTRAAISVYAQGDDYHDLIKKRLKALARWLVAAAPSEVKVFVDTAAVMEKPLAQTAHLGWQGKHTNLVSREFGSWLFLGAIYTTLDLPRDGAEIDHCGSCRACLDICPTSAFPAPYRLDARRCISYLTIEKKGPIPREFRKAIGNRIYGCDDCLAACPWNKFAQEGREARLAARDELRAPSLAELARLDDAAFRALFTKSPVKRIGRDRFLRNVLIAIGNSGEMALAEEARRLLEDASPLVRGAAVWALGQLVGRSEFDAMKSAAMSAERDEGVRQEWHTAA

SEQ ID NO: 75178 - protein, 385 aa, unidentified
  source 1..385: note = Bradyrhizobium stylosanthis
  REGION 1..385: note = tr|A0A560ECX0|A0A560ECX0_9BRAD Epoxyqueuosine reductase OS=Bradyrhizobium stylosanthis OX=1803665; GN = queG PE=3 SV=1
MTSVDALVIRSSTDTVELRAALEREARALGFDCIGITAPGTIEKAGAHFLEFIASGGHGDMDWLAAQPERRVDPRGLWRDVRSVIMLGVNYGPDSDPLAILQERTRAAISVYAQGDDYHDLIKKRLKALARWLVAAAPSEVKVFVDTAAVMEKPLAQTAHLGWQGKHTNLVSREFGSWLFLGAIYTTLELPRDDAEIDHCGSCRACLDICPTSAFPAPYKLDARRCISYLTIENKGPIPHEFRKAIGNRIYGCDDCLAACPWNKFAQEGREAKLAARDELRAPGLAELARLDDAAFRALFTKSPVKRIGRDRFLRNVLIAIGNSGEMTLAEEARQLLEDASPLVRGAAVWALGQLVTREEFAALRANAIAGEHDESVREEWQTAA

SEQ ID NO: 75179 - protein, 397 aa, unidentified
  source 1..397: note = Bradyrhizobium valentinum
  REGION 1..397: note = tr|A0A0R3M5C1|A0A0R3M5C1_9BRAD Epoxyqueuosine reductase OS=Bradyrhizobium valentinum OX=1518501 GN=queG; PE = 3 SV=1
MAGGGAGIADLRGPRLLNKDTRLSAADLKAALAREAETLGFDCIGVTDPDAIASAGKYFREFLDAGAHGDMDWLAAQPERRMDPRVLWRGVRSIIMLGVNYGPAEDPLALLAKRTRGAISAYAQGDDYHDVIKKRLKALARWFVAASGEEVKVFIDTAAVMERPLAQAAGLGWQGKHTNLVSREFGSWLFLGAIFTAADLPRDDADTDRCGSCNACQEICPTAAFPAPYKLDARRCISYLTIENKGPIPHEFRKSIGNRIYGCDDCLAVCPWNKFAQQGREAKLAARTELRAPSLAELVRLDDTAFRALFSKSPVKRIGRDRFVRNVLIAIGNADDASLAPEAERLLDDASPLVRGAAVWALSQLVDRVKFNALAARAMGAETDEDVRAEWHLATAV

SEQ ID NO: 75180 - protein, 391 aa, unidentified
  source 1..391: note = Bradyrhizobium vignae
  REGION 1..391: note = tr|A0A4Q0R9R5|A0A4Q0R9R5_9BRAD Epoxyqueuosine reductase OS=Bradyrhizobium vignae OX=1549949 GN=queG PE=3; SV = 1
MAGWRAGVADLRGPGFLNSDPTELKAALEHEARALGFDCVGITAPGTIESAGKHFLEFIASGGHGDMDWLAVQPERRVDPRGLWQDVRSVIMLGVNYGPDQDPLAILKQRTRAAISVYAQGDDYHDLIKKRLKALARWLVATAPSEVKVFVDTAAVMEKPLAQAAHLGWQGKHTNLVSREFGSWLFLGAIYTTLDLPRDAAEIDHCGSCRACLDICPTAAFPTPYKLDARRCISYLTIENKGPIPQEFRKAIGNRIYGCDDCLAACPWNKFAREGREAKLAARDELRAPSLAELARLDDAAFRALFTKSPVKRIGRDRFLRNVLIAIGNSGEAALAEEARRLLDDANPLVRGAAVWALAQLVSREEFDAMRANAIADEQDESVREEWQLAS

SEQ ID NO: 75181 - protein, 391 aa, Bradyrhizobium yuanmingense
  REGION 1..391: note = tr|A0A0R3BI67|A0A0R3BI67_9BRAD Epoxyqueuosine reductase OS=Bradyrhizobium yuanmingense OX=108015 GN=queG; PE = 3 SV=1
MAGRRAGVADLCGPGFLSSDPTELKAALAREAHALGFDCIGVTAPGSIDAAGQHFLEFIASGGHGDMDWLANQPERRVDPRGLWADVRSVIMLGVNYGPDSDPLAILKQRARAAISVYAQGDDYHDLIKKRLKALARWLVATAPSEVKVFVDTAAVMEKPLAQAAHLGWQGKHTNLVSREFGSWLFLGAIYTTLELPRDAAEIDHCGSCRACLDICPTAAFPAPYKLDARRCISYLTIENKSPIPHEFRKAIGNRIYGCDDCLAACPWNKFAREGREAKLSARDELRAPSLAELARLDDAAFRALFTKSPVKRIGRDRFVRNVLIAIGNSDEAALAEEARRLLDDASPLVRGAAVWALAQLLSREEFEAMKGAAISNEHDESVRKEWRAAS

SEQ ID NO: 75182 - protein, 378 aa, Bradyrhizobium yuanmingense
  REGION 1..378: note = tr|A0A4E0Q5Z4|A0A4E0Q5Z4_9BRAD Epoxyqueuosine reductase OS=Bradyrhizobium yuanmingense OX=108015 GN=queG; PE = 3 SV=1
MNNIDTDTDRLRSALEEQAHALGFDCIGVTAPGSIDAAGQHFLEFIASGGHGDMDWLANQPERRVDPRGLWADVRSVIMLGVNYGPDSDPLAILKQRTRAAISVYAQGDDYHDLIKKRLKALARWLVATAPSEVKVFVDTAAVMEKPLAQAAHLGWQGKHTNLVSREFGSWLFLGAIYTTLELPRDAAEIDHCGSCRACLDICPTAAFPAPYKLDARRCISYLTIENKGPIPHEFRKSIGNRIYGCDDCLAACPWNKFAREGREAKLAARDELRAPSLAELARLDDAAFRALFTKSPVKRIGRDRFLRNVLIAIGNSGEVALAEAARRLLDDASPLVRGAAVWALGQLLAREEFEAMKSAAASSERDESVREEWRAAS

SEQ ID NO: 75183 - protein, 391 aa, unidentified
  source 1..391: note = Bradyrhizobium zhanjiangense
  REGION 1..391: note = tr|A0A4Q0QU51|A0A4Q0QU51_9BRAD Epoxyqueuosine reductase OS=Bradyrhizobium zhanjiangense OX=1325107; GN = queG PE=3 SV=1
MAGRRTGVPDLRGPGFLSSDPAELKTALAREARALGFDCIGITAPGTIESAGKYFLEFIASGGHGDMDWLAASPERRVDPRGLWQDVRSVIMLGVNYGPDQDPLVILKQRTRAAISVYAQGDDYHDLIKKRLKALARWLVATAPSDVKVFVDTAAVMEKPLAQAAHLGWQGKHTNLVSRAFGSWLFLGAIYTTLELPRDDAEIDHCGSCRACLDICPTAAFPAPYKLDARRCISYLTIENKGPIPHEFRKSIGNRIYGCDDCLAACPWNKFAQEGRETKLAARDELRAPGLAELARLDDAAFRALFTKSPIKRIGRDRFVRNVLIAIGNSGEGALAAEARRLLEDASPLVRGAAVWALGQLMSEEELAAMKSAAMDGESDESVREEWRIAS

SEQ ID NO: 75184 - protein, 391 aa, unidentified
  source 1..391: note = Bradyrhizobium zhanjiangense
  REGION 1..391: note = tr|A0A4Q0SRT1|A0A4Q0SRT1_9BRAD Epoxyqueuosine reductase OS=Bradyrhizobium zhanjiangense OX=1325107; GN = queG PE=3 SV=1
MAGRRAGVADLRGPGFLSSDPAELKTALAREARALGFDCIGITAPGTIESAGKYFLEFIASGGHGDMDWLAASPERRVDPRGLWQDVRSVIMLGVNYGPDQDPLAILEQRTRAAISVYAQGDDYHDLIKKRLKALARWLVATAPSDVKVFVDTAAVMEKPLAQAAHLGWQGKHTNLVSREFGSWLFLGAIYTTLELPRDDAEIDHCGSCRACLDICPTSAFPAPYKLDARRCISYLTIENKGPIPHEFRKAIGNRIYGCDDCLAACPWNKFAQEGRETKLAARDELRAPGLAELARLDDAAFRALFTKSPIKRIGRDRFVRNVLIAIGNSGEVALAAEARRLLEDASPLVRGAAVWALGQLMSEEELAAMKSAAMDGEPDESVREEWRAAS

SEQ ID NO: 75185 - protein, 379 aa, Brenneria alni
  REGION 1..379: note = tr|A0A421DU55|A0A421DU55_9GAMM Epoxyqueuosine reductase OS=Brenneria alni OX=71656 GN=queG PE=3 SV=1
MAYPYDLSELAQLIKQWGQSLGFQQVGICDTDLSSEEPKLQAWLDKQYHGEMAWMARHGMLRARPHELLPGTLRVISVRMNYLPAKAAFASTLKNPQLGYVSRYALGRDYHKLLRQRLKKLGDQIQDYCGALSFRPFVDSAPIMERPLAAKAGLGWVGKHSLLLNRESGSWFFLGELLIDLPLPVDQPQEEQCGRCVACMTACPTGAIIEPYTVDARRCISYLTIELEGPIPETLRPLMGNRIYGCDDCQLICPWNRFSQLTDETDFSPRAALHTPELLDLFNWSEEKFLRITEGSAIRRIGHLRWLRNIAVALGNAPYQDQIVLALQTRLGESDLLDEHIHWAIKQQRIRRSSQEIEVQPPQKKRLIRAIEKGLPRDA

SEQ ID NO: 75186 - protein, 379 aa, unidentified
  source 1..379: note = Brenneria goodwinii
  REGION 1..379: note = tr|A0A250BJV8|A0A250BJV8_9GAMM Epoxyqueuosine reductase OS=Brenneria goodwinii OX=1109412 GN=queG PE=3; SV = 1
MIYPYDLSELAQLIKQWGLSLGFQQVGICDTDLSAEEPKLQAWLDKQYHGEMAWMARHGMLRARPHELLPGTLRVISVRMNYLPAKAAFACTLKNPLKGYVSRYALGRDYHKLLRQRLKKLGDQIQNYCGELNFRPFVDSAPIMERPLAAKAGLGWIGKHSLLLNRESGSWFFLGELLIDLPLPIDQPQEEQCGRCVACMTTCPTGAIVEPYTVDARRCISYLTIELEGPIPEEFRPLMGNRIYGCDDCQLICPWNRFSQLTDETDFSPRAALHTPELLDLFNWSEDKFLRITEGSAIRRIGHLRWLRNIAVALGNAPYQDQIVLALRTRLGESELLDEHIHWAIHQQLMRRSSREVEVQPARKKRLIRAVEKGLPRDA

SEQ ID NO: 75187 - protein, 379 aa, unidentified
  source 1..379: note = Brenneria goodwinii
  REGION 1..379: note = tr|A0A0G4JVT2|A0A0G4JVT2_9GAMM Epoxyqueuosine reductase OS=Brenneria goodwinii OX=1109412 GN=queG PE=3; SV = 1
MIYPYDLSELAQLIKQWGLSLGFQQVGICDTDLSAEEPKLQAWLDKQYHGEMAWMARHGMLRARPHELLPGTLRVISVRMNYLPAKAAFASTLKNPLKGYVSRYALGRDYHKLLRQRLKKLGDQIQNYCGELNFRPFVDSAPIMERPLAAKAGLGWIGKHSLLLNRESGSWFFLGELLIDLPLPVDQPQEEQCGRCVACMTTCPTGAIVEPYTVDARRCISYLTIELEGPIPEEFRPLMGNRIYGCDDCQLICPWNRFSQLTDESDFSPRTALHTPELLDLFNWSEDKFLRITEGSAIRRIGHLRWLRNIAVALGNAPYQDQIVLALRTRLGESELLDEHIHWAIHQQLMRRSSREIEVQPARKKRLIRAVEKGLPRDA

SEQ ID NO: 75188 - protein, 379 aa, Brenneria nigrifluens
  REGION 1..379: note = tr|A0A2U1UFE8|A0A2U1UFE8_9GAMM Epoxyqueuosine reductase OS=Brenneria nigrifluens DSM 30175 = ATCC 13028; OX = 1121120 GN=queG PE=3 SV=1
MAYPYDLGELAQLIKQWGLSLGFQQVGICDTDLSAEEPRLQAWLDKQYHGEMAWMARHGMLRARPHELLPGTLRVISVRMNYLPAKAAFASTLKNPQLGYVSRYALGRDYHKLLRQRLKKLGERIQDYCGELNFRPFVDSAPIMERPLAAKAGLGWVGKHSLLLNRESGSWFFLGELLIDLPLPVDQPQQEQCGRCVACITTCPTGAIVEPYTVDARRCISYLTIELEGAIPEAFRPLIGNRIYGCDDCQLICPWNRFSQLTDETDFSPRAALHAPELLELFQWSEEKFLRITEGSAIRRIGHLRWLRNIAVALGNAPYQDRIVLTLQTRLGENDLLDEHIHWAIKQQRTRRAAQGIEVQSARKKRLIRAVEKGLPRDA

SEQ ID NO: 75189 - protein, 379 aa, unidentified
  source 1..379: note = Brenneria roseae
  REGION 1..379: note = tr|A0A2U1U1P9|A0A2U1U1P9_9GAMM Epoxyqueuosine reductase OS=Brenneria roseae subsp. americana OX=1508507; GN = queG PE=3 SV=1
MSYPYDLSELAQLIKQWGQELGFQQIGICDTDLSHEEPKLQAWLDKQYHGEMEWMARHGMLRARPHELLPGTLRVISVRMNYLPAKAAFASTLNNPLSGYVSRYALGRDYHKLLRQRLKKLGDRIQHYCGELNFRPFVDSAPIMERPLAAKAGIGWVGKHSLILNRESGSWFFLGELLIDLPLPVDQPQDEQCGRCVACMTTCPTGAIVAPYTVDARRCISYLTIELEGPIPEEFRPLMGNRIYGCDDCQLICPWNRFSQLTDEADFSPRAALHAPELVTLFAWNEEKFLRITEGSAIRRIGHVRWLRNIAVALGNAPYQDYIVLALQNRLGEHDLLDEHIHWAIEQQLARRAEQQIDVQSSQKKRLIRAVEKGLPRDA

SEQ ID NO: 75190 - protein, 379 aa, Brenneria rubrifaciens
  REGION 1..379: note = tr|A0A4P8QRC4|A0A4P8QRC4_9GAMM Epoxyqueuosine reductase OS=Brenneria rubrifaciens OX=55213 GN=queG PE=3; SV = 1
MSYPYDLGELAQLIKQWGQALGFQQIGICDTDLSKEEPKLQDWLDKQYHGEMAWMVRHGMLRARPHELLPGTLRVISVRMNYLPAQAAFASTLKNPQLGYVSRYALGRDYHKLLRQRLKKLGDRIQNYCGELNFRPFVDSAPIMERPLAAKAGIGWIGKHSLILNRASGSWFFLGELLIDLPLPVDQPQEEQCGRCVACMTTCPTGAIIAPYTVDARRCISYLTIELEGPIPEELRPLMGNRIYGCDDCQLICPWNRFSPLTEEADFSPRAALHAPELVTLFLWSEEKFLRITEGSAIRRIGHVRWLRNIAVALGNAPYQDHIVLALRNRLGESELLDEHIHWAIKQQLTRHAEQGIEVQSPQKKRLIRAVEKGLPRDA

SEQ ID NO: 75191 - protein, 379 aa, Brenneria salicis
  REGION 1..379: note = tr|A0A366I2N3|A0A366I2N3_9GAMM Epoxyqueuosine reductase OS=Brenneria salicis ATCC 15712 = DSM 30166; OX = 714314 GN=queG PE=3 SV=1
MSYPYDLSELAQLIKQWGQALGFQQVGICDTDLSHEEPKLQDWLDKQYHGEMAWMARHGMLRARPHELLPGTLRVISVRMNYLPAKAAFASTLKNPRLGYVSRYALGRDYHKLLRQRLKKLGEQIQRYCGELNFRPFVDSAPIMERPLAAKAGIGWVGKHSLILNRESGSWFFLGELLIDLPLPVDQPQEEQCGRCVACITTCPTGAIVAPYTVDARRCISYLTIELEGPIPEAFRPLMGNRIYGCDDCQLICPWNRFSQLTDEADFSPRAALHAPELAALFAWSEEKFLRITEGSAIRRIGHVRWLRNIAVALGNAPYEDHIVLALQRRLGESDLLDEHIHWAIKQQLARRAEQEIEVQSARKNRLIRAVEKGLPRDA

SEQ ID NO: 75192 - protein, 379 aa, Brenneria sp.
  REGION 1..379: note = tr|A0A2U1U504|A0A2U1U504_9GAMM Epoxyqueuosine reductase OS=Brenneria sp. CFCC 11842 OX=2173106 GN=queG; PE = 3 SV=1
MAYPYDLGELAQLIKQWGLSLGFQQVGICDTDLSAEEPRLQAWLDKQYHGEMAWMARHGMLRARPHELLPGTLRVISVRMNYLPAKAAFASTLKNPQLGYVSRYALGRDYHKLLRQRLKKLGERIQDYCGELNFRPFVDSAPIMERPLAAKAGLGWVGKHSLLLNRESGSWFFLGELLIDLPLPVDQPQQEQCGRCVACITTCPTGAIVEPYTVDARRCISYLTIELEGPIPEAFRPLIGNRIYGCDDCQLICPWNRFSQLTDETDFSPRAALHAPELLELFQWSEEKFLRITEGSAIRRIGHLRWLRNIAVALGNAPYQDRIVLTLQTRLGENDLLDEHIHWAIEQQRIGRASQGIEVQSARKKRLIRAVEKGLPRDA

SEQ ID NO: 75193 - protein, 379 aa, Brenneria sp.; identical to SEQ ID NO: 75188
  REGION 1..379: note = tr|G7LW20|G7LW20_9GAMM Epoxyqueuosine reductase; OS = Brenneria sp. EniD312 OX=598467 GN=queG PE=3 SV=1

SEQ ID NO: 75194 - protein, 375 aa, Breoghania corrubedonensis
  REGION 1..375: note = tr|A0A2T5VFV8|A0A2T5VFV8_9RHIZ Epoxyqueuosine reductase OS=Breoghania corrubedonensis OX=665038 GN=queG; PE = 3 SV=1
MRLEKAIAEKARALGFDACRITHADAIPEAPERLARFLADGHHATMEWMAETADRRAAPRVLWQDVRSIVMLGMNYGPDRDPLENLTRPEVGSISVYARHRDYHDVIKGKLKTLAGQIGALARDGGPDVKVFVDTAPVMEKPLAAAAGLGWQGKHTNLVSREFGSWLFLGAIFTTLDLEADAPEADRCGSCRACLDICPTRAFPAPYRLDAGRCISYLTIEHKGPIPREFRQAIGNRIYGCDDCLAACPWNKFAETAREAKLKARADLEAPALADLAKLDDAAFRALFSGSPVKRIGRDRFIRNVAIAIGNSGDAALAQTARRLLGDPAPDVRGAAVWALSRLLPGDEFARLGRENAEREEDPSVREEWHSGAAS

SEQ ID NO: 75195 - protein, 392 aa, Breoghania sp.
  REGION 1..392: note = tr|A0A346QY43|A0A346QY43_9RHIZ Epoxyqueuosine reductase OS=Breoghania sp. L-A4 OX=2304600 GN=queG PE=3; SV = 1
MTRDAGTQKAERLKAEIAARAGALGFDACRVTSADAIPQAAPRLRQFLSDGHHASMEWMAETAERRASPRALWPEVRSVIMLGMNYGPDGDPLEHLAHPDRAGISVYARNRDYHDIIKGRLKTLAGQIAARASAAAEPGAAPLDVKVFVDTAPVMEKPLAEAAGLGWQGKHTNLVSRELGSWLFLGAIFTTLDLPADAPEADHCGSCRACLDACPTDAFPAPYRLDARRCISYLTIEHKGPIPLEFREAMGNRIYGCDDCLAVCPWNKFAAEAHEAKLHARDDLKLPALAGFLGLDDAGFRKQFAGSPIKRIGRDRFLRNVLIAAGNSGSEALAQPVAALLDDGAAEVRGAAVWALSRLLPKEKLRRLRNAREATETEADVRAEWGEADGAS

SEQ ID NO: 75196 - protein, 359 aa, unidentified
  source 1..359: note = Brevefilum fermentans
  REGION 1..359: note = tr|A0A1Y6K8W2|A0A1Y6K8W2_9CHLR Epoxyqueuosine reductase OS=Brevefilum fermentans OX=1986204 GN=queG PE=4; SV = 1
MRCLAELKRAFSTRAHQLGFTHVGITPAHPVPHFDAFERWIRAGHHADMHYLARQDTLAKRADPSLVLEGCQRVICLAMPYTPPQSSLTAISPGFGRVSAYARPADYHQVIQNKLVELENLICSLADGAVKIKSYVDTGPVLERAFAVQAGLGMVGKNSNLIIQGKGTYFFLAVMLTDLELPVDAPFTHDLCGSCQRCIEACPTSCILPDRTIDARRCISYLTIENKGVIPDALKCQVGNWLFGCDICQMVCPHNIRAQTQPSMLGEPLLPEQMNLTDILNWDEEDFKSATQNTALNRPKQRGLVRNAIVVLGNQAQATALPLLRDHLDKEAHPMVLDALYWAIDQIERNQTDDARSNG

SEQ ID NO: 75197 - protein, 405 aa, Brevibacillus agri
  REGION 1..405: note = tr|A0A3M8A5C8|A0A3M8A5C8_9BACL Epoxyqueuosine reductase OS=Brevibacillus agri OX=51101 GN=queG PE=3 SV=1
MIDEQDLRYWEQTKQSIIDYAKEIGIDKIGFASADPFLTLKERLIEHREKGYESGFEEPDLEKRTNPSLLLEGARSLISIALAYPSKLENPPKSEPGAYRGILCRAAWGVDYHHVLRDKLDKLGKFIQELEPGAKIESMVDTGALSDRAVAERAGVGFVGKNCAVITPEFGSWVYLGELLTNLPLPIDHPIEEGCGDCNICVDACPTGALVQGGQLNAQRCVAFLTQVKDFIPDEFRGKIGNRLYGCDTCQTVCPKNRRINSNHHPEFQPDPEIAKPLLIPLLEMSNKEFKEKFGLSSSSWRGKKPIQRNAILALAHFKDRTAVPHLARLLANDPRPVIRGTAAWALGKIGGADAEAALVRAQETEQVAEVQDEIAKGMKLLAEQSAQGEKQRRQEQQEQQEQLP

SEQ ID NO: 75198 - protein, 399 aa, Brevibacillus borstelensis
  REGION 1..399: note = tr|M8DA91|M8DA91_9BACL Epoxyqueuosine reductase; OS = Brevibacillus borstelensis AK1 OX=1300222 GN=queG PE=3; SV = 1
MNERQYWEDTKQAIIRYAKEMGIDKIGFASADPFLTLKQRLVEHREKGYESGFEEPDLDKRTEPSLSLEGARSIISIALAYPSKLKNPPKSEPGAYRGIMCRAAWGTDYHHVLREKLDKLADYIRQLEPHARLESMVDTGALSDRAVAERAGLGWVGKNCALITPEFGSWVYLGEMLTNLPLPPDTPVEEGCGDCNLCVEACPTGALVQGGQLDSQKCVAFLTQVKGFIPDQYRSKIGNRLYGCDTCQTVCPKNRGLHFEHHPEFQPDPELVKPLLLPLLQMSNKEFKQKFGHSSSSWRGKKPIQRNAILALTHFRDQSAVPDLIRLMESDPREVIRGTAAWALGKIGGEEAAEALHKAAEQEQSEEVMAEIRKGISMLQQPPSLRKGTVSREKTEEIS

SEQ ID NO: 75199 - protein, 383 aa, Brevibacillus brevis
  REGION 1..383: note = tr|A0A1Y4X625|A0A1Y4X625_BREBE Epoxyqueuosine reductase OS=Brevibacillus brevis OX=1393 GN=queG PE=3 SV=1
MNDLLYWEQTKQSIIDYAKEIGIDKIGFASADPFTTLKERLIVHREKGYESGFEEPDFEKRTNPELLLDGARSLISIALAYPSKLKNPPKSEPGAYRGILCRAAWGTDYHHVLRDKLDKLTRFIMELEPGARIESMVDTGALSDRAVAERAGIGFVGKNCAIITPEFGSWVYLGELVTNLPLPSDQPIEEGCGDCNICVDACPTGALIQGGQLDAQRCVAYLTQVKDFIPDEFRGKIGNRLYGCDTCQTVCPKNRRIDNDHHAEFQPDPEIAKPLLIPLLQMSNKEFKEKFGQSSSSWRGKKPIQRNAILALAHFKDRTAVPHLERLLFEDPRPVIRGTAAWALGKIGGEQAQEALITAKAKEASPEVVEEIEKGMSMIREQA

SEQ ID NO: 75200 - protein, 383 aa, Brevibacillus brevis
  REGION 1..383: note = tr|A0A291BEW8|A0A291BEW8_BREBE tRNA epoxyqueuosine(34) reductase QueG OS=Brevibacillus brevis X23 OX=1200792 GN=queG PE=4 SV=1
MNDLQYWEQTKQSIIDYAKEIGIDKIGFASADPFTTLKERLLVHREKGYESGFEEPDLEKRTNPELLLDGARSLISIALAYPSKLKNPPKSEPGAYRGILCRAAWGTDYHHVLRDKLDKLTRFIMELEPGARIESMVDTGALSDRAVAERAGIGFVGKNCAIITPEFGSWVYLGELVTNLPLPSDLPIEEGCGDCNICVDACPTGALIQGGQLDAQRCVAYLTQVKDFIPDEFRGKIGNRLYGCDTCQTVCPKNRRIDNDHHAEFQPDPEIAKPLLIPLLQMSNKEFKEKFGLSSSSWRGKKPIQRNAILALAHFKDRTAVPHLERLLFEDPRPVIRGTAAWALGKIGGEQAQEALISAKAKEASPEVVEEIEKGMSMIRAQA

SEQ ID NO: 75201 - protein, 387 aa, Brevibacillus choshinensis
  REGION 1..387: note = tr|A0A0Q3WHD8|A0A0Q3WHD8_BRECH Epoxyqueuosine reductase OS=Brevibacillus choshinensis OX=54911 GN=queG; PE = 3 SV=1
MNEQQYWEQTKQSIIAYAKQIGIDKIGFASADPFIDLKGRLIEHREKGYESGFEEQDLDKRTQPGLLVEGARSLISIALAYPSKLEQPPKSEPGAYRGILCRAAWGTDYHHVLRDRLDKLAGYIAQLEPGVRIESMVDTGELSDRAVAERAGVGWSGKNCSIITPEFGSWVYLGELVTNLPLPADHPIEEGCGDCNICVDACPTGALVQGGQLDAQRCIAFLTQVKDFIPDEFRGKIGNRLYGCDTCQTVCPKNRRINATHHPEFQPDPEIAKPLLLPLLDMSNKEFKEKFGLSSSSWRGKKPIQRNAILALAHFKDKTAVPQLSRLLESDPRPVIRGTAAWALGKIGGDEAQVALDKAKEREDAPEVLAEVEKGLRMIEEHTATGK

SEQ ID NO: 75202 - protein, 386 aa, Brevibacillus fluminis
  REGION 1..386: note = tr|A0A3M8DPF1|A0A3M8DPF1_9BACL tRNA epoxyqueuosine(34) reductase QueG OS=Brevibacillus fluminis OX=511487 GN=queG PE=4 SV=1
MTSEQTYWQQTKEAIIRYAGEIGIDKIGFATADPFLDLKERLEVHRESGFESGFEEPDLEKRTDPTLTIPEARSLIAIALAYPSKMKNPPKSVPGAYRGILSRSAWGTDYHHVLREKMEKLTAFIRDLEPGAMIESMVDTGGLSDRAVAERAGIGWSGKNCAIITPEFGSWVYLGELVTSLPLPPDAPIEEGCGDCNICVDACPTGALVQGGQLNSQRCVAFLTQVKDFIPDEFRSKIGNRLYGCDTCQTVCPKNKGKHFDYHPEFSPDPEVAKPLLVPILSMGNREFKEVFGKSSSAWRGRKPIQRNAILALAHFKDQSAVPDLIRLLQKDPRPVIRGTAAWALGKIGGTQAGEALQEALSLEKDEEALAEIHKGLALWQQEATV

SEQ ID NO: 75203 - protein, 383 aa, Brevibacillus formosus
  REGION 1..383: note = tr|A0A4Y4I624|A0A4Y4I624_9BACL Epoxyqueuosine reductase OS=Brevibacillus formosus OX=54913 GN=queG PE=3; SV = 1
MNDLLYWEQTKQSIIDYAKEIGIDKIGFASADPFTTLKERLIVHREKGYESGFEEPDLEKRTNPELLLGGARSLISIALAYPSKLKNPPKSEPGAYRGILCRAAWGTDYHHVLRDKLDKLTRFIMELEPGARIESMVDTGALSDRAVAERAGIGFVGKNCAIITPEFGSWVYLGELVTNLPLPSDQPIEEGCGDCNICVDACPTGALIQGGQLDAQRCVAYLTQVKDFIPDEFRGKIGNRLYGCDTCQTVCPKNRRIDNAHHAEFQPDPEIAKPLLIPLLQMSNKEFKEKFGQSSSSWRGKKPIQRNAILALAHFKDRTAVPHLERLLFEDPRPVIRGTAAWALGKIGGEQAQGALITAKAKETSPEVVEEIEKGMSMIRAQA

SEQ ID NO: 75204 - protein, 383 aa, Brevibacillus formosus
  REGION 1..383: note = tr|A0A220MBR5|A0A220MBR5_9BACL Epoxyqueuosine reductase OS=Brevibacillus formosus OX=54913 GN=queG PE=3; SV = 1
MNDLLYWEQTKQSIIDYAKEIGIDKIGFASADPFTTLKERLIVHREKGYESGFEEPDLEKRTNPELLLDGARSLISIALAYPSKLKNPPKSEPGAYRGILCRAAWGTDYHHVLRDKLDKLTRFIMELEPGARIESMVDTGALSDRAVAERAGIGFVGKNCAIITPEFGSWVYLGELVTNLPLPSDQPIEEGCGDCNICVDACPTGALIQGGQLDAQRCVAYLTQVKDFIPDEFRGKIGNRLYGCDTCQTVCPKNRRIDNDHHAEFQPDPEIAKPLLIPLLQMSNKEFKEKFGQSSSSWRGKKPIQRNVILALAHFKDRTAVPHLERLLFEDPRPVIRGTAAWALGKIGGEQAQGALITAKAKEASPEVVEEIEKGISMIRAQA

SEQ ID NO: 75205 - protein, 406 aa, unidentified
  source 1..406: note = Brevibacillus gelatini
  REGION 1..406: note = tr|A0A3M8AW56|A0A3M8AW56_9BACL Epoxyqueuosine reductase OS=Brevibacillus gelatini OX=1655277 GN=queG; PE = 3 SV=1
MDGQDLRYWEQTKQSIIHYAKEIGIDKIGFASADPFLTLKERLIEHREKGYESGFEEPDLEKRTNPGLLLEGARSLISIALAYPSRLENPPKSEPGAYRGILCRAAWGVDYHHVLRDKLDKLGKFIQELEPGAKIESMVDTGALSDRAVAERAGVGFVGKNCALITPEFGSWVYLGELLTNLPLPADQPIEEGCGDCNICVDACPTGALVQGGQLNAQRCVAFLTQVKDFMPDEFRGKIGNRLYGCDTCQTVCPKNRRINFNHHPEFQPDPEIAKPLLIPLLEMSNKEFKEKFGLSSSSWRGKKPIQRNAILALAHFKDRTAVPHLARLLANDPRPVIRGTAAWALGKIGGADAEAALVSAQETEQVAEVQAEIAKGMKLLAEQGAQGKQREPQEPAKQQRQQEQL

SEQ ID NO: 75206 - protein, 392 aa, Brevibacillus invocatus
  REGION 1..392: note = tr|A0A3M8C5G7|A0A3M8C5G7_9BACL Epoxyqueuosine reductase OS=Brevibacillus invocatus OX=173959 GN=queG; PE = 3 SV=1
MNDQQYWVQTKQAIIAYAKEIGIDKIGFASADPFVELRGRLIEHREKGYESGFEEPDLEKRTQPDLILEGARTLISIALAYPSKLENPPKSEPGAYRGILCRAAWGTDYHHVLRDRLAKLARFIRELEPGAQIESMVDTGALSDRAVAERAGLGWVGKNCALITPEFGSWVYLGELVTNLPLPFDQPVEEGCGDCNICVDACPTGALVQGGQLNAQRCVAYLTQVKDFIPDEFRTKIGNRLYGCDTCQTVCPKNRGIHNSHQTEFIPDPEVAKPLLIPLLEMSNKEFKEKFGLSSSSWRGKKPIQRNAILALAHFKDRSAVPHLARLLEHDPRPVIRGTAAWALGKIGGEDAEAALNRSKEREDSPEVLEEVRKGLEIMNSQVQQKNTEQTK

SEQ ID NO: 75207 - protein, 392 aa, Brevibacillus laterosporus
  REGION 1..392: note = tr|A0A502HUQ0|A0A502HUQ0_BRELA tRNA epoxyqueuosine(34) reductase QueG OS=Brevibacillus laterosporus OX=1465 GN=queG PE=4 SV=1
MKSTLDPTYWQRLKETIQRYAAEIGIDKIGFTSADPFLELKDRLIVHREKGYESGFEEKDIDKRVYPELTLEGARSIIAIAIAYPSKMTNFPKSEPEAYRGILARSAWGLDYHHVLRDKLNRLADFIQELEPDARLESMVDTGVLSDRAVAERAGIGWVGKNCSIITLEFGSYVYLGEMITNLPFPSDQPIEDQCGDCTLCLDTCPTQALVQGGQLNSQRCVAFLTQVKNEIPEEFREKIGNRLYGCDTCQTTCPKNKGMNFTHHLETLPDPELVKPLLKPLLTIGNKEFKERFGTSSAAWRGKKPIQRNAILGLAHFRDKSAVPDLIELLHKDTRPVIRGTSAWALGRIGGELAMEALELACQKEQDESVLPEIQKAIKKLESKNREQQGS

SEQ ID NO: 75208 - protein, 393 aa, Brevibacillus laterosporus
  REGION 1..393: note = tr|A0A075QZT6|A0A075QZT6_BRELA Epoxyqueuosine reductase OS=Brevibacillus laterosporus LMG 15441; OX = 1042163 GN=queG PE=3 SV=1
MKPSLDTAYWQQIKETIQRYAAEIGIDKIGFTSADPFLELKDRLIVHREKGYESGFEEKDIDKRVYPELTLEGARSIIAIAIAYPSKMTNFPKSEPEAYRGILARSAWGVDYHHILRDKLNQLADFIQTLESEARLESMVDTGVLSDRAVAERAGIGWVGKNCSIITPEFGSYVYLGEMITNLPLPSDQPIEDQCGDCTLCLDTCPTQALVQGGQLNSQRCVAFLTQVKDEIPEEFREKIGNRLYGCDTCQTVCPKNKGMNFTHHPETLPDPELVKPLLKPLLTIGNKEFKARFGKSAAAWRGKKPIQRNAILGLAHFRDKSAIPDLIELLNKDLRPVIRGTSAWALGRIGGELAVEALKLANLKEQDESVLQEIQKALKKLEGKNVTANNNT

SEQ ID NO: 75209 - protein, 400 aa, unidentified
  source 1..400: note = Brevibacillus nitrificans
  REGION 1..400: note = tr|A0A3M8DHK3|A0A3M8DHK3_9BACL tRNA epoxyqueuosine(34) reductase QueG OS=Brevibacillus nitrificans OX=651560 GN=queG PE=4 SV=1
MRRARDRSDQAAVSKQQQYWEQTKQSIIDYAAQIGIDKIGFASADPFLELKERLIVHRGKGYESGFEEPDLDKRTEPGLLVEGARSLISIALAYPSKLENPPKSEPGAYRGILCRAAWGTDYHHVLRDKLEKLSAFITELEPGAKIESMVDTGALSDRAVAERAGLGFVGKNCALITEEFGSWVYLGELVTNLPLPADQPVEEGCGDCNICVDACPTGALVQGGQLDAQRCVAYLTQVKDFIPDEFRGKIGNRLYGCDTCQTVCPKNRRLNHTHHAEFQPDPEIAKPLLLPLLDMSNKEFKEKFGLSSSSWRGKKPIQRNAILALAHFKDKTAVPHLARLLENDPRPVIRGTAGWALGKIGGDEARLALLKAMERESDTAVLAEVQKGLAMLPEQSASSH

SEQ ID NO: 75210 - protein, 383 aa, Brevibacillus panacihumi
  REGION 1..383: note = tr|A0A3M8DDV5|A0A3M8DDV5_9BACL Epoxyqueuosine reductase OS=Brevibacillus panacihumi OX=497735 GN=queG; PE = 3 SV=1
MSDRQYWEQTKQAIKDYASKIGIDKIGFASADPFVELRERLVEHREKGYESGFEEPDLEKRTQPQRIMEGARSLISIALAYPSKLENPPKSEPGAYRGILCRAAWGTDYHHVLRDRMDKLSRFIQELEPGVKIESMVDTGALSDRAVAERAGLGWVGKNCALITPEFGSWVYLGELVTNLPLPPDQPVEEGCGDCNICVDACPTGALVQGGQLNAQRCVAYLTQVKDFIPDEFRAKIGNRLYGCDTCQTVCPKNRGIHFQNHEEFRPDPEVAKPLLIPLLEMSNKEFKEKFGISSSSWRGKKPIQRNAILALAHFKDRTAVPHLVRLLENDPRPVIRGTAAWALGKIGGEDAHASLLQAKDREESPEVLQEIDKGLDMLKAAL

SEQ ID NO: 75211 - protein, 383 aa, Brevibacillus panacihumi
  REGION 1..383: note = tr|V6M9N2|V6M9N2_9BACL Epoxyqueuosine reductase; OS = Brevibacillus panacihumi W25 OX=1408254 GN=queG PE=3; SV = 1
MSDRQYWEQTKQAIKEYASKIGIDKIGFASADPFVELRERLVEHREKGYESGFEEPDLEKRTQPQRIMEGARSLISIALAYPSKLENPPKSEPGAYRGILCRAAWGTDYHHVLRDRMDKLSRFIQELEPGAKIESMVDTGALSDRAVAERAGLGWVGKNCALITPEFGSWVYLGELVTNLPLPPDQPVEEGCGDCNICVDACPTGALVQGGQLNAQRCVAYLTQVKDFIPDEFRAKIGNRLYGCDTCQTVCPKNRGIHFQNHAEFTPDPEVAKPLLIPLLEMSNKEFKEKFGISSSSWRGKKPIQRNAILALAHFQDRSAVPHLVRLLENDPRPVIRGTAAWALGKIGGEDAHAALLQAKDRDDSPEVLQEIDKGLDILTAAR

SEQ ID NO: 75212 - protein, 398 aa, Brevibacillus parabrevis
  REGION 1..398: note = tr|A0A4Y3PMQ7|A0A4Y3PMQ7_BREPA Epoxyqueuosine reductase OS=Brevibacillus parabrevis OX=54914 GN=queG; PE = 3 SV=1
MIDEQDVRYWQQTKQSIIDYAKEIGIDKIGFASADPFLTLKERLMEHREKGYESGFEEPDLEKRTHPELLLDGARSLISIALAYPSKLENPPKSEPGAYRGILCRAAWGTDYHHVLRDKLDKLAKFIAELEPGAKIESMVDTGALSDRAVAERAGVGFVGKNCAVITPEFGSWVYLGELLTNLPLPTDQPIEEGCGDCNICVDACPTGALVQGGQLNAQRCIAFLTQVKNFIPDEFRGKIGNRLYGCDTCQTVCPKNRRINSNHHPEFQPDPETAKPLLIPLLEMSNKEFKEKFGLSSSSWRGKKPIQRNAILALAHFKDRTAIPHLSRLLANDPRPVIRGTAAWALGKIGGAEAEAALLRAQELEQDAEVQDEIAKGMSLLAKQEKQEKQDRQQEAK

SEQ ID NO: 75213 - protein, 380 aa, Brevibacillus reuszeri
  REGION 1..380: note = tr|A0A0K9YWH2|A0A0K9YWH2_9BACL Epoxyqueuosine reductase OS=Brevibacillus reuszeri OX=54915; GN = ADS79_03610 PE=4 SV=1
MNDQQYWEQTKQSIIDYAMEIGIDKIGFASADPFTTLKERLIEHREQGYESGFEEPDLDKRTDPGLLVEGARSLISIALAYPSKLENPLKSEPGAYRGILCRAAWGTDYHHVLREKLDKLAQFIKELEPGALIESMVDTGALSDRAVAERAGVGFTGKNCAIITPEFGSWVYLGELVTTLPLPSDQPIEEGCGDCNICVDACPTGALVQGGQLNAQRCIAFLTQVKDFIPDEFRGKIGNRLYGCDTCQTVCPKNRRIHTNHHPEFQPDPETAKPLLIPLLEMSNKEFKQKFGLSSSSWRGKKPIQRNAILALAHFKDKSAVPHLIRLLTNDPRPVIRGTAAWALGKIGGEDAKAALEQSREKEDSPEVLLEIEKGMDFIT

SEQ ID NO: 75214 - protein, 401 aa, Brevibacillus sp.
  REGION 1..401: note = tr|A0A3E0R4M1|A0A3E0R4M1_9BACL Epoxyqueuosine reductase OS=Brevibacillus sp. OX=1882945 GN=queG PE=3 SV=1
MSDRQYWEQTKQAIIAYAREIGIDKIGFASADPFLTLKERLLEHREKGYESGFEEPDLDKRTDPGLSLDGARSLIAIALAYPSKMDNPPKSEPGAYRGILCRAAWGTDYHHVLREKLDKLAGYICELEPGARVESMVDTGALSDRAVAERAGLGWVGKNCALITPEFGSWVYLGELITNLPLPPDEPVEEGCGDCNLCVEACPTGALVQGGQLNAQKCVAFLTQVKDFIPDQYRAKIGNRLYGCDTCQMVCPKNRGKHFAHHAEFRPDPEVAKPLLRPLLHMSNKEFKQTFGASSAAWRGKKPIQRNAILALAHFHDRSAVPDLIRLLEEDPRPVIRGTAAWALGKIGGEEAEAALAAARERESSPEVLAEVEKGFALLRQHGASGAAKSHDVRSGKGAHA

SEQ ID NO: 75215 - protein, 401 aa, Brevibacillus sp.
  REGION 1..401: note = tr|A0A1A5X768|A0A1A5X768_9BACL Epoxyqueuosine reductase OS=Brevibacillus sp. WF146 OX=319501 GN=queG; PE = 3 SV=1
MSDRQYWEQTKQAIIAYANEIGIDKIGFASADPFLTLKERLVEHREKGYESGFEEPDLDKRTDPSLSLEGARSLIAIALAYPSKMENPPKSEPGAYRGILCRAAWGMDYHHVLREKLDKLARFICRLEPGARVESMVDTGALSDRAVAERAGLGWVGKNCALITPEFGSWVYLGELITNLPLPPDMPVEEGCGDCNLCVEACPTGALVQGGQLNAQKCVAFLTQVKDFIPDQYRAKIGNRLYGCDTCQTVCPKNRGKHFAHHAEFRPDPEVAKPLLRPLLHMSNKEFKQTFGTSSAAWRGKKPIQRNAILALAHFRDRTAVPDLIRLLEEDPRPVIRGTAAWALGRIGGAEAEAALQTARERETSPDVLAEVEKGIALLHQPGSSRAAQTDNERGSKGANV

SEQ ID NO: 75216 - protein, 379 aa, unidentified
  source 1..379: note = [Brevibacterium] frigoritolerans
  REGION 1..379: note = tr|A0A3Q9SE78|A0A3Q9SE78_9BACI tRNA epoxyqueuosine(34) reductase QueG OS=[Brevibacterium] frigoritolerans OX=450367 GN=queG PE=4 SV=1
MDMNSFKQEVILYSKEIGIDKIGFTSATAFTELKGRLIRQQELDYQSGFEEADIEKRVRPELIFDKPQSIISIALAYPSKLKDAPQSTKSERRGIFCRASWGTDYHTVLRNKLQLLENFIKDKVPGAMMKSMVDTGELSDRAVAERAGIGWSAKNSMIITPEFGSFVYLGDMITNLPFEPDQPMEDQCGTCNKCVDVCPTGALVQGGQLNSKRCIAFLTQTKGFLPDEFRTKIGNRLYGCDTCQTVCPKNKGMDFHFHEEMEPDPELAKPLLKFLLTISNRDFKETYGHVSGSWRGKKPIQRNAILALAHFKDETALPLLIQVMKNDPRPVIRGTAAWAVGKIGREQAVSALEEARMKEKDEEVLAEIEKGLQFTLETK

SEQ ID NO: 75217 - protein, 377 aa, unidentified
  source 1..377: note = [Brevibacterium] frigoritolerans
  REGION 1..377: note = tr|A0A4R6AAL2|A0A4R6AAL2_9BACI Epoxyqueuosine reductase OS=[Brevibacterium] frigoritolerans OX=450367; GN = queG PE=3 SV=1
MNYEELKQDILSFSKSIGIDKIGFAQASVFDELKQRLIVHEQNGYQSGFEEPDLEKRTNPDVLLPGAKSIISIALAYPSKLKDAPRSTKEDRRGIFCRASWGQDYHHVLRDRLNKLEVYIRERVPNAEFKSMVDTGELSDRAVAERAGIGWSGKNCAIITPEFGSYVYLGEIVTNIPFSPDTPMEDRCGSCNICVDACPTGALVQGGQLDSNKCIAFLTQTKGFLADKYRKKLGNRLYGCDTCQTVCPENKGKDFHLHAEMEPDPEIAKPKLKPLLTMSNREFKEKFGHVSGSWRGKKPIQRNAIIALAHFKDQTAIPELIQLMHKDPRPVIRGTAAWAIGSIGGKERLIDLKKALQHEEDEEVRDEIEKGISLIEA

SEQ ID NO: 75218 - protein, 357 aa, unidentified
  source 1..357: note = Brevifollis gellanilyticus
  REGION 1..357: note = tr|A0A512M4M2|A0A512M4M2_9BACT Epoxyqueuosine reductase OS=Brevifollis gellanilyticus OX=748831 GN=queG; PE = 3 SV=1
MNDLKARLIAKAQELGFADCRVARAAEAARRDLYEQWVAEGKHGDMAWMARNMERRGDPRLVQEGAQSVIVLAMNYFQGPPPREPGYRIARYAWNDDYHDLIEAKLKTFEAWLIEQGGVQRRYVDTGPVLERNWASEAGLGWGGKSTMQIHRQLGTWFFLAELITTLEIEPDAPAKDHCGTCTRCIVACPTQAITAPRRLDARRCVSYLTIENKGSIPVEFRRAIRDRLYGCDDCLAACPWNKFAQISHEATFQARQSVFGMSLRDFLTLTDESFRALFAKSPIKRIKRHAFLRNVCVVLGNVGTAEDLPALLPLVDDPHPLIAEHAAWAVEEIRQRNQTSHEAPAYYESPESHVSN

SEQ ID NO: 75219 - protein, 357 aa, unidentified
  source 1..357: note = Brevirhabdus pacifica
  REGION 1..357: note = tr|A0A2M9DAX4|A0A2M9DAX4_9RHOB Epoxyqueuosine reductase OS=Brevirhabdus pacifica OX=1267768 GN=queG PE=3; SV = 1
MTSSRDSDLPGSDLKARLAVFARESGFASMGVCRPDAVPELAGRLEAFVAAGRHGQMGWMEERRNWRGNPAALWPEARSIVMLADLYTPHADPLEVLERPDRGAISVYARNRDYHDVVKKRLKKVGRWLLEQSRGEEIKVFVDTAPVMEKPLAAAAGLGWQGKHTNLLSRDLGNWFFLGAIFTTVELPPDTPGRENCGSCTACLDICPTAAFPAPFQLDARRCISYLTIEHHGPVPEELRPALGNRIYGCDDCLAVCPWNKFARDAQEIRYHARDDLDAPELSRLAALDDAGFRALFSGSPIKRIGRARFLRNVCYAIGNSGRPDMLPSLGPLLDDPDPALADAARWAVARLRDHAA

SEQ ID NO: 75220 - protein, 349 aa, unidentified
  source 1..349: note = Brevirhabdus pacifica
  REGION 1..349: note = tr|A0A1U7DM78|A0A1U7DM78_9RHOB Epoxyqueuosine reductase OS=Brevirhabdus pacifica OX=1267768 GN=queG PE=3; SV = 1
MPGSDLKARLAVFARESGFASMGVCRPDAVPELAGRLEAFVAAGRHGQMGWMEERRNWRGNPAALWPEARSIVMLADLYTPHADPLEVLERPDRGAISVYARNRDYHDVVKKRLKKVGRWLLEQSRGEEIKVFVDTAPVMEKPLAAAAGLGWQGKHTNLLSRDLGNWFFLGAIFTTVELPPDTPGRENCGSCTACLDICPTAAFPAPFQLDARRCISYLTIEHHGPVPEELRPALGNRIYGCDDCLAVCPWNKFARDAQEIRYHARDDLDAPELSRLAALDDAGFRALFSGSPIKRIGRARFLRNVCYAIGNSGRPDMLPSLGPLLDDPDPALADAARWAVARLRDHAA

SEQ ID NO: 75221 - protein, 298 aa, unidentified
  source 1..298: note = Brevundimonas abyssalis
  REGION 1..298: note = tr|U3APY7|U3APY7_9CAUL Iron-sulfur cluster-binding protein OS=Brevundimonas abyssalis TAR-001 OX=1391729; GN = MBEBAB_2034 PE=4 SV=1
METTLARRAHPTAMWADARTAIVLGLNYGPGHDPLPEMEDRSAGYISVYARGDDYHELIKGRLKQLAGIVAVRSGAEVKVFVDTAPLMEKPLAQRAGLGWQGKHTNLLSRTHGNWLFLGVILSAADYEPDPSEDEHCGSCRACLDACPTNAFPAPFQLDARRCLSYLTIEFAGPWPEEFRAAAGSRIYGCDDCLAVCPWNKFAQGAHEARLHARDSLSAPRLVDLAALDDASFRTLFAKSPVKRIGRDRFVRNVLYAIGNSGDPALIPSAERLLEDPDPVVRDAAGWALGRLRAGDVA

SEQ ID NO: 75222 - protein, 391 aa, Brevundimonas diminuta
  REGION 1..391: note = tr|A0A2D0AP32|A0A2D0AP32_BREDI Epoxyqueuosine reductase OS=Brevundimonas diminuta OX=293 GN=queG PE=4; SV = 1
MAADPRIFIRQRAAELGFGVCRFASASDPWSAGEKLAHFIDAGRHGDMGWMETTLERRAHPTAMWDGAKTAIVLGMNYGPDEDPRPELEEASAGYISVYARGDDYHEVIKGRLKILAGQIAARLGQEVKVFVDTAPLMEKPLAQRAGLGWQGKHTNLLSRTHGNWLFLGTILTAAEIEADEAEVEHCGRCTACLDACPTQAFPAPFQIDARRCLSYLTIEYAGAWPHEFRIATGNRIYGCDDCLAACPWNKFAQEASETRLQARDALKSPPLADLLALDDPAFRALFAKSPVKRIGRDRFTRNALYAAGNSGEATLIGAVERLLDDPAPVVRGAAVWALSQLSPERFAELRETRRASETDEAVKQEWRPSPLAGEGGPRSGSDEGSRRPQT

SEQ ID NO: 75223 - protein, 375 aa, Brevundimonas diminuta
  REGION 1..375: note = tr|L1QIJ1|L1QIJ1_BREDI Putative iron-sulfur cluster-binding protein OS=Brevundimonas diminuta 470-4; OX = 1035191 GN=HMPREF0185_02064 PE=4 SV=1
MAADPRIFIRQRAAELGFGVCRFASASEPWSAGERLAYFVDAGRHGDMGWMETTLERRAHPTAMWDGARTAIVLGMNYGPDEDPRPELEQASSGYISVYARGDDYHEVIKGRLKILAGQIAARLKQEVKVFVDTAPLMEKPLAQRAGLGWQGKHTNLLSRTHGNWLFLGVILTAAEIEPDEAETEHCGRCTACLDACPTKAFPAPFQIDARRCISYLTIEYAGAWPREFRLATGNRIYGCDDCLAACPWNKFAQSASEARLQARDALKSPPLTDLLALDDPAFRALFTKSPVKRIGRDRFIRNVLYAAGNSGDAALIASVEALLDDPAPVVRGAAAWALSRLSPERFAMERAARLASEPDADVRQEWSFSPCGRR

SEQ ID NO: 75224 - protein, 375 aa, Brevundimonas intermedia
  REGION 1..375: note = tr|A0A4Y9RZ03|A0A4Y9RZ03_9CAUL tRNA epoxyqueuosine(34) reductase QueG OS=Brevundimonas intermedia OX=74315 GN=queG PE=4 SV=1
MSDRLKTFIRQRAAELGFDVCRFASAADAWPAGERLRHFVDEGRHGDMEWMETTLDRRQHPTAMWDEARTAIVLGMNYGPDDNPLDQLADRSAGYISVYARGDDYHEVIKGRLKQLAGQIAARNGADIKVFVDTAPLMEKPLAQRAGMGWQGKHTNLLSRTHGNWLFLGTILTAAEIEPDAAETEHCGRCTACLDACPTKAFPAPFQLDARRCLSYLTIEFADPWPVEFRTLTGSRIYGCDDCLAVCPWNKFAQSAREIRLAPRPAFQSPRLHDLLALNDAAFRALFTKSPVKRIGRDRFLRNVLYAVGNSDDASLIAPTKALLSDPSPLVRGAAVWALSQLTPPGEFAALSDATDETDPQVLAEWRRAQTPQPA

SEQ ID NO: 75225 - protein, 371 aa, Brevundimonas naejangsanensis
  REGION 1..371: note = tr|A0A172Y7E6|A0A172Y7E6_9CAUL tRNA epoxyqueuosine(34) reductase QueG OS=Brevundimonas naejangsanensis OX=588932 GN=DA69_10490 PE=4 SV=1
MAADPRIFIRQRAAELGFGVCRFASASDPWSAGERLAYFVDAGRHGEMGWMETTLERRAHPTAMWDGARTAIVLGMNYGPDEDPRPELQEASAGYISVYARGDDYHEVIKGRLKILAGQIAARLGQEVKVFVDTAPLMEKPLAQRAGLGWQGKHTNLLSRTHGNWLFLGTILTAAEIEPDAAESEHCGRCTACLDACPTKAFPAPFQIDARRCLSYLTIEYAGAWPREFRLATGNRIYGCDDCLAACPWNKFAQSASEARLQARDALKSPPLIDLLALGDPAFRALFTKSPVKRIGRDRFIRNALYAAGNSGDAALVAPVEALLDDPAPVVRGAAIWALAQLAPERFETERAARLRQETDDEVKQEWSFSP

SEQ ID NO: 75226 - protein, 380 aa, Brevundimonas naejangsanensis
  REGION 1..380: note = tr|A0A494RDX6|A0A494RDX6_9CAUL tRNA epoxyqueuosine(34) reductase QueG OS=Brevundimonas naejangsanensis OX=588932 GN=queG PE=4 SV=1
MAADPRIFIRQRAAELGFGVCRFASASEPWSAGEKLAHFVEADRHGDMGWMETTLERRAHPTAMWDGARTAIVLGMNYGPDEDPRPELDQPSAGYISVYARGDDYHEVIKGRLKILAGQIAARLGQEVKVFVDTAPLMEKPLAQRAGLGWQGKHTNLLSRTHGSWLFLGVILTAAEIEADEAESEHCGRCTACLDACPTNAFPAPFQIDARRCLSYLTIEYAGAWPREFRVATGNRIYGCDDCLAACPWNKFAQAASEARLQAREALKSPPLAELLALDDPAFRTLFAKSPVKRIGRDRFLRNVLYAAGNSGETGLVGAVERLLDDAASMVRGAATWALGRLAPERFEAAREARLAGEADEAVREEWRATPLPPRPGEGG

SEQ ID NO: 75227 - protein, 373 aa, Brevundimonas nasdae
  REGION 1..373: note = tr|A0A0B4D1B2|A0A0B4D1B2_9CAUL 4Fe-4S ferredoxin; OS = Brevundimonas nasdae OX=172043 GN=RM53_08775 PE=4 SV=1
MPRPVSDRLKTFIRQRAAELGFDVCRFASAADAWPAGERLRHFVDEGRHGDMEWMETTLDRRQHPTAMWDEARTAIVLGMNYGPEQNPLDQLADRSAGYISVYARGDDYHEVIKGRLKQLAGQIAARNGADIKVFVDTAPLMEKPLAQRAGLGWQGKHTNLLSRSHGNWLFLGTILTAAEIEPDAAETEHCGRCTACLDACPTKAFPAPFQLDARRCLSYLTIEFADPWPVEFRTLTGSRIYGCDDCLAVCPWNKFAQEAREIRLAPRPAFESPRLHDLLALDDAAFRALFTKSPVKRIGRDRFLRNVLYAVGNSGDASLVAPTKALLADPSPLVRGAAVWALSRLMPADAFATLAEATKETDPVVLTEWRRA

SEQ ID NO: 75228 - protein, 375 aa, Brevundimonas sp.
  REGION 1..375: note = tr|A0A358IYB0|A0A358IYB0_9CAUL tRNA epoxyqueuosine(34) reductase QueG OS=Brevundimonas sp.; OX = 1871086 GN=queG PE=4 SV=1
MAADPRIFIRQRAAELGFGVCRFASASEPWSAGERLAYFVDAGRHGDMGWMETTLERRAHPTAMWDGARTAIVLGMNYGPDEDPRPELEQASSGYISVYARGDDYHEVIKGRLKILAGQIAARLKEEVKVFVDTAPLMEKPLAQRAGLGWQGKHTNLLSRTHGNWLFLGAILTAADIEPDEAETEHCGRCTACLDACPTQAFPAPFQIDARRCISYLTIEYAGAWPREFRIAAGNRIYGCDDCLAACPWNKFAQSASEARLQARDALKSPPLTDLLALDDPAFRALFTRSPVKRIGRDRFIRNALYAAGNSGDAALIASVEALLDDPAPVVRGASAWALSRLSPERFAMERAARLASETDEEVRHEWSFSPCGRR

SEQ ID NO: 75229 - protein, 391 aa, Brevundimonas sp.
  REGION 1..391: note = tr|A0A1R1IAR4|A0A1R1IAR4_9CAUL tRNA epoxyqueuosine(34) reductase QueG OS=Brevundimonas sp. ZS04 OX=1906854 GN=BJP32_14135 PE=4 SV=1
MAADPRIFIRQRAAELGFGVCRFASASDPWSAGEKLAHFVDAGRHGDMGWMETTLERRAHPTAMWDGAKTAIVLGMNYGPDEDPRPELEEASAGYISVYARGDDYHEVIKGRLKILAGQIAARLGQEVKVFVDTAPLMEKPLAQRAGLGWQGKHTNLLSRTHGNWLFLGTVLTAAEIEADEAEVEHCGRCTACLDACPTQAFPAPFQIDARRCLSYLTIEYAGAWPREFRIATGNRIYGCDDCLAACPWNKFAQEASETRLQARDALKSPPLADLLALDDPAFRALFTKSPVKRIGRDRFIRNALYAAGNSSEATLIEAVERLLDDPAPVVRGAAVWALSQLSPERFAELRETRRASETDEAVKQEWRPSPLAGEGGPRSGSDEGSRRPQT

SEQ ID NO: 75230 - protein, 384 aa, Brevundimonas subvibrioides
  REGION 1..384: note = tr|A0A258FR43|A0A258FR43_9CAUL tRNA epoxyqueuosine(34) reductase QueG OS=Brevundimonas subvibrioides OX=74313 GN=B7Z01_03605 PE=4 SV=1
MSDPRDILRAKAADLGFDVCRFASASEPWTAGERLAHFVEAGRHGDMGWMETTLERRAHPTAMWQGARTAMVLGMNYGSGRDPLPEMEDRSAAYISVYARGDDYHEVIKGRLKTLAGQVAARLGAAHLPSEVKVFVDTAPLMEKPLAQRAGLGWQGKHTNLLSREHGNWLFLGVILTAAEIEADAPEAEHCGSCTACLTACPTNAFPAPFQLDARRCLSYLTIEHAGPWPVEFRAAAGSRIYGCDDCLAVCPWNKFAETAREARLTAREALVSPRLADLAALDDAAFRALFSKSPIKRIGRDRFMRNVLYAIGNSGDAALVDSAMRLLNDPSPLVRGAAVWALSRLLDPDAFEGVRDLRLAGEDDKGVRSEWHHHSPSPAGEGG

SEQ ID NO: 75231 - protein, 371 aa, Brevundimonas subvibrioides
  REGION 1..371: note = tr|D9QFD5|D9QFD5_BRESC 4Fe-4S ferredoxin-type domain-containing protein OS=Brevundimonas subvibrioides (strain ATCC 15264 / DSM 4735 / LMG 14903 / NBRC 16000 / CB 81 ) OX=633149 GN=Bresu_3144 PE=4 SV=1
MSDPRDILRVQAAGLGFSVCRFASASEPWTAGERLAHFVAAGRHGDMGWMETTLERRAHPTAMWPDARTAIVLGMNYGPDADPLPEMSDRSAGYISVYARGDDYHEVIKGRLKTLAGQVAARLGAEVKVFVDTAPLMEKPLAQRAGLGWQGKHTNLLSREHGNWLFLGVILTAAEIEPDAAEAEHCGSCTACLTACPTNAFPGPFQLDARRCLSYLTIEHAGPWPVEFRALTGARIYGCDDCLAVCPWNKFAQGGREARLAAREASISPRLEDLAALDDPAFRALFSKSPIKRIGRDRFVRNVLYAIGNSGDAALVAVASRLTADASPLVRGAAVWALSRLLDERAFADLRLSGQAGEADAGVLAEWARAA

SEQ ID NO: 75232 - protein, 391 aa, Brevundimonas vancanneytii
  REGION 1..391: note = tr|A0A4P1KHL0|A0A4P1KHL0_9CAUL Epoxyqueuosine reductase OS=Brevundimonas vancanneytii OX=1325724 GN=queG; PE = 4 SV=1
MAADPRIFIRQRAAELGFGVCRFASASDPWSAGEKLAHFVDAGRHGDMGWMETTLERRAHPTAMWDGAKTAIVLGMNYGPDEDPRPELEEASAGYISVYARGDDYHEVIKGRLKILAGQIAARLGQEVKVFVDTAPLMEKPLAQRAGLGWQGKHTNLLSRTHGNWLFLGTILTAAEIEADEAEVEHCGRCTACLDACPTQAFPAPFQIDARRCLSYLTIEYAGAWPREFRIATGNRIYGCDDCLAACPWNKFAQEASETRLQARDALKSPPLADLLALDDPAFRALFTKSPVKRIGRDRFIRNALYAAGNSGEATLIGAVERLLDDPAPVVRGAAVWALSQLSPERFAGLRETRRASETDEAVKQEWRPSPLAGEGGPRSGSDEGSRRPQT

SEQ ID NO: 75233 - protein, 391 aa, Brevundimonas vesicularis
  REGION 1..391: note = tr|A0A2X1BSB9|A0A2X1BSB9_BREVE Epoxyqueuosine reductase OS=Brevundimonas vesicularis OX=41276 GN=queG; PE = 3 SV=1
MRRATSPLRREETSCYPPPVSDRLKTFIRQRAAELGFDVCRFASAADAWLAGERLRRFVDEGRHGDMEWMETTLDRRQHPTAMWDEARTAIVLGMNYGPEQNPLDQLADRSAGYISVYARGDDYHEVIKGRLKQLAGQIAARNGADIKVFVDTAPLMEKPLAQRAGLGWQGKHTNLLSRTHGNWLFLGTILTAAEIEADAAETEHCGRCTACLDACPTKAFPAPFQLDARRCLSYLTIEFAGPWPVEFRTLTGSRIYGCDDCLAVCPWNKFAQEAREIRLAPRPAFESPRLHDLLALDDAAFRALFNKSPVKRIGRDRFLRNVLYAVGNSGDATLIAPTQALLADPSALVRGAAVWALSELMPAGAFATLAEATTETDAHVLSEWRRLEPT

SEQ ID NO: 75234 - protein, 369 aa, Brevundimonas vesicularis
  REGION 1..369: note = tr|A0A1Z3U777|A0A1Z3U777_BREVE Epoxyqueuosine reductase OS=Brevundimonas vesicularis OX=41276 GN=queG; PE = 3 SV=1
MSDRLKTFIRQRSAELGFDVCRFASAADAWPAGERLRHFVDEGRHGDMEWMETTLDRRQHPTAMWDEARTAIVLGMNYGPENNPLDQLADRSAGYISVYARGDDYHEVIKGRLKQLAGQIAARNGADIKVFVDTAPLMEKPLAQRAGLGWQGKHTNLLSRTHGNWLFLGTILTAAEIEPDAAETEHCGRCTACLDACPTNAFPAPFQLDARRCLSYLTIEFAGPWPEEFRTLTGSRIYGCDDCLAVCPWNKFAQEAREIRLAPRPAFQSPRLHDLLALDDAAFRALFTKSPVKRIGRDRFLRNVLYAVGNSDDASLIAPTKALLDDPSPLVRSAAVWALSQMTPPDDFAALAKSTTETDPQVLSEWRRA

SEQ ID NO: 75235 - protein, 351 aa, unidentified
  source 1..351: note = Brevundimonas viscosa
  REGION 1..351: note = tr|A0A1I6T568|A0A1I6T568_9CAUL Epoxyqueuosine reductase OS=Brevundimonas viscosa OX=871741; GN = SAMN05192570_2973 PE=4 SV=1
MARDPRIFIRERAAALGFDVCRFGSASEPWSAGERLAHFVEDGRHGDMGWMETTLERRAHPTSMWEGARTAIVLGLNYGPGHDPLPELADRSAGYLSVYARGDDYHELIKGRLKTLAGQIAARTGEEVKVFVDTAPLMEKPLAQRAGLGWQGKHTNLLSRDHGNWLFLGVILSAATFEPDEAETQHCGSCTACLDACPTNAFPAPFQLDARRCLSYLTIEFAGPWPEDFRVATGNRIYGCDDCLAICPWNKFAAESREGRLQAREALLSPRLADLAALDDAAFRALFSKSPVKRIGRDRFVRNVLYAIGNSRDAALVPAAEALMDDPDPVVRDAAAWAVARLRSLSHRERA

SEQ ID NO: 75236 - protein, 379 aa, Brochothrix campestris
  REGION 1..379: note = tr|W7CNV3|W7CNV3_9LIST YhbA protein OS=Brochothrix campestris FSL F6-1037 OX=1265861 GN=BCAMP_08831 PE=4 SV=1
MVDTLKDEIKAYAKTIGIQKIGFTTADYFQTLEKRLSFAQEHDLLTGFEHPVIAERVNPSLIFEQPQSIIAIALAYPNQMDNTLRSKRGEWRGVFARASWGVDYHTVLREKLALLEAFIKTKVPEARTKSMVDTGELSDVAVAERAGIGWRGKNTLLITPEYGSFVYLGEMITNIAFEPDEPMGDQCGECTQCIKACPTGALLGDGKMNGKECLSYQTQTKGMMPERFRDKLHNRLYGCDTCQVVCPYNRGKDFHLHPAMEPDEAKVKPLLKPLLTISNREFKETFGPMAGSWRGKKPLQRNAILILGRYKDETAIPDLVNCLLADPRPVIRGTAAYALAKIGGHIALEALQTAQQEETDDEARAEITAALLNLSQKEG

SEQ ID NO: 75237 - protein, 382 aa, Brochothrix thermosphacta
  REGION 1..382: note = tr|A0A1D2KBD5|A0A1D2KBD5_BROTH Epoxyqueuosine reductase OS=Brochothrix thermosphacta OX=2756 GN=queG; PE = 4 SV=1
MVNAQLKAEIKAYAQSIGVQKIGFTHADYFQTLEKRLTFAAEHDLLTGFEHPVIKERVDPSVIFEEPRSIIAIALAYPNQTDNNLRSKRGEWRGVFARASWGVDYHTILREKLALIEAFIKEKVPTARFKSMVDTGELSDVAVAERAGIGWRGKNTLLITPEFGSFVYLGEMITNLEFEADEPMADGCGECTQCIKACPTGALLGEGRMDGKECLSYQTQTKGMMPERFREKLHNRLYGCDTCQVVCPYNRGKDFHLHPEMEPEEAKIKPLLKPLLTISNREFKETFGPMAGSWRGKKPLQRNAILILGRYKDQTAVPDLVNCLLEDPRPVIRGTAAYSLSKIGGGIAYDALIAAEKEETDAEAYQEISKALLQLSEKEGSY

SEQ ID NO: 75238 - protein, 398 aa, unidentified
  source 1..398: note = Brucella abortus
  REGION 1..398: note = tr|A0A4Z1PGK9|A0A4Z1PGK9_BRUAO Epoxyqueuosine reductase OS=Brucella abortus OX=235 GN=queG PE=3 SV=1
MATSTSDSGQIAENNTPVRQKPALEKELRLKRFLIEEAKAAGFDAIAFTTPDAIPQAPQRLRQYISEGCHADMLWMEETEERRANPSVLWPEVRSIMVLAMNYGPDTNPLAILDKKDRAAISVYAQNRDYHDIIKGKFKHVASRFSARAGQDVKVFVDTAPVMEKPLAEAAGLGWQGKHTNLVSRELGSWLFLGSIFTTAQIPPDEPDHDHCGSCHACLDICPTGAFPAPYRVDARRCISYLTIENKGPIPLEFRKPMGNRIYGCDDCLSICPWNKFAQVTSEMKLKARDDLKAPHLKDLLVLDDPSFRMLFSGSPVKRIGRDRFIRNVLIATGNSGDITLLPQVEALLEDPAPVVRGAAVWALKQLASPQHIADQQMRLATREEDATVQAEWTMETH

SEQ ID NO: 75239 - protein, 404 aa, unidentified
  source 1..404: note = Brucella abortus
  REGION 1..404: note = tr|C4IWK1|C4IWK1_BRUAO Epoxyqueuosine reductase; OS = Brucella abortus str. 2308 A OX=641140 GN=queG PE=3 SV=1
MPRWLIMATSTSDSGQIAENNTPVRQKPALEKELRLKRFLIEEAKAAGFDAIAFTTPDAIPQAPQRLRQYISEGCHADMLWMEETEERRANPSVLWPEVRSIMVLAMNYGPDTNPLAILDKKDRAAISVYAQNRDYHDIIKGKFKHVASRFAARAGQDVKVFVDTAPVMEKPLAEAAGLGWQGKHTNLVSRELGSWLFLGSIFTTAQIPPDEPDHDHCGSCHACLDICPTGAFPAPYRVDARRCISYLTIENKGPIPLEFRKPMGNRIYGCDDCLSICPWNKFAQVTSEMKLKARDDLKAPHLKDLLVLDDPSFRMLFSGSPVKRIGRDRFIRNVLIATGNSGDITLLPQVEALLEDPAPVVRGAAVWALKQLASPQHIADQQMRLATREEDATVQAEWTMETH

SEQ ID NO: 75240 - protein, 398 aa, unidentified
  source 1..398: note = Brucella canis
  REGION 1..398: note = tr|A9MCX1|A9MCX1_BRUC2 Epoxyqueuosine reductase; OS = Brucella canis (strain ATCC 23365 / NCTC 10854); OX = 483179 GN=queG PE=3 SV=1
MATSTSDSGQIAENNTPVRQKPALEKELRLKRFLIEEAKAAGFDAIAFTTPDAIPQAPQRLRQYIAEGCHADMLWMEETEERRANPSVLWPEVRSIMVLAMNYGPDTNPLAILDKKDRAAISVYAQNRDYHDIIKGKLKHVASRFAARAGQDVKVFVDTAPVMEKPLAEAAGLGWQGKHTNLVSRELGSWLFLGSIFTTAQIPPDEPDHDHCGSCHACLDICPTGAFPAPYRVDARRCISYLTIENKGSIPLEFRKPMGNRIYGCDDCLSICPWNKFAQVTSEMKLKARDDLKAPHLKDLLVLDDPSFRMLFSGSPVKRIGRDRFIRNVLIATGNSGDITLLPQVEALLEDPAPVVRGAAVWALKQLASPQHIADQQMRLATREEDATVQAEWTMETH

SEQ ID NO: 75241 - protein, 404 aa, Brucella ceti
  REGION 1..404: note = tr|C0GB21|C0GB21_9RHIZ Epoxyqueuosine reductase; OS = Brucella ceti str. Cudo OX=595497 GN=queG PE=3 SV=1
MPRWLIMATSTSDSGQIAENNTPVRQKPALEKELRLKRFLIEEAKAAGFDAIAFTTPDAIPQAPQRLRQYIAEGCHADMLWMEETEERRANPSVLWPEVRSIMVLAMNYGPDTNPLAILDKKDRAAISVYAQNRDYHDIIKGKLKHVASRFAARAGQDVKVFVDTAPVMEKPLAEAAGLGWQGKHTNLVSRELGSWLFLGSIFTTAQIPPDEPDHDHCGSCHACLDICPTGAFPAPYRVDARRCISYLTIENKGPIPLEFRKPMGNRIYGCDDCLSICPWNKFAQVTSEMKLKARDDLKAPHLKDLLVLDDPSFRMLFSGSPVKRIGRDRFIRNVLIATGNSGDITLLPQVEALLEDPAPVVRGAAVWALKQLASPQHIADQQMRLATREEDATVQAEWTMETH

SEQ ID NO: 75242 - protein, 398 aa, Brucella melitensis
  REGION 1..398: note = tr|A0A4P6KRE5|A0A4P6KRE5_BRUML Epoxyqueuosine reductase OS=Brucella melitensis OX=29459 GN=queG PE=3 SV=1
MATSTSDSGQIAENNTPVRQKPALEKELRLKRFLIEEAKAAGFDAIAFTTPDAIPQAPQRLRQYIAEGCHADMLWMEETEERRANPSVLWPEVRSIMVLAMNYGPDTNPLAILDKKDRAAISVYAQNRDYHDIIKGKLKHVASRFAARAGQDVKVFVDTAPVMEKPLAEAAGLGWQGKHTNLVSRELGSWLFLGSIFTTAQIPPDEPDHDHCGSCHACLDICPTGAFPAPYRVDARRCISYLTIENKGPIPLEFRKPMGNRIYGCDDCLSICPWNKFAQVTSEMKLKARDDLKAPHLKDLLVLDDPSFRMLFSGSPVKRIGRDRFIRNVLIATGNSGDITLLPQVEALLEDPAPVVRGAAVWALKQLASPQHIADQQMRLATREEDATVQAEWTMETH

SEQ ID NO: 75243 - protein, 398 aa, Brucella melitensis; identical to SEQ ID NO: 75242
  REGION 1..398: note = tr|C0RMI4|C0RMI4_BRUMB Epoxyqueuosine reductase; OS = Brucella melitensis biotype 2 (strain ATCC 23457); OX = 546272 GN=queG PE=3 SV=1

SEQ ID NO: 75244 - protein, 398 aa, Brucella microti
  REGION 1..398: note = tr|C7LJG3|C7LJG3_BRUMC Epoxyqueuosine reductase; OS = Brucella microti (strain CCM 4915) OX=568815 GN=queG; PE = 3 SV=1
MATSTSDSGQIAENNTPVRQKPALEKELRLKRFLIEEAKAAGFDAIAFTTPDAIPQAPQRLRQYIAEGCHADMLWMEETEERRANPSVLWPEVRSIMVLAMNYGPDTNPLAILDKKDRAAISVYAQNRDYHDIIKGKLKHVASRFAARAGQDVKVFVDTAPVMEKPLAEAAGLGWQGKHTNLVSRELGSWLFLGSIFTTAQIPPDEPDHDHCGSCHACLDICPTGAFPAPYRVDARRCISYLTIENKGPIPLEFRKPMGNRIYGCDDCLSICPWNKFAQVTSEMKLKARDDLKAPHLKDLLVLDDPSFRMLFSGSPVKRIGRDRFIRNVLIATGNSGDITLLPQVEALLEDPAPVVQGAAVWALKQLASPQHIADQQMRLATREEDATVQAEWTMETH

SEQ ID NO: 75245 - protein, 398 aa, unidentified; identical to SEQ ID NO: 75242
  source 1..398: note = Brucella neotomae
  REGION 1..398: note = tr|A0A381BZ92|A0A381BZ92_BRUNE Epoxyqueuosine reductase OS=Brucella neotomae OX=29460 GN=queG PE=3 SV=1

SEQ ID NO: 75246 - protein, 404 aa, unidentified
  source 1..404: note = Brucella ovis
  REGION 1..404: note = tr|A0A0H3AU06|A0A0H3AU06_BRUO2 Epoxyqueuosine reductase OS=Brucella ovis (strain ATCC 25840 / 63/290 / NCTC 10512) OX=444178 GN=queG PE=3 SV=1
MPRWLIMATSTSDSGQIAENNTPVRQKPALKKELRLKRFLIEEAKAAGFDAIAFTTPDAIPQAPQRLRQYIAEGCHADMLWMEETEERRANPSVLWPEVRSIMVLAMNYGPDTNPLAILDKKDRAAISVYAQNRDYHDIIKGKLKHVASRFAARAGQDVKVFVDTAPVMEKPLAEAAGLGWQGKHTNLVSRELGSWLFLGSIFTTAQIPPDEPDHDHCGSCHACLDICPTGAFPAPYRVDARRCISYLTIENKGPIPLEFRKPMGNRIYGCDDCLSICPWNKFAQVTSEMKLKARDDLKAPHLKDLLVLDDPSFRMLFSGSPVKRIGRDRFIRNVLIATGNSGDITLLPQVEALLEDPAPVVRGAAVWALKQLASPQHIADQQMRLATREEDATVQAEWTMETH

SEQ ID NO: 75247 - protein, 398 aa, unidentified
  source 1..398: note = Brucella ovis
  REGION 1..398: note = tr|N8LPF1|N8LPF1_BRUOV Epoxyqueuosine reductase; OS = Brucella ovis IntaBari-2002-82-58 OX=1293916 GN=queG; PE = 3 SV=1
MATSTSDSGQIAENNTPVRQKPALKKELRLKRFLIEEAKAAGFDAIAFTTPDAIPQAPQRLRQYIAEGCHADMLWMEETEERRANPSVLWPEVRSIMVLAMNYGPDTNPLAILDKKDRAAISVYAQNRDYHDIIKGKLKHVASRFAARAGQDVKVFVDTAPVMEKPLAEAAGLGWQGKHTNLVSRELGSWLFLGSIFTTAQIPPDEPDHDHCGSCHACLDICPTGAFPAPYRVDARRCISYLTIENKGPIPLEFRKPMGNRIYGCDDCLSICPWNKFAQVTSEMKLKARDDLKAPHLKDLLVLDDPSFRMLFSGSPVKRIGRDRFIRNVLIATGNSGDITLLPQVEALLEDPAPVVRGAAVWALKQLASPQHIADQQMRLATREEDATVQAEWTMETH

SEQ ID NO: 75248 - protein, 398 aa, Brucella pinnipedialis; identical to SEQ ID NO: 75242
  REGION 1..398: note = tr|A0A0E1WUR0|A0A0E1WUR0_9RHIZ Epoxyqueuosine reductase OS=Brucella pinnipedialis M292/94/1 OX=520462; GN = queG PE=3 SV=1

SEQ ID NO: 75249 - protein, 398 aa, Brucella sp.
  REGION 1..398: note = tr|A0A1P8S7Z7|A0A1P8S7Z7_9RHIZ Epoxyqueuosine reductase OS=Brucella sp. 09RB8910 OX=1844051 GN=queG PE=3; SV = 1
MATSTSDSGQIAENNTPVRQKPALEKELRLKRFLIEEAKAAGFDAIAFTTPDAIPQAPERLRQYIAEGCHADMLWMEETEERRANPSVLWPEVRSIMVLAMNYGPDTNPLAILDKKDRAAISVYAQNRDYHDIIKGKLKHVASRFAARAGQDVKVFVDTAPVMEKPLAEAAGLGWQGKHTNLVSRELGSWLFLGSIFTTAQIPPDEPDHDHCGSCHACLDICPTGAFPAPYRVDARRCISYLTIENKGPIPLEFRKPMGNRIYGCDDCLSVCPWNKFAQVTSEMKLKARDDLKAPRLKDLLVLDDPSFRTLFSGSPVKRIGRDRFIRNVLIATGNSGDITLLPQVEALLEDPAPVVRGAAVWALKQLASPQHIADQQMRLATREEDATVRAEWTMETH

SEQ ID NO: 75250 - protein, 398 aa, Brucella sp.
  REGION 1..398: note = tr|D6LTV1|D6LTV1_9RHIZ Epoxyqueuosine reductase; OS = Brucella sp. NVSL 07-0026 OX=520448 GN=queG PE=3 SV=1
MATSTSDSGQIAENNTPVRQKPALEKELRLKRFLIEEAKAAGFDAIAFTTPDAIPQAPQRLRQYIAEGCHADMLWMEETEERRANPSVLWPEVRSIMVLAMNYGPDTNPLAILDKKDRAAISVYAQNRDYHDIIKGKLKHVASRFAARAGQDVKVFVDTAPVMEKPLAEAAGLGWQGKHTNLVSRELGSWLFLGSIFTTAQIPPDEPDHDHCGSCHACLDICPTGAFPAPYRVDARRCISYLTIENKGPIPLEFRKPMGNRIYGCDDCLSICPWNKFAQVTSEMKLKARDDLKAPHLKDLLVLDDPSFRMLFSGSPVKRIERDRFIRNVLIATGNSGDITLLPQVEALLEDPAPVVRGAAVWALKQLASPQHIADQQMRLATREEDATVQAEWTMETH

SEQ ID NO: 75251 - protein, 398 aa, unidentified; identical to SEQ ID NO: 75240
  source 1..398: note = Brucella suis
  REGION 1..398: note = tr|A0A4Z0F1X6|A0A4Z0F1X6_BRUSS Epoxyqueuosine reductase OS=Brucella suis OX=29461 GN=queG PE=3 SV=1

SEQ ID NO: 75252 - protein, 398 aa, unidentified; identical to SEQ ID NO: 75240
  source 1..398: note = Brucella suis
  REGION 1..398: note = tr|A0A0H3G8A9|A0A0H3G8A9_BRUSU Epoxyqueuosine reductase OS=Brucella suis biovar 1 (strain 1330); OX = 204722 GN=queG PE=3 SV=1

SEQ ID NO: 75253 - protein, 381 aa, unidentified
  source 1..381: note = Brucellaceae bacterium
  REGION 1..381: note = tr|A0A3P1UMG6|A0A3P1UMG6_9RHIZ Epoxyqueuosine reductase OS=Brucellaceae bacterium VT-16-1752 OX=2487907; GN = queG PE=3 SV=1
MAISTSNSKTEKLKRFLIEEAKAVGFDAVAFTTPDAIPQAPERLRQYIADGHHADMLWMEETEERRANPGVLWPEVRSIMMLAMNYGPDTDPLAILDQKDRAAISVYAQNRDYHDIIKGKLKHVASRFAARAGQDVKVFVDTAPVMEKPLAEAAGLGWQGKHTNLVSRELGSWLFLGSIFTTAEIPPDEPDRDHCGSCRACLDACPTRAFPAPYRINAGRCISYLTIENKGPIPAEFRKVMGNRIYGCDDCLSVCPWNKFAQATSEMKLKARDDLKAPRLSDLLALDDPAFRALFSGSPVKRIGRDRFIRNVLIAAGNSGDTTLLPQIEALLGDAAPVVRGAAVWALKQLAEPGHVDALQKRLASTEEDATVQEEWNTETV

SEQ ID NO: 75254 - protein, 289 aa, unidentified
  source 1..289: note = Brumimicrobium salinarum
  REGION 1..289: note = tr|A0A2I0R6X6|A0A2I0R6X6_9FLAO tRNA epoxyqueuosine(34) reductase QueG OS=Brumimicrobium salinarum OX=2058658 GN=queG PE=4 SV=1
MYCGISKAEFLEEEAPHLAQWLKDNKNGKMAYMENHFDKRLDPRKLVPGAQSVVSLLFNYYPDQQQCADETYKISKYAYGEDYHFIIKDKLKTFFQEIQDEIGEVGGRVFTDSAPVMDKAWAKKSGLGWVGKNTNLIHPKNGSFFFIAELILDLPLNADGPIKDYCGTCTKCIDACPTDAITPYVVDGSKCISYLTIELKDEIPNQFKGKMENWMFGCDICQDVCPWNRFSKAHNVPRLKPHDDLLDMKRTDWEELTEEVFRKVFKKSAVKRTKFSGLKRNIDFIKSKN

SEQ ID NO: 75255 - protein, 332 aa, unidentified
  source 1..332: note = Bryobacterales bacterium
  REGION 1..332: note = tr|A0A3D1B0Y9|A0A3D1B0Y9_9BACT tRNA epoxyqueuosine(34) reductase QueG OS=Bryobacterales bacterium OX=2026791 GN=queG PE=4 SV=1
MSLAELRNIAAACGFELCGVTPARPAADAVWFERWAEAGYAGRMGYLTDYRKERRRDPRSLLPAAETVVCVGKLYNGPQAGHPQISRYAWGRDYHDVLRAGLEQLARALGEHEYKICVDTAPLLERSYAQLAGLGWIGKNTCLINQQAGSWFFLGEMLTSLRITGEPQLAADRCGTCTRCIDACPTQAILPLDGRRHSIDARLCIAYLTIELRGAVPEELRPAMGNRIFGCDICQDVCPWNARAPVTDEFAPLHPAQSLEQLAALTAEQFQAMYRDTPVPHARYTGFLRNVAIAMGNAAETRFRPALEELSRHSHPSVAESARWALGLLPSV

SEQ ID NO: 75256 - protein, 354 aa, unidentified
  source 1..354: note = Bryobacterales bacterium
  REGION 1..354: note = tr|A0A2E5FK41|A0A2E5FK41_9BACT tRNA epoxyqueuosine(34) reductase QueG OS=Bryobacterales bacterium OX=2026791 GN=queG PE=4 SV=1
MSTERIKARALEIGFDLVGISEARPTLEAAFYPEWIELGFAGNMSYLKGRRGDMRSDPRSLLPSANSVISVGIVYNTQHPYSTDVDFNGQGWVSRYAWGEDYHHVLKRRLQALVDILHKDLGAFETKICVDTAPLLERAYAHRSGLGWIGHNTCLINQQLGSWLFLGEVLTSLSLECDNPAAFRCGSCTRCIEACPTDALVPTGELEGPAYALDSNKCISYWSIELKGSLPESARAMMGEHLFGCDICQDVCPWNRRAAVTKADEFQPRNALPNLEEVASMTPEEFDRCFGDTPVERTRYRGFLRNVAVAMGNSGKEQFLELLYRMTDSPDPVIVEHALWAIDTLKDKIAVSKS

SEQ ID NO: 75257 - protein, 409 aa, Bryocella elongata
  REGION 1..409: note = tr|A0A1H5SM66|A0A1H5SM66_9BACT Epoxyqueuosine reductase OS=Bryocella elongata OX=863522; GN = SAMN05421819_0236 PE=4 SV=1
MTGEDRTWLVERALAAGFDLAGIAAVPAVESDAAVRLDARYAAWIAEGRAGGMEWLKRTDEAGQLVRGDVRRAFPWARSVLVCALEYGLQGAPRSIDAAEAGAGWIARYAWSGGAAEQQNGKAAEQQNGKAAEQQNSGTAEHGSAVPGGSDYHEVLLPRLKAVEAELKARFGEALETRCYVDTGPIVERAIAEWAGIGWVGKNACLLNQERGSWMLLGVIVTELELESAQWTLPAADRCGSCTRCIDACPTDALVAPRQMDASRCIAYLTIEHKGAIDEALREPMGRQVFGCDICQDVCPWNAKSARGPVVADWKRMPSREALINPDLAWLASMESRDFKQWFRGSPLERTGKKRLHRNVAIAMGNSGEARFVPQLETWAAGADEVLADAARWAMARIEALGQSGERRD

SEQ ID NO: 75258 - protein, 356 aa, Budvicia aquatica
  REGION 1..356: note = tr|A0A484ZEZ0|A0A484ZEZ0_9GAMM Epoxyqueuosine reductase OS=Budvicia aquatica OX=82979 GN=queG PE=3 SV=1
MGISDTDLTEEEPKLQAWLDKQYHGEMAWMARHGMLRARPHELHPGTLRVISVRMNYLPPAAAFAQTLKNPELGYISRYALGRDYHKVLRQRLKKLGEQIQAYCSEFDLNFRPFVDSAPIMERPLATKAGIGWTGKHSLIINREAGSWFFLGELLIDLPLPVDSPVEEECGRCVACMTICPTGAIVEPYTVDARRCISYLTIELEGAIPEELRPLMGNRIYGCDDCQMTCPWNKLSQLTDEADFYPRSYLYQPPLLELYSWDEPTFLHKTEGSPIRRIGYFRWLRNISVALGNAPYQADIISALEKRKGFSLLLDQHIDWAISQQMTKRNNAAIEIQQPKQKRLIRSVEKGLPRDA

SEQ ID NO: 75259 - protein, 381 aa, Budvicia aquatica
  REGION 1..381: note = tr|A0A2C6DKQ8|A0A2C6DKQ8_9GAMM Epoxyqueuosine reductase OS=Budvicia aquatica OX=82979 GN=queG PE=3 SV=1
MSHPLDFNRLAQDIKLWGQALGFQQVGISDTDLTEEEPKLQAWLDKQYHGEMAWMARHGMLRARPHELHPGTLRVISVRMNYLPPAAAFAQTLKNPELGYISRYALGRDYHKVLRQRLKKLGEQIQAYCSEFDLNFRPFVDSAPIMERPLATKAGIGWTGKHSLIINREAGSWFFLGELLIDLPLPVDSPVEEECGRCVACMTICPTGAIVEPYTVDARRCISYLTIELEGAIPEELRPLMGNRIYGCDDCQMTCPWNKLSQLTDEADFYPRSYLYQPPLLELYSWDEPTFLHKTEGSPIRRIGYFRWLRNISVALGNAPYQADIISALEKRKGFSLLLDQHIDWAISQQMTKRNNAAIEIQQPKQKRLIRSVEKGLPRDA

SEQ ID NO: 75260 - protein, 411 aa, Burkholderia ambifaria
  REGION 1..411: note = tr|A0A2S9KWB4|A0A2S9KWB4_9BURK Epoxyqueuosine reductase OS=Burkholderia ambifaria OX=152480 GN=queG PE=3; SV = 1
MNRLPELAASDRPSTRTEGVAPCALDDATLTALATRIKAWGRELGFGAIGISDTDLSDAEAGLAAWLEAGYHGEMDYMAKHGTKRARPAELVAGTRRVISARLAYLPAQTLAADAPDASSGALVPHDWRARERARLDDPQAAVVSIYARGRDYHKVLRNRLQTLAERIEREIGAFGYRVFTDSAPVLEVELAQKAGVGWRGKHTLLLQRDAGSLFFLGEIYVDVPLPTDAQTAPDVAPETPGAHCGNCTRCIDACPTGAIVEPYRVDARRCISYLTIELKGSIPEALRPMIGNRVYGCDDCQLVCPWNKFAQAAPVADFDVRHGLDRATLVELFGWDADTFDTRMQGSAIRRIGHESWLRNLAVGLGNALRAPTDRLAPDARDAVIAALRARADDPSPIVREHVEWALRAA

SEQ ID NO: 75261 - protein, 411 aa, Burkholderia ambifaria
  REGION 1..411: note = tr|B1TAK8|B1TAK8_9BURK Epoxyqueuosine reductase; OS = Burkholderia ambifaria MEX-5 OX=396597 GN=queG PE=3 SV=1
MNRLPELAASDRPSTRTEGAAPCALDDATLTALATRIKAWGRELGFGAIGISDTDLSDAEAGLAAWLEAGYHGEMDYMAKHGTKRARPAELVAGTRRVISARLAYLPAQTLAADAPDASAGALAPHDWRARERARLDDPQAAVVSIYARGRDYHKVLRNRLQTLAERIEGAIGAFGYRVFTDSAPVLEVELAQKAGVGWRGKHTLLLQRDAGSLFFLGEIYVDVPLPTDAQTAPDVAPETPGAHCGSCTRCIDACPTGAIVEPYRVDARRCISYLTIELKGSIPEPLRPMIGNRVYGCDDCQLVCPWNKFAQAAPVADFDVRHGLDRATLVELFGWDADTFDTRMQGSAIRRIGHESWLRNLAVGLGNALRAPADRLAPDARDAIVAALRARADDPSPIVREHVEWALRAA

SEQ ID NO: 75262 - protein, 407 aa, Burkholderia anthina
  REGION 1..407: note = tr|A0A103T8B1|A0A103T8B1_9BURK Epoxyqueuosine reductase OS=Burkholderia anthina OX=179879 GN=queG PE=3; SV = 1
MNRLPERAASDRPSTRAEGAAPCALDDAALTALAARIRAWGRELGFGAIGISDTDLSDAEAGLAAWLEAGYHGEMDYMAKHGMKRARPAELVAGTRRVISVRLAYLPAQTLADDEPGALVPHDWRTRERARLDDPQAAVVSIYARGRDYHKVLRNRLQTLAERIEHEIGGFGYRVFTDSAPVLEVELAQKAGVGWRGKHTLLLQRDAGSLFFLGEIYVDLPLPTDARTSPDTAPETPGAHCGSCTRCIDACPTGAIVEPYRVDARRCISYLTIELKGSIPEPLRPMIGNRVYGCDDCQLVCPWNKFAQAAPVADFDVRHGLDRATLVELFAWDAGTFDTRMQGSAIRRIGYESWLRNLAVGLGNALRAGADRLSPAARDAIVAALRARADDPSPVVREHVEWALRAA

SEQ ID NO: 75263 - protein, 407 aa, Burkholderia anthina
  REGION 1..407: note = tr|A0A3P0BZ24|A0A3P0BZ24_9BURK Epoxyqueuosine reductase OS=Burkholderia anthina OX=179879 GN=queG PE=3; SV = 1
MNRLPERAASDRPSTRAEGAAPCALDDAALTALAARIRAWGRELGFGAIGISDTDLSDAEAGLAAWLEAGYHGEMDYMAKHGMKRARPAELVAGTRRVISVRLAYLPAQTLADDEPGALVPHDWRARERARLDDPQAAVVSIYARGRDYHKVLRNRLQTLAERIEHEIGGFGYRVFTDSAPVLEVELAQKAGVGWRGKHTLLLQRDAGSLFFLGEIYVDLPLPTDARTSPDTAPETPGAHCGSCTRCIDACPTGAIVEPYRVDARRCISYLTIELKGSIPEPLRPMIGNRVYGCDDCQLVCPWNKFAQAAPVADFDVRHGLDRATLVELFAWDAGTFDTRMQGSAIRRIGYESWLRNLAVGLGNALRAGADRLSPAARDAIVAALRARADDPSPVVREHVEWALRAA

SEQ ID NO: 75264 - protein, 411 aa, Burkholderia cenocepacia
  REGION 1..411: note = tr|A0A3N8XWY4|A0A3N8XWY4_9BURK Epoxyqueuosine reductase OS=Burkholderia cenocepacia OX=95486 GN=queG; PE = 3 SV=1
MNRLPERTASDRPSTRAEGAAPCALDDAALTALAARIRAWGRELGFGAIGISDTDLSDAEAGLAAWLEAGYHGEMDYMAKHGMKRARPAELVAGTRRVISVRLAYLPAQTLAADAPGGEPGALAPHDWRARERARLDDPRAAVVSIYARGRDYHKVLRNRLQTLAERIEHEIGGFGYRVFTDSAPVLEVELAQKAGVGWRGKHTLLLQRDAGSLFFLGEIYVDLPLPTDAHTSPDSAPETPGAHCGSCTRCIDACPTGAIVEPYRVDARRCISYLTIELKGSIPEPLRPMIGNRVYGCDDCQLVCPWNKFAQAAPVADFDVRHGLDRATLVELFAWDGETFDTRMQGSAIRRIGYESWLRNLAVGLGNALRAGADRLAPSARDAIVAALRARADDPSPVVREHVEWALRAA

SEQ ID NO: 75265 - protein, 411 aa, Burkholderia cenocepacia
  REGION 1..411: note = tr|A2VVZ2|A2VVZ2_9BURK Epoxyqueuosine reductase; OS = Burkholderia cenocepacia PC184 OX=350702 GN=queG PE=3; SV = 1
MNRLPERAASDRPSTRDEGAAPCALDDAALTALAARIRAWGRELGFGAIGISDTDLSDAEAGLAAWLEAGYHGAMDYMAKHGMKRARPAELVAGTRRVISVRLAYLPAQTLAADAPAGEPGALVPHDWRARERARLDDPQAAVVSIYARGRDYHKVLRNRLQTLAERIEHEIGGFGYRVFTDSAPVLEVELAQKAGVGWRGKHTLLLQRDAGSLFFLGEIYVDLPLPTDAHTLPDTAPETPGAHCGSCTRCIDACPTGAIVEPYRVDARRCISYLTIELKGSIPEPLRPMIGNRVYGCDDCQLVCPWNKFAQAAPVADFDVRHGLDRATLVELFAWDAEAFDTRMQGSAIRRIGYESWLRNLAVGLGNALRAGADRLAPPARDAIVAALRARADDPSPVVREHVEWALRAA

SEQ ID NO: 75266 - protein, 411 aa, Burkholderia cepacia
  REGION 1..411: note = tr|A0A1B4PUD2|A0A1B4PUD2_BURCE Epoxyqueuosine reductase OS=Burkholderia cepacia OX=292 GN=queG PE=3 SV=1
MNRLPELAASDRPSTRAEGAAPCALDDAALTALAARIRAWGRELGFGAIGISDTDLSDAEAGLAAWLEAGYHGEMDYMAKHGMKRARPAELVAGTRRVISARLAYLPAQTLAAGAPGDEPGALAPHDWRARERARLDDPRAAVVSIYARGRDYHKVLRNRLQTLAERIEQAIGAFGYRVFTDSAPVLEVELAQKAGVGWRGKHTLLLQRDAGSLFFLGEIYVDVPLPTDAHTSPDTAPETPGAHCGSCTRCIDACPTGAIVEPYRVDARRCISYLTIELKGSIPEPLRPMIGNRVYGCDDCQLVCPWNKFAQAAPVADFDVRHGLDRATLVELFAWDADTFDARMQGSAIRRIGYESWLRNLAVGLGNALRAGEGRLAPQARDAIVAALRARADDPSPVVREHVEWALRAA

SEQ ID NO: 75267 - protein, 411 aa, Burkholderia cepacia
  REGION 1..411: note = tr|A0A0U4D8J0|A0A0U4D8J0_BURCE Epoxyqueuosine reductase OS=Burkholderia cepacia JBK9 OX=1395570 GN=queG; PE = 3 SV=1
MNRLPELAASDRPSTQAEGAAPCALDDAALTALAARIRAWGRELGFGAIGISDTDLSDAEAGLAAWLEAGYHGEMDYMAKHGMKRARPAELVAGTRRVISVRLAYLPAQTLADDAPGGEPGALVPHDWRARERARLDDPQAAVVSIYARGRDYHKVLRNRLQTLAERIEGEIGAFGYRVFTDSAPVLEVELAQKAGVGWRGKHTLLLQRDAGSLFFLGEIYVDLPLPADAHTSPDTAPETPGAHCGSCTRCIDACPTGAIVEPYRVDARRCISYLTIELKGSIPEALRPMIGNRVYGCDDCQLVCPWNKFAQAAPVADFDVRHGLDRATLVDLFAWDADTFDTRMQGSAIRRIGYESWLRNLAVGLGNALRVGPDRLAPPARDAIVAALRARADDPSPVVREHVEWALRAA

SEQ ID NO: 75268 - protein, 382 aa, Burkholderia contaminans
  REGION 1..382: note = tr|A0A250LEX7|A0A250LEX7_9BURK Epoxyqueuosine reductase OS=Burkholderia contaminans OX=488447 GN=queG; PE = 3 SV=1
MTALAARIRAWGRELGFGAIGISDTDLSDAEAGLAAWLEAGYHGEMDYMAKHGMKRARPAELVAGTRRVISARLAYLPAETLAPDAAESGPGALALHDWRARERARLDDPQAAVVSIYARGRDYHKVLRNRLQTLAERIEQEIGAFGYRVFTDSAPVLEVELAQKAGVGWRGKHTLLLQRDAGSLFFLGEIYVDVPLPTDALTSPDTAPETPGAHCGSCTRCIDACPTGAIVEPYRVDARRCISYLTIELKGSIPEPLRPMIGNRVYGCDDCQLVCPWNKFAQAAPVADFDVRHGLDRATLVELFAWDADAFDTRMQGSAIRRIGYESWLRNLAVGLGNALRADAGRLTPQARDAIVAALRARADDPSPVVREHVEWALRAA

SEQ ID NO: 75269 - protein, 411 aa, Burkholderia contaminans
  REGION 1..411: note = tr|A0A3N8R645|A0A3N8R645_9BURK Epoxyqueuosine reductase OS=Burkholderia contaminans OX=488447 GN=queG; PE = 3 SV=1
MNRLPELAASDRPSTRAEGAAPCALDDAALTALAARIRAWGRELGFGAIGISDTDLSDAEAGLAAWLEAGYHGEMDYMAKHGMKRARPAELVAGTRRVISARLAYLPAETLAADAPESEPGALALHDWRARERARLDDPQAAVVSIYARGRDYHKVLRNRLQTLAERIEQEIGAFGYRVFTDSAPVLEVELAQKAGVGWRGKHTLLLQRDAGSLFFLGEIYVDVPLPTDAHTSPDTAPETPGAHCGSCTRCIDACPTGAIVEPYRVDARRCISYLTIELKGSIPEPLRPMIGNRVYGCDDCQLVCPWNKFAQAAPVADFDVRHGLDRATLVELFAWDADAFDTRMQGSAIRRIGYESWLRNLAVGLGNALRADAGRLTPQARDAIVAALRARADDPSPVVREHVEWALRAA

SEQ ID NO: 75270 - protein, 438 aa, unidentified
  source 1..438: note = Burkholderia dabaoshanensis
  REGION 1..438: note = tr|A0A2N7VJQ2|A0A2N7VJQ2_9BURK Epoxyqueuosine reductase OS=Burkholderia dabaoshanensis OX=564714 GN=queG; PE = 3 SV=1
MKRSPEQAAHGARTLGEAEAGGGADDRAPPLDDAALAALARQIKAWGLELGFSAVGISDTDLSDAEAALTAWLEAGCHGEMDYMAKHGAKRARPAELVAGTRRVITARMAYLPAAAFSPEPDVSASSGEPRATGGDWRARELARLGDPAAAVVSIYARGRDYHKVMRQRLQQLAERIERVVGAYGYRVFTDSAPVLEVALAQKAGVGWRGKHTLLLERDAGSLFFLGEIYVDLALPADAQTDPERATREAGAHCGQCTRCIDACPTGAIVGPYRVDARRCISYLTIELKGSIPEPLRPLIGNRIYGCDDCQLVCPWNKFAQPAPVDDFDVRHGLDRATLADLFAWSAEEFDTRMQGSAIRRIGYERWLRNLAVAMGNALRAGLRPPSSAAPAPVHARAAEPAAPSSEARERIVQALRARAQDPSPLVREHVQWALQAA

SEQ ID NO: 75271 - protein, 411 aa, Burkholderia diffusa
  REGION 1..411: note = tr|A0A1B4BUJ1|A0A1B4BUJ1_9BURK Epoxyqueuosine reductase OS=Burkholderia diffusa OX=488732 GN=queG PE=3; SV = 1
MNRLPELAASDRPSTRAEGAAPCALDDATLTALAARIRAWGRELGFGAIGISDTDLSDAEAGLAAWLEAGYHGEMDYMAKHGMKRARPAELVAGTRRVISARLAYLPAETLAVDTPDARSGALAPHDWRARERARLDDPQAAVVSIYARGRDYHKVLRNRLQTLAERIEREIGAFGYRVFTDSAPVLEVELAQKAGVGWRGKHTLLLQRDAGSLFFLGEIYVDVPLPTDAQTAPDVAPETPGAHCGSCTRCIDACPTGAIVEPYRVDARRCISYLTIELKGSIPEPLRPMIGNRVYGCDDCQLVCPWNKFAQAAPVADFDVRHGLDRATLVELFGWDADAFDTRMQGSAIRRIGYESWLRNLAVGLGNALRAPADRLAPDARDAIVAALRARADDPSPVVREHVEWALRAA

SEQ ID NO: 75272 - protein, 411 aa, Burkholderia dolosa
  REGION 1..411: note = tr|A2W7X7|A2W7X7_9BURK Epoxyqueuosine reductase; OS = Burkholderia dolosa AU0158 OX=350701 GN=queG PE=3 SV=1
MNRLPELAASDGPSTRAEGAAPCALDDAALTALAARIRAWGHELGFGAIGISDTDLSDAEAGLAAWLEAGCHGEMDYMAKHGMKRARPAELVAGTRRVISVRLAYLPAETLAGDAHDETGGALAPRDWRARERARLDDPQAAVVSIYARGRDYHKVLRNRLQTLAERIERDIGAFGYRVFTDSAPVLEVELAQKAGVGWRGKHTLLLQRDAGSLFFLGEIYVDIPLPTDAQTSPDAAPETPGAHCGSCTRCIAACPTGAIVEPYRVDARRCISYLTIELKGSIPEPLRPMIGNRVYGCDDCQLVCPWNKFAQAAPVADFDVRHGLDRATLVDLFGWDAGTFDARMQGSAIRRIGYESWLRNLAVGLGNALRAPAERLAPAARDAIVAALRARADDPSPIVREHVEWALRAA

SEQ ID NO: 75273 - protein, 405 aa, Burkholderia gladioli
  REGION 1..405: note = tr|A0A2S4NUA0|A0A2S4NUA0_BURGA Epoxyqueuosine reductase OS=Burkholderia gladioli OX=28095 GN=queG PE=3; SV = 1
MNRKPELAMMDAPSTQREGAAPRRLDDAALDALVVRIKAWGRELGFGAIGISDTDLSDAEAGLAAWLEAGCHGEMDYMAKHGMKRARPAELVAGTLRVISARLAYLPAETAAADVASKGGGWRARELARLEDPAAAVVSIYARGRDYHKVLRNRLQTLAERIEAEIGPFGYRVFTDSAPVLEVELAQKAGTGWRGKHTLLLQRDAGSLFFLGEIFVDLPLPTDAETSPATAPETPGSHCGSCTRCIDACPTGAIVEPYRVDARRCISYLTIELKGSIPESLRPLIGNRVYGCDDCQLVCPWNKFAQPAPVADFDVRHGLGSASLVDLFGWSAEQFDERMQGSAIRRIGHERWLRNLAVGLGNALRAPRERLGDETREAIVAALAARADDASELVREHVEWALQAA

SEQ ID NO: 75274 - protein, 405 aa, Burkholderia gladioli
  REGION 1..405: note = tr|F2L8U7|F2L8U7_BURGS Epoxyqueuosine reductase; OS = Burkholderia gladioli (strain BSR3) OX=999541 GN=queG; PE = 3 SV=1
MNRKPELAMMDAPSTQGEGAAPRRLDDAALDALVVRIKAWGRELGFGAIGISDTDLSDAEAGLAAWLEAGCHGEMDYMAKHGMKRARPAELVAGTLRVISARLAYLPAETAAADAASAGGGWRARELARLEDPAAAVVSVYARGRDYHKVLRNRLQTLAERIEAEIGPFGYRVFTDSAPVLEVELAQKAGTGWRGKHTLLLQRDAGSLFFLGEIFVDLPLPTDAETSPATAPETPGSHCGSCTRCIDACPTGAIVEPYRVDARRCISYLTIELKGSIPESLRPLIGNRVYGCDDCQLVCPWNKFAQPAPVADFDVRHGLGSASLVELFGWSAEQFDQRMQGSAIRRIGHERWLRNLAVGLGNALRAPRERLGDETREAIVAALAARADDASELVREHVEWALQAA

SEQ ID NO: 75275 - protein, 405 aa, Burkholderia glumae
  REGION 1..405: note = tr|A0A2J9H7V0|A0A2J9H7V0_BURGL Epoxyqueuosine reductase OS=Burkholderia glumae OX=337 GN=queG PE=3 SV=1
MNRKPELAVIDAPASPSDGAAWRCLDEAALEALARRIRAWGRELGFGAIGISDADLSEAEAGLAAWLEAGCHGEMDYMAKHGMKRARPAELVAGTRRVISVRLAYLPAATAAAGAASNASGWRAHELARLEDPAAAVVSIYARGRDYHKVLRSRLQTLAERIEAEIGPFGYRVFTDSAPVLEVELAQKAGTGWRGKHTLLLQRDAGSLFFLGEIFVDVPLPTDAELHPEAAPETPGSHCGSCTRCLDACPTAAIVAPFRVDARRCISYLTIELKGSIPEALRPLIGNRVYGCDDCQLVCPWNKFAQAAPVADFDVRHGLDRASLVELFGWSATEFDERMQGSAIRRIGHERWLRNLAVGLGNALRAPAGRLTGDARAAIVAALESRAGDASALVREHVEWALRAA

SEQ ID NO: 75276 - protein, 405 aa, Burkholderia glumae; identical to SEQ ID NO: 75275
  REGION 1..405: note = tr|C5AC96|C5AC96_BURGB Epoxyqueuosine reductase; OS = Burkholderia glumae (strain BGR1) OX=626418 GN=queG; PE = 3 SV=1

SEQ ID NO: 75277 - protein, 390 aa, unidentified
  source 1..390: note = Burkholderia insecticola
  REGION 1..390: note = tr|R4WST0|R4WST0_9BURK Epoxyqueuosine reductase; OS = Burkholderia insecticola OX=758793 GN=queG PE=3 SV=1
MSRAFTREEEAALSELAQRIKAWGRELGFGAVGISDIDLTDAEKGLAEWLEAGYHGEMDYMAKHGMKRARPAELVAGTRRVITARMAYLPAQTLEKTGDESVLTADGQKNDWRAIEWTRLAQPAQANVSIYARGRDYHKVMRQRLQQLAERIEGEIGPFGYRAFTDSAPVLEVALAQKAGNGWRGKHTLLLDRDAGSLFFLGEIFVDVPLPVDPHPEQDGAHCGQCTRCIGACPTGAIVAPYRVDARRCISYLTIELHGSIPEDMRPLIGNRIYGCDDCQLVCPWNKFAQAAPVADFDVRHGLDRATLVELFAWSAADFDTRMQGSAIRRIGHERWLRNIAVAMGNALRASGLDAGERKAIVEALDARADDPSTLVREHVRWALAQGSRT

SEQ ID NO: 75278 - protein, 382 aa, Burkholderia lata
  REGION 1..382: note = tr|Q39DH9|Q39DH9_BURL3 Epoxyqueuosine reductase; OS = Burkholderia lata (strain ATCC 17760 / DSM 23089 / LMG 22485 / NCIMB 9086 / R18194 / 383) OX=482957 GN=queG PE=3 S V=1
MTALAARIRAWGRELGFGAIGISDTDLSDAEAGLAAWLEAGYHGEMDYMAKHGMKRARPAELVAGTRRVISARLAYLPAETLAADAPESEPGTLALHDWRARERARLDDPQAAVVSIYARGRDYHKVLRNRLQTLAERIEQEIGAFGYRVFTDSAPVLEVELAQKAGVGWRGKHTLLLQRDAGSLFFLGEIYVDVPLPTDAHTSPDTAPETPGAHCGSCTRCIGACPTGAIVEPYRVDARRCISYLTIELKGSIPEPLRPMIGNRVYGCDDCQLVCPWNKFAQAAPVADFDVRHGLDRATLVELFAWDADTFDTRMQGSAIRRIGYESWLRNLAVGLGNALRADAGRLTPQAREAIVAALRARADDPSPVVREHVEWALRAV

SEQ ID NO: 75279 - protein, 411 aa, Burkholderia lata
  REGION 1..411: note = tr|A0A3G3H7T0|A0A3G3H7T0_BURL3 Epoxyqueuosine reductase OS=Burkholderia lata (strain ATCC 17760 / DSM 23089 / LMG 22485 / NCIMB 9086 / R18194 / 383) OX=482957; GN = que G PE=3 SV=1
MNRLPELAASDRPSTRDEGAASCALDDAALTALAARIRAWGRELGFGAIGISDTDLSDAEAGLAAWLEAGYHGEMDYMAKHGMKRARPAELVAGTRRVISVRLAYLPAETLAGDAPGEPAGALVPHDWRARERARLDDPQAAVVSIYARGRDYHKVLRNRLQTLAERIEQEIGAFGYRVFTDSAPVLEVELAQKAGVGWRGKHTLLLQRDAGSLFFLGEIYVDVPLPTDAHTSPDTAPETPGAHCGSCTRCIGACPTGAIVEPYRVDARRCISYLTIELKGSIPEPLRPMIGNRVYGCDDCQLVCPWNKFAQAAPVADFDVRHGLDRATLVELFAWDADTFDTRMQGSAIRRIGYESWLRNLAVGLGNALRADPGRLTPPARDAIVAALRARADDPSPVVREHVEWALRAA

SEQ ID NO: 75280 - protein, 411 aa, Burkholderia latens
  REGION 1..411: note = tr|A0A1B4NU50|A0A1B4NU50_9BURK Epoxyqueuosine reductase OS=Burkholderia latens OX=488446 GN=queG PE=3; SV = 1
MNRLPELAASDTPSTRAEGAAPCALDDATLTALAARIRAWGRELGFGAIGISDTDLSDAEAGLAAWLEAGYHGEMDYMAKHGMKRARPAELVAGTRRVISARLAYLPAETLAADAPDAAAGALAPHDWRARERARVDDPQAAVVSIYARGRDYHKVLRNRLQTLAERIEREIGGFGYRVFTDSAPVLEVELAQKAGVGWRGKHTLLLQRDAGSLFFLGEIYVDIPLPTDAQTAPGTAPETPGAHCGSCTRCIDACPTGAIVEPYRVDARRCISYLTIELKGSIPEPLRPLIGNRVYGCDDCQLVCPWNKFAQAAPVADFDVRHGLDRATLVELFDWDADTFETRMQGSAIRRIGHESWLRNLAVGLGNALRAPRDRLAPDARDAIVAALRARAEDPSPVVREHVEWALRAA

SEQ ID NO: 75281 - protein, 409 aa, Burkholderia mallei
  REGION 1..409: note = tr|A0A3N4FW15|A0A3N4FW15_BURML Epoxyqueuosine reductase OS=Burkholderia mallei OX=13373 GN=queG PE=3 SV=1
MDRNPELAIADARPSQDGRAAPSRLDDAQLAELASRIKAWGRELGFGAIGISDTDLSEAEAGLAAWLEAGCHGEMDYMAKHGMKRARPAELVAGTRRVISARLAYLPAGTLDGAPDAQGARRDWRAREAARIADPQAAVVSVYARGRDYHKVLRNRLQTLAERIEAEIGVFGHRVFTDSAPVLEVELAQKAGVGWRGKHTLLLQRDAGSFFFLGEIYVDVPLPADAQTSPDAAPETPGAHCGSCTRCLGACPTGAIVAPYRVDARRCISYLTIELHGSIPEPLRPLIGNRVYGCDDCQLVCPWNKFAQAAPVADFDVRHGLDRASLVELFEWTAEQFDERMQGSAIRRIGYERWLRNLAVGLGNALRAAPGGIEPDARAAIVAALRARLDDPCVSALVREHVEWALRAA

SEQ ID NO: 75282 - protein, 409 aa, Burkholderia mallei; identical to SEQ ID NO: 75281
  REGION 1..409: note = tr|C4ARB3|C4ARB3_BURML Epoxyqueuosine reductase; OS = Burkholderia mallei GB8 horse 4 OX=320390 GN=queG PE=3; SV = 1

SEQ ID NO: 75283 - protein, 411 aa, Burkholderia metallica
  REGION 1..411: note = tr|A0A1B4HW41|A0A1B4HW41_9BURK Epoxyqueuosine reductase OS=Burkholderia metallica OX=488729 GN=queG PE=3; SV = 1
MNRLPELAASDRPSTRAEGAAPCALDDAALTALAARIRAWGHELGFGAIGISDTDLSDAEAGLAAWLEAGYHGEMDYMAKHGMKRARPAELVAGTRRVISARLAYLPAETLAADARDGAPGALAPHDWRARERARLDDPQAAVVSIYARGRDYHKVLRNRLQTLAERIEQEIGAFGYRVFTDSAPVLEVELAQKAGVGWRGKHTLLLQRDAGSLFFLGEIYVDVPLPTDAHTSPDTAPETPGAHCGSCTRCIDACPTGAIVEPYRVDARRCISYLTIELKGSIPEPLRPMIGNRVYGCDDCQLVCPWNKFAQAAPVADFDVRHGLDRATLVELFAWDAHAFDTRMQGSAIRRIGYESWLRNLAVGLGNALRAGPDRLAPQARDAIVAALRARADDPSPVVREHVEWALRAA

SEQ ID NO: 75284 - protein, 404 aa, Burkholderia multivorans
  REGION 1..404: note = tr|A0A2S9LHF9|A0A2S9LHF9_9BURK Epoxyqueuosine reductase OS=Burkholderia multivorans OX=87883 GN=queG; PE = 3 SV=1
MNRLPELAASDRTSTRDEGAASCALDDAALTALAVRIRAWGRELGFGAIGISDTDLSDAEAGLAAWLEAGCHGEMDYMAKHGMKRARPAELVAGTRRVISARLAYLPADTLAGDASGAFDWRARERARLDDPQAAVVSIYARGRDYHKVLRNRLQTLAERIEREIGAFGHRVFTDSAPVLEVELAQKAGVGWRGKHTLLLQRDAGSLFFLGEIYVDIPVPTDAQTSPDAAPESPGAHCGSCTRCIDACPTGAIVEPYRVDARRCISYLTIELKGSIPEPLRPLIGNRVYGCDDCQLVCPWNKFAQAAPVADFDVRHGLDRATLVELFGWDAGEFDTRMQGSAIRRIGYESWLRNLAVGLGNALRAPAQRLAPEARDAIVAALRARADDPSPIVREHVEWALRAA

SEQ ID NO: 75285 - protein, 346 aa, Burkholderia multivorans
  REGION 1..346: note = tr|B9BTC4|B9BTC4_9BURK Putative iron-sulfur cluster-binding protein, degenerate OS=Burkholderia multivorans CGD2 OX=513052 GN=BURMUCGD2_0895 PE=4 SV=1
MPKQPRRLAGSRCHGEMDYMAKHGMKRARPAELVAGTRRVISARLAYLPADTLAGDASGAFDWRARERARLDDPQAAVVSIYARGRDYHKVLRNRLQTLAERIEREIGAFGHRVFTDSAPVLEVELAQKAGVGWRGKHTLLLQRDAGSLFFLGEIYVDIPVPTDAQTSSDAAPESPGAHCGSCTRCIDACPTGAIVEPYRVDARRCISYLTIELKGSIPEPLRPLIGNRVYGCDDCQLVCPWNKFAQAAPVADFDVRHGLDRATLVELFGWDAGEFDTRMQGSAIRRIGYESWLRNLAVGLGNALRAPAQRLAPEARDAIVAALRARADDPSPIVREHVEWALRAA

SEQ ID NO: 75286 - protein, 413 aa, unidentified
  source 1..413: note = Burkholderia novacaledonica
  REGION 1..413: note = tr|A0A2U3I6K2|A0A2U3I6K2_9BURK Epoxyqueuosine reductase OS=Burkholderia novacaledonica OX=1544861; GN = queG PE=3 SV=1
MNRLPEHSVEVTTASSDAAAESVSESRVFDIDENALAELAQRIKMWGRDLGFGAVGISDIDLTDAEKGLAEWLEAGYHGEMDYMAKHGMKRARPAELVAGTRRVITVRMAYLPMETLAKTGDESVATADGQKNDWRAIEWSRLSKPAEAMVSIYARGRDYHKVMRNRLQQLAERIEREIGPFGHRAFTDSAPVLEVALAQKAGNGWRGKHTLLLDRDAGSLFFLGEIFVDVPLPVDPDPEQEGAHCGQCTRCIGACPTGAIVAPYRVDARRCISYLTIELHGSIPEDMRPLIGNRVYGCDDCQLVCPWNKFAQAAPVADFDVRHGLDRATLVELFAWSAGDFDTRMQGSAIRRIGHERWLRNIAVAMGNALRASSLGAGERQAIVEALEARADDPSALVREHVLWALEQGKQT

SEQ ID NO: 75287 - protein, 407 aa, Burkholderia oklahomensis
  REGION 1..407: note = tr|A0A381BYY2|A0A381BYY2_9BURK Epoxyqueuosine reductase OS=Burkholderia oklahomensis OX=342113 GN=queG; PE = 3 SV=1
MDRIPELAVADARPSQDGRAAPSRLDDAKLAELASRIKAWGRELGFGAIGISDTELSDAEAGLAAWLEAGCHGEMDYMAKHGMKRARPAELVAGTRRVISARLAYLPAATLGDAPDSSAAPRDWRAREAARIADPQAAVVSVYARGRDYHKVLRNRLQTLAERIEAEIGAFGYRVFTDSAPVLEVELAQKAGVGWRGKHTLLLQRDAGSFFFLGEIYVDVPLPADAQTSPAAAPETPGAHCGSCTRCIGACPTGAIVAPYRVDARRCISYLTIELHGSIPEPLRPLVGNRVYGCDDCQLVCPWNKFAQAAPVADFDVRHGLDRASLVELFAWTAEQFDERMQGSAIRRIGYERWLRNLAVGLGNALRAAPGSVEPAARAAIVAALRARADDSSELVREHVEWALRAA

SEQ ID NO: 75288 - protein, 405 aa, Burkholderia plantarii
  REGION 1..405: note = tr|A0A0B6RZE8|A0A0B6RZE8_9BURK Epoxyqueuosine reductase OS=Burkholderia plantarii OX=41899 GN=queG PE=3; SV = 1
MNRKPELAVIDAPASQSDGAAWRRLDDAALEALARRIRAWGRELGFGAIGISDTDLSDAEAGLAAWLEAGCHGEMDYMAKHGMKRARPAELVAGTRRVISARLAYLPAATVADGAASDAGGWRAHELARLEDPAAAVVSIYARGRDYHKVLRNRLQTLAERIEAEIGPFGYRVFTDSAPVLEVELAQKAGNGWRGKHTLLLQRDAGSLFFLGEIFVDVPLPTDAELHPEAAPETPGSHCGSCTRCLDACPTAAIVEPFRVDARRCISYLTIELKGSIPEAMRPLIGNRVYGCDDCQLVCPWNKFAQAAPVADFDVRHGLDRASLVELFGWSATEFDERMQGSAIRRIGYECWLRNLAVGLGNALRAPAGRVTDEARAAIVAALAARADDASGLVREHVEWALRAA

SEQ ID NO: 75289 - protein, 409 aa, Burkholderia pseudomallei
  REGION 1..409: note = tr|A0A3B6WA22|A0A3B6WA22_BURPE Epoxyqueuosine reductase OS=Burkholderia pseudomallei OX=28450 GN=queG; PE = 3 SV=1
MDRNPEFAIADARPSQDGRAAPSRLDDAQLAELASRIKAWGRELGFGAIGISDTDLSEAEAGLAAWLEAGCHGEMDYMAKHGMKRARPAELVAGTRRVISARLAYLPAGTLDGAPDAQGARRDWRAREAARIADPQAAVVSVYARGRDYHKVLRNRLQTLAERIEAEIGAFGHRVFTDSAPVLEVELAQKAGVGWRGKHTLLLQRDAGSFFFLGEIYVDVPLPADAQTSPDAAPETPGAHCGSCTRCLGACPTGAIVAPYRVDARRCISYLTIELHGSIPEPLRPLIGNRVYGCDDCQLVCPWNKFAQAAPVADFDVRHGLDRASLVELFEWTAEQFDERMQGSAIRRIGYERWLRNLAVGLGNALRAAPGGIEPDARAAIVAALRARLDDPCVSALVREHVEWALRAA

SEQ ID NO: 75290 - protein, 409 aa, Burkholderia pseudomallei; identical to SEQ ID NO: 75289
  REGION 1..409: note = tr|B1HF52|B1HF52_BURPE Epoxyqueuosine reductase; OS = Burkholderia pseudomallei S13 OX=320374 GN=queG PE=3; SV = 1

SEQ ID NO: 75291 - protein, 411 aa, unidentified
  source 1..411: note = Burkholderia pseudomultivorans
  REGION 1..411: note = tr|A0A132EY93|A0A132EY93_9BURK Epoxyqueuosine reductase OS=Burkholderia pseudomultivorans OX=1207504; GN = queG PE=3 SV=1
MNRLPELAASDRPSTRAEGAAPCALDDATLTALAARIRAWGRELGFGAIGISDTDLSDAEAGLAAWLEAGCHGEMDYMAKHGMKRARPAELVAGTRRVISARLAYLPAQTLAGDAPDAAAGALAPRDWRARERARLDDPQAAVVSIYARGRDYHKVLRNRLQTLAERIEHEIGAFGYRVFTDSAPVLEVELAQKAGVGWRGKHTLLLQRDAGSLFFLGEIYVDIPLPTDAQSSPDAAPESPGAHCGSCTRCIDACPTGAIVEPYRVDARRCISYLTIELKGSIPEPLRPLIGNRVYGCDDCQLVCPWNKFAQAAPVADFDVRHGLDRATLVELFGWDADTFETRMQGSAIRRIGHESWLRNLAVGLGNALRAPAGQLAPAAREAIVAALRARADDPSPIVREHVEWALRAA

SEQ ID NO: 75292 - protein, 411 aa, unidentified
  source 1..411: note = Burkholderia pseudomultivorans
  REGION 1..411: note = tr|A0A132EB83|A0A132EB83_9BURK Epoxyqueuosine reductase OS=Burkholderia pseudomultivorans OX=1207504; GN = queG PE=3 SV=1
MNRLPELAASDRPSTRAEGAAPCALDDATLTALAARIRAWGRELGFGAIGISDTDLSDAEAGLAAWLEAGCHGEMDYMAKHGMKRARPAELVAGTRRVISARLAYLPAETRAVDAPDGTPGALAPRDWRARERARLDDPQAAVVSIYARGRDYHKVLRNRLQTLAERIEQEIGAFGYRVFTDSAPVLEVELAQKAGVGWRGKHTLLLQRDAGSLFFLGEIYVDIPLPTDAQRSPDAAPESPGAHCGSCTRCIDACPTGAIVEPYRVDARRCISYLTIELKGSIPERLRPLIGNRVYGCDDCQLVCPWNKFAQAAPVADFDVRHGLDRATLVELFGWDADTFETRMQGSAIRRIGHESWLRNLAVGLGNALRAPAGQLAPAARDAIVAALRARADDPSPIVREHVEWALRAA

SEQ ID NO: 75293 - protein, 411 aa, unidentified
  source 1..411: note = Burkholderia puraquae
  REGION 1..411: note = tr|A0A1X1PCV2|A0A1X1PCV2_9BURK Epoxyqueuosine reductase OS=Burkholderia puraquae OX=1904757 GN=queG PE=3; SV = 1
MNRLPELAASDRPSTRAEGAAPCALDDAALTALAARIRAWGRELGFGAIGISDTDLSDAEAGLAAWLEAGYHGEMDYMAKHGMKRARPAELVAGTRRVISARLAYLPAETLAAGTPDGEPGAHALHDWRARERARLDDPQAAVVSIYARGRDYHKVLRNRLQTLAERIEQEIGAFGYRVFTDSAPVLEVELAQKAGVGWRGKHTLLLQRDAGSLFFLGEIYVDVPLPTDAHTSPDTAPETPGAHCGSCTRCIGACPTGAIVEPYRVDARRCISYLTIELKGSIPEPLRPMIGNRVYGCDDCQLVCPWNKFAQAAPVADFDVRHGLDRATLVELFAWDADTFDTRMQGSAIRRIGYESWLRNLAVGLGNALRADAGRLAPQARDAIVAALRARADDPSPVVREHVEWALRAA

SEQ ID NO: 75294 - protein, 411 aa, Burkholderia pyrrocinia
  REGION 1..411: note = tr|A0A2Z5MXX3|A0A2Z5MXX3_BURPY Epoxyqueuosine reductase OS=Burkholderia pyrrocinia OX=60550 GN=queG PE=3; SV = 1
MNRLPELSASDKPSTRAEGAAPCALDDAALTALAARIRAWGRELGFGAIGISGTDLSDAEAGLAAWLEAGCHGEMDYMAKHGMKRARPAELVAGTRRVISVRLAYLPAETLDAGAPGGEPGALAPHDWRARERARLDDPQAAVVSIYARGRDYHKVLRNRLQTLAERIEGEIGAFGYRVFTDSAPVLEVELAQKAGVGWRGKHTLLLQRDAGSLFFLGEIYVDIPLPTDAHTSPDTAPETPGAHCGSCTRCIDACPTGAIVEPYRVDARRCISYLTIELKGSIPEPLRPMIGNRVYGCDDCQLVCPWNKFAQAAPVADFDVRHGLDRATLVELFAWDADAFDTRMQGSAIRRIGYESWLRNLAVGLGNALRTGADRLAPQARDAIVAALRARADDRSPVVREHVEWALRAA

SEQ ID NO: 75295 - protein, 411 aa, Burkholderia pyrrocinia
  REGION 1..411: note = tr|A0A318IKS4|A0A318IKS4_BURPY Epoxyqueuosine reductase OS=Burkholderia pyrrocinia OX=60550 GN=queG PE=3; SV = 1
MNRLPELAASDRPSTHAEGAAPCALDDAALTALAARIRTWGRELGFGAIGISDTDLSDAEAGLAAWLEAGYHGEMDYMAKHGMKRARPAELVAGTRRVISVRLAYLPAETLAAGAPDGEPGALAPHDWRARERARLDDPQAAVVSIYARGRDYHKVLRNRLQTLAERIEREIGAFGYRVFTDSAPVLEVELAQKAGVGWRGKHTLLLQRDAGSLFFLGEIYVDIPLPTDAHTSPDTAPEAPGAHCGNCTRCIDACPTGAIVEPYRVDARRCISYLTIELKGSIPEPLRPMIGNRVYGCDDCQLVCPWNKFAQAAPVADFDVRHGLDRATLVELFGWDAEAFDTRMQGSAIRRIGYESWLRNLAVGLGNALRASADRLSPQARDAIVAALRARADDPSPVVREHVEWALRAA

SEQ ID NO: 75296 - protein, 407 aa, unidentified
  source 1..407: note = Burkholderia reimsis
  REGION 1..407: note = tr|A0A365QX05|A0A365QX05_9BURK Epoxyqueuosine reductase OS=Burkholderia reimsis OX=2234132 GN=queG PE=3; SV = 1
MNRLPELAASDRPSTRAEGAAPCALDDAALTALAARIRAWGRELGFGAIGISDTDLSDAEAGLAAWLEAGYHGEMDYMAKHGMKRARPAELVAGTRRVISARLAYLPAQTLVDDAPDALVPHDWRARERSRLDDPQAAVVSIYARGRDYHKVLRNRLQTLAERIEREIGAFGYRVFTDSAPVLEVELAQKAGVGWRGKHTLLLQRDAGSLFFLGEIYVDVPLPTDAHTSPDTAPETPGAHCGSCTRCIDACPTGAIVEPYRVDARRCISYLTIELKGSIPEPLRPMIGNRVYGCDDCQLVCPWNKFAQAAPVADFDVRHGLDRASLVELFAWDADTFDTRMQGSAIRRIGYESWLRNLAVGLGNALRAGEGRLAPQAREAIVDALRARADDPSPVVREHVEWALRAA

SEQ ID NO: 75297 - protein, 411 aa, Burkholderia seminalis
  REGION 1..411: note = tr|A0A124Q9J8|A0A124Q9J8_9BURK Epoxyqueuosine reductase OS=Burkholderia seminalis OX=488731 GN=queG PE=3; SV = 1
MNRLPELAASDRPSTRAEGAAPCALDDAALTALAARIRAWGRELGFGAIGISDTDLSDAEAGLAAWLEAGYHGEMDYMAKHGMKRARPAELVAGTRRVISVRLAYLPAETLAGDARGGAPGALVPHDWRARERARLDDPQAAVVSIYARGRDYHKVLRNRLQTLAERIEHEIGAFGYRVFTDSAPVLEVELAQKAGVGWRGKHTLLLQRDAGSLFFLGEIYVDLPLPTDAHTAPDAAPETPGAHCGSCTRCIDACPTGAIVEPYRVDARRCISYLTIELKGSIPEALRPMIGNRVYGCDDCQLVCPWNKFAQAAPVADFDVRHGLDRATLVELFAWDADTFDTRMQGSAIRRIGYESWLRNLAVGLGNALRAGADRLAPPARDAIVAALRARADDPSPVVREHVEWALRAA

SEQ ID NO: 75298 - protein, 255 aa, unidentified
  source 1..255: note = Burkholderia singularis
  REGION 1..255: note = tr|A0A238HBL4|A0A238HBL4_9BURK Epoxyqueuosine (OQ) reductase QueG OS=Burkholderia singularis OX=1503053; GN = BSIN_5060 PE=4 SV=1
MRARLQTLAERIEAEIGAFGHRVFTDSAPVLEVELAQKAGIGWRGKHTLLLQRDAGSFFFLGEIYVDLPLPTDEQTSPSTAPETPGAHCGSCTRCIDACPTGAIVEPYRVDARRCISYLTIELHGSIPEPLRPLIGNRVYGCDDCQLVCPWNKFAQACAVADFDVRHGLDRASLVELFSWSAEQFDERMQGSAIRRIGHERWLRNLAVGLGNALRAPPARLEPAARAAIVDALRARAGDASALVREHVEWALRAA

SEQ ID NO: 75299 - protein, 424 aa, Burkholderia sp.
  REGION 1..424: note = tr|D5WCB9|D5WCB9_BURSC Epoxyqueuosine reductase; OS = Burkholderia sp. (strain CCGE1002) OX=640511 GN=queG; PE = 3 SV=1
MNRSPKSPVSCTPASADDAARASDATSLFDEAALRALALDIKTWGRELGFGAIGISDTDLSAAEAPLAAWLEAGCHGEMDYMAKHGMKRARPAELVAGTRRVITVRIAYLPARTLEGEAPESMPEDVTPRASRATPRTRDWRAAEHARLADPSTAVVSIYARGRDYHKVMRQRLQQLADRIEAAIGPFGYRVFTDSAPVLEVELAQKAGIGWRGKHTLLLQRDVGSLFFLGEIYVDIPLPTDAETSPEAAPETPGSHCGSCARCIGACPTGAIVAPYKVDARRCISYLTIELKGSIPLELRPLIGNRVYGCDDCQLVCPWNKFAQAAPVADFDVRHGLDRASLVELFGWSAQEFDTRMQGSAIRRIGYECWLRNLAVGMGNALRAAPGTLDVDARAAIVRALKQRADDPSALVREHVEWALEAA

SEQ ID NO: 75300 - protein, 409 aa, Burkholderia sp.
  REGION 1..409: note = tr|A0A329DS55|A0A329DS55_9BURK Epoxyqueuosine reductase OS=Burkholderia sp. yr520 OX=1761779 GN=queG; PE = 3 SV=1
MEVTTASGNAAADSRAFDIHDEAALAELAQRIKMWGRELGFGAVGISDADLTDAEEGLASWLEAGYHGEMDYMAKHGMKRARPAELVAGTRRVITARIAYLPAATLAAKGDESVTTADGQRNDWRAIEWSRLADPTAAVVSIYARGRDYHKVMRNRLQQLAERIEGEIGGFGYRAFTDSAPVLEVALAQKAGVGWRGKHTLLLQRDAGSLFFLGEIYVDIPLPPDAVTNAQNAPEHDGAHCGQCTRCITACPTGAIVGPYRVDARRCISYLTIELKGSIPEDLRPLIGNRVYGCDDCQLVCPWNKFAQAAPVADFDVRHRLDRASLVELFRWNADDFDVRMQGSAIRRIGHERWLRNIAVAMGNALRAEIADDERARIIDALQARADDPSPVVREHVEWALRYGETPGE

SEQ ID NO: 75301 - protein, 411 aa, Burkholderia stabilis
  REGION 1..411: note = tr|A0A4Q2ARW2|A0A4Q2ARW2_9BURK Epoxyqueuosine reductase OS=Burkholderia stabilis OX=95485 GN=queG PE=3; SV = 1
MNRLPELAASDTPSTQAEGAAPCALDDAALTALAARIRAWGRELGFGAIGISDTDLSDAEAGLAAWLEAGYHGEMDYMAKHGMKRARPAELVAGTRRVISVRLAYLPAETLAAAAPDGEPGALVPHDWRARERARLDDPQAAVVSIYARGRDYHKVLRNRLQTLAERIEHEIGAFGYRVFTDSAPVLEVELAQKAGVGWRGKHTLLLQRDAGSLFFLGEIYVDIPLPTDAHTSPDTAPETPGAHCGSCTRCIDACPTGAIVEPYRVDARRCISYLTIELKGSIPEPLRPMIGNRVYGCDDCQLVCPWNKFAQAAPVADFDVRHGLDRATLVELFAWDADAFDTRMQGSAIRRIGYESWLRNLAVGLGNALRADADRLAPQTRDAIVAALRARADDPSPVVREHVEWALRAA

SEQ ID NO: 75302 - protein, 411 aa, Burkholderia stabilis
  REGION 1..411: note = tr|A0A1D7ZGG2|A0A1D7ZGG2_9BURK Epoxyqueuosine reductase OS=Burkholderia stabilis OX=95485 GN=queG PE=3; SV = 1
MNRLPELAASDRPSTHAEGAAPCALDDAALTALAARIRAWGRELGFGAIGISDTDLSDAEAGLAAWLEAGYHGEMDYMAKHGMKRARPAELVAGTRRVISVRLAYLPAETLAPSAPDGEPGALALHDWRARERARLDDPQAAVVSIYARGRDYHKVLRNRLQTLAERIELEIGAFGYRVFTDSAPVLEVELAQKAGVGWRGKHTLLLQRDAGSLFFLGEIYVDIPLPTDAHTSPDTAPETPGAHCGSCTRCIDACPTGAIVEPYRVDARRCISYLTIELKGSIPEPLRPMIGNRVYGCDDCQLVCPWNKFAQAAPVADFDVRHGLDRATLVELFAWDADAFDTRMQGSAIRRIGYESWLRNLAVGLGNALRASTERLSPQAREAIVAALRARADDPSPVVREHVEWALRAA

SEQ ID NO: 75303 - protein, 411 aa, unidentified
  source 1..411: note = Burkholderia stagnalis
  REGION 1..411: note = tr|A0A107A5Q5|A0A107A5Q5_9BURK Epoxyqueuosine reductase OS=Burkholderia stagnalis OX=1503054 GN=queG; PE = 3 SV=1
MNRLPELAASDTHSTEVEGAAPCVLDDAALTALAARIRAWGRELGFGAIGISDTDLSDAEAGLAAWLEAGCHGEMDYMAKHGMKRARPAELVAGTRRVISARLAYLPADTLAGDTQDDTSGALAPRDWRARELARLDDPQAAVVSIYARGRDYHKVLRNRLQTLAERIEGEIGAFGHRVFTDSAPVLEVELAQKAGIGWRGKHTLLLQRDAGSLFFLGEIYVDIPLPTDAQTAPDAAPETPGAHCGSCTRCIGACPTGAIVAPYRVDARRCISYLTIELKGSIPEPLRPLIGNRVYGCDDCQLVCPWNKFAQAAPVADFDVRHGLDRATLVELFGWRADEFDTRMQGSAIRRIGYECWLRNLAVGLGNALRAPAGRLAPGARDAIVAALRAREDDPSPLVREHVEWALRAA

SEQ ID NO: 75304 - protein, 411 aa, unidentified
  source 1..411: note = Burkholderia stagnalis
  REGION 1..411: note = tr|A0A3P0G8A6|A0A3P0G8A6_9BURK Epoxyqueuosine reductase OS=Burkholderia stagnalis OX=1503054 GN=queG; PE = 3 SV=1
MNRLPELAASDTHSTEVEGAAPCVLDDAALTALAARIRAWGRELGFGAIGISDTDLSDAEAGLAAWLEAGCHGEMDYMAKHGMKRARPAELVAGTRRVISARLAYLPADTLAGDTQDDTSGALAPRDWRARELARLDDPQAAVVSIYARGRDYHKVLRNRLQTLAERIEGEIGAFGHRVFTDSAPVLEVELAQKAGIGWRGKHTLLLQRDAGSLFFLGEIYVDIPLPTDAQTAPDAAPETPGAHCGSCTRCIGACPTGAIVAPYRVDARRCISYLTIELKGSIPEPLRPLIGNRVYGCDDCQLVCPWNKFAQAAPVADFDVRHGLDRATLVELFGWSADEFDTRMQGSAIRRIGHECWLRNLAVGLGNALRAPAGRLAPGARDAIVAALRAREHDPSPLVREHVEWALRAA

SEQ ID NO: 75305 - protein, 411 aa, unidentified
  source 1..411: note = Burkholderia territorii
  REGION 1..411: note = tr|A0A106E3G0|A0A106E3G0_9BURK Epoxyqueuosine reductase OS=Burkholderia territorii OX=1503055 GN=queG; PE = 3 SV=1
MNRLPELAASDRPSTRVEGATPCALDDATLTALAARIRAWGRELGFGAIGISDTDLSDAEAGLAAWLEAGYHGEMDYMAKHGMKRARPPELVAGTRRVISARLAYLPAETLAADTRDAPSGARAPHDWRARERARLDDPQAAVVSIYARGRDYHKVLRNRLQTLAERIEREIGAFGYRVFTDSAPVLEVELAQKAGVGWRGKHTLLLQRDAGSLFFLGEIYVDVPLPTDAQTAPDVAPETPGAHCGSCTRCIDACPTGAIVEPYRVDARRCISYLTIELKGSIPEPLRPMIGNRVYGCDDCQLVCPWNKFAQAAPVADFDVRHGLDRATLVELFGWDADAFDTRMQGSAIRRIGYESWLRNLAVGLGNALRAPADRLAPDARAAIVAALRGRADDPSPVVREHVEWALRAA

SEQ ID NO: 75306 - protein, 411 aa, unidentified
  source 1..411: note = Burkholderia territorii
  REGION 1..411: note = tr|A0A102GAJ0|A0A102GAJ0_9BURK Epoxyqueuosine reductase OS=Burkholderia territorii OX=1503055 GN=queG; PE = 3 SV=1
MNRLPELAASDRPSTRVEGATPCALDDATLTALAARIRAWGRELGFGAIGISDTDLSDAEAGLAAWLEAGYHGEMDYMAKHGMKRARPAELVAGTRRVISARLAYLPAETLAADTRDAPSGARAPHDWRARERARLDDPQAAVVSIYARGRDYHKVLRNRLQTLAERIEREIGAFGYRVFTDSAPVLEVELAQKAGVGWRGKHTLLLQRDAGSLFFLGEIYVDVPLPTDAQTAPDVAPETPGAHCGSCTRCIDACPTGAIVEPYRVDARRCISYLTIELKGSIPEPLRPMIGNRVYGCDDCQLVCPWNKFAQAAPVADFDVRHGLDRATLVELFGWDADAFDTRMQGSAIRRIGYESWLRNLAVGLGNALRAPADRLAPDARAAIVAALRARADDPSPVVREHVEWALRAA

SEQ ID NO: 75307 - protein, 409 aa, Burkholderia thailandensis
  REGION 1..409: note = tr|A0A2N8QZ03|A0A2N8QZ03_BURTH Epoxyqueuosine reductase OS=Burkholderia thailandensis OX=57975 GN=queG; PE = 3 SV=1
MNRIPELAVADARPSQDGRAAPSRLDDARLAELASRIKAWGRELGFGAIGISDTDLSDAEAGLAAWLEAGCHGEMDYMAKHGMKRARPAELVAGTRRVISARLAYLPAETLGDALDSGGARRDWRAREAARIADPQAAVVSVYARGRDYHKVLRNRLQTLAERIEAEIGAFGHRVFTDSAPVLEVELAQKAGVGWRGKHTLLLQRDAGSFFFLGEIYVDVPLPTDAQTSPDAAPETPGAHCGSCARCIGACPTGAIVAPYRVDARRCISYLTIELHGSIPEPLRPLIGNRVYGCDDCQLVCPWNKFAQAAPVADFDVRHGLDRASLVELFEWTAEQFDERMQGSAIRRIGYERWLRNLAVGLGNALRAAPGRIEPGARAAIVAALHARLGDPSVSVLVREHVEWALRAA

SEQ ID NO: 75308 - protein, 409 aa, Burkholderia thailandensis
  REGION 1..409: note = tr|Q2T0L9|Q2T0L9_BURTA Epoxyqueuosine reductase; OS = Burkholderia thailandensis (strain ATCC 700388 / DSM 13276 / CIP 106301 / E264) OX=271848 GN=queG PE=3 SV=1
MNRIPELAVADARPSQDGRAAPSRLDDARLAELASRIKAWGRELGFGAIGISDTDLSDAEAGLAAWLEAGCHGEMDYMAKHGMKRARPAELVAGTRRVISARLAYLPAETLGDALDSGGARRDWRAREAARIADPQAAVVSVYARGRDYHKVLRNRLQTLAERIEAEIGAFGHRVFTDSAPVLEVELAQKAGVGWRGKHTLLLQRDAGSFFFLGEIYVDVPLPTDAQTSPDAAPETPGAHCGSCARCIGACPTGAIVAPYRVDARRCISYLTIELHGSIPEPLRPLIGNRVYGCDDCQLVCPWNKFAQAAPVADFDVRHGLDRASLVELFEWTAEQFDERMQGSAIRRIGYERWLRNLAVGLGNALRAAPGRIEPGARAAIVAALHARLGDPSVSALVREHVEWALRAA

SEQ ID NO: 75309 - protein, 411 aa, Burkholderia ubonensis
  REGION 1..411: note = tr|A0A102K2T4|A0A102K2T4_9BURK Epoxyqueuosine reductase OS=Burkholderia ubonensis OX=101571 GN=queG PE=3; SV = 1
MNRLPELAASDPRSTQAERAAPCVLDDAALTALAARIRAWGRELGFGAIGISDTDLSDAEAGLAAWLEAGCHGEMDYMAKHGMKRARPAELVAGTRRVISARLAYLPAQTLAADAPDDAPGASAPRDWRAREQARLDDPQAAVVSIYARGRDYHKVLRNRLQTLAERIEREIGAFGYRVFTDSAPVLEVELAQKAGVGWRGKHTLLLQRDAGSLFFLGEIYVDIPLPTDAQTAPDAAPETPGAHCGSCTRCIDACPTGAIVAPYRVDARRCISYLTIELKGSIPEPLRPLIGNRVYGCDDCQLVCPWNKFAQAAPVADFDVRHGLDRATLVELFGWSAEEFDARMQGSAIRRIGHECWLRNLAVGLGNALRAPPERLAPAARDAIVAALRARADDPSPLVREHVEWALRAA

SEQ ID NO: 75310 - protein, 411 aa, Burkholderia ubonensis
  REGION 1..411: note = tr|A0A125JS08|A0A125JS08_9BURK Epoxyqueuosine reductase OS=Burkholderia ubonensis OX=101571 GN=queG PE=3; SV = 1
MNRLPELAASDPRPTQAERAAPCVLDDAALTALAARIRAWGRELGFGAIGISDTDLSDAEAGLAAWLEAGCHGEMDYMAKHGMKRARPAELVAGTRRVISARLAYLPAQTLAADAPDDARGAPAPRDWRAREQARLDDPQAAVVSIYARGRDYHKVLRNRLQTLAERIEREIGAFGYRVFTDSAPVLEVELAQKAGVGWRGKHTLLLQRDAGSLFFLGEIYVDIPLPTDAQTAPDAAPETPGAHCGSCTRCIDACPTGAIVAPYRVDARRCISYLTIELKGSIPEPLRPLIGNRVYGCDDCQLVCPWNKFAQAAPVADFDVRHGLDRATLVELFGWSADEFDARMQGSAIRRIGHECWLRNLAVGLGNALRAPPERLAPAARDAIVAALRARADDPSPLVREHVEWALRAA

SEQ ID NO: 75311 - protein, 408 aa, Burkholderia vietnamiensis
  REGION 1..408: note = tr|A0A103HUQ9|A0A103HUQ9_BURVI Epoxyqueuosine reductase OS=Burkholderia vietnamiensis OX=60552 GN=queG; PE = 3 SV=1
MNRLPELAASDGPSTRAEGAAPCALDDAALTALAARIRAWGRELGFGAIGISDTDLSDAEAGLAAWLEAGYHGEMDYMAKHGTKRARPAELVAGTRRVISARLAYLPAATLAADAPDASSAPPDWRAHERARLDDPQAAVVSIYARGRDYHKVLRNRLQTLAERIEREIGAYGYRVFTDSAPVLEVELAQKAGVGWRGKHTLLLQRDAGSLFFLGEIYVDVALPTDAQTAPDAAPETPGAHCGSCTRCLGACPTGAIVEPYRVDARRCISYLTIELKGSIPEPLRPLIGNRVYGCDDCQLVCPWNKFAQAAPVADFDVRHGLDRATLVELFGWDAETFDTRMQGSAIRRIGHESWLRNLAVGLGNALRAPAGRLAPAARDAIVAALRARADDPSPVVREHVEWALRAA

SEQ ID NO: 75312 - protein, 379 aa, Burkholderia vietnamiensis
  REGION 1..379: note = tr|A4JH93|A4JH93_BURVG Epoxyqueuosine reductase; OS = Burkholderia vietnamiensis (strain G4 / LMG 22486); OX = 269482 GN=queG PE=3 SV=1
MTALAARIRAWGRELGFGAIGISDTDLSDAEAGLAAWLEAGYHGEMDYMAKHGMKRARPAELVAGTRRVISARLAYLPAATLAADAPDASSAPHDWRARERARLDDPQAAVVSIYARGRDYHKVLRNRLQTLAERIEREIGAYGYRVFTDSAPVLEVELAQKAGVGWRGKHTLLLQRDAGSLFFLGEIYVDVALPTDAQTAPDAAPETPGAHCGSCTRCLGACPTGAIVEPYRVDARRCISYLTIELKGSIPEPLRPLIGNRVYGCDDCQLVCPWNKFAQAAPVADFDVRHGLDRATLVELFGWDDETFDTRMQGSAIRRIGHESWLRNLAVGLGNALRAPAGRLAPAARDAIVAALRARADDPSPVVREHVEWALRAA

SEQ ID NO: 75313 - protein, 167 aa, unidentified
  source 1..167: note = Burkholderiaceae bacterium
  REGION 1..167: note = tr|A0A5C7PYA6|A0A5C7PYA6_9BURK tRNA epoxyqueuosine(34) reductase QueG (Fragment); OS = Burkholderiaceae bacterium OX=2030806 GN=E6Q93_21965; PE = 4 SV=1
AAPRIDPLGRDDGLPRAHPEAGRAAAAMRLGRRCISYLTIEHDGAIPVELRAAIGNRIYGCDDCQLVCPWNKYARRATLPDFDPRAPLGQATLLELWRWDEAEFLHRTEGSAIRRIGHARWRRNLAVAMGNALRAGVDEGLRAALVAAREGASELLREHIDWALGQG

SEQ ID NO: 75314 - protein, 370 aa, unidentified
  source 1..370: note = Burkholderiaceae bacterium
  REGION 1..370: note = tr|A0A4U8V2V4|A0A4U8V2V4_9BURK Epoxyqueuosine reductase OS=Burkholderiaceae bacterium PBA OX=795666; GN = queG PE=3 SV=1
MPHATEPPRYDPIVLVAQIRDWGQALGFDRVQIADIDLGDAEAGLLAWLEKGFHGSMDYMANHGLKRARPAELVPGTVRAIVARMPYLPIDTPPDWRDREQRRLMQPGEAVVSLYARGRDYHKVLRSRLQQLADRIADAIGPFGYRVFTDSAPVMEVALATRGGLGWRGKHTLLLDRDAGSMFFLGEILIDLPLPADPPSEPHCGTCTRCLDVCPTQAIVAPYVLDARRCISYLTIEHTGSIPEALRAPLGNRIYGCDDCQTVCPWNKFARCATLPDFDVRHALDSSTLLELFAWDADAFSRHLEGSPIRRIGHERWLRNLAVALGNALRSETDSAHAAAMRAALQARLTHPSPLVREHVQWALDQSPIT

SEQ ID NO: 75315 - protein, 378 aa, unidentified
  source 1..378: note = Burkholderiales bacterium
  REGION 1..378: note = tr|A0A3N5F521|A0A3N5F521_9BURK Epoxyqueuosine reductase OS=Burkholderiales bacterium OX=1891238 GN=queG; PE = 3 SV=1
MDEATLDDWMERLRGWARELGFASIGVADVSGIEHSPAADGLARWLDAGFHGEMDYMARHAGLRARPDALVPGTLRAVMVSLDYAPDDPAWLEQAWLTLADPERAYVSRYALGRDYHKVVRSRLSRLAERLQAAVGPFGWRAFCDSAPVMEVELARRAGLGWRGKHTLLLAREGGSMRFLGTLYTDLPLPVDAPVDEHCGRCTACLDACPTRAIVAPYRLDARRCIAYLTIEAKGAIPVEFREAIGNRIYGCDDCQLACPWNKYAAMASLPDFASRNRLDAASLVELFGWDRPAFESRMEGSAIRRIGHERWLRNIAVALGNAPASPQVIAALRSREHDPSPLVAEHVRWALERHRAAGVPDPESEARTEPSRPASAS

SEQ ID NO: 75316 - protein, 361 aa, unidentified
  source 1..361: note = Burkholderiales bacterium
  REGION 1..361: note = tr|A0A1F4ML92|A0A1F4ML92_9BURK Epoxyqueuosine reductase OS=Burkholderiales bacterium RIFOXYD12_FULL_59_19 OX=1797574 GN=queG PE=3 SV=1
MQQLNSSQWVSRIQEWGRALGFSQIGVAGVDLTAAEPGLSAWLAAGCHGDMFYMASHGLKRARPAELVPGTLRVITARMDYLPADTSDGWQALELDRLNRRAEGIVSIYARGRDYHKVMRSRLQKLSDQIAAALGPLGYRVFTDSAPVLEAELASLSGLGWRGKHTLLLSREAGSTFFLGEIFVDMALPVTDPVAGHCGSCSACIDICPTRAIIAPYRLDARRCISYLMIEHAGQIPLELRPLMGNRIYGCDDCQLICPWNKFAKRSALPDFDARAGLVGGQLVALFGWSEETFLRLCEGSPIRRIGHERWLRNIAVALGNALRAADADLAGSLVTVLASRSAHPSSLVREHVAWALEQKN

SEQ ID NO: 75317 - protein, 379 aa, Buttiauxella agrestis
  REGION 1..379: note = tr|A0A381CCS5|A0A381CCS5_9ENTR Epoxyqueuosine reductase OS=Buttiauxella agrestis OX=82977 GN=queG PE=3; SV = 1
MSQPLDLNQLAQNIKQWGIELGFQQVGITDTDLSASEPALQLWLDKQYHGEMDWMARHGMMRARPHELLPGTLRVISVRMNYLPANAAFASTLKNPKIGYISRYALGRDYHKLLRNRLKKLGEMIQSHCSTLNFRPFVDSAPILERPLADKAGLGWTGKHSLILNQEAGSFFFLGELLVDIPLPIDKPVEEKCGRCVACMTICPTGAIVEPYTVDARRCISYLTIELEGAIPEEFRPLIGNRIYGCDDCQLICPWNRFSQLTGEDDFSPRRALHAPPLIELFAWSEEYFLRVTEGSAIRRIGHLRWLRNIAVALGNAPWEEVILEALQQRKGEHPLLDEHIDWAIAQQLSKRSANATEVQLPQKQRLVRVIEKGLKRDA

SEQ ID NO: 75318 - protein, 379 aa, Buttiauxella agrestis
  REGION 1..379: note = tr|A0A085GKR6|A0A085GKR6_9ENTR Epoxyqueuosine reductase OS=Buttiauxella agrestis ATCC 33320 OX=1006004; GN = queG PE=3 SV=1
MSQPLDLNQLAQNIKQWGIELGFQQVGITDTDLSASEPALQLWLDKQYHGEMDWMARHGMMRARPHELLPGTLRVISVRMNYLPANAAFASTLKNPKIGYISRYALGRDYHKLLRNRLKKLGEMIQSHCSTLNFRPFVDSAPILERPLADKAGLGWTGKHSLILNQEAGSFFFLGELLVDIPLPIDKPVEEKCGRCVACMTICPTGAIVEPYTVDARRCISYLTIELEGAIPEEFRPLIGNRIYGCDDCQLICPWNRFSQLTVEDDFSPRRALHAPPLVELFAWSEEYFLRVTEGSAIRRIGHLRWLRNIAVALGNAPWEEVILEALQQRKGEHPLLDEHIEWAIAQQLSKRSANATEVQLPQKQRLVRVIEKGLKRDA

SEQ ID NO: 75319 - protein, 379 aa, Buttiauxella brennerae
  REGION 1..379: note = tr|A0A1B7IEC4|A0A1B7IEC4_9ENTR Epoxyqueuosine reductase OS=Buttiauxella brennerae ATCC 51605 OX=1354251; GN = queG PE=3 SV=1
MSQPLDLNQLAQNIKQWGIELGFQQVGITDTDLTASEPALQIWLDKQYHGEMDWMARHGMMRARPHELLPGTLRVISVRMNYLPANAAFASTLKNPKIGYISRYALGRDYHKLLRNRLKKLGEMIQSHCSTLNFRPFVDSAPILERPLADKAGLGWTGKHSLILNQEAGSFFFLGELLVDIPLPIDKPVEEKCGRCVACMTICPTGAIVEPYTVDARRCISYLTIELEGSIPEEFRPLIGNRIYGCDDCQLICPWNRFSQLTTEEDFSPRSKLHAPELAELFTWSEDYFLRVTEGSAIRRIGHLRWLRNIAVALGNAPWDEAILGVLQQRKGEHPLLDEHIDWAIAQQLIKRNANATEVQLPQKQRLVRVIEKGLKRDA

SEQ ID NO: 75320 - protein, 379 aa, Buttiauxella gaviniae
  REGION 1..379: note = tr|A0A1B7HWK4|A0A1B7HWK4_9ENTR Epoxyqueuosine reductase OS=Buttiauxella gaviniae ATCC 51604 OX=1354253; GN = queG PE=3 SV=1
MSQPLDLNQLAQNIKQWGIELGFQQVGITDTDLTASEPALQIWLDKQYHGEMDWMARHGMMRARPHELLPGTLRVISVRMNYLPANAAFASTLKNPKIGYISRYALGRDYHKLLRNRLKKLGEMIQSHCSTLNFRPFVDSAPILERPLADKAGLGWTGKHSLILNQEAGSFFFLGELLVDIPLPIDKPVEEKCGRCVACMTICPTGAIVEPYTVDARRCISYLTIELEGAIPEEFRPLIGNRIYGCDDCQLICPWNRFSQLTTEEDFSPRSKLHAPELAELFTWGEDYFLRVTEGSAIRRIGHLRWLRNIAVALGNAPWDEAILETLQQRKGEHPLLDEHIDWAIAQQLIKRSEGATEVQRPQKQRLVRVIEKGLKRDA

SEQ ID NO: 75321 - protein, 379 aa, Buttiauxella izardii
  REGION 1..379: note = tr|A0A3A5JL93|A0A3A5JL93_9ENTR Epoxyqueuosine reductase OS=Buttiauxella izardii OX=82991 GN=queG PE=3; SV = 1
MSQPLDLNQLAQNIKQWGIELGFQQVGIADTDLTASEPALQLWLDKQYHGEMDWMARHGMMRARPHELLPGTLRVISVRMNYLPANAAFASTLKNPKIGYISRYALGRDYHKLLRNRLKKLGEMIQSHCSTLNFRPFVDSAPILERPLAEKAGLGWTGKHSLILNQEAGSFFFLGELLVDIPLPVDKPVEEKCGRCVACMTICPTGAIVEPYTVDARRCISYLTIELEGAIPEEFRPLIGNRIYGCDDCQLICPWNRFSQLTTEDDFSPRSKLHAPELVALFAWNEEYFLRVTEGSAIRRIGHLRWLRNIAVALGNAPWDEAILEALQQRKGEHPLLDEHIDWAIAQQLSKRSANATEVQLPQKQRLVRVIEKGLKRDA

SEQ ID NO: 75322 - protein, 379 aa, Buttiauxella noackiae
  REGION 1..379: note = tr|A0A1B7HHC6|A0A1B7HHC6_9ENTR Epoxyqueuosine reductase OS=Buttiauxella noackiae ATCC 51607 OX=1354255; GN = queG PE=3 SV=1
MSQPLDLNQLAQNIKQWGIELGFQQVGITDTDLSASEPALQMWLDKQYHGEMDWMARHGMMRARPHELLPGTLRVISVRMNYLPANAAFASTLKNPKIGYISRYALGRDYHKLLRNRLKKLGEMIQSHCSTLNFRPFVDSAPILERPLAEKAGLGWTGKHSLILNQEAGSFFFLGELLVDIPLPIDNPIEEKCGRCVACMTICPTGAIVEPYTVDARRCISYLTIELEGAIPEEFRPLIGNRIYGCDDCQLICPWNRFSQLTTEDDFSPRSKLHAPELAELFTWSEEYFLRVTEGSAIRRIGHLRWLRNIAVALGNAPWDEAILETLQQRKCEHPLLDEHIDWAIAQQLIKRSEDATEVQLPQKQRLVRVIEKGLKRDA

SEQ ID NO: 75323 - protein, 379 aa, Buttiauxella sp.
  REGION 1..379: note = tr|A0A3G2IFB7|A0A3G2IFB7_9ENTR Epoxyqueuosine reductase OS=Buttiauxella sp. 3AFRM03 OX=2479367 GN=queG; PE = 3 SV=1
MSQPLDLNQLAQNIKQWGIELGFQQVGISDTDLTASEPALQMWLDKQYHGEMDWMARHGMMRARPHELLPGTLRVISVRMNYLPANAAFASTLKNPKIGYISRYALGRDYHKLLRNRLKKLGEMIQSHCSTLNFRPFVDSAPILERPLAEKAGLGWTGKHSLILNQEAGSFFFLGELLVDIPLPVDKAIEEQCGRCVACMTICPTGAIVEPYTVDARRCISYLTIELEGAIPEEFRPLIGNRIYGCDDCQLICPWNRFSQLTTEDDFSPRRALHAPPLVELFAWSEEYFLRVTEGSAIRRIGHLRWLRNIAVAMGNAPWDEAILEALQQRKGEHPLLDEHIDWAIAQQLTRRSANATEVQLPQKQRLVRVIEKGLKRDA

SEQ ID NO: 75324 - protein, 338 aa, Buttiauxella sp.
  REGION 1..338: note = tr|A0A4R6DVV6|A0A4R6DVV6_9ENTR Epoxyqueuosine reductase OS=Buttiauxella sp. JUb87 OX=2485129 GN=queG; PE = 3 SV=1
MWLDKQYHGEMDWMARHGMMRARPHELLPGTLRVISVRMNYLPANAAFASTLKNPKIGYISRYALGRDYHKLLRNRLKKLGEMIQSHCSTLNFRPFVDSAPILERPLAEKAGLGWTGKHSLILNQEAGSFFFLGELLVDIPLPVDKAIEEQCGRCVACMTICPTGAIVEPYTVDARRCISYLTIELEGAIPEEFRPLIGNRIYGCDDCQLICPWNRFSQLTTEDDFSPRRALHAPPLVELFAWSEEYFLRVTEGSAIRRIGHLRWLRNIAVAMGNAPWDEAILEALQQRKGEHPLLDEHIDWAIAQQLTRRSANATEVQLPQKQRLVRVIEKGLKRDA

SEQ ID NO: 75325 - protein, 379 aa, Buttiauxella warmboldiae
  REGION 1..379: note = tr|A0A3N5E0U4|A0A3N5E0U4_9ENTR Epoxyqueuosine reductase OS=Buttiauxella warmboldiae OX=82993 GN=queG; PE = 3 SV=1
MSQPLDLNQLAQNIKQWGRELGFQQVGITDTDLCASEPALQLWLDKQYHGEMDWMARHGMMRARPHELLPGTLRVISVRMNYLPANAAFATTLKDPKIGYISRYALGRDYHKLLRNRLKKLGEMIQSHCSTLNFRPFVDSAPILERPLAEKAGLGWTGKHSLILNQEAGSFFFLGELLVDIPLPVDKPVEEKCGRCVACMTICPTGAIVEPYTVDARRCISYLTIELEGAIPEAFRPLIGNRIYGCDDCQLICPWNRFSQLTAEDDFSPRRALHAPPLVELFAWSEEYFLRATEGSAIRRIGHLRWLRNIAVALGNAPWDEAILNALQQRKGEHPLLDEHIEWAIAQQLTRRNAQATEVQPAQKQRLVRVIEKGLKRDA

SEQ ID NO: 75326 - protein, 230 aa, unidentified
  source 1..230: note = Butyribacterium methylotrophicum
  REGION 1..230: note = tr|A0A1E7S015|A0A1E7S015_BUTME Epoxyqueuosine reductase OS=Butyribacterium methylotrophicum OX=1487; GN = queG_2 PE=4 SV=1
MNPLNEKIEALGKGLGAAQVGFADLSGLPDGLNLGYPGAVSVVVRLSKGILAQMDDAPTATYFSHYRIVNRLIDEITLRVALALEEGGAMAVAVPASQSLPSVKGENPYRGLFAHKTAAVIAGMGWIGKSALFIHRDYGPAVRLGTVLTDAPLDIVAAPGKSECGSCQACVKACPSMSIEGTLWEPGMERSYLLDAHSCSEYMKEAYQHIGRGSVCGLCMVSCPHFGKNL

SEQ ID NO: 75327 - protein, 315 aa, unidentified
  source 1..315: note = Butyribacterium methylotrophicum
  REGION 1..315: note = tr|A0A1E7S1L5|A0A1E7S1L5_BUTME Epoxyqueuosine reductase OS=Butyribacterium methylotrophicum OX=1487; GN = queG_1 PE=4 SV=1
MLKEEKIREAARAAGIEMIGFAEPHPLTEWLEILEKRREQGRITSFERTPPSRRVDYSQAFPKVKGIIVIGVPYCTELPEPEDNTAHGRMASVAWGQDYHEVVTEKMNGLMALLKETAPSLEYRSYVDNSRLLDRATAWRAGLGFFGKNNTLINPEYGSFFFIGQILVSSLIDFKHAVPLKSQCGTCQRCLMACPNQALGEGYTLEPERCVSYLTQKKKLTPEEERLLGVTYLYGCDDCQRACPWNIKSSDGGQAWPDIAPESIYPGLDETEAISESDFEEKFGKTAAAWRGKDVLARNARIIKNNLKNHAKDKN

SEQ ID NO: 75328 - protein, 273 aa, unidentified
  source 1..273: note = Butyricicoccus porcorum
  REGION 1..273: note = tr|A0A252F490|A0A252F490_9CLOT 4Fe-4S ferredoxin-type domain-containing protein; OS = Butyricicoccus porcorum OX=1945634 GN=CBW42_07145 PE=4; SV = 1
MDFLSRFFDIPHTGGKGICRLSALELDEETVRTVQVRCPGAARVIVVLFPYLVRDAGNVSLYARGLDYHAVIMRALEPVCARLRQEFSQNRFVPLVDASPLPEVRAAWVSGAGILGQNGLIFDRTYGSFVFIGTVLTDLELPPTPSAREICPGCGACTRACPAQALQHGCVDEASCLSALTQSKQPMTEEQLRQLAHHPLVWGCDICSLACPLNRDAAETTNPAFRGNRICSLEADNVDGLTRKQFLAAFPERAFTWRGPAPLARNLSLKRQK

SEQ ID NO: 75329 - protein, 272 aa, Butyricicoccus pullicaecorum
  REGION 1..272: note = tr|A0A1Y4LBD6|A0A1Y4LBD6_9CLOT 4Fe-4S ferredoxin-type domain-containing protein; OS = Butyricicoccus pullicaecorum OX=501571 GN=B5F17_02170; PE = 4 SV=1
MNIVDRLSVSDGLCACGVCAMGTLLSHMDDRQQLGLSRLIDSPRSVLVALFPYLTGAPSGNLSLYARGRDYHAVIADRLGAAVEAFQAEYPENHFVVLADDSPLPEVYAAACAGLGCIGDNGLLIHPDYGSYVFIGTIVTDLDLPVTEQTPKGCLHCGACRRACPVDLDKGRCLSALTQQGGTLTEEQAALVREHPLVWGCDTCQLVCPMNRHAKQTDIPDFGQFLIDTLTLADVDGLTRRQFYEKYPDRAFTWRGPAPLRRNLTLKEGDNS

SEQ ID NO: 75330 - protein, 272 aa, Butyricicoccus pullicaecorum
  REGION 1..272: note = tr|R8W5B8|R8W5B8_9CLOT 4Fe-4S ferredoxin-type domain-containing protein OS=Butyricicoccus pullicaecorum 1.2 OX=1203606 GN=HMPREF1526_01373 PE=4 SV=1
MNIVDRLSVSGGLCACGVCAMGTLLSHMDDRQRLGLSRLIDSPRSVLVALFPYLTGAPSGNLSLYARGRDYHAVIADRLGAVAKAFQAEYPDNHFVVLADDSPLPEVYAAACAGLGCIGDNGLLIHPDYGSYVFIGTIVTDLDLPATEQTPQGCLHCGACRRACPVELDKERCLSALTQQGGTLTEEQAALVREHPLVWGCDTCQLVCPMNKHAKQTDIPDFRQSPIDTLTLADVDGLTRRQFCEKYPDRAFTWRGPAPLRRNLSLKEGDNP

SEQ ID NO: 75331 - protein, 298 aa, unidentified
  source 1..298: note = Butyricimonas faecalis
  REGION 1..298: note = tr|A0A3S9VST2|A0A3S9VST2_9BACT tRNA epoxyqueuosine(34) reductase QueG OS=Butyricimonas faecalis OX=2093856 GN=queG PE=4 SV=1
MESLSEIAKACGFDACGVVPVDILSRERERLEQWVERGFHAGMNYMANNMEKRENPALLVEGARSVIVTLTNYYTPKLQLEGVPVVARYAYGKDYHRVVKDRLFKLYACLEETIGRKIMGRVFVDSAPVFEHEWARRAGLGWVGRNSLLINPRLGSYCFIGVIISDFEPSTYSLPEKRNFCGQCNRCVEACPTGALSAYEVNANLCISYNTIERKGEIPSEIKKKMGVRFFGCDACQDICPWNRKAVAHHIDEFSPNEWLMWMSREDWLSLDEETFRERFKNSPLLRPGLEQIKRNVK

SEQ ID NO: 75332 - protein, 298 aa, Butyricimonas sp.
  REGION 1..298: note = tr|A0A3D2DWK0|A0A3D2DWK0_9BACT tRNA epoxyqueuosine(34) reductase QueG OS=Butyricimonas sp.; OX = 1969738 GN=queG PE=4 SV=1
MEVLSEIAKACGFDACGVVPVDVLSRERERLERWIRQGFHAGMNYMANNIEKRENPALLVEGARSVIVTLTNYYTPKLQLEGIPVVARYAYGKDYHRVVKDRLFKLYACLEEAIGQKITGRVFVDSAPVFEHEWARRAGLGWIGRNSLLIHPRLGSYCFIGVIISDFEPSRYSLPEERNFCGQCNRCVEACPTGALSSHEVNANLCIAYNTIERKDDIPSEMKKKMGDRFFGCDACQEVCPWNRKAVLHHVEEFSPNEWLMRMSREDWLSLDEEIFRERFKDSPLLRPGLEQIKRSVK

SEQ ID NO: 75333 - protein, 297 aa, Butyricimonas sp.
  REGION 1..297: note = tr|A0A1Y3VTD4|A0A1Y3VTD4_9BACT tRNA epoxyqueuosine(34) reductase QueG OS=Butyricimonas sp. An62 OX=1965649 GN=B5G13_14840 PE=4 SV=1
MEALLEKAKECGFDACGVVPVDVLSRERERLERWIGQGFHAGMNYMANNIEKRENPALFVEGARSVIVTLTNYYTPKLQSEGIPVVARYAYGKDYHRVVKDRLFKLHTCLEEVSGRKITGRAFVDSAPVFEHEWARRAGLGWIGRNSLLIHPRLGSYCFIGVIISDFEPSRYSLPEERNFCGQCNRCVEACPTGALSSHEVNANLCISYNTIERKDDIPSEIKKKMGDRFFGCDACQEVCPWNRKAVLHHVEEFSPNEWLMRMSREEWLALDEETFQVRFKESPLQRPGLERIKHNL

SEQ ID NO: 75334 - protein, 297 aa, Butyricimonas synergistica
  REGION 1..297: note = tr|A0A1U7LFL1|A0A1U7LFL1_9BACT tRNA epoxyqueuosine(34) reductase QueG OS=Butyricimonas synergistica OX=544644 GN=BHV81_00745 PE=4 SV=1
MESLLEKARECEFDACGVVPVDVLFRERERLERWIGRGFHAGMNYMANNIEKRENPALLVEGARSVIVTLTNYYTPKLQSEGIPVVARYAYGKDYHRVVKDRLFKLHTCLEEVTGRKITGRAFVDSAPVFEHEWARRAGLGWIGLNSLLIHPRLGSYCFIGVIISDFEPSRYSLPEERNFCGQCNRCVEACPTGALSSHEVNANLCISYNTIERKDDIPSEIKKKMGDRFFGCDACQEVCPWNRKAVLHHVEEFSPNEWLMRMSREEWLALDEEAFQVRFKESPLQRPGLERIKHNL

SEQ ID NO: 75335 - protein, 298 aa, Butyricimonas virosa
  REGION 1..298: note = tr|A0A413IM86|A0A413IM86_9BACT tRNA epoxyqueuosine(34) reductase QueG OS=Butyricimonas virosa; OX = 544645 GN=queG PE=4 SV=1
MEVLSEIAKACGFDACGVVPVDVLFRERERLERWIRQGFHAGMNYMANNIEKRVNPALLVEGARSVIVTLTNYYTPKLQLEGIPVVARYAYGKDYHGVVKDRLFKLYACLEEAIGQKITGRVFVDSAPVFEHEWARRAGLGWIGRNSLLIHPRLGSYCFIGVIISDFEPSRYSLPEERNFCGQCNRCVEACPTGALSSHEVNANLCIAYNTIERKDDIPSEMKKKMGDRFFGCDACQEVCPWNRKAVLHHVEEFSPNEWLMRMSREDWLSLDEEIFRERFKDSPLLRPGLEQIKRSVK

SEQ ID NO: 75336 - protein, 298 aa, Butyricimonas virosa; identical to SEQ ID NO: 75332
  REGION 1..298: note = tr|A0A412WW87|A0A412WW87_9BACT tRNA epoxyqueuosine(34) reductase QueG OS=Butyricimonas virosa; OX = 544645 GN=queG PE=4 SV=1

SEQ ID NO: 75337 - protein, 381 aa, unidentified
  source 1..381: note = Bythopirellula goksoyri
  REGION 1..381: note = tr|A0A5B9QND4|A0A5B9QND4_9PLAN Epoxyqueuosine reductase OS=Bythopirellula goksoyri OX=1400387 GN=queG; PE = 4 SV=1
MSPDEITKRIKQNANELGFQLCGICPAISPPGAARLDEWLAAGYGGQMHYIADRREAYVDPKHVLEGVQSLVMLGMMYHGTGESVPTTGTVGRVARYAQGTVDYHNVIRERLHSLADSLREMAPKATTRGVVDTAPLLEREFAQMAGLGWAGKNTLLLSRHAGSYFFLAALLTDATLEYDKPFEADHCGTCTACLDACPTDAFPQPYVLDASRCISYLTIELRDAVPSELREGIGDWVFGCDVCQEVCPWNRDVPLSEEPNFAPQSELNPLELPPLFEMDESDFRQRFRHTPLWRAHRRGLLRSAAIVLGNQRDPEALPALMKGLNDEEPLVRGAAAWALGQFDIAEARLQLLNRQQRESDESVLMEIQHSLGHKLNKNQP

SEQ ID NO: 75338 - protein, 420 aa, unidentified
  source 1..420: note = Caballeronia arationis
  REGION 1..420: note = tr|A0A157ZXG9|A0A157ZXG9_9BURK Epoxyqueuosine reductase OS=Caballeronia arationis OX=1777142 GN=queG; PE = 3 SV=1
MNRLPEHSIEVAAASGNAADDVRAFDIHDEAALAGLAQRIRTWGRELGFGAVGISDADLTDAEKGLASWLEAGYHGEMDYMAKHGMKRARPAELVAGTRRVITARIAYLPASTLGQKGDESVVTAASKSAGQRNDWRAVEWSRLADPAAAVVSIYARGRDYHKVMRNRLQQLAERIEGEIGRFGYRAFTDSAPVLEVELAQKAGVGWRGKHTLLLQRDAGSLFFLGEIYVDIPLPTDAETHPSSAPEHEGAHCGQCTRCIAACPTGAIVAPYRVDARRCISYLTIELAGSIPEDLRPLIGNRVYGCDDCQLVCPWNKFAQAAPVADFDVRHGLDEASLVDLFRWSAADFDVRMQGSAIRRIGYERWSRNIAVAMGNALRTKLEPAQRGEIVEALRSRADDSSALVREHVEWALRGAAPEE

SEQ ID NO: 75339 - protein, 413 aa, unidentified
  source 1..413: note = Caballeronia arvi
  REGION 1..413: note = tr|A0A158JER9|A0A158JER9_9BURK Epoxyqueuosine reductase OS=Caballeronia arvi OX=1777135 GN=queG PE=3 SV=1
MNRLPEHSVEITTASSDAAAESASESRVFDLDENALAALAQRIKVWGRELGFGAVGISDIDLSDAEKGLNDWLEAGYHGEMDYMAKHGMKRARPAELVAGTRRVITARMAYLPEQTLAKTGDESVATADGQKNDWRAIEWSRLSKPSEAVVSIYARGRDYHKVMRNRLQQLAERIEAEIGPFGHRAFTDSAPVLEVALAQKAANGWRGKHTLLLDRDAGSLFFLGEIFVDVPLPADPHPEEDGAHCGQCARCIGACPTGAIVGPYRVDARRCISYLTIELHGSIPEEMRPLIGNRVYGCDDCQLVCPWNKFAQAAPVADFDVRHGLDRATLVELFAWSAGDFDTRMQGSAIRRIGHERWLRNIAVAMGNALRSSTLDTVERKAIAEALEARADDPSALVREHVHWALAQGSGK

SEQ ID NO: 75340 - protein, 413 aa, unidentified
  source 1..413: note = Caballeronia calidae
  REGION 1..413: note = tr|A0A158BSP5|A0A158BSP5_9BURK Epoxyqueuosine reductase OS=Caballeronia calidae OX=1777139 GN=queG PE=3; SV = 1
MNRLPEHSVEITTASSDAAAESVSESRVIELDENALAELAQRIKVWGRELGFGAVGISDIDLTDAEKGLNDWLEAGYHGEMDYMAKHGMKRARPAELVAGTRRVITARMAYLPAATLAKKGDESVATADGQKNDWRAIEWKRLAKPEQATVSIYARGRDYHKVMRNRLQQLAERIEKAIGPFGHRAFTDSAPVLEVALAQKAGNGWRGKHTLLLDRDAGSLFFLGEIFVDVPLPVDPYPEHEGAHCGQCTRCIGACPTGAIVAPYRVDARRCISYLTIELHGSIPEDMRPLIGNRVYGCDDCQLVCPWNKFAQAAPVADFDVRHGLDRATLVELFAWSAEDFDTRMQGSAIRRIGHERWLRNIAVAMGNALRSAELDASEREVIVEALEARAGDASALVREHVQWALAQRSQT

SEQ ID NO: 75341 - protein, 413 aa, unidentified
  source 1..413: note = Caballeronia catudaia
  REGION 1..413: note = tr|A0A157ZDI9|A0A157ZDI9_9BURK Epoxyqueuosine reductase OS=Caballeronia catudaia OX=1777136 GN=queG PE=3; SV = 1
MNRLPEHSVEITTASSDAAAESASESRVFDLDENALAALAQRIRVWGRELGFGAVGISDIDLSDAEKGLNDWLEAGYHGEMDYMAKHGMKRARPAELVAGTRRVITARMAYLPAETLGKIGDESVATADGQKNDWRAIEWSRLSKPSEAVVSIYARGRDYHKVMRNRLQQLAERIEGEIGPFGHRAFTDSAPVLEVALAQKAGNGWRGKHTLLLDRDAGSLFFLGEIYVDVPLPFDPHPEEDGAHCGQCARCIGACPTGAIVAPYRVDARRCISYLTIELHGSIPEEMRPLIGNRVYGCDDCQLVCPWNKFAQAAPVADFDVRHGLDRATLVELFAWSAGDFDIRMQGSAIRRIGHERWLRNIAVAMGNALRSSTLDTVERKAVTEALEARADDPSALVREHVHWALAQGSRK

SEQ ID NO: 75342 - protein, 422 aa, unidentified
  source 1..422: note = Caballeronia choica
  REGION 1..422: note = tr|A0A158G7F3|A0A158G7F3_9BURK Epoxyqueuosine reductase OS=Caballeronia choica OX=326476 GN=queG PE=3; SV = 1
MNRLPEHSIEVTAASGNAAADMRAFDIHDEAALAELAQRIKTWGRELGFGAVGISDADLTEAEEGLASWLEAGYHGEMDYMAKHGMKRARPAELVAGTRRVITARIAYLPASTLASQGDESVTTGRGGHGGHTSQRNDWRAIEWSRLADPTAAVVSIYARGRDYHKVMRNRLQQLAARIEDEIGHFGYRAFTDSAPVLEVALAQKAGVGWRGKHTLLLQRDAGSLFFLGEIYVDIPLPPDAATNPSSAPEHDGAHCGQCTRCIAACPTGAIVGPYRVDARRCISYLTIELAGSIPEDLRPLIGNRVYGCDDCQLVCPWNKFAQAAPVADFDVRHGLDRASLVDLFGWSAADFDVRMQGSAIRRIGYERWLRNIAVAMGNALRAELGREERAAIVDALRARADDASAVVREHVEWALRSCIEE

SEQ ID NO: 75343 - protein, 412 aa, unidentified
  source 1..412: note = Caballeronia cordobensis
  REGION 1..412: note = tr|A0A158JC36|A0A158JC36_9BURK Epoxyqueuosine reductase OS=Caballeronia cordobensis OX=1353886 GN=queG; PE = 3 SV=1
MNRLPEHSVEVTTASSDAAAESASEPRVFDLDEHALAALAQRIKEWGRELGFGAVGISDIDLSDAEEGLASWLEAGYHGEMDYMAKHGMKRARPAELVAGTRRVITARMAYLPAETLAKTGDESVATADAQKNDWRAIEWTRLSKPSEAVVSIYARGRDYHKVMRNRLQQLAERIEREIGPFGHRAFTDSAPVLEVALAQKAGNGWRGKHTLLLDRDAGSLFFLGEIYVDVPLPADPHPEQDGAHCGQCTRCIGACPTGAIVGPYRVDARRCISYLTIELHGSIPEAMRPLIGNRVYGCDDCQLICPWNKFAQAAPVADFDVRHGLDRATLVELFAWSAADFDTRMQGSAIRRIGHERWLRNIAVAMGNALSAASLDAGERRAITDALEARADDPSALVREHVHWALAQGSQ

SEQ ID NO: 75344 - protein, 410 aa, unidentified
  source 1..410: note = Caballeronia fortuita
  REGION 1..410: note = tr|A0A158BQ24|A0A158BQ24_9BURK Epoxyqueuosine reductase OS=Caballeronia fortuita OX=1777138 GN=queG PE=3; SV = 1
MNRLPEHSVEITTASSDAAAESVTESRVFDLDENALAELAQRIKLWARELGFGAVGISDVDLTDAEKGLNDWLEAGYHGEMDYMAKHGMKRARPAELVAGTRRVITARMAYLPAQTLAKTGDESVATADGQKNDWRAIEWSRLADPSQAMVSVYARGRDYHKVMRNRLQQLAERIEKEIGPFGHRAFTDSAPVLEVALAQKAGTGWRGKHTLLLDRDAGSLFFLGEIFVDVPLPVDPHPEHEGAHCGQCTRCIGACPTGAIVAPYRVDARRCISYLTIELHGSIPEEMRPLIGNRVYGCDDCQLVCPWNKFAQAAPVADFDVRHGLDRATLVELFAWSADDFDTRMQGSAIRRIGHERWLRNIAVAMGNALRASSLDAGERERIVDALRAREHDPSELVREHVRWALEQA

SEQ ID NO: 75345 - protein, 414 aa, unidentified
  source 1..414: note = Caballeronia glathei
  REGION 1..414: note = tr|A0A069Q4H6|A0A069Q4H6_9BURK Epoxyqueuosine reductase OS=Caballeronia glathei OX=60547 GN=queG PE=3; SV = 1
MNRLPEHSVEITTASGNAAADTRAFDMLDEAALAELAQRIRTWGRELGFGAVGISDADLTDAEKGLASWLEAGYHGEMDYMAKHGMKRARPAELVAGTRRVITARIAYLPAATLASTGDAGVMTGDGQRNDWRAVEWSRLADPSAAVVSIYARGRDYHKVMRNRLQQLAERIEGEIGRFGHRAFTDSAPVLEVELAQKAGVGWRGKHTLLLQRDAGSLFFLGEIYVDIPLPADAVTRPASAPEHEGAHCGQCTRCIDACPTGAIVAPYRVDARRCISYLTIELAGSIPEDLRPLIGNRVYGCDDCQLVCPWNKFAQAAPVADFDVRHGLDRATLVDLFGWSAADFDVRMQGSAIRRIGHERWLRNIAVAMGNALRAELGGEARAAIVDALLARADDPSALVREHVEWALRQRDA

SEQ ID NO: 75346 - protein, 410 aa, unidentified
  source 1..410: note = Caballeronia glebae
  REGION 1..410: note = tr|A0A158AFZ7|A0A158AFZ7_9BURK Epoxyqueuosine reductase OS=Caballeronia glebae OX=1777143 GN=queG PE=3; SV = 1
MNRLPAHSVEITTASSDAAAESDSESRVFDLDENALTELAQRIKLWGRELGFGAVGISDIDLTDAEKGLADWLEAGYHGEMDYMAKHGMKRARPAELVAGTRRVITARMAYLPARTLAKKGDESVATADGQKNDWRAIEWSRLAKPSQALVSIYARGRDYHKVMRNRLQQLAERIEKEIGPFGHRAFTDSAPVLEVALAQKAGNGWRGKHTLLLDRDAGSLFFLGEIFVDVPLPVDPHPEQDGAHCGQCTRCIGACPTGAIVAPYRVDARRCISYLTIELHGSIPEDMRPLIGNRVYGCDDCQLVCPWNKFAQAAPVADFDVRHGLDRATLVELFAWSAEDFDTRMQGSAIRRIGHERWLRNIAVAMGNALRASSLDAGERKAIVDALEARADDPSELVREHVRWALEQS

SEQ ID NO: 75347 - protein, 413 aa, unidentified
  source 1..413: note = Caballeronia grimmiae
  REGION 1..413: note = tr|A0A069NR93|A0A069NR93_9BURK Epoxyqueuosine reductase OS=Caballeronia grimmiae OX=1071679 GN=queG PE=3; SV = 1
MNRLPEHSDEVTTAASDAAVEPRALHRLESDEAGLAELAQRIKAWGRELGFGAVGISDTDLTDAEEGLASWLEAGYHGEMDYMAKHGMKRARPAELVAGTRRVITARMAYLPAATLASTGDESVATADGQKNDWRAIEWKRLAQPAQAQVSIYARGRDYHKVMRNRLQQLAERIEKEIGAFGHRAFTDSAPVLEVALAQKAGNGWRGKHTLLLDRDAGSLFFLGEIYVDLALPVDPEPEHDGAHCGQCTRCIGACPTGAIVGPYRVDARRCISYLTIELHGSIPEDLRPLIGNRVYGCDDCQLVCPWNKFAQAAPVADFDVRHGLDRATLVELFAWSADDFDTRMQGSAIRRIGHERWLRNIAVAMGNALRDASLDARERGSIIGALHARADDASALVREHVSWALEQGDRHE

SEQ ID NO: 75348 - protein, 409 aa, unidentified
  source 1..409: note = Caballeronia humi
  REGION 1..409: note = tr|A0A158EUP3|A0A158EUP3_9BURK Epoxyqueuosine reductase OS=Caballeronia humi OX=326474 GN=queG PE=3 SV=1
MEVTTASGNAAADSRAFDIHDEAALAELAQRIKTWGRELGFGAVGISDADLTDAEEGLASWLEAGYHGEMDYMAKHGMKRARPAELVAGTRRVITARIAYLPASTLGLTGDESVMTADGQRNDWRAIEWSRLADPTAAVVSIYARGRDYHKVMRNRLQQLAERIEGEIGGFGYRAFTDSAPVLEVALAQKAGVGWRGKHTLLLQRDAGSLFFLGEIYVDIPLPPDAVTNAQNAPEHDGAHCGQCTRCIAACPTGAIVGPYRVDARRCISYLTIELKGSIPEDLRPLIGNRVYGCDDCQLVCPWNKFAQAAPVADFDVRHGLDRASLVELFRWNADDFDVRMQGSAIRRIGHERWLRNIAVAMGNALRAEIGDDERARIIDALQARADDPSPVVREHVEWALRYGETPGE

SEQ ID NO: 75349 - protein, 419 aa, unidentified
  source 1..419: note = Caballeronia hypogeia
  REGION 1..419: note = tr|A0A158BJ55|A0A158BJ55_9BURK Epoxyqueuosine reductase OS=Caballeronia hypogeia OX=1777140 GN=queG PE=3; SV = 1
MNRLPEHSVEITTASSDAAAESVSESRAFTHDEEAALAELAQRIKAWGRELGFGAVGISDIDLTDAEKGLADWLEAGYHGEMDYMAKHGMKRARPAELVAGTRRVITARMAYLPAQTLAKQGDESVVTADGQKNDWRAIEWSRLSKPSQAMVSIYARGRDYHKVMRNRLQQLAERIEGEIGQFGYRAFTDSAPVLEVALAQKAGNGWRGKHTLLLDRDAGSLFFLGEIFVDVPLPVDPDSEHDGAHCGQCTRCIGACPTGAIVAPYRVDARRCISYLTIELHGAIPEDMRPLIGNRVYGCDDCQLVCPWNKFAQAAPVADFDVRHGLDRATLVELFAWSPDDFDTRMQGSAIRRIGHERWLRNIATAMGNALRAASLDAGERHAIVEALRARADDPSALVREHVLWALKQGDTHEEPAV

SEQ ID NO: 75350 - protein, 410 aa, unidentified
  source 1..410: note = Caballeronia jiangsuensis
  REGION 1..410: note = tr|A0A038H172|A0A038H172_9BURK Epoxyqueuosine reductase OS=Caballeronia jiangsuensis OX=1458357 GN=queG; PE = 3 SV=1
MNRLPEHSVEVTTASSDAAAESVSESRVFDIDENALAELAQRIRNWGRELGFGAVGISDIDLTDAEKGLTDWLEAGYHGEMDYMAKHGMKRARPAELVAGTRRVITVRMAYLPAQTLAKTGDESVATADGQKNDWRAIEWTRLAKPSQAMVSIYARGRDYHKVMRNRLQQLAERIEKEIGPFGHRAFTDSAPVLEVALAQKAGTGWRGKHTLLLDRDAGSLFFLGEIFVDVPLPVDPNPEREGAHCGQCTRCIGACPTGAIVAPYRVDARRCISYLTIELHGSIPEDMRPLIGNRIYGCDDCQLVCPWNKFAQAAPVADFDVRHGLDRATLVELFAWSAGDFDTRMQGSAIRRIGHERWLRNIAVAMGNALRASGLDAGEREAIVDALRAREDDSSELVREHVRWALEQS

SEQ ID NO: 75351 - protein, 410 aa, unidentified
  source 1..410: note = Caballeronia megalochromosomata
  REGION 1..410: note = tr|A0A149PWR4|A0A149PWR4_9BURK Epoxyqueuosine reductase OS=Caballeronia megalochromosomata OX=1399969; GN = queG PE=3 SV=1
MNRLPEHSVEVTTASSDAAAESVSESRVFDIDENALAELAQRVKVWGRELGFGAVGISDIDLTDAEQGLADWLEAGYHGEMDYMAKHGMKRARPAELVAGTRRVITARMAYLPAQTLAKTGDESVATADGQKNDWRAIEWSRLAKPSQALVSIYARGRDYHKVMRNRLQQLAERIESEIGPFGHRAFTDSAPVLEVALAQKAGNGWRGKHTLLLDRDAGSLFFLGEIFVDVPLPVDPHPEQEGAHCGQCTRCIDACPTGAIVAPYRVDARRCISYLTIELHGSIPEEMRPLIGNRVYGCDDCQLVCPWNKFAQAAPVADFDVRHGLDRATLVELFAWSAGDFDTRMQGSAIRRIGHERWLRNIAVGMGNALRSSALDAGEREAIVDALRAREDDSSELVREHVRWALEQS

SEQ ID NO: 75352 - protein, 414 aa, unidentified
  source 1..414: note = Caballeronia mineralivorans
  REGION 1..414: note = tr|A0A0J1D4M0|A0A0J1D4M0_9BURK Epoxyqueuosine reductase OS=Caballeronia mineralivorans PML1(12); OX = 908627 GN=queG PE=3 SV=1
MNRLPEHPVERGSASDDATANTRHFSIDDEAALAELALRIKAWGRELGFGAVGVSDADLTEAEEGLASWLEAGYHGEMDYMAKHAMKRARPAELVAGTRRVITVRMAYLPASTLSGKAQESAATADGQASDWRAAEWARIDDPAAAVVSVYARGRDYHKVMRSRLQQLADRIDAEIGAYGYRVFTDSAPVLEVELAQKAGTGWRGKHTLLLQRDAGSLFFIGEILVDIPLPADALTHPEHAPEHDGSHCGSCTRCIDVCPTGAIVAPYRVDARRCISYLTIELKGSIPEEMRPLIGNRVYGCDDCQLVCPWNKFAQAAPVADFDVRHGLDRASLVALFGWSALDFDERMQGSAIRRIGHERWLRNIAVAMGNALRSPALDANERLEIHNALNARAADASELVREHVEWALRQEA

SEQ ID NO: 75353 - protein, 410 aa, unidentified
  source 1..410: note = Caballeronia pedi
  REGION 1..410: note = tr|A0A158BYG3|A0A158BYG3_9BURK Epoxyqueuosine reductase OS=Caballeronia pedi OX=1777141 GN=queG PE=3 SV=1
MNRLPEHSVEFTTASSDAAAESVSESRVIELDENALAELAQRIKAWGRELGFGAVGISDIDLTDAEKGLNDWLEAGYHGEMDYMAKHGMKRARPAELVAGTRRVITARMAYLPAQTLAKQGDESVATADGQKNDWRAIEWSRLAKPSQAMVSIYARGRDYHKVMRNRLQQLAERIESEIGPFGHRAFTDSAPVLEVALAQKAGNGWRGKHTLLLDRDAGSLFFLGEIFVDVPLPVDPHPEQEGAHCGQCTRCIGACPTGAIVAPYRVDARRCISYLTIELHGSIPEELRPLIGNRVYGCDDCQLVCPWNKFAQAAPVADFDVRHGLDRATLVELFAWSAGDFDTRMQGSAIRRIGHERWLRNIAVGMGNALRSSALDAGEREAIVDALRAREDDSSELVREHVRWALEQS

SEQ ID NO: 75354 - protein, 390 aa, unidentified
  source 1..390: note = Caballeronia peredens
  REGION 1..390: note = tr|A0A158K2F9|A0A158K2F9_9BURK Epoxyqueuosine reductase OS=Caballeronia peredens OX=1777132 GN=queG PE=3; SV = 1
MSRAFTREEEAALAELAQRIKAWGRELGFGAVGISDIDLTDAEKGLADWLEAGYHGEMDYMAKHGMKRARPAELVAGTRRVITARMAYLPAQTLEKTGDESVATADGQKNDWRAIEWTRLAQPAQANVSIYARGRDYHKVMRHRLQQLAERIEGAIGPFGYRVFTDSAPVLEVALAQKAGNGWRGKHTLLLDRDAGSLFFLGEILVDVPLPADPHPEQDGAHCGQCTRCIGACPTGAIVAPYRVDARRCISYLTIELHGSIPEDMRPLIGNRVYGCDDCQLVCPWNKFAQAAPVADFDVRHGLDRATLVELFAWSAADFDTRMQGSAIRRIGHERWLRNLAVAMGNALRASGLDTGEREAIVEALTARADDASALVREHVRWALAQGSET

SEQ ID NO: 75355 - protein, 413 aa, unidentified
  source 1..413: note = Caballeronia ptereochthonis
  REGION 1..413: note = tr|A0A158DLK2|A0A158DLK2_9BURK Epoxyqueuosine reductase OS=Caballeronia ptereochthonis OX=1777144; GN = queG PE=3 SV=1
MNRLPEHSVEITTASSDAAAESVSESRAFTHGEEAALAELAQRIKAWGRELGFGAVGISDIDLTDAEKGLADWLEAGYHGEMDYMAKHGMKRARPAELVAGTRRVITARMAYLPAETLAKKGAESVATADGQKNDWRAIEWSRLAKPSQAMVSIYARGRDYHKVMRNRLQQLAERIEGEIGSFGYRAFTDSAPVLEVALAQKAGNGWRGKHTLLLDRDAGSLFFLGEIFVDVPLPVDPHPEQDGAHCGQCARCIGACPTGAIVAPYRVDARRCISYLTIELHGSIPEDLRPLIGNRVYGCDDCQLVCPWNKFAQAAPVADFDVRHGLDRATLVELFGWSAEDFDARMQGSAIRRIGHERWLRNIAVAMGNALRASIGESERAAIVEALQARADDPSALVREHVHWALAQGRQT

SEQ ID NO: 75356 - protein, 406 aa, unidentified
  source 1..406: note = Caballeronia sordidicola
  REGION 1..406: note = tr|A0A242N2H0|A0A242N2H0_9BURK Epoxyqueuosine reductase OS=Caballeronia sordidicola OX=196367 GN=queG; PE = 3 SV=1
MEHERTSDDAAENLRHFRIDDKAALAELALRIKAWGRELGFGAVGVSDADLTDAEEGLASWLEAGYHGEMDYMAKHAMKRTRPAELVAGTRRVITVRMAYLPASTLDGKARESTSTAGAEPLDWRAAEWARIDDPAAAVVSVYARGRDYHKVMRSRLQHLADRIEAEIGPFGYRVFTDSAPVLEVELAQKAGNGWRGKHTLLLQRDAGSLFFIGEILVDIPLPADAETHPEHAPEHEGSHCGSCTKCIDVCPTQAIIAPYRLDARRCISYLTIELKGSIPEEMRPLIGNRVYGCDDCQLVCPWNKFAQAAPVADFDVRHGLDRASLVTLFGWSAAEFDERMQGSAIRRIGHERWLRNIAVGMGNALRSTSLDADSRSEIRNALHARAGDASELVREHVQWALRQAA

SEQ ID NO: 75357 - protein, 406 aa, unidentified
  source 1..406: note = Caballeronia sordidicola
  REGION 1..406: note = tr|A0A226WKI7|A0A226WKI7_9BURK Epoxyqueuosine reductase OS=Caballeronia sordidicola OX=196367 GN=queG; PE = 3 SV=1
MERESASDDAVAHTRHFRLDDEAALAELALRIKAWGRELGFGAVGISDADLTEAEEGLASWLEAGYHGEMDYMAKHAMKRARPAELVAGTRRVITVRMAYLPASTLDGKARESAATADGQAIDWRAAEWARLDDPAAAVVSVYARGRDYHKVMRSRLQQLAERMEAEIGAYGYRVFTDSAPVLEVELAQKAGNGWRGKHTLLLESDAGSLFFIGEILVDIALPPDALTNPDQAPEHDGAHCGSCTRCIDVCPTGAIVAPYRVDARRCISYLTIELKGSIPEDMRPLIGNRVYGCDDCQLVCPWNKFAQAAPVADFDVRHGLDRASLVMLFGWSDHDFDERMQGSAIRRIGHEQWLRNIAVAMGNALRSPALGADERSAIRNALNGRVADDSALVREHVEWALRQQA

SEQ ID NO: 75358 - protein, 416 aa, unidentified
  source 1..416: note = Caballeronia telluris
  REGION 1..416: note = tr|A0A158I0U6|A0A158I0U6_9BURK Epoxyqueuosine reductase OS=Caballeronia telluris OX=326475 GN=queG PE=3; SV = 1
MNRLPEHSTEVAAASGNAADDARVFDIRDEAALAELAQRIKAWGRELGFGAVGISDADLTDAEKGLASWLEAGYHGEMDYMAKHGMKRARPAELVAGTRRVITARIAYLPASTLESAGDESVMTVDGQRNDWRAVEWSRLADPAAAVVSIYARGRDYHKVMRNRLQQLAERIEAEIGRFGYRAFTDSAPVLEVELAQKAGVGWRGKHTLLLQRDAGSLFFLGEIYVDIPLPTDAETHPSSAPEHEGAHCGQCTRCIAACPTGAIVAPYRVDARRCISYLTIELAGSIPEDLRPLIGNRVYGCDDCQLVCPWNKFAQAAPVADFDVRHGLNEASLVDLFRWSAADFDVRMQGSAIRRIGYERWSRNIAVAMGNALRAKLEPALRAEIVDALRSRADDASALVREHVEWALRGAAIEA

SEQ ID NO: 75359 - protein, 410 aa, unidentified
  source 1..410: note = Caballeronia temeraria
  REGION 1..410: note = tr|A0A158C3M9|A0A158C3M9_9BURK Epoxyqueuosine reductase OS=Caballeronia temeraria OX=1777137 GN=queG; PE = 3 SV=1
MNRLPAHSVEVTTASSDAAAESVSESRVFDLDENALAELAQRIKAWGRELGFGAVGISDIDLTDAEKGLNDWLEAGYHGEMDYMAKHGMKRARPAELVAGTRRVITARMAYLPAATLAKKGAESVATADGQKNDWRAIEWSRLAKPSQAMVSIYARGRDYHKVMRNRLQQLAERIEQEIGPFGHRAFTDSAPVLEVALAQKAGNGWRGKHTLLLDRDAGSLFFLGEIFVDVPLPVDPHPEQEGAHCGQCTRCIGACPTGAIVAPYRVDARRCISYLTIELHGAIPEAMRPLIGNRVYGCDDCQLVCPWNKFAQAAPVADFDVRHGLDRATLVELFAWSAQDFDTRMQGSAIRRIGHERWLRNIAVAMGNALRAPSLDAGEREAIADALNARADDPSELVREHVRWALEQA

SEQ ID NO: 75360 - protein, 409 aa, unidentified
  source 1..409: note = Caballeronia terrestris
  REGION 1..409: note = tr|A0A158JSV3|A0A158JSV3_9BURK Epoxyqueuosine reductase OS=Caballeronia terrestris OX=1226301 GN=queG; PE = 3 SV=1
MEVTTASGNAAADSRAFDIHDEAALAELAQRIKTWGRELGFGAVGISDADLTDAEEGLASWLEAGYHGEMDYMAKHGMKRARPAELVAGTRRVITARIAYLPASTLGLTGDESVMTADGQRNDWRAIEWSRLADPTAAVVSIYARGRDYHKVMRNRLQQLAERIEGEIGGFGYRAFTDSAPVLEVALAQKAGVGWRGKHTLLLQRDAGSLFFLGEIYVDMPLPPDTVTNPLGAPEHDGAHCGQCTRCIAACPTGAIVGPYRVDARRCISYLTIELKGSIPEDLRPLIGNRVYGCDDCQLVCPWNKFARAAPVADFDVRHGLDRASLVELFRWSADDFDVRMQGSAIRRIGHERWLRNIAVAMGNALRAEIEDDERAGIIEALQARADDPSPVVREHVEWALRYGETPGE

SEQ ID NO: 75361 - protein, 410 aa, unidentified
  source 1..410: note = Caballeronia turbans
  REGION 1..410: note = tr|A0A158H4U7|A0A158H4U7_9BURK Epoxyqueuosine reductase OS=Caballeronia turbans OX=1777134 GN=queG PE=3; SV = 1
MNRLPEHSVEVTTASCDAAAESVSEPRVFDIDENALAELAQRIKVWGRELGFGAVGISDIDLADAEKGLTDWLEAGYHGEMNYMAIHGMKRARPAELVAGTRRVITVRMAYLPAQTLAKTGDESVATADGQKNDWRAIEWSRLAKPSQAMVSIYARGRDYHKVMRNRLQQLAERIEKEIGPFGHRAFTDSAPVLEVALAQQAGNGWRGKHTLLLDRDAGSLFFLGEIFVDVPLPVDPHPEREGAHCGQCTRCIGACPTGAIVAPYRVDARRCISYLTIELHGSIPEDMRPLIGNRVYGCDDCQLVCPWNKFAQAAPVADFDVRHGLDRATLVELFAWSAADFDTRMQGSAIRRIGHERWLRNIAVAMGNALRASGLDAGERQAIVDALEAREDDPSELVREHVRWALEQS

SEQ ID NO: 75362 - protein, 414 aa, unidentified
  source 1..414: note = Caballeronia udeis
  REGION 1..414: note = tr|A0A3M0V4M3|A0A3M0V4M3_9BURK Epoxyqueuosine reductase OS=Caballeronia udeis OX=1232866 GN=queG PE=3; SV = 1
MNRLPEHPVERESASDDATANTRHFSIDDEAALAELALRIKAWGRELGFGAVGVSDADLTEAEEGLASWLDAGYHGEMDYMAKHAMKRARPAELVAGTRRVITVRMAYLPASTLSGKAQESAATADAQASDWRAAEWARIDDPAAAVVSVYARGRDYHKVMRSRLQQLADRIEAEIGAYGYRVFTDSAPVLEVELAQKAGTGWRGKHTLLLQRDAGSLFFIGEILVDIPLPADAVTNPEHAPEHDGSHCGSCTRCIDVCPTGAIVAPYRVDARRCISYLTIELKGSIPEEMRPLIGNRVYGCDDCQLVCPWNKFAQAAPVADFDVRHGLDRASLVALFGWSALDFDERMQGSAIRRIGHERWLRNIAVAMGNALRSPALDANARLEIHNALNARAADASELVREHVEWALRQEA

SEQ ID NO: 75363 - protein, 418 aa, unidentified
  source 1..418: note = Caballeronia udeis
  REGION 1..418: note = tr|A0A158F0P2|A0A158F0P2_9BURK Epoxyqueuosine reductase OS=Caballeronia udeis OX=1232866 GN=queG PE=3; SV = 1
MNRLPEHPVERESASDDAAADTRHFRFDDEAALAELALRIKAWGRELGFAAVGVSDADLTEAEEGLASWLEAGYHGEMDYMAKHAMKRARPAELVAGTRRVITVRMAYLPASTLAGKARESAATADGQATDWRAAEWARIADPAAAVVSVYARGRDYHKVMRTRLQQLAERIEAEIGTYGYRVFTDSAPVLEVELAQKAGTGWRGKHTLLLQSDAGSLFFIGEILVDIPLPADADVNPDQAPEHDGAHCGSCRRCIDVCPTGAIVAPYRVDARRCISYLTIELKGSIPEDLRPLIGNRVYGCDDCQLVCPWNKFAQAAPVADFDVRHGLDRASLVMLFGWSAHDFDERMQGSAIRRIGHERWLRNIAVAMGNALRSPVLGADERSAIRDALNARAGDASELVREHVEWALRQEASPHV

SEQ ID NO: 75364 - protein, 356 aa, Caenimonas sp.
  REGION 1..356: note = tr|A0A562ZX29|A0A562ZX29_9BURK Epoxyqueuosine reductase OS=Caenimonas sp. HX-9-20 OX=2596921 GN=queG; PE = 3 SV=1
MRDWARELGFSQIGVAGVDLSSAEPGLLAWLANGFHGEMDYMARHGVRRARPAELVPGTVSVITARMDYLPATTPEGWQAIEFERLQRSGEAIVSLYARGRDYHKVLRARLQALSERMAAALGPFGHRVFTDSAPVLEVELAARSGQGWRGRHTLVLNREGGSMFFLGEIYVDLALPVTETVADHCGTCAACIAVCPTQAIVAPYRLDARRCISYLTIEHAGPIPAELRPLMGNRIYGCDDCQLACPWNKFAATSPLPDFEARPGLAGASLVELFAWTEEEFLRRTEGSPIRRIGHERWLRNIAVALGNALRAGGGYDVRQALQARAGHPSTLVREHVVWALAQQPESERQAQHAQ

SEQ ID NO: 75365 - protein, 398 aa, Caenispirillum bisanense
  REGION 1..398: note = tr|A0A286GY52|A0A286GY52_9PROT Epoxyqueuosine reductase OS=Caenispirillum bisanense OX=414052 GN=queG; PE = 3 SV=1
MSIKQAITDEARRLGFDDVRFTRAMLPAEVRANLDAYLAEGRHADMAWMAETAERRAHPQALWPEAVTGIVLGANYGPGLDPRTLQDHPDRGHISVYARNRDYHDWIKGRMKTLGQWLIARFGGDIKVFVDTAPVMEKPLAAQAGLGWQGKHTNLVSRGFGSWLFLGEILTTLDVEPDPPESDHCGSCSRCLPACPTGAITAERQIDARRCISYLTIENKGPIPRELRSLVGNRIYGCDDCLAVCPWNRFARPTPHAAFQPRAEFMAPRLADLAQLDDAGFRSLFTVSPVKRIGRDRFIRNVFVAIGNSGDRTLAPLARKAACTDPSPLVRGAAVWCLARLVDPEGYISCYENFRDHEGDPSVRDEWDAAYPSARAAATTTCGTLGGPRGPSEDEGRG

SEQ ID NO: 75366 - protein, 398 aa, unidentified
  source 1..398: note = Caenispirillum salinarum
  REGION 1..398: note = tr|K9HPL5|K9HPL5_9PROT Epoxyqueuosine reductase; OS = Caenispirillum salinarum AK4 OX=1238182 GN=queG PE=3; SV = 1
MDARQAITHKAHELGFDAVRFTRAALPARVRDHLNRFVAEGRHADMGWMADTAERRGDPQSLWPQAVTAVSLGVNYGPGHDPRVLQDHPGRGHISVYARNRDYHDWVKGRMKTLGQWMASRFGGDLKVFVDTAPVMEKPLAEQAGLGWQGKHTNLVSRDFGSWLFLGEILTTLEVEPDAAESDHCGSCTRCITACPTDAITAAGEIDARLCISYLTIENKGPIPRRLRPMMGNRIYGCDDCLAVCPWNRFSLPTRHDAFKPRAELAAPRLGDLAELDDAAFRTLFSASPIKRIGRDRFMRNVFIAIGNSQDEKLIPRVRKAATDDPSPLVRGTAVWALSRLEGPEGYISIYTDHRDRENDPIVQEEWDAGYPSAQAPEPPGHGILTTAHHSQETEGRG

SEQ ID NO: 75367 - protein, 394 aa, Caldalkalibacillus thermarum
  REGION 1..394: note = tr|F5L4R6|F5L4R6_CALTT Epoxyqueuosine reductase; OS = Caldalkalibacillus thermarum (strain TA2.A1) OX=986075; GN = queG PE=3 SV=1
MGLAQTEQRIDLRQLKQEIIEYSRSIGIDKIGFASADPFDELKQRLLRHRELGYESGFEEPDIDKRTTPTKILPEAKSIIAIALAYPSRLKNPPRSRKGAYRGILCRASWGLDYHHILRDKLIKLEAFIKSKVPDARCESMVDTGALSDRAVAERAGIGWSGKNTAIITKEFGSWVYLGEMLTSIPFEPDQPVTESCGSCTKCLDACPTGALVQPGQLDSTKCLAYLTQVKNFVPAAFREKMGNRLYGCDTCQVVCPVNHKKNFTHHPEMEPDPEVAKPLLKPLLRMSKREFREKFGPTSSAWRGKKPLQRNAIIALGNFKDESAVPELIDLLHHDPRPAIRGTAAWALGKIGTEEGRQALEEANRQEQDEQVLAEIEQALGMFEETHSSEGRQ

SEQ ID NO: 75368 - protein, 373 aa, Caldanaerobacter subterraneus
  REGION 1..373: note = tr|A0A101E6J2|A0A101E6J2_9THEO Epoxyqueuosine reductase OS=Caldanaerobacter subterraneus OX=911092; GN = queG PE=4 SV=1
MSCISKKEITDFAKAVGIDLIGFASADCLKGYKSFLEERKSLGYECPIEERMPDKRVSPEFILPEVKTIISVALSYNIEYQVKLPSKSFGIISKSSWGMDYHLVLKEKMKRVCEFVKSKCPDVKTVSLVDNNPLLERAIAYHAGIGWFGKNGLIINEEYGSYLFLGEILINEYFEPDTPQESKCGDCDLCMKACPTKAIEKPYIVNANKCLSFITVKKGEIEEEFLKKLGRRIYGCDTCQEVCPFNKEAKKVKREEFTPSKLLPRPNLIEILNMSNKEFKEIFGPTASSWRGKSVIIRNAIIACVNTKDQECIEPIKKLLKSPSPLLRGYSAWAISYLEERDKAIEEIKEALNKEKDGFAIKMMAEALQKLER

SEQ ID NO: 75369 - protein, 373 aa, Caldanaerobacter subterraneus
  REGION 1..373: note = tr|U5CTU9|U5CTU9_CALSX 4Fe-4S ferredoxin-type domain-containing protein OS=Caldanaerobacter subterraneus subsp. yonseiensis KB-1 OX=1388761 GN=O163_00895 PE=4 SV=1
MSCISKKEITDFAKAVGIDLIGFASADCLKGYKSFLEERKSLGYECPIEERMPDKRVSPEFILPEVKTIISVALSYNIEYQVKLPSKSFGIISKSSWGMDYHLVLKEKMKRVCEFVKSKCPDVKTVSLVDNNPLLERAIAYHAGIGWFGKNGLIINEEYGSYLFLGEILINKYFEPDTPQESKCGDCDLCMKACPTKAIEKPYIVNANKCLSFITVKKGEIDEEFSRKLGRRIYGCDTCQEVCPFNKKGKKVKKEEFIPSKLLPRHSLIHILNMTNKEFEEIFGPTASSWRGKSVIIRNAIIACVNTKDQECIEPIKKLLKSPSPLLRGYSAWAISYLEERDKAIEEIKEALNKEKDGFAIKMMAEALQKLER

SEQ ID NO: 75370 - protein, 345 aa, Caldanaerobius fijiensis
  REGION 1..345: note = tr|A0A1M4YQJ1|A0A1M4YQJ1_9THEO Epoxyqueuosine reductase OS=Caldanaerobius fijiensis DSM 17918 OX=1121256; GN = SAMN02746089_01263 PE=4 SV=1
MDSVEIKDEIKNFAYSLGFDLVGFTTAEAFNAEILYQRKAEGYLSGLEEKDIKKRVTPRLSLNTAKSIIALGLSYNIPIKYVPQRGYAIISRSAYGKDYHKVMSDMMLKLVKYIEKMYNVKSIYMVDTGPLVDRMVAYRAGIGWYGKNCSIINDEYGSWIFLGEILTELELPPDSPVESRCGDCDLCLKACPTGALVSPYTLNANRCLSYNTVKKGILPDDIKDKMGMRIYGCDTCQEVCPVNKRAKYTNKNEFIPQPPMPLIPLEDVAKMDKKIFEEIFKHTSAGWRGKTTLQRNGIIAMGNSGDSRYLEILESFLNDSRPGISDAARWSLEKIRSRANGQGNS

SEQ ID NO: 75371 - protein, 336 aa, Caldanaerovirga acetigignens
  REGION 1..336: note = tr|A0A1M7LYW6|A0A1M7LYW6_9FIRM Epoxyqueuosine reductase OS=Caldanaerovirga acetigignens OX=447595; GN = SAMN05660826_02082 PE=4 SV=1
MFDRKEQIRNYAKQIGFDKIGFASAEPFWEEKEILMERKRAGLFSPFEESDIELRCHLEKHLPGAKTIICFAVSYFFEKEDVPGENSSEPLGIISKYALMRDYHDVLFQKLKLMADFIYSMWGAKSKIFVDSGGLLERAAARRAGIGWIGQNTCLFTEEFGSWVFLGELITDLEIEPDMPCRNLCDNCGKCVKACPTGALEEPYRLNPFRCLSYITQMKGTIPEEFRDIMGLRLFGCDICQEACPKNKKIILVKHEEFMLDYQIERRLTKLIFMDKVEFDKNFKLTPIAWRGRNVLRRNATVALANAGVGCKRYFEKLLSDPSPLIREHAMWALKR

SEQ ID NO: 75372 - protein, 369 aa, unidentified
  source 1..369: note = Calderihabitans maritimus
  REGION 1..369: note = tr|A0A1Z5HNX9|A0A1Z5HNX9_9THEO 4Fe-4S ferredoxin-type domain-containing protein; OS = Calderihabitans maritimus OX=1246530 GN=KKC1_03860 PE=4; SV = 1
MSLSQEIKNYAEGLGINRVRICGPEPFEELLPLLQKRKEAGYGTPFEERDLQLRIEPRRLLPEVRSIIAVSVSYGGKAVGSRVPQELKPGISYHAWGEDYHRALRRQLEQLVDFLEIRVGRKVQSLICVDATPLVERAVARRSGLGWYGKNCSLITPDEGSWVFLGEILVDVELDRDYPLDHRGCGNCSRCLEACPAGALRAPYTLDSSRCLSYISQKSGFIPEEFRSLLGTRLYGCDTCQLVCPYNHSPEPVSQASIARPERFTAELVKVLSLNRQEFYQMFGFSVLAWRGKNVLARNAAVALGNLGDEDAVPGLKKALLEHPSPTVRGHAAWALGRIGGSSAGEALVRAKKMETDSRVLKEIERALV

SEQ ID NO: 75373 - protein, 377 aa, unidentified
  source 1..377: note = Caldibacillus debilis
  REGION 1..377: note = tr|A0A3E0K7H8|A0A3E0K7H8_9BACI Epoxyqueuosine reductase OS=Caldibacillus debilis OX=301148 GN=queG PE=3; SV = 1
MEALNTLKKEIIAYSKEIGIDKIGFTTADPFTELKNRLIRQRELNYQSGFEEPDIEKRTNPRLSLEGAQSIISIAVCYPSKMKNPVRGNREERRGIFARSSWGEDYHRVLNDKLEKLGQFIRSKVPDARYKPMVDTGPLADRAVAERAGIGWSGKNCAIITPEFGSYVYLGELITNIPFEPDAPIEDRCGSCNRCLEACPTGALVRAGQINAKICISYLTQTKEDIPEPYRKKIGNRLYGCDTCQVVCPYNKGKDFHFHPEFEPDPEAAKPLLKPLLSISNREFKERFGHMSGAWRGKKPIQRNAIIALAHFKDVTAVEDLGKVLAEDPREVIRKTAAWALGKIGGERAKEILSSARDREKSEQVLAEIGRALKMLQ

SEQ ID NO: 75374 - protein, 377 aa, unidentified
  source 1..377: note = Caldibacillus debilis
  REGION 1..377: note = tr|A0A420VIX2|A0A420VIX2_9BACI Epoxyqueuosine reductase OS=Caldibacillus debilis GB1 OX=1339248 GN=queG; PE = 3 SV=1
MEALNTLKKEIIAYSKEIGIDKIGFTTADPFTELKNRLIRQRELNYQSGFEEPDIEKRTDPRLSLEGAQSIISIAVCYPSKMKNPVRGNREERRGIFARSSWGEDYHRVLNDKLEKLGQFIRSKVPDARYKPMVDTGPLADRAVAERAGIGWSGKNCAIITPEFGSYVYLGELITNIPFEPDAPIEDRCGSCNRCLEACPTGALVRAGQINAKICISYLTQTKEDIPEPYRKKIGNRLYGCDTCQVVCPYNKGKDFHFHPEFEPDPEAAKPLLKPLLSISNREFKERFGHMSGAWRGKKPIQRNAIIALAHFKDVTAVEDLGKVLAEDPREVIRKTAAWALGKIGGERAKEILSSARDREKSEQVLAEIGQALKMLQ

SEQ ID NO: 75375 - protein, 373 aa, unidentified
  source 1..373: note = Caldicoprobacter faecalis
  REGION 1..373: note = tr|A0A1I5SX07|A0A1I5SX07_9FIRM Epoxyqueuosine reductase OS=Caldicoprobacter faecalis OX=937334; GN = SAMN05444406_10391 PE=4 SV=1
MENLDILKAELIERGKHLGFPVIGITDARPFDLWCQAVEVRRTMDSKVERVLSRLTPYPEDLMPDARAIVVAVHPYLPYPEEFPEGVPRYSAHYVEYPGARKAVEELARVIGQRGYKVMVEPPLPAKAAAYRAGVGTFGKNGLIYVGEYGSWVTLHLILTDAPLSCDSQSQDLCLCGECNRCIQACPAHAIADDGAVLPGRCLRAYMLSSEFVPVDIREKLGTRLLGCDICQMVCHRNSRITRQARLPEDDHLRPFDVYALIKALVENDRKSIEAVASLIGSNYARPQRLLSSAIIVAGNFGQPKFVPLLIKTLKHPHPPIRAYSAWALGKIGGRESMNALADALKDETDERVIQEIKRAQEIAGLSECRSDA

SEQ ID NO: 75376 - protein, 384 aa, Caldicoprobacter oshimai
  REGION 1..384: note = tr|A0A2W4KHH4|A0A2W4KHH4_9FIRM 4Fe-4S ferredoxin-type domain-containing protein; OS = Caldicoprobacter oshimai OX=551788 GN=DIU64_05515 PE=4; SV = 1
MQKLLKKGAAVVENLDILKAELIERGKHLGFPVIGITDARPFDLWCQAVEVRRTMESKVERVLSRLTPYPEDLMPDARAIVVAVHPYLPYPEEFPEGVPRYSAHYVEYPGARKAVEELARVIGQRGYKVMVEPPLPAKAAAYRAGVGTFGKNGLIYVGEYGSWVTLHLILTDAPLSCDSQSQDLSLCGECNRCIQACPAHAIADDGAVLPGRCLRAYMLSSEFVPVDIREKLGTRLLGCDICQMVCPRNSRITRQARLPEDDHLRPFDVYALIKALVENDRKSIEAVASLIGSNYARPQRLLSSAIIVAGNFGQPKFVPLLIKTLKHPHPPIRAYSAWALGKIGGRESMNALADALKDETDERVIQEIKRAQEIAGLSECRSDA

SEQ ID NO: 75377 - protein, 405 aa, Caldilinea aerophila
  REGION 1..405: note = tr|I0I483|I0I483_CALAS Putative iron-sulfur binding protein OS=Caldilinea aerophila (strain DSM 14535 / JCM 11387 / NBRC 104270 / STL-6-O1) OX=926550; GN = CLDAP_20310PE=4 SV=1
MQLSPVLIQAIRRQAHQLGFDFCSFAPAGEAPHADFFDAWIEAGRAGEMSYLERHREKRRFPALLAEPPSPPFETMVVLAVDYHQFDLPPEVRNDPSRGIIASYAWGDDYHEILRPLLYELDAFIRSQTGRSTLGKCLVDTGPVLERDWAAVAGIGFTGKNCCTIRPSVGSWLFLAVILIPERLPAGWTSRREEGREEEGKRPMTCGRCTRCLSACPTDAFVGPYELDPLRCIAYWTIEARSIIPRSLRSAFGNRIFGCDICQEVCPYNRRLGERTPRLAGLRARHERVAPPLLEGFDPAHPYWLNQEAFNKQFARSPVRRARRGGMLRNVCVALGNWGAPATVPALAHALRDPEPVARAHAAWALGRVLARQPHEQAANLLAMAMEQETDSRVREEIHLALHGV

SEQ ID NO: 75378 - protein, 206 aa, unidentified
  source 1..206: note = Caldilineae bacterium
  REGION 1..206: note = tr|A0A3M1G293|A0A3M1G293_9CHLR DUF1730 domain-containing protein (Fragment) OS=Caldilineae bacterium OX=2420332 GN=D6790_04565 PE=4 SV=1
MSESELAVEIKAEAERLGFDACRIAAVDAPPHLAFFQRWLALGRAGEMTYLARHVAKRANPARLAEDAPPFRSLIVLAVDYHQFDLPREVVADPSRGLIASYAWGNDYHDLIRPALHELDGFIRAHTGRTTRGKALVDTGPVLERDWAYKSGLGFTGKNCCTIRPGLGSWLFLAVLLVPEALPADPPPQIVDAPQISPDDVAAGLA

SEQ ID NO: 75379 - protein, 402 aa, unidentified
  source 1..402: note = Caldilineae bacterium
  REGION 1..402: note = tr|A0A3M1ER36|A0A3M1ER36_9CHLR tRNA epoxyqueuosine(34) reductase QueG OS=Caldilineae bacterium; OX = 2420332 GN=queG PE=4 SV=1
MKSARRAGQTFKTSASHLMAEQLRFLTKRLLLHSVRYCSPNAANGKTMTRQILAQRIKERARAMGFTGAAIVPATPAEHARYYRAWLEAGYHAEMAYLARPDAVARRANMARTVPNAQSVVVVTANYHTQHLPPSILNDPSRGIIASYAWGVDYHDLLTPRLYELQAWIASQVEDPLHGRAYVDTGPVLERALAARGGLGFIGKNTCLIDPLRGSYLFVGEIILDCPLPFDAPSPRGTCGRCTRCLSACPTGAFPAPHTLDSRLCISYLTIELKGEIPVALRPKLGNRIFGCDICQEVCPYNRRFAMPTDEPAFRATLERAAPPLLELVALDEAGFRERFRGSPVRRAKRRGLLRNVCVALGNWGDPAAIPALQRARHDPEPLIRHHAAWALAQIAARRAKS

SEQ ID NO: 75380 - protein, 374 aa, unidentified
  source 1..374: note = Caldisalinibacter kiritimatiensis
  REGION 1..374: note = tr|R1CT77|R1CT77_9CLOT Epoxyqueuosine (OQ) reductase QueG OS=Caldisalinibacter kiritimatiensis OX=1304284; GN = L21TH_2050 PE=4 SV=1
MNLKDYIIDKAKGIGIDIIGFTDAEPFDEVKEFLIQRKEKGFHTEFEEEDLEKRYNPKLHLPSAKSIIVIGLSYNVDFKLKRDNKLVGRLSKSSWGIDYHKVVKEKIQLLVEEIRKIIDFDYKAFVDTGPLIDRYIAEKSGIGWYGKNCSIINDEFGSFIFLGYILTDLDLQKDNSLKSKCEDCRLCIDACPTNAIQEDYKINATRCVSYLTQTKKRIPYELRDKMGVKIYGCDTCQLVCPKNKNVKKGQIKEFIPHKTSGYLDLLELLKISNKEFKKKYGHISGSWRGKNILKRNAIIALGNIGDKKYLDLIEKQLNDPSPMIREYAAWAILKIDIKRGKELLKQRLQLEKDKEVKEELEKLLKYFKVENKLT

SEQ ID NO: 75381 - protein, 317 aa, Caldithrix abyssi
  REGION 1..317: note = tr|H1XPY3|H1XPY3_9BACT Epoxyqueuosine reductase; OS = Caldithrix abyssi DSM 13497 OX=880073 GN=queG PE=3 SV=1
MTKENLTRAIKQIAMELKFDRVGIAQAEKTPGAAQLDEWLAQGKHGEMLWMEKYRDIRKDIRKFFPQARSIIMVALNYYTPYQIKDNPHTAKISRYAWGSDYHKILKKKLKRFLSELKKIDDGMEGRAFVDSAPVMEKQWAVLAGIGWQGKNTNVLTRDMGSWFFLGGLAVNRELIYDRPLQDYCGSCNACVEACPTDALKPYELDANRCISYLTIEYRDKPIPTELGGKLHNWVFGCDICQDVCPWNRFARETEEQRFHPKQPVLVNPPLTFLQKLSPKDFDMLFAGTPVRRARYANFKRNVQTVMDSRPGQDKKA

SEQ ID NO: 75382 - protein, 361 aa, Caldithrix sp.
  REGION 1..361: note = tr|A0A523J479|A0A523J479_9BACT Epoxyqueuosine reductase OS=Caldithrix sp. OX=1962856 GN=queG PE=3 SV=1
MTLTKKIKHKAHLLGFELVGVAPVEPVPELSFYKEWIEAGYAGKMEYLARNPDKRTDVREVVAEAKSVVVCALIYHTRHPLSTEQNDPGRGWISRYAWGDDYHNVIQEKLYELIDFIKAESPDEVISRLYVDTGPVVDRVFAKYAGIGWFGKNTCIINQQKGSWFFLGEIITNLELDYDSTVPDRCGTCNRCIEACPTDAILEPYVLDSRLCISYLTIELRDEIPVELREPMGNHIFGCDICQDVCPWNHRAAATDKPAFQPREGLLNPDLEEIAKLSIEEFREKFRQSPVKRAKYAGFLRNVAVAMGNSGNSKFLSVLEELSEHEEPLVSGHAKWAVEKIHGVEENNLLANTQREESLST

SEQ ID NO: 75383 - protein, 360 aa, Caldithrix sp.
  REGION 1..360: note = tr|A0A523HR19|A0A523HR19_9BACT Epoxyqueuosine reductase OS=Caldithrix sp. OX=1962856 GN=queG PE=3 SV=1
MANVTILAPDFGIQNQVTLTDKIKQKALALGFDLAGVAPVGPVPELSFYRDWIDAGYAGKMAYLEKNIDKREDITRVVPEAKSVIVCARIYNTNQPLSVEQTDRTRGWISRYSWGDDYHDVLQKMLFELLDFITLAAQDEVIGRIYVDTGPVIDRVYAKYAGIGWFGKNTCLINQEKGSWFFIGEIITNLELAYDSPTPDRCGTCTRCIDACPTDAILEPYVLDARQCISYLTIELKEDIPVELREGIGNHVFGCDICQDVCPWNRKAAETDSDAFKPREGMMNPELDTLANLSLEEFRQRFQGSPIKRTKYKGFLRNVAVALGNSGESRFLPLLQKLAQNEEPLIARHAAWAIKKLKQS

SEQ ID NO: 75384 - protein, 317 aa, unidentified
  source 1..317: note = Calditrichaeota bacterium
  REGION 1..317: note = tr|A0A3M1NLZ2|A0A3M1NLZ2_9BACT Epoxyqueuosine reductase OS=Calditrichaeota bacterium OX=2212469 GN=queG; PE = 3 SV=1
MDDLVTRIKEKGMALGFSAVGICDAAPLEEESRKLDLWLSRKFHGTMEWMERTRSQRVDPRSYFPEAKSIVVVAVNYFRKDEPLKLPQDKASISIYARGRDYHKVIRKKLKALLKEIQQWVPGVKGRVCVDSFPIMEKSLAVKAGLGWIGKHTNLILKSKGSYFFLGELLLNISIPSDTPFTFDHCGSCHRCQEACPTDALSEAYVLDSRKCISYLTIEHKEGIDENLKPGIGNWVFGCDICQIVCPWNKFSESTQISDFHTRIPESWLPLERLEKITSDEFEHLFQGTPVKRAGYENFKRNVGIALTNYRATVKRS

SEQ ID NO: 75385 - protein, 320 aa, unidentified
  source 1..320: note = Calditrichaeota bacterium
  REGION 1..320: note = tr|A0A3M2FQ66|A0A3M2FQ66_9BACT Epoxyqueuosine reductase OS=Calditrichaeota bacterium OX=2212469 GN=queG; PE = 3 SV=1
MNPFELTRIIKEKARALGFDKVGVAGAGPLPKADFLKEWLSRGHHGQMTWMENYVEKRMDVRKLYPQARSVVAVAMNYYTPFEHNPAPDSAKISRYAWGRDYHRIMKKKLKHLLREIRELDPELDGRLFVDTAPIQDKLWAEQAGIGWQGKNTNIISREYGSWLFLGELVLNRELVYDRPIRDFCGSCTACIDACPTDALTPYRLAAEKCLSYITIEMWDRPIPASIQSRMEGWVFGCDICQDVCPWNRFQKPSEEPAYYPENANHHTTVKELEALTEETYKTRFKKSPVYRAGYKNFMRNVRALKKEGALSPEHDRDRK

SEQ ID NO: 75386 - protein, 119 aa, unidentified
  source 1..119: note = Calditrichales bacterium
  REGION 1..119: note = tr|A0A524LCC3|A0A524LCC3_9BACT DUF1730 domain-containing protein (Fragment) OS=Calditrichales bacterium OX=2528038 GN=E4H13_11955 PE=4 SV=1
MTSLTAQIKELAYASGFDKVGITAARQPGKSAYLTEWLNRSYHGTMNWMDTHRSKRISIQEFVPGARSVICVACNYNAPDIHSSDPARGKISRYAWGEDYHKIIKKKLKRLLSEIKKYD

SEQ ID NO: 75387 - protein, 331 aa, Caloramator australicus
  REGION 1..331: note = tr|I7LKH2|I7LKH2_9CLOT Iron-sulfur cluster-binding protein OS=Caloramator australicus RC3 OX=857293; GN = CAAU_2382 PE=4 SV=1
MIKEKIINYAKHIGIEYIGFSSINFKDEFVNRLREKRLNGHLSGFEEQDEYKRTNVKNIMENAKSFISIAVPYRTMEIDYNKPYFSKSSLGLDYHKVLYNKLNKIQIYLKEEFNANSFYFCDIGPLHDREIAYMSGIGFYGKNTNIYTEKYGSFVFLGELVTDIYIEPDIPIESKCGDCEICMKACPTGAIERPYYVNSKKCLSYITQKKDGLTYEEMAKMGNRIYGCDTCQDVCPLNKRALFSNIKDFMPEEWNINIVAEDFLNMSNKRFKETYQKTSGGWRGKKILQRNLIIALANSRTNEGHAKIKSLINDDYFSYYVEYYLKRMGGY

SEQ ID NO: 75388 - protein, 342 aa, Caloramator fervidus
  REGION 1..342: note = tr|A0A1H5SJN5|A0A1H5SJN5_9CLOT Epoxyqueuosine reductase OS=Caloramator fervidus OX=29344; GN = SAMN05660865_00380 PE=4 SV=1
MYRKKLWGEKMIKEKIKEYANKIGIEYIGFSSVEFSFDFIERLKERRLNGHLSGFEEKDEFKRVDVSSILSNAKSFISIAVPYRTVDLDYSRPYLSKSSLGIDYHIVLKNKLELLKVFLKEELGAESIYFCDIGPLHDREIAYKCGIGFYGKNTNIYTKKYGSFVFLGELITDLYIEPDYPIESKCGSCDICIKSCPVGAIEKPFYLNSKKCLSFITQKKETLTYDEMIKMGSRIYGCDICQDVCPFNKKAEYSNIVDFKPESWNINIEVERFLTMSNKQFKETFQKTSAGWRGKKVLQRNLIIALANLKSKEGYNKIKSLIEDEYFSYYVKYYLNRLGEFK

SEQ ID NO: 75389 - protein, 330 aa, Caloramator mitchellensis
  REGION 1..330: note = tr|A0A0R3JWP5|A0A0R3JWP5_9CLOT Epoxyqueuosine reductase OS=Caloramator mitchellensis OX=908809 GN=queG; PE = 4 SV=1
MAKEKLISFARKIGIDYIGFSDINFSDNFVERLVEKRNNGHLSGFEEFDVIKRIDVKSLLKDAKTFISIAIPYKTIDIDYSKPYFSKSSMGIDYHKVVSKKLELIKNYLMDEFGANSVYYCDTGALHDREIAKKCGIGFYGKNTNIYTEKYGSYVFLGELITDMYIEPDIEKLSKCGECDICIKACPVGAIEKPYYVNSQKCLSYVTQKKELLTENEMNSMGLRIYGCDICQDACPFNKSIGISNIIDFLPNDWNININIEKFLTMSNKEFKETYGKISGGWRGKKILQRNLIIALGNSKRGEYKELIKKYMNDEYLNFYAKYFLKRLEE

SEQ ID NO: 75390 - protein, 333 aa, Caloramator proteoclasticus
  REGION 1..333: note = tr|A0A1M4W9S1|A0A1M4W9S1_9CLOT Epoxyqueuosine reductase OS=Caloramator proteoclasticus DSM 10124; OX = 1121262 GN=SAMN02746091_01097 PE=4 SV=1
MSIKNQIIEFSKSIGVEYIGFCRAEYTDDFIKRLNYSYHKNYNCEFQTTEVQKRINIKEYMEDAKTFISIALPYKTIEINKSKPYFSKSSLGKDYHIVVKNKLKLIEDFLQNNYNAKTLSFVDTSPMHDREIAYMCGIGFYGKNSTLITEKYGSYVFLGEILTNIYIEPSTPMSSLCGSCDKCLKACPVGAIKKDYFIDANKCLSYITQKKDDLSEQEQTKLGLRIYGCDTCQDVCPFNHKAQISNIEDFLPEDWNININEDDFLNISNSQFNKTFKTTSAGWRGKKVLQRNLIIAMGNSGKKEYLDILKRLNKNEYLEKYIKNAIKKLEVKK

SEQ ID NO: 75391 - protein, 335 aa, unidentified
  source 1..335: note = Caloramator quimbayensis
  REGION 1..335: note = tr|A0A1T4XW23|A0A1T4XW23_9CLOT Epoxyqueuosine reductase OS=Caloramator quimbayensis OX=1147123; GN = SAMN05443428_1143 PE=4 SV=1
MIREKIIKFANSIGIDCIGFTDIYFSDEFIKRLRERKIFGHLSGFENSDESIRTDVNRLLEGAKTIISIAVPYKTVEIDKTKPYISKSSLGMDYHKVMNYKLKSISEYITNEFSGKCVYYADTGCLHDREIAKKCGIGFYGKNTSIITQKYGSFVFLGEVITDLYIERDLEIDSLCKDCTLCIDVCPINALEKPYYLNAKKCLSYITQKKETINDIEIKKMGLRVYGCDTCQDVCPFNKGVIFSNVKEFHPEEWNINISPDKVLNMTNKEFKNFFGSTSSGWIGKKRFQRNMIIALGNSNNKDYIPLLESKLNDDYLKHYAEKSINRLRGNLNEK

SEQ ID NO: 75392 - protein, 331 aa, Caloramator sp.
  REGION 1..331: note = tr|A0A5B7TMJ7|A0A5B7TMJ7_9CLOT tRNA epoxyqueuosine(34) reductase QueG OS=Caloramator sp. E03; OX = 2576307 GN=queG PE=4 SV=1
MIKDNIIKYAGSIGIDCIGFSDTYFDDIFLNRLKERREAGHLSGFEEVDENVRIDINSLLEDAKTIISIAIPYKTIEVDKSKPFLSKSSLGIDYHRILKDKLNNISEFIKNTYGAKTIYFADTGCLHDREVAKKCGIGFYGKNTSIITKEYGSFVFLGEIVTDLFIERDVEIESKCGDCTLCLDACPTKALEKPYYLNAKKCLSFVTQKKEILTDYEMKKMGLRLYGCDVCQDVCPYNKNVKTSSVKEFYPDTWNINIDPDKILKMTNNEFKKYFGLTSSGWIGKKRFQRNMIIALGNSNNKNYIPLLESKLEDDYLKYYVEKSIIKLKGD

SEQ ID NO: 75393 - protein, 231 aa, Caloranaerobacter azorensis
  REGION 1..231: note = tr|A0A1M5RA18|A0A1M5RA18_9CLOT Epoxyqueuosine reductase QueG (Queuosine biosynthesis); OS = Caloranaerobacter azorensis DSM 13643 OX=1121264; GN = SAMN02745135_00140 PE=4SV=1
MNLTFREKIIEKAISMGASKVGFAKLENFLPDNFSHLKTGISIIVRLSDQIMNDVVDKPTHTYFHHYRTVNFLIDQITLAITIMIQNEGYLAMAIPASQTVKTKTDAYTGIFQHKTVATLAGLGWIGKNACLVTEEFGPRIRLGTVLTNMILPYDEPIRNSKCGNCNICVKKCPALALKGNNWYQGMDRDALIDAFACSSYMSEQYKDIGRGSVCGLCISSCPKGTKIIRK

SEQ ID NO: 75394 - protein, 373 aa, Caloranaerobacter azorensis
  REGION 1..373: note = tr|A0A096DM22|A0A096DM22_9CLOT 4Fe-4S ferredoxin; OS = Caloranaerobacter azorensis H53214 OX=1156417; GN = Y919_06900 PE=4 SV=1
MDLKKFVKEKAIEVGLDIIGFCSAEPFYEIKEYLTFRKQKGYMAEFEQEDIKLRIAPKEIMPSANTIIAAGLSYNVDFKNNIDIKSIFKGRLSKSSWGIDYHNVLYRKLELLVDYIKEIKDDVEYKIFVDTGSLVDKEIAKRAGIGWYGKNCLIINDEYGSFIFIGYIITNLEIEADSESISKCGDCRLCLDACPTKALEDAYVLNPKRCISYLTQTKEKIPYELRDKMNNKIYGCDTCQLVCPKNKNVKKGKTEEFIPKVTGGYLDIVEIFNLSNKEFKKKYGHITGSWRGKNILKRNCIIALGNLRDKRAIELLNKSLEDSSPMIREYSAWALMKIDRKIGKRILLSHLEKEKSKEVKQEIYNLIEYFDSR

SEQ ID NO: 75395 - protein, 373 aa, Caloranaerobacter sp.
  REGION 1..373: note = tr|A0A0P8V449|A0A0P8V449_9CLOT 4Fe-4S ferredoxin; OS = Caloranaerobacter sp. TR13 OX=1302151 GN=TR13x_06815; PE = 4 SV=1
MNLKKFIKEKAIEVGLDIIGFCSSEPFHEMKEYLVLRKQKGYVTEFESIDIESRINPKKIMSSAKTIIAAGLSYNIDFNNNDKENILQGRLSKSSWGIDYHNVLYGKLESLVSHLKKIKDIEYKIFVDTGPLVDREIAKRAGIGWYGKNCLIINDEYGSFIFIGYIITNLEIEVDSESVSNCGNCRLCLDACPTKALEDDYILNPKKCISYLTQTKEKIPYELRDKMNTKIYGCDTCQLVCPKNKNARKGKTKEFIPKVTGGYLDIVEMFNLSNKEFKRKYGHMAGSWRGKNILKRNCIIALGNLRDKRAIELLSKALGDSSLMIREYSAWALMKIDRKLGKKMLLSHLEKEKSIEIKEEIHKLIDYFDRIVD

SEQ ID NO: 75396 - protein, 324 aa, unidentified
  source 1..324: note = Calothrix brevissima
  REGION 1..324: note = tr|A0A1Z4K542|A0A1Z4K542_9CYAN Epoxyqueuosine reductase OS=Calothrix brevissima NIES-22 OX=1973478; GN = queG PE=3 SV=1
MNNSGITTSDVVKKKAQELGFHKVGIAAVDGVEKTAAQRLQAWLALGYNADMGWMANPKRQDIHLVMPEGRSLICVALNYYTPHQRPEGEEYAKISRYGWGRDYHKVMDKKLKALTIWLRSQSEDVKAIYYADTGPVQDKVWAQKAGIGWIAKNGNVITREYGSWVFLGEIITNLSLESDRPATQHCGTCTRCLDACPTGAITSPYVVDANRCIAYHTIENRAETLPESVQSHLHGWVAGCDICQDICPWNLRFSQETDVAEFHPYPGNVAPKLIELAKITDEEWERQFPASALRRIKPEMLRRNARANLDASRQQNDSESNYL

SEQ ID NO: 75397 - protein, 321 aa, unidentified
  source 1..321: note = Calothrix desertica
  REGION 1..321: note = tr|A0A3S1AP86|A0A3S1AP86_9CYAN Epoxyqueuosine reductase OS=Calothrix desertica PCC 7102 OX=232991; GN = queG PE=3 SV=1
MSGLQKISSDEVKRKALELGVHKVGITVASANSFSEVNNLSKWLELGYQADMMWMSNKARQDIKLVMPDVKSLVCVALNYYTPHQHQEVTGTGDRCGKISRYAWGRDYHKVMHKKLKALSSWLESLHPDIKTRYYADTGPIQDKVWSEKAGIGWIAKNGNVISRSHGSWIFLGEVLTNLELTPDTPHTKHCGTCTRCIDACPTGAIIADGVVDANRCIAYHTIENRSEELPETIKSKMQGWVAGCDICQDVCPWNQRFANVTDVVEFQPYPENVAPSLTELAEISDEKWDKRFTASALRRIKPSMLRRNARANIEAFQAKL

SEQ ID NO: 75398 - protein, 324 aa, unidentified
  source 1..324: note = Calothrix elsteri
  REGION 1..324: note = tr|A0A2A2TE57|A0A2A2TE57_9CYAN Epoxyqueuosine reductase OS=Calothrix elsteri CCALA 953 OX=987040 GN=queG; PE = 3 SV=1
MNQLPRVSSNKVKEKALELGFHLVGIAEPDGMETQAVKKLQGWLTLGYQADMAWMANPKRQDIKLVMPSVRSLICVALNYYTTHQRPEGEEYGKISRYGWGRDYHKIMHKKLKALSIWLESLSDGVKARYYADTGPVQDKVWAQRAGIGWIAKNGNVITREYGSWVFLGEVVTNLELVPDQPHSEHCGTCTRCIDACPTNAIANPGVVDANLCIAYHTIENRSEALPEEIKSNLQGWVAGCDICQDVCPWNQRFAKNTNVSEFEPYTGNLAPKLVELAAISDEEWDKQFPASALRRIKPEMLRRNASANLEASRQKHDEESDYL

SEQ ID NO: 75399 - protein, 317 aa, Calothrix parasitica
  REGION 1..317: note = tr|A0A1Z4LVE9|A0A1Z4LVE9_9CYAN Epoxyqueuosine reductase OS=Calothrix parasitica NIES-267 OX=1973488; GN = queG PE=3 SV=1
MNQSSSPSSIQIKEKALELGFHKVGIAAVNLTETQVQRLQAWLALGYHADMEWMRNPKRQNIKLVMPEVRSLICVALNYYTEHQRPEKKEYGKISRYAWGRDYHKVVQKKLKAFSIWLESFGEEIKTRHYIDTGPIQDKVWAQQAGIGWIAKNGNVITREYGSWVFLGEILTNLELTPDTPHTQHCGNCTKCIESCPTDAIREPFVVDANRCIAYHTIENRDDKLPENIAENMQGWVAGCDICQDVCPWNQRFANNTDIEEFQPYPGNIAPKLIELARITDENWDKQFPASALRRIKPQMLRRNARANLKASRIQRP

SEQ ID NO: 75400 - protein, 326 aa, Calothrix sp.
  REGION 1..326: note = tr|A0A0T7BYL5|A0A0T7BYL5_9CYAN Epoxyqueuosine reductase OS=Calothrix sp. 336/3 OX=1337936 GN=queG PE=3; SV = 1
MNQLPEKSQRLDALTIATSEIKDKALNIGFHKVGIARVADWEQETPHHLQAWLKQGFHGDMEWMTTPKRQDIKLVMPEARSVISLALNYYTAHQHPQGTEYAKISRYGWGRDYHKILHKKLKALTNWLQSLHPDIQARYYADTGPLQDKLWAQRAGIGWIAKNSNLITREYGSWVFLGEIVTNLPLTPDSPHTEHCGTCNRCLEACPTKAIAKPFTVDANLCIAYHTIENRAEQLPENITPHLNGWVAGCDICQDVCPWNQRFAKETDIEEFQPYPGNLTPKLLELAEISDQEWEKRFTASALRRIKPKMFRRNAQSNLKTLNQDK

SEQ ID NO: 75401 - protein, 324 aa, Calothrix sp.
  REGION 1..324: note = tr|K9PKC8|K9PKC8_9CYAN Epoxyqueuosine reductase; OS = Calothrix sp. PCC 7507 OX=99598 GN=queG PE=3 SV=1
MEKRAVINSNVIKEKASELGFHKVGIAAVDGVDATEVQRLQAWIALGYHAEMAWMANPKRQDISLIMPEVRSLICVALNYYTPDQRPQGEEYAKISRYGWGRDYHKVMHKKLKALTIWLQSLGESIQARYYADTGPVADKVWAQRAGIGWIAKNGNVITREYGSWVFLGEVLTNLELESDRPSTEHCGTCTRCLDACPTNAITQPFVIDANRCIAYHTIENRSEKLPQTVAPHLQGWVAGCDICQDVCPWNQRFAHVTDVAEFQPYPGNIAPKLIELAEISDEEWDQQLPASALRRIKPEMLRRNARANLDASKQSNDPESNYF

SEQ ID NO: 75402 - protein, 414 aa, Camelimonas lactis
  REGION 1..414: note = tr|A0A4R2GWT1|A0A4R2GWT1_9RHIZ Epoxyqueuosine reductase OS=Camelimonas lactis OX=659006 GN=queG PE=3 SV=1
MRDASPPDSRRQRSAGHGKTARPETLEGAALKGAALREAVVARARAEGFDVARVAPAAALPETGARLMAWLDAGYHGDMEWMREGAERRASPQAMWPEARSALVLGLNYGPDHNPLDHLAARDRGLISVYAQGRDYHEIIKGRLKQVAGFLASRGGADVKVFVDTAPLMEKPLAARAGVGWQGKHSVLVSRTLGNWLFLGVILTTAELPPDPPGQPSCGSCRACLDVCPTQAFPAPYQLDSRRCISYLTIEHAGPVPHAFRKAIGNRIFGCDDCLAVCPWNKFARVGHDAKLAARAENDRPALAELLTLDDATFRSRFAGTPVKRTGRDRFLRNVLIATGNSGDARLAEPAARLLDDPSALVRGATVWALGQLLDADSLGKLRRQNAAERDPEVLAEWEAAAGFPAQISEPEQA

SEQ ID NO: 75403 - protein, 373 aa, Caminicella sporogenes
  REGION 1..373: note = tr|A0A1M6MUW2|A0A1M6MUW2_9CLOT Epoxyqueuosine reductase OS=Caminicella sporogenes DSM 14501 OX=1121266; GN = SAMN02745883_00655 PE=4 SV=1
MDIKKEIIRYSQKIGIDLIGFIKAEPLEELRGLLNDRKSKNYLSGFEEEDIEKRINPALTMKEANTIIVIAMSYYINDKEINYPKKYKYCGYISRSAWGMDYHIILKDKMEQLISFIKNKVDKLKYKYFVDTGPLVDRYLAYKANIGWYGKNNCIINKDYGSWIFIGYILCNLDIESDKFCKNSCLNCNKCINSCPTGALKDNYNYNAKKCISYLTQTKEELDYELREKMGNNIYGCDTCQSVCPHNQKIISKKNNFFYPNEFTYYPNLLEILEMSNKEFKEKYKMTAAGWRGKNIIKRNALIAIGNIGDREVIDVIKKYLNEKSIMIRKYTAWAILKLDRKRGKNILIKHLKVEENSEVIEEINNLFKYFNI

SEQ ID NO: 75404 - protein, 330 aa, Campylobacter jejuni
  REGION 1..330: note = tr|A0A4U9P0W7|A0A4U9P0W7_CAMJU Epoxyqueuosine reductase OS=Campylobacter jejuni OX=197 GN=queG PE=4 SV=1
MARHGMLRARPHELLPGTLRVISVRMNYLPAKAAFAKTLNNPQLGYVSRYALGRDYHKVLRQRLKKLGDMIQAHCTEHADQTVTFRPFVDSAPVMERPLAAKAGLGWVGKHSLTLNRESGSWFFLGELLIDLPLPVDQPQEEKCGKCVACITTCPTGAIVAPYTVDARRCISYLTIELEGAIPEEFRPLMGNRIYGCDDCQLICPWNRYSQLTDEEDFSPRAALHAPELIALFGWTEEKFLRITEGSPIRRIGHLRWLRNIAVALGNAPYAEDVLNALQSREGENALLDEHISWAIAQQVERRQEHRVEVQTSQQKRLIRAVEKGLPRDA

SEQ ID NO: 75405 - protein, 345 aa, unidentified
  source 1..345: note = Unknown
  REGION 1..345: note = tr|A0A1V5FIW4|A0A1V5FIW4_9BACT Epoxyqueuosine reductase OS=candidate division BRC1 bacterium ADurb.BinA292 OX=1852824 GN=queG PE=4 SV=1
MVRVQANTEARELRERIRAEALAVGFSRAGFAGAEPLGPTIERRRTEWLAEGRAGAMQYLHREHPRRTHPRDLLPEARTALVVLAGYYDGDHPPAAPDEGRIARYAWGEDYHGVMRRRLDALAERIQRIAQGAGIAAPLRMRPCVDSAPIDERALAARAGLGFIGKNTLLIDPAGGSWTLIGVLLISLDLPPDEPLRGPAASCAGCRRCLDACPTGAIDRPYRLDARRCLSYLTIEQKNEIPLELAARMEGWAFGCDICQEVCPFNDRPLGRLLPELAADRGAGPLATPAMLERDPSARAFRRRWGHTPLERPGRKGLERNLRALAAGRRPVPAGAIRPIQEDPS

SEQ ID NO: 75406 - protein, 321 aa, unidentified
  source 1..321: note = Zixibacteria bacterium
  REGION 1..321: note = tr|A0A1F4YA03|A0A1F4YA03_9BACT tRNA epoxyqueuosine(34) reductase QueG OS=candidate division Zixibacteria bacterium RBG_16_53_22 OX=1802787; GN = A2W25_13710 PE=4 SV=1
MAIKQALEKEALSLGFAAFGVAPAEYNPAPHNSHLRWLDKDYQGTMGYLERGVRRRFDPRVHLPGARSVIVCAHPYYSEPQNDPTRPYVSIYARGENYHTVLNDKLEALGRKMRELAGDIFYKIFVDSSPISEKTFAVKAGIGFIGRNGMVIIPRKRDGKKPQSHGSFHFLGLIITDLELEPDSPREGTCGQCRKCIETCPTEAIVDDGVVDANRCISYQTTQNKGRIPDDIARASGNMIFGCDICQIVCPYNSGISAAAEPRFFPDPDLVRADLTRLLEMTAAEFASRFEKSSIGEFKYEMFRRNAGIVNENIKSGKTEH

SEQ ID NO: 75407 - protein, 369 aa, unidentified
  source 1..369: note = Abawacabacteria bacterium
  REGION 1..369: note = tr|A0A1F4XKP5|A0A1F4XKP5_9BACT tRNA epoxyqueuosine(34) reductase QueG OS=Candidatus Abawacabacteria bacterium RBG_16_42_10 OX=1817814; GN = A2V81_01970 PE=4 SV=1
MHFDVSVHKIIHKLAYEQSFDLIRISKASVLQKDKEFYLQWLKNGEQGEMAYLDRDPERRYNPAKILPGVKSIIIAGLNYGEKPTKISDNTKVNIARYAKNKPDYHKVFEKKLSTFSESLTQNFSKINAKFYVDYGPLMERPYAAASSMGFIGKNTTLITPQFGSWVLLGEILTTLEIPEETPQKHGSCGSCRKCLDICPTKALKSAYDLDSRLCISYLTIENKGPIPVKLRKQIGTWLFGCDLCQEVCPHNVRAQAYVPQKWQDITIEPDLKNSMYLSSIAFLKKILTIKSEQEFKIFFKNTPFLRAKRVGLIRNACIVAGNLGNRELLPYLENLTNDESELIREHAAWAIDELKKPLHGRNSPPIVQ

SEQ ID NO: 75408 - protein, 346 aa, unidentified
  source 1..346: note = Abyssubacteria bacterium
  REGION 1..346: note = tr|A0A419EXQ5|A0A419EXQ5_9BACT Epoxyqueuosine reductase OS=Candidatus Abyssubacteria bacterium SURF_17; OX = 2093361 GN=C4532_10415 PE=4 SV=1
MQSLTEIVLDYVMCENACAAGIATVETLAGGPPTADLTYVLPNAKSAVCFALPLDQSLIPPYLAKKDRLSHERDNFRTNFLASGIALGLTRFLEQKGFPSYAVAANEVYRQDTPRGAIDMIPDVSLRYLAVRSGVASFGLSGNVLRKNEGAAIILGAVVTTADLEPTDPLPKEDNYCDNCRLCMASCASSFMDPEEEASVTLGGIEFKYSKRRSYLRCEFVCGGFTGLHSSGKWSTWSPGRFTIPTDEREFMPALLHGIDAYNQRPPTQGGHHHVLMDSRLYLTCGNCQLICHPDKEERKRRHKILRESGVIVQNADGSLDAVVPEVARERLASMDPEKRALYERV

SEQ ID NO: 75409 - protein, 348 aa, unidentified
  source 1..348: note = Abyssubacteria bacterium
  REGION 1..348: note = tr|A0A3A4PBZ4|A0A3A4PBZ4_9BACT Epoxyqueuosine reductase OS=Candidatus Abyssubacteria bacterium SURF_5; OX = 2093360 GN=C4520_00005 PE=4 SV=1
MYSLEQLIIDRVMGEGACAYGFATTETLAGGPPSVNLEYVLPGARSAISFAIPLDQSCIPPYLMKKDHLSQQKDNTRANKIASGIALDLARYLEQKGFPSYPVASNQVYRQDTPRGIFDLKPDVSLRYLAVRSGVSHMSLSGNAITKNEGAAIILGGVVTTAELHPTAPLPQEENYCDGCRLCMAACLSGLMDPEEEEIITLGGVSFTYAKRREYNRCGYVCGGFTGLHPSGTWSTWSPGRFPIPERDEDFGPAVMQHLDIHTRRPAMDGARIHPLIEGKFSMTCGMCQLVCAPDKEERKKRYKMLAESGCAVQNPDGLIEAVPPAEACRRLAAMDSETRALYEEVQG

SEQ ID NO: 75410 - protein, 403 aa, unidentified
  source 1..403: note = Accumulibacter aalborgensis
  REGION 1..403: note = tr|A0A1A8XKI3|A0A1A8XKI3_9PROT Epoxyqueuosine reductase OS=Candidatus Accumulibacter aalborgensis; OX = 1860102 GN=yjeS PE=3 SV=1
MQQGSQVTAKAGGGRLIGEVQAKRGLVMIGAMQEKDSKTNAAGGQTLGQNAYAEMARRIKDWGQELGFAAIGIAGADVSAATPRLMAWLALGRHGEMDYMAKHASLRADPGRLLPGTLSVISARLTYWPEAADAEKVLADRELAYVSRYALGRDYHKTVRQRLQALADRLRGDIAALAPAQPFSCRVFSDSAPVLETELARQSGIAWRGKHTLSLTRGGSWHFLGEIYTNLPLPPDAPIADHCGDCRRCLDVCPTQAIFAPYEVDARRCISYLTIELQGAIPVDLRSLIGNRIYGCDDCQLCCPWNRFAGLGDADFAVRNGLDAMPLAALFAWSEEEFNRRLAGSALRRIGHQRWLRNIAVALGNAPGSPAIVAALASRQDDPSPLVREHVRWALAQHTARGV

SEQ ID NO: 75411 - protein, 364 aa, unidentified
  source 1..364: note = Accumulibacter sp.
  REGION 1..364: note = tr|A0A011MQI9|A0A011MQI9_9PROT Epoxyqueuosine reductase OS=Candidatus Accumulibacter sp. SK-12; OX = 1454001 GN=queG PE=3 SV=1
MRVAGDAPSLSVGDAAALRRQISSWGAELGFAAIGVSGIDVAAAAPGLLRWLDLGRHGEMDYMAKHAALRLAPQALLPGVRTVIAARLPYWPPAADALAVLGDDRLAYVSRYALGRDYHKTTRHRLRKIAARLQEAAAKLGQPCSCRVLSDSAPVLETEFARQSGVGWRGKHTLSLTREGSWHFLGEIYTTLPLPADPPAEEHCGDCRRCLDVCPTAAIVAPYELDARLCISYLTIELPGSIPPSLRPLIGNRIYGCDDCQLHCPWNRFARMGDADFAVRNGLDAAPLTALLAWSESEFDSRLAGSAIRRIGHERWLRNVSVALGNAHPGTPGVVTALRSRLDHPSPLVREHVVWALARHQAAV

SEQ ID NO: 75412 - protein, 365 aa, unidentified
  source 1..365: note = Actinomarina minuta
  REGION 1..365: note = tr|S5DXE7|S5DXE7_9ACTN Putative Fe-S protein; OS = Candidatus Actinomarina minuta OX=1389454 PE=4 SV=1
MLIKMKDLNVINYLNKNNIEIPKNIKISTVDIPSYENKSQRIKEVKDQQKHANMKFTFSNPDYSGLGDKFTWAESCIIISYNYGEIYSTNISTSTGKGSIARFAIDDYYKPIKKFIEKLKDHFDTLDLRTQEFIDSPSHYDRLFFEGSGLGWQGKSSMMLSPSIGPWQLIGNLYVEMKFETPVAKSYSCGNCNMCQISCPTGALDNEYKIDSRKCISYWLQSPEIIPHEIRTKIANRFYGCDDCLTSCPPGQNKFISLKQTKEVDLEKIINMDKDNLISKFEWFYVPQRNADYLKRNAIIALANNPDENSHELFIKLLDSDSDIIRLYSIWALWRIGMLDKVNEESFIKKEVSSDVKKEFERLKK

SEQ ID NO: 75413 - protein, 365 aa, unidentified
  source 1..365: note = Actinomarina minuta
  REGION 1..365: note = tr|S5DQK2|S5DQK2_9ACTN Putative Fe-S protein; OS = Candidatus Actinomarina minuta OX=1389454 PE=4 SV=1
MLIKMKEKNLFNYLKIHKVEVPENINISIVSLPSLISKTTEIKKSKNENKHANMKFTFSDPEYSGLGDKFEWAKSCIVISYNYIPKSVNNHSFAPGEGAIALFAAEDHYKPLKRFMNNLIELFDNKHIQTHEFIDSPQHYDRIFFNTSGLGWQGKSTMMLSPGIGPWQLIGNLYVSESFDSSDQKKFSCGSCNLCQISCPTGALDEEYTLDSNKCISYWLQSPEIIPHDMRSYIGNRFYGCDECLTSCPPGQTKDFNIDLTSKVDLKRIIKMSNDELINSYSWFYIPKRNGDYLKRNALIALANNPDRSAVDFIFTLLKSESEIIRFYSIWAIWKLQSLGDLPQHYDVSFEKSELVKDEYLRLMK

SEQ ID NO: 75414 - protein, 367 aa, unidentified
  source 1..367: note = Actinomarinales bacterium
  REGION 1..367: note = tr|A0A520VTX6|A0A520VTX6_9ACTN 4Fe-4S ferredoxin-type domain-containing protein OS=Candidatus Actinomarinales bacterium OX=2510331 GN=EVA29_01625 PE=4; SV = 1
MKDINLLNYLSENNIDIPDGFNISVVRLPSQLNKSLEINRAKEENRHANMKFTFSDPNYSGLGDKFEWAESCIVVSYSYITENYSNLGFLPGRGSIARFAKKDYYIPLKEFINQIKEHFKKNNLRTAEFIDNPKHYDRLFFEQSGLGWQGKSTMMLSPGKGPWQLIGNIYVEKKFDLAAEKDYSCGSCNLCQISCPTSALDEEFILDSNKCISYWLQSPDIIPHDMRAQIGNRFYGCDECLISCPPGQGSVMNINTDTSVDLVQVLNSESDDLVRLYNWFYIPKRNGDYLKRNAIIALANNPSSDTKEIFISLLKSHSDLIRFYCIWGLWKIGDFEIVTQYLDIKNEKSEMILQEYQRLNEMIYSNK

SEQ ID NO: 75415 - protein, 361 aa, unidentified
  source 1..361: note = Actinomarinales bacterium
  REGION 1..361: note = tr|A0A2A5YDR0|A0A2A5YDR0_9ACTN Uncharacterized protein OS=Candidatus Actinomarinales bacterium MED-G02; OX = 1986262 GN=CND04_01035 PE=4 SV=1
MKEKNIFNYLKLNNIHIPKDINIAVISLPSLIDKSLLIQEAKSEKRHANMKFTFSNPEYSGLGDKFEWAKSCIVISYNYSPGSSNNHSFKPGDGAIALFASENHYKPLDNFINLLTELFQRQGIRIQQFIDSPQHYDRIFFNSSGLGWQGKSTMMLSPGIGPWQLIGNLYTEEKFEDTEKNTFSCGACNLCQISCPTGALDKEYTLDSNKCISYWLQSPDIIPHEMRINIGNRFYGCDECLTSCPPGQTKEFDETKTSTVDLKKILSMTNEELVEKYSWFYIPKKNGDFLKRNALIALANNPDEYSVKIIHKLLKSDSEIIRFYSIWAIWKITKFIDIEKFYDVDLEESELVKNEYLRLMK

SEQ ID NO: 75416 - protein, 310 aa, unidentified
  source 1..310: note = Aerophobetes bacterium
  REGION 1..310: note = tr|A0A565E9Y8|A0A565E9Y8_9BACT Uncharacterized protein OS=Candidatus Aerophobetes bacterium Ae_b3a; OX = 2012485 GN=CEE34_02995 PE=4 SV=1
MTGTLFSQLAKRGYKGRIVPIQHLNDLEEEIEDRHSRGSFDKEFYKERLDFFEFDPPDSLPKAKSIVTIAVPRPQVRVIFNWKGERLPLIIPPTYVAYKNTYRQVENLLREILGGQEYRMAKASLPEKLLAVRSGLGFYGKNNICYVNGMGSFHQLVSFYTELPCKEHSWQELQPMKRCLNCSACLRRCPTGAITPKRFLLRAECCIVFHNERVGDFPSWLDPNWHNCVIGCLECQRVCPENKNLLEWIEDKGEFSQEETALLSEGKQLDRLPSSMVIKLEKLDLVEYLDVLPRNLSVLFNKGKHSYPPT

SEQ ID NO: 75417 - protein, 365 aa, unidentified
  source 1..365: note = Aminicenantes bacterium
  REGION 1..365: note = tr|A0A1V6B177|A0A1V6B177_9BACT Epoxyqueuosine reductase OS=Candidatus Aminicenantes bacterium ADurb.Bin147 OX=1852831 GN=queG_2 PE=4 SV=1
MPDPPAAGEPQTTLWELAGHELNDPGAVLARVRRPAGEIGFPAGPGKWPEGNSMNGLLEELACHGFRARTVSADHAPELKAEIEERHRRGEFAEEFYRERLLDIRSSFNDAEPEIRTLIVVAAPQPIIRLIFHLPVKPVTLVVPPTYQYGVNEKAERLLKKCLKRAGCRLIRTSLPLKLLAARSGLGVYGRNNVCYVKGLGSFHRLMAFGTDLPWEEDSWGPARLMDTCSRCRACRRLCPTGAIQEEDFLLRAHRCLTFLNERSDPFPQWTDSSWHHAVVGCLHCQLVCPENKTVRNWSQAGDKFSEEETRLLLEGRRPEKIPADLRGRLERLGLLEYSEILPRNIQAALANSASSADSLLEEYA

SEQ ID NO: 75418 - protein, 302 aa, unidentified
  source 1..302: note = Aminicenantes bacterium
  REGION 1..302: note = tr|A0A1F5BAD5|A0A1F5BAD5_9BACT Uncharacterized protein OS=Candidatus Aminicenantes bacterium RBG_19FT_COMBO_59_29 OX=1797276 GN=A2028_03955 PE=4 SV=1
MVHILRELNTKGLRARAVSIAHLPELEEELEERRINGDLQEGFFRERLADFQFEPPESMPKASTIIIIAFPQPIIQVSFHRNGDRSPLIIPPTYQFYPNTVTERLLKKVLSQTGHRLARTILPLKLLAVRSGLGSYGRNNICYVPGMGSYHRLMAFFTDFPLTEDSWQSAKLMESCSRCSACLYSCPTGAITPNRFLIRAHRCLTYLNERPSEFPAWVNPSWHNALVGCMRCQEVCPANASFKKIIEPRDYFSKEESRILLNEVNPAKLSLSMRKRLKKLGLWEYVDLLPRNIRLVMDELKK

SEQ ID NO: 75419 - protein, 335 aa, unidentified
  source 1..335: note = Amulumruptor caecigallinarius
  REGION 1..335: note = tr|A0A4V1LAJ1|A0A4V1LAJ1_9BACT tRNA epoxyqueuosine(34) reductase QueG OS=Candidatus Amulumruptor caecigallinarius OX=2109911 GN=queG PE=4 SV=1
MRCRKASNGYSSKVMNLWSYRAIDHLSIPYMERSQVKEIVKGVGATAVGIARVAEVDAAARQSYLHWIESGRSAPLGYMDRYHEVRNNPRLLLDGANSIIVAAFSYYYPTPAAKSHFTIARYARGADYHDVVRRRLNDAVTAIIAETALDPSDFRVCVDTAPLRERYWARKAGVGFIGRNNALIVPGEGSYMVLGEILTTMELDADAPCTLTCGNCMACVKRCPAGALDCDEDGYCGVDASRCLSCLTIEHRGDFPEEIKLGGRIAGCDTCQDVCPHNRHAKTSPIAEFAPSNPLLDMTDDQILSLRAEDIRPLTRHTSLSRIKPSDFIRNIHTP

SEQ ID NO: 75420 - protein, 336 aa, unidentified
  source 1..336: note = Arthromitus sp.
  REGION 1..336: note = tr|G2IEX5|G2IEX5_9CLOT Iron-sulfur cluster-binding protein OS=Candidatus Arthromitus sp. SFB-rat-Yit; OX = 1041504 GN=RATSFB_1137 PE=4 SV=1
MDNKLRETLVDYMNFLGILYGFTECRKFIELYDYLKFKSENGDLTEFENRDIDSRINPFLYLENGETIISIAIPYYREYSTYNQKFSKYTQGEDYHKVVLSYLEKIAYFIEMSGYEFKLFCDTNNLPERYIAYLCGIGHIGRNSLIYTSEYGSYVFLGEIITNAKLSVKNSYEYYKKKFDDISLFRECGICKKCLYKCPNKILFDKNFRLCVSNLTQQKKLSMYEMNKLNNMIFGCDICQDECIKNKNIKYSFIDEFDTLKFIENISDEDIVNMDNSFFKNNFKKLACSWRGKKILKRNSLIRNMNNKEFLHSLSLENNEELNNYKNLFLYNNFEE

SEQ ID NO: 75421 - protein, 337 aa, unidentified
  source 1..337: note = Arthromitus sp.
  REGION 1..337: note = tr|A0A1B7LKS0|A0A1B7LKS0_9CLOT FeS-binding protein; OS = Candidatus Arthromitus sp. SFB-turkey OX=1840217; GN = A6P36_06890 PE=4 SV=1
MMINLNLKNKLIKFTESLNIFCYGFTECRRFIELKQYFNSKIDKLYLTEFEDKDVEKRINPFFYFEDGKTIISIAVPYFRKDNEYNKCFSKYTQGLDYHYVVNDYLNKICDFIRNFGYECKSFCDTNNLPERYIAYLCGVGHIGRNSLLYTKKYGSYVFLGEIITNANLCDSFSQEYYDNKFKEIGVFEHCGKCRNCMKKCPNDVLVEKNFNKCVSNLTQKKVLDSDEINNLNGMIFGCDICQDVCPKNRNVEYSFEERFNTEEFLKNIKDNDIVNMNNKFFKDNFKKLSCSWRGKNLLKRNVIIKNKEDINFIKSLNFDNNEHLNYYKNRFFNKKN

SEQ ID NO: 75422 - protein, 305 aa, unidentified
  source 1..305: note = Atelocyanobacterium thalassa
  REGION 1..305: note = tr|A0A086CIK0|A0A086CIK0_9CHRO Epoxyqueuosine reductase OS=Candidatus Atelocyanobacterium thalassa isolate SIO64986 OX=1527444 GN=queG PE=3 SV=1
MLSTTRKIKNKAFDIGFDKIGIANPHIIYEDNAIYNLQNWLSLGYQADMAWMNNPKRFDITQCMPDVRSVITVALNYYTPHKHPNNINYGKVSRYAWGKDYHKVLKQKLKLFCKWLTKKNIKTVCYVDTGPIQEKVWAERSGIGWIAKNGNIITKEFGSWVFLGVVLTNLSLISDTPHVKHCGACRRCIDICPTKAIVSPSVVDSRRCIAYHTIENKSENLPEHIVNNLNGWVAGCDLCQDVCPWNQRFSQETNIQDFYPYPGNISLHLEEISNLTEIQWQQKFSSSSLKRIKAKAWRRNADANL

SEQ ID NO: 75423 - protein, 385 aa, unidentified
  source 1..385: note = Atribacteria bacterium
  REGION 1..385: note = tr|A0A3D3DHZ3|A0A3D3DHZ3_9BACT tRNA epoxyqueuosine(34) reductase QueG OS=Candidatus Atribacteria bacterium OX=2053509 GN=queG PE=4 SV=1
MSLAAKIKELGEEIGLDIVRITNAESFPEAEKHLIESVEKGYIPKNDYYTSGNISVRPNQLNLNKISRRCNPKSILKRVKSIISVAECYLIEETEDVQDKGQLCGKIAKYDAGNFYYDVKLKLKKIIDFINQETNYKYKSKNKSCYISLTEKPIARRAGVGWYGKNGIIITERFGSWVVLGEVITELELDTDEPLQQDCGDCTICIDSCPTKAIVSPYVIDRTKCLQFISERPMNVPLAFREKWEDRLYGCTTCQEVCPQNRKVKLKKYKPEYGYIGSKIPLMPLLQITEEEFQRYFAYNQIAMRPKEAIKRNAILALGNIGDPRAVVPLIKVLQEDDNPMVRGHTAWALGKIGGEKAKFALEKALKIEGDREVREEITNALRMI

SEQ ID NO: 75424 - protein, 385 aa, unidentified
  source 1..385: note = Atribacteria bacterium
  REGION 1..385: note = tr|A0A1F5A8U8|A0A1F5A8U8_9BACT tRNA epoxyqueuosine(34) reductase QueG OS=Candidatus Atribacteria bacterium RBG_19FT_COMBO_35_14 OX=1797291; GN = A2V47_02295 PE=4 SV=1
MSLTTKIKELGEEIGLDIVRITHAESFPEAEKHIIESVEKGYIPENDYYISKNISERPNNPNLNKICKRCNPKSILKNAKSIISAAQCYLIEETEDIQDKNQPLGKIAKYDIGNFYYDVKLKLKKIVDFINQETDFKYKSKNKSCYVSLAEKPIAQRAGVGWYGKNGIIITERFGSWVVLGEIITELELDTDESLQRDCGDCTICIDSCPTKAIVSPYAIDRTKCLQFISERSMKVPLVFREKWGDRLYGCTTCQEVCPQNREVIPKKDKPEYGYIGLKIPLIPLLQMTEEEFQNYFAYNQIAMRPKEAIKRNTVLALGNIGDPRTVVPLIKVLQEDDNSIVRGHTAWALGKIGGEKAKFALEKALKIEKDKEVSEEITNALRMI

SEQ ID NO: 75425 - protein, 377 aa, unidentified
  source 1..377: note = Azambacteria bacterium
  REGION 1..377: note = tr|A0A350QGW1|A0A350QGW1_9BACT Epoxyqueuosine reductase OS=Candidatus Azambacteria bacterium OX=2053511; GN = queG PE=3 SV=1
MAIDYQQLARRIKQWALELGFQKLGITAPDLSAEEPRLQAWLNNEYHGDMHYMAEHGMMRARPAELLPGTLRVLSVRMDYLPAKAGFATNLADPAKAYISRYALGRDYHKLVRNRLKQLALKIRTEIPELNFRPFVDSAPVLERPLAQRAGLGWIGKHSLLLNHDGGSWFFLGELLVDIPLPVDAPHQGDCGSCVACITSCPTGAIVAPYVVDGRRCISYLTIELKTAIPEALRPLMGNRIYGCDDCQLVCPENRDAPLSIESDFQRRPQWLEQSLLQLFAWDEATFLRLTEGSAIRRIGFERWQRNIAVALGNAPYQVEITTALTQARVHSSDLVTEHIDWALAQQKRKSWQAENLLPRATGRLVRIIQKGLPRDA

SEQ ID NO: 75426 - protein, 217 aa, unidentified
  source 1..217: note = Brocadiae bacterium
  REGION 1..217: note = tr|A0A524H639|A0A524H639_9BACT Epoxyqueuosine reductase (Fragment) OS=Candidatus Brocadiae bacterium; OX = 2517210 GN=E4H40_08420 PE=4 SV=1
ADVIEPLKPLVLFLENKGYQAVICDSSDGDRSVLPLKLAAVRAGLGWQGKHSLLISKKFGTFLALGGIITNALLEHNTRQEANHCGNCDKCQKACPVNALDRSYKLTRGKCLSYLMQVEHLSEEAPDAMANRVADCEICQDVCPWNRKHIAQPLATKLTVTFQKKIRDWERFFYLPDLVKMSEQEYIQSTDKLRAGIPYDLFRRNVRIALRNAAKGG

SEQ ID NO: 75427 - protein, 401 aa, unidentified
  source 1..401: note = Burkholderia pumila
  REGION 1..401: note = tr|A0A0J7JQX7|A0A0J7JQX7_9BURK Epoxyqueuosine reductase OS=Candidatus Burkholderia pumila OX=1090375; GN = queG PE=3 SV=1
MNRLPAHSAYHTTASGDDAVVTCALNDDEEALAELARRIKTWGRELGFGAVGISDTDLSDAEKGLTAWLEAGYHGEMDYMAKHRTKRARPAELVAGTLRVITVRMAYLPADTLQKKGDESVATANGQKNDWRAIEWTRLSKPAEAVVSIYARGRDYHKVMRNRLQQLAVRIENAIGAFGYRAFTDSAPVLEVALAQKAGTGWRGKHTLLLDRDAGSLFVLGEIYVDIPLPPDPYPETEGAHCGQCTRCVAACPTGAIVEPYRVDARRCISYLTIELHGSIPEEMRPLIGNRVYGCDDCQLVCPWNKFAQAALVADFDVRNGLDRATLVELFAWSAEEFDTRMQGNAIRRIGHERWLRNIAVAMGNALRVPLAVEERAAIADALQARSSDPSALVRGTCNGR

SEQ ID NO: 75428 - protein, 409 aa, unidentified
  source 1..409: note = Burkholderia verschuerenii
  REGION 1..409: note = tr|A0A0L0MCG5|A0A0L0MCG5_9BURK Epoxyqueuosine reductase OS=Candidatus Burkholderia verschuerenii; OX = 242163 GN=queG PE=3 SV=1
MNRLPEHSAKTTTASHDAAFESRLSHHDEEALAELARRIRTWGRELGFGAVGISDIDLSDAEQGLASWLEASYHGEMDYMAKHGLKRARPAELVAGTRRVITARMAYLPAETLAKQGAESVPTADGQKNDWRAIEWSRLTKPAEAVVSIYARGRDYHKVMRNRLQQLAERIEAEIGPYGHRAFTDSAPVLEVALAQKAGNGWRGKHTLLLDRDAGSLFFLGEIYVDIPLPADPHPEQDGAHCGQCTRCIGACPTGAIVAPYRVDARRCISYLTIELHGSIPEDMRPLIGNRVYGCDDCQLVCPWNKFAQAAPVADFDVRHGLDRASLVALFAWSADDFDTRMQGSAIRRIGHERWLRNIAVAMGNALRSTSLSAEERAAIVEALRARAHDASDIVREHVNWALRQESGT

SEQ ID NO: 75429 - protein, 414 aa, unidentified
  source 1..414: note = Carbobacillus altaicus
  REGION 1..414: note = tr|A0A2R6Y475|A0A2R6Y475_9BACL Epoxyqueuosine reductase OS=Candidatus Carbobacillus altaicus OX=2163959; GN = queG PE=3 SV=1
MIVHQNPDGTLSTKNDTIKKDIVPFIREDDEPEVYALKLKGEMKGAARSFGLDAVGVTTADPFYELEPKLKAYYEKGYDTGFEKGTIAEKVDPRATMPWAKSIIAVAMAYPTRLDRAPRSEQGAYRGFVARSAWGDDYHVVLRERLLLLAGWLKDRVPDVRYEVMVDTGVLSDRAVAERAGIGWIGKNGLLITPEYGSFVYLGELVVSVTLPPDQPMVEQCGSCRKCLDLCPTQAFEAPGVLNGKRCLSYHTQTKGFVPFYFREKMGNRLYGCDTCQLVCPYNRGQNWTHHERFRPDPELVKPLLMPLVGMSKKTFQNTWAKSAAGWRGKKTIERNAIIALGHYRSKEATALLTDRMLHDPRPVIRGTAAWALGKIGGEEVRVALEKARETERDADVLEEIEHALLICNNQRDF

SEQ ID NO: 75430 - protein, 314 aa, unidentified
  source 1..314: note = Chryseobacterium massiliae
  REGION 1..314: note = tr|A0A3D9BHR5|A0A3D9BHR5_9FLAO Epoxyqueuosine reductase OS=Candidatus Chryseobacterium massiliae; OX = 204089 GN=queG PE=3 SV=1
MTSNAEKYTQLIKSKAKTFGFQNCGISKADFLEEDAKPLENWLKNNFHGEMKYMENHFDKRLDPRLLVEGSRSVISLSYNYFPEEKISTLENFKISKYAYAEDYHEVIKDILRSMVAELQEEIGEFGFRVFVDSAPVLERSWARKSGIGWVGKNANLITRQSGSFYFLAEIICDLELVADHPVTDHCGTCRKCIDACPTNAIVSEKLIDGSKCISYATIELKDSIPDYFQDKMDDWMFGCDVCQDVCPWNRFSSPHQQTKFKPNESLKNFKKGEWKELTQELFSEIFRKSPVKRTKFAGLKRNIEFLEKSSQNK

SEQ ID NO: 75431 - protein, 542 aa, unidentified
  source 1..542: note = Chrysopegis kryptomonas
  REGION 1..542: note = tr|A0A0P1NX19|A0A0P1NX19_9BACT Epoxyqueuosine reductase OS=Candidatus Chrysopegis kryptomonas OX=1633643; GN = queG PE=3 SV=1
MDKFELTHKIKQKAIELGFSKVGIAKAEKLLDEAERLRQWLERKYHADMLWLKNNFEKRINPENILPDAKSIIVVGLNYFQKIPPAKKEQGKISIYALGKDYHIVLKSKLENLLNFIKEICPNVNAKIYVDTGPVMEKVWAVRAGLGWIGKHTNLITKEFGSWIFLGVLICDLELEYDEPMADFCGKCTRCINACPTSAIVEPYVLDSNKCISYWTIEFKGENFPEGIKKKFGNLIFGCDICQEVCPWNIKFQKETTVEEFKAFEHNINPDLFKLSNLTVDEFNLLYKFSPIKRAKFFGFMRNVKNAISNLTLEKILNLDFECAIFDLDGVVADTFLFHFSSWSEICRRYGRDLSLEEFRKIVFGRKGEESAKILFDGKISDEEAKEIGVEVDRIFRVIAKGQLKEVDGAIDFIKMLRENGIKTALATSAPFENVELIFNELSLNGLFDVVVSAKDVKRGKPEPDIFILAGSKLNCNPRECIVFEDSIAGLISAKRAGMLAVGVETTLTKIELSNYADLTIKNFLEIFENVKQNRKEKDATN

SEQ ID NO: 75432 - protein, 176 aa, unidentified
  source 1..176: note = Cloacimonas sp.
  REGION 1..176: note = tr|A0A1W9P0Y0|A0A1W9P0Y0_9BACT DUF1730 domain-containing protein (Fragment) OS=Candidatus Cloacimonas sp. 4484_209 OX=1968525 GN=B5M53_10085 PE=4; SV = 1
MFLTEEIKRKALEIGFSKVGITDTQPFSFEIQKRYNEWLNKGFHSGMSYLSRDIIKRLNPSMIFKGAKSIISVAMNYYPGWIAGSTDSDMGFISRYALGYDYHRIITKKLQQLFDYIKRETNGKANGKIFCDTGPLLEKMIAERAGLGWIGKNGALVTKEFGSWVFLGEIVLDIEL

SEQ ID NO: 75433 - protein, 299 aa, unidentified
  source 1..299: note = Cloacimonetes bacterium
  REGION 1..299: note = tr|A0A523QY60|A0A523QY60_9BACT tRNA epoxyqueuosine(34) reductase QueG (Fragment) OS=Candidatus Cloacimonetes bacterium OX=2030808 GN=queG PE=4 SV=1
VEKRLNPLRIFEGAKSIISLAINYSPGWIEQSKDKNLAFISRYALGYDYHKVVFAKLKLLFDFIVKETKGKAKGKIYCDTGPLLEKAIAERAGLGWIGKNGLLITKEFGSWVFLGEIILDVELRKDTQAKNLCSDCNLCIKSCPSGAIIAPGIIDASRCFSYLTIENRKKIPFKLRNVLGSRVFGCDACQEVCPFNNNVPETEEPLFEPQKELLSMPLEKFFILANKQFKEYFKNSTIKRVKRNGLLRNITVAMGNSGNKEFLLLLKKASKESDSIIRKHAEWAICKIGGNRFANLVGR

SEQ ID NO: 75434 - protein, 315 aa, unidentified
  source 1..315: note = Cloacimonetes bacterium
  REGION 1..315: note = tr|A0A1Y1REH0|A0A1Y1REH0_9BACT Epoxyqueuosine reductase OS=Candidatus Cloacimonetes bacterium 4572_55; OX = 1971726 GN=queG PE=3 SV=1
MNKTLTDRIKISAKEAGFDLVGIASAAPTGEDDRLRSWLDQGCHASMSWMENHIDKRLDPTRLMPGAQSIVVLAMNYYPGRISHDDPSRARISRYALSHDYHRILKKRALGLLSEIKSWSESIQGRFFVDTAPIMEKFWAVQAGLGGMGKQGLIVTREFGSWVFLGEILLNIGLKQDEPQPDCCGSCRLCIDACPTRAIIAPYVVDANRCLSYLTIEHRGEIPPDAASEMGNRIFGCDICQEVCPWNIQRATVTNKKEFLPNPIHVDLQLKELADFTEEQFRQKFGKSPIKRAKFDGFQRNVRIGLRNAEPLPFT

SEQ ID NO: 75435 - protein, 355 aa, unidentified
  source 1..355: note = Competibacter denitrificans
  REGION 1..355: note = tr|W6M5W9|W6M5W9_9GAMM Epoxyqueuosine reductase; OS = Candidatus Competibacter denitrificans Run_A_D11; OX = 1400863 GN=queG PE=3 SV=1
MTPNLTAESLAALVTAIKDWGNELGFQRVGVSGIDLVQHETWLLAWLAAGFHGEMAYMARHGVKRSRPAELVPETVRVISARMDYLPPMAAEPWSVLRRPELGYISRYTLGRDYHKVMRQRLQRLADRIAAVVGPFGYRVFTDSAPVLEKALAAQAGLGWIGKHSNLLDRSAGSWFFLGEIYVDLPLPPDEPVTAHCGRCVACLDICPTQAIVAPYQVDARRCISYHTIELQGSIPLAFRPAIGNRIYGCDDCQLVCPWNRFAQVAAEADFRTRHQLDAPDLLKLFAWDESEFLRRTEGSAIRRLGHERWLRNIAVALGNAPQSPAVIAALQARLAHPSALVREHVIWALERQTG

SEQ ID NO: 75436 - protein, 362 aa, unidentified
  source 1..362: note = Competibacteraceae bacterium
  REGION 1..362: note = tr|A0A3C1SV28|A0A3C1SV28_9GAMM tRNA epoxyqueuosine(34) reductase QueG (Fragment) OS=Candidatus Competibacteraceae bacterium OX=2053538 GN=queG PE=3 SV=1
LGFQQLGVARIDLGEHEAHLLDWLAAGFHGTMTYMARHGTRRARPAELVPGTVRVISARMDYWPPQSAEPWRVLRDPERAYLSRYALGRDYHKVMRRRLQRLVERIIAAVGPLGYRVFSDSAPVLEKALAQRAGLGWIGKHSNLLDRRAGSWFFLGEIYLDIPLPADAPATGHCGRCAACLDVCPTRAIVAPYRVDARRCISYHTIELQGSIPLEFRRAMGNRIYGCDDCQLVCPWNRFARPAAEPDFRVRHGLDAPDLIALFGWEEPDFLRHTEGSAIRRIGHERWLRNLAVALGNAPPSARAVDALQARAAHPSAVVAEHVAWALDEQAEKRDRRARGDPVQTPVLDGAGAADRRLSPPR

SEQ ID NO: 75437 - protein, 397 aa, unidentified
  source 1..397: note = Competibacteraceae bacterium
  REGION 1..397: note = tr|A0A3D2VQT5|A0A3D2VQT5_9GAMM Epoxyqueuosine reductase OS=Candidatus Competibacteraceae bacterium; OX = 2053538 GN=queG PE=3 SV=1
MKKLLDGGGWGHNTPVIFPHPAAAVTLVVTDPQLAELAVAIKRWGRELGFQRVGIAAIDLGEHEARLSEWLAAGFHGDMAYMARHGVRRSRPAELVPGTVRAISARMDYLPPEAAEPWRVLNDRALGYLSRYALGRDYHKLLRRRLQRLAERIAATVGPFGYRVFTDSAPALEKALAEKAGLGWIGKHSNLLDRRAGSWFFLGEIYVDLPLPADEAATAHCGRCTACLKVCPTRAIVAPYRVDARRCISYHTIELAGSIPLEFRRAIGNRIYGCDDCQLACPWNRFARPTVEVDFRARHGLDAPGLSGLFAWDEREFLRRTEGSAIRRIGHQRWLRNIAVALGNAPPSPAILAALQARLRHPSELVREHVAWALGVQQQTTAVRPTNAGPPSPRPKT

SEQ ID NO: 75438 - protein, 360 aa, unidentified
  source 1..360: note = Contendobacter odensis
  REGION 1..360: note = tr|A0A2G6PGI2|A0A2G6PGI2_9GAMM Epoxyqueuosine reductase OS=Candidatus Contendobacter odensis OX=1400860; GN = queG PE=3 SV=1
MPSVLSPTELANLATTIKTWGHSLGFQHVGISDITLDEHEVYLLNWLTAGYHGEMDYMARHGTKRSRPAQLVPGTLRVITARMNYWLSNAADPWHVLKRPDLGYISRYALGRDYHKLLRQRLQKLAKQITNAIGAFGYRVFTDSAPVLEKALAQKAGLGWIGKHSNLLDRRVGSWFFLGEIYVNLPLPVDQPATAHCGQCNACLEICPTQAIIAAYRVDARRCISYHTIELRGSIPLQFRRAMGNRIYGCDDCQLVCPWNRFAQNTVEPDFRIRHRLDAPDLIALFHWDEMEFLRRTEGSAIRRIGHERWLRNIAVALGNAPNTPAVMDALRMRLTHPSENVREHVHWALAEQAEKKRPT

SEQ ID NO: 75439 - protein, 321 aa, unidentified
  source 1..321: note = Cyclonatronum proteinivorum
  REGION 1..321: note = tr|A0A345UKU6|A0A345UKU6_9BACT Epoxyqueuosine reductase OS=Candidatus Cyclonatronum proteinivorum; OX = 1457365 GN=queG PE=3 SV=1
MNVSMNKQQLTAAVRAEANRLGFEGCGFAKAGFLEDEARRLEKWLLAGKHGKMHWMENHFDKRVDPTKLVPGAKSVISVLCSYHQPELFREHASDEANLRISKYALGEDYHFVLKDKLYQLFEFTKKLNGGLEGRVFVDSAPVMDKAWAVKSGLGWMGKHTNVISRKAGSCFFLGEMIVDAVFDYDSPTTDHCGSCTRCIDACPTDAITEPYSVDGSKCISYFTIELRDEIPAEYHDKLGNWIFGCDICQDVCPWNRKALPGSEPRLMARDELLGKDKGYWEELNLQEFRRLFKKNPVKRTKFDGLKRNIAAVRGNKKGKD

SEQ ID NO: 75440 - protein, 363 aa, unidentified
  source 1..363: note = Dactylopiibacterium carminicum
  REGION 1..363: note = tr|A0A272ET33|A0A272ET33_9RHOO Epoxyqueuosine reductase OS=Candidatus Dactylopiibacterium carminicum; OX = 857335 GN=queG PE=3 SV=1
MSGHSTDSLDTQELVRQIRAWGGELGLGAVAIAGIELPGAEAGLADWLTAGFHGDMDYMARHGMKRARPAELVPGTLSVVCARLDYWPEPDMTAARADFSRPERAVVSRYAWGRDYHKVLRARLQKLADRIADAVGPLGHRVFVDSAPVMEGALGAGAGLGWRGKHTLLLSREAGSTFFLGEIYVDLALPPDAPQIDHCGRCSACIEACPTRAIVAPYRLDARRCISYLTIEHAGAIPEAFRAAIGNRVYGCDDCQTVCPWNRFARPTRELDFAVRNGLDRATLVELFAWSEEDFNARLAGSPIYRIGHERWLRNLATGLGNAPTTPAVLAALRSRADHPSALVREHVAWALAQHAGKDLNPA

SEQ ID NO: 75441 - protein, 307 aa, unidentified
  source 1..307: note = Dadabacteria bacterium
  REGION 1..307: note = tr|A0A3M1KMI3|A0A3M1KMI3_9BACT tRNA epoxyqueuosine(34) reductase QueG (Fragment) OS=Candidatus Dadabacteria bacterium OX=2080303 GN=queG PE=4 SV=1
MVALQNGPVAAPGAPVVSFQSTVPRMDAAALAVEVVDARTSDKLVEQIRRTGFDLVGIAPTTLPDAWRARFEDWLARGFHGEMNWMKRSADERAQPRVRAPWVRAVIVVALAYDRPDPEPGGIVSRISRYARGRSYHNVMRRRLRKAARVLEQYGASRVAFSSDTAPVAERELARLAGLGWIGRHSLLLHPRLGSYLFLGTLFCDLELKPGAPMASHCGTCTACVDACPTNAIVADGVVDARRCISYLNIEHRGPFDPPYDADLHGWLHGCDLCQEVCPFVARARRAGLAGDEAFSPREVWRQVRLA

SEQ ID NO: 75442 - protein, 378 aa, unidentified
  source 1..378: note = Dadabacteria bacterium
  REGION 1..378: note = tr|A0A1F5IZY4|A0A1F5IZY4_9BACT Epoxyqueuosine reductase OS=Candidatus Dadabacteria bacterium RIFCSPHIGHO2_12_FULL_53_21 OX=1797756 GN=queG PE=3 SV=1
MGIKEITDSVKSKAYEIGFDLVGISPAGSFPESQFYKEWLSRGYAGEMKYMERNPEKREDPGQIVPGAKSVITCGLNYNTGFPYSTEAGDGSRGWIARYAWGEDYHAVMDDRLRALEDFISGEAPEGASCRRYVDTGPVLERVYGKYGGIGWTGKNTCLINQRIGSWIFLGEIITSMELDYDSPAPDRCGTCTRCIDACPTGAITEPYVLDSRLCISYLTIELKDGIPKELRDGIDNNIFGCDICQDVCPWNRKAEKTAEPGFQPREGLYNPGLRSFSGLGPDEFSARFKGSPVRRTKRKGLLRNVLVAMGNSGDTSLIPAIEEYLSDGEPLVRAHAAWALWKLEGEGSKDTLLDHIKLENDPMVLEEIDALLMDVQG

SEQ ID NO: 75443 - protein, 374 aa, unidentified
  source 1..374: note = Desulfosporosinus infrequens
  REGION 1..374: note = tr|A0A2U3KIQ1|A0A2U3KIQ1_9FIRM PBS lyase HEAT-like repeat family protein OS=Candidatus Desulfosporosinus infrequens OX=2043169 GN=SBF1_210007 PE=4 SV=1
MSLTSQIKEYALNIGYSKIGIIPAENFPEYIDDLTKRNEMYDFYVKSPYRPLAIADLKSLMPNAKSIITTVYDYAQKSFPKELTNKIGRVYQARSYDPPPEYINGARPELMRTFLRKLSCEVGEKIALPERVVAAKAGVTNYGRNGFAYAEGIGSFIYLKSFIVDRELEYDNPTRKEVCPVGCTACMKACPTKAIYEPHKINPLRCIAFHTFLTQEGMAGSYIQPEIREKMGTKIQGCDICQDVCPLNQERLKSILPEDEYLVKVAQDFSLSQVLNMTDEFYDTRVRPLLFNYIKERKYFQRNAAIALGNLRDPAFVPDLAFAMDDPEELVRGNAAWALGKIGVRSAKQVLEDKLGKETSEAVKEEIRQALSTG

SEQ ID NO: 75444 - protein, 334 aa, unidentified
  source 1..334: note = Desulfosporosinus infrequens
  REGION 1..334: note = tr|A0A2U3KH49|A0A2U3KH49_9FIRM Uncharacterized protein OS=Candidatus Desulfosporosinus infrequens; OX = 2043169 GN=SBF1_200003 PE=4 SV=1
MEADEQMRWQTKIKKWGSELGFVAIGFTTAKSVNGLAQVLQTRINQGLATPFEGKEIEQRIDPQAGWQDCQTVVVLAYPLPDTVPPRAGEGILARSAVGADYHRVLRQTISELVDTMISNGWTGNPRWQVDTGPLIERAFALRAGIGWIGRNQQLIIPSYGSFVSLALLLLERELPADRPSIDQCGACQRCVEACPAHILGQETFAAKHCVSYLTQSKEMLSNEECKRLGLRIFGCDTCQEVCPHNQKRMEKEQADSSRSTLRRGVDLLETLNLTKREFQQRFQATAAGWRGKAVLQRNAFLAMHNVQDPRLRLWLEEHGEDQSVPPIIVPYLL

SEQ ID NO: 75445 - protein, 447 aa, unidentified
  source 1..447: note = Dormibacter sp.
  REGION 1..447: note = tr|A0A2W5Z7X5|A0A2W5Z7X5_9BACT tRNA epoxyqueuosine(34) reductase QueG OS=Candidatus Dormibacter sp. RRmetagenome_bin12 OX=2599630 GN=queG PE=4; SV = 1
MAVSSPSSLPSTSMAAGPSSPVKAVTRSASPPIVAGAPSPRIATVMCRPANVLACLPLLDKLEPTAPRAEWYRPGSATGGGILVGVSRWEAFREELRAHALESGWCALGVTGVEPFVEARRHGLDAIAAGRMEGMPWMTAERVAASTDLGPRYPWARSIIALAWPYRPVRGAAEHEGSTPRGRMAAYALLEQPGEPDAVDYHDVLARGCDELVAWLRERVPEVRAKRFVDHGWAMDRAVAERAGIGFTGKHAGLLTTTAGSYVLLAEIAVSLPLPADAPSKKGCGSCATCLPSCPTGAIIAPGVIDARRCISYLTIEHEGPIPHALRPLMGTWVFGCDLCQEACPINHRLAPPPLADTKHGRKGPVPAPDLVELLELDERGFAERFAGTAVARTGRARLARNTAIALGNAGVAATAASLRRAAAQDSDADVREAAAWALERVTAEVN

SEQ ID NO: 75446 - protein, 135 aa, unidentified
  source 1..135: note = Edwardsbacteria bacterium
  REGION 1..135: note = tr|A0A3B9EC26|A0A3B9EC26_9BACT tRNA epoxyqueuosine(34) reductase QueG (Fragment) OS=Candidatus Edwardsbacteria bacterium OX=2053551 GN=DCG35_11190 PE=4; SV = 1
MISYTKIYFTRYNTPIGRLYLAATDKGLLNIAPEKGSELSFLIDLPIRHYDLVRSEKPFLQIKKQLDRYFKGQPVVFKFRADMSHGTGFQRSVWRKLSGLLPGQMMTYGILAREIGQPKAYRAVGQAVGANPLPI

SEQ ID NO: 75447 - protein, 427 aa, unidentified
  source 1..427: note = Eisenbacteria bacterium
  REGION 1..427: note = tr|A0A538SJT4|A0A538SJT4_9BACT Epoxyqueuosine reductase OS=Candidatus Eisenbacteria bacterium OX=2212470; GN = queG PE=3 SV=1
MRGAARASSGKRPHPAAGTGVLHRVQPSQTNASTKESIRREAQALGFGGVGFARADESPHAGRLRAWLEAGRHGTMHWIARDPGRRSDPRAVLSGARTVISVTVPYYRGDWPSEPNGAVAERSPHAPSRGRIARYAWGRDYHKRIRRRLRLLAKAIASVCPEARWLAYVDTGPVLDRSWAERAGVGWIGKNTNVIVQGKGSWFFLGELLTDLELDPDPPARNHCGTCARCIAACPTGAILGPYELDARRCISYLTIEHRGAIPLELRPSIGTRIFGCDDCQEVCPWNRFAVPTSDPDFAERPDQQTPELIPLLRLDEESFRTRYRGTAILRAKRSGFVRNVAVALGNLRDRRSVGPLTRTLNRDPDPLVRGHAAWALGRIGGTASRAALQEAATHESSEEVLVEIRSALESCEGAGATHRIEGDPEP

SEQ ID NO: 75448 - protein, 389 aa, unidentified
  source 1..389: note = Eisenbacteria bacterium
  REGION 1..389: note = tr|A0A1F5RJ20|A0A1F5RJ20_9BACT Epoxyqueuosine reductase OS=Candidatus Eisenbacteria bacterium RBG_16_71_46 OX=1817856 GN=queG PE=3 SV=1
MSAPVGHAERIKRRALELGFDAAGVADVGPLEAVERFEAWLDAGRHGTMDYLAGTRNRGRRADLARILPGVRAVVCVALCHEPGREADRDRRLGRIARYAAGQDYHRVMHDLLGALADEIEALLPSARALWYADTGAILERGWAERAGLGWIGKHSGLLSPRLGSWLLLGEVLLDRPLDPDPPLPHGHCGTCVRCLDACPTRAIVAPYQVDARLCISYLTIELRGPIPRELRPLVGDWVFGCDVCQEVCPWNRFAPPAREARLHARALDGWTLERFLGLDEAGFAELFAGSPIRRAGRAGFLRNVCVALGNRREAAAVPALARVLAGDPGALVRGHAAWALGEIAAAIGAEGAGCAVGDIAAALARAARDDADPGVREEARLAHARARA

SEQ ID NO: 75449 - protein, 374 aa, unidentified
  source 1..374: note = Endobugula sertula
  REGION 1..374: note = tr|A0A1D2QPQ6|A0A1D2QPQ6_9GAMM Epoxyqueuosine reductase OS=Candidatus Endobugula sertula OX=62101; GN = queG PE=3 SV=1
MVALAANIPVWGQELGFQQIGITDIQLHQHNHYLQQWLDNGYHGEMQWMLAHQDKRQYPPELVPHAIRVISARMDYLPEDPQHIKTLKQGEKAYISHYALGRDYHKLIRKRLRVLAEKISQQFTELANTHQWNIGHISQRPFVDSAPVLEKAFAEKAGLGWIGKHTLVLNQHAGSWFFLGEVLTSIPLPINTHIADNKCGDCTACLKVCPTDAFIAPYTLDATRCISYLTIELKGTIPEEFREAMGNRVFGCDDCQAICPWNKYAKQTQEKDFSPRHQLDRADLITLFLWTEEEYLKKTEGSPIRRIGYERWLRNLAIGLGNAPKSETVYQTLRSRQNFPSKLVQEHIQWAIKQQLSDKKRRRKIKNPKKMGAG

SEQ ID NO: 75450 - protein, 373 aa, unidentified
  source 1..373: note = Endolissoclinum sp.
  REGION 1..373: note = tr|A0A1Z9Y1D1|A0A1Z9Y1D1_9PROT Epoxyqueuosine reductase OS=Candidatus Endolissoclinum sp. TMED26; OX = 1986636 GN=queG PE=3 SV=1
MTSKEAAIRQRAVHYGFSTIGFTAPAIAPTAQMRFDALAAADGFGDMSWMVSTADRRRDPAALWPAARSVIVVTQNYTPEHDPMLALTAKQHGNVSVYARFKDYHNVLKKRLKKMAQELVCEHGCEVKVFVDTAPILEKPLAQRAGVGWQGKHSNLVSRDLGSWFFLGEIFTTLQLQPDTPEEDHCGSCQKCIDICPTAAITAPYQLDPLRCIAYLTIEHKGHIPRDFRGAIGNRVFGCDDCLAVCPWNKFAAPPMEPAYHPRAEHDLPALADLAALDDAAFRARFQGTPVRRTGRDRFVRNVLIAIGNSGDRRLLPSVAALLGDPAAIVRAMAVWALGCLADAAELTAFRQQFAHMEEDPEVCDEWRDAGSR

SEQ ID NO: 75451 - protein, 386 aa, unidentified
  source 1..386: note = Endolissoclinum sp.
  REGION 1..386: note = tr|A0A1Z8V3Q4|A0A1Z8V3Q4_9PROT Epoxyqueuosine reductase OS=Candidatus Endolissoclinum sp. TMED55; OX = 1986641 GN=queG PE=3 SV=1
  VARIANT 378: note = Xaa can be any naturally occurring amino acid
MKERIRTKAKEEGFDAIGFAQAEMGFREKARLEAFVSLGQHGDMTWMSDHLERRKDPRTLWPDVRSVIAVAMNYGPKVNPLDDLRSINRANISVYARNKDYHNVIKKRLKKLGRWLGKEFNCDLKVFVDTAPILEKPLGQAAGIGWQGKHSNLVNQSFGSWLFLGEIFTTLKLDPDEMEVDHCGSCTKCLDICPTNAFPEPYMLDASRCISYLTIEHKGHIPLEYREKMGNRIYGCDDCLAVCPWNKFSKMAREAAFIPREDLNLPLLEDFLSLDDSLFREKFSGSPIKRIGRDRFIRNVLIALGNSSIRAPSIGLLNLLNDPSSIVRAMCVWVLGRILPINKMKELSVQHLKSEMDKTVREEWYMALNIDYNSESSXNSGSRGSI

SEQ ID NO: 75452 - protein, 365 aa, unidentified
  source 1..365: note = Entotheonella factor
  REGION 1..365: note = tr|W4LCM3|W4LCM3_9BACT Epoxyqueuosine reductase; OS = Candidatus Entotheonella factor OX=1429438 GN=queG PE=3; SV = 1
MMTTPSNLSQHDLTQRIKTKALELGFDLVGITPAQGSPELAFFDRWLNAGYAGEMHYLQRNAERRRDIQQVVPGAQSIVVCGLNYDTDYPYSTGCDDPDRGWVARYAWGGDYHDHMQEKLRQLQAFVAELVPEEIASKLYVDTGPVVERVYAKYAGLGWFGKNTCILNKQLGSWLFLGELILALPLDYDRPALDHCGTCTRCIDACPTDAILEPYVLDSRKCIAYLTIELKGSIPETLRPQIGHHIFGCDICQDVCPWNRKRTLTAEAALQPQPSHVYPSLADLAQLTPQAFKAQFRGTPLERTKRRGVLRNVCVAMGNSGNESFIPLLEVLAEDEEELIREHAVWALTRLRQAPNDTTPECRIS

SEQ ID NO: 75453 - protein, 391 aa, unidentified
  source 1..391: note = Entotheonella gemina
  REGION 1..391: note = tr|W4M6L7|W4M6L7_9BACT 4Fe-4S ferredoxin-type domain-containing protein OS=Candidatus Entotheonella gemina OX=1429439 GN=ETSY2_20655 PE=4 SV=1
MAPAAKPLSKEELTSKVKEFALISGACVVGITTRETLAGGPPSTDLSYVLEGARSAVTFGVPLNQDKILDFLGKVDRAGHQKDYCLASTIATGIAAEMANFVKHFGHAAVAVLANQVYRNEAPGTRRQPDLSHRYLAVRGGIGWFGFSGNVLTPSHGPNVQFATMVTDAGLEPTEPLPEQDNYCDDCQACNAACPSGFFRNGKTDKVTITMGGVDFTYSQRRRYDRCTYVCGGKTGLHQSGRWSTWSPARFPIPKTDEDEDLLPVLTEGELAWRARPELPGGGLQSPGQYGLAKRDIPLTCGNCALVCHPDREERDRRLKLLHSSGVVIQNEDGRVEAVSPKKAKAHIAAMEPGRRALYETPTPEKYDPKKYWGHKHHSQYGLAKTPGKKG

SEQ ID NO: 75454 - protein, 426 aa, unidentified
  source 1..426: note = Eremiobacter sp.
  REGION 1..426: note = tr|A0A2W5XV50|A0A2W5XV50_9BACT tRNA epoxyqueuosine(34) reductase QueG OS=Candidatus Eremiobacter sp. RRmetagenome_bin22 OX=2599629 GN=queG; PE = 4 SV=1
MRLRPGDHERFARARNDRRRISGGNHKNHVIAAQPRPFSQDAKSRITARAQAIGFDLVGIASAEPFVDEQRTLCERRDRGYLDHWRYPDDLIARICDPAISLPGARSIICTATAYASRDAPHAPYAPGLRGAVSAHAWGRDYHRVIGGRLQELAAFIGSEYPDERCLACVDTGPLPERAAAVRAGIGWFGKSGNVLTKRFGSYVLLGEIITTLALEPDRPLLTHCGNCEDCIPACPTGAIQPDGAVDATRCISDLTQYKGAIPRALRKAIGNRLWGCDTCQTDCRVNARSRPAADGSFRPLPEVGTSMDLPAVLRMTKSQFREWFGPTSMGWRGKAVLQRNAAVALGNSRDERAIPHLVAALSDRKPLVRGHAAWALGEFGGDSARAALTALLHREGDAWVREEAELALRGPETGTTDRQLGKELT

SEQ ID NO: 75455 - protein, 380 aa, unidentified
  source 1..380: note = Eremiobacteraeota bacterium
  REGION 1..380: note = tr|A0A2W5X6C5|A0A2W5X6C5_9BACT tRNA epoxyqueuosine(34) reductase QueG OS=Candidatus Eremiobacteraeota bacterium OX=2052317 GN=queG PE=4 SV=1
MDDSLPSKLRARARELGALSVRISGAESDQHTRARLSRAFARGDFQTWHYDERYAAAATIPQMLLSKARSIVCVAMPYALGPPPAHLPLRGRVSNYAWGADYHKTMRPLLGDLSRLIDDYAGAPATAIACDTAPVAERAFAARAGLGWVGKHTNLIHPDLGSFVFLGEIVTSVALPADEPLKKHCGDCTRCVDACPTGALRGDYTIDAVRCISDLTQRTDSIPRELRALVGDWIWGCDICQTVCPPTMRAPFTAQRQLPPRAHGIDLHELLRLRSGTFKREYRTSAMGWRGAAVLRRNAAVALGNALDRASVPALCGSLQDDPHPMVREHAAWALGRIGSPTALTFLKKRLKEESDHTVCREIALGLEPFLPLQALRGVV

SEQ ID NO: 75456 - protein, 411 aa, unidentified
  source 1..411: note = Filomicrobium marinum
  REGION 1..411: note = tr|A0A0D6JDU4|A0A0D6JDU4_9RHIZ Epoxyqueuosine reductase OS=Candidatus Filomicrobium marinum OX=1608628; GN = queG PE=3 SV=1
MSNRDRHFERSSATASPALLPPRTTQTSISKQTDVAPAEAVALKEAVSKRARELGFDAFGVSRPDAIALAGARLETYVAAGHHGDMAWMETTLERRRDPKALMPNARSVIAVAMSYAPDTNPMEALSQTSRGLISVYAKGRDYHDVLKGRLKQLAGYLASRSGEDVKVFVDTAPLMEKPLAAAGGIGWQGKHTNLVSREHGSWLFLGAILTAAELPPDTAGRDNCGRCQRCLDVCPTAAFPAPYQLDARRCLAYLSIESKAHIPVEFRKPMGNRVYGCDDCLAVCPWNKFASAAREAKFAARVETDNPPIAELIAIDDRAFRERFAGTPVKRTGRDRIVRNALIAAGNSQDRTMIPLVEERLKDESELVRAMAVWALSQLADPDHFADLRKAYLPREADPDVRNEWEAQSA

SEQ ID NO: 75457 - protein, 348 aa, unidentified
  source 1..348: note = Fischerbacteria bacterium
  REGION 1..348: note = tr|A0A1F5VS52|A0A1F5VS52_9BACT tRNA epoxyqueuosine(34) reductase QueG OS=Candidatus Fischerbacteria bacterium RBG_13_37_8 OX=1817863; GN = A2Y62_16770 PE=4 SV=1
MANFSRAGLTPIIKQEAKTLGFDRIGIVEKKSLQHSGYIKQWIKQGYHADMKYMAENLEKRIDINKVFGSCESIIVVAENYYKPAKRDKYMHIARYAAAKDYHGRIKAKLVSLAKTIQSMEPSLQYKAYVDTGPVMEKLWAVEAGIGWMGKHSIIINKGIGSWFCIGILLVNQTLEPDHPVKDKCGDCMRCIETCPTGAIIQPYVVDARRCISYLTIENKQEIPTDYLDKLSGYFFGCDICQEACPWNKGRFKGTSKNIINIFARHKGTEAQRHKGIEIPGEFFLDCEKEEDNYFVREEEILPVSYSKEEMEKLLLIKEQEFKRIYSGYAIRRLVFKNFRRNIQAYMK

SEQ ID NO: 75458 - protein, 374 aa, unidentified
  source 1..374: note = Frackibacter sp.
  REGION 1..374: note = tr|A0A139CPE2|A0A139CPE2_9FIRM Iron-sulfur cluster binding protein OS=Candidatus Frackibacter sp. T328-2; OX = 1785949 GN=AWU54_1149 PE=4 SV=1
MTLTEEIKEYAKIIGIDEIRITGAEPFLEVREFLMNMEERDYLSKFINNDIELITEPKQILSTAQSVIVCAISYYHEIESPPSFKEELRGKFSKFAWGRDYHQVLGEKLEQLIGFLRTKNDNLEVKKFVDTGPTVDRALARRAGIGWQGKNCSIINPDYGSWIFIGGIITNLELEFDAPIEDQCSGCRKCIEACPTGALVDEYTLKSNKCLGYITLSKGYIEKEDRRKMGTRIWGCDTCQDVCPHNQKVKFGNHSDFLPQTLEAYPQLSSLLALTNKDYEEKFKPTPMNWRGKRPIQRNAAIVLGNLKNPKAIPHLLKGLDDPKPIVRAHSAWALGEIGEPSVIGDLKKRLAKEREEEVIVEIEGVIDKLSDLC

SEQ ID NO: 75459 - protein, 374 aa, unidentified
  source 1..374: note = Frackibacter sp.
  REGION 1..374: note = tr|A0A1H7YDQ5|A0A1H7YDQ5_9FIRM Epoxyqueuosine reductase OS=Candidatus Frackibacter sp. WG12 OX=2017977; GN = SAMN04488698_10425 PE=4 SV=1
MTLTEELKEYAKSIGIDKIRITGVEPFLEAREFLMNMKERDYLSKFINNDIDLITNPKQVLPTAQSVIVCAISYYHEIESPPSFKEELRGKFSKFAWGRDYHQVLGEKLEQLIGFLRTRTDNLEVKKFVDTGPTVDRALARRAGIGWQGKNCSIINPDYGSWIFIGGIITNLELEFDAPIEDQCSGCRKCIEACPTGALVDEYTLKSNKCLGYITLSKGYIEKEDRRKMGTRIWGCDTCQDVCPHNQKVKFGNHSDFLPQTLEAYPQLSSLLALTNKDYEEKFKPTPMNWRGKRPIQRNAAIVLGNLKNPKAIPHLLKGLDDPKPIVRAHSAWALGEIGEPSVIGDLKKRLAKEREEEVIVEIEGVIDKLSDLC

SEQ ID NO: 75460 - protein, 359 aa, unidentified
  source 1..359: note = Gallionella acididurans
  REGION 1..359: note = tr|A0A139BY59|A0A139BY59_9PROT Epoxyqueuosine reductase OS=Candidatus Gallionella acididurans OX=1796491; GN = queG PE=3 SV=1
MQDGTPQKINYDELTAQIRRWAYELGFQAVGISDTDLTAAENGLLEWLSLGLHGELNYMANHGAKRSRPAELLPGTLRVISLRMNYLPSQSRDSWQVLAEGERAFISRYALGRDYHKVLRNRLANLADKIRNEVTEFNGRVFTDSAPVMEVELARKAGLGWRGKHTLLLSREHGSWFFLGEIYVNLPLPIDAPQLEHCGTCMRCIEICPTRAIIAPYRLDARRCISYLTIELKGSIPAEFRPLIGNRIYGCDDCQLVCPWNGFAQTTVEPDFAVRHGLDDVSLVELFAWDEAEFKARLAGSAIYRIGHEQWLRNIAVALGNATKSAVVVAALTRRATHQSGLVREHVEWALMRHAMTDG

SEQ ID NO: 75461 - protein, 377 aa, unidentified
  source 1..377: note = Glomeribacter gigasporarum
  REGION 1..377: note = tr|G2JAM5|G2JAM5_9BURK Epoxyqueuosine reductase; OS = Candidatus Glomeribacter gigasporarum BEG34 OX=1070319; GN = yjeS PE=3 SV=1
MGPFDDATCTQLTQRIREWGRELGFSAVGISDTDLSHAEAGFTQWIQAGYHGEMDYMVKHGSKRTRPAELVPGAQRVISVRMPYLPAATVRGQSHDWRASEHAKLAEPDRAVVSMYARGRDYHKVVRQRLQKLAERIEAQIGPFGYRVFADSAPVLEVEFGRKAGIGWRGKHTLLLQRDAGSFFFLGELYVDIPLLTDAQTAPSSAPQQDGAHCGHCTRCMNACPTGAIVAPYRVDARKCIAYLTIELHGSIPLALRPLIGNRIYGCDDCQLVCPWNKFAQMATCDDFDVRNGLDDAHLVDLFAWSADEFNRRFAGSAIRRIGHERWLRNIAVALGNALRSLLPSALRDELTAALRRRMDDSSALVREHIAWALEAA

SEQ ID NO: 75462 - protein, 324 aa, unidentified
  source 1..324: note = Gracilibacteria bacterium
  REGION 1..324: note = tr|A0A2M7FD11|A0A2M7FD11_9BACT tRNA epoxyqueuosine(34) reductase QueG OS=Candidatus Gracilibacteria bacterium CG17_big_fil_post_rev_8_21_14_2_50_48_13 OX=1974580 GN= queG PE=4 SV=1
MSPREASLHIKACAIEVGFDLCGITSSDIIPEARDRYIEWIQKGYNGGMQWLSDVQRRTNPRAVIPEAKSVIMLALNYFSRKEPEPEDGVIARYARGRDYHKVIASMQKHLILLLRKEFPEATFRSYVDYGPFMERPYAEKAGLGFIGKNGMLITEEFGSYVFLAEVLTSLELEHDAPAIRRCGTCDRCQTACPTGAFIADGMLDSTKCIAYYTIESKEDEIPEVVKKAMKGRTFGCDICQEVCPYNNRLRNKETTVPDFSPRYTSLDPEDPALRSDAAFLEKFAGTPLMRSKRKGLRRNLGLPKEDLQEGGTMVLLFRINLKS

SEQ ID NO: 75463 - protein, 286 aa, unidentified
  source 1..286: note = Hydrogenedentes bacterium
  REGION 1..286: note = tr|A0A3M2F4S7|A0A3M2F4S7_9BACT tRNA epoxyqueuosine(34) reductase QueG OS=Candidatus Hydrogenedentes bacterium OX=2030809 GN=queG PE=4 SV=1
MTDAIPLPGRARVLDVIPVKRRRRRWSGSSGKAADIRERLEELAFRNGFSDLGVVAPEIPREDRERFRRWLAQGRHGEMEYMARRVEHRLEFEDWVKSLIVLTRPYPPLRFPKGKKRYAAYAEGEDYHKTIRRALLPLAEEIRAAGGRARRFVDTSSVLERSLAARAGLGFIGRSTMLLSRTHGPYVFLCGIKTDLVLPPDSPGTGTCGECRRCIETCPGNALDEEGLDSRKCVSYLTIELKRPRTLEEERLVGEWEFGCDVCIEVCPYAKFALPPVVPRRRGVER

SEQ ID NO: 75464 - protein, 277 aa, unidentified
  source 1..277: note = Hydrogenedentes bacterium
  REGION 1..277: note = tr|A0A1J4VFX7|A0A1J4VFX7_9BACT tRNA epoxyqueuosine(34) reductase QueG OS=Candidatus Hydrogenedentes bacterium CG1_02_42_14 OX=1805216; GN = AUJ18_00695 PE=4 SV=1
MDIGYISSRELKMEKLKERIVIAGLTAGFGEIGFARSRVLNQDIEFMADWISKKRYADMNWLARNFERRGTPPEWVRTIIVAVKPYHPLEWNADEKRYSAFADGDDYHAAISAMLSGLLKEINTVGGRAKTCVDTSAIFEKAWAKEAGLGFIGKNKIFVSEKFGPFVLLGLVLTDLELPADEKKSNLNCGNCRLCIDRCPTSALDEFGLDVRRCISWMTIEKKSELSEEEKIIVGNRIFGCDECLLACPWSKKSLPSRRPTHLAISKRKPRMNIDKY

SEQ ID NO: 75465 - protein, 347 aa, unidentified
  source 1..347: note = Hydrothermae bacterium
  REGION 1..347: note = tr|A0A496U6Q1|A0A496U6Q1_9BACT tRNA epoxyqueuosine(34) reductase QueG OS=Candidatus Hydrothermae bacterium OX=2250085 GN=queG PE=4 SV=1
MIEEVKDYIKELGIEIFAIIKPLDFSFRKDYLIRWISSRFHGEMDYMARNLEKRLSPEKLYPEVKSILIVGIPYDTLRWNDIDKKGRGLISKYAIRRDYHRVIKKKLKKILSFLREKNSEIQGRIYVDSAPVLEKELARLAGIGFIGKNTMLISKKFGSYFFLGELFLNIELEEIKHPPVPLLCVSCKRCVEACPSEAIVKPYILDASRCISYLTIEYRGIIKDELENQMGQWIFGCDECQEVCPFNRKNKPLEVSLIPDEKRLANIKLEELILLRKEDFEEIFKGTPVKRAGYEMFMRNVFIAAGNSGKKELLQSLRKREKDFLQNPIVYHHLLRAIKKLENNCSE

SEQ ID NO: 75466 - protein, 329 aa, unidentified
  source 1..329: note = Izimaplasma sp.
  REGION 1..329: note = tr|A0A088T2V9|A0A088T2V9_9BACT Epoxyqueuosine reductase OS=Candidatus Izimaplasma sp. HR1 OX=1541959; GN = queG PE=4 SV=1
MNNIILDVGEKMKDKVISILEKQTDTYSFLNVDTYIKNHKENSMHGNFDNYAFLNKFKTIITLAFPYPKKEVKYMGKGYGILARFSYSNDYHKVIASKLDEVISGLNTLGIKGYGSVDVSKIDEKYAASLSGIGYFGKHSILINPQYGSYMFLATILIDKSLNEDYKVVGSECGDCTICIDVCPSNALEDGFNRDKCISHLSQTKMPFNEEQISYFKSMIYGCDICLKACPKNKGIDFHKIEEFEPNGIENIWLEDMLLMSKKEFRKKFGNNTSHWIGASTMRRNALCIIGNQKLVEYIPKIKKSMSVYKDNLWYNKTADIVLKKLERE

SEQ ID NO: 75467 - protein, 317 aa, unidentified
  source 1..317: note = Izimaplasma sp.
  REGION 1..317: note = tr|A0A2A1ZLL2|A0A2A1ZLL2_9BACT Uncharacterized protein OS=Candidatus Izimaplasma sp. ZiA1 OX=2024899; GN = CI105_08655 PE=4 SV=1
MKKIINKVLSSSSFDDYSYVSVNEYIKQRSLVFSNDNFSDYSKLKDYQTIITVLMSYPSETVPYKGKGYGILSRYSYGTDYHIVLNKELDKVTKVLNEYDIKTHSSVDISFIDERFAASLSNLGYIGKNNFLINKKYGSYVYLATILIDKLVEEDINVKDDCNGCSICVDACPVSALDNHLDVSKCLSALSQNKEIQSVSTLKHYKEMIYGCDICQNVCPKNKLIDFHLHPEFEPSGIENIKVIDLFKMSNKEYKDIYLNNASSWKGPLIIKRNALGIIINQNLVEFIPVLTESMVKYKDVLWYYETVKAAIKEIRK

SEQ ID NO: 75468 - protein, 387 aa, unidentified
  source 1..387: note = Jacksonbacteria bacterium
  REGION 1..387: note = tr|A0A351ISI3|A0A351ISI3_9BACT Epoxyqueuosine reductase OS=Candidatus Jacksonbacteria bacterium; OX = 2053562 GN=queG PE=3 SV=1
MPKLSEKIKEYALNECFFDVIGFAPVQPSDHHTIVQNWVKQGYHGGMKWYERSVDTRVNPQKLFDSAKTIITLGVNYYPFDYPEEVLNDPSRGIIARYAVYDDYHEILLPKLIQLKEFIEKELGRKIEYRAYVDTGPVLEREIAARAGTGFIGRNTTLINFEYGSWVLLAELVVDVELGIRTVETLPWGVSNDETRKGHVSTPATCGTCTRCIDICPTKALVSPYTLDANKCISYLTIEHRGIIPREFRSAMKNRIYGCDICQEICPWNKSRQKQSTHPDFHARMDLYAPKLLDLFPMSQSHFSARFKNSPIKRAKREGFVRNVLVALGNWADPSLVPILEHGLQDESPVIRAHTVWALRHIGTQNAKDVILKHKSREIHPRVLEEI

SEQ ID NO: 75469 - protein, 324 aa, unidentified
  source 1..324: note = Kapabacteria thiocyanatum
  REGION 1..324: note = tr|A0A1M3KY48|A0A1M3KY48_9BACT Epoxyqueuosine reductase OS='Candidatus Kapabacteria' thiocyanatum; OX = 1895771 GN=queG PE=3 SV=1
MDDERYIRTQAVKQAALDAGFDAVAIARAEPLDEEYAMYREWLDRGYHGSMHYMERNGESRRDVSAIVPGARSVVVVARNYYTPSIHPDGTVGKLSRYAWGDDYHVVLPPMLDDLCERIRGIVPGAETRRYTDTGPVMEKQWAVRSGLGWMGKNGNILRRDIGSWFFLGVVITTADLEADTPMADYCGTCTACLDACPTQAIVQPSVVDATKCISYWTIETKGDTDIPLEIVRNLDGWLYGCDTCQDVCPWNRFQTPTSEARFEPREGETFLKLDDVLNLQPDNFVIRFRNSPIKRPKLAGLQRNARALGAHHSNNRDIHGSES

SEQ ID NO: 75470 - protein, 363 aa, unidentified
  source 1..363: note = Kentron sp.
  REGION 1..363: note = tr|A0A450S5Z1|A0A450S5Z1_9GAMM Epoxyqueuosine reductase OS=Candidatus Kentron sp. DK OX=2126562 GN=queG; PE = 3 SV=1
MDYRRLREDIGRWGAELGFREIGIASIKLGEEERQLRAWLAAGYHGEMAYMARHGHKRTRPAQLVPGTRRVISACMDCLPEGGMEEAARVLGDPTRGYIARYALGRDYHKVLRRRLAHLVGKIEETLEREGVRRPAPGKSRVFVDSAPVLEKPLARNAGIGWIGKHTNLVRRDGGSWFLLGEIYTDLPLPVDEPAPRRGHCGTCRACMTACPTGALIAPRRLDARRCLSYLTIEYRGAIPLEFRPKIGNRIFGCDDCQLACPWNRFAGAAKEPDFLPRDGLDNPDLIDLFRWPEAEFLERTAGSALRRIGYEGWLRNVAIAIGNAPPSPRAIAALEARIGHPSPLVSEHAAWALARQRSKMAG

SEQ ID NO: 75471 - protein, 386 aa, unidentified
  source 1..386: note = Kentron sp.
  REGION 1..386: note = tr|A0A451A3N3|A0A451A3N3_9GAMM Epoxyqueuosine reductase OS=Candidatus Kentron sp. UNK OX=2126344 GN=queG; PE = 3 SV=1
MDYQRLREDIKCWGQELGFRQVGISSIRLADDERRLQAWLAAGYHGEMHYMARHGHKRSRPAELVPGACRVISASMDYLPAAGIQGATQVLRDPRRGYVARYALGRDYHKVLRRRLARLLERIVERTGRGQYRMARAANRDNTHDWKASPAFLANFGHSDADSLGGRVFVDSAPVLEKALARNAGLGWIGKHTNLIAREAGSCFLLGEIVTNAPLPPDRPSQGHCGACRACMMACPTDAIVAPYRLDARRCIAYLTIEYRGAIPLELRPKIGNRIFGCDDCQLACPWNRFARAARERDFLPRNGLDAPSLVDLFRWSEAEFMERAQGSALRRVGYACWLRNLAVAMGNAPPSKRIAAALEERMGHPSPLVTEHVAWALARQRRIGS

SEQ ID NO: 75472 - protein, 350 aa, unidentified
  source 1..350: note = Kerfeldbacteria bacterium
  REGION 1..350: note = tr|A0A359MWL1|A0A359MWL1_9BACT tRNA epoxyqueuosine(34) reductase QueG OS=Candidatus Kerfeldbacteria bacterium OX=2053565 GN=queG PE=4 SV=1
MDDTMNLVHYAKEHLGFTQIGVLPVSPATTFPYFTDWVDHRYAADMDWMHTDGRKEKRASVDQVLSDAKSVITLAYTYRTEDLPPEILNDPARGIFARYTWGRDYHQVIKRKLLDLIHHLETELGTTIQARAYVDTGPILERELAERAGIGFTGNNSMLISPLFGSYLFLSEIIIDQELPVVSVKARGGCRTCRKCVKRCPTNAIVENKVIDARRCISYLTIESKGVIPEALRPLMKNRVYGCDICQEVCPWNGTPQARSTKNDWLDAALERQAPYLTDLAKLTEADFRERYRGTPIVRAKRRGLLRNVAVSLGNWGSPDAVAALEQLARDPDELISAHALWGLHQIISN

SEQ ID NO: 75473 - protein, 334 aa, unidentified
  source 1..334: note = Kerfeldbacteria bacterium
  REGION 1..334: note = tr|A0A1G2BGG9|A0A1G2BGG9_9BACT tRNA epoxyqueuosine(34) reductase QueG OS=Candidatus Kerfeldbacteria bacterium RIFOXYB2_FULL_38_14 OX=1798547; GN = A2319_03785 PE=4 SV=1
MPVSPSKTFFHFKNWLQAGNQAQMHWLARPDAVDKRADLRKIMPNAQSVLVLGFRYTPPAIPQNLLNDPARGIIARYALYDDYHQILKQKLKLIVVSLKQSLGDFSDKIYVDTGPILERELAVYANLGFIGRHSNLIHRQLGSYLFLAEIITSVKKENFLFFEKKLTVSQNNACQLCHKCQTNCPTQAIVDNKIIDARKCISYLTIEHQGVIPSALRPLLKNRIYGCDLCQEVCPYNQTAQAQKAVVKNDFTQHPDLVAPLLESLLFFQEEEFKEKFKNSPILRAKREGLMRNVAVALGNWHHPRARILLKQILRKDPSLLVRTHAQWGLMRQY

SEQ ID NO: 75474 - protein, 542 aa, unidentified
  source 1..542: note = Kryptonium thompsoni
  REGION 1..542: note = tr|A0A0P1LNF0|A0A0P1LNF0_9BACT Epoxyqueuosine reductase OS=Candidatus Kryptonium thompsoni OX=1633631; GN = queG PE=3 SV=1
MNKHELTQEIKRKAIEIGFSKVGIARVEELEQESVKLSNWLERKFHADMNWMGKNFDKRTNPKEILPEAKSIISVALNYFQKIPPAEPHQGRISIYALGQDYHIILKLKLEKLLDFIRQIVPDVKAKIYVDTGPVMEKVWAMRAGLGWIGKHTNLITREFGSWVFLGEIICDLELIYDEPIADFCGKCTRCIDACPTEAIVEPYVLDSNKCISYWTIEYKGDLFPEHIANKFENLIFGCDICQEVCPWNLKFQKETNITEFKAFDHNINPDLFELSKLNEESFKSLYKLSPIKRAKFHGFMRNVKNAIKNLALQKLLNLDFKCAIFDLDGVIADTFKLHRQSWGEICARFGYSLSDEEFKKIIFGRRGEESAKILFNGKITEEEARYIGIEVDRIFRKIAVGNLKTVDGVIEFIRILKENSIKIALATSAPDENVELIFSELNLHGLFDVVVTSKDVKHGKPAPDIFILAGQKLGCKPRECIVFEDSIAGLIAAKNADMLAVGVETTLDKNELMNYADVSIKNFNEVLRNLKLNKKVNNATN

SEQ ID NO: 75475 - protein, 303 aa, unidentified
  source 1..303: note = Lambdaproteobacteria bacterium
  REGION 1..303: note = tr|A0A1F6GET0|A0A1F6GET0_9PROT tRNA epoxyqueuosine(34) reductase QueG OS=Candidatus Lambdaproteobacteria bacterium RIFOXYD2_FULL_50_16; OX = 1817772 GN=A2527_03445 PE=4SV=1
MQTQIKDILLQAGFPLVGFVGEAQAQFGDWYKKWLERGYQAEMAYMERNLAIRETPLVIEPWAKSMVVVGVPYKTQPPKGWEQKPPISCYAWGEDYHHWIKKRLRLALSQLSTEIPGFIGRALVDSAPIPEKLLAQRAGLGWIGKNSLLIHPKYGSYLFLAAVVTNLELESSQPLAQNCGDCALCLDACPNSAIKPRGFVDARLCISYLTIEKRGEFKPGQERLLAGSLFGCDRCQEVCPVNIQAPIQTDSPFCFDPKWSPTSPQWVLDLDLATFDQLKIKSPLKRAGLKGLQRNARAVLAYK

SEQ ID NO: 75476 - protein, 107 aa, unidentified
  source 1..107: note = Lambdaproteobacteria bacterium
  REGION 1..107: note = tr|A0A1F6GQZ3|A0A1F6GQZ3_9PROT Uncharacterized protein OS=Candidatus Lambdaproteobacteria bacterium RIFOXYD2_FULL_56_26 OX=1817773 GN=A2557_10440 PE=4 SV=1
MVDANWCISYLTIEHIGPFTPVQAKATRGSLFGCDRCQEGCPYNQKAPVQPGGPFAFDPRWEGLEPAKVLGWSEREFEALKVKSPVKRAGLEGWVRNAKAALGEQDP

SEQ ID NO: 75477 - protein, 313 aa, unidentified
  source 1..313: note = Latescibacteria bacterium
  REGION 1..313: note = tr|A0A3N5WLC9|A0A3N5WLC9_9BACT tRNA epoxyqueuosine(34) reductase QueG OS=Candidatus Latescibacteria bacterium OX=2053570 GN=queG PE=4 SV=1
MNAEDAAREIGGEAARLGFDAFGAAPAAVPEIERERIDRWIAKRMHGTMAWMERSAAVRKDPTLLLPGARSVWIGAVNYFHEAPRREGDGRVSIYASGRDYHRAIGGLLRRLAETARRVFPGAAVRPFVDSAPVLEKYYAERAGIGWRGKHSNLIVPGAGSWFFLAGFLIDRDLAPGERAADRCGSCTACIDACPTGAIPAPYTVDGSRCISYLTIEHRGAVDSDLAARSGDWIFGCDICQEVCPWNRFAKPARLTDFHPRAGGASIGLEEALQLGRERFDARFEGSPLRRAGWERFRGSVERAIANRDPERE

SEQ ID NO: 75478 - protein, 372 aa, unidentified
  source 1..372: note = Latescibacteria bacterium
  REGION 1..372: note = tr|A0A1V5ZNM8|A0A1V5ZNM8_9BACT Epoxyqueuosine reductase OS=Candidatus Latescibacteria bacterium ADurb.Bin168 OX=1852850 GN=queG PE=4 SV=1
MGVDILTILRRHGRVHGLIGPFVAPKLTPDTWEPFCEWLDAGLAGDMVYLNRRRNERRDVRCLNPRARSLVVYALPYSGAPPGTETVHSGLLSAHATGEDYHHRCRNALEKVVEALRTELRTHVEGWIHVDTAPILERDFARQAGLGWVGKNTLLINPDLGSRFHICEIALPFDLPATPVVVPDGCGACTRCLDSCPTGALVAPRVLDARRCFSYLTIEYKGSIPRELRPVLGTRIFGCDTCQDVCPWNQKATVRSFSDAETLAMDAVDILDLDQGGFRTRFRNTPFERTGRTRLIRNTAVVAGNLKTQKATDSLLRLLKDTEPLLREHAAWALARVRGREAAESIRVAYEKETDARTRSDMALSLRDARET

SEQ ID NO: 75479 - protein, 367 aa, unidentified
  source 1..367: note = Macondimonas diazotrophica
  REGION 1..367: note = tr|A0A4Z0FDK1|A0A4Z0FDK1_9GAMM Epoxyqueuosine reductase OS=Candidatus Macondimonas diazotrophica; OX = 2305248 GN=queG PE=3 SV=1
MTVLANASSSSSGMRDPVALAREIKRWGVELGFQQVGISAFDLDDDADRLDAWLADGFHGEMGYMARNTGLRRHPEGLVPGSVRAICVRMDYRPVAEYPDHVLNVPALGYVARYALGRDYHKVLRKRLEQLARRIADAIGPHGYRVFTDSAPILEKALARQAGLGWIGKHTNLLDRQAGSWFFLGEILTDLPLPVDQPLDAHCGSCRACIDICPTGAIVGPYRLDARRCISYLTIEHHGPIPESLRPFMGNRIYGCDDCQLVCPWNRYAALSGEEAFAPRHALDAPRLVDLFGWDEATFESRLAGSPVRRIGHIRWLRNLAVAMGNAPPDPAIAAALAARLDHPAELVREHVHWALARQQTTRQGAQ

SEQ ID NO: 75480 - protein, 305 aa, unidentified
  source 1..305: note = Marinimicrobia bacterium
  REGION 1..305: note = tr|A0A2D8PG42|A0A2D8PG42_9BACT tRNA epoxyqueuosine(34) reductase QueG OS=Candidatus Marinimicrobia bacterium OX=2026760 GN=queG PE=4 SV=1
  VARIANT 274: note = Xaa can be any naturally occurring amino acid
  VARIANT 278: note = Xaa can be any naturally occurring amino acid
  VARIANT 280: note = Xaa can be any naturally occurring amino acid
MSYSLTQHIKDKAKDIGFEKIGITQAVSTNEEKVQLVDWLKNKHHGSMSWMEKRKDERGNIFNYFKEAKSVISVGLNYYSGHDQNDLESNNKFSNYAWGDDYHQIIKSKLYELLQFIKVEYPEIKGIVCVDTSPIMEKVWAQRAGLGWQGKHTNLITRDYGSWIFLGEILLDIELDYDDEFIDDLCGSCTACIDSCPTNALGDYEIYAEKCISYFTIEHRGEFKSNTELHNWIYGCDICQEVCPWNQKFSQITNEKNFYPKMEILSWTDKDWEXINEXEXRKIFKGSAVKRTKHVGLLRNIKEDK

SEQ ID NO: 75481 - protein, 315 aa, unidentified
  source 1..315: note = Marinimicrobia bacterium
  REGION 1..315: note = tr|A0A3M7KJU8|A0A3M7KJU8_9BACT Epoxyqueuosine reductase OS=Candidatus Marinimicrobia bacterium PRS2; OX = 2483458 GN=queG PE=3 SV=1
MSTIELSQFIRTSASKLGFSKLGIAPATAQQQSTNKLKSWLQMGYHSTMYWMEKRADERGDVGKYYPEAKSVISLGINYFTGNALPESDVGKISNYAWGDDYHTLIKSRLYQLLGKIKTKFPHINGIACVDTAPIMEKDWAQRAGIGWIGKHTNLITRDYGSWIFLGELLLDVKLEYDTPFEDDLCGTCTACLDACPTNAFPEPYVLDASKCISYLTIEHRGDLPTELEDKLSGWIYGCDICQEVCPWNITFSHLSNENSFQPRENLKERPIRQWEKLTEEEYRRLFKKSTVKRTKYAGLKRNIESARKSLCESL

SEQ ID NO: 75482 - protein, 358 aa, unidentified
  source 1..358: note = Melainabacteria bacterium
  REGION 1..358: note = tr|A0A317IQN6|A0A317IQN6_9BACT tRNA epoxyqueuosine(34) reductase QueG OS=Candidatus Melainabacteria bacterium OX=2052166 GN=queG PE=4 SV=1
MDTKQTILHLARSLGFQRTVVASLTPMRRSLARYEEWIDKGYAGEMNYLKRDPKARHSPALLFPEARSAIIVSVSYYTPLPPDPGLYFGRVASYAVGLDYHAVLRKKIRELKTALETELGQPLLGKAYTDDVPLQERSLAARHGLGFAGRNTLIIGPKLMGSFNFIGELLTDLPLDADEPYVGTCGKCFRCGVQCPTDAILPEGQLNSNLCISYLTIENKGAIPIELRPKVGQWLFGCDVCQEVCPYNQRPPETPWPEFQPESGVGHYIDLLSLLEIKDEEEFLTRFRHTALRRPKRRGLLRNALVVLGNRLREQKAMGSRPDHVIERIEQYRDSESDPMLREHAEWAMAQYSARAAS

SEQ ID NO: 75483 - protein, 381 aa, unidentified
  source 1..381: note = Melainabacteria bacterium
  REGION 1..381: note = tr|A0A1F6QMX7|A0A1F6QMX7_9BACT tRNA epoxyqueuosine(34) reductase QueG OS=Candidatus Melainabacteria bacterium RIFCSPLOWO2_12_FULL_35_11; OX = 1801609 GN=A3F80_07365 PE= 4 SV=1
MSDLKQLITNIAFDLGFDAAGITLADNLSKSNEHFLSWRKSGFAGDMNYLLRNNPINAKPGKIVQNAKSVISLLVNYYTEPPEEPGPNFGRVAAYAVGLDYHKVLKKKIKQFQERIQKEISGEFVSRGFSDSVPLLEKSFARNSGLGFFGKNTLIINKPFGSYFFICELISNLNIEPSEEQTGTCGKCTRCVDACPTGAFNTPTIPLLDARLCISYLTIENKINIPVNLRSKIGGWIFGCDLCQMICPYNKKIKETTWEEFKPKSGFGHWLNLKEVLSIRSDEEFHSKFCHTPLNRPRRQGLLRNAAIVAGNKLSEEALPELIWLAENESNSVIREHVLWALLKYDDRKAKQISYYSDVTARSVNDEATVIISNALTTPYE

SEQ ID NO: 75484 - protein, 396 aa, unidentified
  source 1..396: note = Methylomirabilis lanthanidiphila
  REGION 1..396: note = tr|A0A564ZHH3|A0A564ZHH3_9BACT Epoxyqueuosine reductase OS=Candidatus Methylomirabilis lanthanidiphila; OX = 2211376 GN=queG PE=3 SV=1
MNAKPQEPDVVALTPERLAQAITGEARRLGFELVGIAPVDDPLHEQAFADWLQAGYSGEMAYMARTEQARRHPHTWMPWARSVVSVAINYATPFPHETRDTGVPRGWISRYAWGDDYHEMMESRLESLLSWIRDTVGGEIQGKVYVDTGPVLEHEFAVRAGIGWIGKNTLLISPQHGSYFFLGELFLSLELPADQPIRNRCGSCDLCLKACPTDAFVGPYRLDARRCISYLTIELKGRIPAEMRPLIGDHIFGCDICQEVCPYNINIGASKEPAFQPREGLHAPELIPLLALGDEQFRSRFKGSPIKRSKRRGFLRNVAVALGNNGSEKSVPALTPLLADPEPLVRSHAAWALGRIGTTEARAALDDARTRETDPDVHAEITQALIACALSPSPSL

SEQ ID NO: 75485 - protein, 396 aa, unidentified
  source 1..396: note = Methylomirabilis oxyfera
  REGION 1..396: note = tr|D5ML55|D5ML55_9BACT Epoxyqueuosine reductase; OS = Candidatus Methylomirabilis oxyfera OX=671143 GN=queG; PE = 3 SV=1
MSVAQNEADMAALTPEQLAQAIKAEARRLGFELVGISPVIDPPHEQSFADWLQEGYSGEMAYMARTEQARRHPEAWFPWARSVVAVAMNYYTPFPRETPPSDVPRGWISRYAWGEDYHTTIESRLDALLGWIRHTVGEEVQGKVYVDAGPVLEKGFAGLAGIGWIGKNTLLISPKHGSYFFLGELFLSLELPEDQPIRNRCGSCDLCLKACPTDAFVGPYRLDARRCISYLTIELKGSIPAEIRPLIGEHIFGCDICQEVCPYNINIGVSAEPTFQPREGLHAPELIPLLALDDEQFRSRFKGSPLKRSKRRGVLRNVAVALGNLGSKESVPALAKLLSDPEPLIRGHAAWALGRIGTTEARTALDEACARETDPDVQAEMTQALIACALSPSHGP

SEQ ID NO: 75486 - protein, 357 aa, unidentified
  source 1..357: note = Methylopumilus planktonicus
  REGION 1..357: note = tr|A0A5B8D435|A0A5B8D435_9PROT Epoxyqueuosine reductase OS=Candidatus Methylopumilus planktonicus; OX = 1581557 GN=queG PE=3 SV=1
MADIWDQLALQIKDWGQEIGFAQIGIADIDLNHTKDHYLEWIKQGFHGEMHYMVKHGSRRYQPDELVPYTIRIISARLNYFPHSHNSEAVLEDDQKAFISRYALGRDYHKVMRAKLKKLSEKIQKEAHKTLDQSFEFRLFTDSAPVMEVELAEKSGLGWRGKHTLLINKEHGSWFFLGEIYINLPLPVDKKVENHCGTCTSCMDVCPTKAIVGPYKLDARKCISYLTIEHKSSIPLEYRKQIGNRVYGCDDCQLYCPWNKFGQMTKEDDFKVRHGLDDIELVECFLWTEAEFIKYMEGSAILRIGYEQWLRNIAIGLGNAKTSETIVNALKGRLSEASPLVKEHISWALAQHNFHMN

SEQ ID NO: 75487 - protein, 357 aa, unidentified
  source 1..357: note = Methylopumilus universalis
  REGION 1..357: note = tr|A0A5B8CYW3|A0A5B8CYW3_9PROT Epoxyqueuosine reductase OS=Candidatus Methylopumilus universalis; OX = 2588536 GN=queG PE=3 SV=1
MADIWDQLALQIKDWGREIGFNQIGIADIDLNHTKDHYLEWIKQGFHGEMHYMVKHGSRRYQPDELVPNTIRIITARLNYLPHSHNSETILEDGQKAFISRYALGRDYHKVMRTKLKKLSEKIQKEAHKTLDRSFEFRLFTDSAPVMEVELAEKSGLGWRGKHTLLINKEHGSWFFLGEIYINLPLPVDKKVENHCGTCTSCIDVCPTKAIVGPYMLDARKCISYLTIEHKSSIPLEFRKQIGNRVYGCDDCQLFCPWNKFGQITKEEDFKVRHGLDDIELVECFLWTEAEFIKYMEGSAILRIGYDQWLRNIAIGLGNAKTSETIVNALKGRLNEASPLVKEHISWALAQHNFHMN

SEQ ID NO: 75488 - protein, 246 aa, unidentified
  source 1..246: note = Methyloumidiphilus alinensis
  REGION 1..246: note = tr|A0A2W4SXE8|A0A2W4SXE8_9GAMM tRNA epoxyqueuosine(34) reductase QueG (Fragment) OS=Candidatus Methyloumidiphilus alinensis OX=2202197 GN=queG PE=4 SV=1
MSIISSPQSQAPHSSVRQLDSDQLAELAHKIKQWGMQLGFQQVGIADIDLSEAEGHLNAWLKAGFHGEMGYMERHGSKRTHPDELVPDTVKVISVRMDYLPENRVSMRDNMENPLAAYISRYALGRDYHKLMRSRLQKLASYIEADVGHFGYRVFSDSAPVLEKALAAKAGLGWIGKHSNLIHREAGSWFFLGEIYTSLDLPLDSSVKENCGTCSACLVICPTRAIVAPYRVDARRCISYLTIELH

SEQ ID NO: 75489 - protein, 127 aa, unidentified
  source 1..127: note = Micropelagos thuwalensis
  REGION 1..127: note = tr|U2XNG4|U2XNG4_9PROT UPF0102 protein RS24_01675; OS = Candidatus Micropelagos thuwalensis OX=1397666 GN=queG; PE = 3 SV=1
MIFTEKKKLQNKKIQAYRRGIRAEIVAGLYLSVTGWRVLVWRWKCPLGEIDLVAKRGKIISFIEVKARRNEQAAIDSITAHQWRRISNAADLFMARHGQYADCSWRFDAIIIVPRKWPRRFKNMWLD

SEQ ID NO: 75490 - protein, 400 aa, unidentified
  source 1..400: note = Micropelagos thuwalensis
  REGION 1..400: note = tr|U2WTD5|U2WTD5_9PROT Epoxyqueuosine reductase; OS = Candidatus Micropelagos thuwalensis OX=1397666 GN=queG; PE = 3 SV=1
MTSKIENHAHIDAPEDLTRLFRDIAHAEGFDAVGFVSPDAIPEAATRLHEFISAGRHGDMDWMETHQTRREAPLNLWADVKTVIMLGMNYGPDTNPLDALEVKEKGVISVYARGHDYHDIIKKKLKKLARRLVEETGGAVKVFVDTAPIMEKPLAEAAGLGWQGKHTNLVSRTFGSWLFLGSIFTTSDLPKDTPEIDHCGSCSACLDICPTDAFPEPYKLDARRCISYLTIEAKSQIPLEFRSKMGNHIYGCDDCLTVCPWNKYASISREAKLHARTELTAPDLLTLVKLDDTNFRALFRASPIKRTGRDRFVRNVLIAIGNAAGAANNAQRLKYLTAIESRLADTAPLVRGMAVWALGQYLSADDMKSRATNVLSDSSSGVVSAQEMDETVRAEWEFWL

SEQ ID NO: 75491 - protein, 429 aa, unidentified
  source 1..429: note = Microthrix parvicella
  REGION 1..429: note = tr|A0A359A4B3|A0A359A4B3_9ACTN tRNA epoxyqueuosine(34) reductase QueG OS=Candidatus Microthrix parvicella OX=41950 GN=queG PE=4 SV=1
MRRQPAEPQRPAGPSVGCPPLRRRIVSIPLNVTASPGLDRLADRLLEVGREAGLVSVGICDTQPFLEARQELFDRREAGLAGTMAFTYRNPERSTDPQRLLRNAASLVVGAVSYRQPRTDVGAIGEPTARVARYATDDYYTTLRSALERVAEELRTAGYRARVVADDNALVDRAAAVRAGLGWIGRNTGLIAPEEGGEVVLGSVVTDAELPGRGTPVEDGCGSCRACEPACPTGALADGRLDARKCLAWLVQAPGEFPREHRAALGDRLYGCDECTVVCPPSRVAARRHGDGPLGDDPGPTVVVLDLLGLDDEEVLERYGRWYLPGRDPDALRRNALVILGNTGHAGRDPRNGGHPVDSEVEAALVRYLGGESELLAGHAAWAALALGRDDLVRPHRHRSAVAAELASFQPSEQQPSQQPPGIDQTGAS

SEQ ID NO: 75492 - protein, 404 aa, unidentified
  source 1..404: note = Microthrix parvicella
  REGION 1..404: note = tr|R4YXF1|R4YXF1_9ACTN 4Fe-4S ferredoxin-type domain-containing protein OS=Candidatus Microthrix parvicella RN1 OX=1229780 GN=BN381_140043 PE=4 SV=1
MSIPLNVTASPGLDRLADRLLEVGREAGLVSVGICDTQPFLEARQELFDRREAGLAGTMAFTYRNPERSTDPQRLLRNAASLVVGAVSYRQPRTDVGAIGEPTARVARYATDDYYTTLRSALERVAEELRTAGYRARVVADDNALVDRAAAVRAGLGWIGRNTGLIAPEEGGEVVLGSVVTDAELPGRGTPVEDGCGSCRACEPACPTGALADGRLDARKCLAWLVQAPGEFPREHRAALGDRLYGCDECTVVCPPSRVAARRHGDGPLGDDPGPTVVVLDLLGLDDEEVLERYGRWYLPGRDPDALRRNALVILGNTGHAGRDPRNGGHPVDSEVEAALVRYLGGESELLAGHAAWAALALGRDDLVRPHRHRSAVAAELASFQPSEQQPSQQPPGIDQTGAS

SEQ ID NO: 75493 - protein, 361 aa, unidentified
  source 1..361: note = Moanabacter tarae
  REGION 1..361: note = tr|A0A2Z4AHN8|A0A2Z4AHN8_9BACT Epoxyqueuosine reductase OS=Candidatus Moanabacter tarae OX=2200854; GN = queG PE=3 SV=1
MLRTQKSDRSTPLGSEELKEDLRSIATSLGFQVCGIASVDAPLRRDFYLKWIAEGKQADMEWMHRNNNRRLHPSNVLPGARSIICVGLNYYQPQPKRRGRIAKYALGEDYHDLMSQRLRALCRWLQEKGGTNKPYVDTGPVLEKSIAVQAGLGWQAKSTMLLNSTFGTWLLLGEIFTTLEIPPDRPQNDHCGKCTACIDACPTGAITAPYQLDPRKCISYLTIEHKGPIPYPYRAAIGDRVFGCDDCLDVCPWNRWARITQEAKLQSRHYPDLREMLAWGDGEFRRFFRKTPVMRLGRVRWIRNVCIVLGNIGTNADLAALQICAQDPEPLIAEHAAWAISRIEDKDRKAESPRAGNGSNP

SEQ ID NO: 75494 - protein, 303 aa, unidentified
  source 1..303: note = Moduliflexus flocculans
  REGION 1..303: note = tr|A0A081BSN4|A0A081BSN4_9BACT Uncharacterized protein OS=Candidatus Moduliflexus flocculans OX=1499966; GN = U14_05700 PE=4 SV=1
MRPLFIQEAFTNGEKAALLPIHRLQHLKDEIAQFKHDEALNGFQQWIVNDLYSFDVPTAEFVISSIILLAVPHPFYAPVEFIHRGKIYHCLSLVMSDFDRAEQSLQKALQSRNYQIIAAPNIPLKRLAVQSGFAAYGRNNICYIDGMGSNFSFSAYFSDMPCDDDDWTAAKMASNCAHCTVCVKHCPTKAIRMDRFLIDNERCLSYLNESGEPFPEWLPKTAHHCVYDCLRCQMVCPMNAAQVKQVGELIRFTESETEQLLAGAYADTFSASFKKKAVYLGLHQWPDGIAKNLKALMELSDRP

SEQ ID NO: 75495 - protein, 342 aa, unidentified
  source 1..342: note = Moduliflexus flocculans
  REGION 1..342: note = tr|A0A0S6VTF5|A0A0S6VTF5_9BACT Uncharacterized protein OS=Candidatus Moduliflexus flocculans OX=1499966; GN = U14_02046 PE=4 SV=1
MNAAWIKTTAQELGFHLVGIASAERPPEADFLQEWLRKGFAGEMTYLSRNVEKREHPRLLFPPARSIIVCGLSYHSRTDETERISPQPIGQISRYARGADYHHVLKEKLFALLHLMQADTPRPIVAKVCVDTAPLLERACAKSAGLGWIGKHGGVINPRYGSWCFLGEILVDFECEYDTPMKDGCGACTRCLDACPTGALIAPYTLDARKCLSYLTIEHRGVIPETLRPALGNCVFGCDRCQEVCPYNQQADAPGLAEFLPRESLKHLSLEWLATLSEHDFPHIFADSPILRTGWRGLLRNTAVAIGNSHDRDLLPVLRQLSRSPESLIREHAEWGMTRLLS

SEQ ID NO: 75496 - protein, 361 aa, unidentified
  source 1..361: note = Muproteobacteria bacterium
  REGION 1..361: note = tr|A0A1F6UXF5|A0A1F6UXF5_9PROT Epoxyqueuosine reductase OS=Candidatus Muproteobacteria bacterium RBG_16_60_9 OX=1817755 GN=queG PE=3 SV=1
MESPAALIEPDFTELAERIKRWGGELGFQQVGITNVDLADAEVHLHEWLRQQRHGDMHYMERHGVRRSRPAQLVPGTIRVISARMDYFPNARDPEATLADSADAYVSRYALGRDYHKVLRARLRRLADQIEGEIGSFGYRVFTDSAPVLEKALAEKAGLGWIGKHTNVIARDAGSWFFLGEIYTDLPLPIDAPATNHCGTCAACIDVCPTRAIVAPYQLDARRCISYLTIELRGSIPEELRPLLGNRIYGCDDCQLVCPWNRYAHLAPEPDFAPRHGLDASMLITLFAWSEQEFLQRTEGSAIRRINYEQWLRNIAVALGNAPTSGVVIQALDDRRNYPSELVREHVAWALVQHSRLAKVY

SEQ ID NO: 75497 - protein, 355 aa, unidentified
  source 1..355: note = Muproteobacteria bacterium
  REGION 1..355: note = tr|A0A1F6U071|A0A1F6U071_9PROT Epoxyqueuosine reductase OS=Candidatus Muproteobacteria bacterium RIFCSPLOWO2_01_FULL_60_18 OX=1817768 GN=queG PE=3 SV=1
MHTARNNKIDLTRLATDIKAWGRELGFQRIGIADVELGDAETRLLNWLDRERHGEMHYMESHGTRRSRPQELQPGTLRVISARMDYLPGHAADSEAVMHNPSLGFISRYALGRDYHKVMRGRLQKLAERIESKVGPFQYRAFTDSAPVLEKALAEKAGLGWIGKHTNLIDKQTGSWFFLGELYTDLPLPVDAPAENHCGTCHACLDVCPTQAIVAPYELDARRCISYLTIELRGSIPEDLRPLIGNRIYGCDDCQLVCPWNRFARPTTEPDFAPRHDLDAPELIRLFSWTEEEFMKYTEGSAIRRIGYECWLRNIAVALGNAPTSGAIVNALRIRSDYPSELVREHVRWALARHR

SEQ ID NO: 75498 - protein, 311 aa, unidentified
  source 1..311: note = Nephrothrix sp.
  REGION 1..311: note = tr|A0A2B8A4F0|A0A2B8A4F0_9BACT Epoxyqueuosine reductase OS=Candidatus Nephrothrix sp. EaCA OX=2044729; GN = queG PE=3 SV=1
MNTLAHRSVAVKSIAHSLGFNFCGIAKAESLESERHKLETWLRRGYHGKMKYMENHFEKRLDPSKLVPGAKSVVCLMYNYFPTEDLSEKSELKISKYAYGEDYHRVIKDKLKIFAARIRETIGDVNARCFTDSAPVMERQWAALAGAGWIGKNSLLINRRQGSFFFLSEIIMDAELEYDSPIGDYCGTCTACIDACPTEAILEGGVVDASRCISYFTIELKDEIPRAMNGKFERWIFGCDICQDVCPWNRFSKPHREPRFNPSDEMQNLTASDWVEMTEETFHAVFKDSPLRRAGFERMKRNCEASNPPFR

SEQ ID NO: 75499 - protein, 344 aa, unidentified
  source 1..344: note = Nitrospira inopinata
  REGION 1..344: note = tr|A0A0S4KXF2|A0A0S4KXF2_9BACT Epoxyqueuosine reductase OS=Candidatus Nitrospira inopinata OX=1715989; GN = yjeS PE=3 SV=1
MTLTESIKREAFALGFDAVGIARIDEQERSRADAGSRADARPASVASSPNLLLNRLGEWLRRGYQGTMAWMSRDPAKRSDPRLVLPGCRSIISVGLNYLTEHRADERPGHGRIARYAWGQDYHKVFRDRLRQLERRIQSLAPDAHTRSYADTGPIMEKAWAERAGLGWIGKHSNLVSAEHGSWLLLGEVLTTLVLDADEPATDLCGSCSLCVQACPTGAIVEPYVVDATRCISYLTIELRGPQEEIPTDLQQRMDNKIFGCDDCLDVCPFNLRAEPTDEPTFQPMPLALAPNLDTLSGLDESTFSALFQRSPIRRAKLDGLRRNAAIAQRNQRSHSQSPLQPKP

SEQ ID NO: 75500 - protein, 335 aa, unidentified
  source 1..335: note = Nitrospira nitrosa
  REGION 1..335: note = tr|A0A0S4LPE0|A0A0S4LPE0_9BACT Epoxyqueuosine reductase OS=Candidatus Nitrospira nitrosa OX=1742972; GN = queG PE=3 SV=1
MSLTTAIKQQARTLGFDAIGIVRLANNDAPSTLTPQPLEPCSDNATKIVPQLYHRLTEWLRRGYHGTMTWMERAPDKRADPRVVLPGCQSIISVGINYLTDHRANEQPGHGRIARYAWGKDYHKVFETRLKQLEEFIKILAPATHTRSYSDTGPLMEKAWAEQAGLGWIGKHSNLVSADHGSWLLLGEILTTVELEPDAPATDLCGSCTLCIQACPTNAIVQPYEIDATRCISYLTIELRGDESVIPQELHAGMGNKIFGCDDCLDVCPFNLRAEPTRESAFQPSAVTLAPSLDELSRLDEQTFLTLFQQSPIRRAKIHGFQRNIAIAQKNKTRS

SEQ ID NO: 75501 - protein, 355 aa, unidentified
  source 1..355: note = Nitrotoga fabula
  REGION 1..355: note = tr|A0A2X0SKC6|A0A2X0SKC6_9PROT Epoxyqueuosine reductase OS=Candidatus Nitrotoga fabula OX=2182327; GN = yjeS PE=3 SV=1
MDYDALAVKIKEWGRALGFQAVGIGDVHLHDAEERLLQWLAQGFHGEMDYMAKHGVKRCRPAELIPGTVRVISVRMDYYPPNVKDSWKVMEDGTRAFISRYALGRDYHKVLRHRLERLAEKIRTGMSDFRYRVFTDSAPVMEVELASRSRLGWRGKHTLLLSREHGSWFFLGEIYTDLPLPLDEPAEPGHCGSCMACLNACPTQAIVAPYRLDARRCISYLTIELRGSIPLPLRPLIGNRIYGCDDCQLVCPWNRFAKKSIEPDFVARHGLDDVGLTELFGWDEKTFRKTFEGSAILRIGHEQWLRNIAVALGNAPGSPEVRTALEARAQDVSPLVREHVAWALERQRNWVGIAE

SEQ ID NO: 75502 - protein, 356 aa, unidentified
  source 1..356: note = Nitrotoga sp.
  REGION 1..356: note = tr|A0A3E1DI01|A0A3E1DI01_9PROT Epoxyqueuosine reductase OS=Candidatus Nitrotoga sp. SPKER OX=2184312; GN = queG PE=3 SV=1
MQIETPQIVDYTALAAKIKEWGRELGFQAVGIADINLHDAEERLLEWLARGFHGEMDYMAKHGAKRTRPAELIPGTLRVISVRMDYYPPTVKDGWEVLEDGTRAFISRYALGRDYHKVLRKRLEKLVQKIRIEVGGFSYRVFTDSAPVMEVELAYKARLGWRGKHTLLLSRDHGSWFFLGELYTDLPLPIDEPESEHCGTCMACVQVCPTQAIIAPYKLDARRCISYLTIELKSSIPVALRPLIGNRIYGCDDCQMVCPWNRFAHKSLEPDFAARHGLDDVALTELFGWDEETFNQKFAGSAVYRIGHEQWLRNIAVALGNAPNSMEVLAALQARAQDASPLVREHVAWALGQHGS

SEQ ID NO: 75503 - protein, 371 aa, unidentified
  source 1..371: note = Omnitrophica bacterium
  REGION 1..371: note = tr|A0A3A4NYT9|A0A3A4NYT9_9BACT Epoxyqueuosine reductase OS=Candidatus Omnitrophica bacterium OX=2035772; GN = queG PE=3 SV=1
MKEQLKAFAKSIGFDAVGIARSEPKTWDRYAEWLARGFHGEMEYLARRSLERRDISYLFKNPQSVIVAAKRYLTIDPIDHKQRPFQPVVSRYAWGDDYHAALRDGLNRICRWIEEKTNGVHTVRSCVDSAPILERDFAAQAGIGWFGKHTNLLNRSLGNWFFLGVVITSLELEEDEPVSSYCGTCTRCLDSCPTNAFVGPYLLDARRCISYLTIEVKGAIPRELRPLMGARVFGCDDCLAVCPWNRFAVPTAEITFFPRDTIETSDLIELLGLTDEEFRARYKKSPIKRSKRRGFLRNVAIALGNTGDPRAIPALARALSDHEPLIRSHAAWALGRIGGDEAKRILMSALNKESEEAVREEIQFAIDPRVL

SEQ ID NO: 75504 - protein, 366 aa, unidentified
  source 1..366: note = Omnitrophica bacterium
  REGION 1..366: note = tr|A0A2H0LC83|A0A2H0LC83_9BACT tRNA epoxyqueuosine(34) reductase QueG OS=Candidatus Omnitrophica bacterium CG11_big_fil_rev_8_21_14_0_20_64_10; OX = 1974750 GN=queG PE= 4 SV=1
MTGTGRGLSPNGDCPRTPSDLIKTEAARLGFPACGIVKANAIGRREPELKAWLAAGRDGGLGYMQAFFDRRRRLLEGFPTFKTALVLAVPYARRNPPADPAAPVSGGRIARYARGRDYHPVISKRLRRLEQALRALFPKSGPMRPCVDTSPLQERALAEAAGLGFFGKNGCLIDPKSGSFFFLCALLTDLDLPADQPMLWDCGGCTRCITACPTGALEPPYQVNAGRCITLLTIENRGPIPEPLREKIGPWLFGCDICQEVCPYNKGGTGGSDPVNLWPELRPEQGAGERLPLSELLRIRTEADFLSRFQGTPLTRPKREGLLRNAAVAAGNSRNPALIPALREAAKEDLSPMVREHAAWALARLE

SEQ ID NO: 75505 - protein, 307 aa, unidentified
  source 1..307: note = Ornithobacterium hominis
  REGION 1..307: note = tr|A0A383TVS2|A0A383TVS2_9FLAO Epoxyqueuosine reductase OS=Candidatus Ornithobacterium hominis; OX = 2497989 GN=queG PE=3 SV=1
MNIQQRTTFVKKRAKELGFLNCGISKAEFLEEEAPRFEAWLKKGFHGELGYMENHFDKRLDPTKLVPGAKSVISFSFNYYTENQQPEDSYKISKYAYGKDYHFVVKDKLFQLFNELQDEIGEINGRVFVDSAPVLDRAWAKRSGLGWVGKNSNILAKGTGSFFFLAEIISDVEFEYDSPFKTDHCGSCTACIDACPTQAIEAPRTVNASKCISYATIELKNEIPAHFQDRMEDWMFGCDICQDVCPWNRFSKPHQEREFEPHPAIQSFKKKEWEELSQEMFNEIFRKSAVKRTKYTGLMRNMKFIKP

SEQ ID NO: 75506 - protein, 414 aa, unidentified
  source 1..414: note = Paraburkholderia kirkii
  REGION 1..414: note = tr|G4M9Z9|G4M9Z9_9BURK Epoxyqueuosine reductase; OS = Candidatus Paraburkholderia kirkii UZHbot1 OX=1055526; GN = queG PE=3 SV=1
MNRLPEHSVEVSTASSDAAAESVSESRAITREEEASLSELAQRIKAWGRELGFGAVGISDIDLTDAEKGLADWLDAGYYGEMDYMAKHGTKRARPAELVAGARRVITARMAYLPAETLAKTGDESVVTADGQKNDWRVIEWSRLAKPSQAVVSIYARGCDYHKVMRNRLQQLAERIEGEIGKFGYRAFTDSAPVLEVALAQKSGNGWRGKHTVLLDRDAGSLFFLGEIFVDVPLPVDPHPEQDGAHCGQCARCVGACPTGAIVAPYRVDARRCISYLTIELHGSIPEEMRPLIGNRVYGCDDCQLVCPWNKFAQAAPVADFDVRHGLDRATLVELFAWSAQDFDTRMQGSAIRRIGHERWLRNIAVAMGNALRACGLDVGERKAIVEALEARADDPSALVREHVKWALEQGEQT

SEQ ID NO: 75507 - protein, 417 aa, unidentified
  source 1..417: note = Paraburkholderia sp.
  REGION 1..417: note = tr|A0A4V2ZY85|A0A4V2ZY85_9BURK Epoxyqueuosine reductase OS=Candidatus Paraburkholderia sp. 4M-K11; OX = 2528715 GN=queG PE=3 SV=1
MAPQNVAAPLDEAALAALATRIRAWGRELGFGAIGISDTDLSHAEAGLAAWLEAGCHGEMDYMAKHGMKRARPAELVAGTRRVITARMAYLPAATLAGAAHVGAQTEVPAAGEHEDWRGREHARLADPFAGVVSIYARGRDYHKVMRARLQQLAERIAAEIGAFGFRVFTDSAPVLEVELAQKAGIGWRGKHTLLLQRDAGSLFFLGEIYVDVPLPTDAENAQAAQDAQNSASHAPEQPGAHCGTCTRCIGACPTGAITGPYRVDARRCISYLTIELKGSIPLELRELIGNRVYGCDDCQLVCPWNKFAQAAPVADFDVRHGLDRASLVELFGWSAAQFNERMQGSAIRRIGYECWSRNIAVAMGNALRATRENDGACGQPHDAQEGRAAIVAALRAREHDESALVREHVQWALEAA

SEQ ID NO: 75508 - protein, 402 aa, unidentified
  source 1..402: note = Peregrinibacteria bacterium
  REGION 1..402: note = tr|A0A2M7UPG0|A0A2M7UPG0_9BACT Uncharacterized protein OS=Candidatus Peregrinibacteria bacterium CG_4_10_14_0_2_um_filter_38_24 OX=1974774 GN=COY05_03450; PE = 4 SV=1
MSMLEHSTMGKILKKTEGLKNAINKTKSEIEIFALSIGFDLVGFSPAKIDKKYFDVYKKWLGEGMNAGMEYMEKSAQRKDVSKNLPNAKTVISLGINYFHSQENKKISKDEAIIARYAYGRDYHKIISKKLKQLEAYLKEKFPNEFTKSYVDTGSILERAYAETSGIGQIGKNGCIITKSFGSWIFLSEIITTLDLCPQEEFGKEGGRRCSRKIDCLASEPIKHRLRLYKSYMLDLYNGKTYFERTSPSSFQTNSICGNLQNVSAETFSPPPSICGTCTRCIDACPTKAIIAPGIIDSRKCIAYQTIENKGRIPKKIQDVIKKTKRIFGCDICQEVCPHNIGKQKITTHSEFLQPIAGDKISLKKIIATKSNEEFLQIYAGSPLMRAKLKKLKSTAKLISTN

SEQ ID NO: 75509 - protein, 392 aa, unidentified
  source 1..392: note = Peregrinibacteria bacterium
  REGION 1..392: note = tr|A0A1F7B3I6|A0A1F7B3I6_9BACT tRNA epoxyqueuosine(34) reductase QueG OS=Candidatus Peregrinibacteria bacterium RIFOXYB2_FULL_32_7 OX=1801906; GN = A2335_04085 PE=4 SV= 1
MGNKKFLEDKIINYAKELGFDLVKILPAQSLDENLQKSFYDWIYFEYAGDMEYMKKEPEKRADLLKKFPDAKSIIVLGMNYFMEEKASPTCPNDLFGRKDSFWRGKRESSFAKATADKKEKEKAEGKVARYAWGRDYHKVIELKLKKLKEFILRNVDSGETQNDIFKMYVDYGPILERAYAVKAGFGFIGRNTCLITKEFGSWVFLAELITNLEIQEKGERKEDEKDHFGCGNCVQCLQVCPTGALETPYKLNAKKCISYLTIENKGSIPEKSRPLIGDWLYGCDLCQEVCPYNARAKATKEPDFKKQILGDTQILKDVLSIRTDQEFRQKFAGSPVIRIKRKGLLRNACVVAGNLKDRSLLPVLEECLKKDPEPLIREHAKWGIRKINNEK

SEQ ID NO: 75510 - protein, 379 aa, unidentified
  source 1..379: note = Phycosocius bacilliformis
  REGION 1..379: note = tr|A0A2P2EC45|A0A2P2EC45_9PROT Epoxyqueuosine reductase OS=Candidatus Phycosocius bacilliformis; OX = 1445552 GN=queG PE=3 SV=1
MASAPRTKPTLTADQVKALAQDHGFDVCGLADARAPWEAGARLQAFVDAGHHGSMDWMETTLARRSHPTAMWAGARSAIMLGVNYGPDTDPMEALTKPDKAVLSVYAGGDDYHDVIKKKLKAMAGELHRLTGAEVKVFVDTAPLMEKPLAALAGLGWQGKHTNLVSKDYGSWLFLGAILTDLPLAPDQPSLDHCGRCTACLDACPTEAFPAPYQLDARRCISYLTIEHDGPIPRAFRKPMGNRIYGCDDCLAVCPWNKFAQTGKEVRLALRDTLRDLSLSDLAFLDDAAFRTLFAKNPIKRIGVARFLRNVAIGLGNSGQASHVPAARHLSQHENPLVRGAGVWALQQLLPAGDFSALAKTSMAQEENASVRAEWGQTQ

SEQ ID NO: 75511 - protein, 419 aa, unidentified
  source 1..419: note = Poribacteria bacterium
  REGION 1..419: note = tr|A0A496B8K0|A0A496B8K0_9BACT Epoxyqueuosine reductase OS=Candidatus Poribacteria bacterium OX=2026781; GN = queG PE=3 SV=1
MTGNPAQITLTQQIQRRAHELGFALVGITPAERSQTLQRYRAWLGNGYAGEMDYLERHLPLKEDPRRLLAEAKSVISLAMNYYTLDPPELLAADPGRGQISRYAWGDDYHEVIRERLRQLVEFIRQRFAETEPDCRICVDTAPILEREYAQKARLGWIGKNTNLINWRSGSWYFLAEVLVNVRLESTAEPQWPVGGGSFPSSGDSRRVTFAGDRPPRYETMPFSSTVARGSCGTCTRCIEACPTDAIVAPNVLDSRLCISYLTIELKDSIPAELRPKMGNLIFGCDICQEVCPWNSKATPTTESAFYPREGNLAPALLSLVNMTQAEFSSRFKGSPIKRAKRRGFLRNVLVAIGNWGARKALPALEIALSDGEPLVRSHAAWAVGQIGGETAAKLLQTRLVVEEEPEVIAEIQGALARL

SEQ ID NO: 75512 - protein, 399 aa, unidentified
  source 1..399: note = Poribacteria bacterium
  REGION 1..399: note = tr|A0A2E8DU49|A0A2E8DU49_9BACT Epoxyqueuosine reductase OS=Candidatus Poribacteria bacterium OX=2026781; GN = queG PE=3 SV=1
MYTILNEMTKINQLELKKTQLNQWIRKQAEKMGFDLVGIVPADPPKLIDRYREWLNLGYAGEMEYLHRHFPLKQDPKNLLPEVKSVISLGLNYYTVEPDAVRKLDPTRGQISRYAWGEDYHDVIRKRLKRLVKKIEKRLKRETKSRVFVDSGPILERDYAQTAGLGWIGKNTNLINWQKGSWYFLAEILISLDLGVDVLPARGSCGSCTLCIEACPTDAIVAPNQVDARSCISYLTVELKEAIPMDLRPGLGNLIFGCDICQEVCPWNTKSQPTSVKEFQPRKGNLLPKLADLIGITQNEFSQKFKGSPIKRTKRRGLLRNVVVAMGNSKDPSMVEPLQSAILDVEPLVRQHAAWALGQIATPLAKTILKKKLQNEKNIEVIIEIESALQIIESENIKD

SEQ ID NO: 75513 - protein, 405 aa, unidentified
  source 1..405: note = Promineofilum breve
  REGION 1..405: note = tr|A0A160T1Q2|A0A160T1Q2_9CHLR Epoxyqueuosine reductase OS=Candidatus Promineofilum breve OX=1806508; GN = queG PE=4 SV=2
MILFRKGEASIAHGRDIIFIMESSPESLTAALKEQTRALGFNRAGVIPAGPARRLDAYLRWVAAGQHGEMGYMARPDRLARRHDPGLILPGVRSVVVVGLDYHTADLPPDVAADPSRGRISNYAWGVDYHEIMTPRLEALADWLRRQPGAGDVSSRVYVDTGAILERDHGETAGLGFTGKNTLLINPRRGSWFFLGVLLTTQVLAYDPPPAERPPLPGCGRCTRCLSACPTAAFPAPYVLDARRCISYLTIELKSWIPLELRPLLGNWVYGCDVCQAVCPFNRFARPTGEPAFYPVALDAAAPPLLELLALDEESFARRFTDSPIRRIKRDRLVRNACVAAGNWGSLAAVPPLVALLADGSPLVRGHAAWALRRIGGEPAHAALAAALASEDSEAVRREIKGEDF

SEQ ID NO: 75514 - protein, 372 aa, unidentified
  source 1..372: note = Propionivibrio aalborgensis
  REGION 1..372: note = tr|A0A1A8XRM5|A0A1A8XRM5_9RHOO Epoxyqueuosine reductase OS=Candidatus Propionivibrio aalborgensis; OX = 1860101 GN=yjeS PE=3 SV=1
MQELNSDTRTLTASAWNGFDFVALVKKIKNWGKELGFSELGIAGADVSATTPKLLRWLELGRHGEMNYMAKHAALRAQPETLVPGTLSVVTARLPYLPAAAECEQVLGNRELAYISRYALGRDYHKTIRNRLQKLANRIHGEISQSEQESSFAYRVFSDSAPVMEVEFARQSGIAWRGKHSLALTRSGSWHFLGEIYTTLPLPPDELISEHCGTCIRCLEACPTAAIVAPYEVDARRCISYLTIELAGPIPVELRPLIGNRIYGCDDCQLCCPWNEFAQLGDPDFAVRNGLDATSLATLFSWNEQAFMTRLEGSPIRRIGHTRWLRNIAVALGNAANTAEASAALSTRLEHPSALVREHVRWALAQIHSDSS

SEQ ID NO: 75515 - protein, 363 aa, unidentified
  source 1..363: note = Puniceispirillum sp.
  REGION 1..363: note = tr|A0A2D4UMT6|A0A2D4UMT6_9PROT tRNA epoxyqueuosine(34) reductase QueG OS=Candidatus Puniceispirillum sp. OX=2026719 GN=queG PE=4 SV=1
MIEAAANEGFLLAGIGPADIGPVNRAGLVAFLDDAFEGDMGWLRDTAAKRQQPQAMWPDAKTAIVLGMNYGPDHDPMDNLAAKSAGNISVYARGRDYHDLVKGKLKQLAGQFAAQTGHAVKVFVDTAPLMEKPMAQTAGIGWQGKHTNLVSRKAGSWLFLGVILTDAILPYDTPETDHCGGCRRCLDICPTNAFPAPYRLDARRCISYLTIEHKGVIDRSFRHAIGNRIFGCDDCLAICPWNKFASRAKEQKLAAKVGTDLPSLADLLKLDDTDFRQFFAGTPVRRAGYERFLRNVLIAAGNSGDAGLIPLIMPFLDHSSTLLRAMAIWALRQLADDDIWQGLRGAYLPDEHDQSVRREWQDN

SEQ ID NO: 75516 - protein, 383 aa, unidentified
  source 1..383: note = Puniceispirillum sp.
  REGION 1..383: note = tr|A0A1Z8UV25|A0A1Z8UV25_9PROT Epoxyqueuosine reductase OS=Candidatus Puniceispirillum sp. TMED52; OX = 1986639 GN=queG PE=3 SV=1
MIAPVRTELIHDLATSHGFSVVGIASAEADAELAERLDAFLDAGHHGDMQWMKDTRDRRISPVAMWSDAKSAIVLGMNYAPDHDPMENLTSRSHGNISVYARGRDYHDVIKGKLKQCAAQIAKGLDIEVKVFVDTAPLMEKPLAARSGLGWQGKHTNLVSREYGSWLFIGVILTNAELAPHQPAEDHCGSCTRCLDICPTDAFPAPYQLDARRCISYLTIEYAGIIPPEFRRPMGNRIFGCDDCLAVCPWNRFARTASEQKLQARAELTMPMLADLLALNEAAFRKQFAASPVKRTGYQRFIRNVLIACGNSGNARLTPAVKRHLDSADMVIRASAIWALSQIMPADDFAALASQCRPSEDHQDVAAEWDSGISICNAPANNI

SEQ ID NO: 75517 - protein, 299 aa, unidentified
  source 1..299: note = Raymondbacteria bacterium
  REGION 1..299: note = tr|A0A1F7F3D9|A0A1F7F3D9_9BACT tRNA epoxyqueuosine(34) reductase QueG OS=Candidatus Raymondbacteria bacterium RIFOXYD12_FULL_49_13 OX=1817890; GN = A2519_16970 PE=4 SV= 1
MNQKIREAALGAGIPLIGFCTPQIDTRTKNAFQNWLETGMHADMAYLHKTRNTRRVIEEFLPGQKSVIICGFPYPAVESKHVVSYALINDYHALLHEKLETFCLYLTKAFSGIKTKVFIDTLPVLEKVYASKAGLGCIGKNTLLLSKKYGSRLFLGGIMTDLEIEHDGPEKWDPCGSCRKCIDACPTRALDAYVLDARKCISYHTIENKGEIPEDITEKMGEMVYGCGICEKVCPWNNKNTVVPGWDVYEDLANADVETLKILAGESFKKHFGKTPVYHSGKRVFLRNIVIAVANKARQ

SEQ ID NO: 75518 - protein, 385 aa, unidentified
  source 1..385: note = Regiella insecticola
  REGION 1..385: note = tr|G2GYU3|G2GYU3_9ENTR Epoxyqueuosine reductase; OS = Candidatus Regiella insecticola 5.15 OX=1005043 GN=queG; PE = 3 SV=1
MTDQLDLNQLAKNIKQWGQALGFQQVGICDTDLSLEEPRLQAWLDKQYHGEMAWMARYGMLRARPHELLPGTLRVISVRMNYLPAEASFARTLNNSELGYISRYALGRDYHKLLRQRLKKLGDKIQMYCSECSEGSDTHFRPFVDSAPIMERSLAVKAGLGWVGKHSLVLNRDAGSWFFLGELLIDLPLPVDKPLPEQCGRCVACMTICPTKAIVAPYVIDARRCISYLTIELKGAIPEEFRPLMGNRIYGCDDCQLICPWNRFSPITDEKAFNPRAQLHTPKLLDLFAWDEETFLQMTEGSAIRRIGHLRWLRNISVALGNAAYQSSVVLALEKRRGLDPMLDEHIQWAIDQQLARRSAQAVKVQSAQTSRLIRTVEKGLPRDA

SEQ ID NO: 75519 - protein, 339 aa, unidentified
  source 1..339: note = Rhodobacter lobularis
  REGION 1..339: note = tr|A0A0J9EA99|A0A0J9EA99_9RHOB Epoxyqueuosine reductase OS=Candidatus Rhodobacter lobularis OX=1675527; GN = queG PE=3 SV=1
MARALQEGFSKCRVTVPDAVPDAAARLAQFVEKGRHGQMGWMAERMHWRGDPAALWPEARSVIMLAEAYTPDHDPLEVLGQRDRAAISVYAQNRDYHDIVKKRLKRLGRWLIEQSPCEIKVFVDTAPVMEKPLAEAAGLGWQGKHTNLLARDLGSWFFLGAIFTTLELAPDPPEGEHCGSCRACLDICPTEAFPAPFQLDARRCISYLTIEHKGRVDEALRAKMGNRIYGCDDCLAVCPWNKFAQAAHETRYAAREDLRAPRLAELVQLDDAGFRAKFSGSPIKRIGRDRFVRNVLYAIGNSGEAALRAAALPLADDPDPAVADAARWAAMRLAQWSSG

SEQ ID NO: 75520 - protein, 335 aa, unidentified
  source 1..335: note = Rokubacteria bacterium
  REGION 1..335: note = tr|A0A2V2STP3|A0A2V2STP3_9BACT tRNA epoxyqueuosine(34) reductase QueG OS=Candidatus Rokubacteria bacterium OX=2053607 GN=queG PE=4 SV=1
MTAAELDRLAQELGIDVVGATPAVPYEETERHILERRAQGLFADMRFTMAQPEVSCHPERLLPDARTVVSAALCYYAPGPQPGPGQGRLPRYTWYDAYAELREKLDVLGSRIGGAYRVLVDANQHVDREGAARSGVGFYGKNTMLITRRFGSWVVLGTLVTTASIETTKPLELDCGECRLCVEACPTGALDEPGVLDSTKCLSYWTQSSDPIPEPFREELGHQVYGCDICQDVCPWNRGVERRRSQSRPPEGSEPVVSLVDWLQEDAESLVSRYERLYVPRKEARFLRRNALVALGNAAGEEPVELAERYLDDPDPLLQEHAAWAVRRARRRLRP

SEQ ID NO: 75521 - protein, 346 aa, unidentified
  source 1..346: note = Rokubacteria bacterium
  REGION 1..346: note = tr|A0A1F7QGR6|A0A1F7QGR6_9BACT tRNA epoxyqueuosine(34) reductase QueG OS=Candidatus Rokubacteria bacterium RIFCSPLOWO2_12_FULL_73_47; OX = 1802111 GN=A3G44_11100 PE=4 S V=1
MTLLARALREAVRARALELGFDAVALGPAGPPEHGAAFERWLDAGYAGTMRYLERGRAERLDPERLLPGCRSVVAVAQSHNHPDADPSWRPVARYARGRDYHDLMRPRLRELAGFIREAAGPPVRCRAAVDTSAVLERDLAARAGLGWIGKNTNLLSPALGSYVVLGVVLTTAALEPDARQPDRCGTCTACLDACPTGAFAGPYVLDARRCLSYLTIEHRGEVPAELCGSVADWVFGCDVCQEVCPWNRKAAPAREPALAPRGAFPPLEALLDVDRDAFRARFGASALTRAKRAGLLRNAALALGNRGDARAVPALRRALDDADPVVRGAAGWALERLAARPAAAP

SEQ ID NO: 75522 - protein, 373 aa, unidentified
  source 1..373: note = Schekmanbacteria bacterium
  REGION 1..373: note = tr|A0A3M1RYY6|A0A3M1RYY6_9BACT 4Fe-4S ferredoxin-type domain-containing protein OS=Candidatus Schekmanbacteria bacterium OX=2419984 GN=D6734_03175 PE=4; SV = 1
MTLKNEFVDYVKNEVGIPLVGVVAPEDYPSEDYERIAAVQRIFAKATPLSGGIDTVFQPKDFLPEAKSVIITGSPAYIEKVYTYEQCKRDLLGCAEATHVNTNYLQNNGERNAKIIDFLKDRGYQCFSLTAGGFPLKLMASKCGVGFYGKNAIIQHPKYGAWISLSGYITDADLEPDSPLDMDCGKCDLCMKACPTNALSTPYVCDMTKCIDFHLGHNKHFIPYEIRENCGNLLGEGCTICRDVCPKNKNLTPLEDFEVSMELMHPKMLDVLKISDEDWERGFAMTLMGFFLMDKKYLIRNAAIGLGNFQDERAVEPLGEILNAGPNKARGYAAWALGRIRGRKSRDLLNSALNNEEDEDIRDEIKFALEMLG

SEQ ID NO: 75523 - protein, 375 aa, unidentified
  source 1..375: note = Schekmanbacteria bacterium
  REGION 1..375: note = tr|A0A1F7SEK5|A0A1F7SEK5_9BACT 4Fe-4S ferredoxin-type domain-containing protein OS=Candidatus Schekmanbacteria bacterium RIFCSPLOWO2_12_FULL_38_15; OX = 1817883 GN=A3G3 1_06955 PE=4 SV=1
MNNSLKKELKEFALEKLGVDEVGIASADNYSNEDCERIRIMREVFAKSTPIAGGDANIYQPEDFLSGAKSVIVTGTNSYFGKGSDMEKAKRRLLGYVEESHVDSDFLGKSAKRSSEIEDFLKKRGYQCSSLAAGGFPIKLKASECGVGRYGKNAVIQNNKLGAWISLSAFITDAEMEPDEPLKDGCGECTLCIEACPTGALEKPYFCDVRKCIDFNFGHNKGYLPKEIRDAGGNLLGEGCRICRDVCPYNRNLKPVEHGNIPDDIISPELTSILSISDEQWENKYAPTLFGFFLVEKKYLQRNAAIALGNFSDERATASLLDALENGEDVVREYSSWALGKIKGAGSKTGLEKALKKEQDAGVKKEIKDSLESMS

SEQ ID NO: 75524 - protein, 365 aa, unidentified
  source 1..365: note = Sulfotelmatobacter kueseliae
  REGION 1..365: note = tr|A0A2U3KLT0|A0A2U3KLT0_9BACT 4Fe-4S ferredoxin, iron-sulfur binding protein OS=Candidatus Sulfotelmatobacter kueseliae OX=2042962 GN=SBA1_310024; PE = 4 SV=1
MASQISDVKAIVQRAAEQCGFDVCGIAPAADLPELQHFSAWIAAGRAGEMAYMSSRDERGELKRASLSRAAPWARSVVVCAINYNTGHPYSTQMQDPNRGWISRYAWSREDYHDAVLRRLKRVEEVLQNDLWSGGRPRPSDLTTRCYADTGPIVERVFAKYAGVGWIGKNTCIINQKKGSWLFLGVILTSLELEPDLPAPDRCGTCTRCIAACPTDAIIAPYQLDSNKCISYLTIEKRGSIPEDLRAGMGRHIFGCDICQDVCPWNRKAPVSTAPEFEPRPGFVNPALAWLAEMSADEFRAVFRGSPVRRAKRTGLRRNAAIAMGNSGNPEFLPLLEKLADDEEQSVAESARWARARLLERDEAG

SEQ ID NO: 75525 - protein, 303 aa, unidentified
  source 1..303: note = Sulfotelmatobacter sp.
  REGION 1..303: note = tr|A0A2N9MYQ4|A0A2N9MYQ4_9BACT Epoxyqueuosine reductase OS=Candidatus Sulfotelmatobacter sp. SbA7; OX = 2043160 GN=SBA7_1430001 PE=4 SV=1
MIVCAINYNTAHPYSTQVQTQTDDASRGWISRYAWSGEDYHDAVLRRLKQVEDELRGLLAATGNWQFRSYVDTGPLIERVYAKYAGIGWIGKNTCIINQKLGSWLFLGVILTSLGITNNDVTGDLPAPDRCGTCTRCIVACPTQAITAPGKLDARLCISYLTIEKRGEIPVELREGMGRHVFGCDICQDVCPWNRKAPATSAAEFEPREGLVNPALDWLAEMRPEEFREVFRGSPIRRAKLSGLRRNAAMAMGNSGDKRFMPTLTTLCEDPDLVVAEHARWALGRLELCCRQRKGLDPSSGGL

SEQ ID NO: 75526 - protein, 183 aa, unidentified
  source 1..183: note = Sulfotelmatomonas gaucii
  REGION 1..183: note = tr|A0A2N9LA52|A0A2N9LA52_9BACT Epoxyqueuosine reductase OS=Candidatus Sulfotelmatomonas gaucii; OX = 2043161 GN=SBA5_250075 PE=4 SV=1
MAVLLTSLEVSESAGPAFVPDRCGSCTRCIEACPTDALIAPYQMDARRCISYLTIEHKGPIDEAMMPGMGRQVFGCDICQDVCPWNSPRRTPIVADADLEPRPELMNPALDWLGSLDEQSFEREFNGSPVRRAGFNGLRRNVAIAMGNSGLARFGPRLEEWAAAADEGLRAAARWALGRLRNG

SEQ ID NO: 75527 - protein, 374 aa, unidentified
  source 1..374: note = Sumerlaea chitinovorans
  REGION 1..374: note = tr|A0A2Z4Y5H7|A0A2Z4Y5H7_9BACT Epoxyqueuosine (OQ) reductase QueG OS=Candidatus Sumerlaea chitinovorans; OX = 2250252 GN=BRCON_1185 PE=4 SV=1
MISRDEGRASYGTPASWIPIRLGKTSMGANHDIHWPTWKAELVRVAQQAGFFAVRVANVTLGQEICDHYARWIANSYHGEMTYMEHTAQLRLNVQRWLPWAQSVLVFAADYYPREPQAACRPESTAETVRISKYAVGEDYHHVLRRRLEIICEWLGTHFPEAQWQICIDSSPLLERAYAVAAGIGFWGRNTMVITPRHGSYYFLGCLVTSVALPPDPPVWGTCGSCTRCMDACPTQAFVAPYVLNARRCISYLSIEKRTPLSPTERRLLGEWVFGCDICQDVCPYNKRPPVTPFPEFREGRIVREWEPTSTFISPRSNREFTRRLAHSPILRPGRRRILERVEAVVENLRRRTKLSQDAPASNQLRSDDSSAGE

SEQ ID NO: 75528 - protein, 342 aa, unidentified
  source 1..342: note = Sumerlaeota bacterium
  REGION 1..342: note = tr|A0A353GL22|A0A353GL22_9BACT tRNA epoxyqueuosine(34) reductase QueG OS=Candidatus Sumerlaeota bacterium OX=2107588 GN=queG PE=4 SV=1
MKRALRNVAKSLGIPVLGVAVAQPLTEDMAYIRAACDEGCHAAMEWLPRSLDVRADPQRVLPGAQSVVMVAWPVAEKKKYQAGRSHPTDLPNTSPLPEGRIARYAAGRDYHIVLQGKLNELAAPLRAVGAAVRVFVDAAPMLERGYAQKAGLGFVGKNNCLIHPVFGSWFLLGGLLTTLKLPEDAPLPNGCGECRRCLDACPGRALIRPYCLDARKCLSYWTVENRGAWPEDVRANVGDRLFGCDACQEACPYNWESTSPRYPLADVLAIVSNREFEGKFKDTAFLRLGRRGLLRNALVVAAHLKRGDLIPRIRALAENPQEHEVVRETACWALQTLETASL

SEQ ID NO: 75529 - protein, 441 aa, unidentified
  source 1..441: note = Symbiobacter mobilis
  REGION 1..441: note = tr|U5N791|U5N791_9BURK Epoxyqueuosine reductase; OS = Candidatus Symbiobacter mobilis CR OX=946483 GN=queG; PE = 3 SV=1
MTVAVTVQVAKRLLEVPLACTVAMSPLQRSALVSNLKGWGRELGFSRTGVAGVDLSGARQGLSAWLAAGFHGDMAYMARHGLARCEPQTLLPGARSVVLARMDYLDVNATPGWPEAARERLRQPLQASIALYALGRDYHKVVRSRLEQLGRRVVAECAECARSAHCTPCLECAERNPVRYPVRYRVVCDSAPIQEAELAVRSGLGWRGRNTLIVDRDGGSMFVLGALLLDIALPCEEPVAPRCGSCHACIAACPTQALVAPYRLDARRCLAYLSIEHPGPIPVALRSAMGNRIYGCDDCQLACPWNKFARPTTVPDFAVRPWLAGRTLLELWEWDEATFLRNTEGSPIRRIGHERWLRNLAVALGNALRGVQGASTQGELVQGASVSGIPVAARWDALRQALASRAEHPSALVREHVAWALEGGTAIWGNAAALPACVRPG

SEQ ID NO: 75530 - protein, 311 aa, unidentified
  source 1..311: note = Synechococcus spongiarum
  REGION 1..311: note = tr|A0A171DEG1|A0A171DEG1_9SYNE Epoxyqueuosine reductase OS=Candidatus Synechococcus spongiarum OX=431041; GN = queG PE=3 SV=1
MNAPLLATQLKEKALAMGFVVAGIGRVDQPAAVPARTAALERWLRAGHQASLGWMADPRRRHINSLLPGVRSLLAVGLNYWTGQQQRPGVLSIARYGWGRDYHRTIDRRLRAIGRWLSRQQPHCRWRACVDSAPLMDKAWAEAAGIGWIGKHSNLIHPRHGSWLLLGHLLTTLELPADVPQAPLCGRCRRCLQVCPTGAIPEPFVVDSRACIAFHTIENRNPALPPEVAKGLRGWIAGCDLCQQVCPWNRTVTPTADPERQPADWMLTASPEHLLSWDDDTWDKKLRGSALRRIKPWMWRRNVHTAVNGQP

SEQ ID NO: 75531 - protein, 314 aa, unidentified
  source 1..314: note = Synechococcus spongiarum
  REGION 1..314: note = tr|A0A0G2HK69|A0A0G2HK69_9SYNE Epoxyqueuosine reductase OS=Candidatus Synechococcus spongiarum SP3; OX = 1604020 GN=queG PE=3 SV=1
MIAANALLLANQLKEKALAMGFVVAGIARVDQPAALAARTAALERWLQAGHQASLGWMADPRRRHVNSLLPGVRSLLAVGMNYWTDRQQRPGVLSIARYGWGRDYHRTIDRRLRSLGHWLSQHHPDCRWRVCVDSAPLMDKAWAEAAGIGWIGKHSNLIHPRHGSWLLLGHLLTTLELPADDPQMPLCGRCRRCLEVCPTGAIPEPFVVDSRACIAFHTIENRNPALPAHVAKGLGGWIAGCDLCQQVCPWNRTATPTADPERQPADWMLTAKAEQLLGWDDATWDEKLRGSALRRIKPWMWRRNIHTAVTGQP

SEQ ID NO: 75532 - protein, 413 aa, unidentified
  source 1..413: note = Tectomicrobia bacterium
  REGION 1..413: note = tr|A0A1F7SWD6|A0A1F7SWD6_9BACT tRNA epoxyqueuosine(34) reductase QueG OS=Candidatus Tectomicrobia bacterium RIFCSPLOWO2_02_FULL_70_19; OX = 1802342 GN=A3I72_10685 PE=4SV=1
MDLPRPVAEHSPAELARAAKDLARRHGFDLAGIAPPELEEAYDRYREWLGLGYEGEMAYLRRRPEVRSDLRRVWPETRSALVVAIRYRSEEALPSPALLPGKIASYAHGGDYHKFLKKRLLRLLRDLKELDPGMDGRSYVDTGPILERNLAVRAGLGWQGKNSLLLHRALGSYFFLGALLLNRPLPADAPFAEEHCGTCARCIEACPTGAIVAPGVVDARRCISYLTIELRGPMPRELRPLVGAHFFGCDICQEVCPWNADTPPASEPRFAPRTGVRSPDLLDLLEMDEEAFAKRFRGTPVMRSRYDGFLRNVAVAAGNTGGGEAVAPLMRALRHREPLARGHAAWALGRIGRRLGGDAIRPGLEGRLASEPHPWVREEIELALGELPAFRLPALQETASGHEKGNGTPHSSR

SEQ ID NO: 75533 - protein, 413 aa, unidentified; identical to SEQ ID NO: 75532
  source 1..413: note = Tectomicrobia bacterium
  REGION 1..413: note = tr|A0A1F7TS21|A0A1F7TS21_9BACT tRNA epoxyqueuosine(34) reductase QueG OS=Candidatus Tectomicrobia bacterium RIFCSPLOWO2_12_FULL_69_37; OX = 1802343 GN=A3J27_11470 PE=4SV=1

SEQ ID NO: 75534 - protein, 359 aa, unidentified
  source 1..359: note = Tenderia electrophaga
  REGION 1..359: note = tr|A0A0S2TDE9|A0A0S2TDE9_9GAMM Epoxyqueuosine reductase OS=Candidatus Tenderia electrophaga OX=1748243; GN = queG PE=3 SV=1
MTEKHTLTQPHEAVDYPALARAIKEQGRALGFQQLGVSDIDLSEASQHLRAWLQANFHGEMGYMARHQALRDDPRQLVPGTVRVISVRMDYLPPSGDAEAVMNNPELGFVSRYALGRDYHKVMRKRLQRLADWITARVGEFGYRVFVDSAPVLEKALAQKAGLGWIGKHTNLLSRTAGSWFFLGEIYTDLPLPTDDSPEEHCGSCRACIDICPTRAIVAPYQLDARLCISYLTIELHGSIPVELRALLGNRIYGCDDCQLVCPWNRFAQLSGEDDFLPRHGLDAPYLIELFAWSEQTFNERLQGSPIRRIGHERWLRNIAVALGNGAKSEAVIDALKGRLEHPSEMVREHVQWALDQLR

SEQ ID NO: 75535 - protein, 344 aa, unidentified
  source 1..344: note = Terasakiella magnetica
  REGION 1..344: note = tr|A0A1C3RJN8|A0A1C3RJN8_9RHIZ Epoxyqueuosine reductase OS=Candidatus Terasakiella magnetica OX=1867952; GN = queG PE=3 SV=1
MEDVKQTIRTLALEMGFDDIGFCVAQTSKQHKDDLKEFNARELYGTMEWMQTTQERRADPKVLWPEAKSIIVLGMNYGPKNDPLALIDNPEKGVISCYAYNRDYHDTVKKRLKRLAREMVERWDGELKVFVDTAPVMEKPLAAQTQLGWQGKHTCVVSRTYGSWLFLGEIYTTLELEPDAPHKDHCGNCSSCLDICPTDAFLGESQIDGRKCISYLTIEHDGMIEPELALKMGNRIYGCDDCLAICPWTKFTQTTNEKDFKPRVEFLAPRLGDLIELDDPAFREFFRASPVKRIKHHRFIRNVIIAIVNSKRNDLFKKVEKWVDDDHHVIAQTAKWALSILEKG

SEQ ID NO: 75536 - protein, 335 aa, unidentified
  source 1..335: note = Thermochlorobacter aerophilum
  REGION 1..335: note = tr|A0A395M0R0|A0A395M0R0_9BACT Epoxyqueuosine reductase OS=Candidatus Thermochlorobacter aerophilum; OX = 1868324 GN=queG PE=3 SV=1
MTIVRKIKEYAYALGFSAIGISKAEELTEEARRLEAWLKAGMHGEMRYMEENFDKRIDPRKLMPECRTVISVIANYFTPTHNSDKKQRKDCNSTEGESEKAKGKISIYAIRADYHAVMKKKLYQLFDYITQLVGEVNGRAFVDSAPMLDKAWAARAGLGWIGKHTNLINRSIGSYFFIGNLLLDCELEPDKPLPKNYCGTCTACIDLCPTKAIVAPYQVDARRCISYLTIELKREFTDEEKSMLGEWLFGCDICQEVCPWTRFSKVTELAEFAPIEALQSLSEREILEMTKSTFKRLFGETPVWRTGLRRLKRNAKAVQENLSSAKISESERQAD

SEQ ID NO: 75537 - protein, 313 aa, unidentified
  source 1..313: note = Thermochlorobacteriaceae bacterium
  REGION 1..313: note = tr|A0A081SE37|A0A081SE37_9BACT Epoxyqueuosine reductase OS=Candidatus Thermochlorobacteriaceae bacterium GBChlB OX=1519464 GN=queG PE=3 SV=1
MTATEKIKAQALSLGFSAVGIAKAERLNKEADLLERWLSNGMHGEMRYMEDHFEKRVNPAALVPNAKSILSVIANYFTPEKFGQVEKGKARISAYAQSEDYHVVLKRKLNELFEFVLQTVGEVNGRAFVDSAPMLDKAWAERAGLGWIGKHTNLITRKHGSYFFIGSLVLDCELDCDTPYAHNYCGRCTACIDLCPTHAIVAPYQVDARKCISYLTIELKREFSEEEQAMLGEWLFGCDVCQEVCPWNRFAQPTTIKELAPTQELNSITESEILEMTKSAFAKVFSETPLFRTGLRRLKRNALAVGKNRVKKN

SEQ ID NO: 75538 - protein, 385 aa, unidentified
  source 1..385: note = Thermofonsia Clade
  REGION 1..385: note = tr|A0A2M8PDN0|A0A2M8PDN0_9CHLR tRNA epoxyqueuosine(34) reductase QueG OS=Candidatus Thermofonsia Clade 1 bacterium OX=2364210 GN=queG PE=4 SV=1
MEAAFESVRLKERAQQLGFSMLGVTRALPSPRLEAYLRWIAAGYHGTMAYMARADRVARRRDLNVILPNVRSLIVVGLAYHTLNVPAAVLRDPTRGRIAAYAWGLDYHEVIAARLEALAAWLRAESGGMAYRVYVDTGAILERSHAQQAGLGFIGKNTVLIDPKRGSYFLLGELLTDLAFDRYDEPHRETMCGTCVRCQSACPTAAFPQPYVLDARRCISYLTIEYKGYVPRGLRPLLGNWIMGCDICMDVCPFTRFATPTPEPAFQLRDIERAAPRLARLLSLSAAEFAAFFAGSPILRLKHERLLRNACIAAGNSGDASLLPHLDALLESASPLVRAHAAWAVARLAGRAAREALQAALARETDAECATEIETTLADLDAGSL

SEQ ID NO: 75539 - protein, 356 aa, unidentified
  source 1..356: note = Thermofonsia Clade
  REGION 1..356: note = tr|A0A2M8QG24|A0A2M8QG24_9CHLR tRNA epoxyqueuosine(34) reductase QueG OS=Candidatus Thermofonsia Clade 3 bacterium OX=2364212 GN=CUN48_02095; PE = 4 SV=1
MGFDLVGFAPAGPTPGAARFLAWLRAGYHAEMAYMARAPERRLDPRHLMPNVRTIVVVGLSYETLAVPMEVLQDPARGRIARYAWGADYHDVITPVLRAFGDWLARESRAYVDTGPILERAWAARCGLGFIGKNTCLIHPKRGSYLFLGAVLLSEEIEEADHEHSAAAPPLNTAGAPHRSTGEDAPFSRCGRCARCLVACPTNALPTPGVLDASRCISYLTIELKGSIPLALRPQMGNWVFGCDLCQDVCPYVRRFSRPSDSPLAKAFRPPDPERIAPRLLDLLSMDRTAFHARFKGTAIMRTKRRGLLRNACVAAGNWGSDEALPVLRRLLNDEEPLVREHAVWAIARIQQSAYT

SEQ ID NO: 75540 - protein, 542 aa, unidentified
  source 1..542: note = Thermokryptus mobilis
  REGION 1..542: note = tr|A0A0S4MQA8|A0A0S4MQA8_9BACT Epoxyqueuosine reductase OS=Candidatus Thermokryptus mobilis OX=1643428; GN = queG PE=3 SV=1
MMDRIELTREIKRKAIEIGFSKVGIAKAQQLENEAIKLSQWLERGYEADMKWMRESFEKRINPALVLPGAKSIISVALNYFKNLPQAQKEEGKISIYALGIDYHIVLKSKLEKLRQFILKLVPEANAKVYVDTGPVMEKVWATKAGIGWIGKNSNLITREFGSWVFLGEIITDIELEYDEPMSDFCGKCTRCIIACPTEAIVEPYVVDSNKCISYWTIEYKGDEFPDDLGRRFKNLIFGCDICQEVCPWNLKFQKETEVEEFKPFSYNLNPKLSELSKLTEKQFKSNYKLSPIKRAKFHGFIRNIKNAIKNMVLMKISELDFDCAIFDLDGVIADTFQFHFKSWRKICEEFGRDLSVDEFRTIIFGRRGEESAKILFDGKIKDEEIKKIGARVNEIFRDIARGKLKSVDGAIEVVKILKENGIKVALATSAPDENVELIFEELNLYGLFDIVITSKDVQRGKPAPDIFILPAKRLNCRAERCIVFEDSIAGLISAKNAGMVAIGVETTLRKDELSNYADFSIKNFFELIEILKQRTLKNAGD

SEQ ID NO: 75541 - protein, 360 aa, unidentified
  source 1..360: note = Thiodiazotropha endoloripes
  REGION 1..360: note = tr|A0A1E2UUU4|A0A1E2UUU4_9GAMM Epoxyqueuosine reductase OS=Candidatus Thiodiazotropha endoloripes; OX = 1818881 GN=queG PE=3 SV=1
MSETLNADELLKLSLQIKQWGEELGFNAVGITDTDLSEAESRLQQWLASDCHGEMDYMARHGSKRSRPAELEPGTVRVISVRMDYLPEPMQDLQQLLEDPQKAFISRYALGRDYHKLLRNRLKKLQQKIQHSIPDSNNRLYVDSAPVLEKPLAEKAGLGWIGKHTNLINKRSGSWFFLGEIYTSIPLPIDQPAEDHCGRCQACLEICPTRAITAPYQLDARRCISYLTIELKGAIPEPFRAAMGNRIYGCDDCQQVCPWNRFAQVTGEQDFLARHHLDTSGLISLFDWDEATYLQKTEGSAIRRIGYQRWQRNLAVALGNAPTSDAVAEALLRRLEQASPMVKEHILWALDRQRNQPATA

SEQ ID NO: 75542 - protein, 361 aa, unidentified
  source 1..361: note = Thiodictyon syntrophicum
  REGION 1..361: note = tr|A0A2K8UHT6|A0A2K8UHT6_9GAMM Epoxyqueuosine reductase OS=Candidatus Thiodictyon syntrophicum; OX = 1166950 GN=queG PE=3 SV=1
MTEATRDSPDGAALAQAIKTWGQELGFQQLGIAATDLSVAAAHLAEWLRAGYHGEMHYMARHGTRRSRPAELVPGTRSVIMARMDYLPQTRTAMAAALRDPTGALISRYALGRDYHRLLRRRLQRLAERITAAIGPFGHRAFVDSAPVLEKPLAQHAGLGWIGKHTNLIDRRAGSWFFLGALYTDLALPPDTQARDHCGRCQACLRACPTGAIVAPYRLDARRCISYLTIEHPGPIPEPLRPLLGNHIYGCDDCQLVCPWNRFARLTAEPAFLPRHGLAAATLVELFAWDEATFLARTQGSALRRIGHERWLRNLAVALGNAPPGPAVTAALAARADHASPLVREHVGWARRHRPDDPQRF

SEQ ID NO: 75543 - protein, 383 aa, unidentified
  source 1..383: note = Thioglobus sp.
  REGION 1..383: note = tr|A0A520MMI2|A0A520MMI2_9GAMM Epoxyqueuosine reductase OS=Candidatus Thioglobus sp. OX=2026721 GN=queG; PE = 3 SV=1
MTELNTNHLAELARNINEWAQELGFNGVGISDSGLEDAGDQLNAWLAKGWHGEMSFMSRNTEKRIKPELLIPEVKRIISVRLNYWPEQSTDPGELIKQQDQAYIARYALGRDYHRLMRRRLQQLANRISDEIGPFHYRAFVDSAPVMEKPLASAAGLGWIGKHTNLIDPHSGSWFFLGELYTDLPLPTTRPAKDHCGSCTRCIDACPTGALDTPYQLDARQCIAYLTIEHKSSIPEPLRALIGNRIFGCDDCQLVCPHNRLTQKGDAEFSPRHGLDTATLLDLFAWSPEEFNRCTAGSPIRRLGYERWMRNLSVAIGNSTPTEKKISILQSKFKKISAMVDEHIVWAINRLRSRLAGEQGITDQGPANKTLSSDVVAVKRHPN

SEQ ID NO: 75544 - protein, 362 aa, unidentified
  source 1..362: note = Thioglobus sp.
  REGION 1..362: note = tr|A0A2A5WXF9|A0A2A5WXF9_9GAMM Epoxyqueuosine reductase OS=Candidatus Thioglobus sp. MED-G25 OX=1986229; GN = queG PE=3 SV=1
MTSRTFSSKELTSLKVQMKLWAGELGFSMIGIADTDLSQAETRLIEWLADGRHGDMHYMAKHGNRRTQPAAIQPGTVRVVSVRMDYLPDSATPPTTILQDSTKGYVSRYALGRDYHRLIRRRLQKLADLMSEAVGPFRYRAFVDSGPVMEKPLAVKAGLGWLGKHTNLIDKESGSFFFLGELYTDLPLPLDKEQTDHCGDCNRCMTACPTGAIDKAYQLDARRCIAYLTIELKGSIPEDLRPLIGNRIFGCDDCQLVCPWTRFSKSVPTQDFQPRHSLDNATLTGLFSWSESEFNTRLEGSPIRRIGYQRWLRNIAVALGNSRRTTEVLAVLERKKEEATPMVREHIEWAIARLNDHCSESD

SEQ ID NO: 75545 - protein, 368 aa, unidentified
  source 1..368: note = Tokpelaia hoelldoblerii
  REGION 1..368: note = tr|A0A1U9JV22|A0A1U9JV22_9RHIZ Epoxyqueuosine reductase OS=Candidatus Tokpelaia hoelldoblerii OX=1902579; GN = queG PE=4 SV=1
MRAFLQEEARNNGFDLIGITRPNAIPAARAHLQRALAAGYLGTMDWMEETFERRVAPDVLWPDVRSVIMLAMNYGPGTDPRALQDHPGRGAISVYARHRDYHDLIKGRLKQIASRFAARTGEEVKVFVDTAPVMEKPLAAAAGLGWQGKHTNLVSRTHGSWLFLGSVFTTADLGADAPENDHCGSCRACLDSCPTHAFPAPYQLDARRCISYLTIELKEQIPPGFRKAIGNRIYGCDDCLAACPWNKFAQVTHEIKLQTREELKAPALSMLLGLDDRAFRHFFSGSPVKRIGRDRFIRNALLAAGNSNDANLVPHIEKHMTDPSPLVRGMAVWALHQLLPPAAFETLRKRFASDETDDTVKAEWETAT

SEQ ID NO: 75546 - protein, 111 aa, unidentified
  source 1..111: note = Tokpelaia sp.
  REGION 1..111: note = tr|A0A367ZZ51|A0A367ZZ51_9RHIZ Epoxyqueuosine reductase OS=Candidatus Tokpelaia sp. JSC189 OX=2079010; GN = queG PE=4 SV=1
MNWIEDTVERRSRPDILWPEARSIIMLAMNYGPDSDPCTLQTLPSQGTISVYARHRDYHDLIKGRLKQIASRFSARTGNPVKVFVDTSSCDGKTAGRRRRPRLAGQAYQPF

SEQ ID NO: 75547 - protein, 313 aa, unidentified
  source 1..313: note = Vecturithrix granuli
  REGION 1..313: note = tr|A0A081C566|A0A081C566_9BACT Iron-sulfur cluster-binding protein OS=Candidatus Vecturithrix granuli; OX = 1499967 GN=U27_06706 PE=4 SV=1
MSHKSLFKKIFQTLEQQGYQGRMISVEHLAELQTEIEQRYYQGEMAREVYDEEPCKKFEFTNPAALPEARSLIIAAAPQPPVEATFHVNGQPFPALIPPTYFFYTDASIHQLLDSVLGPEGYHLVKARLPLKLLAVRSGLAQYGRNNITYIPGMGSFHRPVAFYTDLPCETDSWGAAAFMPRCSTCQVCCKICPTGAITPDRFLIHAERCLTLHNESDRDFPEWIDPAWHNCIIGCLECQSSCPANKDVAARTDHKAQFSEEETALLLQGTPQEQLLPETQSKIKDLEIVEFGYFHLLPRNLRVLFQQQKILA

SEQ ID NO: 75548 - protein, 336 aa, unidentified
  source 1..336: note = Vecturithrix granuli
  REGION 1..336: note = tr|A0A081CAX7|A0A081CAX7_9BACT Uncharacterized protein OS=Candidatus Vecturithrix granuli OX=1499967; GN = U27_02561 PE=4 SV=1
MNSDRIKAHALSLGFHLAGIAPAIRFTEADTYRAWLAMGYAGEMSYLVHNVEKRLDCRVLFPPARSVIVCGLSYHSSISAAAPVTSPERGWISRYAWGDDYHAVVKHKLLALLEFLRHETSATIEAKVCVDTVPLLERLHGYYAGLGWIGKNGALINQRYGSWFFLGEILLNLDLEYDSPAVEHCGNCTLCLDACPTVALVAPRTLDARRCLSYLSIEFKGAIPKELHSAFGKTVFGCDRCQEVCPWNQRAEAPGQPEFLPREGLYQPDLRWLSSLSADDFRKIFNNSPIMRTNLQGILRNTAIAISNTQICQPPLPLIKASVSCAANAAAIIRKA

SEQ ID NO: 75549 - protein, 303 aa, unidentified
  source 1..303: note = Capsulimonas corticalis
  REGION 1..303: note = tr|A0A402CXH4|A0A402CXH4_9BACT tRNA epoxyqueuosine(34) reductase QueG OS=Capsulimonas corticalis OX=2219043 GN=CCAX7_31780 PE=4 SV=1
MYLHRQEPKRGDLSEVLPGVRSVVSLAWNYSPENGRPSAPPQTEYLTGAVARYARFDDYHDLIWARLQSLLDSILAERPDAHGKLYCDTGPVTERDLAMRAGLGWIGKHTNLISRKLGNWFFLAELLLDIDLPPDEPEVPHCGSCTRCIPACPTGAIVAPYTLDARRCISYLTIELKGSIPEELRPLIGTRIYGCDECLAVCPWNKFAQRSSEPAVRPRADLTAPDLLALLALDDAGFKEKFRSSPIKRAKRRGLLRNVCVALGNIGDIRAIPALTTAMENDPEPLVREHAAWALERIAEANP

SEQ ID NO: 75550 - protein, 224 aa, Carboxydocella sporoproducens
  REGION 1..224: note = tr|A0A1T4L9E1|A0A1T4L9E1_9FIRM Uncharacterized protein OS=Carboxydocella sporoproducens DSM 16521; OX = 1121270 GN=SAMN02745885_00092 PE=4 SV=1
MARVAWGQDYHRVMREMLERVLQRMGLTGQIQVDSGPWPEKELAVKAGLGWIGRNTLFYHWQAGSFVNLGVALLPFPADGGKNEIEKKPGSRCGQCRRCLEACPGGALTEQGLVVSRCLSAVSQRRGDITEAEARLLPPRLYGCDDCQKVCPYNREQVKKMGDWGWIDVDEVLSLSNRQFKESWGKTAAGWRGAGVIRRNARLITISQNGQKNMVYWNKKDNGG

SEQ ID NO: 75551 - protein, 224 aa, Carboxydocella thermautotrophica; identical to SEQ ID NO: 75550
  REGION 1..224: note = tr|A0A2R4MYL5|A0A2R4MYL5_9FIRM Uncharacterized protein OS=Carboxydocella thermautotrophica OX=178899; GN = CFE_0701 PE=4 SV=1

SEQ ID NO: 75552 - protein, 309 aa, unidentified
  source 1..309: note = Carboxylicivirga sp.
  REGION 1..309: note = tr|A0A553G4X3|A0A553G4X3_9BACT Epoxyqueuosine reductase OS=Carboxylicivirga sp. M1479 OX=2594476 GN=queG; PE = 3 SV=1
MSIINLAYQQQIKEKAFDLGFSDIGFSVVDHLADDELKLQQWLSNGHQAGMNYMNNHFDKRVNPGLLVEGAKSVISVLLNYAPKELQQDENAPKIARYAYGKDYHFVIKDKLQQLYNFIKEEIYTSLEGRVFTDSAPVLDRAWAKKAGLGWVGKNTNLIHKKLGSYFFIGELISNLEVQPAEEIKEACGGCQRCIDACPTGALVAPYKLDSNKCISYLTIEHREAIPEEFEGQFENWAFGCDICQEACPWNWKARPTKEMEFAPHPDFLSLSKEEWNGLSEERFVEVFRKSALKRTKFAGLRRNLKFLE

SEQ ID NO: 75553 - protein, 389 aa, Carnobacterium alterfunditum
  REGION 1..389: note = tr|A0A1N6HA05|A0A1N6HA05_9LACT Epoxyqueuosine reductase OS=Carnobacterium alterfunditum OX=28230; GN = SAMN05878443_1713 PE=4 SV=1
MVGEATSLKEKIIEESKRIGIDKIGFTTADPFDELEDKLRKQQELGHHSGFEHKVIEERIYPKLIFENPRSIISIALAYPTKIDDPPPRVKGERRGEFARASWGIDYHDILRDKMNRLIEYIRHEAGETITYKPMVDTGELIDVAVAQRAGIGFIGRNGLLITEEFGSYVYLGEIITNLDFPADRIVPFGCGDCTRCVDACPTGALLGDGQINAIQCLSYQTQTKGMMEEKFRRKMGHVIYGCDICQVVCPYNKGKNAHFHPEMEPEPESIMPKLKPLLTISNRDFKEQFGHMSGSWRGKKPLQRNAIIALGNYRDKSALPDLMRCIEEDVRPIIRGTAAWSIAKIVSARDKMIIDFLKEALAKETDKEAYHEIDQAIEVIQHKREKKS

SEQ ID NO: 75554 - protein, 382 aa, Carnobacterium divergens
  REGION 1..382: note = tr|A0A2R7ZZS0|A0A2R7ZZS0_CARDV Epoxyqueuosine reductase OS=Carnobacterium divergens OX=2748 GN=queG PE=4; SV = 1
MSTLQTSLKEKIILESKRIGIDKIGFTSAAPFTELEEKLEKQQEKGHHSGFEHSNIKERIYPELIFEEPRSIISIALAYPTKMVEAPEKVKGERRGQFARASWGTDYHDILREKMDRLIAYIKEEAEEVSFKPMVDTGELIDVAVAQRAGLGFIGKNGLLITEEFGSYVYLGEIITNISFPVDEPVPNGCGDCTRCIVGCPTTALLGDGRMNAKRCLSYQTQTKGMMPLEYRKKMGHVIYGCDICQMVCPYNKGKNFHFHEEMEPVPEDVAPLLKPLLTISNREFKERFGVMAGSWRGKKPIQRNAIIALANYRDKSAVPDLLKCVAEDPRPVIRGTAAWAIGEIGIQTEELIEFLEEAFTKETDEEAKAELTAAIEKLTTN

SEQ ID NO: 75555 - protein, 390 aa, Carnobacterium divergens
  REGION 1..390: note = tr|A0A0R2I388|A0A0R2I388_CARDV Epoxyqueuosine reductase OS=Carnobacterium divergens DSM 20623 OX=1449336; GN = queG PE=3 SV=1
MDKELISVCALEITLKEKIILESKRIGIDKIGFTSADPFTELEEKLEKQQEKGHHSGFEHSNIKERIYPELIFEEPRSIISIALAYPTKMAEAPEKVKGERRGQFARASWGTDYHDILREKMDQLIAYIKEEAADVSFKPMVDTGELIDVAVAQRAGLGFIGKNGLLITEEFGSYVYLGEIITNISFSVDKPVPNGCGDCTRCIVGCPTTALLGDGRMNAKRCLSYQTQTKGMMPLEYRKKMGHVIYGCDICQMVCPYNKGKNFHFHEQMEPVPEDVAPLLKPLLTISNREFKERFGVMAGSWRGKKPIQRNAIIALANYRDKSAVPDLLKCVAEDPRPVIRGTAAWAIGEIGIKTEELITFMKDAFEKETDEEAKLELKKAIERLTIAD

SEQ ID NO: 75556 - protein, 389 aa, unidentified
  source 1..389: note = Carnobacterium iners
  REGION 1..389: note = tr|A0A1X7NJ08|A0A1X7NJ08_9LACT Epoxyqueuosine reductase OS=Carnobacterium iners OX=1073423; GN = SAMN04488700_2043 PE=4 SV=1
MIVLQADLKEKIIEESQRLGINKIGFTTAEPFLDLENKLIAQQEKGHHSGFEHKNIQERIYPELIFESPRSIISIALAYPTKIEHPPERVKGERRGEFARASWGTDYHIILREKMDQLIEYIRKEAGDSVTYKPMVDTGELIDVAVAKRAGLGFIGRNGLLITEEFGSYVYLGEIITNLDFPIDAEIPFGCGDCTRCVDACPTGALLGDGRMNAKQCLSYQTQTKGMMPEEFRRRMGHVIYGCDICQVVCPYNKGKNTGFHPAMEPDPESAMPKLKPLLTISNREFKESFGYMSGSWRGKKPIQRNAIIALGNYRDKSALPDLLHCLEKDPRPVIRGTAAWSIAKIVFHRDEMIMEFLKEVLEKETDKEAQDEMNKAIASIHMKKEKKK

SEQ ID NO: 75557 - protein, 388 aa, Carnobacterium inhibens
  REGION 1..388: note = tr|U5SDC2|U5SDC2_9LACT Iron-sulfur cluster-binding protein OS=Carnobacterium inhibens subsp. gilichinskyi; OX = 1266845 GN=Q783_06225 PE=4 SV=1
MVGEATSLKEKIIEESKRIGIDKIGFTTADPFSDLEEKLKQQKELGHHSGFEHKVIEERIYPEMIFQNPRSIISIALAYPTKIENPPPRVKGERRGEFSRASWGTDYHDILRDKMNQLIEYIRAEAGETVTYKPMVDTGELVDVAVAQRAGLGFIGRNGLLITEEFGSYVYLAEIITNLDFKSDIPVPFGCGECTRCIDACPTGALLGDGRMNAQLCLSYQTQTKGMMDEQFRRKMGHVIYGCDICQVVCPYNKEKNFHFHPEMEPEPESVMPKLKPLLTISNREFKENFGHMSGSWRGKKPLQRNAIIALGNYRDKSALPDLLRCIEEDSRPVIRGTAAWSLAKIVSVRDEMVIEFLEEALAKEEDKEAYHEINQAIETIKNKKERK

SEQ ID NO: 75558 - protein, 386 aa, Carnobacterium maltaromaticum
  REGION 1..386: note = tr|A0A2N5JGU6|A0A2N5JGU6_CARML tRNA epoxyqueuosine(34) reductase QueG OS=Carnobacterium maltaromaticum OX=2751 GN=queG PE=4 SV=1
MSGTSLSLKERIIQESQRIGIDKIGFASAEPFSDLEKKLEEQQEKGHHSGFEHPVIKERIYPELIFDEPRSIISIALAYPTKMKEPPERVKGQRRGQFARASWGTDYHDILREKLARLIEFIKEEAKEEVLFKPMVDTGELIDVAVAQRAGLGFIGKNGLLITEEFGSYVYLGEIITNLEFEFDEAVANGCGDCTRCITGCPTTALLGDGRMNAKKCLSFQTQTKGMMPVEYRKKMGHVIYGCDICQMVCPYNKGKNFHFHEAMEPVPEDVAPLLQPLLSISNKEFKQRFGVMAGSWRGKKPIQRNAIIALANYRDKTALPALLRCIEEDPRPVIRGTAAWAIGQIGAKQDVTVIEFLRTAYQKEEDEEARVEFKQALQTLEEKSS

SEQ ID NO: 75559 - protein, 386 aa, Carnobacterium maltaromaticum
  REGION 1..386: note = tr|K8E359|K8E359_CARML Putative iron-sulfur cluster-binding protein OS=Carnobacterium maltaromaticum LMA28 OX=1234679 GN=aa23 PE=4 SV=2
MSGTSLSLKERIIQESQRIGIDKIGFASAEPFSNLEKKLEEQQEKGHHSGFEHPVIKERIYPELIFDEPRSIISIALAYPTKMNEPPERVKGQRRGQFARASWGTDYHDILREKLARLIEFIKQEAKEEVLFKPMVDTGELIDVAVAQRAGLGFIGKNGLLITEEFGSYVYLGEIITNLEFEFDEAVANGCGDCTRCITGCPTTALLGDGRMNAKKCLSFQTQTKGMMPVEYRKKMGHVIYGCDICQMVCPYNKGKNFHFHEEMEPVPEDVAPLLQPLLSISNKEFKQRFGVMAGSWRGKKPIQRNAIIALANYRDKTALPALLRCIEEDPRPVIRGTAAWAIGQIVAKQDVTVIEFLRTAYQKEEDEEARVEFKQALQTLEEKSS

SEQ ID NO: 75560 - protein, 389 aa, Carnobacterium sp.
  REGION 1..389: note = tr|F4BRW4|F4BRW4_CARS1 Putative iron-sulfur containing oxidoreductase subunit OS=Carnobacterium sp. (strain 17-4) OX=208596 GN=yhbA PE=4 SV=1
MVGEATSLKEKIIEESKRIGIDKIGFTTADPFNELEEKLEKQQELGHHSGFEHKVIKERIYPELIFENPRSIISIALAYPTKMDAPPPRVKGERRGEFARASWGTDYHDVLRDKMDQLIAYIRREAGEVATYKPMVDTGELIDVAVAQRAGLGFIGRNGLLITEEFGSYVYLAEIITNLDFSVDTPVPFGCGDCTRCVDACPTGALLGDGRINAKQCLSYQTQTKGMMEEPFRRKMGHVIYGCDICQIVCPYNKGKNAHFHPEMEPDPESVMPKLKPLLTISNRNFKEQFGHMSGSWRGKKPLQRNAIIALGNYRDKSALPDLLRCIDEDVRPVIRGTAAWSIAKIVSARDELVIEFLEETLTKEEDKEAYYEIQQAIETIKSKREKKR

SEQ ID NO: 75561 - protein, 389 aa, Carnobacterium sp.
  REGION 1..389: note = tr|A0A0U3P124|A0A0U3P124_9LACT Epoxyqueuosine reductase QueG OS=Carnobacterium sp. CP1 OX=1564681; GN = NY10_714 PE=4 SV=1
MAAMQTALKEKIIEESKRIGINKIGFTTAEPFSDLESKLEAQQAKGHHSGFEHKVIKERIYPELIFESPRSIISIALAYPTKIENPPPRVKGERRGEFARASWGMDYHDILREKMNQLIDYIRQEAGDTVTYKPMVDTGELVDVAVAQRAGLGFIGRNGLLITEEFGSYVYLGEIITNLDFPSDETVPFGCGDCTRCIDACPTGALLGDGRMNAKQCLSYQTQTKGMMPEEFRRSMGHVIYGCDICQIVCPYNKGKHANVHPEMEPEPESVMPKLKPMLSISNREFKEQFGHMAGSWRGKKPLQRNSIIALGNYRDKSALPDLLRCVERDPRPVIRGTAAWSIAKIVSYQDDMVIEFLEEALEKETDKEAFFEIKQAVVAIKDKRTKRN

SEQ ID NO: 75562 - protein, 389 aa, Carnobacterium viridans
  REGION 1..389: note = tr|A0A1H0Y9J5|A0A1H0Y9J5_9LACT Epoxyqueuosine reductase OS=Carnobacterium viridans OX=174587; GN = SAMN04487752_0798 PE=4 SV=1
MVEEATSLKEKIIEESKRIGIDKIGFTTADPFDDLEEKLEKQQELGHHSGFEHKVIKERIYPELIFKSPRSIISIALAYPTKMDAPPPRVKGERRGEFARASWGTDYHDILRDKMNQLIAYIRREAGETVTYKPMVDTGELVDVVVAQRAGLGFIGRNGLLITEEFGSYVYLAEIITNLDFSSDTLVPFGCGDCTRCVDACPTGALLGDGRINAKQCLSYQTQTKGMMEEQFRRKMGHVIYGCDICQIVCPYNKGKNVHFHPEMEPDPESVMPKLKPLLTISNRDFKEQFGHMSGSWRGKKPLQRNAIIALGNYRDKSALPDLFRCIEEDIRPVIRGTAAWSIAKIVSARDELVIEFLEEALTKEEDKEAYYEIQQAIETIKSKKEEKR

SEQ ID NO: 75563 - protein, 376 aa, Caryophanon latum
  REGION 1..376: note = tr|A0A1C0YFX8|A0A1C0YFX8_9BACL tRNA epoxyqueuosine(34) reductase QueG OS=Caryophanon latum; OX = 33977 GN=A6K76_14970 PE=4 SV=1
MTITQLQQDFIAYAASIGVDKIGFTTAAPFMELKNRLRRQQELNFQSGFEESDVELRTEPTKLLPQAESIVSIALAYPSRMDNAPIGKKGERRGIFCRASWGVDYHVAVRERLTKLEAWLQERVPNVQIRSMVDTGELVDRAVAERAGIGWSAKNCSVITPEFGSYVYLGELITNIPFAPSTPIEEECGDCRLCIDVCPTGALIEGGQLDSKRCIAFLTQTKTMLPDEFRTKIGNRLYGCDTCQTVCPKNKRKHNDWHEEFTPDPELAKPLLEPLLHISNKEFKAKFGHVSGSWRGKKPIQRNAILALAHFKEEAAMPALVELLKKDERPVIRGTAAWAIGKIGADGAEEVLLQAKEKEADEQVVAEIEKGLQLLR

SEQ ID NO: 75564 - protein, 378 aa, Caryophanon tenue
  REGION 1..378: note = tr|A0A1C0YB10|A0A1C0YB10_9BACL tRNA epoxyqueuosine(34) reductase QueG OS=Caryophanon tenue; OX = 33978 GN=A6M13_15480 PE=4 SV=1
MRVHIASLQRELIAYAKSIGVDKIGFTTAAPFMELKNRLRRQQELNYQSGFEESDVELRTEPTLLLDRAESIISIALAYPSRMENAPLGKKGARRGVFCRASWGVDYHVAVRERLQKIEAWLQERVPTVAIRSMVDTGELVDRAVAERAGIGWSAKNCSVITPEFGSYVYLGELITNIPFVPDTPIEDECGDCRLCIDVCPTGALIEGGQLDSKRCIAFLTQTKTMLPDEFRTKIGNRLYGCDTCQTVCPKNKGKLNWIHEEFTPDPELAKPLLQPFLHMSNKEFKTTFGHVSGSWRGKKPIQRNAILALAHFREEAAVPELIELLHKDTRPVIRGTAAWAIGKIGTPEAEEVLLLARSKENDEEVLAEIDKGLQFLR

SEQ ID NO: 75565 - protein, 359 aa, Castellaniella defragrans
  REGION 1..359: note = tr|W8X8G3|W8X8G3_CASDE Epoxyqueuosine reductase; OS = Castellaniella defragrans 65Phen OX=1437824 GN=queG; PE = 3 SV=1
MNGNNQWSRQIRAWARELGFSDIGVSGVDLSSAEPHLLQWLARGYHGDLHYMERHGLKRARPAELVPGTVSVITARMPYLPRDTAPDWQARECARLADPGEGVVSLYARGRDYHKVVRARLQKLCDRIEALVGPFGYRVFSDSAPVLEKELASRSGLGWRGKHSMVLSRDAGSMFFLGEIFVDFALEPTDPVSAHCGTCTACIDVCPTGAIVAPGVVDARRCISYLTIENHGPIPEELRPLMGNHIYGCDDCQTICPWNKYAQTSTLPDFDERAPLVGRRLVELFAWDEETFLKRTEGGPIRRIDHERWLRNIAVALGNALREADAAQARELRAALLGRADHESALVREHVAWALAQRA

SEQ ID NO: 75566 - protein, 317 aa, unidentified
  source 1..317: note = Catalinimonas alkaloidigena
  REGION 1..317: note = tr|A0A1G9MWX3|A0A1G9MWX3_9BACT Epoxyqueuosine reductase OS=Catalinimonas alkaloidigena OX=1075417; GN = queG PE=3 SV=1
MMEPFVRRRHTMLIKERAHALGFAACGVSTADFLEEEAPRLEHWLRQQQHGQMAYMANHFDKRLDPRKLVDDAKSVVSLLFNYFPKEELPTDGTYKIARYAYGTDYHFVIKDKLRALMAYIEEEIGEVHGRVFVDSAPVMDKAWAKRSGLGWVGKNSNLLNRRMGSYFFIAELILDLDLVPDQGIRDYCGTCTRCLDACPTGAIVEPYVVDGSRCISYFTIELKDQIPEAVRGQFDDWIFGCDICQEVCPWNRFAQPTTEPAFAPHPALSEMKKSDWEELTEEVFREIFRRSPVKRTKFEGLKRNINFAKNAKGFPE

SEQ ID NO: 75567 - protein, 385 aa, Catenovulum agarivorans
  REGION 1..385: note = tr|W7QIF9|W7QIF9_9ALTE Epoxyqueuosine reductase; OS = Catenovulum agarivorans DS-2 OX=1328313 GN=queG PE=3; SV = 1
MFMPLSNQQLEQLAQNIKLWATELGFSYVGISDLDLTKHEQPLLDWLDKNYHGEMAYMQNHGLLRARPSELHPGSVRSISIGMDYLPQSAKFAKTLKDKHKGYISRYSLGRDYHKLIRNKLKQLGQKIEQQTELNTGFRPFVDSAPILERPLAEKAGIGWTGKHSLILNQTGGSWFFLGELLINLPLPTDNPVEEKCGNCVACMTICPTQAIVAPYEVDARRCISYLTIEKKGPIPQEFRHAIGNRIYGCDDCQLVCPWNRYASLTAEDDFQARHNLDSSDLLDLWSWQEQDFLTKLQGSAIRRIGYEYWLRNLAVALGNAPASEAIIQQLQQKLGTISELVDEHIHWAVEQQQQKITDTNLNTGLDKKTQRLVRVVEKGLARDA

SEQ ID NO: 75568 - protein, 384 aa, unidentified
  source 1..384: note = Catenovulum maritimum
  REGION 1..384: note = tr|A0A0J8GNP5|A0A0J8GNP5_9ALTE Epoxyqueuosine reductase OS=Catenovulum maritimum OX=1513271 GN=queG PE=3; SV = 1
MTTQTALNSEQLAQLSIDIKKWGKELGFQHVGISSTELLNQDEAYQKWIKNNYHGDMDYMNRNIDLRLNPAQLHPNTASIISVRLDYLPENAGFSTSLNDPNKAYISRYAIGRDYHKVLRNKLKQLGQKIELETELNIGFRPFVDSAPVLERPIAEQAGLGWTGKHTLIIHKDAGSWFFLGELFINLPLVEDQPVQEECGNCVACITICPTAAIVEPYVVDARKCISYLTIELQGSIPVEYREAIGNRIYGCDDCQLVCPWNRYADLSQEKDFEQRHGLLSQDLLALWQWDEETFLTKTQGSPIRRIGYQRWLRNLAIGIGNSSFNPANIAALESKLVQADEIAAEHINWAIAQQQLKQSNENPVNKKTARLIRVIEKGLPRDA

SEQ ID NO: 75569 - protein, 380 aa, Catenovulum sp.
  REGION 1..380: note = tr|A0A2S0VY53|A0A2S0VY53_9ALTE Epoxyqueuosine reductase OS=Catenovulum sp. CCB-QB4 OX=2172099 GN=queG; PE = 3 SV=1
MTLTAEQLVHIKSQIKAMAQTLGFQALGVSDIDLSIEEPRLQAWLDNNYHGEMDYMARHGMMRARPAELQPGTLRVISVRMDYLPEEAYFAQDLKEPNTAFISRYALGRDYHKLIRNRLKRLGQQISEKLEQELGFRPFVDSAPILERPLAAKAGLGWVGKHSLLLDEKAGSWFFLGELLVDLPLPVDEPVQEQCGSCVACMTMCPTQAIVAPYVVDGRRCISYLTIELQEAIPEEFRPLIGNRIYGCDDCQLVCPWNRYAELSCEQDFQKRGNVASQDLLTLWAWDEDTFLKNTEGSAIRRIGHQRWLRNIAVALGNAPYSAAIVSALTSKRVEVSELVVEHIDWALAQQAEKQKQQVNLDKKTQRLIRIVEKGLPRDA

SEQ ID NO: 75570 - protein, 360 aa, unidentified
  source 1..360: note = Caulobacter flavus
  REGION 1..360: note = tr|A0A2N5D613|A0A2N5D613_9CAUL Epoxyqueuosine reductase OS=Caulobacter flavus OX=1679497 GN=queG PE=3; SV = 1
MTTSTSDLTPKDRFLAIRDEIRREALALGFDACGFASAADAWPNGEWLRQFVAEGLHGAMGWMEETLERRSHPTAMWTNARSAVVLGVNYGPDIDPLTQLEHRDRAAISVYAQGDDYHDVVKKRLKQLAGWMHRRWGEEVKVFVDTAPLMEKPLAQRAGLGWQGKHTNLVSRQFGSWLFLGSVLTTLDLPPDPEEFDRCGSCRACLDICPTNAFPAPHRLDARRCISYLTIELAGPIPDEFRPLLGNRIYGCDDCLAACPWNKFASLSAEAKFHARETLKTPALADLAALDDPSFRALFSKSPIKRIGRDRFVRNVLYAIGNSGDPGLLAVVQPLRADADETVRDAADWAASRLAGAQAS

SEQ ID NO: 75571 - protein, 378 aa, Caulobacter henricii
  REGION 1..378: note = tr|A0A0P0P3W3|A0A0P0P3W3_9CAUL Epoxyqueuosine reductase OS=Caulobacter henricii OX=69395 GN=queG PE=3; SV = 1
MTTSTSSPPNLAFRDEIRAEALRLGFDACGFADAATAWPHGEQLAQFVAEGFHGEMGWMEETLERRSHPTAMWTDARSAVVLGLNYGPEHDPLTALDHKDRAAISVYAQGDDYHEVVKKRLKLLAGWMHRRFGEEVKVFVDTAPLMEKPLAQRAGLGWQGKHTNLVSRPFGSWLFLGSVLTTLGLPPDPPEVDHCGSCRACLDICPTGAFPAPYRLDARRCISYLTIELAGPIPPEFRPALGNRIYGCDDCLAACPWNKFAQVAGEARFHAREALKGPSLADLAGLDDPSFRALFSKNPIKRIGRDRFVRNVLYAIGNSGDATLMTAVEPLLQDPVPLVRGAAVWAARRLDPGRAAAAGARELETDQAVLDEWARPLA

SEQ ID NO: 75572 - protein, 354 aa, Caulobacter mirabilis
  REGION 1..354: note = tr|A0A2D2B3M3|A0A2D2B3M3_9CAUL Epoxyqueuosine reductase OS=Caulobacter mirabilis OX=69666 GN=queG PE=3; SV = 1
MTILISDDTNDRIRQRARSLGFDVVGFASAADAWPAGERLRQFVAEGLHGQMGWLEETLDRRAHPTGMWAEGRSAVMLGMNYGPDADPLERLKERSTGIISAYAQGDDYHDLIKGKLKNLAGWMKARFGGEVKVFVDTAPLMEKPLAQRAGLGWQGKHTNLVSRELGSWLFLGSVLISVDLEHDSPEIDRCGSCRACLDICPTKAFLGPYRLDARRCISYLTIEHDGPIPEDLRPALGNRIYGCDDCLAVCPWNKFAETSRQAQFQARQALRAPKLSELAALDDEGFRFVFRRSAVQRIGRDRFIRNVLYAVGNSGDPALLPTAERLLDDPDPVVRDAAHWAVSRLKGAPPAAA

SEQ ID NO: 75573 - protein, 360 aa, unidentified
  source 1..360: note = Caulobacter radicis
  REGION 1..360: note = tr|A0A2T9K149|A0A2T9K149_9CAUL Epoxyqueuosine reductase OS=Caulobacter radicis OX=2172650 GN=queG PE=3; SV = 1
MTTSTSDLTPQDRLLAIRDEIRREALALGFDACGFASAADAWPNGEWLRQFVAEGLHGAMGWMEETLERRSHPTAMWTEAKSAVVLGVNYGPDIDPLTQLEHRDRAAISVYAQGDDYHDVVKKRLKQLAGWMHRRWGNDVKVFVDTAPLMEKPLAQRAGLGWQGKHTNLVSRQFGSWLFLGSVLTTLDLPADEAEFDRCGSCRACLDICPTNAFPAPHRLDARRCISYLTIELAGPIPDEFRPLLGNRIYGCDDCLAACPWNKFASLSAEAKFHARETLKTPSLAQLAVLDDPSFRALFSKSPIKRIGRDRFVRNVLYAIGNSGDRALMAVVEPLRSDPDETVRDAADWAAARLAPAQAS

SEQ ID NO: 75574 - protein, 360 aa, unidentified
  source 1..360: note = Caulobacter radicis
  REGION 1..360: note = tr|A0A2T9J1T5|A0A2T9J1T5_9CAUL Epoxyqueuosine reductase OS=Caulobacter radicis OX=2172650 GN=queG PE=3; SV = 1
MTTSTSDLTPQDRFLAIRDEIRREALALGFDACGFASAADAWPNGEWLRQFVAEGLHGAMGWMEETLERRSHPTAMWTDAKSAVVLGVNYGPDIDPLTQLEHRDRAAISVYAQGDDYHDVVKKRLKQLAGWMHRRWGNDVKVFVDTAPLMEKPLAQRAGLGWQGKHTNLVSRQFGSWLFLGSVLTTLDLPPDEAEFDRCGSCRACLDICPTGAFPAPHRLDARRCISYLTIELSGPIPDEFRPMLGNRIYGCDDCLAACPWNKFASLSAEAKFHARETLKTPPLAELAVLDDPSFRALFSKSPIKRIGRDRFVRNVLYAIGNSGDAALMTVVEPLRSDPDETVRDAADWAAARLASAQVS

SEQ ID NO: 75575 - protein, 395 aa, unidentified
  source 1..395: note = Caulobacter rhizosphaerae
  REGION 1..395: note = tr|A0A561NAH1|A0A561NAH1_9CAUL Epoxyqueuosine reductase OS=Caulobacter rhizosphaerae OX=2010972 GN=queG; PE = 3 SV=1
MTISTSDPPNQALRDEIRAEALRLGFDACGFASASDAWPNGGWLRDFVAEGFHGAMGWMEETLDRRSHPTAMWTDAKTAVVLGVNYGPEHDPLLALQDPSRPAISVYAQGDDYHEVIKKRLKALARWMHGRFGGEVKVFVDTAPLMEKPLAQRAGLGWQGKHTNLVSRQFGSWLFLGSVLTTLDLPADPPERDHCGSCQACLDICPTNAFPGPYRLDARRCISYLTIELSGPIPVEFREALSNRIYGCDDCLAACPWNKFASLSSEMAFHARETLKGPSLADLAGLDDPAFRALFSKSPVKRIGRDRFVRNVLYAIGNSGDVGLMAAVEPLLADPSPVVRGAAAWAAGRLLDATAFARLAGTVAEEDPAVRAEWENGSTRGSPGTPSAGSVASPR

SEQ ID NO: 75576 - protein, 372 aa, Caulobacter segnis
  REGION 1..372: note = tr|A0A2W5WNK4|A0A2W5WNK4_9CAUL Epoxyqueuosine reductase OS=Caulobacter segnis OX=88688 GN=queG PE=3 SV=1
MTTSTSELTPQAIKDEIRAEALALGFSTCGFADASAAWPNGQWLREFVEADRHGAMGWMEETLDRRSHPTAMWTEAKSAVVLGVNYGPDIDPLEQLARTDRAAISVYAQGDDYHDVIKKRLKVLAGWMHRRFGQDVKVFVDTAPLMEKPLAQRAGLGWQGKHTNLVSRDFGSWLFLGSVLTTLDLPPDTPETDHCGRCSACLDICPTKAFPAPRQLDARRCISYLTIELAGPIPVEFRPALGNRIYGCDDCLAVCPWNKFASLSSEAKLLAREALRQPSLAELALLDDAQFRALFSKNPIKRIGRDRFIRNVLYAIGNSGDAELMAIVEPLLSDPAPIVRGAAVWAARRLLGDAAATFRRREDDEAVLAEWL

SEQ ID NO: 75577 - protein, 382 aa, Caulobacter segnis
  REGION 1..382: note = tr|D5VPW4|D5VPW4_CAUST Epoxyqueuosine reductase; OS = Caulobacter segnis (strain ATCC 21756 / DSM 7131 / JCM 7823 / NBRC 15250 / LMG 17158 / TK0059) OX=509190 GN=queG P E=3 SV=1
MTTSTSELSPDAIKDEIRAEALALGFSTCGFADAAAAWPNGEWLREFVEADRHGAMGWMEETLERRSHPTAMWTEAKSAVVLGVNYGPDIDPLEQLAQTDRAAISVYAQGDDYHDVIKKRLKVLAGWMHRRFGQDVKVFVDTAPLMEKPLAQRAGLGWQGKHTNLVSREFGSWLFLGSVLTTLNLPPDPPETDHCGRCSACLDICPTNAFPAPRQLDARRCISYLTIELSGPIPAEFRPALGNRIYGCDDCLAVCPWNKFASLSSEAKLQAREALRQPSLAELARLDDAEFRALFSKNPIKRIGRDRFVRNVLYAIGNSGDTSLVAVVEPLLTDPAPVVRGAAVWAARRLLGDAAAALRNAEVDPEVLAEWAILPLAGEVSP

SEQ ID NO: 75578 - protein, 374 aa, Caulobacter sp.
  REGION 1..374: note = tr|B0T5B8|B0T5B8_CAUSK Epoxyqueuosine reductase; OS = Caulobacter sp. (strain K31) OX=366602 GN=queG PE=3 SV=1
MFSDSCHPNEALRDEIRAEALRLGFDACGFASASDTWPNGGWLREFVAEGFHGAMGWMEETLDRRAHPTAMWRDAATAVVLGVNYGPEHDPLIALEDPSRAAISVYAQGDDYHEVIKKRLKALARWMHGRFGGEVKVFVDTAPLMEKPLAQRAGLGWQGKHTNLVSRPFGSWLFLGSVLTTLDLPADPPERDHCGSCSACLDVCPTKAFPAPYRLDARRCISYLTIELSGPIPVEFRAALGNRIYGCDDCLAVCPWNKFAQLSSEAAFHARETLKGPSLAELAALDDPSFRALFSKSPVKRIGRDRFVRNVLYAIGNGGDAALMAVIEPLLADPSPMVRGAAVWAAGRLAPERLPGLRAARVEEDPAVLAEWGG

SEQ ID NO: 75579 - protein, 395 aa, Caulobacter sp.
  REGION 1..395: note = tr|A0A2G5RGK7|A0A2G5RGK7_9CAUL Epoxyqueuosine reductase OS=Caulobacter sp. X OX=2048901 GN=queG PE=3 SV=1
MTTSTSELTPLESLLAIKDEIRAEALALGFSTCGFADAAAAWPNGEWLREFVEADRHGAMGWMEETLDRRSHPTAMWTEAKSAVVLGVNYGPDIDPLEQLARTDRAAISVYAQGDDYHDVIKKRLKVLAGWMHRRFGRDVKVFVDTAPLMEKPLAQRAGLGWQGKHTNLVSRDFGSWLFLGSVLTTLDLPPDAPETDHCGRCSACLDVCPTNAFPAPRQLDARRCISYLTIELAGPIPAEFRPALGNRIYGCDDCLAVCPWNKFASLSNEAKLQAREALKQPSLADLARLDDAEFRTLFSKNPIKRIGRDRFVRNVLYAIGNSGDASLMAVVEPLLADPAPVVRGAAVWAARRLLGDAAAALKQDEDDAEVLAEWEILPPAGEVAPQATEGEETG

SEQ ID NO: 75580 - protein, 372 aa, Caulobacter vibrioides
  REGION 1..372: note = tr|A0A258DDJ7|A0A258DDJ7_CAUVI Epoxyqueuosine reductase OS=Caulobacter vibrioides OX=155892 GN=queG PE=3; SV = 1
MTTSISELTPDRIKDEIRAEALKLGFSACGFASATDAWPNGEWLREFVQAERHGAMGWMEETLERRSHPTAMWTDAKSAVVLGVNYGPDIDPLEQLADPARAAISVYAQGDDYHDVIKKRLKVLAGWMHRRFGEEVKVFVDTAPLLEKPLAQRAGLGWQGKHTNLVSRQFGSWLFLGSVLTTLDLPADAAEVDHCGSCRACLDVCPTNAFPAPRQLDARRCISYLTIELAGPIPSEFRSALGNRIYGCDDCLAVCPWNKFASLSNEAKLVAREALRQPSLAELAALDDAAFRALFAKNPIKRIGRDRFVRNVLYAIGNSGDVGLVAVVEPLLADPAPVVRGAAVWAARRLLGDAAAALTGREDDESVLAEWD

SEQ ID NO: 75581 - protein, 372 aa, Caulobacter vibrioides
  REGION 1..372: note = tr|R0EBA4|R0EBA4_CAUVI Epoxyqueuosine reductase; OS = Caulobacter vibrioides OR37 OX=1292034 GN=queG PE=3 SV=1
MTTSTSERSQAAIKDEIRAEALALGFSACGFADAAAAWPNGEWLREFVEADRHGAMGWMEETLERRAHPTAMWTEAKSAVVLGVNYGPDIDPLEQLVRADRAAISVYAQGDDYHDVIKKRLKVLAGWMHRRFGQEVKVFVDTAPLMEKPLAQRAGLGWQGKHTNLVSRPFGSWLFLGSVLTTLDLPPDPAEVDHCGRCNACLDICPTQAFPAPRQLDARRCISYLTIELSGPIPAEFRSALGNRIYGCDDCLAVCPWNKFASLSSEAKLRARSALRQPALAELAGLDDAAFRALFSKNPIKRIGRDRFVRNVLYAIGNSGEAALMAVVEPLLSDPAPVVRGAAVWAARRLIGDRALSLKGAEDHPEVLAEWN

SEQ ID NO: 75582 - protein, 358 aa, unidentified
  source 1..358: note = Caulobacter zeae
  REGION 1..358: note = tr|A0A2N5CYI7|A0A2N5CYI7_9CAUL Epoxyqueuosine reductase OS=Caulobacter zeae OX=2055137 GN=queG PE=3 SV=1
MTTSTSDLTPQDRLLAIRDEIRREALALGFDACGFASAADAWPNGEWLRQFVAEGLHGAMGWMEETLERRSHPTAMWTDARSAVVLGVNYGPDIDPLTQLEQRDRAAISVYAQGDDYHDVVKKRLKQLAGWMHRRWGNEVKVFVDTAPLMEKPLAQRAGLGWQGKHTNLVSRQFGSWLFLGSVLTTLDLPADTAEHDRCGSCRACLDICPTNAFPAPHRLDARRCISYLTIELAGPIPDEFRALLGNRIYGCDDCLAACPWNKFASLSAEAKFHARETLKTPSLAELAGLDDPSFRALFSKSPIKRIGRDRFVRNVLYAIGNSGDRGLMAVVEPLRGDPDDTVRDAADWAASRLAQAS

SEQ ID NO: 75583 - protein, 363 aa, unidentified
  source 1..363: note = Caulobacteraceae bacterium
  REGION 1..363: note = tr|A0A4Q3S855|A0A4Q3S855_9CAUL tRNA epoxyqueuosine(34) reductase QueG OS=Caulobacteraceae bacterium OX=1978230 GN=queG PE=4 SV=1
MTPDDIRKRARALGFDACGFASAADAWSAGARLAQFVEDGRHGQMDWMAETLQRRAHPTGMWPQARSAVVVGMTYGPERNPLEGLARRSNGLVSAYARGDDYHGLIKGRLKNLGGWIKAKFGGEVKVFTDTAPLMEKPLAERAGLGWQGKHTNLVSRELGSWLFLGSVLTSVELPADAAGEDACGSCRACLDICPTNAFPAPYQLDARRCISYLTIEHEGPVDPALRPALGNRIYGCDDCLAVCPWNKFAVEAREMGLRARPELEEPSLAELARLDDAGFRRLFRKSAVTRIGRDRLVRNVLYAAGNSGDAALVPDVEALLGDADPAVRGAAVWALRRLAPERAAALRGSVAERDPDVLAEWG

SEQ ID NO: 75584 - protein, 378 aa, unidentified
  source 1..378: note = Caulobacteraceae bacterium
  REGION 1..378: note = tr|A0A1B1AG65|A0A1B1AG65_9CAUL Epoxyqueuosine reductase OS=Caulobacteraceae bacterium OTSz_A_272; OX = 1759059 GN=ATE48_06240 PE=4 SV=1
MTTSDNPRSIRGKIQSQAQSLGFDAIGVASVREPWPAGARLHEFLADGRHGDMDWLGQRREGVNPREHPQALWADARCAILVGQSYASADDAIALLQLKQKGLVSAYAARRDYHDVVKGKLKQLAQWLARDTGADVKVFVDTAPLMEKPLAQRAGLGWQGKHTNLVSREHGSWLFLGAILSAADIEADAPEEDHCGSCRACLDVCPTNAFPAPYQLDARRCLAYLTIEHKGQIPLEFRQAVANRIFGCDDCLAVCPWNKFAQTSREARLEMRDDLRIAPLSELAALDDAAFRTRFAGTPVKRTGRDRFVRNVVCAIGNSDDVSLAPVAERLIGDSSPLVRGMAVWAARRLLDAEAFERLKSVQAPREGDRSVAKEWDA

SEQ ID NO: 75585 - protein, 377 aa, unidentified
  source 1..377: note = Caulobacterales bacterium
  REGION 1..377: note = tr|A0A258CGA4|A0A258CGA4_9PROT Epoxyqueuosine reductase OS=Caulobacterales bacterium 32-67-6 OX=1970502; GN = queG PE=3 SV=1
MTISISETPEDLIRRQALALGFDDCRLARADQPWIAGARLAEFVAEGRHGEMAWLETTLERRSHPQAMWEGARSAVMLGVNYGPDHDPRDILAHPDRGAISVYAQGSDYHDLIKKRLKQLASWMAQTFGSEVKVFVDTAPLLEKPLAQASGLGWQGKHTNLVSRQFGSWLFIGSVLTSLELEPDPPGEDACGSCRACQDVCPTAAFPAPYQLDARRCISYLTIELSGPIPAEFRPALGNRIYGCDDCLAVCPWNKFAQDAREQQLQAREVLKAPRLEDLAALDDAAFRALFTKSAVKRLGRDRFVRNVLYAIGNSGDAGLVEVARERLADEAPVVRGAAVWALSQLAAPDVFAAERALALPAEMDEGVGAEWGQTPA

SEQ ID NO: 75586 - protein, 371 aa, unidentified
  source 1..371: note = Caulobacterales bacterium
  REGION 1..371: note = tr|A0A1F8INX3|A0A1F8INX3_9PROT Epoxyqueuosine reductase OS=Caulobacterales bacterium RIFOXYB1_FULL_67_16; OX = 1797588 GN=queG PE=3 SV=1
MSDRLKTFIRQRAAELGFDVCRFASAADAWPAGERLRRFVDEGRHGDMEWMETTLDRRRHPTAMWDEAKTAIVLGMNYGPDDNPLDQLADRSAAYISVYARGDDYHEVIKGRLKQLAGQIAARNGADIKVFVDTAPLMEKPLAQRAGLGWQGKHTNLLSRTHGNWLFLGTILTAAEIEPDAAETEHCGRCTACLDACPTNAFPAPFQLDARRCLSYLTIEFAGPWPVEFRTLTGSRIYGCDDCLAVCPWNKFAQEAREIRLQPRPAFNSPRLADLLALDDAAFRALFTKSPVKRIGRDRFLRNVLYAVGNSDDPALIAPTQALLSDPAPLVRGAAVWALSRLMAPAEFTALAQATAETDVQVLREWQGLRA

SEQ ID NO: 75587 - protein, 311 aa, unidentified
  source 1..311: note = Cecembia calidifontis
  REGION 1..311: note = tr|A0A4Q7P6P0|A0A4Q7P6P0_9BACT Epoxyqueuosine reductase OS=Cecembia calidifontis OX=1187080 GN=queG PE=3; SV = 1
MRNTTDLYAQIIKTQAKSLGFDFCGIAKAEFLEEEAPKLEAWLHENYHGKMAYMANHFDKRLDPTKLVDGAKTVVSLIYNYFPEKKLPEKEEDFKIAKYAYGQDYHHVIKDKLKRLLEILRDEIGEFGGRAFVDSAPVMERQWAQKTGIGWLGKNSLLLNRQMGSFFFLAELIIDLEVTADPPMVKDYCGTCTRCIDACPTDAIVQPGVVDGSKCISYFTIELKEEIPQDVKGKFENWVFGCDICQDVCPWNRFSKPHQEPKFDPHPDMMNFNRKDWEEITEATFNKVFSKSAVKRAKFSGFLRNLRFLQQ

SEQ ID NO: 75588 - protein, 313 aa, unidentified
  source 1..313: note = Cecembia lonarensis
  REGION 1..313: note = tr|K1LJ22|K1LJ22_9BACT Epoxyqueuosine reductase; OS = Cecembia lonarensis LW9 OX=1225176 GN=queG PE=3 SV=1
MNTEKADKYANIIKTQAKSLGFDFCGIAKADFLEEEAPKLEAWLNQNYHGKMGYLANHFDKRLDPRLLVDGAKTVVSLIYNHFPVKEIPSGPEDLKLAKYAYGEDYHFVIKDKLKTFLQHLREEIGEIDGRAFVDSAPVMERQWAQKAGLGWQGKNSLLLNRTMGSFFFLAELIIDLEVSPDPPMVKDYCGTCTRCIDACPTDAIVQAGVVDGSKCISYFTIELKEEIPQEVKGKFENWVFGCDICQDVCPWNRFSKPHQEQRFLPHPDLAAFTRKDWEEITLETFQKVFKNSPLKRAKFDGLKRNIDFLVKK

SEQ ID NO: 75589 - protein, 311 aa, unidentified
  source 1..311: note = Cecembia rubra
  REGION 1..311: note = tr|A0A2P8E4C7|A0A2P8E4C7_9BACT Epoxyqueuosine reductase OS=Cecembia rubra OX=1485585 GN=queG PE=3 SV=1
MNNKADQFAQIIKTQAKSLGFDFCGIAKAEFLEEEAPKLEAWLNKNYQGKMSYMANHFDKRLDPTKLVDGAKTVISLIYNYFPEKRLPEDSDDFKIAKYAYGQDYHYVIKEKLKILLENLKSEIGDFGGRAFVDSAPVMERQWAQRSGLGWLGKNSLLLNRQMGSFFFLAELIIDLEVTSDPPMVKDYCGTCTRCLDACPTDAIVQPGLVDGSRCISYFTIELKEEIPQEVKGKFENWVFGCDICQDVCPWNRFSQAHKEPKFDPHPELRDFNQKDWNEITEETFNKVFSKSAIKRTKFGGLLRNLRFIQQ

SEQ ID NO: 75590 - protein, 379 aa, Cedecea davisae
  REGION 1..379: note = tr|S3K624|S3K624_9ENTR Epoxyqueuosine reductase; OS = Cedecea davisae DSM 4568 OX=566551 GN=queG PE=3 SV=1
MSQPLDYNQLAQNIKLWGEELGFQQVGITDTDLSASEPELQAWLDKQYHGEMDWMARHGMMRARPHELVPGTLRVISVRMNYLPANAAFASTLKNPQLGYVSRYALGRDYHKVLRNRLKKLGEMIQTHCSTLNFRPFVDSAPLLERPLAEKAGLGWTGKHSLILNREAGSFFFLGELLVDIPLPIDKPVEEACGRCVACMTICPTGAIVEPYTVDARRCISYLTIELEGAIPEEFRSLIGNRIYGCDDCQLICPWNRYSQLSDEDDFSPRRALHAPQLTELFAWSEQHFLRVTEGSAIRRIGHLRWSRNIAVALGNAPWDEANLAALEQRKGEHPLLDEHIEWAIAQQIARRSEQAVEVQLPKKQRLVRVIEKGLVRDA

SEQ ID NO: 75591 - protein, 379 aa, Cedecea lapagei
  REGION 1..379: note = tr|A0A2N0CNJ9|A0A2N0CNJ9_9ENTR Epoxyqueuosine reductase OS=Cedecea lapagei OX=158823 GN=queG PE=3 SV=1
MSQPLDLNQLAQNIKQWGAELGFQKVGITDTDLSASEPKLQAWLDKQYHGEMEWMARHGMMRARPHELLPGTLRVISVRMNYLPANAAFARTLKDPSLGYVSRYALGRDYHKLLRNRLKKLGETIQQHCGSLNFRPFVDSAPILERPIAEKAGLGWTGKHSLILSRDAGSFFFLGELLIDLPLPVDSPVEEGCGRCVACMTICPTGAIVEPYTVDARRCISYLTIELEGAIPEEFRPLIGNRIYGCDDCQLICPWNRYSQLTDEDDFSPRKALHAPKLTELFAWDESYFLRITEGSAIRRIGHLRWLRNIAVALGNAPWDEANIQALEKRRGEHPLLDEHIEWAIAQQIEKRNACVVEVQLPQKKRLVRVIEKGLVRDA

SEQ ID NO: 75592 - protein, 379 aa, Cedecea lapagei
  REGION 1..379: note = tr|A0A3S4IGV7|A0A3S4IGV7_9ENTR Epoxyqueuosine reductase OS=Cedecea lapagei OX=158823 GN=queG PE=3 SV=1
MSQPLDYNQLAQNIKQWGKDLGFQQVGITDTDLTASEPKLQEWLDKQYHGEMDWMARHGMMRARPHELQPGTLRVISVRMNYLPANAAFASTLKNPQLGYVSRYALGRDYHKVLRNRLKKLGEMIQSHCSTLNFRPFVDSAPLLERPLAEKAGLGWTGKHSLILNREAGSFFFLGELLVDIPLPIDSPVEEGCGRCVACMTICPTQAIVEPYTVDARRCISYLTIELEGAIPEAFRPLIGNRIYGCDDCQLICPWNRYSQLSEEDDFSPRKALHSPPLTDLFAWSEQHFLRVTEGSAIRRIGHLRWLRNIAVALGNAPWDEANLAALEMRKGEHPLLDEHIEWAIAQQLARRSEQAVEVQLPQKQRLVRVIEKGLPRDA

SEQ ID NO: 75593 - protein, 320 aa, Cedecea neteri
  REGION 1..320: note = tr|A0A2X2T0H9|A0A2X2T0H9_9ENTR Epoxyqueuosine reductase OS=Cedecea neteri OX=158822 GN=queG PE=4 SV=1
MMRARPHELVPGTLRVISVRMNYLPTNAAFASTLKNPQLGYVSRYALGRDYHKVLRNRLKKLGEMIQAHCSTLNFRPFVDSAPLLERPLAEKAGLGWTGKHSLILNREAGSFFFLGELLVDIPLPIDSPVEEGCGRCVACMTICPTNAIVEPYTVDARRCISYLTIELEGAIPEEFRPLIGNRIYGCDDCQLICPWNRYSQLSEEDDFSPRKALHSPPLTELFAWSEQYFLRVTEGSAIRRIGHLRWLRNIAVALGNAPWDEANLTVLEQRKGEHPLLDEHIEWAIAQQLARRSEQAVEVQLPKKQRLVRVIEKGLPRDA

SEQ ID NO: 75594 - protein, 379 aa, Cedecea neteri
  REGION 1..379: note = tr|A0A089Q3D1|A0A089Q3D1_9ENTR Epoxyqueuosine reductase OS=Cedecea neteri OX=158822 GN=queG PE=3 SV=1
MSQPLDYNQLAQNIKQWGKDLGFQQVGITDTDLTASEPQLQDWLDKQYHGEMDWMARHGMMRARPHELMPGTLRVISVRMNYLPTNAAFASTLKNPQLGYVSRYALGRDYHKVLRNRLKKLGEMIQSHCSTLNFRPFVDSAPLLERPLAEKAGLGWTGKHSLILNREAGSFFFLGELLVDIPLPIDAPVEEGCGRCVACMTICPTNAIVEPYTVDARRCISYLTIELEGAIPEEFRPLIGNRIYGCDDCQLICPWNRYSQLSEEDDFSPRKALHSPPLTELFAWTEQHFLRVTEGSAIRRIGHLRWLRNIAVALGNAPWNEANLTALEQRKGEHPLLDEHIEWAIAQQLARRSEQAVEVQLPKKQRLVRVIEKGLPRDA

SEQ ID NO: 75595 - protein, 379 aa, Cedecea sp.
  REGION 1..379: note = tr|A0A1X7L9T1|A0A1X7L9T1_9ENTR Epoxyqueuosine reductase OS=Cedecea sp. NFIX57 OX=1566286 GN=queG PE=3; SV = 1
MSQPLDYNQLAQNIKQWGKDLGFQQVGITDTDLTASEPQLQEWLDKQYHGEMDWMARHGMMRARPHELVPGTLRVISVRMNYLPTNAAFASTLKNPQLGYVSRYALGRDYHKVLRNRLKKLGEMIQSHCSTLNFRPFVDSAPLLERPLAEKAGLGWTGKHSLILNREAGSFFFLGELLVDIPLPIDSPVEEGCGRCVACMTICPTNAIVEPYTVDARRCISYLTIELEGAIPEEFRPLIGNRIYGCDDCQLICPWNRYSQLSEEDDFSPRKALHSPPLTELFAWSEQHFLRVTEGSAIRRIGHLRWLRNIAVALGNAPWNEANLAALEQRQGEHPLLDEHIEWAIAQQLARRSEQAVEVQLPKKQRLVRVIEKGLPRDA

SEQ ID NO: 75596 - protein, 346 aa, Celeribacter baekdonensis
  REGION 1..346: note = tr|A0A1G7L4P3|A0A1G7L4P3_9RHOB Epoxyqueuosine reductase OS=Celeribacter baekdonensis OX=875171 GN=queG; PE = 3 SV=1
MAGLDKETVRARALEEGFSKVGFARPDLPDAMDRLKAFVDAGHHGQMGWMEERMAWRGDPTALWPEAKSVIMLAEVYTPDDDPMEAVKRPESGAISVYARNRDYHDMVKKRLKRLGRWLIEQAGEGTEIKVFVDTAPVMEKPLAAKAGLGWQGKHTNLLARDLGSWFFLGAIFTTHDFDPDPAEKDHCGSCRACLDACPTQAFPAPFQLDARRCISYLTIEHHGPVDLELREKMGNRIYGCDDCLAACPWNKFAATAKELRYAARDDLIAPPLRDLALLDDAAFRAKFSGSPIKRIGRDRFVRNVLYAIGNSGAADLEPIARALCEDADATVRDAAQWAVARLGSA

SEQ ID NO: 75597 - protein, 346 aa, Celeribacter baekdonensis
  REGION 1..346: note = tr|K2JH10|K2JH10_9RHOB Epoxyqueuosine reductase; OS = Celeribacter baekdonensis B30 OX=1208323 GN=queG PE=3; SV = 1
MAGLDKETVRARALDEGFSKVGFARPDLPDAMDRLKAFVDAGHHGQMGWMEERMAWRGDPTALWPEAKSVIMLAEVYTPDDDPMVAINRPESGAISVYARNRDYHDMVKKRLKRLGRWLIEQAGEGTEIKVFVDTAPVMEKPLAAKAGLGWQGKHTNLLARDLGSWFFLGAIFTTHNFDPDPAEKDHCGSCRACLDACPTQAFPAPFQLDARRCISYLTIEHHGPVDLELREKMGNRIYGCDDCLAACPWNKFAATAKELRYAARDDLIAPPLRDLALLDDATFRAKFSGSPIKRIGRDRFVRNVLYAIGNSGAADLEPIARLLCEDADATVRDAAQWAVARLGCA

SEQ ID NO: 75598 - protein, 346 aa, unidentified
  source 1..346: note = Celeribacter ethanolicus
  REGION 1..346: note = tr|A0A291GDP6|A0A291GDP6_9RHOB Epoxyqueuosine reductase OS=Celeribacter ethanolicus OX=1758178 GN=queG; PE = 3 SV=1
MAGLDKEIVRARALEEGFSKVSFGRPEIPGAMEHLQSFVAEGRHGQMGWMEDRMHWRGDPAALWPDARSVIMLAEAYTPDDDPMEAINRPESGTISVYARNRDYHDIVKKRLKRLGRWLIEQAGEGTEIKVFVDTAPVMEKPLAAQAGLGWQGKHTNLLSRDLGNWFFIGAIFTTHDFDPDPAEKPHCGSCRACLDACPTGAFPAPYQIDARRCISYLTIEHHGPVEEELRARMGNRIYGCDDCLAACPWNKFAVEAKEVRFAARADLISPPLAELALLEDAAFREKFSGSPIKRIGRDRFVRNVLYAIGNSGSPGLRDVAAGLCEDADPTVRDAARWAVARLTEE

SEQ ID NO: 75599 - protein, 346 aa, unidentified
  source 1..346: note = Celeribacter halophilus
  REGION 1..346: note = tr|A0A1I3WMJ8|A0A1I3WMJ8_9RHOB Epoxyqueuosine reductase OS=Celeribacter halophilus OX=576117 GN=queG; PE = 3 SV=1
MAGLDKETVRARALEEGFSKASFGRPDIPEAMERLKAFVAEGRHGQMGWMAERMHWRGDPSALWPEAKSVIMLAEAYTPEEDPMEAVNRPESGAISVYARNRDYHDIVKKRLKRLGRWLIEQAGTETEIKVFVDTAPVMEKPLAAKAGLGWQGKHTNLLSRDLGNWFFLGAIFTTVDFDPDPPENERCGSCRACLDACPTEAFPAPYQIDARRCVSYLTIEHHGPVDEELRGKLGNRIYGCDDCLAVCPWNKFAVAAKEIRFSARDDLISPPLEALAQLDDAAFRAKFSGSPIKRIGRDRFVRNVLYAIGNSGSPELRAVAEKLCEDADATVRDAAQWAVARLTNS

SEQ ID NO: 75600 - protein, 351 aa, unidentified
  source 1..351: note = Celeribacter indicus
  REGION 1..351: note = tr|A0A0B5DN12|A0A0B5DN12_9RHOB Epoxyqueuosine reductase OS=Celeribacter indicus OX=1208324 GN=queG PE=3; SV = 1
MKGAAVTLPDKETVRAKALEEGFSKVGFGRPDLPGAMERLRAFVAEGRHGQMGWMEERMGWRGDPSALWPEARSVIMLAEVYTPEEDPMAALERPESGAISVYARNRDYHDMVKKRLKRVGRWLLEQAGEGEEIKVFVDTAPVMEKPLAARAGLGWQGKHTNLLSRELGSWFFLGAIFTTLDFDPDPAENEHCGSCRACLDACPTAAFPAPFQLDARRCISYLTIEHRGPVDEDLRALMGNRIYGCDDCLAACPWNKFAQVAKETRYAARADLLDPPLAELAGLDDAAFRAKFSGSPIKRIGRDRFVRNVLYAIGNSGSPALAEVARGLCEDADPVVRDAARWAVARLSDS

SEQ ID NO: 75601 - protein, 373 aa, unidentified
  source 1..373: note = Celeribacter manganoxidans
  REGION 1..373: note = tr|A0A291LVG5|A0A291LVG5_9RHOB Epoxyqueuosine reductase OS=Celeribacter manganoxidans OX=1411902 GN=queG; PE = 3 SV=1
MPRSSRDRPSATSSPTKSPASRRPGTTPISTSDLKDAIAAQAQAEGFSAMGVCRPDALPHLPERLRHFLDEGRHGQMAWMAERSHWRENPAALWPEARSVIMLAESYTPDEDPLAVLDHPDAAAISVYARGKDYHDLVKKRLKRLARWLIAEAGGEVKVFVDTAPVPEKPLAEAAGLGWQGKHTNLVSRDLGNWVFLGAVFTTLELPLDEPGRDSCGSCRRCLDACPTDAFPAPYQLDARRCISYLTIEHKGPVDEALRPALGNRIYGCDDCLAVCPWNKFAVEASDIRYAARAGTIAPPLAELAVLDDAGFRERFSGSPIKRIGRDRFVRNVLYAVGNSGLPQLRPVAQSLTDDPDPAVADAARWAVDRLPG

SEQ ID NO: 75602 - protein, 338 aa, unidentified
  source 1..338: note = Celeribacter marinus
  REGION 1..338: note = tr|A0A0N9ZZJ9|A0A0N9ZZJ9_9RHOB Iron-sulfur cluster-binding protein OS=Celeribacter marinus OX=1397108; GN = IMCC12053_1845 PE=4 SV=1
MRAKALEEGFSKVGFARPDLPEAMERLRAFIAAGHHGQMGWMEERMAWRGDPTALWPEAKSVIMLAEAYTPDDDPMEAVNRPESGAISVYARNRDYHDIVKKRLKRVGRWLIEQAGEDTEIKVFVDTAPVMEKPLAAKAGLGWQGKHTNLLGRDIGSWFFLGAIFTTVDFDPDPAEIERCGSCRACLDACPTDAFPAPYQLDARRCISYLTIEHHGPVDEELRARMGNRIYGCDDCLAACPWNKFAVDAKELRYAARDDLRAPPLAELVQLDDAAFREKFSGSPIKRVGRDRFVRNVLYAIGNSGDPQFVPHATALTRDPDATVADAARWAVGRLAKT

SEQ ID NO: 75603 - protein, 338 aa, Celeribacter neptunius
  REGION 1..338: note = tr|A0A1I3S950|A0A1I3S950_9RHOB Epoxyqueuosine reductase OS=Celeribacter neptunius OX=588602; GN = SAMN04487991_2382 PE=4 SV=1
MRARALEEGFSKAAFGRPILPGAMARLESFVEMDRHGQMGWMAERMNWRGDPAALWPEAKSVIMLAESYTPDEDPMAVISRPESGAISVYARNRDYHDIVKKRLKRLGRWLIEQAGEGTEIKVFVDTAPVMEKPLAMQAGLGWQGKHTNLLSRDLGSWFFLGAIFTTHEFDPDPAENEHCGSCRACLDACPTDAFPAPFQIDARRCISYLTIEHHGPVEPELRSKLGNRIYGCDDCLAACPWNKFAVAAQELRYAARDDLRDPSLRELAALDDAAFRAKFSGSPIKRIGRDRFVRNVLYAIGNSGSSDLRDVAVSLCEDADAVVRDAAEWAVARLSRE

SEQ ID NO: 75604 - protein, 346 aa, unidentified
  source 1..346: note = Celeribacter persicus
  REGION 1..346: note = tr|A0A2T5HEZ1|A0A2T5HEZ1_9RHOB Epoxyqueuosine reductase OS=Celeribacter persicus OX=1651082 GN=queG PE=3; SV = 1
MAGLHKETVRARALEEGFSKASFGRPEIPGAMEHLQNFVAEGRHGQMGWMAERMNWRGDPAALWPEAKSVIMLAEAYTPDDDPMEAINRPESGAISVYARNRDYHDIVKKRLKRLGRWLIEQAGEGTEIKVFVDTAPVMEKPLAAQSGLGWQGKHTNLLSRDLGNWFFLGAIFTTHDFDPDPAEKEHCGSCRACLDACPTDAFPAPFQLDARRCISYLTIEHHGPVDEELRARMGNRIYGCDDCLAACPWNKFAVTAKEMRFAAREDLISPPLDELALLDDAGFREKFSGSPIKRIGRDRFVRNVLYAIGNSGAPALRDVAAALCEDADPVVRDAARWAVARLTGE

SEQ ID NO: 75605 - protein, 377 aa, Celerinatantimonas diazotrophica
  REGION 1..377: note = tr|A0A4R1K1S3|A0A4R1K1S3_9GAMM Epoxyqueuosine reductase OS=Celerinatantimonas diazotrophica OX=412034; GN = queG PE=3 SV=1
MAENSKIDFNQLALDIKQWGKQLGFAQVGITDTDVSEHIQSYRDWLSRGYHGQMSFMQRNQQLREDPAQLHPGTLRIISVRMNYLINDAGFASTLKDPNRAYISRYALGRDYHKVLRKRLKKLAEKIKTVCEQLDYRPFVDSAPIMERPIAEKSGLGWTGKHSLLIHPDEGSWFFLGELLINLPLPTDSAIEPQCGSCVACMTLCPTGAITEPYQVDARRCISYLTIENPGPIAEELRPLMGNRIYGCDDCQLVCPYNHESQLGEENDFLPRHELDKTTLLSLFAWDETTFLSKTEGSPIRRIGHERWQRNIAVALGNAPASIAIIQALEDARPQASELVKEHIDWALNQHHKQLSTVTRQTKRLIRIVEKGLTRDA

SEQ ID NO: 75606 - protein, 306 aa, Cellulophaga algicola
  REGION 1..306: note = sp|E6X4P3|QUEG_CELAD Epoxyqueuosine reductase; OS = Cellulophaga algicola (strain DSM 14237 / IC166 / ACAM 630) OX=688270 GN=queG PE=3 SV=1
MNTKEKHSDLIKAEAIRLGFLSCGISKANFLEEEAPRLEKWLKNNMNGEMQYMENHFDKRLDPRLLVDDAKSVISLTLNYYPEEQQADGTYKISKYAYGHDYHHVIKGKLKQLQEFISEEIGEVGGRAFVDSAPVLDKAWAAKSGLGWIGKHSNLLTQKTGSFYFIAELIVDLDLTYDHPVTDHCGTCTACIDACPTQAIVQPYVVDGSKCISYFTIELKNEIPQEFQGKFDDWAFGCDVCQDVCPWNRFSKPHSEPLFNPHPDLLSLTKKDWEEITDDVFKKVFQKSAVKRTKYAGLKRNIDFLK

SEQ ID NO: 75607 - protein, 306 aa, Cellulophaga baltica
  REGION 1..306: note = tr|A0A1G7CZL6|A0A1G7CZL6_9FLAO Epoxyqueuosine reductase OS=Cellulophaga baltica OX=76594 GN=queG PE=3; SV = 1
MSIKEKHSDLIKAEALRLGFLSCGISKADFLAEEAPRLEKWLRNNANGEMQYMENHFDKRLDPRLLVDDAKSVISLTLNYYPEEQQTSDTFKISKYAYGQDYHHVIKGKLKQLQEFISEEIGEVGGRAFVDSAPVLDKAWAAKSGLGWIGKHSNLLTQKTGSFYFIAELIVDLDLTYDHPVTDHCGTCTACIDACPTQAIVQPYVVDGSKCISYFTIELKNEIPQEFQGKFDDWAFGCDVCQDVCPWNRFSKPHQEPLFNPHPDLLSLTKKDWEEITEDVFRKVFQKSAVKRTKFSGLKRNIDFLK

SEQ ID NO: 75608 - protein, 306 aa, Cellulophaga baltica
  REGION 1..306: note = tr|A0A0A7K583|A0A0A7K583_9FLAO Epoxyqueuosine reductase OS=Cellulophaga baltica 18 OX=1348584 GN=queG; PE = 3 SV=1
MSIKEKHSDLIKAEALRLGFLSCGISKADFLAEEAPRLEKWLKNNGNGEMQYMENHFDKRLDPRLLVDDAKSVISLTLNYYPEEQQTSDTFKISKYAYGQDYHHVIKGKLKQLQEFISEEIGEVGGRAFVDSAPVLDKAWAAKSGLGWIGKHSNLLTQKTGSFYFIAELIVDLDLTYDHPVTDHCGTCTACIDACPTQAIVQPYVVDGSKCISYFTIELKNEIPQEFQGKFDDWAFGCDVCQDVCPWNRFSKPHQEPLFNPHPDLLSLTKKDWEEITEDVFRKVFQKSAVKRTKFSGLKRNIDFLK

SEQ ID NO: 75609 - protein, 309 aa, Cellulophaga fucicola
  REGION 1..309: note = tr|A0A1K1PDW4|A0A1K1PDW4_9FLAO Epoxyqueuosine reductase OS=Cellulophaga fucicola OX=76595 GN=queG PE=3; SV = 1
MLPIVNKEKVTALIKEEAKRLGFISCGVSKAEFLEEEAPRLENWLNKNMNGEMSYMENHFDKRLDPTKLVEGSKSVISLLLNYYPEETQGDDVLKISKYAYGQDYHHIIKSKLRELQEFMTDTIGEVGGRAFVDSAPVLDKAWAAKSGLGWIGKNSNLITQRVGSFYFIAELIVDIDLVYDTAVTDHCGTCTACIDACPTQAIVDPYVVDGSKCISYFTIELKNEIPVEVKDKFDDWVFGCDVCQDVCPWNKFSKPHQEPLFNPHPDLLSMTKKDWEEITEDVFRKVFQKSAVKRTKFSGLQRNIEFLK

SEQ ID NO: 75610 - protein, 310 aa, Cellulophaga lytica
  REGION 1..310: note = tr|F0RCK0|F0RCK0_CELLC Epoxyqueuosine reductase; OS = Cellulophaga lytica (strain ATCC 23178 / DSM 7489 / JCM 8516 / NBRC 14961 / NCIMB 1423 / VKM B-1433 / Cy l20) OX=8 67900 GN=queG PE=3 SV=1
MKLPLVNKEKTTALIKDEAKRLGFISCGVSKAEFLEEEAPRLEKWLTKNMNGQMAYMENHFDKRLDPTKLVEGSKSVISLLLNYYPEDTQNNDALKISKYAYGQDYHHVIKSKLRELQEFITNNIGEVEGRAFVDSAPVLDKAWAAKSGLGWIGKNSNLITQKVGSFYFIAELIVDIELAYDSAVTDHCGTCTACIDACPTQAIVDPYVVDGSKCISYFTIELKNEIPAEVRGKFDDWIFGCDVCQDVCPWNRFSKPHNEPLFNPHPDLLSMTKKDWQEITEDVFRKVFKKSAVKRTKFSGLQRNIDFLD

SEQ ID NO: 75611 - protein, 310 aa, Cellulophaga sp.
  REGION 1..310: note = tr|A0A559N333|A0A559N333_9FLAO Epoxyqueuosine reductase OS=Cellulophaga sp. RHA_52 OX=1250036 GN=queG; PE = 3 SV=1
MKLPLVNKEKTTALIKDEAKRLGFMSCGVSKAEFLKEEAPRLEKWLTKNMNGQMAYMENHFDKRLDPTKLVEGSKSVISLLLNYYPEDTQNNDALKISKYAYGQDYHHVIKSKLRELQEFITNNIGEVEGRAFVDSAPVLDKAWAAKSGLGWIGKNSNLITQKVGSFYFIAELIVDIELAYDSAVTDHCGTCTACIDACPTQAIVDPYVVDGSKCISYFTIELKNEIPAEVRGKFDDWIFGCDVCQDVCPWNRFSKPHNEPLFNPHPDLLSMTKKDWQEITEDVFRKVFKKSAVKRTKFSGLQRNIDFLD

SEQ ID NO: 75612 - protein, 306 aa, Cellulophaga tyrosinoxydans
  REGION 1..306: note = tr|A0A1W1YED1|A0A1W1YED1_9FLAO Epoxyqueuosine reductase OS=Cellulophaga tyrosinoxydans OX=504486 GN=queG; PE = 3 SV=1
MTLKEKNTFLIKNEAKRLGFMSCGISKADFLEKEAPRLERWLNNNMNGEMHYMENHFDKRLDPRLLVPGAKSVISLLLNYYPEEKQIDTTYKISKYAYGQDYHHVIKGKLKMLQEFISQEIGEVDGRAFVDSAPVLDKAWAAKSGLGWIGKHSNLLTQQAGSFYFIAELIVDLDLEYDNPVTDHCGTCTACIDSCPTQAITEPYVVDGSKCISYFTIELKKEIPTEFQGKFDDWAFGCDVCQDVCPWNRFSKSHNEPLFNPHPELLSMTKKDWEEITDEVFKKVFQKSAVKRTKFEGLKRNINFLK

SEQ ID NO: 75613 - protein, 329 aa, Cellulosilyticum lentocellum
  REGION 1..329: note = tr|F2JJA1|F2JJA1_CELLD 4Fe-4S ferredoxin-type domain-containing protein OS=Cellulosilyticum lentocellum (strain ATCC 49066 / DSM 5427 / NCIMB 11756 / RHM5); OX = 642492GN=Clole_2693 PE=4 SV=1
MMLKKRIEDFCKSIGLDTIGFIPCRRFDELEVFYRERQKLGLQNEFEEQNIEKRLNPNLYMKEGKTIISIAFPYYHREIKDEVANGFSIYTKRLDYHRVVKKYLNEISEYIETLGGKALGFVDSNALPERYIAYLAGLGFIGRNNMLITKKYGSYVFLGELMTDLKIECEDQRSQDELIKYAECGACKACLKECPTKSINMSRSNPNICLSYITQKKELSDQEIKLLKGNIFGCDFCQLKCPYNEEVATNVLEEFQTLVHMNEPANVYAGMDNSYFKEKMSPTSCGWRGKNVIRRNAIIHMDHAGLPIEQYKGDSPYINNYIERLTQNK

SEQ ID NO: 75614 - protein, 328 aa, Cellulosilyticum sp.
  REGION 1..328: note = tr|A0A5B9YHZ7|A0A5B9YHZ7_9FIRM tRNA epoxyqueuosine(34) reductase QueG OS=Cellulosilyticum sp. WCF-2 OX=2497860 GN=queG PE=4 SV=1
MLKKKIEDFCKSIGLDTIGFIPCRRFDELEVFYRERQKLGLQNEFEEQNIEKRLNPNLYMEEGKTIISIAFPYYHREIKDEVANGFSIYTKRLDYHRVVKKYLNEISEYIETLGGKALGFVDSNALPERYIAYLAGLGFIGRNNMLITKKYGSYVFLGELMTDLKIECEDQRSQDELIKYAECGACKACLKECPTKSINMSRSNPNICLSYITQKKELSDQEIKLLKGNIFGCDFCQLKCPYNEEVATNVLEEFQTLVHMNEPANVYAGMDNSYFKEKMSPTSCGWRGKNVIRRNAIIHMDHAGLSIEQYKGDSPYINSYIERLTQNK

SEQ ID NO: 75615 - protein, 395 aa, Cellvibrio japonicus
  REGION 1..395: note = tr|B3PDD5|B3PDD5_CELJU Epoxyqueuosine reductase; OS = Cellvibrio japonicus (strain Ueda107) OX=498211 GN=queG; PE = 3 SV=1
MFFNHFYPCGGSLAQYPSDFTIPIHSMSDLDLHQLAADIKHWGRELGFQQLGITDIDLGEAEVRLKEWLAKGYHGSMEWLAAHGNKRSRPAELLPGTLRVISVRMDYLPGDTRQIQILKDPTKAYISRYTLGRDYHKLIRKRLGQLAERIERALPDDYPLKGQNRAFVDSAPVMERPLAEKAGLGWTGKHTLIINSSAGSWFFLGEIFTFLPLPIDKPEQHNQCGDCTACLKVCPTDAFPRPYELDARRCISYLTIENTGVIPEEFREPIGNRIFGCDDCQAICPWNKYAHFTGETDFLPRHGLADSDLVDLFLWSEEEFLTRTEGSAIRRVGYEGWLRNIAVGLGNAPSDLRIIEALTHKRETASSLVREHIDWALAQQAQPQRRRKRKIQRDN

SEQ ID NO: 75616 - protein, 369 aa, Cellvibrio mixtus
  REGION 1..369: note = tr|A0A266QAV4|A0A266QAV4_9GAMM Epoxyqueuosine reductase OS=Cellvibrio mixtus OX=39650 GN=queG PE=3 SV=1
MPSSPDLNQLADDIKRWGRELGFQQVGITDIDLQQAEVKLQEWLAKGYHGSMEWLAAHGNKRSRPAELLPGTVRVISVRMDYLPGDTQQIKILKDPTKAYISRYTLGRDYHKLIRKRLSILAQQIDDALPADYEFKGQNRAFVDSAPVMERPLAEKAGLGWTGKHTLIINSGAGSWFFLGEIFTFVPLPVDTPAQPNQCGECTACLKVCPTDAFPRPYELDARRCISYLTIENKGAIPEEFREPIGNRIFGCDDCQAICPWNKYAHFTHETDFLPRHGLADSDLVDLFNWTEEEFLARTEGSAIRRVGYDGWLRNIAVGLGNAPSDERIVAALTAKKESCSELVQEHITWALAQQANPQRRRTRKIKRS

SEQ ID NO: 75617 - protein, 128 aa, Cellvibrio sp.
  REGION 1..128: note = tr|A0A3D4PXQ6|A0A3D4PXQ6_9GAMM tRNA epoxyqueuosine(34) reductase QueG (Fragment) OS=Cellvibrio sp. OX=1965322 GN=DIW64_03570 PE=4 SV=1
GNRIFGCDDCQAICPWNKYAQFTGETDFLPRHGLADSDLVDLFNWTEEEFLARTEGSAIRRVGYEGWLRNLAVGLGNAPSDERIIQALSDKKNQASPLVNEHIDWALTQQTKPNRRRKRKIQRAPVIE

SEQ ID NO: 75618 - protein, 372 aa, Cellvibrio sp.
  REGION 1..372: note = tr|A0A4R7BKF0|A0A4R7BKF0_9GAMM Epoxyqueuosine reductase OS=Cellvibrio sp. YR554 OX=2135765 GN=queG PE=3; SV = 1
MPNLDLHQLAADIKLWGRELGFQQVGITDIDLGDAEVRLQEWLAKGYHGSMKWLTAHGNKRSRPAELLPGTVRVISVRMDYLPGDTAQIKILKDPTKAYISRYTLGRDYHKLIRKRLSVLAQQIDDALPADYEFKGQNRAFVDSAPVMERPLAEKAGLGWTGKHTLIINSGAGSWFFLGEIFTFVPLPVDEPQQPNQCGECTACLKVCPTDAFPRPYELDARRCISYLTIENEGAIPEEFREPIGNRIFGCDDCQAICPWNKYAQFTNETDFLPRHGLADSDLVDLFNWTEDEFLTRTEGSAIRRVGYEGWLRNIAVGLGNAPSDERIIQALNARKTRASPMVAEHIDWALIQQANPNRRRKRKIQQIRPSN

SEQ ID NO: 75619 - protein, 400 aa, unidentified
  source 1..400: note = Cellvibrionaceae bacterium
  REGION 1..400: note = tr|A0A2E2XHA4|A0A2E2XHA4_9GAMM Epoxyqueuosine reductase OS=Cellvibrionaceae bacterium OX=2026723 GN=queG; PE = 3 SV=1
  VARIANT 62..64: note = Xaa can be any naturally occurring amino acid
  VARIANT 66: note = Xaa can be any naturally occurring amino acid
  VARIANT 86: note = Xaa can be any naturally occurring amino acid
  VARIANT 215: note = Xaa can be any naturally occurring amino acid
  VARIANT 261: note = Xaa can be any naturally occurring amino acid
  VARIANT 263: note = Xaa can be any naturally occurring amino acid
  VARIANT 296: note = Xaa can be any naturally occurring amino acid
  VARIANT 300..302: note = Xaa can be any naturally occurring amino acid
  VARIANT 306: note = Xaa can be any naturally occurring amino acid
MPTLSSPYSDAFLQQLALDIKQWGRELGFQQVGITDTDLQREEERLKVWLDKGYQGEMAWLXXXGXKRSRPDELLEGTQRVICARXDYLPADTDPIRILKQEDKAYVSRYALGRDYHKLIRKRLSTLAKRIEQTLIDQYPEQAEAIQQRAFVDSAPVMERPLAAKAGLGWVGKHTLIIHPEAGSWFFLGEVYTSVPLPVDNQPQTDRCGDCEACXKVCPTDAFTRAYELDARRCISYLTIENKGSIPEEFRQPMGNRVFGXDXCQSICPWNKYASHSDIDDFSPRHALDQSKLADXFLWXXXTFLXNTEGSAIRRIGHERWLRNLAVGLGNAPYSDDVIHSLKCRLDHPSALVQEHVQWALEQQTQRQHNPKQRRRRKIKGPRSLGLDSRSRPDSANQTK

SEQ ID NO: 75620 - protein, 374 aa, unidentified
  source 1..374: note = Cellvibrionaceae bacterium
  REGION 1..374: note = tr|A0A545T5X9|A0A545T5X9_9GAMM Epoxyqueuosine reductase OS=Cellvibrionaceae bacterium R142 OX=2591008; GN = queG PE=3 SV=1
MSKHRDDDLTELASNIKIWARELGFQQVGICDTDLSREKPRLAEWLRRGYHGTMEWLENRADMRTDPGRLHPGTLRVISARMDYLPGDTRQIEILKSPAKAYLSRYALGRDYHKLIRKRLRLLAVRIEQAAGRTLHQRPFVDSAPVLERPLAAKAGLGWVGKHTLVINRQAGSWFFLGEILTDLPLPVDDDPQENLCGDCNACLKVCPTDAFPEPYVLDARRCISYLTIENQGAIPEAFREPMGNRVFGCDDCQAICPWNKFARPTAEPDFQPRHQLDNRDLLELFNWSEATFLQRTAGSAIRRTGYAGWLRNLAVGLGNAPSDSAIIAALERRRDEVSPMVREHIDWALAQQRNPGRRRRRKVKNNDKTASRP

SEQ ID NO: 75621 - protein, 348 aa, unidentified
  source 1..348: note = Cellvibrionales bacterium
  REGION 1..348: note = tr|A0A5C7PUI2|A0A5C7PUI2_9GAMM Epoxyqueuosine reductase OS=Cellvibrionales bacterium OX=2026722 GN=queG; PE = 3 SV=1
MDDENLLTQLQHWARELDFQQIGVSDIDVGQHAQYLQRWLQNGYHADMHWMQQHAALREHPEQLHTGALRVISVRMDYLSDQDSNLIAKVNADGGAYIARYALGRDYHKWMRKRLALLAQKIETQFPHKHRAVVDSAPVLERAFAQKSGLGWIGKNTMLINSQAGSYFFLGEILTDLPLPLTAPQETTHCGTCTACLDLCPTQAFVAPQQLNASRCISYLTIELRGSIPLELRKKIGNRIFGCDDCQAVCPWNKFAQRTEQEVFQPKHNLDDAQLTALFAWSEEEYLEKTAGSALRRIGYEGWLRNSAVALGNARTTSEIIFALNSRREHESVLVREHVAWALEQHAH

SEQ ID NO: 75622 - protein, 387 aa, unidentified
  source 1..387: note = Cellvibrionales bacterium
  REGION 1..387: note = tr|A0A1Z8Z9X6|A0A1Z8Z9X6_9GAMM Epoxyqueuosine reductase OS=Cellvibrionales bacterium TMED79 OX=1986768; GN = queG PE=3 SV=1
  VARIANT 22: note = Xaa can be any naturally occurring amino acid
  VARIANT 30: note = Xaa can be any naturally occurring amino acid
  VARIANT 54: note = Xaa can be any naturally occurring amino acid
  VARIANT 84: note = Xaa can be any naturally occurring amino acid
  VARIANT 116: note = Xaa can be any naturally occurring amino acid
  VARIANT 121: note = Xaa can be any naturally occurring amino acid
  VARIANT 135: note = Xaa can be any naturally occurring amino acid
  VARIANT 199: note = Xaa can be any naturally occurring amino acid
  VARIANT 212: note = Xaa can be any naturally occurring amino acid
  VARIANT 216: note = Xaa can be any naturally occurring amino acid
  VARIANT 228: note = Xaa can be any naturally occurring amino acid
  VARIANT 244: note = Xaa can be any naturally occurring amino acid
  VARIANT 246: note = Xaa can be any naturally occurring amino acid
  VARIANT 250: note = Xaa can be any naturally occurring amino acid
  VARIANT 278: note = Xaa can be any naturally occurring amino acid
  VARIANT 308: note = Xaa can be any naturally occurring amino acid
  VARIANT 348: note = Xaa can be any naturally occurring amino acid
  VARIANT 356..357: note = Xaa can be any naturally occurring amino acid
  VARIANT 367..368: note = Xaa can be any naturally occurring amino acid
  VARIANT 372: note = Xaa can be any naturally occurring amino acid
  VARIANT 374: note = Xaa can be any naturally occurring amino acid
  VARIANT 387: note = Xaa can be any naturally occurring amino acid
MREVYLAAPLICHNVSVNTANXKEIIATIXGWASELGFQDIGFTGVDLGEHEGXLQKWLDAGYEGTMSWMARHGTKRSRPNELXPGTCTVISCRMDYLPEAADSWQVIASSERGFXSRYAXGRDYHKLIRSRLAXLAERIRTELASGEFRAFVDSAPVLERAIAEQAGMGWIAKNTMLINESAGSWFFLGEIYTDIALXHSEPKREKHCGTXTACXDTCPTGAFVAPXVLDARRCISYLTIEHXGXIDPXLRAKMGNRIYGCDDCQLVCPWNKFASLXKESDFEPRGDLANPDLASLFMWTEEEFEQXLQGSPIRRIGHERWLRNIAIALGNADSTSSVIGALKSREXDPSELVRXXVAWALTQHAXXDDSXQXMAVQFDPASDQSX

SEQ ID NO: 75623 - protein, 408 aa, unidentified
  source 1..408: note = Cephaloticoccus capnophilus
  REGION 1..408: note = tr|A0A139SP27|A0A139SP27_9BACT Epoxyqueuosine reductase OS=Cephaloticoccus capnophilus OX=1548208; GN = AXK12_03430 PE=4 SV=1
MTELAAAPIATVEQQERLRARLGELGFDDVRFAALHKLHGKPLREWLEAGMHGEMAWMERSVDKRLDPSQVLSGARSIIMLGVNYWPGRELRQPGPQWARYALWEDYHDTIKAALVEAGRAIEEVFGVGGGDYRYYVDTGPVIERGWAAKAGLGFVGKNAMLISRTHGNWLFLASVLTRVALRPDPPVRKQASNFADVGLLCGKCTRCLDACPTAAFAAPGVVDARRCISYQTIENKGIIPRELRAGIGSRVYGCDTCLEVCPWNRFAERGRQLLLAARHDLPELGLGELLAMTPERFSQVFRRTPIKRLKLRGLLRNACVVAGNQSQAGLSGERLLVARQENERVVAHLLRLAQHELAMIRVHAVWALYRLLGVEAASAALAEIRSAETDAAVLEEYAWWAAASAAG

SEQ ID NO: 75624 - protein, 406 aa, unidentified
  source 1..406: note = Cephaloticoccus primus
  REGION 1..406: note = tr|A0A139STD5|A0A139STD5_9BACT Epoxyqueuosine reductase OS=Cephaloticoccus primus OX=1548207; GN = AXK11_00510 PE=4 SV=1
MSAARAAVSTSPAVEPQEQLRARLRELGFDEVRFAALHKLDGRPLREWLAAGMHGDMAWMERSVDKRLDPTQVLAGARSIIMLGVNYWPGGELRQRGPQWARYALWEDYHDTIKVALAEAGRAVEATFGVGSGDYRYYVDTGPVIERGWAAKAGLGFVGKNAMLISRTHGNWLFLASILTTVALRPDPPVRQQASDFADVGLLCGKCTRCLDACPTAAFAAPGVVDARRCVSYQTIENKGIIPRELRAGIGRRIYGCDTCLKVCPWNRFAQAGRALLLAARHDLPEISLEELLALTPERFAEVFRRTPIKRLKLRGLLRNACVVAGNLAAELPEAERRALIPPLLALAQHELPLLRVHAVWALHRLLGVNAAAALLAPARTAETDADVLEEYTWWATAPQGVSLVD

SEQ ID NO: 75625 - protein, 378 aa, Cerasibacillus quisquiliarum
  REGION 1..378: note = tr|A0A511UVV1|A0A511UVV1_9BACI Epoxyqueuosine reductase OS=Cerasibacillus quisquiliarum OX=227865; GN = queG PE=3 SV=1
MDISILKKEVIQYSKQIGIDKIGFTTADVFTELKERLRRQQELGYQSGFEKGTIEERTEPRRLVPEAQSIIAIAVAYPSRMKNAPRGTKENRRGIFCRASWGVDYHVVLRERLEKLANYIKEKVPDAVTKSMVDTGELSDRAVAERAGIGFSGKNCSIITPEFGSYVYLGELITNIPFTPDKPIEDSCGDCRKCLDACPTGALVQGGQLNAQRCIAFLTQTKTFLPDEFRDKIGNRLYGCDTCQQVCPRNRHVDFHHQTEFEPDPEVAKPLLKPLLKISNRTFREKFGSMSGSWRGKKPIQRNAILALAHFKDKTAVKDLIEVMREDVRPEIRGTAAWTLGKIGTEEAFAAIEEAIAYETDERVIYEMEKGLQFRRND

SEQ ID NO: 75626 - protein, 342 aa, unidentified
  source 1..342: note = Cereibacter changlensis
  REGION 1..342: note = tr|A0A2W7RF70|A0A2W7RF70_9RHOB Epoxyqueuosine reductase OS=Cereibacter changlensis OX=402884; GN = LX76_00590 PE=4 SV=1
MKGLPVKERLIARALEEGFSKVGICAPDAAPETAGRLRAFLEAGRHGQMGWMAEREHWRGDAAALWPEARSVIMLAEVYTPEADPRAVLAERDRAAVSVYAQGKDYHDLVKKRLKRLGRWLVAETGAEIKVFVDTAPVMEKPLAQAAGLGWQGKHTNLLSRDLGNWFFLGAIFTTLDLPKDAAEPEHCGSCTACLEACPTRAFPAPFQLDARRCISYLTIEHHGPVEPELRALMGNRIYGCDDCLAACPWNKFAVAAREIGYAARVGAPPLAELAELDDAGFRARFAGSPIKRIGRDRFLRNVLYAIGNSGDPALLPAARARLGDADPVVAEAAEWAVARLS

SEQ ID NO: 75627 - protein, 342 aa, unidentified; identical to SEQ ID NO: 75626
  source 1..342: note = Cereibacter changlensis
  REGION 1..342: note = tr|A0A2T4K0L8|A0A2T4K0L8_9RHOB tRNA epoxyqueuosine(34) reductase QueG OS=Cereibacter changlensis JA139 OX=1188249 GN=queG PE=4 SV=1

SEQ ID NO: 75628 - protein, 313 aa, Cesiribacter andamanensis
  REGION 1..313: note = tr|M7N5U5|M7N5U5_9BACT Epoxyqueuosine reductase; OS = Cesiribacter andamanensis AMV16 OX=1279009 GN=queG PE=3; SV = 1
MAMTPTQVRTHTQLLKQKALELGFSFCGVAKAAYLEAEAPRLEAWLKANMHGQMGYMANHFDLRLDPRKLVPGAKSVVVLGYSYFPKEDLTERTGYKIAKYAYGQDYHHVIKARLRELMDWLQQEVGAVEGRAFVDSAPLLERQWAQRAGLGWLGKNSLLLTKQMGSFFFLSELVLDLALEPDVPLAKDFCGSCTRCLDACPTDAIVQPGVVDGSRCISYFTIELKEEIPQEVAGKFEDWIFGCDICQDVCPWNRFSRPHQEPLFDPHPDLQHMQKKEWEEISEEVFSKLFRKSAVKRTKLEGLRRNISFVKK

SEQ ID NO: 75629 - protein, 317 aa, Chamaesiphon minutus
  REGION 1..317: note = tr|K9UH96|K9UH96_CHAP6 Epoxyqueuosine reductase; OS = Chamaesiphon minutus (strain ATCC 27169 / PCC 6605); OX = 1173020 GN=queG PE=3 SV=1
MNDLTQQVEDRAREIGFHAVGIAAIDPNTTQAAATHLQEWLSLGYQADMAWMSDPRRQDIYRLMPSAQTVIALALNYYTPHQRPDGPTYAKIARYAWGRDYHKVLEKKLKQLTNWLIDSIDNVEARYYVDTGPIQDKFWAQAAGIGWIGKNGNVINRQHGSWIFLGEIVTNIPLIPSDPHTQHCGTCTRCISACPTGAITQPFVVDANRCIAYHTIENRAETLPPEIANNLQGWVAGCDICQDVCPWNQKFAQPTDVADFQPYPRNLDRTLTELGSLTDESWDRSFRASALRRIKPAMWRRNAIANLHNWGSQSNVN

SEQ ID NO: 75630 - protein, 317 aa, unidentified
  source 1..317: note = Chamaesiphon polymorphus
  REGION 1..317: note = tr|A0A2T1GGR5|A0A2T1GGR5_9CYAN Epoxyqueuosine reductase OS=Chamaesiphon polymorphus CCALA 037 OX=2107692; GN = queG PE=3 SV=1
MNDLTRQVEDRAREIGFHAVGIAAIDPNTTQAAATHLQEWLSLGYQADMAWMSDPRRQDIYRLMPSATTVIALALNYYTPHQRPNSPTHAKIARYAWGRDYHKVLEKKLKQLTNWLLESFDNVEARYYVDTGPIQDKFWAQAAGIGWIGKNGNVINRKYGSWIFLGEIVTNIPLIPSDPHSQHCGTCTRCISACPTGAITQPFVVDANRCIAYHTIENRAETLPPEIANNLQGWVAGCDICQDVCPWNQKFARPTDVADFQPYPRNLAHTLTELGSLTDESWDRSFRASALRRIKPAMWRRNAIANLHNWGSQSNVN

SEQ ID NO: 75631 - protein, 379 aa, unidentified
  source 1..379: note = Chania multitudinisentens
  REGION 1..379: note = tr|W0LAI7|W0LAI7_9GAMM Epoxyqueuosine reductase; OS = Chania multitudinisentens RB-25 OX=1441930 GN=queG PE=3; SV = 1
MTHPLDLNQLAQHIKQWGQSLGFQQVGICDTDLSAEEPKLQAWLDKQYHGEMAWMARHGMLRARPHELLPGTLRVISVRMNYLPAKAAFASTLQNAQLGYVSRYALGRDYHKLLRQRLKKLGDRIQAYCGELNFRPFVDSAPVMERALAAKAGIGWVGKHSLILNREAGSWFFLGELLIDLPLPVDQPQEEQCGRCVACMTTCPTGAIVAPYTVDARRCISYLTIELEGVIPEEFRALMGNRIYGCDDCQLICPWNRFSQLTDEEDFSPRAVLHAPQLIDLFRWNEEKFLRITEGSAIRRIGHLRWLRNIAVALGNAPYQDQIVIALRARQGEDAMLDEHIVWALEQQRARREALGIEVQTAQKKRLIRAVEKGLPRDA

SEQ ID NO: 75632 - protein, 383 aa, Chelativorans sp.
  REGION 1..383: note = tr|Q11CA8|Q11CA8_CHESB Epoxyqueuosine reductase; OS = Chelativorans sp. (strain BNC1) OX=266779 GN=queG PE=3; SV = 1
MRVARAEPERLRAYIEREAHAAGFDVVAFTTPEAAPAAPARLAEFLSEGRHGTMDWMAETAMRRARPRTLWPEVRSIIMLGMNYGPEGDPLPILKRKDRAAISVYARNRDYHEVIKGRLKQIAGKLAGKAGADVKVFVDTAPVMEKPLAAAAGLGWQGKHTNLVSRQLGSWLFLGSIFTTAEIAPDLPEIDHCGSCRACLDICPTDAFPAPYQLDARRCISYLTIEHKGPIPREFREKMGNRIYGCDDCLAVCPWNKFAKAASESKLKAREDLKAPALADFLEFDDPSFRAFFSGSPIKRIGRDRFIRNVLIAAGNSAEEKLIPACERLLGDGSPLVRGAAIWALSRLMASGKFDALRRRMRPLEPHPQVQAEWDYAAVEVPA

SEQ ID NO: 75633 - protein, 422 aa, Chelatococcus asaccharovorans
  REGION 1..422: note = tr|A0A2V3TT00|A0A2V3TT00_9RHIZ Epoxyqueuosine reductase OS=Chelatococcus asaccharovorans OX=28210; GN = queG PE=3 SV=1
MRERSAARPAMSLRDALVDRARQMGFDDVRITSPDAIPHAPEHLAAWLEAGYAGSMTWMGETPERRSDPRALWSEVRSVVMLGMNYAPSSDPLASLAMRDRATISVYARNRDYHDVIKGKLKQVAGFLASAGGADVKVFVDTAPVMEKPLAEAAGLGWQGKHSVLVSRQFGSWLFLGAIFTTAELPFDAPGTPLCGSCRRCLTICPTAAFPAPYQLDARRCISYLTIEHKGPIDRALRPLMGNRVFGCDDCLAVCPWNKFAEAGREAKIVAGADYRAPALTELAQLDDAAFRLRFAGSPVKRTGRDRFMRNVLIAIGNSGDPAMVPVAGEKLTEDNPLVRGAAVWALSRLLPAATFAALAPRYMMGEPDESVMAEWNAGLEEGLAENLAESLDQERQVPAPREIRQSAVCVTRPSEKAGKRP

SEQ ID NO: 75634 - protein, 334 aa, Chelatococcus sambhunathii
  REGION 1..334: note = tr|A0A0K6HHK3|A0A0K6HHK3_9RHIZ Epoxyqueuosine reductase OS=Chelatococcus sambhunathii OX=363953; GN = Ga0061061_11321 PE=4 SV=1
MAWMADRADERADPARLWPQVRSILLLGMNYGPAEDPLANLARPERATISVYARNRDYHDIIKGKLKQVASLLASVGGADVKVFVDTAPVMEKPLAEAAGLGWQGKHTVLVSRTFGNWLFLGAIFTTAELPPDAPEKDHCGSCRRCLDICPTAAFPAPYVLDARRCISYLTIEHRGPIPRDLRALMGNRVFGCDDCLAVCPWNKFAREAREARLAARPDLTAPSLAALAGLDEAAFRQLFAGSPIKRTGRERFIRNVLVAIGNSGLPALAESALRLLDEPSALIRGTAVWALSRLLPADDFVALAALRMDGEEDMTVRDEWRLALAGSAAEGLT

SEQ ID NO: 75635 - protein, 413 aa, Chelatococcus sp.
  REGION 1..413: note = tr|A0A2W7A4D9|A0A2W7A4D9_9RHIZ Epoxyqueuosine reductase OS=Chelatococcus sp. OX=1953771 GN=queG PE=3 SV=1
MVCEDQVEAELQAAAGGPDAGHGAERALRRSGLLSGAKLKAAVAERAGAEGFAVIRVAPADAIPEAPERLAAWLAAGHHGGMAWMTERMAERADPRRLWDEVRSVVMLGMNYAGESDPLAALAHPDRAAISLYARRRDYHDVIKGKLKSVAGLLAARGGADVKVFVDTAPVMEKPLAQAAGLGWQGKHTVLVSREHGSWLLLGAIYTTAELPADAPERDHCGSCRRCLDICPTDAFPAPYRLDARRCIAYLTIEHAGHIEAALRPGIGNRVFGCDDCLAVCPWNKFAASAREARLALRDELADLPLAHLATLDDAAFRRLFAGTPVKRTGRDRFLRNVLIAIGNSGRPDLAASARDCLDDASPLVRAMAVWALGRLAPDEARRRSGPALRHEPDLQVCAEWRALDTTPEGCAA

SEQ ID NO: 75636 - protein, 380 aa, Chelatococcus sp.
  REGION 1..380: note = tr|A0A0K2DHV4|A0A0K2DHV4_9RHIZ Epoxyqueuosine reductase OS=Chelatococcus sp. CO-6 OX=1702325 GN=queG; PE = 3 SV=1
MTGEALRRAVAARAAAEGFDVLKVTHPAAVPQLPERLGAWLAEGRQGSMAWMADRADERADPARLWPEVRSIILLGMNYGPAEDPLANLARPERATISVYARNRDYHDIIKGKLKQVASLLASAGGADVKVFVDTAPVMEKPLAEAAGLGWQGKHTVLVSRTFGSWLFLGAIFTTAELPADAPEEDHCGSCRRCLDICPTAAFPAPYVLDARRCISYLTIEHKGPIPRDLRPLMGNRVFGCDDCLAVCPWNKFAREAREARLAARPELTAPSLAALARLDDAAFRQLFAGSPVKRAGRERFIRNVLVAIGNSGLPELAESAFPLLDDPSALIRGTAVWALSRVLPAEDFTALAATRMDGEEDMGVREEWRLALGESAGEG

SEQ ID NO: 75637 - protein, 313 aa, unidentified
  source 1..313: note = Chishuiella changwenlii
  REGION 1..313: note = tr|A0A1M6USC2|A0A1M6USC2_9FLAO Epoxyqueuosine reductase OS=Chishuiella changwenlii OX=1434701 GN=queG; PE = 3 SV=1
MLLETAEHIKVKWTQQIKDKAEMLGFVSCGVAKADFLEEEAPRLESWLNNNYHGEMSYMANNFDMRLDPRLLVEDAKSVISLAYNYYQNLDRNPDAYKVAMYAQGEDYHFVVKEKVRELLEYIQEEIGEVSGRAFADSAPILEHAWAKKAGIGWVGKNSLTLSKQKGSFFFLAELIIDLDLEYDHPIETDHCGKCTRCIDACPTEAILPNKTVNGSQCISYFTIELKDQIPTELKGKFDDWIFGCDICQEVCPWNRFSLPTKESRFVGNEKINQFSKNDWKEITEDVFKEIFKKSPVKRTKYDGLKRNINFMN

SEQ ID NO: 75638 - protein, 365 aa, Chitinimonas sp.
  REGION 1..365: note = tr|A0A2G3K9N7|A0A2G3K9N7_9BURK Epoxyqueuosine reductase OS=Chitinimonas sp. BJB300 OX=1559339 GN=queG; PE = 3 SV=1
MHDVNVSKPGVERDWAALASDIKRWATALGFDAAMIGDADLGAKTEQDLQAWLAAGNHGEMDYMAAHGSKRARPAELVPGTRRVISLRMNYRPPAAKSSEAVLVNGEAAFISRYALGRDYHKVLRSRIKKLAERIITAAGDFGYRAFVDSAPVMEVAAAERAGLGWRGKHTLLLTREHGSFFFLGELFTDLPLPIDPPLAQEHCGRCTRCIDICPTQAIVAPYQVDARRCVSYLTIELKGAIPTELRPLIGNRVYGCDDCQLTCPWNRFAVDSKESDFAVRNGLDDVSLVELFAWREQDFLNKLAGTAIYRIGYERWLRNIAVGLGNAPTSPAVVNALRSRQDDASELVREHVAWALARHLDAPT

SEQ ID NO: 75639 - protein, 368 aa, Chitinimonas sp.
  REGION 1..368: note = tr|A0A516SDK8|A0A516SDK8_9MICO Epoxyqueuosine reductase OS=Chitinimonas sp. R3-44 OX=2594795 GN=queG; PE = 3 SV=1
MHEVTQSDAERDWAALAADIKRWAAELGFDAAVIGDADLGPAAEQNLQAWLAAGNHGEMDYMAAHGTKRARPAELVPGTRRLISLRMNYRPPKARDSEAVLADGEAAFVSRYALGRDYHKVLRNRLQKLAERIEKAVGTFGYRPFVDSAPVMEVEAAVRAGLGWRGKHSLLLNREHGSFFFLGELFTDLPLPLDPPLPQEHCGRCTKCIDICPTQAIVAPYRVDARRCVSYLTIELKGAIPVEFRPLIGNRVYGCDDCQLVCPWNRFAVDATESDFAVRNGLDDVSLAEVFGWTEAEFMQKLAGTAIYRIGYERWLRNIAVGLGNAPGTPAVLAALHARRDDPSDLVREHVAWALAQHAERTRPAPNK

SEQ ID NO: 75640 - protein, 358 aa, Chitinimonas taiwanensis
  REGION 1..358: note = tr|A0A1K2HCW3|A0A1K2HCW3_9BURK Epoxyqueuosine reductase OS=Chitinimonas taiwanensis DSM 18899 OX=1121279; GN = queG PE=3 SV=1
MERDWTALAGDIKRWAKELGFDAAQIGDADLGAEVEAGLTAWLDAGFHGEMDYMAAHGMKRARPAELVPGTRRVISLRMNYRPPEAKSSEAVLADGEAAFISRYALGRDYHKVLRNRLQKLAERIADCVGPTGYRAFVDSAPVMEVAAAERAGLGWRGKHTLLLTREHGSFFFLGELFTDLPLPIDPPLAQEHCGRCTRCLDVCPTQAIVAPYQVDARRCISYLTIELKGAIPAELRPLLGNRVYGCDDCQLFCPWNRFAVDTSEADFAVRNGLDAASLVELFAWSEQDFLNRLAGTAIYRIGYERWLRNLAVGLGNAPSSPAVLAALASRQADATPLVREHIDWALAQHQQRGASLA

SEQ ID NO: 75641 - protein, 355 aa, Chitiniphilus sp.
  REGION 1..355: note = tr|A0A4V5MQ33|A0A4V5MQ33_9NEIS Epoxyqueuosine reductase OS=Chitiniphilus sp. HX-2-15 OX=2571148 GN=queG; PE = 3 SV=1
MDETLDKQAVVADIKRWAGELGFARAAITGPDLGHAEAGMLAWLEAGYHGEMDYMARHGLKRARPAELVPGTRSIVSVILPYLPPSAAASEAVLADGGKAYVSRYALGRDYHKVLRARLQALADRLAARIGPFGHRVFVDSAPVLEVELAKQAGLGWRGKHTLLIHRDHGSFFFLGELFTDLDLPYDAPLPVEHCGRCTRCLDFCPTKAIVAPYTVDARRCVSYLTIELKGSIPLELRPLIGNRVYGCDDCQLVCPWNRFAAESAETDFQIRNGLDDVTLVELFAWSEADFQRNLAGSAIYRIGHERWLRNLAVGLGNAATTPDVLAALNARRDDGSELVREHVAWALARHGVAA

SEQ ID NO: 75642 - protein, 299 aa, unidentified
  source 1..299: note = Chitinivibrio alkaliphilus
  REGION 1..299: note = tr|U7DA22|U7DA22_9BACT Iron-sulfur cluster binding protein OS=Chitinivibrio alkaliphilus ACht1 OX=1313304; GN = CALK_0050 PE=4 SV=1
MALVTGFSACGFVALRRLSEHDSSLQNWLSSGYHGSMGWMENHFEKRLDPRLLVPGAETGIILLLNYFPQKKYDDTGHVLSKYAYGDDYHGVMKQMLFSLRDQINTVVPAKGRAFVDSAPVLERPWAVEAGLGWIGKNSLLIHPVLGSFCFIGELFLSCTLPPDAPWSGSSCGTCNRCRTACPTQAIVSPGCIDSRRCLSYLTIEHRGEIPPDRSLYSRVFGCDLCQDVCPWNRSCTPTTVPEFIPDSLRQDVYEQDLWKRLTPEDFNRLFSSSPLRRTGYTGLTRNIDRCSSQDEDAS

SEQ ID NO: 75643 - protein, 304 aa, Chitinophaga arvensicola
  REGION 1..304: note = tr|A0A1I0RJP9|A0A1I0RJP9_9BACT Epoxyqueuosine reductase OS=Chitinophaga arvensicola OX=29529 GN=queG; PE = 3 SV=1
MTHTLFIKELAKELGFDHCGIAKAEQLDDDARRLENWLNKGMHGNMQYMENHFDKRIDPRKLVDGAQSVITLLFNYFPSERQRDDAPRISKYAYGNDYHEVIRARLKTMLLRMQERIGPVQGRGFVDSAPVLERAWAKRSGLGWLGKNGNLIHKQAGSFFFIATLITDIPLEYDGPVADFCGSCTRCLDACPTEAIVAPGVVDGSKCISYFTIELKEQLIPDKMKGQFDDWMFGCDTCQDVCPWNRFAKANKEAEFTPVPAILNFSTRDWEEMTEEAFKTIFRHSPLKRSKFAGIRRNINFLKY

SEQ ID NO: 75644 - protein, 308 aa, unidentified
  source 1..308: note = Chitinophaga barathri
  REGION 1..308: note = tr|A0A3N4MI37|A0A3N4MI37_9BACT Epoxyqueuosine reductase OS=Chitinophaga barathri OX=1647451 GN=queG PE=3; SV = 1
MRTPEKNTLLIKQKARTLGFDHCGIAKAEQLTEDAYRLEQWLQQGMHGNMQYMENYFDKRIDPRLLVDGAQSVITLLLNYYPVQEQQPEAPKLAKYAYGRDYHDVIREKLNTLLADLRVEIGDIQGRGFVDSAPVLERSWAQRSGLGWIGKNGNLIHKQAGSFFFIATLIVDIPLVYDGPAADYCGSCTRCLDACPTGALVSPTVVDGSRCISYYTIELKDMLIPASMQGKFENWMFGCDICQDVCPWNRFSKPNTEFAPIPEVLNFTTSQWEEMTEEEFKRIFAKSPLKRSKYAGIRRNLKFLGRPE

SEQ ID NO: 75645 - protein, 314 aa, unidentified
  source 1..314: note = Chitinophaga caeni
  REGION 1..314: note = tr|A0A291QW30|A0A291QW30_9BACT Epoxyqueuosine reductase OS=Chitinophaga caeni OX=2029983 GN=queG PE=3; SV = 1
MLNIEKNTLFVKEQAKAFGFDHCGIAQAAELTGDAFRLENWLHKGMHGGMKYMENYFDKRIDPRKLVDGAKSVITLLLNYYPSQFQQPGAPKVAKYAYGNDYHEIIKERLNSFLQVLRSKLGDIQGRGFVDSAPVLERSWAQRSGLGWIGKNGNLLHKQAGSFFFIATLIVDVPFLYDAPTGDYCGSCTRCLEACPTGALVSPSVVDGSKCISYFTIELKEQLIPGSMQGKFEDWFFGCDICQDVCPWNRFAKAHRDEAFRPIPEILNFSTSDWEALTEEEFKNIFKKSPLKRSKYAGIRRNLKFIETKNSGKG

SEQ ID NO: 75646 - protein, 310 aa, unidentified
  source 1..310: note = Chitinophaga costaii
  REGION 1..310: note = tr|A0A1C4CCA9|A0A1C4CCA9_9BACT Epoxyqueuosine reductase OS=Chitinophaga costaii OX=1335309 GN=queG PE=3; SV = 1
MNHAARHTTFIKQQAAALGFDHCGIAQAVQLEDDARRLERWLQQGMHGGMQYMENYFDLRIDPRKLVPGAQSVITLLLNYYPETLQRPDAPQIAKYAYGADYHEVIRARLNQLLAKMQTEIGHIAGRGFIDSAPVLERSWAQRSGLGWIGKNGNIIHKQAGSFFFIATLIVDIPLQYDGPVANHCGNCTRCLDACPTGALAAPGVVDGSRCISYLTIELKDLLIPESFAGQMQNWAFGCDICQDVCPWNRFARPHQQEAFKPLPVILNLSTREWEDMSEEAFRKLFKHSAIKRSKHRGLQRNLQFLKLKG

SEQ ID NO: 75647 - protein, 308 aa, unidentified
  source 1..308: note = Chitinophaga cymbidii
  REGION 1..308: note = tr|A0A512RQZ3|A0A512RQZ3_9BACT Epoxyqueuosine reductase OS=Chitinophaga cymbidii OX=1096750 GN=queG PE=3; SV = 1
MQLLDKNTLLVKEKARALGFDHCGIAKAEQLTEDAYRLEQWLKQGMHGNMQYMENYFDKRIDPRLLVEGAQSVITLLLNYYPAATQVSDAPKVAKYAYGQDYHEVIRARLNSFLAELRAEFGEIQGRGFVDSAPVLERSWAQRSGLGWIGKNGNLIHKQAGSFFFIATLIVDIPLVYDPPTGDYCGSCTRCLDACPTEALVSPTVVDGSRCISYYTIELKDMLIPSGMEGKFDNWMFGCDLCQDVCPWNRFSRPNTVPEFAPIPEVLNFTTSQWEELTEEEFRRIFAKSPLKRSKYAGIRRNLKFLGK

SEQ ID NO: 75648 - protein, 306 aa, unidentified
  source 1..306: note = Chitinophaga dinghuensis
  REGION 1..306: note = tr|A0A327W217|A0A327W217_9BACT Epoxyqueuosine reductase OS=Chitinophaga dinghuensis OX=1539050 GN=queG; PE = 3 SV=1
MEHTRFIKELARELGFDYCGISEATQLDDDARRLEQWLKKGMHGSMQYMENHFDKRIDPRKLVDGAKSVITLLYNYFPAERQREDAPKVSKYAYGQDYHEVIRARLKEMLARMQERIGQIQGRGFVDSAPVLERSWARRGGLGWIGKNGNIINKQSGSFFFIATLITDIPLEYDGPVGDYCGTCTRCLDACPTGALVAPGVVDGSRCISYFTIELKDQLIPEKMKGSFDNWMFGCDTCQDVCPWNRFAKANNETAFTPIPAILDFTTNDWEEMTEEAFKAIFRHSPLKRSKYAGIRRNLQFLNLGE

SEQ ID NO: 75649 - protein, 306 aa, Chitinophaga eiseniae
  REGION 1..306: note = tr|A0A1T4SWE3|A0A1T4SWE3_9BACT Epoxyqueuosine reductase OS=Chitinophaga eiseniae OX=634771 GN=queG PE=3; SV = 1
MNNTLYIKQLAAELGFDHCGIARAEQLDDDARRLERWLNKGMHGNMQYMENHFDKRIDPRKLVEGAQSVITLLFNYFPSERQRPDAPQVSKYAYGQDYHEVIRARLKTMLLRMQEHIGPVQGRGFVDSAPVLERSWARRSGLGWIGKNGNLIHKQAGSFFFIATLITDIPLEYDSPVGDYCGTCTRCLDACPTGALVSPGVVDGSRCISYFTIELKEQLIPDKMQGQFDGWMFGCDTCQDVCPWNRFSKAHSEAAFTPVPAILNFSTQDWEDMTEEAFREIFRHSPLKRSKYAGIRRNLQFLNTKP

SEQ ID NO: 75650 - protein, 308 aa, Chitinophaga filiformis
  REGION 1..308: note = tr|A0A1G8DBF2|A0A1G8DBF2_CHIFI Epoxyqueuosine reductase OS=Chitinophaga filiformis OX=104663 GN=queG; PE = 3 SV=1
MNLAAKYTAFIKQHAADLGFDHCGIAKAVQLDDDARRLEQWLHKGMHGSMHYMENHFDKRIDPRKLVDNAQSVITLLLNYYPSQQQQAEAPKISKYAYGQDYHEVIKGKLNTLLARMQEAFGEVSGRGFVDSAPVLERSWAQRSGLGWLGKNGNLIHKQAGSFFFIATLITDLALEYDSPVGDYCGSCTRCLDACPTGALVAPGMVDGSRCISYFTIELKELLIPENMQGQFDNWMFGCDVCQDVCPWNRFSKPNQTVEFTPIPEILNFSTKDWEELTEEEFKKIFRRSPMKRSKYAGIRRNLRFING

SEQ ID NO: 75651 - protein, 307 aa, unidentified
  source 1..307: note = Chitinophaga flava
  REGION 1..307: note = tr|A0A365XZ50|A0A365XZ50_9BACT Epoxyqueuosine reductase OS=Chitinophaga flava OX=2259036 GN=queG PE=3; SV = 1
MNHTLYIKQLAAELGFDHCGIARAEQLDDDARRLESWLNKGMHGNMQYMENHFDKRIDPRKLVEGAQSVITLLFNYFPSQQQRPDAPKVSKYAYGQDYHEVIRARLKTMLLRMQEHIGPVQGRGFVDSAPVLERSWARRSGLGWIGKNGNLIHKQAGSFFFIATLITDIPLDYDSPVGDYCGTCTRCLDACPTGALVAPGVVDGSRCISYFTIELKEQLIPNPMKGQFDNWMFGCDTCQDVCPWNRFSKAHSEAAFTPVPAILNFSTRDWEDMTEEAFREIFRHSPLKRSKYAGIRRNLQFLQTPSS

SEQ ID NO: 75652 - protein, 304 aa, Chitinophaga ginsengisegetis
  REGION 1..304: note = tr|A0A1T5NA39|A0A1T5NA39_9BACT Epoxyqueuosine reductase OS=Chitinophaga ginsengisegetis OX=393003; GN = queG PE=3 SV=1
MTHTLFIKELAKELGFDHCGIAKAVQLDDDARRLETWLNKGMHGNMQYMEHHFDKRIDPRKLVDGAQSVITLLFNYFPSAQQRTDAPRISKYAYGQDYHEVIRARLKTMLLRMQERIGPVQGRGFVDSAPVLERAWATRSGLGWIGKNGNLIHKQAGSFFFIATLITDIELEYDGPMADYCGSCTRCLDACPTEALVAPGVVDGSKCISYFTIELKEQLIPDKMKGQFDNWMFGCDTCQDVCPWNRFSKANQEAAFTPVPAILNFSTRDWEELTEEAFKDIFRHSPLKRSKFAGIRRNINFLNT

SEQ ID NO: 75653 - protein, 308 aa, Chitinophaga ginsengisoli
  REGION 1..308: note = tr|A0A2P8FGJ4|A0A2P8FGJ4_9BACT Epoxyqueuosine reductase OS=Chitinophaga ginsengisoli OX=363837 GN=queG; PE = 3 SV=1
MELAAKYTAFIKQHAADLGFDHCGIAKAVQLDDDARRLEQWLHKGMHGSMHYMENHFDKRIDPRKLVDNAQSVITLLLNYYPDQQQQPEAPKISKYAYGQDYHEVIKGKLNTLLARMQEAFGAVSGRGFVDSAPVLERSWAQRSGLGWLGKNGNLIHKQAGSFFFIATLITDLALEYDSPVGDYCGSCTRCLDACPTGALVAPGVVDGSRCISYFTIELKELLIPENMQGQFDNWMFGCDVCQDVCPWNRFSKPNQTVEFTPIPEILNFSTKDWEELTEEEFKKIFRRSPMKRSKYAGIRRNLRFING

SEQ ID NO: 75654 - protein, 307 aa, Chitinophaga japonensis
  REGION 1..307: note = tr|A0A562T6F5|A0A562T6F5_CHIJA Epoxyqueuosine reductase OS=Chitinophaga japonensis OX=104662 GN=queG; PE = 3 SV=1
MTPTEKNTIFIKQQAAALGFDHCGIARAVQLDDDARRLEQWLHKGMHGTMRYMENYFDKRIDPRKLVDDAQSVITLLLNYYPEQEQRPDAPRIAKYAYGQDYHEVIRAKLNTLLLRMQETIGAVHGRGFVDSAPVLERSWAQRSGLGWIGKNGNLIHKQAGSFFFIATLITDLPLEYDSPAGDYCGNCTRCLDACPTGALVQPGVVDGSRCISYYTIELKEMLIPDTMQGRFEQWMFGCDTCQDVCPWNRFSKPHSTPEFRPIPEILNFSTREWETLTEDAFREIFRHSPLKRTKFRGIQRNLKFIS

SEQ ID NO: 75655 - protein, 305 aa, unidentified
  source 1..305: note = Chitinophaga jiangningensis
  REGION 1..305: note = tr|A0A1M7KUP1|A0A1M7KUP1_9BACT Epoxyqueuosine reductase OS=Chitinophaga jiangningensis OX=1419482; GN = queG PE=3 SV=1
MEQTRYIKDLARELGFDYCGISAAVQLDDDARRLEQWLKKGMHGSMHYMENHFDKRIDPRKLVDGAKSVITLLYNYFPSERQREDAPKVSKYAYGADYHEVIREKLKTMLARMQERIGAVQGRGFVDSAPVLERSWARRSGLGWMGKNGNIINKQSGSFYFIATLITDIELEYDGPVADYCGTCTRCLDACPTGAIVSPGVVDGSRCISYFTIELKDQLIPEKMQGSFDNWMFGCDTCQDVCPWNRFSKPNTEVAFTPIPAILNFSTSDWEEMTEEAFKTIFRHSPLKRSKYAGIRRNLHFLERK

SEQ ID NO: 75656 - protein, 299 aa, Chitinophaga niabensis
  REGION 1..299: note = tr|A0A1N6EZI7|A0A1N6EZI7_9BACT Epoxyqueuosine reductase OS=Chitinophaga niabensis OX=536979 GN=queG PE=3; SV = 1
MIKQKARALGFDHCGIAKAEQLTDDAYRLEQWLNKGMHGSMGYMENYFDKRIDPRLLVDGAQSVITLLLNYYPAVSQQPDTPHIAKYAYGKDYHEVIKAKLNEFLFELRAELGDIQGRGFVDSAPVLERSWAQRSGLGWIGKNGNLIHKQAGSFFFIATMIVDIPLVYDSPVGDYCGSCTKCLDACPTQALVSPTVVDGSRCISYYTIELKDMLIPAAMEGQFNNWMFGCDICQDVCPWNRFAKATSEAEFAPIPEILNLTSSQWEELTEEEFKKIFSKSPLKRSKYAGIRRNLKFLGK

SEQ ID NO: 75657 - protein, 304 aa, Chitinophaga niastensis
  REGION 1..304: note = tr|A0A2P8HIX5|A0A2P8HIX5_9BACT Epoxyqueuosine reductase OS=Chitinophaga niastensis OX=536980 GN=queG; PE = 3 SV=1
MTHTLFIKQLASELGFDHCGIAKAVQLDEDARRLETWLNKGMHGNMQYMENHFDKRIDPRKLVDGAQSVITLLFNYFPSAQQREDAPRISKYAYGHDYHEVIRAKLKTLLLRMQEHIGPVQGRGFVDSAPVLERSWAQRSGLGWIGKNGNLIHKQAGSFFFIATLITDIALEYDSPVGDYCGTCTRCLDACPTEALVAPGVVDGSKCISYFTIELKDQLIPDKMKGQFDNWMFGCDTCQDVCPWNRFSKAHQEAEFTPIPAILNFTTKDWEELTEEAFKDIFRHSPLKRSKFAGIRRNINFLSD

SEQ ID NO: 75658 - protein, 309 aa, unidentified
  source 1..309: note = Chitinophaga parva
  REGION 1..309: note = tr|A0A2T7BI71|A0A2T7BI71_9BACT Epoxyqueuosine reductase OS=Chitinophaga parva OX=2169414 GN=queG PE=3; SV = 1
MTQQERHTAFIKEQAKALGFDYCGIARAEQLDDDARRLEAWLGKGLHGGMQYMENHFDLRIDPRKLVPGAKSVITFLLNYYPEQQQRPDAPQVAKYAYGADYHEVIRARLNQFLQCLRAEIGEVQGRGFVDSAPVLERSWAQRSGLGWIGKNGNIIHKQAGSFFFIATLIVDLPLAYDGPVTDHCGRCTRCLDACPTGALAAPGLVDGSRCISYFTIELKDALIPEKFQGQFRNWAFGCDICQDVCPWNRFAQPHQQEALQPIPALLNMSTQEWEEMSETTFRELFRQSPIKRSKYKGLQRNLQFLKLK

SEQ ID NO: 75659 - protein, 308 aa, Chitinophaga pinensis
  REGION 1..308: note = tr|A0A5C6LQ93|A0A5C6LQ93_9BACT Epoxyqueuosine reductase OS=Chitinophaga pinensis OX=79329 GN=queG PE=3; SV = 1
MDLRGKYTDFIKKHAADLGFDHCGIAQAMQLDDDARRLEKWLHKGMHGSMHYMENNFDKRVDPRKLVDNAKSVITLLLNYYPQEQQRTDAPKISKYAYGHDYHEVIKAKLNTLLARMQEEFGAVSGRGFVDSAPVLERSWAQRSGLGWLGKNGNLIHKQAGSFFFIATLITDLELLYDGPVGDFCGSCTRCLDACPTGALVEPGVVDGSRCISYFTIELKELLIPDNMQGQFDNWMFGCDACQDVCPWNRFSKPNKTAEFTPIPEILNLSTKDWEELTEEEFRRIFRRSPMKRSKYAGIRRNLRFING

SEQ ID NO: 75660 - protein, 308 aa, Chitinophaga pinensis
  REGION 1..308: note = tr|C7PDW0|C7PDW0_CHIPD Epoxyqueuosine reductase; OS = Chitinophaga pinensis (strain ATCC 43595 / DSM 2588 / NCIB 11800 / UQM 2034) OX=485918 GN=queG PE=3 SV=1
MDLRGKYTDFIKKHAADLGFDHCGIAQAMQLDDDARRLEKWLHKGMHGSMHYMENNFDKRVDPRKLVDNAKSVITLLLNYYPREQQRTDTPKISKYAYGHDYHEVIKAKLNTLLARMQEEFGAVSGRGFVDSAPVLERSWAQRSGLGWLGKNGNLIHKQAGSFFFIATLITDLELLYDGPVGDFCGSCTRCLDACPTGALVEPGVVDGSRCISYFTIELKELLIPDNMQGQFDNWMFGCDACQDVCPWNRFSKPNKTVEFTPIPEILNFSTKDWEELTEEEFKRIFRRSPMKRSKYAGIRRNLRFVNG

SEQ ID NO: 75661 - protein, 304 aa, unidentified
  source 1..304: note = Chitinophaga polysaccharea
  REGION 1..304: note = tr|A0A561PTN2|A0A561PTN2_9BACT Epoxyqueuosine reductase OS=Chitinophaga polysaccharea OX=1293035 GN=queG; PE = 3 SV=1
MTHTLFIKQLAKELGFDHCGIARAEQLDDDARRLESWLNKGMHGNMQYMENHFDKRIDPRKLVEGAQSVITLLFNYFPSAAQRADAPRISKYAYGHDYHEVIRARLKTMLLRMQEHIGPVQGRGFVDSAPVLERAWARRSGLGWIGKNGNLIHKQAGSFFFIATLITDIPLEYDGPVADYCGSCTRCLDACPTEALVAPGVVDGSKCISYFTIELKDQLIPEKMKGQFDDWMFGCDTCQDVCPWNRFSKAHQEAEFNPIPAILNFTTRDWEELTEEAFKTIFRHSPLKRSKFAGIRRNLQFLGH

SEQ ID NO: 75662 - protein, 308 aa, Chitinophaga rupis
  REGION 1..308: note = tr|A0A1H8FFH4|A0A1H8FFH4_9BACT Epoxyqueuosine reductase OS=Chitinophaga rupis OX=573321 GN=queG PE=3 SV=1
MLTAIEKNTRFIKQQAVALGFDHCGIARAVQLDADARRLEEWLHKGMHGSMHYMENYFDKRIDPRKLVDDAQSVITLLLNYYPAEQQHPQAPKVAKYAYGKDYHEVIKAKLNTLLLQMQEQIGEVSGRGFVDSAPVLERSWAQRSGLGWIGKNGNLIHKQAGSFFFIATLITNLPLEYDSPVGDYCGSCTRCLDACPTQALVKPGVVDGSRCISYYTIELKDMLIPNEMQGRFQDWMFGCDICQDVCPWNRFSKPNKTVEFVPIPEILNFSTRDWEALSEEAFREIFRYSPLKRAKHKGIQRNLKFIS

SEQ ID NO: 75663 - protein, 308 aa, Chitinophaga sancti
  REGION 1..308: note = tr|A0A1K1ND40|A0A1K1ND40_9BACT Epoxyqueuosine reductase OS=Chitinophaga sancti OX=1004 GN=queG PE=3 SV=1
MQSVETHTAYIKAQAADLGFDHCGIARAVQLEDDARRLETWLNKGMHGTMKYMENHFDKRIDPRKLVDNAQSVITLLLNYYPPEQQVPDAPRISKYAYGKDYHEVIKAKLNTLLARMQETIGEVSGRGFVDSAPVLERAWAQRSGLGWLGKNGNLIHKQKGSFFFIATLITDLPLVYDNPVGDYCGSCTKCLDACPTGALVAPGVVDGSRCISYYTIELKELLIPEKMQGQFDNWMFGCDTCQDVCPWNRFSQPNQTLEFTPIPEILNFSSKDWEELTEEEFKRIFKHSPMKRSKFAGIRRNLNFLEK

SEQ ID NO: 75664 - protein, 309 aa, Chitinophaga skermanii
  REGION 1..309: note = tr|A0A327QN63|A0A327QN63_9BACT Epoxyqueuosine reductase OS=Chitinophaga skermanii OX=331697 GN=queG PE=3; SV = 1
MLLQIEKNTVYIKQRTKELGFDYCGISKAEELTEDAFRLEAWLNKGMHGNMQYMENYFDKRIDPRKLVEGAQSVITLLLNYFPSQVQQPNAPKVAKYAYGKDYHEVIKARLNTLLEDIRKVTGNISGRGFVDSAPVLERSWAKRSGLGWIGKNGNIIHKQAGSFFFIATLIVDIPLLYDGPVADFCGSCTRCLDACPTGAIVSPSVVDGSKCISYFTIELKEQLIPNEMQGKFKDWMFGCDVCQDVCPWNRFAKPHSDVDFTPIPEILNFSTKEWEALTEDEFKNIFRKSPMKRSKYAGIRRNLKFIQT

SEQ ID NO: 75665 - protein, 307 aa, Chitinophaga sp.
  REGION 1..307: note = tr|A0A5B2VVN6|A0A5B2VVN6_9BACT Epoxyqueuosine reductase OS=Chitinophaga sp. BN140078 OX=2607653 GN=queG; PE = 3 SV=1
MTPTEKNTVFIKQQAAALGFDHCGIARATQLDEDARRLEQWLHKGMHGSMHYMENHFDKRIDPRKLVDNAQSVITLLLNYYPEQQQPADAPRIAKYAYGQDYHEVIRAKLNTLLQRIQETIGEVNGRGFVDSAPVLERSWAQRSGLGWIGKNGNLIHKQAGSFFFIATLITDLALEYDSAAGDYCGSCTRCLDACPTGALVEPGVVDGSRCISYYTIELKELLIPDEMQGRFDNWMFGCDTCQDVCPWNRFSKPNSNVEFTPVPAVLNFRTRDWEALTEESFRELFRHSPLKRSKFKGIQRNLKFIG

SEQ ID NO: 75666 - protein, 306 aa, Chitinophaga sp.
  REGION 1..306: note = tr|A0A3N4PED4|A0A3N4PED4_9BACT Epoxyqueuosine reductase OS=Chitinophaga sp. ZY74 OX=2488634 GN=queG PE=3; SV = 1
MQLLEKNTRLVKEKARALGFDHCGIAKAEELTEDAFRLEQWLNKGMHGNMGYMANYFDKRIDPRKLVEGAQSVITLLLNYYPSATQQPDAPKIAKYAYGADYHEVIRGKLNEFLAELRGFLGDIQGRGFVDSAPVLERSWAQRSGLGWIGKNGNLIHKQAGSFFFIATLIVDVPLLYDAPTGDYCGSCTRCLDACPTGALVSPTVVDGSRCISYYTIELKDALIPGQMEGKFDNWMFGCDICQDVCPWNRFSSPNTTFTPIPEVLDFTTAQWEELTEEEFKRIFRHSPLKRSKYAGIRRNLKFLQG

SEQ ID NO: 75667 - protein, 308 aa, Chitinophaga terrae
  REGION 1..308: note = tr|A0A1H3YXE4|A0A1H3YXE4_9BACT Epoxyqueuosine reductase OS=Chitinophaga terrae Kim and Jung 2007; OX = 408074 GN=queG PE=3 SV=1
MNATVYIKQLAAQLGFDYCGIAAAVQLDDDARRLESWLNKGMHGNMQYMENHFDKRIDPRKLVDGAKSVITLLFNYYPGERQREDAPQVSKYAYGEDYHEVIRARLKTMLARMQEQFGQVQGRGFVDSAPVLERAWAQRSGLGWIGKNGNLIHKQAGSFFFIATLITDLELEYDGPVADFCGTCRRCLDACPTSAIVAPGVVDGSRCISYFTIELKEQLIPEQMQGKFDNWFFGCDTCQDVCPWNRFSKAHNEAAFTPLPEILNFSTSDWEEMTEETFKEVFRRSPLKRSKYAGIRRNLRFWKMNRGS

SEQ ID NO: 75668 - protein, 315 aa, unidentified
  source 1..315: note = Chitinophagaceae bacterium
  REGION 1..315: note = tr|A0A3C0IQS3|A0A3C0IQS3_9BACT Epoxyqueuosine reductase OS=Chitinophagaceae bacterium OX=1869212 GN=queG; PE = 3 SV=1
MLKIFPAHIVKANARSLGFEYCGIAQAKELSDDARRLEKWLQQGLHGTMHYMENHFDLRINPTLLVPGAQSVITLLYNYYPEKRQPNNVPQVAKYAYGEDYHRVIRKKVKQLLATLRTTIGDINGRGFVDSAPVLERSWAQISGLGWIGKNGNLIHKQAGSFFFIATLIVDVAFDYDNLTVKDYCGTCTRCIDACPTQAILPNKVVDGSRCISYFTIELKDALIPHDKKEQFNNWMFGCDVCQDVCPWNRFSKPHQEPSFEPIPAILNYSWNDWQMLTEETFNVIFDKSAMKRAKFSGIQRNLKFIAPNNSPISQ

SEQ ID NO: 75669 - protein, 310 aa, unidentified
  source 1..310: note = Chitinophagaceae bacterium
  REGION 1..310: note = tr|A0A3E1NF83|A0A3E1NF83_9BACT Epoxyqueuosine reductase OS=Chitinophagaceae bacterium K23C18032701; OX = 2291815 GN=queG PE=3 SV=1
MKNVSFYTSFIKSLSTELGFSYCGIAKARRLDEDARRLENWLNKGMHGKMSYMEKYFDLRVDPTLLVPGAKSVITLLLNYYPQTTQHTDGPKIAKYAYGNDYHEVIREKLNNLLLRLQETVGEVNGRGFVDSAPVLERSWAQQSGAGWIGKNGNIISKQAGSFFFIATLIVDLELEYDDPYAKDFCGSCTRCIDSCPTEAILPGKVVDGSKCISYFTIELKDMLLPDNMQQRFDNWFFGCDVCQDVCPWNRFSKPNTEPAFTPLPEILNFSTREWQEMTEESFRAIFKHSPLKRSKYAGIRRNLKFVKGG

SEQ ID NO: 75670 - protein, 312 aa, Chlamydia sp.
  REGION 1..312: note = tr|A0A1M3BEZ5|A0A1M3BEZ5_9CHLA tRNA epoxyqueuosine(34) reductase QueG OS=Chlamydia sp. 32-24; OX = 1895742 GN=BGO10_09240 PE=4 SV=1
MKLTFEDIKKKSLELGFDDVGITDAEISEDDINSYNEWIQNKYQGSLKYMENNLRCFPKDLFPGAKTVLIFITFYKQPPVEKKEYLIASYARGKDYHHLHRKRLKRFIHWLESITQQKNIAKGFSDSTPILEKALAVKAGLGWFGKNTLLIHRRFGTYTLLSGIVTSLDIPFEKTPNLRLPKCGVCQKCLDACPTKAFISPYLLDATKCLSYHTIESKEEIPDFVKQANPGYIFGCDICQEVCPHNVRPPLSLQEHFKEENGVGKTITLEKLIELEANPTKLFGTPLQRRGVTGLRKTYQSLKSEKSFSNSP

SEQ ID NO: 75671 - protein, 310 aa, unidentified
  source 1..310: note = Chlamydiales bacterium
  REGION 1..310: note = tr|A0A1M3CQK3|A0A1M3CQK3_9CHLA tRNA epoxyqueuosine(34) reductase QueG OS=Chlamydiales bacterium 38-26 OX=1895743 GN=BGO14_04910 PE=4 SV=1
MIVSLEEIKTKAYELGWQDVGVTQASIPEIDTTAYKNWVKEKCHASLAYMEKELRCTPQEFFPGAKSAIIFVSYYKQPKQDFLADKGLIASYARGKDYHLIHRKRLKKFIHWLEERAQKQGIAKGFSDSSPVLEKALAVQAGLGWFGKNTLLIHRRYGTFILLSGVFTSLELPHTILSTHNPRCGSCTKCLDACPTQALTSPYKLDAAKCLSYHLIESKQPIPTDVQEKNPGYIFGCDICQDACPHNIRKSNSTSLEFDPKSGNGIYITSKDLEHLKLHPERLFGTPLQRRGVEGLRYNALTLKWQENGL

SEQ ID NO: 75672 - protein, 347 aa, unidentified
  source 1..347: note = Chloracidobacterium sp.
  REGION 1..347: note = tr|A0A257B8Y8|A0A257B8Y8_9BACT Epoxyqueuosine reductase OS=Chloracidobacterium sp. CP2_5A OX=2012633; GN = queG PE=3 SV=1
MTALPPVAPSDAVAAFTERLKAQALALGFSKVGIARAEPLEAEGRRLEDWLARGYHATMGWMARTAEKRARPERLLPGVKSAVAVALNYDTPLRHADAPGVAKISRYAWGDDYHAVLTEKLAALLDWVRAERPTANGYIAVDAQPAMDKAWAARAGLGWLGKHGNIITREFGSWVFLGELFLDIELAPETDLVPDHCGVCTACLEACPTGAIVEPYVVDARRCISFATIESKSEAPEMDTRGWVFGCDICQDVCPWSRFRQPTAEPRLAPREGMVAPTFEELDALTPEAFKQRFAGTPVLRAKHRGLKRNLAAAQGRIANPPELSVAPPASQELHRDSAASKPSSEP

SEQ ID NO: 75673 - protein, 324 aa, unidentified
  source 1..324: note = Chloracidobacterium thermophilum
  REGION 1..324: note = tr|G2LHC9|G2LHC9_CHLTF Epoxyqueuosine reductase; OS = Chloracidobacterium thermophilum (strain B) OX=981222; GN = queG PE=3 SV=1
MPPPADDQPAAVAAFTARLKAQALALGFSKVGIARAEPLADEGMRLHEWLARGYHATMHWMARTADKRTDPAQLLPNVKSVVAVALNYDTPPRHVEAPDIGKISRYAWGDDYHDVMGEKLKALLAWVTAERPEAHGYIAVDAQPAMDKAWAVRAGLGWLGKHSNVITREFGSWVFLGELFLDIDLEPETELVPDHCGTCTACLEACPTQAIVAPYVVDARQCIAFATIESKSETPELPTHGWVFGCDVCQDVCPWSRFRQPTTEARFLPHPDLIAPRLDELAALTPEGFRERFAGTPVLRAKHRGLLRNVEAARAQTTAPEQPD

SEQ ID NO: 75674 - protein, 310 aa, Chlorobaculum limnaeum
  REGION 1..310: note = tr|A0A1D8CVP9|A0A1D8CVP9_CHLLM tRNA epoxyqueuosine(34) reductase QueG OS=Chlorobaculum limnaeum OX=274537 GN=BIU88_01540 PE=4 SV=1
MSEKRLTLKEAIRRKALDLGFCAAGFAAAGPLFGAMEEYRQMLAERRHGEMGYLETGLEARANPELLLPGLKTVLSVALPWPAPATAGGISGYAVIPDYHRVLGELLAELLEFIRSISDQPVNARACVDSSPVLEKAWAEAAGIGRTGRNTLLIAPGHGSRVFLGELLLDIELEPDAPLDWNPCGDCSACIDACPTGALAAPGKLDARRCISYLTIELKRDFTDEEAAATDGWLYGCDRCIDACPHNASAEPTAYPGFAPKEDLVNLTATEILELTGSQFRKLFAGTPALRLGLKRLKRNARAVLGKGAR

SEQ ID NO: 75675 - protein, 311 aa, Chlorobaculum parvum
  REGION 1..311: note = tr|B3QQA3|B3QQA3_CHLP8 Uncharacterized protein; OS = Chlorobaculum parvum (strain NCIB 8327) OX=517417; GN = Cpar_1714 PE=4 SV=1
MSEKRLTMKETIRQKTLDLGFCAAGFAAANPLSEAMEMYRAMIDEKRHGEMGYLETGIEARANPELLLPGVKTVLSVALPWPAPTKPGAISGYAVISDYHRVVGELLKELLDFIRSICDQPVNGKVCVDSSPVLEKEWAEAAGIGRTGKNTLLIVPGYGSRVFLGELLLDLDLEPDAPLDWDPCEGCAACLDACPTGALTASGKLDARRCISYLTIELKRDFTDEEAAMTEGWLYGCDHCLDACPHNTVAKHKAYPGFETKKELAELTPAHALELTNSQFRKLFAGTPAMRLGLRRLKRNAQAALERTNKQ

SEQ ID NO: 75676 - protein, 310 aa, Chlorobaculum sp.
  REGION 1..310: note = tr|A0A4Q1DFJ2|A0A4Q1DFJ2_9CHLB tRNA epoxyqueuosine(34) reductase QueG OS=Chlorobaculum sp. 24CR OX=2508878 GN=queG PE=4 SV=1
MSETRPTIKEAIRQKALDLGFCAAGFAAAGPLAGAIEEYRAMIDEGRHGEMGYLETGLEVRANPELLLAGVKSVLSVALPWPAPAKPGAISGYAVIPDYHRIVGELLNELLDFIRLICDHPVNGRVCVDSLPVLETGWAEAAGIGCTGKNSLVIVPGHGSRIFLGELLLDLELDPDQPLDWNPCGDCTACLDACPTGALAAPGKLDARRCISYLTIELKREFTDEEAAMPEGWLYGCDHCLDACPHNANKVTAFPGFEQKEELATLSAEKALELTNSQFRKLFAETPALRLGLRRLKRNAKAVLGKTNKP

SEQ ID NO: 75677 - protein, 313 aa, Chlorobaculum tepidum
  REGION 1..313: note = tr|Q8KFK4|Q8KFK4_CHLTE Iron-sulfur cluster-binding protein OS=Chlorobaculum tepidum (strain ATCC 49652 / DSM 12025 / NBRC 103806 / TLS) OX=194439 GN=CT0322 PE=4 SV=1
MSEKRLTMKETIRRKALSLGFCAVGFAAADTLNEAMKEYRAMIDEGRHGEMGYLETGLEARANPELLLPGVKSVLSAALPWPAPAKPGAISGYAVIPDYHRVVGELLKELLDFIRSICDHPINGQICVDSSPVLEKEWAEAAGIGRTGKNTLLIVPGYGSRVFLGELLLDLELEPDTPLDWNPCGDCTACLDACPTGALNTPGKLDARRCISYLTIELKRDFTDEEAAMTNGWFYGCDHCLDACPHNANIEATGYPGFEQKKELVNLTPEKALELTHSQFRKRFAGTPALRLGLRRLKRNARAAVANKSQSKS

SEQ ID NO: 75678 - protein, 311 aa, Chlorobaculum thiosulfatiphilum
  REGION 1..311: note = tr|A0A5C4S561|A0A5C4S561_CHLTI tRNA epoxyqueuosine(34) reductase QueG OS=Chlorobaculum thiosulfatiphilum OX=115852 GN=queG PE=4 SV=1
MPETPSGLKEAIRRKALDLGFCAAGFAAAKPLSGALEEYRQMLAEGRHGEMGYLETGLEARANPELLLPDLKTVLSVALPWPAPATAGGISGYAVIPDYHRVVGELLTALLDFIRSISERPVNARACVDSSPVLEKAWAEAAGIGRAGRNTLLIAPGHGSRVFLGELLLDIELEPDAPLDWNPCGDCTACLDACPTGALAAPGKLDAQRCISYLTIELKRDFTEEEAATTDGWLYGCDRCIDACPHNASAEPTTYPGFEPKDELANLSAAEILALTGSQFRKLFAGTPPLRLGLKRLKRNARAALERTNKQ

SEQ ID NO: 75679 - protein, 331 aa, unidentified
  source 1..331: note = Chlorobi bacterium
  REGION 1..331: note = tr|A0A3M1M0D2|A0A3M1M0D2_9BACT Epoxyqueuosine reductase OS=Chlorobi bacterium OX=2268192 GN=queG PE=3; SV = 1
MDARVNSATLTKELKDYCRWLGFDAVGIARADALDDEREHLHTWLSRGYHATMHYMERTCQKRLDPRQILPSARSIVVVAMSYDTPYRHTDQPNRGKISRYGWGDDYHDVLLPKLRAAAAWLANRVPNAESKVYVDTGPVMEKQWARRAGIGWQGKNTNVISRTMGSFFFLGVLLTSVELEVDAPIPDYCGTCTACLDACPTGALVEPYVLDASRCISYWTIETKPDVEFPEPIRRNLDGWLFGCDVCQDVCPWNRFRKETREPAFFPRNTETSLALEQILALTPEEFRLRFRGSPLTRPKLAGLQRNARMLQAAAECSQQSDAHAHDHSR

SEQ ID NO: 75680 - protein, 298 aa, unidentified
  source 1..298: note = Chlorobi bacterium
  REGION 1..298: note = tr|A0A136NZP2|A0A136NZP2_9BACT 3-chloro-4-hydroxyphenylacetate reductive dehalogenase; OS = Chlorobi bacterium OLB7 OX=1619898 GN=cprA PE=4 SV=1
MLELPILSASDSPPAFRWDEWYAGVGGRTIHVPEVQEYLHKIQTEQYPRCEGPVAAVRQEFGSPEEAAAHIKEKATEFGADAVGVCLIEPSDLYRGRSISETHAIALAKRMRWRAFQTVPSREAAIECMRIYYDLGETVIQLAEYIRSIGYGCNVEHPIGDSNLLHIPIALKAGFGELGRHGSVIHPRLGPLFRMGSIATTLPMATDSPIDAGIAAFCDKCRACRIYCPANANTPTTAAPKRGKITWGTIAIRLTPGAVSRTSPSITTARPVCRFASITTRSGRAISTATKPNFSPTW

SEQ ID NO: 75681 - protein, 320 aa, unidentified
  source 1..320: note = Chlorobium chlorochromatii
  REGION 1..320: note = tr|Q3ATZ4|Q3ATZ4_CHLCH Iron-sulfur cluster-binding protein OS=Chlorobium chlorochromatii (strain CaD3); OX = 340177 GN=Cag_0255 PE=4 SV=1
MTTSATHFVRHIRAEAARIGFVAIGFAAPELSPMAMQRYMEMLHDKRHGEMAYLANYTAERANPTLLLSDVKTVISVALSYNHPITYCNGFPKISRYALIDDYHTVMKSKLEELHVAIERIMGEPIAAIAAVDSAPLLEKSWAEQAGIGKVGKNSLLKIPSAGSFVFLGELLIDKEIRVTPLALPNYCGSCNACIEHCPTGALLAPSKLDATKCISYLTIELKRDFTADEAAMIGEWLFGCDICQEVCPYNRQASIVAHSAFTVREELLNVAVDDLLGLTKSSFRKLFYGTPVFRIGLRRLKRNARAVEENVRRRGKNDG

SEQ ID NO: 75682 - protein, 317 aa, unidentified
  source 1..317: note = Chlorobium ferrooxidans
  REGION 1..317: note = tr|Q0YUN3|Q0YUN3_9CHLB 4Fe-4S ferredoxin, iron-sulfur binding OS=Chlorobium ferrooxidans DSM 13031; OX = 377431 GN=CferDRAFT_2006 PE=4 SV=1
MSDSGTNLCRELRKEAARLGFSAIGFSTPQPQQLAVERFAAMIREKRHGEMHYMEQGIENRSEPAMLLPGLKTVISAAISYNNHVEYREGQPKISRYALIADYHTVVRRKLEQLLEKLQTLTTEPVNALITVDSSPVFEKTWAEHAGIGKPGKNTLLIVPSSGSQVFLGELLIDIEIIESKPPLQNLCGSCNLCIEQCPTGALTGPGKIDASRCISYLTGELKRAFSEEEQVMVGEWLFGCDLCMDVCPHNRQSSIKANDSFALRQELTDVTTEQIMNLTRSGFRKLFQGTPVFRIGLRRLRRNAKAVAENIKQKRR

SEQ ID NO: 75683 - protein, 335 aa, Chlorobium limicola
  REGION 1..335: note = tr|B3EEH9|B3EEH9_CHLL2 4Fe-4S ferredoxin-type domain-containing protein OS=Chlorobium limicola (strain DSM 245 / NBRC 103803 / 6330) OX=290315 GN=Clim_1748 PE=4; SV = 1
MRLPDENPAIAIRREAQRIGIASIGFSPLQPQEKAIARISGMIEEKRHGEMRYLETGISERADPSQLLPGVKTIISAALCYNRPEYHAPAPGTARISRYAVIDDYHRVVRSKLEELLSFIRTICDQPVQAVIAVDSSPVLEKAWAESAGIGKTGKNTLLNTTASGSYVFLGELLIDREIHDPAQELPNRCGACRNCIESCPTGALLEPGKLDARRCISYLTIELKREFTPEESRMVGTWLFGCDLCQESCPGNRSRKPAPEGLFTLKKELLDITPEDILNLTGSGFRKLFLGTPIYRIGLKRLKRNARAVLDNLSSSSSVQAPQKGNSSSANDEQ

SEQ ID NO: 75684 - protein, 314 aa, Chlorobium phaeobacteroides
  REGION 1..314: note = tr|B3ELV2|B3ELV2_CHLPB Uncharacterized protein; OS = Chlorobium phaeobacteroides (strain BS1) OX=331678; GN = Cphamn1_1876 PE=4 SV=1
MDKENTVQAILRKAEECGFCAAGFSSITPCSEESTRLREMIRENRHGEMLYMQKNIASRDNPENLLPGAKTVFSAAMPYHFPLETHAESGRLSRYAMVRDYHRVLSEKLEEVLECIRENHSGEVNGKVCVDGIPVFEKSWAEKAGLGRKGKNTMLIVPDKGSLVFLGEILLDIELPFTPEHLPDPCGECNSCINSCPTGAIIEKGKIDARKCISYLTVELKREFTPEESGMTGEWMFGCDICQEVCPHNQKSLKKKTAAGFEPQKELLTITPEEILSLTKSGFKKLFASTPVYRTGLKRLKRNARAVLENLKEC

SEQ ID NO: 75685 - protein, 320 aa, Chlorobium phaeobacteroides
  REGION 1..320: note = tr|A1BE86|A1BE86_CHLPD 4Fe-4S ferredoxin-type domain-containing protein OS=Chlorobium phaeobacteroides (strain DSM 266) OX=290317 GN=Cpha266_0658 PE=4 SV=1
MAEQTDSIIRAIKKEASRLGFCAIGFSSLKPQNLAVERLNNMIDEGRHGEMDYLANRIKERADPSLLLSGTKTIISAAMNYYRSTTPRRPDLPRISNYALIEDYHIVLKDRLGQLLAKIQQLYPEPLNGLITIDSAPVFEKSWAEQAGIGASANNTLLIIPAAGSYVFIGEILIDKPFESDMKPLANLCGSCRKCIESCPTGALVSPGKIDARRCISYLTVELKREFTAEESLMAGSWLFGCDCCQESCPYNRERRGPPEGVFHPKEQLENLTCEEILNLSGSGFKKLFFGTPVYRIGLRRLKRNARAVQENMNRTEIKP

SEQ ID NO: 75686 - protein, 321 aa, Chlorobium phaeovibrioides
  REGION 1..321: note = tr|A0A5C2QL38|A0A5C2QL38_CHLPH tRNA epoxyqueuosine(34) reductase QueG OS=Chlorobium phaeovibrioides OX=1094 GN=queG PE=4 SV=1
MTTRPENPAREIRRAALKLGFAAVGFSSPTPRQQAAERYKEMIAERRHGEMDYLERGLTGRLDPHLLLEGVQTIVSLAISYHTPPRPEGATSGIARYARIADYHQVVRERAEALLLDIEHILGKRPRSYIAVDSAPVMEKEYAEKGSIGRTGKNTLLIVPSAGSYVFLAELLIDEAITEERPPLPNPCGSCTICIDACPTGALLTPGKLDATRCISYLTVELKREFTAEEAAMTGSMLFGCDACQEHCPHNQRPLIAADPAFAAKKELLQLQPEEILKLSRSQFKALFRGTPIWRIGLKRLKRNARAVLKNQNQKTSVLFG

SEQ ID NO: 75687 - protein, 315 aa, Chlorobium phaeovibrioides
  REGION 1..315: note = tr|A4SDE8|A4SDE8_CHLPM 4Fe-4S ferredoxin-type domain-containing protein OS=Chlorobium phaeovibrioides (strain DSM 265 / 1930) OX=290318 GN=Cvib_0485 PE=4 SV=1
MTTRPENPAREIRRAALKLGFAAVGFSSPTPRQQAAERYKEMIAERRHGEMDYLERGLTGRLDPHLLLEGVQTIVSLAISYHTTPSPEGTTSGIARYARIADYHQVVRERAEALLLDIEHILGKRPASYIAVDSAPVMEKEYAEKGGIGRTGKNTLLIVPSAGSYVFLAELLIDEAITEERPPLPNPCGSCTICIDACPTGALLTPGKLDATRCISYLTVELKREFTAEEAAMTGSMLFGCDACQEHCPHNQRPLIAADPAFAPKTELLQLQPEQILKLSHSQFKALFRGTPIERIGLKRLKRNARTALKNQNQN

SEQ ID NO: 75688 - protein, 321 aa, Chlorobium sp.
  REGION 1..321: note = tr|A0A533U317|A0A533U317_CHLSQ tRNA epoxyqueuosine(34) reductase QueG OS=Chlorobium sp.; OX = 1095 GN=queG PE=4 SV=1
MADSSPDLARQIRKEAARLGFAATGFSAPLPQSLSMQRLTTMIQEKRHGEMNYMEKRMVERADPSVLLPGLRTIISTAISYNYPLQYQDGFPKISKYALIDDYHTIVREKLEKLLSTIKILLGEPLEALIAVDSSPLFEKNWAEDAGIGKTGKNTLLKVPSAGSYLFLGEILLNREIRSPGITLPNFCGSCSNCLEHCPTGAFVEPGKIDASKCISYLTVELKREFTAEEATKIGDRIFGCDICQEVCPYNQQASIPAHESFRVRTELLNISTEQILNLTRSGFRELFYGTPVFRIGLRRLKRNARAVAENLKRSGKIPSV

SEQ ID NO: 75689 - protein, 317 aa, Chlorobium sp.
  REGION 1..317: note = tr|A0A4R0QJL4|A0A4R0QJL4_9CHLB tRNA epoxyqueuosine(34) reductase QueG OS=Chlorobium sp. N1; OX = 2491138 GN=queG PE=4 SV=1
MNTPEPSPSLARAIRREARRLGFSAAGFSAPPPGGRATERFRAMLREERHGEMAYLETGLEARERPELLLPELKTVVSLAMSYHQDPPGWNRRISRYALTADYHAVLRRKAEELLEAIGELAGSRPNACITVDSAPVLEKEWGERSALGRTGKNTLLIVPSAGSYVFLAELLLDMEIPEERPPLPNPCGSCRICLDACPTGALLEPGKLDARRCISYLTGELKREFTTEEASMIGGRLFGCDACQERCPHNQRPLIKADPAFEPREELLGLEPERILGMGRSEFRRLFAGTPILRIGLRRLRRNARAVLANEGKPID

SEQ ID NO: 75690 - protein, 376 aa, unidentified
  source 1..376: note = Chloroflexi bacterium
  REGION 1..376: note = tr|A0A2E0S2B2|A0A2E0S2B2_9CHLR tRNA epoxyqueuosine(34) reductase QueG OS=Chloroflexi bacterium; OX = 2026724 GN=queG PE=4 SV=1
MVKLERQIKNLGLKSGFDLVGITSAEKFVRDEQVSIARVKSGLMDGLSWYTEDRVKKANDPGMLLEDARSIISLAVSYNTRENKNKNKITGKIARYAWGEDYHDVIKQRLRCFVEELKLLAGEDVKTRIFVDDGPMNDRAAAERAGVGWFGKNTNILTQNFGSWVFLSQVITDIELAPDLPLNKTCGSCVICIEQCPTGAIVAPYVIDNTKCISFLTIELRDSIPRDLRHLMGDWIFGCDICQDVCPVNRKAVISLDPKFTKLHEFSAMDLIPLLDLSQLEFNKIFKDSAIKRAKLSGFQRNVCVALGNIGDPVAVPALRKVIQTDYPDLVRSHAAWALGRIGGKSAMEILNSHANSEKSPEVLEEIQEAICSGAS

SEQ ID NO: 75691 - protein, 225 aa, unidentified
  source 1..225: note = Chloroflexi bacterium
  REGION 1..225: note = tr|A0A1F8TMJ0|A0A1F8TMJ0_9CHLR tRNA epoxyqueuosine(34) reductase QueG (Fragment); OS = Chloroflexi bacterium RIFOXYC12_FULL_59_14 OX=1797674; GN = A3K45_01650 PE=4 SV=1
PVPNRAYTDTGPLLERDLAQRAGLGWIGKNTCLIHPRAGSYFLLAEILLGLELDPDSPIVTDHCGTCTRCLDACPTDCILPDRTLDARRCISYLTIENKADIPADLRPLIGDWIFGCDICQTACPWNRFAAPEGDASFHPRAGAAATDLVHTLALTPESFRRRFARTPLQRAKRRGLLRNAAVALGNLGDERALPALEKALDDPEPMVREHARWAMERIKTKPLP

SEQ ID NO: 75692 - protein, 316 aa, Chlorogloea sp.
  REGION 1..316: note = tr|A0A2T1EKD7|A0A2T1EKD7_9CHRO Epoxyqueuosine reductase OS=Chlorogloea sp. CCALA 695 OX=2107693 GN=queG; PE = 3 SV=1
MTASPILTSTQIKDKALEIGFHKVGIAKVDNTDVEVQHLQEWLNRGYQADMAWMNDPKRQDIRALMPEVQSIICVALNYYTPHQRPNSPQYAKISRYGWGRDYHKVMAKKLKALNNWLQTYPDVRSRYVSDTAPIQDKVWAQKAGIGWIAKNGNVIAREYGSWLFLGEILTNLDLTPDIAHTEHCGSCTRCIDACPTGAIAAPFVVDANRCIAYHTIENREEKLPEAISAHLQGWVSGCDICQDVCPWNQRFAKETDIVEFQPYAENVAPKLTDLAEISDEEWDRRFTASALRRIKPEMLRRNARANLSSATPKND

SEQ ID NO: 75693 - protein, 317 aa, Chlorogloeopsis fritschii
  REGION 1..317: note = tr|A0A433NNI4|A0A433NNI4_CHLFR Epoxyqueuosine reductase OS=Chlorogloeopsis fritschii PCC 6912 OX=211165; GN = queG PE=3 SV=1
MNQFLGTSSNEVKQKALELGFHKVGIAAVNEDDTEKQRLQAWIALGYHADMEWMTSPKRQDLKLVMSEARSLICVALNYYTPHERPEGKEYGKISRYAWGRDYHKVMHKKLKAFSAWLQGLGEDIQARYYADTGPIQDKAWAQRAGIGWIAKNGNVITREYGSWVFLGEVLTNLELNPDTPHTEHCGTCTRCIEACPTGAITQPFVVDANRCIAYHTIENRHEKLPETVTPHLQGWVAGCDICQDVCPWNQRFARITDVTEFQPYPGNIAPKLVELAQISDREWDKRFPASALRRIKPEMLRRNARANLDAFYLVQE

SEQ ID NO: 75694 - protein, 310 aa, Chloroherpeton thalassium
  REGION 1..310: note = tr|B3QWB9|B3QWB9_CHLT3 4Fe-4S ferredoxin-type domain-containing protein OS=Chloroherpeton thalassium (strain ATCC 35110 / GB-78) OX=517418 GN=Ctha_0763 PE=4; SV = 1
MAKKIGFDAIGIVPVAALGSEARAFEQWLQQDFHGDMRYMKNHFEKRVSPDLLFPGAKTVISCAVNYFHRDKKASQNGKISIYAQSLDYHFVVKQMLNELLEELQKIIGQVQGQAIVDTAPFMDKVWAVRAGIGWRGKHTNLINRKIGSYFFIGSLLLDAAIPSNDSAQRNFCGSCTACIDSCPTKAIVAPYQIDARKCIAYLNIESKPDFNEAEKKMLGEWLFGCDICQQVCPWNRFVQETKNSLLQPKKDLANLQTQDFLQLTKSSFKTLFNDTVIFRTGLRRMKRNATAVSENIKTRNFGSAEDSAT

SEQ ID NO: 75695 - protein, 310 aa, Chondrocystis sp.
  REGION 1..310: note = tr|A0A1Z4RNW8|A0A1Z4RNW8_9CHRO Epoxyqueuosine reductase OS=Chondrocystis sp. NIES-4102 OX=2005460; GN = queG PE=3 SV=1
MSINSFQVKTAAQDIGFHLVGIARIDNHQDQAVDYLKNWLALGYQADMNWMSSPKREDIRACMPEVRSLIAVALNYYTPHQHSNQPGIAKISRYGWGRDYHKVMGSKLKALSNWLRSQDPTIETRYYVDTAPIQDKVWSQRAGLGWIAKNGNMITRKYGSWVFLGEVLTNLELTPDAPHTSHCGTCTRCLESCPTNAIVKPYVVDANRCIAYHTIENRQPELPQEIANNLSGWVAGCDICQDVCPWNQRFAQETNIEDFQPYPENIQPQLTDLANLSPTAWDQRFRASALRRIKPNMWRRNAQANLNSEN

SEQ ID NO: 75696 - protein, 361 aa, Chondromyces apiculatus
  REGION 1..361: note = tr|A0A017T9I4|A0A017T9I4_9DELT Epoxyqueuosine (OQ) reductase QueG OS=Chondromyces apiculatus DSM 436; OX = 1192034 GN=CAP_3422 PE=4 SV=1
MQPELDRQVREQALALGFDVVGVARADEPLDADHDRYRAFIDQGMHGEMDYLARYVEERRRLDTSAILEGARSVICVGRRYARPSTDEGADPPVARSIARYARGRDYHNHLKKQLRKLAQFIEALAEGVRARALCDIEPVLERAWAARSGIGFVGKNGLVITPGQGSYQMLGEVVTTLDLVADVPLRERCGSCTRCLDACPTQAFDAPFVLDPRRCIAYLTIEHRSTPPAALQERVGEHVFGCDVCQEVCPFNRTAPPAPARTTPFHPLSRWEGRTLDDLVTLDQAAFDTLTEGSPVRRARRAGLARNAAIVAANRLARGAHGEEAEAAARALDAALQHDDASVREVAARGAERLGKARAT

SEQ ID NO: 75697 - protein, 362 aa, Chondromyces crocatus
  REGION 1..362: note = tr|A0A0K1EG37|A0A0K1EG37_CHOCO 4Fe-4S ferredoxin; OS = Chondromyces crocatus OX=52 GN=CMC5_039820 PE=4 SV=1
MQPELDRRVKAEALALGFDVVGVARADEPLETEHTRYREFIDQGMHGEMTYLARYVEERRRLDTTAILEGARSVICVGRRYARPRSDESEDPSLAQGVARYARGRDYHNHLKKKLRQLAKFVASLAEGARARALCDIEPVLERAWAARSGIGFVGKNGLVITPGQGSYQMLGEVVTTLDLLPDEPIRERCGSCTRCLDACPTQAFVAPFVLDPRRCVAYLTIEQRTAPEPALREGMGEHLFGCDVCQEVCPFNRTAPPPPARTAPFHPLARWEGRALDELTTLDQASFEALTEGSPVRRARREGLARSATIVAANRLARGACSDDETETARRALHAALQHDDPSVREVARWGLEHARKAPTE

SEQ ID NO: 75698 - protein, 376 aa, unidentified
  source 1..376: note = Chromatiaceae bacterium
  REGION 1..376: note = tr|A0A3D4S2F0|A0A3D4S2F0_9GAMM Epoxyqueuosine reductase OS=Chromatiaceae bacterium OX=2049432 GN=queG; PE = 3 SV=1
MTRASASPSVTSSHAKAPRQQLDASQLAALGHSIKRWGEELGFQQVGIADCDLSQSAERLQHWLAAERQGDMTYMARYRDKRTCPGELVPGTQRIISVRMDYLPQPQETLMETLDDPTRAFVSRYAVGRDYHKVLRQRLKRLARRIEDSIGPFGHRLFVDSAPVLEKPLAQKAGLGWIGKHTNLLNQRAGSWFFLGELYCDLPLPVDRPAEDHCGRCKACIDACPTDAITAPYQLDARLCISYLTIEHPGSIPEPLRARLGNRIYGCDDCQLACPWNRFARPTSETDFLPRQGLDSATLLRLFSWDEQEFLRRTEGSVIRRIGHLRWLRNIAVALGNGPPSAGVYAALHARADDQRPLVREHVHWAIRALETRDLG

SEQ ID NO: 75699 - protein, 117 aa, unidentified
  source 1..117: note = Chromatiales bacterium
  REGION 1..117: note = tr|A0A520WWV1|A0A520WWV1_9GAMM DUF1730 domain-containing protein (Fragment) OS=Chromatiales bacterium OX=2026725 GN=EX272_15145 PE=4 SV=1
MAMLKQEIVDWSHELGFQQAGVSDIDLAVAEGRLRLWLDDRFHGSMHYMERHGSKRSRPEELVPGTVRVISVRMDYLADDQDVAVDLLDHASRAYISRYALGRDYHKVMRGRLRALA

SEQ ID NO: 75700 - protein, 343 aa, unidentified
  source 1..343: note = Chromatiales bacterium
  REGION 1..343: note = tr|A0A1S9CYY6|A0A1S9CYY6_9GAMM Epoxyqueuosine reductase OS=Chromatiales bacterium USCg_Taylor OX=1934255; GN = queG PE=3 SV=1
MDYARLATEIKAWGRDLGFQQIGIAGVELGDDEHRLRDWLAAGYHGEMRYMARHGTKRSRPDELVPGTLRVISARLDYLPPGAASAQAVLDNPRLGYVARYALGRDYHRVLRQRLRRLAGRISARAGPCGYRVFSDSAPVLEKALARNGGLGWIGKHTNLINRQAGSWFFLGEIYTDLPLPADPPHAANHCGRCSACIEICPTQAILGPYRLDARRCISYLTIELRGPIPEPLRPLIGNRIFGCDDCQLVCPWNRFARLSREGDFKPRHGLDAPDLIALFNWNEEAFLKNTEGSAALGNGPASPEAAAALEQRRAHPSELVREHVAWALTRRAAEARRAGSKH

SEQ ID NO: 75701 - protein, 369 aa, Chromatium okenii
  REGION 1..369: note = tr|A0A2S7XMS7|A0A2S7XMS7_9GAMM Epoxyqueuosine reductase OS=Chromatium okenii OX=61644 GN=queG PE=3 SV=1
MNHLDKTNPSLTQNQLTQLTAQIKIWGEQLGFQQLGITDIDLAVAETRLLNWLAAGHHGTMDYMARHGTRRSRPAELVPGTLRVISARMNYWHEPPATSAQIQVDPIQAFISRYALGRDYHCVLRKRLQRLANQIAAIINPFGYRVFVDSAPVLEKPLAEKAGLGWIGKHTNLIHPRAGSWFFLGEIYTDLALPIDTPMRDHCGNCHACLDCCPTHAIIAPYQLDARRCISYLTIEYRGSIPIELRSLLGNRIYGCDDCQRVCPWNRFAIQTVEPDFMTRNHLNATTLIELFAWNETTFLQRTEGSAIRRIGYAQWLRNLAVALGNAHHSPQCITALHSRINYPDSLVREHIEWGLNQQHALEITNGII

SEQ ID NO: 75702 - protein, 353 aa, Chromatocurvus halotolerans
  REGION 1..353: note = tr|A0A4R2KKY3|A0A4R2KKY3_9GAMM Epoxyqueuosine reductase OS=Chromatocurvus halotolerans OX=1132028; GN = queG PE=3 SV=1
MVAAQSAALAGRIREWARELGFQQLGISDIDLSAHEAYLQKWLDAGYHGEMQWMASHGSKRSRPQELVPGTCRVLSVRMDYLPGGTDPEQVLASTDRAYISRYTLGRDYHKLLRKRLATLARRISDEAGGGAYRAFVDSAPVLERALAERAGLGWIAKNTMLINERVGSWFFLGEIYTDLPLPTDDARTEKHCGSCRACLDVCPTDAFTGPFQLDARRCISYLTIEHKGSIDPALRPLMGNRIFGCDDCQLVCPWNKFAQHTDEADFQPRHGLDDIDLVSLFLWDEATYEARTEGSALRRIGHERWLRNIAVALGNAPGNPSILNALERRRGHPSGLVREHVEWAIARHSSGS

SEQ ID NO: 75703 - protein, 360 aa, Chromatocurvus sp.
  REGION 1..360: note = tr|A0A2N5Y0B4|A0A2N5Y0B4_9GAMM Epoxyqueuosine reductase OS=Chromatocurvus sp. F02 OX=1905677 GN=queG; PE = 3 SV=1
MLPILTSRTEHDLRQQLEQWARDLGFSQVGVSDIQLAEHEAYLQKWLDAGYHGSMDYMARHGQKRARPAELVPDTCRVITLRMDYLPADTQPLEILNSPEKAYISRYALGRDYHKLIRKRLARLAQKLEHRAGGGEYRAFVDSAPVLERALAERAGMGWIAKNAMLINDKAGSWFFLGEIYTNLPLAADPPKQTKHCGSCRACLDICPTNAFVGPFELDARKCISYLTIEHKGSIDPALRPLMGNRIFGCDDCQLVCPWNKFAQITAEPDFQPRHQLADSDLVDLFQWDEATFLSRTEGSAIRRIGHQRWLRNIAVALGNAVTSPQVIAALESRSDHASELVREHVEWALQQHARPSSTA

SEQ ID NO: 75704 - protein, 360 aa, unidentified
  source 1..360: note = Chromobacterium amazonense
  REGION 1..360: note = tr|A0A2S9X1E4|A0A2S9X1E4_9NEIS Epoxyqueuosine reductase OS=Chromobacterium amazonense OX=1382803 GN=queG; PE = 3 SV=1
MTENPPQKPDYPELSRQIKAWAREAGFADARITRAALPPEAERELEAWLAAGYHGEMDYMARHGALRVRPAELVPGTLSVISLRMNYWPEAKPAEQVLADPSLAYLSRYALGRDYHKVLRNRLQKLAERIEGAIGAFGYRVFTDSAPLAEVALAAQAGLGWRGKHTLLLTKKQGSLFFLGEILTDLPLPPDEAEDGHCGRCTRCLDVCPTGAIVEPYKVDARRCISYLTIELKGAIPHELRPLIGNRVYGCDDCQLFCPWNRFGALSEESDFAVRHGLDRASLVELFDWSAEAFRERMAGSPIYRIGYHKWLSNLAVGLGNAPTSPEVIAALRRRLDFPDELVAEPVRWALARHGVSSGD

SEQ ID NO: 75705 - protein, 358 aa, Chromobacterium haemolyticum
  REGION 1..358: note = tr|A0A2T5P1W8|A0A2T5P1W8_9NEIS Epoxyqueuosine reductase OS=Chromobacterium haemolyticum OX=394935; GN = queG PE=3 SV=1
MTENSLQKTDYPELARQIKAWARELGFADARIGRAGLPPEAEQKLNAWLAAGYHGEMDYMARHGSLRVKPADLVPGTLSVISLRMHYWPQARASAEVLADGGKAYLSRYALGRDYHKVLRNRLQALAERIKREIGDFGYRVFTDSAPVAEVALAAQAGLGWRGKHTLLLTKNEGSLFFLGEVFTDLPLPEDEAEDGHCGRCTRCIDVCPTAAIVAPYTVDARRCISYLTIELKRAIPEEMRPLIGNRVYGCDDCQLFCPWNRFAVDSRETDFAVRHGLDDVSLLELFAWSEAEFKEKMAGSPIYRIGYLKWLSNLAVGLGNAPTTPEVVAGLRARLDFPDEMVAEPVRWALGRHGVIV

SEQ ID NO: 75706 - protein, 358 aa, Chromobacterium haemolyticum
  REGION 1..358: note = tr|A0A1W0D6S6|A0A1W0D6S6_9NEIS Epoxyqueuosine reductase OS=Chromobacterium haemolyticum OX=394935; GN = queG PE=3 SV=1
MTENSLQKTDYPELARQIKAWACELGFADARIGRAGLPPEAEQKLNAWLAAGYHGEMDYMARHGSLRVKPADLVPGTLSVISLRMHYWPQARASAEVLADGGKAYLSRYALGRDYHKVLRNRLQALADRIKREIGDFGYRVFTDSAPVAEVALAAQAGLGWRGKHTLLLTKNEGSLFFLGEVFTDLPLPEDEAEDGHCGRCTRCIDVCPTAAIVAPYTVDARRCISYLTIELKRAIPEEMRPLIGNRVYGCDDCQLFCPWNRFAVDTRETDFAVRHGLDDVSLLELFAWSEAEFKEKMAGSPIYRIGYLKWLSNLAVGLGNAPTTPEVVAGLRARLDFPDEMVAEPVRWALGRHGVIV

SEQ ID NO: 75707 - protein, 358 aa, Chromobacterium sp.
  REGION 1..358: note = tr|A0A5C1DIG2|A0A5C1DIG2_9NEIS Epoxyqueuosine reductase OS=Chromobacterium sp. 257-1 OX=2605945 GN=queG; PE = 3 SV=1
MTENSPQKPDYPELSRQIKAWAREAGFADARITQAELPPEAEARLNDWLAAGYHGEMDYMARHGALRVKPAELVPGTVSVISLRMNYWPASTSAEQVLADPSRAYLSRYALGRDYHKVLRNRLQKLAERIEAAVGAFGYRVFTDSAPLAEVALASQAGLGWRGKHTLLLTKKQGSLFFLGEILTDLPLPPDAPEDGHCGRCTRCLDVCPTGAIVEPYTVDARRCISYLTIELKGAIPHELRPLIGNRVYGCDDCQLFCPWNRFGALTEEADFAVRHGLDAASLVELFDWSAEAFRERMAGSPIYRIGYAKWLSNLAVGLGNAPSSPEVLAALRRRQDYPDELVAEPVRWALARHGVSA

SEQ ID NO: 75708 - protein, 358 aa, Chromobacterium sp.
  REGION 1..358: note = tr|A0A2T5NMA4|A0A2T5NMA4_9NEIS Epoxyqueuosine reductase OS=Chromobacterium sp. Panama OX=2161826 GN=queG; PE = 3 SV=1
MTENSLQKPDYPELARQIKAWARELGFADARIGRAGLPPEAEQKLNAWLAAGHHGEMDYMARHGALRVKPADLVPGTLSVISLRMHYWPQARASAEVLADGGKAYLSRYALGRDYHKVLRNRLQALADRIKREIGEFGYRVFTDSAPVAEVALAAQAGLGWRGKHTLLLTKNEGSLFFLGEVFTDLPLPEDEAEDGHCGRCTRCIDVCPTAAIVAPYTVDARRCISYLTIELKRAIPEEMRPLIGNRVYGCDDCQLFCPWNRFAVDTRETDFAVRHGLDDVSLLELFAWSEAEFKEKMAGSPIYRIGYLKWLSNLAVGLGNAPTAPEVVAGLRARLDFPDEMVAEPVRWALGRHGVIV

SEQ ID NO: 75709 - protein, 358 aa, unidentified
  source 1..358: note = Chromobacterium sphagni
  REGION 1..358: note = tr|A0A1S1X0Y1|A0A1S1X0Y1_9NEIS Epoxyqueuosine reductase OS=Chromobacterium sphagni OX=1903179 GN=queG; PE = 3 SV=1
MTENSPQKPDYPELSRQIKAWAVEAGFAAARITRASLPDEAEQRLQAWLAAGFHGEMDYMARHGSLRLRPAELVPGTLSVISLRMNYWPAARAAEQVLADPSRAYLSRYALGRDYHKVLRNRLQKLAERIQQHIGSFGFRVFTDSAPLAEVALASQAGLGWRGKHTLLLTKNQGSLFFLGEILTDLPLPADDAEDGHCGRCRKCLDVCPTGAIVEPYSVDARRCISYLTIELKGVIPQALRPLIGNRVYGCDDCQLFCPWNRFAVETAETDFAVRHGLDDASLVELFDWSADDFRERMAGSPIYRIGYHKWLSNLAVGLGNAPTSPEVIAALRRRLDFPDELVAEPVRWALSRHGESC

SEQ ID NO: 75710 - protein, 358 aa, unidentified
  source 1..358: note = Chromobacterium vaccinii
  REGION 1..358: note = tr|A0A2L2B4U4|A0A2L2B4U4_9NEIS Epoxyqueuosine reductase OS=Chromobacterium vaccinii OX=1108595 GN=queG; PE = 3 SV=1
MTENPPQKPDYPELSRQIKAWAREAGFADARVTRAALPPEAEQRLEAWLTAGHHGEMDYMARHGAMRVRPAELVPGTLSVISLRMNYWPGGESAEQVLADPSRAYLSRYALGRDYHKVLRNRLQKLAERIEGAVGSFGYRVFTDSAPLAEVALASQAGLGWRGKHTLLLTKRQGSLFFLGEILTDLPLPPDEAEDGHCGRCTRCLDVCPTGAIIEPYTVDARRCISYLTIELKGPIPEPLRPLIGNRVYGCDDCQLFCPWNRFGALTAEADFAVRHGLDGASLVELFDWSADEFRERMAGSPIYRIGYHKWLSNLAVGLGNAPTTPEVVAALRRRLDFPDELVAEPVRWALARHGQSC

SEQ ID NO: 75711 - protein, 358 aa, unidentified
  source 1..358: note = Chromobacterium vaccinii
  REGION 1..358: note = tr|A0A1D9LG76|A0A1D9LG76_9NEIS Epoxyqueuosine reductase OS=Chromobacterium vaccinii OX=1108595 GN=queG; PE = 3 SV=1
MTENPPQKPDYPELSRQIKAWAREAGFADARVTRAALPPEAEQRLEAWLAAGHHGEMDYMARHGAMRVRPAELVPGTLSVISLRMNYWPGGEPAEQVLADPSRAYLSRYALGRDYHKVLRNRLQKLAERIEGAVGSFGHRVFTDSAPLAEVALASQAGLGWRGKHTLLLTKRQGSLFFLGEILTDLPLPPDEAEDGHCGRCTRCLDVCPTGAIIEPYTVDARRCISYLTIELKGAIPEPLRPLIGNRVYGCDDCQLFCPWNRFGALTAEADFAVRHGLDGASLVELFDWSEDEFRERMAGSPIYRIGYHKWLSNLAVGLGNAPTTPEVVAALRRRLDFPDELVAEPVRWALARHGQSC

SEQ ID NO: 75712 - protein, 358 aa, Chromobacterium violaceum
  REGION 1..358: note = tr|A0A202BBV1|A0A202BBV1_CHRVL Epoxyqueuosine reductase OS=Chromobacterium violaceum OX=536 GN=queG PE=3; SV = 1
MTENPPQKPDYPELSRQIKAWAREAGFADARVTRAALPPEAEQRLEAWLAAGHHGEMDYMARHGALRVRPAELVPGTLSVISLRMNYWPGSEPAEQVLADPSRAYLSRYALGRDYHKVLRNRLQKLAERIEGAVGSFGYRVFTDSAPLAEVALASQAGLGWRGKHTLLLTKRQGSLFFLGEILTDLPLPPDEAEDGHCGRCTRCLDVCPTGAIVEPYTVDARRCISYLTIELKGAIPEPLRPLIGNRVYGCDDCQLFCPWNRFGALTAEADFAVRHGLDCASLVELFDWSADEFRERMAGSPIYRIGYHKWLSNLAVGLGNAPTTPEVVAALRRRLDFPDELVAEPVRWALARHGQSC

SEQ ID NO: 75713 - protein, 358 aa, Chromobacterium violaceum
  REGION 1..358: note = tr|Q7NRG1|Q7NRG1_CHRVO Epoxyqueuosine reductase; OS = Chromobacterium violaceum (strain ATCC 12472 / DSM 30191 / JCM 1249 / NBRC 12614 / NCIMB 9131 / NCTC 9757); OX = 2433 65 GN=queG PE=3 SV=1
MTENPPQKPDYPELSRQIKAWAREAGFADARVTRAALPPEAEQRLEAWLAAGHHGEMDYMARHGALRVRPAELVPGTLSVISLRMNYWPGSEPAERVLADPSRAYLSRYALGRDYHKVLRNRLQKLAERIEGAVGSFGYRVFTDSAPLAEVALASQAGLGWRGKHTLLLTKRQGSLFFLGEILTDLPLPPDEAEDGHCGRCTRCLDVCPTGAIVEPYTVDARRCISYLTIELKGAIPEPLRPLIGNRVYGCDDCQLFCPWNRFGALTAEADFAVRHGLDCASLVELFDWSADEFRERMAGSPIYRIGYHKWLSNLAVGLGNSPTTPEVVAALRRRLDFPDELVAEPVRWALARHGQSC

SEQ ID NO: 75714 - protein, 366 aa, Chromohalobacter canadensis
  REGION 1..366: note = tr|A0A285VJ85|A0A285VJ85_9GAMM Epoxyqueuosine reductase OS=Chromohalobacter canadensis OX=141389 GN=queG; PE = 3 SV=1
MSSSSPIDYAALADRIHTWGRELGFQQVGITDTDLEAHERYLERWLAAGYHGEMHFMAKHGHKRTRPEELIPGTLRVISVRMDYLPPEVETTKVLGQPERAYVSRYALGRDYHKLIRKRLATLAKRIEDEVGAYGYRAFVDSAPVMERALAQKAGLGWFGKNAMLLNPQAGSLFFLGELYTDLPLPVDAPFESEHCGKCSNCQTACPTGAIVDDKVIDSRRCISYLTIELAGSIPEEYRKAMGNRVYGCDDCQLVCPFTRFTRASQEEDFAPRHDLDRASLIRLFAWSEEEFLMRTEGSAIRRIGYERWLRNLAIGLGNAPWSERVEGALRARLAYPSDLVREHVRWGLEQQRHKREQLITSHVSA

SEQ ID NO: 75715 - protein, 366 aa, Chromohalobacter japonicus; identical to SEQ ID NO: 75714
  REGION 1..366: note = tr|A0A1Q8TH51|A0A1Q8TH51_9GAMM Epoxyqueuosine reductase OS=Chromohalobacter japonicus OX=223900 GN=queG; PE = 3 SV=1

SEQ ID NO: 75716 - protein, 366 aa, Chromohalobacter marismortui
  REGION 1..366: note = tr|A0A4R7NVJ2|A0A4R7NVJ2_9GAMM Epoxyqueuosine reductase OS=Chromohalobacter marismortui OX=42055 GN=queG; PE = 3 SV=1
MSSSSPIDHAALADRIHTWGRELGFQQVGITDTDLAAHERYLERWLAAGYHGEMHFMAKHGHKRTRPEELIPGTLRVISVRMDYLPPEVETTKVLGQPERAYVSRYALGRDYHKLIRKRLATLAKRIEDEVGAYGYRAFVDSAPVMERALAQKAGLGWFGKNAMLLNPQAGSLFFLGELYTDLPLPVDAPFESEHCGKCSRCQTACPTGAIVDDKVIDSRRCISYLTIELAGSIPEEYRKAMGNRVYGCDDCQLVCPFTRFTRASQEEDFAPRHDLDRASLIRLFAWSEEEFLMRTEGSAIRRIGYERWLRNLAIGLGNAPWSERVEGALRARLAYPSDLVREHVRWGLEQQRHKREQLIVSHVDA

SEQ ID NO: 75717 - protein, 374 aa, Chromohalobacter salexigens
  REGION 1..374: note = tr|A0A4Q0HL75|A0A4Q0HL75_CHRSL Epoxyqueuosine reductase OS=Chromohalobacter salexigens OX=158080 GN=queG; PE = 3 SV=1
MSSSAPTDYAALADRIHTWGRELGFQQVGITDTDLAAHERYLERWLAAGYHGEMHFMAKHGSKRTRPEELVPGTLRVVSVRMDYLPPEVETTKVLGQPERAYISRYALGRDYHKLIRKRLATLAKRIEDEVGAYGYRAFVDSAPVMERALAQKAGLGWFGKNAMLLNPQAGSLFFLGELYTDLPLPVDAPFDSEHCGKCSRCQTACPTGAIVDDKVIDSRRCISYLTIELAGSIPEEYREAMGNRVYGCDDCQLVCPFTRFTRVSREDDFAPRHDLDRASLVRLFAWSEEEFLARTEGSAIRRIGYERWLRNLAIGLGNAPWSDQVESALRARLAYPSDLVREHVRWGLEQQRRKRERRIASDVDAPAAPERSA

SEQ ID NO: 75718 - protein, 374 aa, Chromohalobacter salexigens
  REGION 1..374: note = tr|Q1QY32|Q1QY32_CHRSD Epoxyqueuosine reductase; OS = Chromohalobacter salexigens (strain DSM 3043 / ATCC BAA-138 / NCIMB 13768) OX=290398 GN=queG PE=3 SV=1
MSSSAPIDYAALADRIHTWGRELGFQQVGITDTDLAAHERYLERWLAAGYHGEMHFMAKHGSKRTRPEELVPGTLRVVSVRMDYLPPEVETTKVLGQPERAYISRYALGRDYHKLIRKRLATLAKRIEDEVGAYGYRAFVDSAPVMERALAQKAGLGWFGKNAMLLNPQAGSLFFLGELYTDLPLPVDAPFDSEHCGKCSRCQTACPTGAIVDDKVIDSRRCISYLTIELAGSIPEEYREAMGNRVYGCDDCQLVCPFTRFTRVSREDDFAPRHDLDRASLVRLFAWSEEEFLARTEGSAIRRIGYERWLRNLAIGLGNAPWSDQVESALRARLAYPSDLVREHVRWGLEQQRRKRERRIASDVDAPAAPERSA

SEQ ID NO: 75719 - protein, 314 aa, unidentified
  source 1..314: note = Chroococcales cyanobacterium
  REGION 1..314: note = tr|A0A2G7GIU6|A0A2G7GIU6_9CHRO Epoxyqueuosine reductase OS=Chroococcales cyanobacterium IPPAS B-1203; OX = 2049454 GN=queG PE=3 SV=1
MDTSWIKQKALELGFHRVGIASVDDDATESQRLQAWLALGYQADMAWMANPKRQNIQLVMPDVRSLICVALNYYTPHQRPLDPKYAKLSRYGWGRDYHKVLHKKLKLLSHWLEAQIQGIQVRYYADTGPVQDKVWAQKAGIGWIAKNGNVITREYGSWVFLGEILTNLNLTPDRPHTEHCGNCTRCIDACPTGAITQPFVVDANRCIAYHTIENRSEKLPEAVASQLNGWVAGCDICQDVCPWNQRFAKETDVAEFQPYPWNIAPTLAELAEISDTEWNKQFPASALRRIKPEMLRRNAKANLQGTARMSTSQQ

SEQ ID NO: 75720 - protein, 315 aa, unidentified
  source 1..315: note = Chroococcales cyanobacterium
  REGION 1..315: note = tr|A0A3N5IKL6|A0A3N5IKL6_9CHRO Epoxyqueuosine reductase OS=Chroococcales cyanobacterium metabat2.561; OX = 2485785 GN=queG PE=3 SV=1
MVTETQIKEKALELGFHGVGIASVDSQDSAVSHLKSWLERGYHADMDWMTNPKRQNIKTLWPEVRSLICLALNYYTPQQHSQEQNHGKISRYAWGRDYHKVLSKKLKALSQWLESQGEQIQTRYYVDTGPVQDKVWAQRAGIGWIAKNGNLITRNYGSWVFLGEILTNLPLEPDRPHSAHCGTCSRCLSACPTQAIVSPSVVDANRCIAYHTIENRAVTLPTEIAKNLQGWVAGCDICQDVCPWNQRFAQVTDVEDFQPRPENLSPRLEELANLTIEEWDRRFISSALRRIKPQQWRRNAQANLAHSPNPVQDDN

SEQ ID NO: 75721 - protein, 319 aa, unidentified
  source 1..319: note = Chroococcidiopsis cubana
  REGION 1..319: note = tr|A0A433W0V1|A0A433W0V1_9CYAN Epoxyqueuosine reductase OS=Chroococcidiopsis cubana SAG 39.79 OX=388085; GN = queG PE=3 SV=1
MTNLTSDQIKQKALELGFHKVGIAAVEAVGTAERQRLQAWLQLGYQADMAWMANPKREDIRLVMPEVRSLICVALNYYTPHQHSTDPTNAKISRYGWGRDYHKVLYKKLKALSQWLRSQAADIQTRFYADTGPIQDKAWAQQAGIGWIAKNGNVITREYGSWVFLGEVLTDLVLTPDRPHTQHCGNCTRCIEACPTQAITQPFVVDANRCIAYHTIENRAEKLPEAIASRLDGWVAGCDICQDVCPWNQRFARTTDINEFHPYAHNLAPKLTELATIEDGEWDRRFTGSALRRVKPEMLRRNARANLESSATIVYSDSL

SEQ ID NO: 75722 - protein, 316 aa, unidentified
  source 1..316: note = Chroococcidiopsis sp.
  REGION 1..316: note = tr|A0A2S6VGN3|A0A2S6VGN3_9CYAN Epoxyqueuosine reductase OS=Chroococcidiopsis sp. TS-821 OX=1378066; GN = queG PE=3 SV=1
MSIDTTRIKQKALELGFHRVGIAAVEDGMTNSQHLQAWLALGYQADMAWMANPKRQDIKLVMPDVRSLICVALNYYTPHQRPQEAKYAKISRYGWGRDYHKVLHKKLKSLSTWLEAQAEGIKARYYADTGPVQDKVWAQKAGIGWIAKNGNVITREYGSWVFLGEVLTNLSLTPDQPHTQHCGTCTRCLEACPTGAIAQPFVVDANRCIAYHTIENRSEKLPDAVAAQLHGWVAGCDICQDVCPWNQRFAKETDVAEFQPYSWNIAPTLAELAEISDAEWNKRFPASALRRIKPEMLRRNAKANLQGAANMSTSQQ

SEQ ID NO: 75723 - protein, 345 aa, unidentified
  source 1..345: note = Chroococcidiopsis thermalis
  REGION 1..345: note = tr|K9U246|K9U246_CHRTP Epoxyqueuosine reductase; OS = Chroococcidiopsis thermalis (strain PCC 7203) OX=251229; GN = queG PE=3 SV=1
MKQLSVISRELRELREQELSTNNHQPMTNLTSDQIKQKALELGFHKVGIAAVEAVGTAERQRLQAWLQLGYQADMAWMANPKREDIRLVMPEVRSLICVALNYYTPHQHSTDPTNAKISRYGWGRDYHKVLHKKLKALSQWLRSQAADIQTRFYADTGPIQDKAWAQQAGIGWIAKNGNVITREYGSWVFLGEVLTDLVLTPDRPHTQHCGNCTRCIEACPTQAITQPFVVDANRCIAYHTIENRAEKLPEAIASRLDGWVAGCDICQDVCPWNQRFARTTDINEFHPYAHNLAPKLTELATIEDGEWDRRFTGSALRRVKPEMLRRNARANLESSATIVYSDSL

SEQ ID NO: 75724 - protein, 316 aa, unidentified
  source 1..316: note = Chroogloeocystis siderophila
  REGION 1..316: note = tr|A0A1U7HV15|A0A1U7HV15_9CHRO Epoxyqueuosine reductase OS=Chroogloeocystis siderophila 5.2 s.c.1; OX = 247279 GN=queG PE=3 SV=1
MSIDTTQIKQKALELGFHQVGIAAVDQGVTEPQYLQAWLALGYQADMAWMANPKRQDIKLVMPDVRSLICVAINYYTPHQRPQEAKYAKISRYGWGRDYHKVLHKKLKLFSTWLEAQAEGIKARYYADTGPVQDKVWAQQAGIGWIAKNGNVITRKYGSWVFLGEVLTNLSLIPDQPHTEHCGTCTRCLDACPTDAIAQPFIVDANRCIAYHTIENRSEELPDAVAAQLHGWVAGCDICQDVCPWNQRFAKETDVVEFQPYPWNISPTLAELAEISDAEWDKRFPASALRRIKPEMLRRNAKANLQGAAIMSTSQQ

SEQ ID NO: 75725 - protein, 315 aa, unidentified
  source 1..315: note = Chryseobacterium angstadtii
  REGION 1..315: note = tr|A0A0J7I304|A0A0J7I304_9FLAO Epoxyqueuosine reductase OS=Chryseobacterium angstadtii OX=558151 GN=queG; PE = 3 SV=1
MLNSGAEKNSQLIKSKAERFGFQSCGISKAEFLEEDAPNLEKWLKNNFHGEMKYMENHFDKRLDPRLLVEGSKSVISLSYNYFPEEKISALENYKISKYAYAEDYHEVVKEILREMVAELQEEIGEFGFRVFVDSAPVLERSWARKSGIGWVGKNANLITKQNGSFYFLAEIICDLELIPDHATTDHCGTCRKCIDACPTDAIVSEKIIDGSRCISYATIELKNEIPDHFKNRMEDWMFGCDICQDVCPWNRFSAPNLQSRFAPNESLKNFKKEEWREITQEIFSEIFRKSPVKRTKFAGLKRNIEFLERSSDVD

SEQ ID NO: 75726 - protein, 318 aa, Chryseobacterium antarcticum
  REGION 1..318: note = tr|A0A3S4WQT4|A0A3S4WQT4_9FLAO Epoxyqueuosine reductase OS=Chryseobacterium antarcticum OX=266748; GN = queG PE=3 SV=1
MQSMLQSPEFNSNLIKAKAKKFGFQNCGISRADFLEEDARPFESWLKHNYQGEMSYMENYFDKRLDPRRLVEGSKSVISLSYNYFPEKNLANLGNLKISKYAYGEDYHEIIKEILREMVAELKDEIGDIECRVFTDSAPILERSWARKSGIGWVGKNANLITKQTGSFYFLAEIICDLELVEDYETTDHCGSCRKCIDACPTDAIVADRVIDGSKCISYATIELKNEIPAHFKGKMEDWMFGCDICQDVCPWNRFSKPHQQEKFKPNSLLQNLEKSDWQELSQELFSEIFRKSPVKRTKFAGLKRNIEFLTDSKTSNF

SEQ ID NO: 75727 - protein, 310 aa, Chryseobacterium aquaticum
  REGION 1..310: note = tr|A0A0Q3SHT3|A0A0Q3SHT3_9FLAO Epoxyqueuosine reductase OS=Chryseobacterium aquaticum OX=452084 GN=queG; PE = 3 SV=1
MNSTAEKYTQLIKTKAKSFGFQNCGVSKAGFLEEDAPHLEKWLKNNFHGEMKYMENHFDKRLDPRLLVEGSKSVISLSYNYFPEEKISTLENFKISKYAYAEDYHEVIKEILRDMVSELQQEIGDFSFRVFVDSAPVLERSWAKKSGIGWVGKNANLITKQSGSFYFLAEIICDLELISDSETTDHCGTCRKCIDACPTDAIVSDKIIDGSKCISYATIELKEEIPDYFKNKMEDWMFGCDICQDVCPWNRFSAPNLQSRFKPNEFLKNFKKREWKELTQEIFSEIFRKSPVKRTKFAGLKRNIEFLDKS

SEQ ID NO: 75728 - protein, 312 aa, Chryseobacterium aquifrigidense
  REGION 1..312: note = tr|A0A543EFX2|A0A543EFX2_9FLAO Epoxyqueuosine reductase OS=Chryseobacterium aquifrigidense OX=558021; GN = queG PE=3 SV=1
MNAGAEKYSELIKSKAKSFGFQSCGISRADFLEEDAPHLEKWLKNNYNGEMKYMENHFDKRLDPRLLVEGSKSVISLSYNYFPEEKISVLENFKISKYAYAEDYHEVIKEILREMVAELQEEIGEFGFRVFVDSAPVMERAWAKKSGIGWVGKNANLITKQSGSFYFLAEIICDLELIPDHATTDHCGSCRKCIDACPTDAIVSEKIIDGSRCISYATIELKNEIPDYFKDKMEDWMFGCDICQDVCPWNRFSAPNKQSRFQPNEALKNFKKGEWKELTQEIFSEIFRKSPVKRTKFAGLKRNIEFLQKSSD

SEQ ID NO: 75729 - protein, 308 aa, unidentified
  source 1..308: note = Chryseobacterium arachidiradicis
  REGION 1..308: note = tr|A0A420DAP6|A0A420DAP6_9FLAO Epoxyqueuosine reductase OS=Chryseobacterium arachidiradicis OX=1617282; GN = queG PE=3 SV=1
MSSKEKYSNLIKSKALAFGFQSCGISKADFLEEEAPHLEQWLRNNFHGEMKYMENYFDKRLDPRLLVEGSKSVISLSYNYFPGEVQTNQDYKLAKYAYGEDYHEVIKEKLRKLVAELQQEIGEFSFRIFVDSAPVLEKAWAKKSGIGWVGKNSNLITKKNGSFYFLAEIICDLDLIEDYPVTDHCGSCTKCIDACPTQAIISDKIIDGSKCISYATIELKDQIPDFFRNKMEDWVFGCDICQDVCPWNRFSAPTLEEKFKPNSEIKNFTKQEWKDITQEVFSSVFRKSAVKRTKFAGLKRNLDFLSEE

SEQ ID NO: 75730 - protein, 312 aa, unidentified
  source 1..312: note = Chryseobacterium arachidis
  REGION 1..312: note = tr|A0A1M5JUN9|A0A1M5JUN9_9FLAO Epoxyqueuosine reductase OS=Chryseobacterium arachidis OX=1416778 GN=queG; PE = 3 SV=1
MNSNAEKYSQLIKSKAKSFGFQSCGISKADFLEEDAKPLEAWLKNNFHGEMKYMENYFDKRLDPRLLVEGSKSVISLSYNYFPEEKISTIENFKISKYAYAEDYHEVIKDILREMVAELQEEIGEFGFRVFVDSAPVLERSWARKSGIGWVGKNANLITKQNGSFYFLAEIICDLELIADHETTNHCGTCRKCIDACPTNAIISEKLVDGSKCISYATIELKDAIPDYFKDKMDDWMFGCDVCQDVCPWNRFSAPNLQSKFSPNEALKNFKKGEWRELTQELFSEIFRKSPVKRTKFAGLKRNIEFLEKSSE

SEQ ID NO: 75731 - protein, 312 aa, Chryseobacterium arthrosphaerae
  REGION 1..312: note = tr|A0A1B8ZMV6|A0A1B8ZMV6_9FLAO Epoxyqueuosine reductase OS=Chryseobacterium arthrosphaerae OX=651561; GN = queG PE=3 SV=1
MNAGAEKYTQLIKSKAKSFGFQSCGVSKADFLEEDAPHLEKWLKNNFNGEMKYMENHFDKRLDPRLLVEGSRSVISLSYNYFPEEKIPILENYKISKYAYAEDYHEVIKEILREMVAELQEEIGEFGFRVFVDSAPVLERSWARKSGIGWVGKNANLITRQNGSFYFLAEIICDLELIPDHATTDHCGTCRKCIDACPTDAIVSEKIIDGSRCISYATIELKNEIPDHFKGKMEDWMFGCDICQDVCPWNRFSAPHKQSRFKPNEALKNFTKGEWKDLTQEIFSEIFRKSPVKRTKFTGLKRNIEFLNNSSD

SEQ ID NO: 75732 - protein, 312 aa, unidentified
  source 1..312: note = Chryseobacterium artocarpi
  REGION 1..312: note = tr|A0A1B8ZXZ6|A0A1B8ZXZ6_9FLAO Epoxyqueuosine reductase OS=Chryseobacterium artocarpi OX=1414727 GN=queG; PE = 3 SV=1
MNAGAEKYSQLIKSKAKSFGFQSCGISKADFLEEDAAHLEKWLKNNFNGEMKYMENHFDKRLDPRLLVEGSKSVISLSYNYFPEEKISILENFKISKYAYAEDYHEVIKEILREMVAELQEEIGEFGFRVFVDSAPILERSWARKSGIGWVGKNANLITKQNGSFYFLAEIICDLELIPDHETTDHCGTCRKCIDACPTDAIVSEKIIDGSRCISYATIELKNEIPDSFKDKMEDWMFGCDICQDVCPWNRFSAPHQQSRFKPNEALKNFKKGEWKDLTQEIFSEIFKKSPVKRTKFAGLKRNIEFLQKSSD

SEQ ID NO: 75733 - protein, 314 aa, Chryseobacterium balustinum
  REGION 1..314: note = tr|A0A3G6TM77|A0A3G6TM77_9FLAO Epoxyqueuosine reductase OS=Chryseobacterium balustinum OX=246 GN=queG; PE = 3 SV=1
MNSTAEKYSQLIKSKAKSFGFQNCGISKADFLEEDAHHLEKWLKNNFHGEMKYMENHFDKRLDPRLLVEGSKSVISLSYNYFPEEKISALENFKISKYAYAEDYHEVVKEILRDMVSELQKEIGDFEFRVFVDSAPVLERSWAKKSGIGWVGKNANLITKQSGSFYFLAEIICDLDLISDHETTDHCGSCRKCIDACPTDAIVSEKIVDGSRCISYATIELKTEIPDYFKDKMEDWMFGCDICQDVCPWNRFSAPNIQAKFKPNEALKNFKKGEWKELTQEIFSEIFRKSPVKRTKFAGLKRNIEFLNQSSKEL

SEQ ID NO: 75734 - protein, 312 aa, unidentified
  source 1..312: note = Chryseobacterium bernardetii
  REGION 1..312: note = tr|A0A3G6TH43|A0A3G6TH43_9FLAO Epoxyqueuosine reductase OS=Chryseobacterium bernardetii OX=1241978; GN = queG PE=3 SV=1
MNAGAEKYSELIKSKAKSFGFQNCGISKADFLEEDAPHLEKWLKNNFNGEMKYMENHFDKRLDPRLLVEGSKSVISLSYNYFPEEKISVLENFKISKYAYAEDYHEVIKEILREMVAELQEEIGEFGFRVFVDSAPVLERSWARKSGIGWVGKNANLITKQNGSFYFLAEIICDLELIVDHETTDHCGTCRKCIDACPTDAIVSEKIIDGSRCISYATIELKNEIPDHFKNKMEDWMFGCDICQDVCPWNRFAAPHKQSRFKPNEALKNFKKGEWKELTQEIFSEIFRKSPVKRTKFAGLKRNIEFLDRSSD

SEQ ID NO: 75735 - protein, 307 aa, Chryseobacterium bovis
  REGION 1..307: note = tr|A0A1U7PXP6|A0A1U7PXP6_9FLAO Epoxyqueuosine reductase OS=Chryseobacterium bovis DSM 19482 OX=1121284; GN = queG PE=3 SV=1
MNLQEKYSRLIKSKASAFGFQSCGISKADFLAEEAPRLEKWLRNGFHGKMGYMENHFDKRLDPRLLVEGARSVISLSYNYFPEKEQNPGNYKIAKYAYGEDYHDVIKEKLRHLVSELQDEVGEFGFRVFVDSAPVLEKAWARKSGIGWVGKNSNLITKQHGSFYFLAEIICDLDLSEDSPVTDHCGSCTRCIDACPTQAIVSDKIIDGSRCISYATIELKDQIPDSFKDKMEDWMFGCDICQNVCPWNRFSAPTLEEKFRPKPAIIDFTKQDWKEITQEIFSSVFKGSAVKRTKFAGLKRNLDFLSE

SEQ ID NO: 75736 - protein, 314 aa, unidentified
  source 1..314: note = Chryseobacterium carnipullorum
  REGION 1..314: note = tr|A0A3G6M969|A0A3G6M969_9FLAO Epoxyqueuosine reductase OS=Chryseobacterium carnipullorum OX=1124835; GN = queG PE=3 SV=1
MNSSAEKYSQLIKSKAERFGFQSCGISKAEFLEEDAPNLEKWLKNNFHGEMKYMENHFDKRLDPRLLVEGSRSVISLSYNYFPKEKISALENYKISKYAYAEDYHEVVKEILREMVSELQDEIGAFGFRVFVDSAPVMERSWARKSGIGWVGKNANLITRQNGSFYFLAEIICDLELVPDHATTDHCGTCRKCIDACPTDAIVSEKIIDGSRCISYATIELKNEIPDHFKDKMEDWMFGCDICQDVCPWNRFAAPNKQSRFAPNESLKNFKKEEWKEITQEIFSEIFRKSPVKRTKFAGLKRNIEFLEGSSGKI

SEQ ID NO: 75737 - protein, 317 aa, unidentified
  source 1..317: note = Chryseobacterium carnipullorum
  REGION 1..317: note = tr|A0A1M7LCB6|A0A1M7LCB6_9FLAO Epoxyqueuosine reductase OS=Chryseobacterium carnipullorum OX=1124835; GN = queG PE=3 SV=1
MKILNSSAEKYSQLIKSKAERFGFQSCGISKAEFLEEDAPNLEKWLKNNFHGEMKYMENHFDKRLDPRLLVEGSRSVISLSYNYFPKEKISALENYKISKYAYAEDYHEVVKEILREMVSELQDEIGAFGFRVFVDSAPVMERSWARKSGIGWVGKNANLITRQNGSFYFLAEIICDLELVPDHATTDHCGTCRKCIDACPTDAIVSEKIIDGSRCISYATIELKNEIPDHFKDKMEDWMFGCDICQDVCPWNRFAAPNKQSRFAPNESLKNFKKEEWKEITQEIFSEIFRKSPVKRTKFAGLKRNIEFLEGSSGKI

SEQ ID NO: 75738 - protein, 319 aa, unidentified
  source 1..319: note = Chryseobacterium carnis
  REGION 1..319: note = tr|A0A3G8XFU7|A0A3G8XFU7_9FLAO Epoxyqueuosine reductase OS=Chryseobacterium carnis OX=1241979 GN=queG; PE = 3 SV=1
MLQNAENYANLIKTKAKKFGFQNCGISRAGFLEEDAKPLERYLQNNFHGEMSYMANYFDKRLDPTLLVEGAKSVISLSYNYFPEEKIAGIEDLKISKYAYGQDYHEIIKEILKEMVAELQDEIGDFTCRVFTDSAPILERSWGRKSGIGWVGKNANLITKQTGSFYFLAEIICDLELKEDFATTDHCGSCRKCIDACPTEAIVGDRVIDGSKCISYATIELKNEIPDHFKGKMEDWIFGCDICQDVCPWNRFSKPHQQEKFKPNPLLKSMNKHEWTDLTQEVFSEIFKKSPVKRTKFAGLKRNIDFINQGIKNDTDLIL

SEQ ID NO: 75739 - protein, 311 aa, Chryseobacterium chaponense
  REGION 1..311: note = tr|A0A1N7K4L5|A0A1N7K4L5_9FLAO Epoxyqueuosine reductase OS=Chryseobacterium chaponense OX=713588 GN=queG; PE = 3 SV=1
MKSTTEKYSTLIKAKAKKFGFQNCGISKAGFLESDAAALEKWLKNDYHGKMSYMENHFDKRLDPTVLVEGSRSVISLSYNYFPDEKLPSLNAFKISKYAYGEDYHVIIKEILQEMVAELKEEIGDFECRVFTDSAPILERSWARKSGIGWVGKNANLITKQSGSFYFLAEIICDLELIEDHETTDHCGTCTKCIEACPTNAIISDKIIDGSKCISYATIELKNEIPESFTNKMEDWMFGCDICQDVCPWNRFSSPHLQERFKPNALLKTYQKEDWKELTQELFSEIFRKSPVKRTKFAGLERNIAFLSNKE

SEQ ID NO: 75740 - protein, 312 aa, unidentified
  source 1..312: note = Chryseobacterium contaminans
  REGION 1..312: note = tr|A0A1M7BAY9|A0A1M7BAY9_9FLAO Epoxyqueuosine reductase OS=Chryseobacterium contaminans OX=1423959; GN = queG PE=3 SV=1
MNAGAEKYSELIKSKAKSFGFQSCGISKADFLEEDAPHLEKWLKNNFNGEMKYMENHFDKRLDPRLLVEGSKSVISLSYNYFPEEKISVLENFKISKYAYAEDYHEVIKEILREMVAELQEEIGEFGFRVFVDSAPVLERSWARKSGIGWVGKNANLITKQNGSFYFLAEIICDLELIADHETTDHCGTCRKCIDACPTDAIVSEKIIDGSKCISYATIELKNEIPDHFKNKMEDWMFGCDICQDVCPWNRFSAPNKQSRFQPNEALKNFKKGEWKELTQEIFSEIFRKSPVKRTKFAGLKRNIEFLERSSD

SEQ ID NO: 75741 - protein, 312 aa, Chryseobacterium culicis
  REGION 1..312: note = tr|A0A1H6HNK7|A0A1H6HNK7_9FLAO Epoxyqueuosine reductase OS=Chryseobacterium culicis OX=680127 GN=queG; PE = 3 SV=1
MRSDAEKYSQLIKSKAKSFGFQNCGISKADFLEEEAPRLEKWLKNNYNGEMKYMENHFDKRLDPRLLVEGSKSVISLSYNYFPEEKISILENYKISKYAYAEDYHEVIKEILREMVAELQEEIGEFGFRVFVDSAPVLERAWAKKSGIGWVGKNANLITKQSGSFYFLAEIICDLELIPDHATTDHCGSCRKCIDACPTDAIVSEKIIDGSRCISYATIELKDEIPAYFKNKMEDWMFGCDICQDVCPWNRFSAPNKQSRFQPNEALKNFKKGEWKELTQEIFSEIFRKSPVKRTKFAGLKRNIEFLQQSSD

SEQ ID NO: 75742 - protein, 312 aa, Chryseobacterium culicis
  REGION 1..312: note = tr|A0A2S9CMQ5|A0A2S9CMQ5_9FLAO Epoxyqueuosine reductase OS=Chryseobacterium culicis OX=680127 GN=queG; PE = 3 SV=1
MNAAAEKYSQLIKSKAKSFGFQNCGISKADFLEEEAPRLEKWLKNNFNGEMKYMENHFDKRLDPRLLVEGSKSVISLSYNYFPEEKISILENYKISKYAYAEDYHEVIKEILREMVAELQEEIGEFGFRVFVDSAPVLERAWAKKSGIGWVGKNANLITKQSGSFYFLAEIICDLELIPDHATTDHCGSCRKCIDACPTDAIVSEKIIDGSRCISYATIELKDEIPSHFKDKMEDWMFGCDICQDVCPWNRFSAPNKQSRFQPNEALKNFKKGEWKEITQEIFSEIFRKSPVKRTKFAGLKRNIEFLQKSSD

SEQ ID NO: 75743 - protein, 313 aa, Chryseobacterium daecheongense
  REGION 1..313: note = tr|A0A3N0W129|A0A3N0W129_9FLAO Epoxyqueuosine reductase OS=Chryseobacterium daecheongense OX=192389; GN = queG PE=3 SV=1
MNSIAATYSQLIKSKAKKFGFQDCGISKADFLEEDAQHLESWLKNNFHGEMKYMENYFDKRLDPRLLVEGSQSVISLSYNYFPKEKISTLENYKISKYAYAEDYHEVIKEILCEMVAELQEEIGDFGFRVFVDSAPVLERSWARKSGIGWVGKNANLITKQSGSFYFLAEIICDLELIPDHETTDHCGTCRKCIEACPTDAIVSDKIIDGSKCISYATIELKNEIPEHFKNKMEDWMFGCDICQDVCPWNRFSSPNLQSRFTPNAFLKNFKKGEWKELTQELFSEIFKKSPVKRTKFAGLKRNIEFLEQSSGQ

SEQ ID NO: 75744 - protein, 313 aa, Chryseobacterium defluvii
  REGION 1..313: note = tr|A0A495SCD1|A0A495SCD1_9FLAO Epoxyqueuosine reductase OS=Chryseobacterium defluvii OX=160396 GN=queG; PE = 3 SV=1
MNSNAGKYSQLIKSKAIKFGFQDCGISKADFLEEDAHHLETWLKNNFHGEMKYMENYFDKRLDPRLLVEGSRSVISLSYNYFPKEKIPTLENFKISKYAYAEDYHEVIKEILREMVAELQDEIGDFGFRVFVDSAPVLERSWARKSGIGWVGKNANLITKQSGSFYFLAEIICDLELIPDHETTDHCGTCTKCMDACPTEAIISDKIIDGSKCISYATIELKNEIPEYFRNKMEDWMFGCDICQDVCPWNRFSSPNLQSRFTPNEALKNFKKGEWKELTQELFSEIFRKSPVKRTKFAGLKRNIEFLERFSGK

SEQ ID NO: 75745 - protein, 317 aa, Chryseobacterium elymi
  REGION 1..317: note = tr|A0A3D9DFI3|A0A3D9DFI3_9FLAO Epoxyqueuosine reductase OS=Chryseobacterium elymi OX=395936 GN=queG PE=3; SV = 1
MEILNGSAEKYSQLIKSKAEHFGFQSCGISKAGFLEEDAPNLEKWLQNNFHGEMKYMENHFDKRLDPRLLVEGSKSVISLSYNYFPKEEISALENYKISKYAYAEDYHEVVKEILREMVSELQQEIGEFGFRVFVDSAPILERSWARKSGIGWVGKNANLITKQNGSFYFLAEIICDLELVPDHATTDHCGTCRKCIDACPTDAIVSEKIIDGSRCISYATIELKNEIPDHFKDKMEDWMFGCDICQDVCPWNRFSSPNLQSRFAPNESLKNFKKEEWREITQEIFSEIFRKSPVKRTKFAGLKRNIEFLERSSDKL

SEQ ID NO: 75746 - protein, 314 aa, Chryseobacterium flavum
  REGION 1..314: note = tr|A0A3D9CGG2|A0A3D9CGG2_9FLAO Epoxyqueuosine reductase OS=Chryseobacterium flavum OX=415851 GN=queG; PE = 3 SV=1
MSTGAEKYTQLIKSKAKSFGFQSCGISKADFLEEDALHLEKWLKNNFHGEMKYMENHFDKRLDPRLLVEGSKSVISLSYNYFPKEKISVLENYKISKYAYAEDYHEVIKEILREMVAELQDEIGEFGFRVFVDSAPVLERSWARKSGIGWVGKNANLITRQNGSFYFLAEIICDLELVPDHETTDHCGTCRKCIDACPTDAIVSEKIIDGSRCISYATIELKSEIPDYFKDKMEDWMFGCDICQDVCPWNRFSAPNKQSRFQPNEALKNFKKGEWKELTQEIFSEIFRKSPVKRTKFTGLKRNIEFLEKSSGQI

SEQ ID NO: 75747 - protein, 318 aa, Chryseobacterium formosense
  REGION 1..318: note = tr|A0A085Z793|A0A085Z793_9FLAO Epoxyqueuosine reductase OS=Chryseobacterium formosense OX=236814 GN=queG; PE = 3 SV=1
MNSTAEKYSQLIKSKAKSFGFQNCGISKADFLEEDARHLEKWLKNNYHGEMKYMENHFDKRLDPRLLVEGSKSVISLSYNYFPEEKISALENYKISKYAYAEDYHEVVKEILRELVAELQTEIGEFNFRVFVDSAPVMERSWAKKSGIGWVGKNANLITKQSGSFYFLAEIICDLDLVSDHETTDHCGSCRKCIDACPTDAIVSEKIVDGSKCISYATIELKNEIPDYFKDRMEDWMFGCDICQDVCPWNRFSAPNLQNKFKPNDSLKNFKKGEWKELTQEMFSEIFRKSPVKRTKFAGLKRNIEFLNRSSDKNSEIL

SEQ ID NO: 75748 - protein, 310 aa, unidentified
  source 1..310: note = Chryseobacterium frigidisoli
  REGION 1..310: note = tr|A0A1I3IS98|A0A1I3IS98_9FLAO Epoxyqueuosine reductase OS=Chryseobacterium frigidisoli OX=1125876; GN = queG PE=3 SV=1
MLQNQQKYSDLIKQKALKFGFQSCGISKAEFLEDDAKPLENWLKNNYHGEMQYMENYFDKRLDPTLLVEGSKSVISLSYNYFPEEKIDSLDNFKISKYAYAEDYHEIIKDILKDLVTVLQEEIGAFHCRIFVDSAPVLERSWARKSGIGWVGKNANLITKQNGSFYFLAEIICDLDLIADHETIDHCGTCRKCIDACPTDAIISDKIIDGNKCISYATIELKNEIPESFKGKMEDWMFGCDICQDVCPWNRFSKPNLQEKFQPNSYLKDFKKENWQELSQDLFFEIFRKSPVKRTKFAGLERNIKFLMEK

SEQ ID NO: 75749 - protein, 314 aa, unidentified
  source 1..314: note = Chryseobacterium gallinarum
  REGION 1..314: note = tr|A0A0G3M659|A0A0G3M659_9FLAO Epoxyqueuosine reductase OS=Chryseobacterium gallinarum OX=1324352; GN = queG PE=3 SV=1
MNPTAEKYSLLIKSKAKSFGFQNCGISKADFLEEDAPRLEQWLKNNFNGEMKYMENHFDKRLDPRLLVEGSKSVISLSYNYFPEEKLPVLENYKISKYAYAEDYHEVIKEILREMVAELQDEIGEFGFRVFVDSAPVLERSWARKSGIGWVGKNANLITKQNGSFYFLAEIICDLELIPDHETTDHCGTCRKCIDACPTDAIVSEKIIDGSRCISYATIELKNDIPGYFKDKMEDWMFGCDICQDVCPWNRFSAPHQQSRFKPNEALKNFKKGEWKELTQEIFSEIFRKSPVKRTKFAGLKRNIEFLEQSSIKS

SEQ ID NO: 75750 - protein, 314 aa, Chryseobacterium gambrini
  REGION 1..314: note = tr|A0A1N7QKL6|A0A1N7QKL6_9FLAO Epoxyqueuosine reductase OS=Chryseobacterium gambrini OX=373672 GN=queG; PE = 3 SV=1
MTSNAEKYTQLIKSKAKSFGFQNCGISKADFLEEDAKPLENWLKNNFHGEMKYMENHFDKRLDPRLLVEGSRSVISLSYNYFPEEKISTLENFKISKYAYAEDYHEVIKDILRSMVAELQEEIGEFGFRVFVDSAPVLERSWARKSGIGWVGKNANLITRQSGSFYFLAEIICDLELVADHPVTDHCGTCRKCIDACPTNAIVSEKLIDGSKCISYATIELKDSIPDYFQDKMDDWMFGCDVCQDVCPWNRFSLPHQQTKFKPNQALKNFKKGEWKELTQELFSEIFRKSPVKRTKFAGLKRNIEFLEKSSEKK

SEQ ID NO: 75751 - protein, 314 aa, unidentified
  source 1..314: note = Chryseobacterium geocarposphaerae
  REGION 1..314: note = tr|A0A2M9BXM3|A0A2M9BXM3_9FLAO Epoxyqueuosine reductase OS=Chryseobacterium geocarposphaerae OX=1416776; GN = queG PE=3 SV=1
MNSTAEKYSQLIKTKAKSFGFQNCGISKADFLEEDAPNLEKWLKNNFHGEMKYMENHFDKRLDPRLLVEGSKSVISLSYNYFPEEKISALENFKISKYAYAEDYHEVIKEILREMVTELQEEIGEFGFRVFVDSAPVLERSWARKSGIGWVGKNANLITKQSGSFYFLAEIICDLELIPDHPVTDHCGSCRKCIDACPTNAIISEKIIDGSKCISYATIELKNEIPDYFKDKMDDWMFGCDVCQDVCPWNRFSAPHQQTKFKPNEALKNFKKGEWKELTQELFSEIFRKSPVKRTKFAGLKRNIEFLDQSEEKK

SEQ ID NO: 75752 - protein, 314 aa, unidentified
  source 1..314: note = Chryseobacterium glaciei
  REGION 1..314: note = tr|A0A172XRH1|A0A172XRH1_9FLAO Epoxyqueuosine reductase OS=Chryseobacterium glaciei OX=1685010 GN=queG; PE = 3 SV=1
MNSNAEKYSQLIKSKAKRFGFQSYGISKADFLEEDARNLENWLKNNFHGEMKYMENYFDKRLDPRLLVEGSKSVISLSYNYFPKEKISTLENYKISKYAYAEDYHEVVKEILREMVDELREEIGDFDCRVFVDSAPVLERSWARKSGIGWVGKNANLITKQNGSFYFLAEIICDLELIPDHETTDHCGTCRKCIDACPTDAIVSEKLIDGNKCISYATIELKNEIPDSFKDKMEDWMFGCDICQDVCPWNRFSAPNLQTRFAPNEALRNFKKVEWKELTQELFSEIFRKSPVKRTKFAGLKRNIEFLEKTSDKK

SEQ ID NO: 75753 - protein, 315 aa, Chryseobacterium gleum
  REGION 1..315: note = tr|A0A4U8WS22|A0A4U8WS22_9FLAO Epoxyqueuosine reductase OS=Chryseobacterium gleum OX=250 GN=queG PE=3; SV = 1
MNSKAEQYSQLIKTKARSFGFQNCGISKADFLEEDAKHLENWLKSNYHGEMKYMENHFDKRLDPRLLVEGSRSVISLSYNYFPEEKIPSLDNFKISKYAYAEDYHEVIKDVLREMVTEFQEEIGEFSYRVFVDSAPVMERSWAKKSGIGWVGKNANLITKQSGSFYFLAEIICDLELIADHETTDHCGTCRKCIDACPTDAIVSDKIVDGSKCISYATIELKNEIPDHFKNKMEDWMFGCDICQDVCPWNRFSVPNFQDKFKPNHQLRNFRKGEWKELTQDLFSEIFRKSPVKRTKFSGLKRNIDFLAQSEDRKP

SEQ ID NO: 75754 - protein, 312 aa, Chryseobacterium gleum
  REGION 1..312: note = tr|A0A448BB18|A0A448BB18_9FLAO Epoxyqueuosine reductase OS=Chryseobacterium gleum OX=250 GN=queG PE=3; SV = 1
MNAGAEKYSQLIKSKAKSFGFQSCGISKADFLEEDAPHLEKWLKNNYNGEMKYMENHFDKRLDPRLLVEGSRSVISLSYNYFPEEKISILENYKISKYAYAEDYHEVIKEILREMVAELQKEIGEFGFRVFVDSAPVLERSWARKSGIGWVGKNANLITKQNGSFYFLAEIICDLELIPDHATTDHCGTCRKCIDACPTDAIVSEKIIDGSRCISYATIELKSEIPDYFKDKMEDWMFGCDICQDVCPWNRFSAPNKQSRFQPNEALKNFKKGEWKELTQEIFSEIFRKSPVKRTKFAGLKRNIEFLQKSSD

SEQ ID NO: 75755 - protein, 310 aa, Chryseobacterium greenlandense
  REGION 1..310: note = tr|A0A117KAY7|A0A117KAY7_9FLAO Epoxyqueuosine reductase OS=Chryseobacterium greenlandense OX=345663; GN = queG PE=3 SV=1
MNSTAEKYTQLIKTKAKSFGFQNCGVSKADFLEEDAPHLEKWLKNNFHGEMKYMENHFDKRLDPRLLVEGSKSVISLSYNYFPEEKISTLENFKISKYAYAEDYHEVIKEILRDMVAELQQEIGDFSFRVFVDSAPVLERSWAKKSGIGWVGKNANLITKQSGSFYFLAEIICDLELIADSETTDHCGTCRKCIDACPTDAIVSDKIIDGSKCISYATIELKEEIPDYFKNKMEDWMFGCDICQDVCPWNRFSAPNLQSRFKPNEFLKNFKKREWKELTQEIFSEIFRKSPVKRTKFAGLKRNIEFLYKS

SEQ ID NO: 75756 - protein, 314 aa, Chryseobacterium hagamense
  REGION 1..314: note = tr|A0A511YR44|A0A511YR44_9FLAO Epoxyqueuosine reductase OS=Chryseobacterium hagamense OX=395935 GN=queG; PE = 3 SV=1
MSSTAERYSQLIKAKAKSFGFQGCGISKAEFLEEEARPLENWLKNSFHGEMKYMENYFDKRLDPRLLVEGSKSVISLSYNYFPEEKISTLENFKISKYAYAEDYHEVIKDILRDMVAELQEEIGEFGFRVFVDSAPVLERSWARKSGIGWVGKNANLITRQSGSFYFLAEIICDLELVADHPVTDHCGTCRKCIDACPTGAIVSEKLVDGSKCISYATIELKDSIPDYFKDKMDDWMFGCDVCQDVCPWNRFSAPHQQSKFKPNESLKNFKKGEWRELTQELFSEIFRKSPVKRTKFAGLKRNIEFLEQSSDKE

SEQ ID NO: 75757 - protein, 308 aa, Chryseobacterium haifense
  REGION 1..308: note = tr|A0A3N0X1G1|A0A3N0X1G1_9FLAO Epoxyqueuosine reductase OS=Chryseobacterium haifense OX=421525 GN=queG; PE = 3 SV=1
MNYAEKYSQLVKTKAKKFGFQSCGISKAGFLEEDAKPLENWLNNNYHGEMAYMENYFDKRLDPTLLVEGSKSVISLSYNYFPKDKISSIDNFKISKYAYGQDYHEIIKETLNEMVAELKEEIGDFHCRVFVDSAPVLERSWAKKSGIGWVGKNANLITKQSGSFYFLAEIMIDLELQEDSPTTDHCGTCTKCIEACPTDAIVSEKIIDGSKCISYATIELKNEIPETFKNKMEDWMFGCDICQDVCPWNRFSAPHHQEKFKPNHFLENAKKEDWKELSQEIFSEIFRKSPVKRTKFAGLKRNIEFLGK

SEQ ID NO: 75758 - protein, 308 aa, Chryseobacterium haifense
  REGION 1..308: note = tr|A0A246B7G0|A0A246B7G0_9FLAO Epoxyqueuosine reductase OS=Chryseobacterium haifense DSM 19056; OX = 1450526 GN=queG PE=3 SV=1
MNYAEKYSQLVKTKAKKFGFQSCGISKAGFLEEDAKPLENWLNNNYHGEMAYMENYFDKRLDPTLLVEGCKSVISLSYNYFPKDKISSIDNFKISKYAYGQDYHEIIKETLNEMVAELKEEIGDFHCRVFVDSAPVLERSWAKKSGIGWVGKNANLITKQSGSFYFLAEIMIDLELQEDSPTTDHCGTCTKCIEACPTDAIVSEKIIDGSKCISYATIELKNEIPETFKNKMEDWMFGCDICQDVCPWNRFSAPHHQEKFKPNHFLENAKKEDWKELSQEIFSEIFRKSPVKRTKFAGLKRNIEFLGK

SEQ ID NO: 75759 - protein, 307 aa, unidentified
  source 1..307: note = Chryseobacterium halperniae
  REGION 1..307: note = tr|A0A085B929|A0A085B929_9FLAO Epoxyqueuosine reductase OS=Chryseobacterium halperniae OX=421072 GN=queG; PE = 3 SV=1
MDNKEKYSELIKSKALAFGFQSCGISKADFLEEEAPRLEKWLKNNFHGEMRYMENHFDKRLDPRLLVEGSKSVISLSYNYFPEELQNNPDFKLAKYAYGEDYHDVIKDKLRTLVAELQDEIGEFAFRVFVDSAPVLEKAWAKKSGIGWVGKNSNLITKKNGSFYFLAEIICDLELIQDFEVTDHCGSCTKCIDACPTKAIVSDKIIDGSKCISYATIELKDHIPDFFKDKMEDWMFGCDICQDVCPWNRFSAPTLEEKFRPNSEIKNFTKQEWKDITQEIFSSVFKKSAVKRTKFSGLKRNLDFLSE

SEQ ID NO: 75760 - protein, 307 aa, Chryseobacterium hispanicum
  REGION 1..307: note = tr|A0A3D9D0L1|A0A3D9D0L1_9FLAO Epoxyqueuosine reductase OS=Chryseobacterium hispanicum OX=358687 GN=queG; PE = 3 SV=1
MNPKERHTQLIKTKASAFGFQSCGISKADFLEEEASHLEKWLKNNHHGEMKYMENYFDKRLDPRLLVEGSKSVISLSYNYFPEEKLQNENFKIAKYAYGEDYHEVIKEKLRTLVAELQEEIGEFSFRVFVDSAPVLEKAWAKKSGIGWVGKNSNLITKKYGSFYFLAEIICDLDLVEDSPVTDHCGSCTKCIDACPTQAIISDRIIDGSKCISYATIELKDQIPDFFKDKMDDWMFGCDVCQDVCPWNRFSAPTLEEKFQPNSQLKNFTKQEWKDITQEVFSSVFRKSAVKRTKFAGLKRNLDFLSE

SEQ ID NO: 75761 - protein, 307 aa, Chryseobacterium hominis
  REGION 1..307: note = tr|A0A1H6KNA1|A0A1H6KNA1_9FLAO Epoxyqueuosine reductase OS=Chryseobacterium hominis OX=420404 GN=queG; PE = 3 SV=1
MNPKERHTQLIKTKASAFGFQSCGISKATFLEEEANHLERWLKKNYHGEMRYMENHFDKRLDPRLLVDGSKSVISLSYNYFPDKIIEADSFKLSKYAYGEDYHNVIKDKLRNLVAELQEEIGDFSFRVFVDSAPVLEKAWARKSGIGWVGKNANLITKKYGSFYFLAEIICDLELTEDFPVTDHCGSCRKCIESCPTQAIISDKIIDGTKCISYATIELKDQIPDYFKDKMDDWMFGCDVCQDVCPWNRFSAPTLEEKFQPNSQLQSFTKQDWKDITQEIFSEVFKKSAVKRTKFAGLKRNLDFLSE

SEQ ID NO: 75762 - protein, 307 aa, Chryseobacterium hominis
  REGION 1..307: note = tr|A0A3N0XC71|A0A3N0XC71_9FLAO Epoxyqueuosine reductase OS=Chryseobacterium hominis OX=420404 GN=queG; PE = 3 SV=1
MNPKERYTQLIKTKASAFGFQSCGISKATFLEEEANNLERWLKKNYHGEMRYMENHFDKRLDPRLLVDGSKSVISLSYNYFPDKIIEADSFKLSKYAYGEDYHNVIKDKLRNLVAELQEEIGEFSFRVFVDSAPVLEKAWARKSGIGWVGKNANLITKKNGSFYFLAEIICDLELTEDFPVTDHCGSCRKCIESCPTQAIISDKIIDGTKCISYATIELKEQIPDYFKDKMDDWMFGCDVCQDVCPWNRFSAPTLEEKFQPNSQLQNFTKQDWKDITQEIFSEVFKKSAVKRTKFAGLKRNLDFLSD

SEQ ID NO: 75763 - protein, 309 aa, Chryseobacterium humi
  REGION 1..309: note = tr|A0A1H5ZUU8|A0A1H5ZUU8_9FLAO Epoxyqueuosine reductase OS=Chryseobacterium humi OX=493375 GN=queG PE=3; SV = 1
MPQNQQKYSDLIKEKARKYGFESCGISKAEFLEEDAPNLENWLKNNFQGEMAYMENYFDKRLNPTLLVEGSKSVISLSYNYFPSEKIETLDNFKISKYAYAEDYHDIIKGILKDLVNELKHEIGDFHFRIFVDSAPVLERAWARKSGIGWVGKNANLITKEKGSFYFLAEIICDLELIADHETTDHCGTCRKCIDACPTDAIISDKIIDGSKCISYATIELKNEIPTHFKDKMEDWMFGCDICQDVCPWNRFARPSHQEKFQPNSFLKNYRKQDWQELSQDLFSEIFRKSPVKRTKFAGLQRNIRFLSQ

SEQ ID NO: 75764 - protein, 307 aa, Chryseobacterium hungaricum
  REGION 1..307: note = tr|A0A1G7U7J5|A0A1G7U7J5_9FLAO Epoxyqueuosine reductase OS=Chryseobacterium hungaricum OX=454006 GN=queG; PE = 3 SV=1
MNPKERHTQLIKTKASAFGFQSCGISKADFLEEEASHLENWLRNNHHGEMKYMENHFDKRLDPRLLVEGSRSVISLSYNYFPEEKLQNDNFKLAKYAYGEDYHDVIKEKLRTLVAELQEEIGEFSCRVFVDSAPVLEKAWAKKSGIGWVGKNSNLITKKYGSFYFLAEIICDLDLVEDSPVTDHCGSCTKCIDACPTQAIISDKIIDGSKCISYATIELKDQIPDFFKDKMDDWMFGCDVCQDVCPWNRFSTPTLEEKFQPNSQLKNFTKQEWKDITQEVFSSVFKKSAVKRTKFAGLKRNLDFLSE

SEQ ID NO: 75765 - protein, 312 aa, Chryseobacterium indologenes
  REGION 1..312: note = tr|A0A411DU70|A0A411DU70_9FLAO Epoxyqueuosine reductase OS=Chryseobacterium indologenes OX=253 GN=queG; PE = 3 SV=1
MNADAEKYSQLIKSRAKSFGFQSCGISKADFLEEEAPHLEKWLKNNYNGEMKYMENHFDKRLDPRLLVEGSKSVISLSYNYFPEEKISTLENFKISKYAYAEDYHEVIKEILREMVAELQEEIGEFGFRVFVDSAPVLERAWAKKSGIGWVGKNANLITKQSGSFYFLAEIICDLELIPDHATTDHCGSCRKCIDACPTDAIVSEKIIDGSRCISYATIELKNEIPDYFKDKMEDWMFGCDICQDVCPWNRFSAPNKQSRFQPNEALKNFKKGEWKELTQEIFSEIFRKSPVKRTKFAGLKRNIEFLQKTSD

SEQ ID NO: 75766 - protein, 312 aa, Chryseobacterium indologenes
  REGION 1..312: note = tr|A0A1Z3VY13|A0A1Z3VY13_9FLAO Epoxyqueuosine reductase OS=Chryseobacterium indologenes OX=253 GN=queG; PE = 3 SV=1
MNAGAEKYSQLIKSKAKSFGFQSCGISKADFLEEDARPLEKWLKNNFNGEMKYMENHFDKRLDPRLLVEGSKSVISLSYNYFPEEKLSVLENFKISKYAYAEDYHEVIKEILREMVAELQEEIGEFGFRVFVDSAPVMERSWARKSGIGWVGKNANLITRQNGSFYFLAEIICDLELIADHATTDHCGTCRKCIDACPTGAIVSEKIVDGSRCISYATIELKDEIPDHFKNKMEDWMFGCDICQDVCPWNRFAAPHKQSRFTPNEALRNFKKGEWKELTQEIFSEIFRKSPVKRTKFAGLKRNIEFLQRSSD

SEQ ID NO: 75767 - protein, 314 aa, Chryseobacterium indoltheticum
  REGION 1..314: note = tr|A0A381FA31|A0A381FA31_9FLAO Epoxyqueuosine reductase OS=Chryseobacterium indoltheticum OX=254 GN=queG; PE = 3 SV=1
MNSTAEKYSQLIKSKAKSFGFQNCGISKADFLEEDARHLEKWLKNNFHGEMKYMENHFDKRLDPRLLVEGSKSVISLSYNYFPEEKISVLENFKISKYAYAEDYHEVVKEILRDLVAELQEEIGDFEFRVFVDSAPVLERSWAKKSGIGWVGKNANLITKQSGSFYFLAEIICDLDLIPDHETTDHCGSCRKCIDACPTDAIVSEKIVDGSKCISYATIELKTEIPDYFKDKMEDWMFGCDICQDVCPWNRFSAPNLQAKFKPNEALKSFKKGEWKELTQEIFSEIFRKSPVKRTKFAGLKRNIEFLNQSSEKL

SEQ ID NO: 75768 - protein, 314 aa, Chryseobacterium indoltheticum
  REGION 1..314: note = tr|A0A381FHS9|A0A381FHS9_9FLAO Epoxyqueuosine reductase OS=Chryseobacterium indoltheticum OX=254 GN=queG; PE = 3 SV=1
MNSTAEKYSQLIKSKAKSFGFQNCGISKADFLEEDARHLEKWLKNNFHGEMKYMENHFDKRLDPRLLVEGSKSVISLSYNYFPEEKISALENFKISKYAYAEDYHEVVKEILRDLVAELQEEIGNFGFRVFVDSAPVLERSWAKKSGIGWVGKNANLITKQSGSFYFLAEIICDLDLIPDNETTDHCGSCRKCIDACPTDAIVSEKIVDGSKCISYATIELKTEIPDYFKDKMEDWMFGCDICQDVCPWNRFSAPNLQAKFKPNEALKNFKKGEWKELTQEIFSEIFRKSPVKRTKFAGLKRNIEFLNQSSEKL

SEQ ID NO: 75769 - protein, 314 aa, Chryseobacterium jejuense
  REGION 1..314: note = tr|A0A2X2X160|A0A2X2X160_9FLAO Epoxyqueuosine reductase OS=Chryseobacterium jejuense OX=445960 GN=queG; PE = 3 SV=1
MNAGAEKYSELIKSKAKSFGFQSCGISKADFLEEDAAHLEKWLKNNFNGEMKYMENHFDKRLDPRLLVEGSKSVISLSYNYFPEEKISILENFKISKYAYAEDYHEVIKEILREMVAELQEEIGEFGFRVFVDSAPVMERSWARKSGIGWVGKNANLITKQNGSFYFLAEIICDLELIADHETTDHCGTCRKCIDACPTDAIISEKIIDGSKCISYATIELKNEIPDHFKNKMEDWMFGCDICQDVCPWNRFSAPNKQSRFKPNEALKNFKKGEWKELTQEIFSDIFKKSPVKRTKFAGLKRNIEFLERSSDSF

SEQ ID NO: 75770 - protein, 309 aa, Chryseobacterium jeonii
  REGION 1..309: note = tr|A0A0C1FL41|A0A0C1FL41_9FLAO Epoxyqueuosine reductase OS=Chryseobacterium jeonii OX=266749 GN=queG; PE = 3 SV=1
MNSNAEKYSIIIKAKAKKFGFQDCGISKAGFLENDAVALENWLKNDYHGKMSYMENHFDKRLDPTLLVEGSKYVISLSYNYFPEEKLPTINTFKISKYAYGEDYHEIIKEIMQEMVAELKDEIGDFQCRVFTDSAPILERSWARKSGIGWVGKNANLITKQSGSFYFLAEIICDLDLQEDHATTDHCGTCTKCIEACPTDAIVSDKIIDGSKCISYATIELKDEIPAGFTDKMEDWMFGCDICQDVCPWNRFSSPHQQEKFKPNSILKNYKKEDWKELTQELFSEIFRISPLKRTKFAGLERNIEFLSK

SEQ ID NO: 75771 - protein, 314 aa, Chryseobacterium joostei
  REGION 1..314: note = tr|A0A1N7IC78|A0A1N7IC78_9FLAO Epoxyqueuosine reductase OS=Chryseobacterium joostei OX=112234 GN=queG; PE = 3 SV=1
MNAGAEKYSQLIKSKAKSFGFQSCGISKADFLEEDAPHLERWLKNNFNGEMKYMENHFDKRLDPRLLVEGSKSVISLSYNYFPEEKISILENFKISKYAYAEDYHEVIKEILRDMVAELQEEIGEFGFRVFVDSAPIMERSWARKSGIGWVGKNANLITKQNGSFYFLAEIICDLELIPDHETTDHCGTCRKCIDACPTDAIVSEKIIDGSRCISYATIELKNEIPDHFKDKMEDWMFGCDICQDVCPWNRFSAPNQQSRFKPNEALKNFKKGEWKELTQEIFSEIFKKSPVKRTKFTGLKRNIEFLQKSSDPV

SEQ ID NO: 75772 - protein, 309 aa, Chryseobacterium koreense
  REGION 1..309: note = tr|A0A0J7LP66|A0A0J7LP66_9FLAO Epoxyqueuosine reductase OS=Chryseobacterium koreense CCUG 49689; OX = 1304281 GN=queG PE=3 SV=1
MSQNRKKYSDIIKLKAKKFGFQSCGISKAGFLEEDAKPLEDWLQNNFHGEMQYMEKNFDKRLDPTILVEGSRSVISLSYNYYPEEKIDSLGNFKISKYAYGQDYHEIIKEILREMVSELRAEIGDFDCRVFTDSAPILERSWGRKSGIGWVGKNANLITKQQGSFYFLAEIICDLDIEEDSPTSDHCGTCTKCIDACPTDAIVADRIIDGSKCISYATIELKNEIPDSFKNNMEDWMFGCDICQDVCPWNRFSAPTLEEKFRPNQFLKTYTKSDWKEITQELFSEIFRKSPVKRTKFAGLKRNMDFLSQ

SEQ ID NO: 75773 - protein, 316 aa, unidentified
  source 1..316: note = Chryseobacterium kwangjuense
  REGION 1..316: note = tr|A0A135W2T1|A0A135W2T1_9FLAO Epoxyqueuosine reductase OS=Chryseobacterium kwangjuense OX=267125; GN = queG PE=3 SV=1
MLNSGAEKHTQLIKSKAERFGFQSCGISKAEFLEEDAPNLEKWLKNNFHGEMKYMENHFDKRLDPRLLVEGSRSVISLSYNYFPEEKISALENYKISKYAYAEDYHEVVKEILREMVAELQHEIGEFGFRVFVDSAPVLERSWARKSGIGWVGKNANLITKQNGSFYFLAEIICDLELVPDHATTDHCGTCRKCIDACPTDAIVSEKIIDGSRCISYATIELKNEIPDHFKGRMEDWMFGCDICQDVCPWNRFSAPNRQTKFVPNESLKNFKKGEWKEITQEIFSEIFRKSPVKRTKFAGLKRNIEFLEHSSDTNL

SEQ ID NO: 75774 - protein, 311 aa, unidentified
  source 1..311: note = Chryseobacterium lactis
  REGION 1..311: note = tr|A0A3G6RMM5|A0A3G6RMM5_9FLAO Epoxyqueuosine reductase OS=Chryseobacterium lactis OX=1241981 GN=queG; PE = 3 SV=1
MSSVEKYSQLIKSKAKSFGFQSCGISKADFLEEDARHLEKWLKNNFNGEMKYMENHFDKRLDPRLLVEGSKSVISLSYNYFPEEKISILENFKISKYAYAEDYHEVIKEILREMVAELQEEIGEFGFRVFVDSAPVLERSWARKSGIGWIGKNANLITKQNGSFYFLAEIICDLELIADHETTDHCGTCRKCIDACPTDAIVSEKIIDGSRCISYATIELKSEIPDYFKDKMEDWMFGCDICQDVCPWNRFSAPHQQSRFKPNEALKNFTKGEWKELTQEIFSEIFKKSPVKRTKFAGLKRNIEFLQKPSD

SEQ ID NO: 75775 - protein, 317 aa, Chryseobacterium lathyri
  REGION 1..317: note = tr|A0A511Y575|A0A511Y575_9FLAO Epoxyqueuosine reductase OS=Chryseobacterium lathyri OX=395933 GN=queG; PE = 3 SV=1
MEILNGDAEKYSQLIKSKAQHFGFQSCGISKAGFLEEDAPNLEKWLKNNFHGEMKYMENHFDKRLDPRLLVEGSKSVISLSYNYFPKEEISALENYKISKYAYAEDYHEVVKEILREMVSELQQEIGEFGFRVFVDSAPVLERSWARKSGIGWVGKNANLITKQNGSFYFLAEIICDLELIPDHATTDHCGTCRKCIDACPTDAIVSEKIIDGSRCISYATIELKNEIPDHFKDKMEDWMFGCDICQDVCPWNRFSSPNLQSRFAPNESLKNFKKEEWREITQEIFSEIFRKSPVKRTKFAGLKRNIEFLERSSDKL

SEQ ID NO: 75776 - protein, 314 aa, unidentified
  source 1..314: note = Chryseobacterium limigenitum
  REGION 1..314: note = tr|A0A1K2IW50|A0A1K2IW50_9FLAO Epoxyqueuosine reductase OS=Chryseobacterium limigenitum OX=1612149; GN = queG PE=3 SV=1
MNSNAEKYSQLIKSKAERFGFQSCGISKADFLEEDARNLEKWLKNNFHGEMKYMENYFDKRLDPRLLVEGSKSVISLSYNYFPKEKISTLENYKISKYAYAEDYHEVVKEILREMVDELREEIGDFDCRVFVDSAPVLERSWARKSGIGWVGKNANLITKQNGSFYFLAEIICDLELIPDHETTDHCGTCRKCIDACPTEAIVSEKLIDGSKCISYATIELKNEIPDSFKDKMEDWMFGCDICQDVCPWNRFSVPNLQSRFAPNEALKNFKKGDWKELTQELFSEIFRKSPVKRTKFAGLKRNIEFLEKTSDKK

SEQ ID NO: 75777 - protein, 317 aa, Chryseobacterium luteum
  REGION 1..317: note = tr|A0A085ZTC8|A0A085ZTC8_9FLAO Epoxyqueuosine reductase OS=Chryseobacterium luteum OX=421531 GN=queG; PE = 3 SV=1
MEILNAGAEKYSQLIKSKAEQFGFQSCGISKAGFLEEDAPNLEKWLKNNFHGEMKYMENHFDKRLDPRLLVEGSKSVISLSYNYFPKEKISALENYKISKYAYAEDYHEVVKEILREMVSELQQEIGEFGFRVFVDSAPVLERSWARKSGIGWVGKNANLITKQNGSFYFLAEIICDLELIPDHATTDHCGTCRKCIDACPTDAIVSDKIIDGSRCISYATIELKSEIPDHFQDRMEDWMFGCDICQDVCPWNRFSSPNLQSRFAPNESLKNFKKEEWKEITQEIFSEIFRKSPVKRTKFAGLKRNIEFLERSLDKL

SEQ ID NO: 75778 - protein, 307 aa, Chryseobacterium molle
  REGION 1..307: note = tr|A0A1M6N6V1|A0A1M6N6V1_9FLAO Epoxyqueuosine reductase OS=Chryseobacterium molle OX=216903 GN=queG PE=3; SV = 1
MNNQEKYSSLIKSKALTFGFQSCGISKAGFLEEEAPRLEKWLKQNYNGEMRYMENHFDKRLDPRLLVEGSKSVISLSYNYFPEELQNNQDFKLSKYAYGEDYHDVIKDKLKLMIAELQEQIGAFSFRVFVDSAPVLEKAWARKSGIGWVGKNSNLITKKNGSFYFLAEIICDLDLIEDFPVTDHCGSCRKCIDACPTQAIVSDKIVDGSKCISYATIELKDQIPDFFKDKMEDWMFGCDICQDVCPWNRFSAPTLEEKFKPNAEIKNFTKQEWKDITQEVFSSVFRKSAVKRTKFSGLKRNLDFLSE

SEQ ID NO: 75779 - protein, 314 aa, unidentified
  source 1..314: note = Chryseobacterium mucoviscidosis
  REGION 1..314: note = tr|A0A202C1H1|A0A202C1H1_9FLAO Epoxyqueuosine reductase OS=Chryseobacterium mucoviscidosis OX=1945581; GN = queG PE=3 SV=1
MTSNAEKYTQLIKSKAKSFGFQNCGISKADFLEEEAKPLENWLKNNFHGEMKYMENHFDKRLDPRLLVEGSKSVISLSYNYFPEEKISTLENFKISKYAYAEDYHEVIKDIMRSMVAELQEEIGEFGFRVFVDSAPVLERSWARKSGIGWVGKNANLITRQSGSFYFLAEIICDLELVADYPVTDHCGTCRKCIDACPTNAIVSEKLIDGSKCISYATIELKDSIPDYFQDKMDDWMFGCDVCQDVCPWNRFSSPHKQTKFKPNESLKNFKKGEWKELTQELFSEIFRKSPVKRAKFAGLKRNIEFLEKSSQNK

SEQ ID NO: 75780 - protein, 312 aa, unidentified
  source 1..312: note = Chryseobacterium nakagawai
  REGION 1..312: note = tr|A0A3S4TJ79|A0A3S4TJ79_9FLAO Epoxyqueuosine reductase OS=Chryseobacterium nakagawai OX=1241982 GN=queG; PE = 3 SV=1
MNAGAEKYSELIKTKAKRFGFQGCGISKADFLEEDAGHLEKWLKNNCNGEMKYMENHFDKRLDPRLLVEGSKSVISLSYNYFPEEKISMLENFKISKYAYAEDYHEVIKEILREMVAELQEEIGEFGFRVFVDSAPVLERSWARKSGIGWVGKNANLITKQNGSFYFLAEIICDLELIADHETTDHCGTCRKCIDACPTDAIVSEKIIDGSKCISYATIELKNDIPDHFKNKMEDWMFGCDICQDVCPWNRFAAPHQQSRFKPNEALKNFKKGEWKEITQEIFSEIFKKSPVKRTKFAGLKRNIEFLERSSD

SEQ ID NO: 75781 - protein, 312 aa, unidentified
  source 1..312: note = Chryseobacterium nakagawai
  REGION 1..312: note = tr|A0A3N2F2C3|A0A3N2F2C3_9FLAO Epoxyqueuosine reductase OS=Chryseobacterium nakagawai OX=1241982 GN=queG; PE = 3 SV=1
MNAGAEKYTQLIKSKAKSFGFQSCGISKADFLEEDAGHLEKWLKNNFNGEMKYMENHFDKRLDPRLLVEGSKSVISLSYNYFPEEKISILENFKISKYAYAEDYHEVIKEILREMVAELQEEIGEFGFRVFVDSAPVLERSWARKSGIGWVGKNANLITKQNGSFYFLAEIICDLELIPDHETTDHCGTCRKCIDACPTDAIVSEKIIDGSKCISYATIELKNEIPDHFKGKMEDWMFGCDICQDVCPWNRFSAPHQQSRFKPNEALKNFKKGEWKELTQEIFSEIFRKSPVKRTKFAGLQRNIEFLKRSSD

SEQ ID NO: 75782 - protein, 308 aa, unidentified
  source 1..308: note = Chryseobacterium nematophagum
  REGION 1..308: note = tr|A0A3M7LBA0|A0A3M7LBA0_9FLAO Epoxyqueuosine reductase OS=Chryseobacterium nematophagum OX=2305228; GN = queG PE=3 SV=1
MDSKAEKYTQLIKAKAQRFGFQSCGISKADFLEEDARPLEKWLKNNFHGEMKYMENHFDKRLDPRLLVEGSQSVISLSYNYFPKNEISTLDNFKISKYAYAEDYHEVIKEILREMVTELQNEIGEFGFRVFVDSAPVLERSWARKSGIGWVGKNANLITKQSGSFYFLAEIICDLPLVSDHETTDHCGTCRKCIDACPTDAIVSDKVIDGSKCISYATIELKNEIPDSFKNKMEDWMFGCDICQDVCPWNRFSTPNLQNRFTPNDSLKNFRKSEWKELTQELFSEIFRKSPVKRTKFAGLKRNIKFLS

SEQ ID NO: 75783 - protein, 308 aa, unidentified
  source 1..308: note = Chryseobacterium nematophagum
  REGION 1..308: note = tr|A0A3M7TJC7|A0A3M7TJC7_9FLAO Epoxyqueuosine reductase OS=Chryseobacterium nematophagum OX=2305228; GN = queG PE=3 SV=1
MDSKAEKYTQLIKTKAQRFGFQSCGISKADFLEEDARPLEKWLKNNFHGEMKYMENHFDKRLDPRLLVEGSQSVISLSYNYFPKNVISTLENFKISKYAYAEDYHEVIKEILREMVTELQNEIGEFGFRVFVDSAPVLERSWARKSGIGWVGKNANLITKQSGSFYFLAEIICDLPLVSDHETTDHCGTCRKCIDACPTDAIVSDKVIDGSKCISYATIELKNEIPDSFKNKMEDWMFGCDICQDVCPWNRFSTPHLQNRFTPNDSLKNFRKSEWKELTQELFSEIFRKSPVKRTKFAGLKRNIKFLS

SEQ ID NO: 75784 - protein, 317 aa, unidentified
  source 1..317: note = Chryseobacterium oleae
  REGION 1..317: note = tr|A0A1I4XEA9|A0A1I4XEA9_9FLAO Epoxyqueuosine reductase OS=Chryseobacterium oleae OX=491207 GN=queG PE=3; SV = 1
MKILNSSAEKHAQLIKSKAERFGFQSCGISKADFLEEDAPNLEKWLKNNYHGEMKYMENNFDKRLDPRLLVEGSKSVISLSYNYFPKEKISALENYKISKYAYAEDYHEVVKEILREMVAELQEEIGEFGFRVFVDSAPILERSWAKKSGIGWVGKNANLITKQNGSFYFLAEIICDLELAADHATTDHCGTCRKCIDACPTDAIVSEKIVDGSRCISYATIELKNEIPDHFKNKMEDWMFGCDICQDVCPWNRFSAPNLQSRFEPNESLKNFKKEEWKEITQEIFSEIFRKSPVKRTKFAGLKRNIEFLERSSDKL

SEQ ID NO: 75785 - protein, 312 aa, Chryseobacterium oncorhynchi
  REGION 1..312: note = tr|A0A316WZ55|A0A316WZ55_9FLAO Epoxyqueuosine reductase OS=Chryseobacterium oncorhynchi OX=741074; GN = queG PE=3 SV=1
MNAGAEKYSQLIKSKAKSFGFQSCGISKADFLEEDAPHLEKWLKNNFNGEMKYMENHFDKRLDPRLLVEGSKSVISLSYNYFPEEKISILENFKISKYAYAEDYHEVIKEILREMVAELQEEIGEFGFRVFVDSAPIMERSWAKKSGIGWVGKNANLITKQNGSFYFLAEIICDLELIPDHETTDHCGTCRKCIDACPTDAIVSEKIIDGSRCISYATIELKNEIPDHFKDKMEDWMFGCDICQDVCPWNRFSAPNQQSRFKPNEALKNFKKGEWKELTQEIFSEVFKKSPVKRTKFSGLKRNIEFLQKSSD

SEQ ID NO: 75786 - protein, 317 aa, Chryseobacterium oranimense
  REGION 1..317: note = tr|A0A1M5UG10|A0A1M5UG10_9FLAO Epoxyqueuosine reductase OS=Chryseobacterium oranimense OX=421058 GN=queG; PE = 3 SV=1
MEILNAGAEKYSLLIKSKAEKFGFQSCGISKAEFLEEDAPNLEKWLKNNFHGEMKYMENHFDKRLDPRLLVEGSKSVISLSYNYFPKEKISELENYKISKYAYAEDYHEVVKEILREMVSELQQEIGEFGFRVFVDSAPVLERSWARKSGIGWVGKNANLITKQNGSFYFLAEIICDLELIPDHATTDHCGTCRKCIDACPTDAIVSEKIIDGSRCISYATIELKNEIPDHFKNKMEDWMFGCDICQDVCPWNRFSSPNLQSRFTPNHALKNFKKGEWKEITQEIFSEIFRKSPVKRTKFAGLKRNIEFLERSAEKD

SEQ ID NO: 75787 - protein, 314 aa, Chryseobacterium piperi
  REGION 1..314: note = tr|A0A086BJA6|A0A086BJA6_9FLAO Epoxyqueuosine reductase OS=Chryseobacterium piperi OX=558152 GN=queG; PE = 3 SV=1
MNSNAEKYSDLIKSKAKSFGFQSCGISKADFLEEDARNLELWLKNNFHGEMKYMENHFDKRLDPRLLVEGSKSVISLSYNYFPKEKISVLENYKISKYAYAEDYHEVIKEILREMVAELQEEIGDFGFRVFVDSAPVLERSWARKSGIGWVGKNANLITKQNGSFYFLAEIICDLELVADYETTNHCGTCRKCIDACPTEAIVSDKIIDGSKCISYATIELKSEIPDYFKDRMEDWMFGCDICQDVCPWNRFSAPNLQSRFSPNEPLKNFKKGEWKELTQELFSEIFRKSPVKRTKFAGLKRNIEFLEQSSDKN

SEQ ID NO: 75788 - protein, 312 aa, Chryseobacterium piscicola
  REGION 1..312: note = tr|A0A1N7L9D0|A0A1N7L9D0_9FLAO Epoxyqueuosine reductase OS=Chryseobacterium piscicola OX=551459 GN=queG; PE = 3 SV=1
MTSNAEKYSQLIKIKAKSFGFQQCGISRAEFLEEDARPLENWLKNNYHGEMKYMENHFDKRLDPRLLVEGSKSVISLSYNYFPEEKISTLDNFKISKYAYSEDYHEVIKEILRDMILELQEQIGEFSFRVFVDSAPVLERSWAKKSGIGWVGKNANLITKQSGSFYFLAEIICDLDLETDYQTKDHCGTCRKCIEACPTKAIITEKIIDGSKCISYATIELKNEIPDYFKDKMDDWMFGCDVCQDVCPWNRFAVPHNQSKFKPNDFLKNLKKEEWKEITQELFSEIFKKSPVKRTKFAGLKRNIEFLDKNSI

SEQ ID NO: 75789 - protein, 314 aa, Chryseobacterium piscium
  REGION 1..314: note = tr|A0A3D9BTC9|A0A3D9BTC9_9FLAO Epoxyqueuosine reductase OS=Chryseobacterium piscium OX=333702 GN=queG; PE = 3 SV=1
MNSTAEKYSQLIKSKAKSFGFQNCGISKADFLEEDARHLEKWLKNNFHGEMKYMENHFDKRLDPRLLVEGSKSVISLSYNYFPEEKISALENFKISKYAYAEDYHEVVKEILRDMVFELQKEIGDFGFRVFVDSAPVLERSWAKKSGIGWVGKNANLITKQSGSFYFLAEIICDLDLISDHETTDHCGSCRKCIDACPTDAIVSEKIVDGSRCISYATIELKTEIPDYFKDKMEDWMFGCDICQDVCPWNRFSAPNLQAKFKPNEALKNFKKGEWKELTQEIFSEIFRKSPVKRTKFAGLKRNIEFLNQSSEEL

SEQ ID NO: 75790 - protein, 314 aa, unidentified
  source 1..314: note = Chryseobacterium polytrichastri
  REGION 1..314: note = tr|A0A1M7DXE9|A0A1M7DXE9_9FLAO Epoxyqueuosine reductase OS=Chryseobacterium polytrichastri OX=1302687; GN = queG PE=3 SV=1
MNSNAEKYSQLIKSKAERFGFQSCGISKADFLEEDARNLEKWLKNNFHGEMKYMENYFDKRLDPRLLVEGSKSVISLSYNYFPKEKISTLENYKISKYAYAEDYHEVVKEILREMVEELREEIGDFDCRVFVDSAPVLERSWARKSGIGWVGKNANLITKQNGSFYFLAEIICDLELIQDHETTDHCGTCRKCIDACPTDAIVSEKLIDGSKCISYATIELKNEIPDSFKDKMEDWMFGCDICQDVCPWNRFSAPNLQTKFAPNEALKNFKKGEWKELTQELFSEIFRKSPVKRTKFAGLKRNIEFLEQPLDKF

SEQ ID NO: 75791 - protein, 312 aa, unidentified
  source 1..312: note = Chryseobacterium rhizoplanae
  REGION 1..312: note = tr|A0A521EGK2|A0A521EGK2_9FLAO Epoxyqueuosine reductase OS=Chryseobacterium rhizoplanae OX=1609531; GN = queG PE=3 SV=1
MNAGAEKYSQLIKSKAKSFGFQSCGISKADFLEEDAPHLEKWLKNNYNGEMKYMENHFDKRLDPRLLVEGSKSVISLSYNYFPEEKISILENYKISKYAYAEDYHEVIKEILREMVAELQEEIGEFGFRVFVDSAPIMERSWARKSGIGWVGKNANLITKQSGSFYFLAEIICDLELIPDHATTDHCGSCRKCIDACPTDAIVSEKIIDGSRCISYATIELKNEIPDYFKDKMEDWMFGCDICQDVCPWNRFSAPNKQSRFQPNEALKNFKKGEWKELTQEIFSEIFRKSPVKRTKFAGLKRNIEFLQKSSD

SEQ ID NO: 75792 - protein, 314 aa, Chryseobacterium rhizosphaerae
  REGION 1..314: note = tr|A0A3D9DCG9|A0A3D9DCG9_9FLAO Epoxyqueuosine reductase OS=Chryseobacterium rhizosphaerae OX=395937; GN = queG PE=3 SV=1
MNAGAEKYSQLIKTKAKSFGFQNCGISKADFLEEDAAHLEKWLKNNFNGEMKYMENHFDKRLDPRLLVEGSKSVISLSYNYFPEEKISVLENYKISKYAYAEDYHEVIKEILRELVAELQEEIGEFGFRVFVDSAPVMERSWARKSGIGWVGKNANLITRQNGSFYFLAEIICDLELISDHETTDHCGTCRKCIDACPTDAIVSEKIIDGSRCISYATIELKNEIPDYFQDKMENWMFGCDICQDVCPWNRFSAPNKQSRFTPNEALKNFKKGEWKELTQEIFSEIFKKSPVKRTKFAGLKRNIEFLERSSDLF

SEQ ID NO: 75793 - protein, 314 aa, Chryseobacterium scophthalmum
  REGION 1..314: note = tr|A0A1N6FTT6|A0A1N6FTT6_9FLAO Epoxyqueuosine reductase OS=Chryseobacterium scophthalmum OX=59733; GN = queG PE=3 SV=1
MNSTAEKYSQLIKSKAKSFGFQNCGISKADFLEEDARHLEKWLKNNFHGEMKYMENHFDKRLDPRLLVEGSKSVISLSYNYFPEEKISALENFKISKYAYAEDYHEVVKEILRDMISELREEIGDFGFRVFVDSAPVLERSWAKKSGIGWVGKNANLITKQSGSFYFLAEIICDLDLIPDHETTDHCGSCRKCIDACPTDAIVSEKIVDGSKCISYATIELKTEIPDYFKDKMEDWMFGCDICQDVCPWNRFSAPNLQAKFKPNDALKNFKKGEWKELTQEIFSEIFRRSPVKRTKFAGLKRNIEFLNQSSKEL

SEQ ID NO: 75794 - protein, 312 aa, unidentified
  source 1..312: note = Chryseobacterium sediminis
  REGION 1..312: note = tr|A0A5B2U2V7|A0A5B2U2V7_9FLAO Epoxyqueuosine reductase OS=Chryseobacterium sediminis OX=1679494 GN=queG; PE = 3 SV=1
MNAGAEKYSQLIKSKAKSFGFQSCGISKADFLEEDAPRLEKWLKNNYNGEMKYMENHFDKRLDPRLLVEGSKSVISLSYNYFPEEKISILENYKISKYAYAEDYHEVIKEILREMVAELQEEIGEFGFRVFVDSAPIMERSWARKSGIGWVGKNANLITKQNGSFYFLAEIICDLELIADHATTDHCGSCRKCIDACPTDAIVSEKIIDGSRCISYATIELKNEIPDYFKDKMEDWMFGCDICQDVCPWNRFSAPNKQSRFKPNEALKNFKKGEWKEITQEIFSEIFRKSPVKRTKFAGLKRNIEFLQKSSD

SEQ ID NO: 75795 - protein, 316 aa, unidentified
  source 1..316: note = Chryseobacterium shandongense
  REGION 1..316: note = tr|A0A3G6MVS1|A0A3G6MVS1_9FLAO Epoxyqueuosine reductase OS=Chryseobacterium shandongense OX=1493872; GN = queG PE=3 SV=1
MNSNAEKYSQLIKARAKSFGFQSCGISKADFLEEDAKPLEEWLKNNFHGEMKYMENHFDKRLDPRLLVEGSKSVISLSYNYFPEEKIPTLDNFKISKYAYAEDYHEVIKEILRDIVSGLQEEIGEFAFRIFVDSAPVLERSWARKSGIGWVGKNANLITKQNGSFYFLAEIICDLELTPDYPTTDHCGTCRKCIDACPTNAIISDKLIDGSKCISYATIELKNEIPDYFKDKMDDWMFGCDVCQDVCPWNRFSAPTQQRKFAPNEALKNFKKGEWKELTQELFSEIFRKSPVKRTKFTGLKRNIEFLENTGKWLDF

SEQ ID NO: 75796 - protein, 316 aa, unidentified
  source 1..316: note = Chryseobacterium shandongense
  REGION 1..316: note = tr|A0A3G6R0A7|A0A3G6R0A7_9FLAO Epoxyqueuosine reductase OS=Chryseobacterium shandongense OX=1493872; GN = queG PE=3 SV=1
MNSNAEKYSQLIKARAKSFGFQSCGISKADFLEEDAKPLEEWLKNNFHGEMKYMENHFDKRLDPRLLVEGSKSVISLSYNYFPEEKIPTLDNFKISKYAYAEDYHEVIKEILRDMVSGLQEEIGEFAFRVFVDSAPVLERSWARKSGIGWVGKNANLITKQNGSFYFLAEIICDLELTPDYPTTDHCGTCRKCIDACPTNAIISDKLIDGSKCISYATIELKNEIPDYFKDKMDDWMFGCDVCQDVCPWNRFSAPTQQRKFAPNEALKNFKKGEWKELTQELFSEIFRKSPVKRTKFTGLKRNIEFLENTGKWLDF

SEQ ID NO: 75797 - protein, 317 aa, Chryseobacterium shigense
  REGION 1..317: note = tr|A0A1N7I7E4|A0A1N7I7E4_9FLAO Epoxyqueuosine reductase OS=Chryseobacterium shigense OX=297244 GN=queG; PE = 3 SV=1
MKILNSGAEKYSQLIKTKAERFGFQSCGISKAEFLEEDAPNLEKWLKNNFHGEMKYMENHFDKRLDPRLLVEGSKSVISLSYNYFPKEKISALENYKISKYAYAEDYHEVVKEILREMVSELQDEIGAFGFRVFVDSAPVMERSWARKSGIGWVGKNANLITRQNGSFYFLAEIICDLELVPDHATTDHCGTCRKCIDACPTDAIVSEKIIDGSRCISYATIELKNEIPEHFKDKMEDWMFGCDICQDVCPWNRFSAPNKQNRFAPNESLKNFKKEEWKEITQEIFSEIFRKSPVKRTKFAGLKRNIEFLEGSSDKI

SEQ ID NO: 75798 - protein, 317 aa, Chryseobacterium shigense; identical to SEQ ID NO: 75737
  REGION 1..317: note = tr|A0A376E7U9|A0A376E7U9_9FLAO Epoxyqueuosine reductase OS=Chryseobacterium shigense OX=297244 GN=queG; PE = 3 SV=1

SEQ ID NO: 75799 - protein, 314 aa, Chryseobacterium soldanellicola
  REGION 1..314: note = tr|A0A1H0Y4X4|A0A1H0Y4X4_9FLAO Epoxyqueuosine reductase OS=Chryseobacterium soldanellicola OX=311333; GN = queG PE=3 SV=1
MNSSAEKYSQLIKSKAKSFGFQSCGISKADFLEEDARHLEEWLKNNFHGEMKYMENHFDKRLDPRLLVEGSKSVISLSYNYFPKEKISSFENFKISKYAYAEDYHEVIKEILREMVADLQEEIGEFGFRVFVDSAPVLERSWAKKSGIGWVGKNANLITKQNGSFYFLAEIICDLELISDHETTDHCGTCRKCIDACPTDAIVSDKIIDGSKCISYATIELKNEIPDYFKDKMEDWMFGCDICQDVCPWNRFSAPNLQSRFSPNEALRNFKKGEWKELTQELFSEIFKKSPVKRTKFAGLKRNIEFLQQPSDKI

SEQ ID NO: 75800 - protein, 314 aa, Chryseobacterium soli
  REGION 1..314: note = tr|A0A086A8K0|A0A086A8K0_9FLAO Epoxyqueuosine reductase OS=Chryseobacterium soli OX=445961 GN=queG PE=3; SV = 1
MNSNAEKYARLIKSKADRFGFQSCGISKADFLEEDARNLEKWLQNNFHGEMKYMENHFDKRLDPRLLVEGSRSVISLSYNYFPKEKISTLENYKISKYAYAEDYHEVVKEILRDMVLELQEEIGEFGFRVFVDSAPVLERSWARKSGIGWVGKNANLITKQSGSFYFLAEIICDLELAADHETTDHCGTCRKCIDACPTDAIVSEKIVDGSKCISYATIELKSEIPDSFKGKMEDWMFGCDICQDVCPWNRFSAPNIQSRFMPNEHLKNFKKGEWKELTQELFSEIFRKSPVKRTKFAGLKRNIEFLKSSSDPL

SEQ ID NO: 75801 - protein, 322 aa, Chryseobacterium solincola
  REGION 1..322: note = tr|A0A0C1CRW3|A0A0C1CRW3_9FLAO Epoxyqueuosine reductase OS=Chryseobacterium solincola OX=510955 GN=queG; PE = 3 SV=1
MPQSAEIYATLIKSKAEKFGFQSCGISRADFLADDAKPFENYLKNNYHGEMSYMENYFDKRLDPRLLVEGSKSVISLSYNYFPEEDLTKFGQLKISKYAYGQDYHEIIKNILREMVAELQEEIGDFECRVFTDSAPILERSWARKSGIGWVGKNANLITKQTGSFYFLAEIICDLELEIDAPTTDHCGSCRKCIDACPTEAIVSERIIDGSKCISYATIELKNEIPESFQGKMEDWMFGCDICQDVCPWNRFSKPHQQELFKPNQLLHKFEKSDWQELSQDLFSEIFKKSPVKRAKFSGLKRNIDFITQDSDVVDFKANLKL

SEQ ID NO: 75802 - protein, 307 aa, Chryseobacterium sp.
  REGION 1..307: note = tr|A0A357BB73|A0A357BB73_9FLAO Epoxyqueuosine reductase OS=Chryseobacterium sp. OX=1871047 GN=queG PE=3; SV = 1
MNLQEKYSRLIKSKALAFGFQSCGISKADFLEKEAPRLEKWLRNGFHGKMGYMENHFDKRLDPRLLVEGARSVISLSYNYFPEKKQNPGNYKIAKYAYGEDYHDVIKEKLRHLVSELQNEVGEFGFRVFVDSAPVLEKAWAKKSGIGWVGKNSNLITKQHGSFYFLAEIICDLDLSEDSPVTDHCGSCTRCIDACPTQAIVSDKIIDGSRCISYATIELKDQIPDSFKDKMEDWMFGCDICQDVCPWNRFSAPTLEEKFRPKPAIMDFTKQDWKEITQEIFSSIFKGSAVKRTKFAGLKRNLDFLSE

SEQ ID NO: 75803 - protein, 314 aa, Chryseobacterium sp.; identical to SEQ ID NO: 75792
  REGION 1..314: note = tr|A0A1W2B5U9|A0A1W2B5U9_9FLAO Epoxyqueuosine reductase OS=Chryseobacterium sp. YR221 OX=1500293 GN=queG; PE = 3 SV=1

SEQ ID NO: 75804 - protein, 314 aa, Chryseobacterium taeanense
  REGION 1..314: note = tr|A0A1G8IQW0|A0A1G8IQW0_9FLAO Epoxyqueuosine reductase OS=Chryseobacterium taeanense OX=311334 GN=queG; PE = 3 SV=1
MNSNAEKYSQLIKARAQSFGFQSCGISKAGFLEEEARPLEAWLKNNFHGEMKYMENHFDKRLDPRLLVEGSKSVISLSYNYFPDEQISTLDNFKISKYAYAEDYHEVIKEILRDMVSGLQEEIGEFAFRVFVDSAPVLERSWARKSGIGWVGKNANLITKQNGSFYFLAEIICDLELIPDHETTDHCGTCRKCIDACPTNAIVSEKLIDGSKCISYATIELKDSIPDYFKDKMDDWMFGCDVCQDVCPWNRFSAPHHQTKFRPNESLKNFKKGEWKELTQELFSEVFRKSPVKRTKFAGLKRNIEFLEKKSDKL

SEQ ID NO: 75805 - protein, 316 aa, Chryseobacterium taichungense
  REGION 1..316: note = tr|A0A1H7YDK9|A0A1H7YDK9_9FLAO Epoxyqueuosine reductase OS=Chryseobacterium taichungense OX=295069; GN = queG PE=3 SV=1
MNSNAEKYSQLIKARAKSFGFQSCGISKADFLEEDARPLEEWLKNNFHGEMKYMENHFDKRLDPRLLVEGSKSVISLSYNYFPEEKISTLDNFKISKYAYAEDYHEVIKDILREMVAGLQEDIGAFGFRVFVDSAPVLERSWARKSGIGWVGKNANLITKQNGSFYFLAEIICDLELIPDHETTDHCGTCRKCIDACPTNAIVSEKLIDGSKCISYATIELKNDIPDYFKDKMDDWMFGCDVCQDVCPWNRFSAPTHQKKFSPNQALKNFKKGEWKELTQELFSEIFRKSPVKRTKFAGLKRNIEFLERSSDKLNF

SEQ ID NO: 75806 - protein, 315 aa, unidentified
  source 1..315: note = Chryseobacterium taihuense
  REGION 1..315: note = tr|A0A1G9LDB0|A0A1G9LDB0_9FLAO Epoxyqueuosine reductase OS=Chryseobacterium taihuense OX=1141221 GN=queG; PE = 3 SV=1
MNSKAEKYSQLIKTKASSFGFQNCGISKADFLEEDAKHLENWLKRNYHGEMKYMENHFDKRLDPRLLVEGSRSVISLSYNYFPEEKIPSLDNFKISKYAYAEDYHEVIKDVLREMVTELQQEIGEFSYRVFVDSAPVMERSWAKKSGIGWVGKNANLITKQSGSFYFLAEIICDLELIADHETTDHCGTCRKCIDACPTDAIVSDKIVDGSKCISYATIELKNEIPDHFKNKMEDWMFGCDICQDVCPWNRFSVPNLQDKFKPNHQLRNFRKGEWKELTQDLFSEIFRKSPVKRTKFSGLKRNIDFLAQSEDRKP

SEQ ID NO: 75807 - protein, 314 aa, Chryseobacterium taiwanense
  REGION 1..314: note = tr|A0A0B4E3U4|A0A0B4E3U4_9FLAO Epoxyqueuosine reductase OS=Chryseobacterium taiwanense OX=363331 GN=queG; PE = 3 SV=1
MNSNAEKYSQLIKAKAKSFGFQNCGISKADFLEEDAPNLEKWLKNNFHGEMKYMENHFDKRLDPRLLVEGSKSVISLSYNYFPEEKISALENFKISKYAYAEDYHEVIKEILRDMVAELHDEIGEFGFRVFVDSAPVLERSWAKKAGIGWVGKNANLITKQSGSFYFLAEIICDLELVPDHPVTDHCGSCRKCIDACPTNAIISEKIIDGSKCISYATIELKNEIPDYFKDKMDDWMFGCDVCQDVCPWNRFSAPNAQTKFQPNEALKNFKKGEWKELTQELFSEIFRKSPVKRTKYAGLKRNIEFLDKSSEKK

SEQ ID NO: 75808 - protein, 316 aa, unidentified
  source 1..316: note = Chryseobacterium takakiae
  REGION 1..316: note = tr|A0A1M4ZHA8|A0A1M4ZHA8_9FLAO Epoxyqueuosine reductase OS=Chryseobacterium takakiae OX=1302685 GN=queG; PE = 3 SV=1
MNSNAEKYSQLIKAKAKSFGFQSCGISKADFLEEDAKPLEEWLKSNFHGEMKYMENHFDKRLDPRLLVEGSKSVISLSYNYFPEEKIPTLDNFKISKYAYAEDYHEVIKDILREMVSGLQQEIGEFAFRVFVDSAPVLERSWARKSGIGWVGKNANLITKQNGSFYFLAEIICDLELVPDHATTDHCGTCRKCIDACPTNAIVSDKLIDGTKCISYATIELKNEIPDYFKDKMDDWMFGCDVCQDVCPWNRFSAPTQQKKFAPNEALKNFKKDEWKELTQELFSEIFRKSPVKRTKFAGLKRNIEFLEKNNKSADL

SEQ ID NO: 75809 - protein, 315 aa, unidentified
  source 1..315: note = Chryseobacterium taklimakanense
  REGION 1..315: note = tr|A0A3G8WWE4|A0A3G8WWE4_9FLAO Epoxyqueuosine reductase OS=Chryseobacterium taklimakanense OX=536441; GN = queG PE=3 SV=1
MLPNREKYSALIKSRAKKFGFQSCGISKSGFLEEDAQPLEDYLAQGYHGEMQYMENYFDKRLDTTKLVEGSKSVISLSYNYFPEEEISTLDNYKISKYAYAEDYHEIIKEILREMITELQEEIGDFHFGIFVDSAPVLERSWARKSGIGWVGKNANLITKQKGSFFFLAEIICDLELEPDSPVTDHCGRCTSCIDACPTNAIVGDKIIDGSKCISYATIELKNEIPESFKNKMEDWMFGCDICQDVCPWNRFSVPHNQPKFLPNHLLRTYRKDDWKELTQELFSEIFRKSPVKRTKFAGLKRNIEFLGDRPDPEV

SEQ ID NO: 75810 - protein, 325 aa, unidentified
  source 1..325: note = Chryseobacterium taklimakanense
  REGION 1..325: note = tr|A0A239XUY0|A0A239XUY0_9FLAO Epoxyqueuosine reductase OS=Chryseobacterium taklimakanense OX=536441; GN = queG PE=3 SV=1
MNCLIFALSLMLPNREKYSALIKSRAKKFGFQSCGISKSGFLEEDAQPLEDYLGQGYHGEMQYMENYFDKRLDTTKLVEGSKSVISLSYNYFPEEEISTLDNYKISKYAYAEDYHEIIREILREMVAELQEEIGDFHFRIFVDSAPVLERSWARKSGIGWVGKNANLITKQKGSFFFLAEIICDLELEPDSPVTDHCGRCTSCIDACPTNAIVGDRIIDGSKCISYATIELKNEIPESFKNKMEDWMFGCDICQDVCPWNRFSVAHNQPKFLPNHILRTYRKADWKELTQELFSEIFRKSPVKRTKFAGLKRNIEFLGDRPDPEV

SEQ ID NO: 75811 - protein, 333 aa, Chryseobacterium treverense
  REGION 1..333: note = tr|A0A1I3JSY0|A0A1I3JSY0_9FLAO Epoxyqueuosine reductase OS=Chryseobacterium treverense OX=631455 GN=queG; PE = 3 SV=1
MLPQSAEIYATLIKSKAEKFGFQSCGISRADFLADDAKPLENYLKNNYHGEMSYMENYFDKRLDPRLLVEGSKSVISLSYNYFPEEDLTKFGQLKISKYAYGQDYHEIIKNILREMVAELQEEIGDFECRIFTDSAPILERSWARKSGIGWVGKNANLITKQTGSFYFLAEIICDLELEIDAPTTDHCGSCRKCIDACPTDAIVSERIIDGSKCISYATIELKNEIPESFKGKMQDWMFGCDICQDVCPWNRFSKPHHQELFKPNQLLHKFEKSDWQELSQDLFSEIFKKSPVKRTKFSGLKRNIDFLTKQPETFNFKEKVNPEKISAPQNMD

SEQ ID NO: 75812 - protein, 315 aa, Chryseobacterium ureilyticum
  REGION 1..315: note = tr|A0A1N7PCG9|A0A1N7PCG9_9FLAO Epoxyqueuosine reductase OS=Chryseobacterium ureilyticum OX=373668; GN = queG PE=3 SV=1
MKLINAGAEKYSQLIKSKAKSFGFQSCGISKADFLEEDAAHLEKWLKNNFNGEMKYMENHFDKRLDPRLLVEGSKSVISLSYNYFPEEKISILENFKISKYAYAEDYHEVIKEILREMVAELQEEIGEFGFRVFVDSAPILERSWARKSGIGWVGKNANLITKQNGSFYFLAEIICDLELVPDHETTDHCGTCRKCIDACPTDAIVSEKIIDGSRCISYATIELKNEIPDSFKDKMEDWMFGCDICQDVCPWNRFSAPHQQSRFKPNEALKNFKKGEWKEITQEIFSEIFRKSPVKRTKFAGLKRNIEFLQKSSD

SEQ ID NO: 75813 - protein, 312 aa, unidentified
  source 1..312: note = Chryseobacterium viscerum
  REGION 1..312: note = tr|A0A316WF45|A0A316WF45_9FLAO Epoxyqueuosine reductase OS=Chryseobacterium viscerum OX=1037377 GN=queG; PE = 3 SV=1
MNAGAEKYSQLIKSKAKSFGFQSCGISKTDFLEEDAPHLEKWLKNNYNGEMKYMENHFDKRLDPRLLVEGSKSVISLSYNYFPEEKISILENYKISKYAYAEDYHEVIKEILREMVAELQEEIGEFGFRVFVDSAPVMERSWARKSGLGWVGKNANLITRQNGSFYFLAEIICDLELIPDHATTDHCGTCRKCIDACPTDAIVSEKIIDGSRCISYATIELKEEIPDYFKDKMEDWMFGCDICQDVCPWNRFSAPNKQSRFKPNESLKNFKKGEWKELTQEIFSEIFRKSPVKRTKFAGLKRNIEFLQRSSD

SEQ ID NO: 75814 - protein, 314 aa, Chryseobacterium wanjuense
  REGION 1..314: note = tr|A0A1I0S069|A0A1I0S069_9FLAO Epoxyqueuosine reductase OS=Chryseobacterium wanjuense OX=356305 GN=queG; PE = 3 SV=1
MNSNAEKYSQLIKSKAKSFGFQSCGISKADFLEDDARHLETWLKNNFHGEMKYMENHFDKRLDPRLLVEGSKSVISLSYNYFPKEKISALENFKISKYAYAEDYHEVIKEILREMIAELQEEIGAFGFRVFVDSAPVMERSWAKKSGIGWVGKNANLITKQNGSFYFLAEIICDLELIPDHETTDHCGTCRKCIDACPTDAIVSDKIIDGSKCISYATIELKNEIPDYFKDKMDDWMFGCDVCQDVCPWNRFSVPNLQSRFAPNEALKNFKKGEWKELTQELFSEIFRKSPVKRTKFAGLKRNIEFLGGSSDKN

SEQ ID NO: 75815 - protein, 311 aa, unidentified
  source 1..311: note = Chryseobacterium xixisoli
  REGION 1..311: note = tr|A0A4R8IEG2|A0A4R8IEG2_9FLAO Epoxyqueuosine reductase OS=Chryseobacterium xixisoli OX=1476462 GN=queG; PE = 3 SV=1
MCCNMSNQEKYSSLIKSKALAFGFQSCGISKADFLEEEAPNLEKWLKNNFNGEMRYMENHFDKRLDPRLLVEGSKSVISLSYNYFPEELQTNTDFKLSKYAYGEDYHEVIKDKLRNLVAELQSEIGEFSFRVFVDSAPVLEKAWAKKSGIGWVGKNSNLITKKNGSFYFLAEIICDLDLIQDSPVTDHCGSCTKCIDACPTQAIISDKIIDGSKCISYATIELKDQIPDFFKDKMEDWMFGCDICQDVCPWNRFSAPTLEEKFRPNSEIKNFTKQEWKDITQEIFSSVFKKSAVKRTKFSGLKRNLDFLSG

SEQ ID NO: 75816 - protein, 307 aa, unidentified
  source 1..307: note = Chryseobacterium zeae
  REGION 1..307: note = tr|A0A1N6EPT6|A0A1N6EPT6_9FLAO Epoxyqueuosine reductase OS=Chryseobacterium zeae OX=1416779 GN=queG PE=3; SV = 1
MNNKERYSNLIKSKAMAFGFQSCGISKADFLEEEAPHLEQWLKNNFHGEMKYMENYFDKRLDPRLLVEGSKSVISLSYNYFPEEIQTNKDFKLAKYAYGEDYHDVIKDKLRLMIAELQEEIGEFSFRVFVDSAPVLEKAWAKKSGIGWVGKNSNLITKKNGSFYFLAEIICDLDLIQDYVVTDHCGSCTKCIDACPTQAIVSDKIIDGSKCISYATIELKDQIPDFFKDKMEDWMFGCDICQDVCPWNRFSAPTLEEKFRPNSEIKNFTKQEWKDITKEVFSKVFRKSAVKRTKFVGLKRNLDFLSE

SEQ ID NO: 75817 - protein, 309 aa, unidentified
  source 1..309: note = Chryseolinea flava
  REGION 1..309: note = tr|A0A364Y6K1|A0A364Y6K1_9BACT Epoxyqueuosine reductase OS=Chryseolinea flava OX=2059302 GN=queG PE=3; SV = 1
MHLAARTQFIKETAKSLGFSFCGISKAEFLDEEAPLLEQWLRKQYQGKMLYLENHFDKRLDPTLLVPGAKSVVSLLYNYAPEKDIAAEGDFKIAKYAYGEDYHFVIKDKLKHFLHLLEEKIGHVEGRAFVDSAPVMERAWAKRSGLGWIGKNSLLLNRGMGSFFFIAELIIDLELDYDGPIKDYCGTCTACMDACPTDAIPQPYVVDGSKCISYFTIELKEEIPADVKGKFENWIFGCDICQDVCPWNSFAKPHQEQRFQPSSTLREMSPGDWREITEEVFKTLFKNSPIQRTKLTGLKRNIKFVSESG

SEQ ID NO: 75818 - protein, 317 aa, unidentified
  source 1..317: note = Chryseolinea serpens
  REGION 1..317: note = tr|A0A1M5WET2|A0A1M5WET2_9BACT Epoxyqueuosine reductase OS=Chryseolinea serpens OX=947013 GN=queG PE=3; SV = 1
MTAHHTAFVKTTAAALGFSFCGISKAEFLKDEAPRLEEWLKRGYQGKMGYLENHFDKRLDPTLLVPGAKSVVSLIYNYAPQKPLEGKSDLKIARYAYGEDYHTVVKDKLKIFLDKIREGVGEVHGRAFVDSAPVMERAWAKRSGLGWIGKNSLLLNRSHGSFFFLAELIIDLELDHDEGMKDYCGTCTACMDACPTDAISEPYVVDGSKCISYFTIELKEEIPASVKGKFDNWIFGCDICQEVCPWNSFAKPHQEQRFNPPPELENMTRQDWREITEDVFKKLFPKSAVQRTKLKGLQRNILFVEDQDARPGDRERE

SEQ ID NO: 75819 - protein, 317 aa, unidentified
  source 1..317: note = Chryseolinea sp.
  REGION 1..317: note = tr|A0A385SMR3|A0A385SMR3_9BACT Epoxyqueuosine reductase OS=Chryseolinea sp. KIS68-18 OX=2321403 GN=queG; PE = 3 SV=1
MTAHHTAFVKATAASLGFSFCGISKAEFLKDEAPRLEEWLKRGYQGKMGYLENHFDKRLDPTLLVPGAKSVVSLIYNYAPQKPLEGKSDLKIARYAYGEDYHTVVKDKLKIFLDKIQEEIGEVHGRAFVDSAPVMERAWAKRSGLGWIGKNSLLLNRSQGSFFFLAELIIDLELDHDEGMKDYCGTCTACMDACPTDAISEPYVVDGSKCISYFTIELKEEIPASVKGKFDNWIFGCDICQEVCPWNSFAKPHQEQRFNPPPELENMTRQDWREITEDVFKKLFPKSAVQRTKLKGLQRNILFVEDENVRRGDRERE

SEQ ID NO: 75820 - protein, 377 aa, unidentified
  source 1..377: note = Chryseomicrobium excrementi
  REGION 1..377: note = tr|A0A2M9F3V3|A0A2M9F3V3_9BACL tRNA epoxyqueuosine(34) reductase QueG OS=Chryseomicrobium excrementi OX=2041346 GN=queG PE=4 SV=1
MNVRDFQQQLIHYAHSIGIDKIGFASAAPFPDLKQRLLLQQQLGYASGFEEPDITKRTEPVQLLDGVQTIISIALAYPSKMKDAPQSKRGARRGIFARASWGMDYHTVLREKLAKLEAFILVHAPDAKLKSMVDTGELSDRAVAERAGIGWSAKNCSIITPEFGSYVYLGEMLTNLPFEPSVPMEDECGDCRLCLDICPTGALIEGGQLNAQRCIAFLTQTKTMVPKEFRAKIGNRVYGCDTCQTVCPKNKGKHSAHQQDFTPDPELVKPLLMPLLEHTNRTFKETYGHMSGAWRGKNPIQRNAIIALVHFKERESIPKLISILSEDPRPVMRGTAAWALGELTSTEGTEALRHQLDQEKEGLVIEEIQEALLKGEQ

SEQ ID NO: 75821 - protein, 310 aa, unidentified
  source 1..310: note = Chrysiogenales bacterium
  REGION 1..310: note = tr|A0A524PZ97|A0A524PZ97_9BACT Epoxyqueuosine reductase (Fragment) OS=Chrysiogenales bacterium; OX = 2528039 GN=E4G96_06595 PE=4 SV=1
KSIIVLVESYFTAAFPPEMERIFGRCYLDDDRITKDGLSRRIKTFRQFLRDNGIESKVPFNLPHRAAAVRAGLGGTGKNCLFYSRSAARKSSWVFPFTVTVDREFVPDRPSEGMECPEWCRNACVAACPTRALKGNSRVDPRKCISFLSYFGSGLTPRDLREPMGMYVYGCDRCQEVCPRNAPWLAQDLPVNERVAAKAQYFDLPRLLHMDREYFTARIWPHMFYMPPDDIWRWKMNVARVMGNSTDEKYTSDLSRAFRENDDPRVKGMAAWALGKIGGAEAKSLLHGFMKEAGDDTIRDEIGHALTMCG

SEQ ID NO: 75822 - protein, 349 aa, unidentified
  source 1..349: note = Chthoniobacter flavus
  REGION 1..349: note = tr|B4D532|B4D532_9BACT Epoxyqueuosine reductase; OS = Chthoniobacter flavus Ellin428 OX=497964 GN=queG PE=3; SV = 1
MVDRPVKEELLALTHQLGFDLCRIAVCAAPPHAAEFRAWLAAGRAGEMAWLERNEARRTDPQQVLPGAKSVIVLGMNYWNADGETRKEEGVHGRIARYAWGDDYHDIIEKKLKALDEWLTARGGRQRCYVDTGPVLERDVAAVAGAGWQGKSTMLIHPQLGTWFFLAEILTTLEFEADAPMADHCGKCTRCIAACPTGAITAPRQLDARRCVSYLTIENKGSIPEEFRAAIGDRIYGCDDCLTACPWNRFAHASRESAFAAREYVHGWSLRDFLGLDDDAFRQLFRKSPIKRIKRRGFLRNVCVALGNIGTREDLPALEKAAHDPEPLIAEHAQWAIERIEARVVAQAR

SEQ ID NO: 75823 - protein, 346 aa, unidentified
  source 1..346: note = Chthoniobacterales bacterium
  REGION 1..346: note = tr|A0A2W5ZWY0|A0A2W5ZWY0_9BACT tRNA epoxyqueuosine(34) reductase QueG OS=Chthoniobacterales bacterium OX=2201154 GN=queG PE=4 SV=1
MEIVDRARVLGFDLCRIATADAPRHGEEFRAWLREGAAGEMDWMARGEEKRCDPQQVLPGARSVIVVALNYWQGEQTASPATGRIARYAWGDDYHEVMLTKLEQLDAFLIEHGGIQKCYVDTGPVLERDHAAEAGIGWHGKSTMLIDPKLGTWFFLAEILTTLALPPDAPQPARCGSCQRCITACPTGAITEPHRLDARRCISYLTIELKGSIPLELRPLIGDRIYGCDDCLDACPWNRFASVSREASFAAGPATTMTLRDYLALDDAKFRELFRRSPIKRIKRRGFLRNVCVALGNVGNHADLSALETAAVDPEPLIAEHATWAIERIHARLSVRSPDEPGHAII

SEQ ID NO: 75824 - protein, 354 aa, unidentified
  source 1..354: note = Chthoniobacterales bacterium
  REGION 1..354: note = tr|A0A2W5YHJ1|A0A2W5YHJ1_9BACT Epoxyqueuosine reductase OS=Chthoniobacterales bacterium OX=2201154; GN = queG PE=3 SV=1
MSSDLRDQVVVLASEIGFDLCRFTRADAPTHAREFRDWLEQGAAGEMNYLERNAQRRCDPQLVLPGVKTVIVVALNYFQEGRRSQTAATGRIARYAWGEDYHPLIEKKLKKLDEFLRGHGGVQKCYVDTGPMLERDHAAAAGIGWQGKSTMLLNRELGAWFFLAEILTTLEFAPSAPEANRCGTCTRCIAACPTGALTPHRLDARRCISYLTIELKGSIPPELRPLIGDRIYGCDECLDVCPWNRFARASREAAFQMRPEVAAMRLRDYLELDDERFRQLFRNSPIRRTKRRGLLRNVCVALGNVGTADDLPALRKAAAGPEPLIAEHAAWAIEQIESRAVPLPPRRTAATTMV

SEQ ID NO: 75825 - protein, 363 aa, Chthonomonas calidirosea
  REGION 1..363: note = tr|S0EY00|S0EY00_CHTCT Epoxyqueuosine reductase; OS = Chthonomonas calidirosea (strain DSM 23976 / ICMP 18418 / T49) OX=1303518 GN=queG PE=3 SV=1
MMQTTTTREEQIKAYAKELGFDLVGIAEAIPSIFQQQYRDWLEKGYAGQMEYLARNLERRLNPQELLPNARSLIVVAMNYYADTEEGPGTPPVRPNHAIFARYARGDDYHDVITKRLYQLLEYIKKRIDPNAAGRVYVDAGPLLEREVAQRAGLGWFGKNTMLINSRRGSYFFLGALVTDLDLEPDRPAQGHCGRCKRCIEACPTGALIAPYQLDARRCISYLTIELKEAIPVELRPALSANGNRIFGCDICQEVCPFNQKFSVPTTEPAFQPREITRNSRLVNLLQLSEPEFREKFRKSPVKRAKRRGLLRNVATALAYSDDPEAEAALQNAAEHDPDPLVREHAAWALDTLRKRKTTSSSP

SEQ ID NO: 75826 - protein, 389 aa, unidentified
  source 1..389: note = Ciceribacter sp.
  REGION 1..389: note = tr|A0A4Q2SZ10|A0A4Q2SZ10_9RHIZ Epoxyqueuosine reductase OS=Ciceribacter sp. F8825 OX=2509717 GN=queG; PE = 3 SV=1
MSADGAPERPTDDKAVRLRHRLTAFIREEATAQGFELCRVTRPDGIPEAPARLAAYIEAGYHGTMGWMEETRQRRADPKVLWSDVRSIVMFGMNYGPEEDPRSVLGKKDRAAISVYARNRDYHDVMKGRLKEIAGRFAARAGADVKVFVDTAPIMEKPLAAAAGLGWQGKHTNLVSREYGSWLFLGSLFTTAELDVDPPETDHCGSCRACLDACPTAAFPAPYRIDARRCISYLTIEHKGPIDRALRPAFGNRVYGCDDCLAACPWNKFAETAREMKLKARDDLREPEIAHLLSLDDAAFRTLFSGSPVKRIGRNRFIRNLLIAAGNSARPELAEPCRRLLDDDAPEVRGMAVWALSRLIDRDTFEALQLGHRPQEQDPDVQAEWDFGR

SEQ ID NO: 75827 - protein, 353 aa, Citreicella sp.
  REGION 1..353: note = tr|A0A355QU10|A0A355QU10_9RHOB Epoxyqueuosine reductase OS=Citreicella sp. OX=1960284 GN=queG PE=3 SV=1
MNEQGQHEDLKARLVEEARAVGFSACRICRPGDVPQVAERLAEFLAAGRHGQMGWMAERTGWRGDPTALWPEARSVIMLAENYGPDHDPRAVLARPERAAVSVYAQNRDYHDVVKKRLKRLGRWLMAAAEAEAPQIKVFVDTAPVMEKPLGQAAGLGWQGKHTNLVSRDLGSWFFLGSIFTTLALPVDGAERDHCGSCRACLDACPTDAFPAPYQLDARRCISYLTIEHAGPVAEDLRPLLGNRIYGCDDCLAACPWNKFAEQAAEIKYHARDDLRAPALADLARLDDAGFRALFSGSPIKRIGRDRFVRNVLYAIGNSGRGDLREVAQGLCADADDTVRDAAHWAVARLAQG

SEQ ID NO: 75828 - protein, 349 aa, Citreicella sp.
  REGION 1..349: note = tr|D0DBE6|D0DBE6_9RHOB 4Fe-4S ferredoxin, iron-sulfur cluster binding protein OS=Citreicella sp. SE45 OX=501479 GN=CSE45_2946 PE=4 SV=1
MSLKERLVAEAGATGFAASRVCRPGDVPQAAGRLAAFLDAGHHGQMGWMAERTAWRGNPAALWPEARSVIMLAENYGPEGDPLAVLEQRDRAAISVYAQNRDYHDVVKKKLKRLGRWLLAAAEKELGLAAEIKVFVDTAPVMEKPLGQAAGLGWQGKHTNLVSREIGSWFFLGAIFTTLELAPDGAERDHCGSCRACLDICPTGAFPAPYQLDARRCISYLTIEHGGPVDEELRSLLGNRIYGCDDCLAVCPWNKFAHRAGEAKYHAREELLAPELSELAGLDDAGFRALFSGSPIKRIGRDRFVRNVCYAIGNSGDAALRPAAQALCDDPDPALRDAARWAVARLDGV

SEQ ID NO: 75829 - protein, 349 aa, Citreimonas salinaria
  REGION 1..349: note = tr|A0A1H3HW28|A0A1H3HW28_9RHOB Epoxyqueuosine reductase OS=Citreimonas salinaria OX=321339 GN=queG PE=3; SV = 1
MPIADAADLKQRVFARALEEGFSSARVCAPDAVPQVMERLQAYLDAGYHGQMGWMADRVHWRGDPAALWPEARSVIMLAENYGPDHDPLAVLETPESAAISVYAQNRDYHDVAKKRLKRLGRWLIDEAGGEIKVFVDTAPVPEKALAQAAGLGWQGKHTNVVSRELGSWFFLGCLFTTLDLPKDAAEVDHCGSCRRCLDVCPTDAFPAPYRLDARRCISYLTIEHKGPVDEALRPALGNRIYGCDDCLAVCPWNKFAQASAEAKYHARDDLLAPDLADLAALDDAAFRALFSGSPIKRIGRDRFVRNVCYAIGNSGAARLVPAAQALCDDPDPAVADAARWAVDRLRGD

SEQ ID NO: 75830 - protein, 384 aa, Citrobacter amalonaticus
  REGION 1..384: note = tr|A0A2U4DSZ5|A0A2U4DSZ5_CITAM Epoxyqueuosine reductase OS=Citrobacter amalonaticus OX=35703 GN=queG; PE = 3 SV=1
MVWSVMSEPLDLNQLAQKIKQWGLELGFQQVGITDTDLSESEPKLQAWLDKQYHGEMDWMARHGMMRARPHELLPGTLRVISVRMNYLPAHAAFASTLKNPTQGYISRYALGRDYHKLLRNRLKKLGERIQQHCVSLNFRPFVDSAPILERPLAEKAGLGWTGKHSLILNREAGSFFFLGELLIDLPLPVDAPVEERCGKCVACITTCPTGAIVAPYTVDARRCISYLTIELEGAIPEALRPLMGNRIYGCDDCQLICPWNRYSQLTDEDDFSPRKPLHAPELIELFARNEAWFLKVTEGSAIRRIGHLRWLRNIAVALGNAPWSDAALSALESRRGEHPLLDEHIEWAVAQQIAKRNADVIEVQSPKQRRLVNAIEKGLPRDA

SEQ ID NO: 75831 - protein, 379 aa, Citrobacter amalonaticus
  REGION 1..379: note = tr|A0A0F6TZT2|A0A0F6TZT2_CITAM Epoxyqueuosine reductase OS=Citrobacter amalonaticus Y19 OX=1261127; GN = queG PE=3 SV=1
MSEPLDLNQLAQKIKQWGLELGFQQVGITDTDLSESEPKLQAWLDKQYHGEMDWMARHGMMRARPHELLPGTLRVISVRMNYLPAHAAFASTLKNPALGYISRYALGRDYHKLLRNRLKKLGERIQQHCVTLNFRPFVDSAPILERPLAEKAGLGWTGKHSLILNREAGSFFFLGELLIDLPLPVDAPVAEECGKCVACITTCPTGAIVAPYTVDARRCISYLTIELEGAIPESLRPLMGNRIYGCDDCQLICPWNRYSHLTSEDDFSPRKALHAPELVELFAWSEATFLKMTEGSAIRRIGHLRWLRNIAVALGNAPWNDAALSALESRRGEHSLLDEHIEWAVAQQIAKRNACVIDVQSPKQRRLVNAIEKGLPRDA

SEQ ID NO: 75832 - protein, 379 aa, Citrobacter braakii
  REGION 1..379: note = tr|A0A1R0FQQ1|A0A1R0FQQ1_CITBR Epoxyqueuosine reductase OS=Citrobacter braakii OX=57706 GN=queG PE=3 SV=1
MSEPLDLNQLAQNIKQWGLELGFQQVGIADTDLSEAEPKLQAWLDKHYHGEMDWMARHGMMRARPHELLPGTLRVISVRMNYLPANAAFASTLKNPSLGYVSRYALGRDYHKLLRNRLKKLGERIQQHCVSLNFRPFVDSAPILERPLAEKAGLGWTGKHSLILNREAGSFFFLGELLIDLPLPVDNPVEEGCGKCVACMTICPTGAIVEPYTVDARRCISYLTIELEGPIPEEFRPLLGNRIYGCDDCQLICPWNRYSQLTTEDDFNTRKQLHAPELIELFSWSEAWFLKVTEGSAIRRIGHLRWLRNIAVALGNAPWDEAVIHALESRRGEHPLLDEHIEWAVAQQIEKRNACVVEVQLPKKQRLVRVIEKGLPRDA

SEQ ID NO: 75833 - protein, 379 aa, Citrobacter braakii
  REGION 1..379: note = tr|A0A1V8NWA5|A0A1V8NWA5_CITBR Epoxyqueuosine reductase OS=Citrobacter braakii OX=57706 GN=queG PE=3 SV=1
MSEPLDLNQLAQNIKQWGLELGFQQVGIADTDLSEAEPKLQAWLDKHYHGEMDWMARHGMMRARPHELLPGTLRVISVRMNYLPANAAFASTLKNPSLGYVSRYALGRDYHKLLRNRLKKLGERIQQHCVSLNFRPFVDSAPILERPLAEKAGLGWTGKHSLILNRAAGSFFFLGELLIDLPLPVDNPVEEGCGKCVACMTICPTGAIVEPYTVDARRCISYLTIELEGAIPEEFRPLLGNRIYGCDDCQLICPWNRYSQLTTEDDFNPRKQLHAPELIELFSWSEAWFLKVTEGSAIRRIGHLRWLRNIAVALGNAPWDEAVIHALESRRGEHPLLDEHIEWAVAQQIEKRNACVVEVQLPKKQRLVRVIEKGLPRDA

SEQ ID NO: 75834 - protein, 379 aa, Citrobacter farmeri
  REGION 1..379: note = tr|A0A223JWZ5|A0A223JWZ5_9ENTR Epoxyqueuosine reductase OS=Citrobacter farmeri OX=67824 GN=queG PE=3 SV=1
MSEPLDLNQLAQKIKQWGLELGFQQVGITDTDLSESEPKLQAWLDKQYHGEMDWMARHGMMRARPHELLPGTLRVISVRMNYLPAHAAFASTLKNPTQGYISRYALGRDYHKLLRNRLKKLGEMIQQHCVSLNFRPFVDSAPILERPLAEKAGLGWTGKHSLILNREAGSFFFLGELLIDLPLPVDAPVAEGCGKCVACITTCPTGAIVAPYTVDARRCISYLTIELEGAIPEALRPLMGNRIYGCDDCQLICPWNRYSQLTSEDDFSPRKALHAPELLELFAWNEATFLKITEGSAIRRIGHLRWLRNIAVALGNAPWSDAVLSALESRRGEHPLLDEHIEWAVAQQIAKRNACVVDVQSPKQRRLVNAIEKGLPRDA

SEQ ID NO: 75835 - protein, 379 aa, Citrobacter freundii
  REGION 1..379: note = tr|A0A427L9J6|A0A427L9J6_CITFR Epoxyqueuosine reductase OS=Citrobacter freundii OX=546 GN=queG PE=3 SV=1
MSEPLDLNQLAQNIKQWGLELGFQQVGIADTDLSEAEPKLQAWLDKQYHGEMDWMARHGMMRARPHELLPGTLRVISVRMNYLPANAAFASTLKNPSLGYVSRYALGRDYHKLLRNRLKKLGEMIQQHCVSLNFRPFVDSAPILERPLAEKAGLGWTGKHSLILNREAGSFFFLGELLIDLPLPIDQPVEEGCGKCVACMTICPTGAIVEPYTVDARRCISYLTIELEGAIPEEFRPLMGNRIYGCDDCQLICPWNRYSQLTAEDDFNPRKQLHAPELIELFSWSEAWFLKVTEGSAIRRIGHLRWLRNIAVALGNAPWDEAILHALESRRGEHPLLDEHIEWAVAQQIEKRNACVVEVQLPQKQRLVRVIEKGLPRDA

SEQ ID NO: 75836 - protein, 379 aa, Citrobacter freundii
  REGION 1..379: note = tr|A0A064DFM0|A0A064DFM0_CITFR Epoxyqueuosine reductase OS=Citrobacter freundii MGH 56 OX=1439318; GN = queG PE=3 SV=1
MSEPLDLNQLAQNIKQWGLELGFQQVGIADTDLSEAEPKLQAWLDKHYHGEMDWMARHGMMRARPHELLPGTLRVISVRMNYLPAKAAFASTLKNPLLGYVSRYALGRDYHKLLRNRLKKLGEMIQQHCVSLNFRPFVDSAPILERPLAEKAGLGWTGKHSLILNREAGSFFFLGELLIDLPLPVDQPVEEGCGKCVACMTICPTGAIVEPYTVDARRCISYLTIELEGAIPEEFRPLMGNRIYGCDDCQLICPWNRYSQLTAEDDFSPRKQLHAPELIELFSWSEAWFLKVTEGSAIRRIGHLRWLRNIAVALGNAPWDDAVIHALESRRGEYTLLDEHIDWAVAQQIEKRNACVVEVQLPKKQRLVRVIEKGLPRDA

SEQ ID NO: 75837 - protein, 379 aa, Citrobacter gillenii
  REGION 1..379: note = tr|A0A3E2KW92|A0A3E2KW92_9ENTR Epoxyqueuosine reductase OS=Citrobacter gillenii OX=67828 GN=queG PE=3; SV = 1
MSEPLDLNQLAQKIKQWGLELGFQQVGIADTDLSEAEPKLQAWLDKQYHGEMDWMARHGMMRARPHELLPGTLRVISVRMNYLPANAAFASTLKNPSLGYISRYALGRDYHKLLRNRLKKLGELIQQHCVSLNFRPFVDSAPILERPLAEKAGLGWVGKHSLILSREAGSFFFLGELLIDLPLPVDQPVEEACGKCVACMTICPTGAIVEPYTVDARRCISYLTIELEGAIPEEFRPLLGNRIYGCDDCQLICPWNRYSQLTVEDDFSPRKQLHAPELIELFGWSEAWFLKVTEGSAIRRIGHLRWLRNIAVALGNAPWDETVINALENRRGEHPLLDEHIEWAIAQQIEKRNACVVEVQLPKKQRLVRVIEKGLPRDA

SEQ ID NO: 75838 - protein, 199 aa, Citrobacter koseri
  REGION 1..199: note = tr|A0A3S4KN03|A0A3S4KN03_CITKO (4Fe-4S)-binding protein OS=Citrobacter koseri OX=545 GN=queG_1 PE=4 SV=1
MPLPIDTPVEEGCGKCVACLTICPTGAIVEPYTVDARRCISYLTIELEGAIPEALRPLMGNRIYGCDDCQLICPWNRYSQLTDEEDFSPRKHLHAPELIELFGWSEAWFLKVTEGSAIRRIGHLRWLRNIAVALGNAPWDNAVITALESRRGEHPLLDEHIEWAIAQQIEKRNACVVEVQLPKKQRLVRVIEKGLPRDA

SEQ ID NO: 75839 - protein, 379 aa, Citrobacter koseri
  REGION 1..379: note = tr|A8AMN5|A8AMN5_CITK8 Epoxyqueuosine reductase; OS = Citrobacter koseri (strain ATCC BAA-895 / CDC 4225-83 / SGSC4696) OX=290338 GN=queG PE=3 SV=1
MSEPLDLNQLAQNIKQWGLELGFQQVGITDTDLSASEPKLQAWLDKQYHGEMDWMARHGMMRARPHELLPGTLRVISVRMNYLPANAAFASTLKNPSLGYVSRYALGRDYHKLLRNRLKKLGERIQQHCVSLNFRPFVDSAPILERPLAEKAGLGWTGKHSLILNREAGSFFFLGELLIDLPLPIDAPVEEGCGKCVACLTICPTGAIVEPYTVDARRCISYLTIELEGAIPEALRPLMGNRIYGCDDCQLICPWNRYSQLTDEEDFSPRKHLHAPELIELFGWSEAWFLKVTEGSAIRRIGHLRWLRNIAVALGNAPWDNAVITALESRRGEHPLLDEHIEWAIAQQIEKRNACVVEVQLPKKQRLVRVIEKGLPRDA

SEQ ID NO: 75840 - protein, 379 aa, Citrobacter murliniae
  REGION 1..379: note = tr|A0A4S3RTY4|A0A4S3RTY4_9ENTR Epoxyqueuosine reductase OS=Citrobacter murliniae OX=67829 GN=queG PE=3; SV = 1
MSEPLDLNQLAQNIKQWGLELGFQQVGIADTNLSEAEPKLQAWLDKHYHGEMDWMARHGMMRARPQELLPGTLRVISVRMNYLPANAAFASTLKNPTLGYVSRYALGRDYHKLLRNRLKKLGEMIQQHCVSLNFRPFVDSAPILERPLAEKAGLGWTGKHSLILNREAGSFFFLGELLVDLPLPVDLPAEEGCGKCVACMTICPTGAIVEPYTVDARRCISYLTIELEGAIPQEFRPLLGNRIYGCDDCQLICPWNRYSQLTVEDDFSPRKQLHAPELIELFSWSEAWFLKVTEGSAIRRIGHLRWLRNIAVALGNAPWDGAVINALENRRGEHPLLDEHIEWAIAQQIEKRNACVVEVQLPKKQRLVRVIEKGLPRDA

SEQ ID NO: 75841 - protein, 379 aa, unidentified
  source 1..379: note = Citrobacter pasteurii
  REGION 1..379: note = tr|A0A0A1RWV6|A0A0A1RWV6_9ENTR Epoxyqueuosine reductase OS=Citrobacter pasteurii OX=1563222 GN=queG PE=3; SV = 1
MSEPLDLNQLAQNIKQWGLELGFQQVGIADTDLSEAEPKLQAWLDKQYHGEMDWMARHGMMRARPHELLPGTLRVISVRMNYLPANAAFASTLKNPSLGYVSRYALGRDYHKLLRNRLKKLGERIQQHCVSLNFRPFVDSAPILERPLAEKAGLGWTGKHSLILNREAGSFFFLGELLIDLPLPVDKPVEEGCGKCVACMTICPTGAIVEPYTVDARRCISYLTIELEGALPEEFRPLLGNRIYGCDDCQLICPWNRYSQLTTEDDFSPRKQLHAPELIALFSWSEAWFLKVTEGSAIRRIGHLRWLRNIAVALGNAPWDEAVIHALESRRGEHPLLDEHIDWAVAQQIEKRNACVVEVQLPKKQRLVRVIEKGLPRDA

SEQ ID NO: 75842 - protein, 379 aa, unidentified
  source 1..379: note = Citrobacter portucalensis
  REGION 1..379: note = tr|A0A4P7UQK2|A0A4P7UQK2_9ENTR Epoxyqueuosine reductase OS=Citrobacter portucalensis OX=1639133 GN=queG; PE = 3 SV=1
MSEPLDLNQLAQNIKQWGLELGFQQVGIADTDLSEAEPKLQAWLDKQYHGEMDWMARHGMMRARPHELLPGTLRVISVRMNYLPANAAFASTLKNPSLGYVSRYALGRDYHKLLRNRLKKLGEMIQQHCVSLNFRPFVDSAPILERPLAEKAGLGWTGKHSLILNREAGSFFFLGELLIDLPLPIDQPVEEGCGKCVACMTICPTGAIVEPYTVDARRCISYLTIELEGAIPEEFRPLLGNRIYGCDDCQLICPWNRYSQLTAEDDFNPRKQLHAPELIELFSWSEAWFLKVTEGSAIRRIGHLRWLRNIAVALGNAPWNEAILHALESRRGEHPLLDEHIEWAVAQQIEKRNACVVEVQLPQKQRLVRVIEKGLPRDA

SEQ ID NO: 75843 - protein, 379 aa, unidentified
  source 1..379: note = Citrobacter portucalensis
  REGION 1..379: note = tr|A0A5A9BXI6|A0A5A9BXI6_9ENTR Epoxyqueuosine reductase OS=Citrobacter portucalensis OX=1639133 GN=queG; PE = 3 SV=1
MSEPLDLNQLAQNIKQWGLELGFQQVGIADTDLSEAEPKLQAWLDKQYHGEMDWMARHGMMRARPHELLPGTLRVISVRMNYLPANAAFASTLKNPSLGYVSRYALGRDYHKLLRNRLKKLGEMIQQHCVSLNFRPFVDSAPILERPLAEKAGLGWTGKHSLILNREAGSFFFLGELLIDLPLPVDQPAEEGCGKCVACMTICPTGAIVEPYTVDARRCISYLTIELEGAIPEEFRPLMGNRIYGCDDCQLICPWNRYSQLTTEDDFNPRKQLHAPELIELFSWSEAWFLKVTEGSAIRRIGHLRWLRNIAVALGNAPWNEAILRALESRRGEHPLLDEHIEWAVAQQIEKRNTCVVEVQLPQKQRLVRVIEKGLPRDA

SEQ ID NO: 75844 - protein, 384 aa, Citrobacter rodentium
  REGION 1..384: note = tr|A0A482PMD7|A0A482PMD7_CITRO Epoxyqueuosine reductase OS=Citrobacter rodentium OX=67825 GN=queG PE=3; SV = 1
MVWSVMSEPLDLNQLAQNIKQWGLELGFQQVGITDTDLSAAEPALQAWLDKQYHGEMEWMARHGMMRARPHELLPGTLRAISVRMNYLPANAAFASTLKNPALGYVSRYALGRDYHKLLRNRLKKLGEKIQQHCVSLNFRPFVDSAPILERPLAEKAGLGWTGKHSLILNREAGSFFFLGELLIDLPLPVDHPVAEGCGKCVACMTTCPTGAIVAPYTVDARRCISYLTIELEGAIPQALRPLMGNRIYGCDDCQLICPWNRYSQLTDEADFSPRKSLHAPELIALFGWDEATFLKITEGSAIRRIGHLRWLRNIAVALGNAPWNEAILNALESRRGEHPLLDEHIQWAREQQIAKRNAQGVEVQLPKTQRLVRAIEKGLTRDA

SEQ ID NO: 75845 - protein, 379 aa, Citrobacter sp.
  REGION 1..379: note = tr|A0A0V9JC62|A0A0V9JC62_9ENTR Epoxyqueuosine reductase OS=Citrobacter sp. 50677481 OX=1736699 GN=queG; PE = 3 SV=1
MSEPLDLNQLAQKIKQWGLELGFQQVGITDTDLSEAEPKLQAWLDKQYHGEMDWMARHGMMRARPHELLPGTLRVISVRMNYLPARAAFASTLKNPDLGYVSRYALGRDYHKLLRNRLKKLGERIQQHCVSLNFRPFVDSAPILERPLAEKAGLGWTGKHSLILNREAGSFFFLGELLIDLPLPVDHAVEDGCGKCVACMTTCPTGAIVAPYTVDARRCISYLTIELEGAIPEDLRPLMGNRIYGCDDCQLICPWNRYSQLTDEADFSPRQQLHAPALIELFSWDEARFLKITEGSAIRRIGHLRWLRNIAVALGNAPWREDVLCALENRRGEHPLLDEHIQWAIAQQIAKRNASAVEVQLPQQKRLVRAIEKGLPRDA

SEQ ID NO: 75846 - protein, 379 aa, Citrobacter sp.
  REGION 1..379: note = tr|A0A318W013|A0A318W013_9ENTR Epoxyqueuosine reductase OS=Citrobacter sp. YR018 OX=2135606 GN=queG PE=3; SV = 1
MSQPLDLNQLAQDIKQWGTELGFQHVGITDTDLSASEPKLQAWLDKQYHGEMEWMARHGMMRARPHELLPGTLRVISVRMNYLPANAAFASTLKNPSLGYVSRYALGRDYHKLLRNRLKKLGEKIQAQCASLNFRPFVDSAPILERPIAEKAGLGWTGKHSLILSRDAGSFFFLGELLIDLALPIDKPVEENCGRCVACMTICPTGAIVEPYTVDARRCISYLTIELEGAIPEEFRPLMGNRIYGCDDCQLICPWNRYSQLTDEEDFSPRKALHAPELITLFGWSEAHFLKVTEGSPIRRIGHLRWLRNIAVALGNAPWDEHNIEALESRRGEHPLLDEHIQWAVAQQIDKRNACVVEVQLPQKQRLVRVIEKGLPRDA

SEQ ID NO: 75847 - protein, 379 aa, Citrobacter werkmanii
  REGION 1..379: note = tr|A0A4Q4BKA9|A0A4Q4BKA9_9ENTR Epoxyqueuosine reductase OS=Citrobacter werkmanii OX=67827 GN=queG PE=3; SV = 1
MSEPLDLNQLAQNIKQWGLELGFQQVGIADTDLSEAEPKLQAWLDQHYHGEMDWMARHGMMRARPHELLPGTLRVISVRMNYLPAKAAFASTLKNPSLGYVSRYALGRDYHKLLRNRLKKLGEMIQQHCVSLNFRPFVDSAPILERPLAEKAGLGWTGKHSLILNREAGSFFFLGELLIDLPLPIDKPVEEGCGKCVACMTICPTGAIVEPYTVDARRCISYLTIELEGAIPEAFRPLLGNRIYGCDDCQLICPWNRYSQLTVEDDFSPRKQLHAPELIELFSWSEAWFLKVTEGSAIRRIGHLRWLRNIAVALGNAPWDEAVINALENRRGEHPLLDEHIAWAVAQQIEKRNACVVEVQLPKKQRLVRVIEKGLPRDA

SEQ ID NO: 75848 - protein, 379 aa, Citrobacter werkmanii
  REGION 1..379: note = tr|A0A090U2Z8|A0A090U2Z8_9ENTR Epoxyqueuosine reductase OS=Citrobacter werkmanii NBRC 105721 OX=1114921; GN = queG PE=3 SV=1
MSEPLDLNQLAQNIKQWGLELGFQQVGIADTDLSEAEPKLQAWLDQHYHGEMDWMARHGMMRARPHELLPGTLRVISVRMNYLPAKAAFASTLKNPSLGYVSRYALGRDYHKLLRNRLKKLGEMIQQHCVSLNFRPFVDSAPILERPLAEKAGLGWTGKHSLILNREAGSFFFLGELLVNLPLPVDKPVEEGCGKCVACMTICPTGAIVEPYTVDARRCISYLTIELEGAIPEAFRPLLGNRIYGCDDCQLICPWNRYSQLTVEDDFSPRKQLHAPELIELFSWSEAWFLKVTEGSAIRRIGHLRWLRNIAVALGNAPWDEAVINALENRRGEHPLLDEHIEWAVAQQIEKRNACVVEVQLPKKQRLVRVIEKGLPRDA

SEQ ID NO: 75849 - protein, 379 aa, Citrobacter youngae
  REGION 1..379: note = tr|A0A549VI08|A0A549VI08_9ENTR Epoxyqueuosine reductase OS=Citrobacter youngae OX=133448 GN=queG PE=3; SV = 1
MSEPLDLNQLAQNIKQWGLELGFQQVGIADTDLSEAEPKLQAWLDKQYHGEMDWMARHGMMRARPHELLPGTLRVISVRMNYLPANAAFASTLKNPSLGYVSRYALGRDYHKLLRNRLKKLGERIQQHCVSLNFRPFVDSAPILERPLAEKAGLGWTGKHSLILNREAGSFFFLGELLIDVPLPVDKPVEEGCGKCVACMTICPTGAIVEPYTVDARRCISYLTIELEGAIPEEFRPLLGNRIYGCDDCQLICPWNRYSQLTTEDDFSPRKQLHAPELIALFSWSEAWFLKVTEGSAIRRIGHLRWLRNIAVALGNAPWDDAVIHVLESRRGEHPLLDEHIDWAVAQQIEKRNACVVEVQLPKKQRLVRVIEKGLPRDA

SEQ ID NO: 75850 - protein, 379 aa, Citrobacter youngae
  REGION 1..379: note = tr|D4BFK2|D4BFK2_9ENTR Epoxyqueuosine reductase; OS = Citrobacter youngae ATCC 29220 OX=500640 GN=queG PE=3; SV = 1
MSEPLDLNQLAQNIKQWGLELGFQQVGIADTDLSEAEPKLQAWLDQHYHGEMDWMARHGMMRARPHELLPGTLRVISVRMNYLPAHAAFASTLKNASLGYVSRYALGRDYHKLLRNRLKKLGEMIQQHCVSLNFRPFVDSAPILERPLAEKAGLGWTGKHSLILNREAGSFFFLGELLVDLPLPVDKPVAEGCGKCVACMTICPTGAIVEPYIVDARRCISYLTIELEGAIPEEFRPLLGNRIYGCDDCQLICPWNRYSQLTAEDDFSPRKQLHAPELIELFSWSEGWFLKVTEGSAIRRIGHLRWLRNIAVALGNAPWDEAVITALESRRGEHPLLDEHIEWAVAQQIEKRKACVIEVQLPQKQRLVRVIEKGLPRDA

SEQ ID NO: 75851 - protein, 365 aa, unidentified
  source 1..365: note = Citromicrobium sp.
  REGION 1..365: note = tr|A0A2E7UCU1|A0A2E7UCU1_9SPHN Epoxyqueuosine reductase OS=Citromicrobium sp. OX=2024827 GN=queG PE=3; SV = 1
MSDAGIIDQLQSDLAQRAGELGFASVGFADAGDDPRMAQRLSAWLEAGYHGTMGWMEREPAVRSGPQSMWPEARSVIALGANYAPAHDPLEAAEPADRARISVYAQGEDYHDKLKKALKSLARWLVAEAQARGLGDTRLKLFVDTAPVMEKPLAQRAGLGWQGKHTNLVSMDHGSWLFLGAVYTTIPFAPDGPHEDRCGSCRACQDACPTNAFPQAYRLDARRCISYLTIEHDGPIPHEFREAIGNRIYGCDDCLAVCPWNKFAKSAAANRAFLPRAELARPRLADLLQLDDAGFRRLFSKSPIKRIGRDKFVRNCLIAAGNSGEATLMAQVEPLLDDPDPVVAEAAEWAQRRLSPARSSTSPST

SEQ ID NO: 75852 - protein, 364 aa, unidentified
  source 1..364: note = Citromicrobium sp.
  REGION 1..364: note = tr|A0A2P0B4J6|A0A2P0B4J6_9SPHN Epoxyqueuosine reductase OS=Citromicrobium sp. RCC1897 OX=1812182 GN=queG; PE = 3 SV=1
MSERSEIDQLQTELVEKARELGFASIGFAEAHDDPRMAERLSAWLEAGHHGSMGWMERDPSVRSGPQGMWPEARSVIALGANYAPADNPLDAAEPEDRARISVYAQGQDYHDVLKKALKALARWLVAETENRGLGETRMKLFVDTAPVMEKPLAQRAGLGWQGKHTNLVSMEHGSWLFLAAIYTTVPFTPDGPHEDRCGSCRACQDACPTDAFPHAYTIDARRCISYLTIEHSGPIPEEFREAMGNRIYGCDDCLSVCPWNKFASSAAANRAFLPRAELVRPALADLLQLDDAGFRALFSKSPIKRIGRDRFVRNCLIAAGNSGEVELLAQVEPLLADPDPVVADTAQWAAERLAPLSSPSPRT

SEQ ID NO: 75853 - protein, 351 aa, unidentified
  source 1..351: note = Cloacibacillus porcorum
  REGION 1..351: note = tr|A0A1B2I4I2|A0A1B2I4I2_9BACT Uncharacterized protein OS=Cloacibacillus porcorum OX=1197717; GN = BED41_07205 PE=4 SV=1
MDKKLLTSKIKRRALELGFAKVGITTADDFPEYEAELHDRPGYRPWINPDRSEDPERSYLIEGVRPRGIMPGAKSIVCAVYDYSRLAYPEELTASVARAYLSRAYVPLPDSICGLRARALHDYLTSLGCRVYDGDKELPQRLCCARAGVTTYGRNNFAYAEDCGSFVILYTYLTEAELEYDAPTVRCDCPSGCRKCVEACPTGALYAPGKLAPQRCLLYSHMRDSAVPADIMEANGTLIHGCDRCQTACPRNIPVMRGAAEKDPFLELLKREFDLEKILFMDDAYYERVVRPIMYNYIRKPEVFRRNAAIAIGNTNDAGYIPALKTAIERGEPIVREAAAWALERIGGGPR

SEQ ID NO: 75854 - protein, 307 aa, Cloacibacterium normanense
  REGION 1..307: note = tr|A0A2S7I4V3|A0A2S7I4V3_9FLAO Epoxyqueuosine reductase OS=Cloacibacterium normanense OX=237258 GN=queG; PE = 3 SV=1
MNYSQLIKQKAEKFGFQSCGISKADFLEEEAPRLETWLNKGYHGEMKYMENHFDKRLNPTLLVDGAKSVISLSYNYFPKVKIDEINNFKISKYAYGEDYHEVIKDILKEMVTELQEEIGEFGFRVFVDSAPVLEKAWARKSGLGWVGKNANLITKKHGSFYFLAEIICDLELEYDLAVTDHCGSCRACIDACPTQAIVSDRIVDGSKCISYATIELKNEIPDYFNGKMDDWMFGCDVCQDVCPWNRFSAPTLQEKFAPNFQKLNFRKNEWKELTQELFSEIFKKSAVKRTKFSGLMRNINLLNDHSL

SEQ ID NO: 75855 - protein, 307 aa, Cloacibacterium normanense
  REGION 1..307: note = tr|A0A1E5UGJ2|A0A1E5UGJ2_9FLAO Epoxyqueuosine reductase OS=Cloacibacterium normanense OX=237258 GN=queG; PE = 3 SV=1
MNYSQLIKQKAEKFGFQSCGISKAEFLEEEAPRLEAWLNKGYHGEMKYMENHFDKRLNPILLVDGAKSVISLSYNYFPKVKIDEINNFKISKYAYGEDYHEVIKDILKEMVTELQEEIGEFGFRVFVDSAPVLEKAWARKSGLGWVGKNANLITKKHGSFYFLAEIICDLELDYDLAVTDHCGSCRACIDACPTQAIVSDRIVDGSKCISYATIELKNEIPDYFNGKMDDWMFGCDVCQDVCPWNRFSAPTLQEKFAPNFQKLNFRKNEWKELTQELFSEIFKKSAVKRTKFSGLMRNINLLKDHSL

SEQ ID NO: 75856 - protein, 337 aa, unidentified
  source 1..337: note = Clostridia bacterium
  REGION 1..337: note = tr|A0A523BYN9|A0A523BYN9_9FIRM tRNA epoxyqueuosine(34) reductase QueG OS=Clostridia bacterium; OX = 2044939 GN=queG PE=4 SV=1
MLSLSGLRRLAQQAGLEVVGATSAAPLVETRALLAARQARGLVTPWVTADLEARCHPESVLLGARSVIMAALPYYHPVGFPAGGPRGRIARCAWGIDYHPVLRERLQLLARLLQRELGRLDFSIQVDNGPLVERALAVRAGLGFVGKNCSLIVPGYGSWVFLGAMVIDVEVEEALPGVPACGQCERCVRACPTGALETPYLVDPGRCLSYITQKGGEVPAEFRGALADRVYGCDTCQEVCRYNLEASGSQVKEFTPAGDSHAPLLAEVISLDRAAFTRRFGTSSLAWRGPNILARNAVIALGNSHHPEAVKLLSRVAQAHPSAMVRSHATQALAGRR

SEQ ID NO: 75857 - protein, 156 aa, unidentified
  source 1..156: note = Clostridia bacterium
  REGION 1..156: note = tr|A0A4R5JLB1|A0A4R5JLB1_9FIRM DUF1730 domain-containing protein (Fragment) OS=Clostridia bacterium k32 OX=2528593 GN=EYS13_02725 PE=4 SV=1
MLLQMMPVTGDGNFQGVAFMEKAQLIKEVAREIGFDLCGITTAEPFYELEDFLRLRAKQGWQSEFEHKELEKRINPRLVLPEARSIIALGKTYPPCEQNATPGYGIIARCGRGIDYHVDFRKRMNALVQFLTKDLGVTKAVSMVDTGPLIDRAVAA

SEQ ID NO: 75858 - protein, 280 aa, unidentified
  source 1..280: note = Clostridiaceae bacterium
  REGION 1..280: note = tr|A0A353K0K7|A0A353K0K7_9CLOT tRNA epoxyqueuosine(34) reductase QueG (Fragment); OS = Clostridiaceae bacterium OX=1898204 GN=queG PE=4 SV=1
MSIKEEIISFARDIEIDLIGFCDINFDEGLINFLKEKRELGLLTGFEEENENKRTDIKKIMEDAQTIIAIALPYKTADINTKQIHISKSSIGLDYHIVLKEKLLKLCNFLIEKYGAKAVSFCDNNPLCEREIARKSGIGFIGKNNSLITKKYGSYVFLGEIITNIYIERDKAVENKCGSCTICLNACPSGALLKPWYIDPRKCISFLTQKKEELTDSEKKLLGLNIYGCDTCQDVCPYNKTAEYSKIEEFKPFGWEANINPDFILGLTNSEYKCTFKKAS

SEQ ID NO: 75859 - protein, 350 aa, unidentified
  source 1..350: note = Clostridiaceae bacterium
  REGION 1..350: note = tr|A0A2I0MZB5|A0A2I0MZB5_9CLOT Epoxyqueuosine (OQ) reductase QueG OS=Clostridiaceae bacterium JG1575; OX = 1658742 GN=ABB02_01680 PE=4 SV=1
MRKDHEPERNQGNPKNPGEQQKLYSLLNAMGLKVFGVTTKEAVLAHAAYYKERPTDQKTEFEASSGDLAKDLQAVVPDGSKILSIAFPYAHDLNWEESHFSIYARSLDYHEVLTAYLARIAQWITDEGYCAQTFRDSNPLPERLIACLAGVGYVGRNNTLITKDYGSFVFLGEVVTDYPLRPSSVGRLPGDHSLCGSCRACQKACPAGILIDGFTDSSRCLSYVSQKKELAEEEIQKLQGRLFGCDTCLRVCPKNQGRSGTGLPEFQVLEYMAHPDLLELAQLSRATFREKYAITSAGWRGKTVLARNALIALSATGKLPEDLRFSSPVLQREYDKIKKLSKEKTKGRSR

SEQ ID NO: 75860 - protein, 273 aa, unidentified
  source 1..273: note = Clostridiales bacterium
  REGION 1..273: note = tr|A0A354IH75|A0A354IH75_9FIRM DUF1730 domain-containing protein OS=Clostridiales bacterium; OX = 1898207 GN=DDX51_07100 PE=4 SV=1
MDILPYFSDIPYTGGKGICRLDALELEPTVLHAVQARCAGAVCAAVVLFPYLVRDTGNLSLYARGADYHTVVRDALEPVCAALRRDFPQNTFVPLVDASPLPEVRAAWISGAGMLGKNGLIFDRVYGSFVFIGTVLTDLPADPTPSARETCPDCGACARACPTGALRDGSVDESACLSALTQSKQELSEEQLRQLAGHPLIWGCDTCSLVCPLNRAAQETPNPAFRQARICSLAPEDVEGRTRKQLLRAFPDRAFTWRGPAPLVRGLSLKGQK

SEQ ID NO: 75861 - protein, 347 aa, unidentified
  source 1..347: note = Clostridiales bacterium
  REGION 1..347: note = tr|A0A349GCJ8|A0A349GCJ8_9FIRM Uncharacterized protein OS=Clostridiales bacterium UBA8960 OX=2060927; GN = DCS67_11515 PE=4 SV=1
MSCNEVAMIRKTELNKIMNALMIRHWGIFLMDKADKNAPRYFDVENSIFDDVSLEKATVIAIALPYKLELEENRPNFHFGKIEAFAWDFDYHIEVMQRLEALSRMLNLMPETEVRYYVDDSPFNDREVAFHAGLGRIGMNHLLINDALGSQFFIGYLVIKGHLDMDKTCIVQRHELKAELQHPYCKSCNKCVYACPTSVCGNGKSNMLECLSSLTQTKEVIEERFRAMMGDTIYGCSICQKVCPLNKKDIINFVYEPKQSNWIDLFELLRMDRKTFKARYGHMGFAWRSQWVYKRNALIVLGNSGKRAVLDELTRLQEIQEASNLNEYYRWAINKLEISILEESDII

SEQ ID NO: 75862 - protein, 345 aa, unidentified
  source 1..345: note = Clostridioides difficile
  REGION 1..345: note = tr|A0A0N0NSE2|A0A0N0NSE2_CLODI Fe-S oxidoreductase; OS = Clostridioides difficile OX=1496 GN=IM33_20145 PE=4 SV=1
MDNYLAEKIKQTALLLGYDKCGIIKITDMQGYAEKLVERIITFPEIKSNFQKFFNFAFLDKKYPWAKSVIICVRHYGKYHIPQHLNNMIAKYYLVDSREDKNSTDYQDSICFENYLTANGIKSVTDRKFGITSLRWAAMKAGLGVIRKNNFFYTEKGSWVYLEGWIIDKELELKEKCDLRHCSENCNLCIQACPTKSLNLPFSMNRSSCVSCITTWDGRDMPNEKYKKQLGNWIYGCDICQDVCPHNKNKWMEKYTFPYLFEIGEMISLEKILDMDYGILCNVIHPKFWYIGKKDIWKWKVNAINAMLNNWDETYYMYIEKATSDKIEMVRDMARYAIKIIDRTF

SEQ ID NO: 75863 - protein, 304 aa, unidentified
  source 1..304: note = Clostridioides difficile
  REGION 1..304: note = tr|D5Q0F2|D5Q0F2_CLODI Putative iron-sulfur cluster-binding protein OS=Clostridioides difficile NAP08; OX = 525259 GN=HMPREF0220_0384 PE=4 SV=1
MNNRELKEFCNLIGLNCVGVAGVDKYDNLENILKDRYKKGYLTGMEEPIIENRINPRNIMEDANSIIVCAFPYYINRQEKNKNSNLSKYCHGKDYHIVVKKFLQQICDYISKKVTDFKYKIFADNGPLVDRYLAYLSGIGYFGINNNIITDEYGSYVFIGYIVNNYKFEEDKPLEKSCFKCGKCVKYCPGNAILGNYDMNPKKCLSYITQKKGDLSQEEKAVLKSGKKVFGCDICQEVCPHNVEIPTTHILEFKENIIDYLDYDEIQNISNKEFKRRYGDRAFSWRGKNIIKRNMEIILDKYND

SEQ ID NO: 75864 - protein, 378 aa, Clostridium aceticum
  REGION 1..378: note = tr|A0A0G3WAM4|A0A0G3WAM4_9CLOT 4Fe-4S ferredoxin-type domain-containing protein OS=Clostridium aceticum OX=84022 GN=CACET_c09420 PE=4 SV=1
MKLKDQIKDYGKSIGIDLLGFTSANAFEEIRSILEKREALGHLSGFEEKDIELRIDPKKTMTDAKSILVIGLSYYNENIKKSENHETEFSGVLARTAWGKDYHYVLKEKLEEIAAFIQKQDKDFQYKIFVDTGPLVDRQVAYRAGLGWYGYNSLLINEKYGSWFFIGYMLNNIAFEEDKPLTNKNCQGCNLCIKHCPKGAIEGPYGFHAKKCVSNLLQQKEDIDEEDRKILGKNLYGCDICQSVCPHNKKAVLMTEGDFAPQVVSPTPDLIEILYMSNKAFKETYGTTSAGWRGKRTLQRNAIIALANNGDKKAIPHLLPLLEDDRPEIRRYGIWAIFQLDPFTGKEISKEMKKKEQDEKVLNTIEDCLNKIFSSKNQ

SEQ ID NO: 75865 - protein, 343 aa, Clostridium acetobutylicum
  REGION 1..343: note = tr|Q97TM1|Q97TM1_CLOAB Uncharacterized Fe-S protein; OS = Clostridium acetobutylicum (strain ATCC 824 / DSM 792 / JCM 1419 / LMG 5710 / VKM B-1787) OX=272562 GN=CA_P007 7; PE = 4 SV=1
MDTIAESIQKKAYELGYEKCGIIPINLIDEYADKFNERMEKIPKSKMFYKSQERLIKPKEIYPWAKSVVVLTSVYGKYKVPQELNGHIAKAYLFDTRVDKNTKEYQNNRALEEYMQELGLKVETNQKFGVVGMRWAALQAGVGIIRRNNFLYTESGSWVHLEAWVTDRKMELKETNNVKKCPKSCNRCIMSCPTKSLSEPYTMSPTECVSFLTTFGGRNLPEEPLRKKFGDCIYGCDICQDACPMNKGKWKDEEEFPGLAELAPSLTPENILNMDEDFYREKVQPKFFYLSPEDLWKWKIDALCYIGNNYSESYKPLLVNACNNANNKISEMANLICSELSLQ

SEQ ID NO: 75866 - protein, 342 aa, Clostridium acidisoli
  REGION 1..342: note = tr|A0A1W1XI18|A0A1W1XI18_9CLOT Epoxyqueuosine reductase QueG (Queuosine biosynthesis) OS=Clostridium acidisoli DSM 12555 OX=1121291 GN=SAMN02745134_01933 PE=4; SV = 1
MNTIEQMIQKKAYELGYEKCGIIPINKLSGYKEKLEERIKKVPESAQFYQTQQRLANPLEEYPWAKSVVVMTVPYGKYKIPEVVKDHVAKAYLFDVRIDANTEEYQHNRAMEKYMQDLGLQVVTNQKFGVVGMRWAALQAGLGIIRRNNFLYTQSGSWVHIEAWLIDREIELKETMDVPQCPKGCNRCMSACPTKSLSAPYTMTPTACISFLTTFGGRNLPQQPLSKNFGNCIYGCDICQDVCPMNKGKWKEVEEFPGLAELSSELTPENILNMDEDFYREKVQPKFFYLSPEELWKWKIDVLCYMRNNYKESYKTYIINSSNNENEKIREMADFIRKELNL

SEQ ID NO: 75867 - protein, 326 aa, Clostridium acidisoli
  REGION 1..326: note = tr|A0A1W1XIL0|A0A1W1XIL0_9CLOT Epoxyqueuosine reductase OS=Clostridium acidisoli DSM 12555 OX=1121291; GN = SAMN02745134_02001 PE=4 SV=1
MNKKNQIIEFCNGLGLLEVGFCSLQVFHELDPFLRKRKESGLQNEFEEDNIEKRINPKLYMEEGKTIISVAFPYLFHKPNKEEIYFSTYTKGKDYHKVIGKYLNEVCKFVNALGGDSKYFVDSNALPERYIAVKSGIGFIGKNNMLINKRYGSYVFLGEIITDLDLQPDNVVKTKCGKCEKCLNACPTKCISKTKCNPNICLSYITQKKNIEDQWFEKFNGRMFGCDTCQKVCPFNEESEFSNLEEFKPFEFMDKLDLDELLNLDKAVFKEKYSLTSSGWRGKNTLQRNALINAFMSDKYINKEEFHINSTYVKEYYHRLLKYNKL

SEQ ID NO: 75868 - protein, 334 aa, Clostridium algidicarnis
  REGION 1..334: note = tr|A0A2S6G028|A0A2S6G028_9CLOT Epoxyqueuosine reductase OS=Clostridium algidicarnis DSM 15099 OX=1121295; GN = BD821_102160 PE=4 SV=1
MKNINELENYIRSLGLDTFGFIPLKSFEELRSFLQYRKINGLENEFEETDIEKRINPHMLMEKGKVIISIAFPYLYNNNFNNDTGFSKYTEGLDYHIVVRSYLDKIVDFLNEKGYEAKAFVDSNVLPERYIAYKAGLGFVGKNNMIITEKYGSFVFLGEIITDMDIEIKYKDKKFSDIEKYESCGSCNICLKECPTKAINHKRRNSNICLSYITQKKQIEDKWFKVLGGRIFGCDSCQKSCPYNTKVKLSNIEGFRPLKFSSNIQTKELIYINNKEFKETLKNTSASWRGKNLIQRNALIRFINFENNKDIDIDSMASPYVKDYAIRLLKIRKL

SEQ ID NO: 75869 - protein, 350 aa, unidentified
  source 1..350: note = [Clostridium] algidixylanolyticum
  REGION 1..350: note = tr|A0A419T369|A0A419T369_9FIRM Fe-S oxidoreductase; OS = [Clostridium] algidixylanolyticum OX=94868; GN = BET01_19100 PE=4 SV=1
MSNVNFSDNSMENQIQRKALELGYEKCGIIPVDMMEGYGEKLDERIEKATGSGQFYQGQKRLKNFQEQYPWAKSIIVLTVPYSQYKVPEEISGHIAKAYLFDTRIDEQAEEYQHSQLLENHLKELGLRVETNRKFGVVALRWAAMKAGLGIIRRNNFFYTESGSWIRIEAFLTDQKMELLQQTTLPACPKHCDRCIKACPTTSLCEAYTMNPLSCVSFLTTFGGRDLPNEPMASNFGDWIYGCDICQEVCPMNQGKWKGDKDFPGVMALSPYLTAENILKMDESYYQQNVQPKFFYLSQDELWKWQVDALNFMDNRYQEHFNSSILEACESKYEQVREMADTVCKKHGLT

SEQ ID NO: 75870 - protein, 329 aa, Clostridium amylolyticum
  REGION 1..329: note = tr|A0A1M6JE87|A0A1M6JE87_9CLOT Epoxyqueuosine reductase OS=Clostridium amylolyticum OX=1121298; GN = SAMN05444401_3066 PE=4 SV=1
MDKKQLILDFCKNLKLDKVGFVQCRKFEELRNFFEERKALGTENEFEEKDIEKRIDPNIYLEGGKTIISIAFPYLHKIETRENYAFSVYTRGQDYHRVVKKYLGQICEYIKALGGEAVALTDSNALPERYIAYLSGIGFIGKNNMLITKEYGSYVFLGEIITDLELTPDFPERNHEMLLKHEECGEECTLCFDECPTKSINPVKKNANICMSYITQKKDLEDKWLPLLNGRLFGCDSCQKKCRYNQLIRLSPLEEFKPHKYMEEHNTDEIINMGKKTFKEKYLITSCGWRGKAVLQRNAMIRKVYFEKGSLEGFKSNSEQLNKLKEKLV

SEQ ID NO: 75871 - protein, 327 aa, Clostridium argentinense
  REGION 1..327: note = tr|A0A0C1U293|A0A0C1U293_9CLOT Epoxyqueuosine reductase OS=Clostridium argentinense CDC 2741 OX=1418104; GN = queG PE=4 SV=1
MNNKTSIINFCKSLGLTTVGFTTCRVFSELENYYSYRKEKGFQIEFEEDDIEKRINPFLLMEDGKTIISIAFPYLHDENRKVKYFSKYTLGEDYHVVVKRYLQKICGYIESLGGKAIGFVDNNPLPERYIAYLCGIGFVGKNNIFITKEYGSYIFLGEIITDLSLESDNPIKENCEKCELCLNACPTNTLKDQVKDNDFNKCLSYLTQKKHIDEYSFNKFKGKIFGCDICQDICPYNKKAKLSHIEEFKAFDFMKEDELIDIITMNNSSFKEKYQKCSCGWRGKNILIRNSLINYNNRNHEDKDNIIKNINSPYIREYYDKLFKNKT

SEQ ID NO: 75872 - protein, 313 aa, unidentified
  source 1..313: note = Clostridium autoethanogenum
  REGION 1..313: note = tr|A0A3M0SXJ7|A0A3M0SXJ7_9CLOT Epoxyqueuosine reductase OS=Clostridium autoethanogenum OX=84023; GN = D9O40_04225 PE=4 SV=1
MKNYANNFIKKVEEYGFKAQVISFKHMEEIKLGIENMKQTYEDINVNIGKYLNKFDYKVSDDFLKPKSIIVIAVPQPVARVYFTLGLKRYAVIMPPMYLLNSSSEFEKKHKKICEITEIVEKILSYENFKAIKVNIPCKPLAVKSGLGTYGKNNICYINGESSFYWLGVYVSDMPWENDSWGEYTIMDTCKNCDLCLKNCPTGAIAEDRFIVHANKCITLQNEDSGDFKKSLRPEWHNCLIGCMRCQIICPANKKCITSIKNITEFNDWETRKILAKTPLEELPETTYKKLESISFIEDYKLLPRNLKVLIMK

SEQ ID NO: 75873 - protein, 127 aa, unidentified
  source 1..127: note = Clostridium autoethanogenum
  REGION 1..127: note = tr|U5RQV4|U5RQV4_9CLOT Uncharacterized protein; OS = Clostridium autoethanogenum DSM 10061 OX=1341692; GN = CAETHG_0713 PE=4 SV=1
MDTCKNCDLCLKNCPTGAIAEDRFIVHANKCITLQNEDSGDFKKSLRPEWHNCLIGCMRCQIICPANKKCITSIKNITEFNDWETRKILAKTPLEELPETTYKKLESISFIEDYKLLPRNLKVLIMK

SEQ ID NO: 75874 - protein, 330 aa, Clostridium baratii
  REGION 1..330: note = tr|A0A0F3FNA5|A0A0F3FNA5_9CLOT (Fe-S)-binding protein OS=Clostridium baratii OX=1561 GN=UC77_11455 PE=4; SV = 1
MDKQEKIIEFCKSINLDLVGFIKCREFSELKEFYSERKELKLENEFEEADILKRINPKTYMEDGKTIISIAFPYNTGEKLCDNGFSIYTKGMDYHNVVHKYLENICEFIKSLGGECVAFTDSNCLPERHIAALAGVGFVGKNNMIITEKYGSYVFLGEIITDLEVYNEDKTTFHNIRGYSKCGECNICFNECPSNSINSFRRNPNICVSYLTQKKELNDKEINLINGRIFGCDSCQMKCPYNENVSFTNLKEFEVKDFMKNDDEDFIININNSLFKETFKITSCGWRGKNTLIRNAMIRKKKFKNKELGNIKSESPYIKEYIKMLSKENS

SEQ ID NO: 75875 - protein, 330 aa, Clostridium baratii
  REGION 1..330: note = tr|A0A0A7FVB7|A0A0A7FVB7_9CLOT Epoxyqueuosine reductase OS=Clostridium baratii str. Sullivan OX=1415775; GN = queG PE=4 SV=1
MDKQEKIIEFCKSINLDLVGFIKCREFNELKEFYSERKELKLENEFEEADILKRINPKTYMEDGKTIISIAFPYNTGEKLCDNGFSIYTKGMDYHNAVHKYLENICEFIKSLGGECVAFTDSNCLPERHIAALAGVGFIGKNNMLITEKYGSYVFLGEIITDLEIYNEDKTTFHNIMEYSNCGECNICFNECPSKSINNFKRNPNICVSYLTQKKALNDKEINLINGRIFGCDSCQMKCPYNENVSFTNLKEFEVKDFMKNDNEDFIININNSLFKETFKTTSCGWRGKNTLIRNAMIRKKKFKNKELGNIKSESPYIKEYINILSKENS

SEQ ID NO: 75876 - protein, 303 aa, Clostridium bartlettii
  REGION 1..303: note = tr|R5XYK1|R5XYK1_9CLOT Putative iron-sulfur cluster-binding protein OS=Clostridium bartlettii CAG:1329; OX = 1263063 GN=BN488_00629 PE=4 SV=1
MHKDRLKQICENKKIDIMGVAPIGPYFELEKILNDRKQKEHLTGMEEEDINKRINPKLIMDDAKSVIVCAFPYYVGEYKDSNISKYCYGEDYHIVTKQILTDICLEIEKEIPDFKYEIFADNGPLVDRYLAYLSGIGYFGINNNIITDKYGSYIFIAYVVNNYEFEPDKPSEKSCLKCNKCVKYCPGNAILGNFEIDPRKCLSYITQKKEELSESEIQLLKENGKVFGCDICQDVCPHNKDIQTTKICEFNNELITKINQEEIDEISNKEFKRRYKNRAFSWRGRKIIKRNLDIISDKNKMDF

SEQ ID NO: 75877 - protein, 276 aa, Clostridium beijerinckii
  REGION 1..276: note = tr|A0A1S8R6A1|A0A1S8R6A1_CLOBE Epoxyqueuosine reductase OS=Clostridium beijerinckii OX=1520 GN=queG_1; PE = 4 SV=1
MDKQYFIKTAEDFVENSQDNYITKEIAISENVVGMKIFDAPILAFSSVDDEYFTLLKQPSAIGKHFMLPKEWLPQSKTVISFFLPFSEAVKKGNRRNMSWPSEEWLHGRIEGQSLLNKLCMHLKSELINAGYNSVVPTLDERFWSNANHPNHEEKFTSNWSERHAAFVCGLGTFGLSKGLITKKGISGRLGSIITELYLSPDKREYEKIYEYCSMCGKCVKNCPANAISIENGKNHIICSEFLDKTMEKHKPRYGCGKCQIDVPCESRIPKQHNVK

SEQ ID NO: 75878 - protein, 343 aa, Clostridium beijerinckii
  REGION 1..343: note = tr|A0A0K2MAY9|A0A0K2MAY9_CLOBE Fe-S oxidoreductase; OS = Clostridium beijerinckii NRRL B-598 OX=1428454; GN = X276_08030 PE=4 SV=1
MTLLADKIKSAALNLGYEKCGIIKISDIDGYKERLDERVERVPESKGFYQGQYRFTQLQDTYPWAKSIVICVRRYGKYHIPEHLKGMIAKYYLVDARKDKNSKDFQDSVKFEEYMQELGLRAETERGFGLVPLRFAAMKAGLGIVRKNNFFYTENGSSVYLDAWLIDKELEAVEIPNVRPCSDKCNLCIKACPSASLSKPYTMNPIACVSCITTFMGRDMTNEKYREEIGNWVYGCDACQDACPMNKNRWQETEEFPNLQELSEHISLEKIIKMDYKFLEEVMQPKFWYIDKSSVWKWKVNAINVMVNDYKEQYKEHILYACNDSNPKVREMAEWAIEKLNLK

SEQ ID NO: 75879 - protein, 303 aa, unidentified
  source 1..303: note = Clostridium bornimense
  REGION 1..303: note = tr|W6RZV5|W6RZV5_9CLOT 4Fe-4S ferredoxin-type domain-containing protein OS=Clostridium bornimense; OX = 1216932 GN=CM240_3074 PE=4 SV=1
MIIKMLKEEALKHNDKIEIVSIERLKDLKTEIEEFKSHNELNGFQNWIVNDLYDFDLPSLDFIAKSIIIVALHHPFYADVKLNYQNKVYNTKCLVRSDFHGSKRYIKDFVNLQGYNLKETKSIPLKRLAVQSGLAVYGKNNITYIDGMGSNLSYIAFYTDIPCFEDHWRPVCHFEFCDKCGNCVKHCPTGAIKKDSFLIDNEKCLSCINESAGDFPHWIPKNIHHTLYDCLRCQEHCPMNKSIINDKIGPITFTEEETSMLLDGKGPDDFPEEFLAKISNLGLFDWRDALPRNINAIIQANSN

SEQ ID NO: 75880 - protein, 324 aa, unidentified
  source 1..324: note = Clostridium bornimense
  REGION 1..324: note = tr|W6S1G0|W6S1G0_9CLOT Iron-sulfur cluster-binding protein OS=Clostridium bornimense OX=1216932 GN=CM240_0968; PE = 4 SV=1
MDLDSKIRNYICSLGIDTFGAIECRKFEEIKEQLEMNKRLKLENPFEEEDIEKRINPFLLYKDGKSIISIAFPYLYPTKGEENPYFSKYTMGSDYHIVVKSYLNKILEYIKSLGGDGIALVDSNPLPERYLAKLCGVGFIGKNNMIITEKYGSYVFLGEIITNIEMKYDIPIDNKCEQCVKCIERCPTNSLNPKRKNSNICLSYITQKKDIEEKWFKVIDKRLFGCDTCQNYCPFNEDAKYSSIEEFRPKNFMKEPKISEIALLNKSDFQSKYKTTSCGWRGKNILQRNALIVSHNCNYKLDIKDKDINSPYVKEYYEKIKNKI

SEQ ID NO: 75881 - protein, 321 aa, Clostridium botulinum
  REGION 1..321: note = tr|A0A0C3HET6|A0A0C3HET6_CLOBO (Fe-S)-binding protein OS=Clostridium botulinum OX=1491 GN=SD74_02085; PE = 4 SV=1
MDCKKSVKEYCRNLGLDLIGFTKCRIFHELIPELTERKNENRQNEFEGKDINKRVDPFQYMKEGKTIISIAFPYLFNLGHEHDIYFSKYTHGRDYHTVINEYLQKICNFIQSKGYRAKYFVDSNDLPERYIAYLCGIGFIGKNNMLITEKYGSYVFLGEIITDMEIHEDEPMECKCKECNICFRACPTSSLENKDPNICLSYITQKKNIENEWFDKLKGRMFGCDTCQRVCPYNKNINTSNIEGFKPFDFMKNLDLEELIYVNNKEFKEKYKLTSCGWRGKSILQRNALINCITMNKDVDIQGKNIKSPYVLDYYHRLLKK

SEQ ID NO: 75882 - protein, 321 aa, Clostridium botulinum
  REGION 1..321: note = tr|A0A0B4W3P5|A0A0B4W3P5_CLOBO Epoxyqueuosine reductase OS=Clostridium botulinum Prevot_594 OX=1408284; GN = queG PE=4 SV=1
MDCKESVREYCRNLGLDLIGFTKCRIFHELIREFTERKNENKQNEFEGKDINKRVNPFQYMREGKTIISIAFPYLFNLDYENNIYFSKYTQGRDYHTIVNEYLKKICEFIQSKGYTAEHFVDSNDLPERYIAYLCGIGFIGKNNMLITEKYGSYVFLGEIITDMEIDADEPMECRCKDCNICLKACPTNSLENKDPNICLSYITQKKNIEDEWFDKLKGRMFGCDTCQRVCPYNKNIKTSNIEGFKPFNFMENLDLEELINVNNKEFKEKYKLTSCGWRGKSILQRNALINCIKMNKDIDIQEKNIKSPYVLDYYRRLLKK

SEQ ID NO: 75883 - protein, 343 aa, Clostridium butyricum
  REGION 1..343: note = tr|A0A2S7FBZ4|A0A2S7FBZ4_CLOBU Epoxyqueuosine reductase OS=Clostridium butyricum OX=1492 GN=AWN73_11125; PE = 4 SV=1
MGVKEDIKNYCFSLGINSVGFIKCRRFEELKAFYEVRKSLNLQNEFEEDNIESRINSKEWFEEGKTIISIAFPYVFSDNNLKTKSENNFSIYTQGLDYHHVVNKYLNKICEIIEANGGKYKTFVDSNTLPERYLAYISGVGFIGKNNLIITPKHGSYVFLGEIITDLEIYDEDKRHFDEIDLFRECGECSICYDKCPTKSINNVRKNCNICLSYITQKKDLNDWEIKKLDGRMFGCDTCQLGCPYNSKIEKSELKEFKPLDWFYDYDEDYIIDMNNSMFKESFKKTSCGWRGKNILKRNALIRKYIFKNESIDKLKTVKFESPYLEEYLKIIAEMKSDKVLKK

SEQ ID NO: 75884 - protein, 343 aa, Clostridium butyricum
  REGION 1..343: note = tr|C4IE06|C4IE06_CLOBU Iron-sulfur cluster-binding protein OS=Clostridium butyricum E4 str. BoNT E BL5262; OX = 632245 GN=CLP_3588 PE=4 SV=1
MGVKEDIKNYCFSLGINSVGFIKCRRFEELKAFYEVRKSLNLQNEFEEDNIESRINSKEWFEEGKTIISIAFPYVFSDNNLKTKSENNFSIYTQGLDYHHVVNKYLNKICEIIEANGGKYKTFVDSNTLPERYLAYISGVGFIGKNNLIITPKHGSYVFLGEIITDLEIYDEDKRHFDEIDLFRECGECSICYDKCPTKSINNVRKNCNICLSYITQKKDLSDWEIKKLDGRMFGCDTCQLGCPYNSKIEKSQLKEFKPLDWFCDYDEDYIIDMNNSMFKESFKKTSCGWRGKNILKRNALIRKYIFKNESIDKLKTVKFESPYLEEYLKRIAEMKSDKVLKK

SEQ ID NO: 75885 - protein, 333 aa, Clostridium cadaveris
  REGION 1..333: note = tr|A0A316LZH6|A0A316LZH6_9CLOT tRNA epoxyqueuosine(34) reductase QueG OS=Clostridium cadaveris; OX = 1529 GN=queG PE=4 SV=1
MTFKNEVVNYSKGLGLDAVGFTYCRRFNELEDFLKERKERKIENEFEEPDIEKRINPKLYMGDGKTIISIAFPYYGGDSQREDVYFSYYTMGMDYHKVVESYLKKICDFIKEKFCGKAEYFVDSNALPERYIAYLSGLGFIGRNGMLITEKYGSYVFLGEIITDIEVEDLKNNKREVQELLKFKNCGQCKKCLSNCPTSAINYNKTIPNICMSYITQSKVIEKPFINKMDGRIFGCDHCQICCPYNENIATDYLKEFEPMDYMKKADIEEIIYMDNKTFREKYGTTSCGWRGKATLQRNALIAKILKKQEFDIDEEKITSPKVQEYYEILKKL

SEQ ID NO: 75886 - protein, 333 aa, Clostridium cadaveris
  REGION 1..333: note = tr|A0A1I2KC65|A0A1I2KC65_9CLOT Epoxyqueuosine reductase OS=Clostridium cadaveris OX=1529; GN = SAMN04487885_10573 PE=4 SV=1
MTFKNEVVNYSKGLGLDAVGFTYCRRFNELEDFLKERKERKIENEFEEPDIEKRINPKLYMGDGKTIISIAFPYYGGDSQREDVYFSYYTMGMDYHKVVESYLKKICDFIKEKFCGKAEYFVDSNALPERYIAYLSGLGFIGRNGMLITEKYGSYVFLGEIITDIEVEDLKNNKREVEELLKFKNCGQCKKCLSNCPTSAINYNKTIPNICMSYITQSKVIEKPFINKMDGRIFGCDHCQICCPYNENIATDYIKEFEPMDYMKKADIEEIIYMDNKTFREKYGTTSCGWRGKATLQRNALIAKILKKQEFDIDEEKITSPKVQEYYEILKKL

SEQ ID NO: 75887 - protein, 324 aa, Clostridium carboxidivorans
  REGION 1..324: note = tr|C6PZG2|C6PZG2_9CLOT 4Fe-4S ferredoxin-type domain-containing protein OS=Clostridium carboxidivorans P7 OX=536227 GN=CcarbDRAFT_4179 PE=4 SV=1
MNYKSMIINYCKDIGLDTVGFTKCRVFEELKHYFEYRESMSLINEFEEKDINKKINPFMYMEDGKAIISIAFPYLFNDNFQQEVNFSKYTQGRDYHVVVSEYLKKICSFIEREMSGKAVYFVDSNSLPERYIAKLCGIGFVGKNNMIITEKYGSYVFLGEIITNIPIEEDKPMECKCEGCDLCQKSCPTGAIREENNCNICLSYISQKKEIDDQWFDKLKGRIFGCDTCQRICPFNKKASFSNIEEFRPYDFMEVINLEELANIDKRIFLNKYSKSSCGWRGKNVLQRNALINIIGMKKNINIEEINSPYVKNYYNRLLYHFKL

SEQ ID NO: 75888 - protein, 345 aa, Clostridium carboxidivorans
  REGION 1..345: note = tr|C6PXZ3|C6PXZ3_9CLOT Uncharacterized protein; OS = Clostridium carboxidivorans P7 OX=536227; GN = CcarbDRAFT_3660 PE=4 SV=1
MLTIEQKIQEKAYELGYEKCGIIPISFMNGYGEKVEERIQKVQKSGPFYQRQRRLVNPLEEYPWAKSIVVVAARYGKYKVPESVRSHIGKSYLFDIRVDANTKEYQNSKVMDKYMQELGLQVATNQKFGVVGLRWAALQAGIGIVRRNNFFYTESGSWVHLEAWLTDREMELREIPTVPQCPKNCGACVAACPTKSLSAPYTMSPTDCISFLTTFGGRNLPQEPLRKSFGQCIYGCDICQDVCPMNKGKWQEVEEFPGLSELAPSLTPENIMDMEESFYREKVQPKFFYLSPDDLWKWKVDVLCFMGNNYKDSYKPYIMRACKNENEKIREMAYSIRRELFDCVR

SEQ ID NO: 75889 - protein, 343 aa, Clostridium carnis
  REGION 1..343: note = tr|A0A3P6KDX2|A0A3P6KDX2_9CLOT Putative Fe-S protein; OS = Clostridium carnis OX=1530 GN=queG_3 PE=4 SV=1
MDTIEQMIQKKAYELGYEKCGIIPIGLMDGYTEKFNERIEKIPKSKMFYENQQRLAKFREIYPWAKSVVVLTVAYGKYKVPEMLNGLIAKAYLFDTRVDENTKEYQNNRALEKYMQELGLKVETNQKFGVVGMRWAALQAGLGIIRRNNFLYTESGSWVHLEAWVTDREMELKETNNVVECPKSCNRCIASCPTKSLSDPYTMSPTECISFLTTFGGRDLPHEPLSKTFGNCIYGCDICQDACPMNKGKWKDEEEFSGLEELVPSLIPENILNMEEDFYRNKVQPKFFYLSADDLWKWKVDVLCYMRNNYKESYKSLIINACNNENNKVREMACSICDELSLQ

SEQ ID NO: 75890 - protein, 222 aa, Clostridium carnis
  REGION 1..222: note = tr|A0A3P6K6N1|A0A3P6K6N1_9CLOT (Fe-S)-binding protein OS=Clostridium carnis OX=1530 GN=queG_1 PE=4 SV=1
MDNDYIKKIVYPLGADVCGFANIGRFDNAPKGFHPLDVYAETKSIIVFGKQFPSSLFQANTNVPYTFFKNNSAKLLDDISIQLTLAIESEGYKAIPIPSDEPYEYWDAENKHGRGILSLKHLAQLCGLGSIGKNTLLINKEYGNRLYFGAVITNAELNEDDLSNNLCPENCNICIKSCPQSALDGITVNQKKCRERCIYATDGGGFVYGCNICRKVCPFANI

SEQ ID NO: 75891 - protein, 340 aa, Clostridium cavendishii
  REGION 1..340: note = tr|A0A1M6MQP5|A0A1M6MQP5_9CLOT Epoxyqueuosine reductase OS=Clostridium cavendishii DSM 21758 OX=1121302; GN = SAMN02745163_02726 PE=4 SV=1
MKLKGKVVSYCNLLGLELVGFTKCRRFDELRNFYEHRKIYGLENEFEEEDIEKRINPNHYMSKGKTIISIAFPYLYEESQNIDGFSLYTRGKDYHYVVNSYLQKICSLIEELGGEAKCFVDSNTLPERYIAYLCGIGFIGKNNLIITEKYGSYVFLGEIITDLEIENSTNRNFEDIKKFAECDICEECYNTCPTKSINRNKKNPNICMSYITQKKDIEDKFLNLMNGRIFGCDTCQISCPKNKDIKYSNLDEFKPLEFMNITNTEKILELTNGDFKETFKLTSCGWRGKNVIIRNALIRKANFENKDISKYKFSSEYIMKYKDKLAKEKEGSEKNNETKN

SEQ ID NO: 75892 - protein, 324 aa, Clostridium celatum
  REGION 1..324: note = tr|L1QKD6|L1QKD6_9CLOT Putative iron-sulfur cluster-binding protein OS=Clostridium celatum DSM 1785; OX = 545697 GN=HMPREF0216_01013 PE=4 SV=1
MLKEKIINYCNSLGLDTIGFIECRKFEELREFFKFRKENLLENEFEESDIEKRINPNIYMEDGKTIISIAFPYLWKENDMDNGFSKYTKGLDYHRVVKSYLDKICIYINELGGNAISFVDSNMLPERYIAYLSGIGFIGKNNMIITKKYGSYVFLGEIITDLDIKCTDKRKFSEIKMFNECGECDNCYKECPTKSININKKNPNICSSYITQKKDLNEIEIKLLKDKIFGCDICQIKCPYNKEVYFSNIEAFKPLDFMCNEKIDIYAGMNNKFFKENISKTSCGWRGKNVIKRNAIIRLHNNGKDIKKYEGDSPYINEYISKLI

SEQ ID NO: 75893 - protein, 286 aa, unidentified
  source 1..286: note = [Clostridium] cellulosi
  REGION 1..286: note = tr|A0A078KQM0|A0A078KQM0_9FIRM 4Fe-4S ferredoxin-type domain-containing protein OS=[Clostridium] cellulosi OX=29343 GN=CCDG5_1630 PE=4 SV=1
MNDLVTINEIMTSCGMPHWGIASFDNVKTALLECNAKKRLPEGAQSIISAIFPYYTHHAAGEISRYAASADYHIVALRRLNDACEKLRRAYEYNSFEPFCDSSPIPEVKTACLAGLGVLGKNGLLITPDYGSFVFIGEIVTDLSLPPNNKPAGRCMSCGLCAAACPSGCIADNKVDCSRCVSHISQKKGELTAEEQELLKKASTIWGCDICQNVCPHNKNLKETYIDEFKTDFVDSLDAKEIEDAGFKKKYKGYAFMWRGKNVLKRNVSILHSGKANNITCTTLKE

SEQ ID NO: 75894 - protein, 326 aa, Clostridium cellulovorans
  REGION 1..326: note = tr|D9SVF9|D9SVF9_CLOC7 4Fe-4S ferredoxin-type domain-containing protein OS=Clostridium cellulovorans (strain ATCC 35296 / DSM 3052 / OCM 3 / 743B) OX=573061; GN = Cloce l_1330 PE=4 SV=1
MDIKEEIKHFCKSLGLNTVGFMRARIFHELRPFYERRKELGVFNSFEESDIEKKINPFLYLHEAKTIITVAFPYKYKESFEDKVYFSRYTRGKDYHKVAYTYLQRICEFIKSFGYDAVALVDSNSLPERYIAAEAGVGFIGKNNMLITEKYGSYVFLGEIITDALIDPDAKIESKCGECNLCIKACPVKAIGEEYNDSNKCLSYLTQKKDLTDEEMESLKGRLFGCDTCQRVCEFNQYTEEANLKELNPYEFMEHVDVKEIAHIDKKIFKDKYIKTSCGWRGKNILQRNALIALFSQGNGEEVDYEKITSDYVKEYYNRLLNRYKL

SEQ ID NO: 75895 - protein, 325 aa, Clostridium chauvoei
  REGION 1..325: note = tr|S6EMX1|S6EMX1_9CLOT Uncharacterized protein; OS = Clostridium chauvoei JF4335 OX=1351755 GN=CCH01_21770; PE = 4 SV=1
MGIKEDIIAYCSSLGLDTIGFIKCRRFEELKSFYENRKSLGLQNEFEEDNIENRINPNVYMNEGKTIISIAFPYLHNVDYIDNGFSMYTRGLDYHRVLKSYLEKICNYINSLGGNAMAFVDSNTLPERYIAYLAGVGFIGKNNMIITKKYGSYVFLGEIITDLEISCEDVRTFKEIANFKECGNCELCYNECPTKAINKSRKNSNICVSYLTQKKDLEDKFIKLLDGRVFGCDSCQKECPYNLHIEYSKIQDFYPLDFMNKDNNEFLININNKNFKETFLTTSCGWRGKNVLKRNAIIRKKNNGDNIGDIKSDSPYLKDYIDRLF

SEQ ID NO: 75896 - protein, 222 aa, Clostridium chromiireducens
  REGION 1..222: note = tr|A0A1V4IJF6|A0A1V4IJF6_9CLOT Epoxyqueuosine reductase OS=Clostridium chromiireducens OX=225345; GN = queG_4 PE=4 SV=1
MIKLSYLQEKLSSCCEIDSFSISMCSESERQALWDLLPECKSVIVLAHHIKHSIEWAWFPFEAERNNVTCAADLHLKTECEKITSVIKDNGYNSIIIPYPGRSGIRFKDLANKTGLGKIGDNFLFLHKEWGAWAHLRVIVSDGEISDKLPECKEVCYHCGICKTSCPAKVIKDDTLLGVECSQYQNKIDEEFGIQGSYTPKCEECARVCPIGETPEKITISK

SEQ ID NO: 75897 - protein, 342 aa, Clostridium chromiireducens
  REGION 1..342: note = tr|A0A1V4IV22|A0A1V4IV22_9CLOT Epoxyqueuosine reductase OS=Clostridium chromiireducens OX=225345; GN = queG_2 PE=4 SV=1
MNTLALQIKNAALELGYEKCGIIKMSDIYGYKEKLEERIERTPEAKGFFQSQYRFVNAQETFPWAKSIVICIRRYGKYDIPEHLKGVIAKYYLVDSRTDENSKDFQDSLKFEKYMRELGIRAETERKFGLTALRWAAMKAGLGMVRRNNFFYTENGSWLYLEAWLIDEELELIETPNLRPCSDKCNLCIKACPSASLSQPYTMSPIACVSCITTFTGRDMPNEKYREEVGDWVYGCDVCQDVCPMNIKRWSETEEFPNLAELSQKISLEKIIKMDYDFLENVMQPKFWYIPKQDVWKWKVNTINAMVNNYKEQYKESIYEACKDSHEKVREMAEWAISKLNI

SEQ ID NO: 75898 - protein, 327 aa, Clostridium cochlearium
  REGION 1..327: note = tr|A0A239Z4F3|A0A239Z4F3_CLOCO (Fe-S)-binding protein OS=Clostridium cochlearium OX=1494 GN=queG PE=4; SV = 1
MEYKKKLILDYCMKLGLDTIGVTEIRKFKELESYLINRKQKGHENEFEEKDIEKRINLQDVCDWGKVIISIAFPYMFNFNFQEKIYFSKYTQGRDYHKVVGEYLKKICCFIEYMGGKAQYFVDSNCLPERYIAKLCGIGFIGKNNMLITEKYGSYVFLGEIITDLCLPGDNEKDNKCGQCDLCLKACPTKSIKEKESNPNICLSYLTQKKDLEDVWMNKLQGRLFGCDTCQRVCPFNKGVEKSPLMEFKPLEFMEKVDLQELIYIDNKSFKEKYALSSCGWRGKNILKRNALINEFYYNKDGELKGQKFNSPYIRDYYSRLLKLHNL

SEQ ID NO: 75899 - protein, 324 aa, Clostridium colicanis
  REGION 1..324: note = tr|A0A151AN72|A0A151AN72_9CLOT Epoxyqueuosine reductase OS=Clostridium colicanis DSM 13634 OX=1121305; GN = queG PE=4 SV=1
MDYKECIIKYCYEIGLSQIGFTKCRVFHELKEFLTKRKHENIENEFEEKDIEKRINPFLYMKEGKTIISLAFPYMHETSTKADKYFSKYTLGRDYHEVVSKYLESICNFIKSLNGKAIYFVDNNALPERYIAYLSGIGFIGKNNMVITERYGSYIFLGEIITDLEIEEDMPKESKCGNCDICIKACPGRSISEKGCNPNICLSYITQKKNINEEEISKLKGKIFGCDICQDVCPYNKHIEFSKINEFEPFDFMRNTNFQEILNMSKKDFNEKYKMTSCGWRGKSVLQRNALINLAHMKRLKEGKKFNSPYVEEYYNKLLKNSKF

SEQ ID NO: 75900 - protein, 332 aa, Clostridium collagenovorans
  REGION 1..332: note = tr|A0A1M5VZP0|A0A1M5VZP0_9CLOT Epoxyqueuosine reductase OS=Clostridium collagenovorans DSM 3089; OX = 1121306 GN=SAMN02745196_01463 PE=4 SV=1
MNIKESISQKLRDIDLDTFGFLKCEVFHDLKEFLVVKEELSLINEFEESEIEKRINPLLLMPEGKTIISIAFPYYVENNKEKDEIYFSRYTRTLDYHRVVHRYLDEVIRHIESLGGKALGFVDSNPLPERYIAMKSGVGFIGKNNMIITEKYGSYVFLGEIITDLEIEEDMPKENLCGECRECIKACPTKSIKNIKEKNLKGILNNSKICLSYITQKKEIDFPFIKLMDGRLFGCDSCQESCPYNKDINNKIIKEFESIDYMDKVNLEELLNLDNAKFKELYKCTSCGWRGKNILIRNSMIAAYNKGRLNLDYINNIKSTYVKEYFEKILRL

SEQ ID NO: 75901 - protein, 321 aa, unidentified
  source 1..321: note = Clostridium combesii
  REGION 1..321: note = tr|A0A2G7HFT1|A0A2G7HFT1_9CLOT tRNA epoxyqueuosine(34) reductase QueG OS=Clostridium combesii; OX = 39481 GN=queG PE=4 SV=1
MDCKESVKEYCRNLGLNLIGFTKCRIFHELIPELTERKNENRQNEFEGKDINKRVDPFQYMKEGKTIISIAFPYLFNLGHKHDVYFSKYTQGRDYHTVVNEYLQKICDFIQSKGYRAEYFVDSNDLPERYIAYLCGIGFIGKNNMLITEKYGSYVFLGEIITDMEIHEDEPMECKCEECNICLRACPTSSLEHKDPNICLSYITQKKNIEDDWFNKLKGRMFGCDTCQRVCPYNKNINTSNIEGFKTFDFMENLDLEELIYVNNKEFKEKYKLTSCGWRGKSILQRNALINCITMNKDVDIQGKNIKSPYVLDYYHRLLKK

SEQ ID NO: 75902 - protein, 266 aa, unidentified
  source 1..266: note = Clostridium coskatii
  REGION 1..266: note = tr|A0A162JDZ2|A0A162JDZ2_9CLOT Epoxyqueuosine reductase OS=Clostridium coskatii OX=1705578 GN=queG_6; PE = 4 SV=1
MDKLTSKEIIKLALKTGASLAGIANVEDLKKAPAFTVVPKMPKYNGVGTYMRGEKDKFLTEVLWPQGIKSVLILAYHHPIDNPAVDYWIEDHNTIGNKKLISITKNVKSILEKECVETYSFNYHVEKGGIFLKDSAVTAGLGCIGRNNLLVTPEYGPHVRLRALGLSLDLQSTGPSGYDPCKSCKIKCWEKCKKSAFAKEIYFSSELGRSELPGRVGNFDRTLCNIQMEEDVASIKPMNIPEVSTEEPVNVIKYCRTCEYACPIGK

SEQ ID NO: 75903 - protein, 235 aa, unidentified
  source 1..235: note = Clostridium coskatii
  REGION 1..235: note = tr|A0A166TRH2|A0A166TRH2_9CLOT Epoxyqueuosine reductase OS=Clostridium coskatii OX=1705578 GN=queG_4; PE = 4 SV=1
MLEYNIQKILNNFMIDYYGVADISKYENELVKYGGSLVKSYPRAISLGIVFPSTIVDHLNDDSNNITKLEYENCYKTINARLDNIASIISSYIIRKGYKALPISAAERVNSDYINAAFSHKLAARLAGLGWIGKSCLLITPKHGPRVRWVSILTDLPLNPTGKEIEQKCGECMACVKICPQKAFYGKNYIEGEDREKRFDVKKCDSYFSEMEHNKQVPVCGMCVYICPYGRKNNK

SEQ ID NO: 75904 - protein, 331 aa, Clostridium cylindrosporum
  REGION 1..331: note = tr|A0A0J8D966|A0A0J8D966_CLOCY Epoxyqueuosine reductase QueG OS=Clostridium cylindrosporum DSM 605; OX = 1121307 GN=queG PE=4 SV=1
MNIKNNIIDYANKIGVPYIGFTDTTFSKKFINNLKNRRNENKLSGFEEEDELKRVDIESLLNGAKTIVSIALPYKYKDQNYIEPYFSKYTMGEDYHRILTSKLNLIKSYIEDNFNEKCIFFCDTGVVSDKEIARKSGLGFVGKNTNIITKNHGSYVFLGEIITTLEIEPCNAKESLCGSCDKCIKACPAKAIDETGIDGKRCLSYITQKKDDLTLEEMERLGNRIFGCDTCQDVCPHNKEVSTSNIDEFKPLEHSMNINLEELLFMSNKEFKIKYGRQALAWRGKFIVQRNAIIAAGNSRNKKYIEVLKKKKDDIRLQNYIDIAIEKINQC

SEQ ID NO: 75905 - protein, 343 aa, Clostridium diolis
  REGION 1..343: note = tr|A0A2P8RCC8|A0A2P8RCC8_9CLOT Epoxyqueuosine reductase OS=Clostridium diolis OX=223919 GN=C4L39_19390; PE = 4 SV=1
MTLLADKIKSAALNLGYEKCGIIKISDIDGYKERLDERVERVPESKGFYQGQYRFTQLQDTYPWAKSIVICVRRYGKYHIPEHLKGMIAKYYLVDARKDKNSKDFQDSVKFEEYMQELGLRAETERGFGLVPLRFAAMKAGLGIVRKNNFFYTENGSSVYLDAWLIDKELEAVEIPNVRPCSDKCNLCIKACPSASLSKPYTMNPIACVSCITTFMGRDMTNEKYREEIGNWVYGCDACQDACPMNKNRWQETEEFPNLQELSEQISLEKIIKMDYKFLEEVMQPKFWYIDKSSVWKWKVNAINVMVNDYKEQYKEHILYACNDSNSKVREMAEWAIEKLNLK

SEQ ID NO: 75906 - protein, 324 aa, Clostridium disporicum
  REGION 1..324: note = tr|A0A174CYW9|A0A174CYW9_9CLOT Iron-sulfur cluster-binding protein OS=Clostridium disporicum OX=84024; GN = queG PE=4 SV=1
MKEQIKRYCNSIGIENIGFIECRRFDELYDFYDYRKNNKLENEFEESDIEKRINPKWYMSEGKTIISIAFPYLWVDNYIENGFSKYTKGLDYHRVVKKYLDEICRLISENGGKAISFVDSNTLPERYIAYLAGIGFVGKNNMIITKDYGSYVFLGEIITDLTLFDKDKRVFNEIEKFKECGQCDICYKECPTKSINEIKKNPNICSSYITQKKDLSDIEIKLLKGKIFGCDICQNKCPYNEDVKFSNIGEFKPLDFMEESNCEIYAGINNKAFKENILITSCGWRGKNIIKRNAIIRLHNEGRDIKKYKGDSPYLNDYIERLNK

SEQ ID NO: 75907 - protein, 328 aa, Clostridium disporicum
  REGION 1..328: note = tr|A0A174CBE3|A0A174CBE3_9CLOT Iron-sulfur cluster-binding protein OS=Clostridium disporicum OX=84024; GN = queG PE=4 SV=1
MIKEKIVKYCNSIGLDTIGFVKCRVFEELREFYLDRKEKGLENEFEENDIEKRINPNVYMEDGKTIISIAFPYYMGKEDVDNGFSVYTKGYDYHRVVKSYLDKICTYINELGGKAIPLVDSNSLPERYIGFLAGLGIIGKNNMIITKKYGSYVFLGEIITDLEICCRDAGTFEDIQKYDGCNECKVCIDNCPTKAIMTGRKNPNICSSYITQKKELSKIDYKLIKNRIFGCDICQNTCPYNKEISFSNLEEFKSLDFMNTTDIKYYADLNNKEFKEKISRTSCGWRGKNVIRRNAIIRLHNEGEDIEKYKGDSLMINNCIDEIKRINN

SEQ ID NO: 75908 - protein, 314 aa, Clostridium drakei
  REGION 1..314: note = tr|A0A2U8DRQ5|A0A2U8DRQ5_9CLOT 4Fe-4S ferredoxin; OS = Clostridium drakei OX=332101 GN=B9W14_10535 PE=4 SV=1
MQNYSSDFINQIQKYGFKAQVISFKHIKEIQLELETTKQIHKDVNTYIGKYINKFNYNVPINSLEAKSIIIIAVPQPIARINFTLDSKNHTVIMPPMYLLNSSSEFEEKHKKISEITTIVKKILSTENFKVVKANIPCKLIAVKSGLGTYGRNNICYINSESSFYWLGSYISDMPCENDFWQKCTIMDACKNCDLCLKNCPTSAISDDRFLLHTNKCITLQNESKETFPKSLNLKWHNCLIGCIRCQIICPVNKKHIKNVKDITEFSELETKKILSKTPLKELPGETYKKLELISFIEDYNLLARNLSILINNK

SEQ ID NO: 75909 - protein, 324 aa, Clostridium drakei
  REGION 1..324: note = tr|A0A2U8DJU7|A0A2U8DJU7_9CLOT Epoxyqueuosine reductase OS=Clostridium drakei OX=332101 GN=B9W14_00265; PE = 4 SV=1
MNYKSMIINYCKDIGLDTIGFTKCRVFEELKHYFEHRKSMSLINEFEEQDINKKINPFMYMKDGKTIISIAFPYLFNNDFQQQVGFSKYTQGRDYHVVVSEYLKNICSLIEKEMSGKAVYFVDSNSLPERYIAKLCGIGFIGKNNMIITEKYGSYVFLGEIITNISIEEDEPMECKCEDCDLCQKSCPTGAIRNENNSNICLSYISQKKEIDDEWFNKLKGRIFGCDTCQRICPFNKKASFSNIEEFRPYDFMEVINLEELANIDKRIFLNKYSKSSCGWRGKNVLQRNALINIISMKRNINIKEINSLYVKNYYNRLLYHFKL

SEQ ID NO: 75910 - protein, 330 aa, Clostridium estertheticum
  REGION 1..330: note = tr|A0A1J0GCU9|A0A1J0GCU9_9CLOT tRNA epoxyqueuosine(34) reductase QueG OS=Clostridium estertheticum subsp. estertheticum OX=1552 GN=A7L45_01405; PE = 4 SV=1
MSIKDDIIEFCSINGLDVIGFSECRIFHELNPYFDKRKKLGLENEFEEKELDKKINPFIYMEDGKTIISIAFPYLYNNDISGKVYFSNYTMGRDYHLVLIEYMKKICTYIEELGAKAMYFVDSNALPERYIASLCGLGFIGKNNMLITKRYGSYVFLGEIITDLMIEPDKSVTQKCGDCEICLSSCPTSAIVKGKVGINNNSNICLSYITQKKDIEDLWFEKLGGRLFGCDTCQKVCPYNKKVEWSVIKEFKPYEHMKTPELKVLMNIDNKLFKDMYKITSCGWRGKNIIKRNAIINAFIIEKVEIIALQKDTSPYIRDYYYRLLKFFKL

SEQ ID NO: 75911 - protein, 337 aa, Clostridium fallax
  REGION 1..337: note = tr|A0A1M4SS18|A0A1M4SS18_9CLOT Epoxyqueuosine reductase OS=Clostridium fallax OX=1533; GN = SAMN05443638_101145 PE=4 SV=1
MIRNNIENFCRGLGLDLIGFVRCREFIELRDFLLDRKKLNLENPFEEEILEKRINPLQYLNEGKTIISIAFPYLHNYEYKENGFSVYTRGEDYHKVVNSYLEKICGFIETLGGKAERFVDSNPLPERYIAYLSGIGFIGKNNMLITKQYGSYVFLGEIITDLVMESYDDDGKHLEDLLKFKECGICDLCYKNCPTKSINKNKKNSNICLSFITQKKDIDDKWFNILNGRIFGCDTCQKVCPFNKYIKYSGIKEFYPLDFMNENLTDKLITITKGDFNKSIKLTSCGWRGKNVLSRNSIIRKYALSKEEIEEGIYNMKFQSSYLEEYKNRILDLSKTE

SEQ ID NO: 75912 - protein, 343 aa, Clostridium felsineum
  REGION 1..343: note = tr|A0A1S8LJ53|A0A1S8LJ53_9CLOT Epoxyqueuosine reductase OS=Clostridium felsineum DSM 794 OX=1121310; GN = queG_1 PE=4 SV=1
MNSLAEQIKSAALHMGYEKCGIIKISDMLGYEEKLNERIERIPEVKPYYEDFYSFAHPEDTYPWAKSIVICARQYGKYYIPEHLKGMIAKYYLVDSRTDENSESFQDSLKFEKHMQDIGIKTATDRKFGITALRFAALKAGIGLVRKNNFFYTESGSWVYLEAWLIDKELESIEIPTLKKCSEYCNICIKSCPTSSLSEPYTMNRSSCISCLTTWEGWDMPNEKYKEQIGDWVYGCDVCQDVCPMNKNRWKETEQFPFLRELGEQISLEKILKMDYTFLENVMQHKFWYIQKTDVWKWKTNAINAMVNDYKQQYREYILDACNDSNAKVRKMAEWAIQKLNLL

SEQ ID NO: 75913 - protein, 238 aa, Clostridium felsineum
  REGION 1..238: note = tr|A0A1S8LCE2|A0A1S8LCE2_9CLOT Epoxyqueuosine reductase OS=Clostridium felsineum DSM 794 OX=1121310; GN = queG_2 PE=4 SV=1
MELLDKIKELGDIHAIDFIGVAGLTKVKNDIKEISGSLIDEYPRALSIGIVLQDSIVDLLSGSDNYENALENKIHGYDVIMNRLDNFASIVGSVIQRNGYKAMPLPASERIDSTRVCASLSHKLTARLAGFGWIGKSCLLINPKYGPRVRWTSVLTDAPFEENKEILEGRCGDCNNCAKACPSKAILGRNYVADEPREVRLDVRRCEEHLSKRKQEGKFEICGKCMYACPFGMQKITL

SEQ ID NO: 75914 - protein, 245 aa, unidentified
  source 1..245: note = [Clostridium] fimetarium
  REGION 1..245: note = tr|A0A1I0RYR4|A0A1I0RYR4_9FIRM Epoxyqueuosine reductase QueG (Queuosine biosynthesis) (Fragment); OS = [Clostridium] fimetarium OX=99656 GN=SAMN05421659_1482; PE = 4 SV=1
MNRKIERMLLENGASMVGFAKINELYSNVDLKEPRSEDSVTESINIPIYPFGISIILSYPQTVIKNISDFPTIEYYNAYHKLSDKLDDLATMCAEYIIEQGYNAYPQTDSATKEYGIFRTVMPHKTVAVHSGLGWIGKSALFLTEKYGSAVRLTSVLTDAPLEFNKLILQSKCGSCMICTDACPGNAISGLTWNPKLERDEFFDALACRKKAREIAAKSLEKQITLCGKCIEVCPYTRKYTTFDS

SEQ ID NO: 75915 - protein, 377 aa, Clostridium formicaceticum
  REGION 1..377: note = tr|A0A1D9FLP0|A0A1D9FLP0_9CLOT tRNA epoxyqueuosine(34) reductase QueG OS=Clostridium formicaceticum OX=1497 GN=BJL90_10705 PE=4 SV=1
MKLKEEIKSYGKSIGVDLIGFTSAEPFEDMRNILEKRKKRNHLSGFEEQNIELRIHPKKTMADAKSIIVIGVSYYKRHIKQGEMNKPPFSGVLARTAWGRDYHYVLKEKLEKIAAFIQERIDDFRYKIFVDTGPLVDRHVAYRAGLGWYGYNALLINEKYGSWFFIGYMMNNVAFEEDKPLENKACEGCNLCIKNCPKGALEGPYEFNAKKCLSNLLQQKEEIYEEDRGILGKNLYGCDICQDVCPHNNKATEMSEDHFSPQAVSSAPDLIELLHMSNKAFKKTYGSTSAGWRGKKVLQRNAIIAIVNHGDKKALPYLIPLLKDNRPEIRSCSIWGIFQLDPFLAREISEEMKKKEEDQKVLDTIVSCLNKAFPFEN

SEQ ID NO: 75916 - protein, 331 aa, Clostridium frigidicarnis
  REGION 1..331: note = tr|A0A1I1AIF2|A0A1I1AIF2_9CLOT Epoxyqueuosine reductase OS=Clostridium frigidicarnis OX=84698; GN = SAMN04488528_103432 PE=4 SV=1
MKNRIISFCNDLGLDTIGFVKCRKFKELIELYTYRKNKNLENEFEETDIEKRINPFIYMENGKTIISIAFPYMKNFDLNDEIYFSKYTQVMDYHKVVRLYLDKICKFIQSLGGEAIPLVDSNSLPERHIAALGGVGFIGKNNMVITKKYGSYVFLGEIITSLNIQCENNINLDEILSFKKCNECHRCYEKCPTKSINIHNKNCNICLSYITQKKEIDDKWLDKLNGRLFGCDTCQTVCPYNKYIEKSLINEFKTMDFMKNINIEEIIYMDKKTFKEKYIKTSCGWRGKSILQRNALIACLTLNGNYYIDDKKILSPYVKEYYNRLLNKGDL

SEQ ID NO: 75917 - protein, 326 aa, Clostridium gasigenes
  REGION 1..326: note = tr|A0A1H0V108|A0A1H0V108_9CLOT Epoxyqueuosine reductase OS=Clostridium gasigenes OX=94869; GN = SAMN04488529_11371 PE=4 SV=1
MELKEKIKDYCEFLGLDTIGFIKCREFNELREFYNGRKAFNLENEFEEENIEKRINPNIYMEEGKTIISIAFPYLHNVEYINNGFSVYTRGEDYHKVVKSYLNKICNYIESLGGVAISLVDSNTLPERYIAYLAGVGFIGKNNMIITKKYGSFVFLGEIITNLEINSDDLRTFEELNNFKECKDCEACYYACPTKAININRKNCNICLSYLTQKKDLEDKYIKLLNGRVFGCDSCQDVCPYNKNALFSNIEEFKPFSFMNENNTKVLAYINNKDFKETFLKTSCGWRGKNVLKRNAIIKLAKNDLDSIKELETESPYIINYINRLL

SEQ ID NO: 75918 - protein, 330 aa, Clostridium grantii
  REGION 1..330: note = tr|A0A1M5RRV0|A0A1M5RRV0_9CLOT Epoxyqueuosine reductase OS=Clostridium grantii DSM 8605 OX=1121316; GN = SAMN02745207_00687 PE=4 SV=1
MKFNVEIRNFCESLGLDLVGFSECREFSELNSYFEQRKNNNLINEFEEKDTLLKINPFQIMKDGKTIISIAFPYKFPIDTDNDAIKDKSIYFSRYTLGQDYHKVVKKYLEKIAFFINERFGGKTEILVDSNALPERYIAYLGGIGFIGKNKMFITEKYGSYVFLGEIITDLKMEWDNPLKNKCEECFLCLNACPSKALISEDFNKCLSYITQKKQIENKWFSKLDKRIFGCDTCQEICPYNKNVTFSNLIEFKPLEFMEKLDKDDLLNLTESSFKEKYKKSSCGWRGKNIIKRNVLINLYKQGYINKENYKSDSPYLMDYYNRLLKETNL

SEQ ID NO: 75919 - protein, 327 aa, Clostridium haemolyticum
  REGION 1..327: note = tr|A0A0A0IJF5|A0A0A0IJF5_CLOHA (Fe-S)-binding protein OS=Clostridium haemolyticum NCTC 8350 OX=1443115; GN = Z961_09020 PE=4 SV=1
MNCKKKIIEYCNELGLDIVGFTKCRVFTELKEYYINRKELNLENEFEENDINKRINPFIYMEKGKTIISIAFPYLYEQISYSKIYFSKYTLGSDYHEVVSSYLKKICEFIKILGGEASYFVDSNSLPERYIAYLSGIGFIGKNNMLVTEKYGSYIFLGEIITDLELEEDYPIKKDCGECELCLKACPTGAISNDINNNSNICLSYITQKKDIDDYWLSKFKGRMFGCDTCQNVCPYNKDVINSNIQEFKPFNFMKEINSEEILNMSKKDFNSKYKLTSCGWRGKNIIQRNMLINMFYFNDIDIKKVKEFSSPYVQSYYNKLLKFLKL

SEQ ID NO: 75920 - protein, 249 aa, unidentified
  source 1..249: note = [Clostridium] hiranonis
  REGION 1..249: note = tr|A0A5C0T388|A0A5C0T388_9FIRM Epoxyqueuosine reductase OS=[Clostridium] hiranonis OX=89152 GN=queG_1; PE = 4 SV=1
MREKFSGLINSFIKEYKSKNNLFAEWEDVLVGFSKVDDKNMKYLREAVIEDHHLATDYLDDAKTMISYFVPFKEIIANSNKEGNLPSDIWVHSYRETNEMADKLNNYLVAEIEKMGYKAAKPVDCGIVDGKAKSRWSQRHIAYLSGLGTFGLNNMLITEKGINGRFFSIVTNMEIKSDEPLKEERCLYKLNGSCGKCVERCFSGALTYDGFDRFKCLEICVENEKNNKMADVCGKCTIGLPCTFKNPLK

SEQ ID NO: 75921 - protein, 320 aa, unidentified
  source 1..320: note = [Clostridium] hiranonis
  REGION 1..320: note = tr|B6G0Z0|B6G0Z0_9FIRM Putative iron-sulfur cluster-binding protein OS=[Clostridium] hiranonis DSM 13275 OX=500633 GN=CLOHIR_01796 PE=4 SV=1
MLIKDGFEGIEKKSRNDIVKSIFLEYGVECCGIAPVKFGNEIREILQKRADENHLSGMEESDIDKRLDATLIMEDAKSIIVAAFPYYCGENNDSNISCYCRGYDYHLVIRGIMNNICEKIQEKFSNGENCTNENSIKMEIFVDNGPLVDRYLAYISGIGFWGMNGSIITDKYGSYVFIGYIVTNLDIEKDVPLEKTCLKCGKCIKSCPGNALLEGYDMDAKKCLSYITQKKGELSDDEKNIIKENKIIFGCDMCQKVCPHNKNIEMTNIEEFKNDLIEKLDLEEINRISNKEFKRRYYNRAFSWRGKGIIKRNLEILEED

SEQ ID NO: 75922 - protein, 137 aa, Clostridium homopropionicum
  REGION 1..137: note = tr|A0A0L6Z8D6|A0A0L6Z8D6_9CLOT Epoxyqueuosine reductase OS=Clostridium homopropionicum DSM 5847; OX = 1121318 GN=queG_2 PE=4 SV=1
MQPEIIERINNGPTEEYFREYNRINEKLDSIVMSCVKYIEAKGFNAIGQTTTFVTSDDNLTTSLPHKTVATRAGLGWIGKSALLITPQYGSAIRLSSIITDMPLPIDSPINESKCGDCINHTFEPLRSNKVVFINKK

SEQ ID NO: 75923 - protein, 281 aa, Clostridium homopropionicum
  REGION 1..281: note = tr|A0A0L6Z8E2|A0A0L6Z8E2_9CLOT Epoxyqueuosine reductase OS=Clostridium homopropionicum DSM 5847; OX = 1121318 GN=queG_3 PE=4 SV=1
MNNNRELKDKIKQFCLDAGADIIGFASVERWEEDNEVPPDFRPQAIFEQARTVIVIGVGMPLPIVDTTPSILHKETYDTANRVLDDMAFNLVRYLNRLGHASYFFTRDGYGNLRLLKDRPQAAFSHIMAGKYAGLGDVGLNNCLLTPEFGPRVRLVSVFTSAILEPDPIIEKDLCIRCGACAKCCPVDSIIIRDKHQVKSEFIPIPCIDRHSELSRDKAYPCGICTKVCPVGKDRVLYNEKGNMKKYLEEEKRLAENPDDPEYKAWTHVRNYGSWNKQYPR

SEQ ID NO: 75924 - protein, 375 aa, unidentified
  source 1..375: note = [Clostridium] indolis
  REGION 1..375: note = tr|A0A3P6KCS5|A0A3P6KCS5_9FIRM 4Fe-4S ferredoxin, iron-sulfur binding domain-containing protein; OS = [Clostridium] indolis OX=69825 GN=queG PE=4 SV=1
MNIDQLKQDVIDYAHSIGIDSIGFTTADPFDELKQKLVDYHAKGYASGFEESDIGLRTEPKLSLPTARSIIAIAVGYPNKLKGAPRSVRGDRRGMFARASWGQDYHTIMRKRLDQLAEYLEARVPNVEIKSMVDTGVLSDRAVAERAGLGYVGRNGFVINPDLGTWTYLGEMLVSVPFPPDDPLIDSCGDCTICVDRCPTGALVGDGQLNSQKCISFLTQTKGYLADEYRYKIGNRLYGCDTCQQVCPRNRGINTQHDDIVLEPEVLKPRLVPLLQMSNKEFKNTYGHLAGAWRGKKPIQRNAILALAHFKEETAIPELQEVALNDPRPMIRGTAYWAIGQIQGEVARPFIDAHYDNELEEVQHEMLKGLDMRRE

SEQ ID NO: 75925 - protein, 342 aa, Clostridium intestinale
  REGION 1..342: note = tr|A0A1M5YWW7|A0A1M5YWW7_9CLOT Epoxyqueuosine reductase OS=Clostridium intestinale DSM 6191 OX=1121320; GN = SAMN02745941_02297 PE=4 SV=1
MDDLAIKIRDEALKLGYEKCGIIKVDEMYDYEDRLNERIEKVPITKGFYSRYYNFSHLQDTYPWAKSIVVCIKRYDNYHVPEHLQGMIGKTYMFDSRVDEKSKEFQDGLKFEKYMQGLGIKTHTERKFGVTGMRWAALKAGLGIIRRNNFFYTEKGSWLTIEAWVIDEELEYKETPNIKPCSEKCNLCIKACPSKSLSEPYTMNPLACVSCLTTFAGRDMPNEIFKEAMGDWVYGCDVCQDSCPMNKNKWIGNEEFLNLEELSSKISLEKIIKMDYDFLENVLQKKFWYIPKDDVWKWKVNAINAMINNYKEEYKASIYEALEDSHEKVREMADFAIKKLSI

SEQ ID NO: 75926 - protein, 342 aa, Clostridium intestinale
  REGION 1..342: note = tr|U2Q5G6|U2Q5G6_9CLOT 4Fe-4S ferredoxin-type domain-containing protein OS=Clostridium intestinale URNW; OX = 1294142 GN=CINTURNW_1515 PE=4 SV=1
MVELAIKIRDEALKLGYEKCGIIKVDEMYDYEDRLNERIEKVPITKGFYSRYYNFAHLQDTYPWAKSIVVCIRRYDNYHVPEHLQGVIGKTYMFDNRVDENSKEFQDGLKFEKYMQGLGIKVHTERKFGVTGMRWAALKAGLGIIRRNNFFYTEKGSWLTIEAWVIDKELEYKETPNIRPCSEKCNLCIKACPSKSLSEPYTMNPLTCVSCLTTFAGRDMPNEIFKEAMGDWVYGCDVCQDSCPMNKNKWIGNEEFPNLEEISSKISLEKIIKMDYDFLENVLQKKFWYIPKDDVWKWKVNAINAMINNYKEEYKASIYDALEDSHEKVREMADFAIKKLSI

SEQ ID NO: 75927 - protein, 328 aa, Clostridium isatidis
  REGION 1..328: note = tr|A0A343JD04|A0A343JD04_9CLOT tRNA epoxyqueuosine(34) reductase QueG OS=Clostridium isatidis; OX = 182773 GN=BEN51_07955 PE=4 SV=1
MIKEDIINFCNSLGLDTLGFIKCRKFIEMKDYLLERKAKGLQNEFEEDDIEKRINPFLYMEEGKTIISIAFPYLHDVEYYDNGFSVYTRGMDYHKVVKSYLGKICEYIESLGGKAAAFVDNNFLPERYIAYLAGVGFIGKNNLIITKKYGSFVFLGEIITDLEIESDEKRSFKDIEKFEECGECTNCYKKCPTKAINPYRKNSNICLSYLTQKKELEDKHIKLLDGRVFGCDSCQKPCPYNENIAYSPIKEFYPYDFMNSDNTEELAAIGNSGFKESFLKTSCGWRGKNVLKRNAIIRLSRNKDISKIKSDSPYLKGYINRLLKNNEI

SEQ ID NO: 75928 - protein, 343 aa, Clostridium kluyveri
  REGION 1..343: note = tr|A0A1L5F7R9|A0A1L5F7R9_CLOKL Fe-S oxidoreductase; OS = Clostridium kluyveri OX=1534 GN=BS101_10115 PE=4 SV=1
MHTIEKMIQNKAYELGYEKCGIIPISLMEGYAEKFKERIEKVPKSKMFYENQKRLLNPLAMYPWAKSVVVLAASYGKYKIPEVVKGHIAKSYLFDTRIDKNTREYQNNRALEKYMQELGLKVETNQKFGVVGMRWAALQAGIGIIRRNNFLYTESGSWVHLEAWITDREMELKETNEVPQCPKACNRCIASCPTKSLSAPYTMSPTECVSFLTTFGGRNLPQEPLSRTFGNCIYGCDICQDVCPMNKGKWKEEEEFPGLAELSSALTPENILNMEEEFYREKVQPKFFYLSAEELWKWKVDVLCYMRNSYNETYRPLIINACNNENYKIREMACSICRELYLQ

SEQ ID NO: 75929 - protein, 326 aa, unidentified
  source 1..326: note = Clostridium liquoris
  REGION 1..326: note = tr|A0A2T0B3A1|A0A2T0B3A1_9CLOT Epoxyqueuosine reductase OS=Clostridium liquoris OX=1289519 GN=queG PE=4; SV = 1
MDNKEKIIKYCNNLGLDNLGFTSCRKFKGLEEYFYLRKSKGQENEFEEKDIQKRINPDIYMREGKAIISIAFPYVFNKNFNNKFYFSKYTMGRDYHLVVTEHLKKICAFIEFLGGKAKYFVDSNALPERYIASLCGIGFIGKNNMLITEKYGSYVFLGEIITDLELDEDNPLRRKCGECNLCLKACPTNSIGEHENNSNICLSYITQKKDIENSWFHKLQGRLFGCDTCQGVCPYNKKASLSTIEAFEPFPFMEEVNIEELINMDNKTFRDKYALTSCGWRGKNILIRNALINVFEKAENYKVGVKHFNSPYVKDYYSRLLQLHKL

SEQ ID NO: 75930 - protein, 235 aa, Clostridium ljungdahlii
  REGION 1..235: note = tr|A0A166R1F8|A0A166R1F8_9CLOT Epoxyqueuosine reductase OS=Clostridium ljungdahlii OX=1538 GN=queG_3; PE = 4 SV=1
MLEYNIQKILNNFMIDYYGVADISKYENELVKYGGSLVKGYPRAISLGIVFPSTIVDHLNDDSNNITKLEYENCYKTINARLDNIASIISSYIIRKGYKALPISAAERVNSDYINAAFSHKLAARLAGLGWIGKSCLLITPKHGPRVRWVSILTDLPLNPTGKEIEQKCGECMACVKICPQKAFYGKNYIEGEDREKRFDVKKCDSYFSEMEHNKQVPVCGMCVYICPYGRKNNK

SEQ ID NO: 75931 - protein, 343 aa, Clostridium ljungdahlii
  REGION 1..343: note = tr|D8GR16|D8GR16_CLOLD Uncharacterized Fe-S protein; OS = Clostridium ljungdahlii (strain ATCC 55383 / DSM 13528 / PETC) OX=748727 GN=CLJU_c32750 PE=4 SV=1
MNIIEQMIQKKAYELGYEKCGIIPIGLMDGYAKKFEERIEKVPKSKMFYQNQQRLVNTLATYPWAKSVVVLAVQYGKYKIPEVVKGHIGKSYLFDIRVDKNTKEYQNNRALEKYMQELGLKVETNQKFGVVGMRWAALQAGIGIVRRNNFLYTESGSWVHLEAWVTDREMELKETNDVLQCPKNCNRCMASCPTKSLSDPYTMSPTTCISFLTTFGGRNLPQEPLSRTFGNCIYGCDICQDVCPMDKGKWKEEEEFPGLAELSSVLTPENILNMEEGFYRKKVQPKFFYLSSEELWKWKVDVLCYMRNNYKETYRPLIINACNNENYKVREMAYSICKELCLQ

SEQ ID NO: 75932 - protein, 320 aa, unidentified
  source 1..320: note = Clostridium luticellarii
  REGION 1..320: note = tr|A0A2T0BSE9|A0A2T0BSE9_9CLOT Epoxyqueuosine reductase OS=Clostridium luticellarii OX=1691940 GN=queG_1; PE = 4 SV=1
MEILEYCREIGLDTVGFSSCRVYTELEEYLWFRKQNLLENEFEEKDIKKRINSCEYIDGGKTIISIAFPYLFEKVRESSGVEFSLYTRGRDYHKVAETYLKKVCNFIESLGGKTRYFVDSNSLPERYIAFQSGIGFIGKNNMLITEKYGSYVFLGEIITDMNIEGDVPVKTQCSSCSLCQIACPTGAICGYKDSNRCMSYITQRKHIEDKWFTKFKGRLFGCDTCQKVCPYNQDVLYSGIEDLRAFDFMEKVDLNEIVNMDKSTFGKKYANTSCGWRGRNVIQRNGIINALMLDEDVSIKSIRSPYIKNYYDRLLRFLKL

SEQ ID NO: 75933 - protein, 280 aa, unidentified
  source 1..280: note = Clostridium luticellarii
  REGION 1..280: note = tr|A0A2T0B5Z4|A0A2T0B5Z4_9CLOT Epoxyqueuosine reductase OS=Clostridium luticellarii OX=1691940 GN=queG_3; PE = 4 SV=1
MENTRKNHIDINLCIGKYLDEFNYNTLKVSFKARSIIVIAVPQPVSRIYFTIKMKKKPVIMPPMYLFNTNSKLEKKQKKVIEVTSIVERVLCSINFRAVKINLPCKLLAVGSGLGSYGRNNICYIDDESSFYWIGVYISDMPCENDTWQENKIMDTCKDCNLCLKNCPGGAIANDRFPIHADKCITLYNENEGGFPKWMNSSCHNSLIGCMRCQSVCPVNRKHIDNIEDIAEFDSYETEMILAGTQLYKLPETTYRKLDTINFVEDYNLLARNLKILISK

SEQ ID NO: 75934 - protein, 326 aa, Clostridium magnum
  REGION 1..326: note = tr|A0A162RMV2|A0A162RMV2_9CLOT Epoxyqueuosine reductase OS=Clostridium magnum DSM 2767 OX=1121326; GN = queG_4 PE=4 SV=1
MDYKNSILEYCKSLGLYTVGFTKCRIFSELKTYYEDRKLRNLENEFEEKEIEKRINPFLYMEDGKTIISIAFPYLFDSDSKEHIDFSKYTKGRDYHIIVSAYLKKVCEFIEGLGGKAIYFVDSNALPERYIAVQCGIGFVGKNNTVITKQYGSYVFLGEILTDLYVEQDNPQEDKCGSCNICQSSCPTGAIQGENIPNKCLSYITQKKDIEDEWFLKLKGRIFGCDTCQKVCPHNKEISLSKIEEFKPFDFMEKVNLEELANIDKKTFKEKYSQTSCGWRGKNVLQRNALINAITLNKDIKVSEISSPYVKDYYDRLLKSLNKKKT

SEQ ID NO: 75935 - protein, 254 aa, Clostridium magnum
  REGION 1..254: note = tr|A0A161WUK9|A0A161WUK9_9CLOT Epoxyqueuosine reductase OS=Clostridium magnum DSM 2767 OX=1121326; GN = queG_3 PE=4 SV=1
MRNKVETMIKEFVKHYAESKGFKTKWKEPLIAYADAEDKMFYELKVVVSYSHALPKDFLQEAKTVITYFIPFDDTVIRSNIDGRESSRVWAIAYIETNQLIADLNTYINEELKNMGFNGTIIPATHNFDKRKLISDWSHRHVAFIAGLGSFGLNNMLITDKGCCGRIGSLVTDLKIESSERKNREYCLFRHNGTCKKCIDRCVNDALKVDCYDRHKCYEICLNNDKVHLDIGLTDVCGKCLVGIPCSTINPVKK

SEQ ID NO: 75936 - protein, 265 aa, unidentified
  source 1..265: note = [Clostridium] methylpentosum
  REGION 1..265: note = tr|C0E9Y0|C0E9Y0_9FIRM Putative iron-sulfur cluster-binding protein OS=[Clostridium] methylpentosum DSM 5476 OX=537013 GN=CLOSTMETH_00632 PE=4 SV=1
MTMLKQILNQAGVREFGVCPMPPEDALLDCRAKSRLPENARSVIVCLFPYYSPGLEGNISRYAMVEDYHKVAREILTPACESLRQAYAAEFSWFADNSPIPEVSAAVQAGLGVQGRNGLLITPDYGTYVFLGEIITDHLFDYSAPAQGSCLGCGRCEAACPGGALCGGAVDISRCVSDISQRKGELTPSETELVRAGGLLWGCDRCQLVCPHNREVKQTHIQAFQKNIVASVAYGQIRPLCKTRAFGFRGPRVLERNYHILYGVD

SEQ ID NO: 75937 - protein, 332 aa, unidentified
  source 1..332: note = Clostridium neonatale
  REGION 1..332: note = tr|A0A2A7MEX9|A0A2A7MEX9_9CLOT tRNA epoxyqueuosine(34) reductase QueG OS=Clostridium neonatale; OX = 137838 GN=queG PE=4 SV=1
MGVKEDIINYCFSLGINSVGFIRCRRFEELEGFFKERKALNLENEFEEKNIDLRIEGREWFKEGKTIVSIAFPYLSLNIDNRIDNGFSLYTRGSDYHYVVNKYLKNIIDIIENYGGKAKAFVDSNTLPERYLAYISGVGFIGKNNMIITKEYGSYVFLGEVITDLEFYEEDKRSFEEINLFKECGDCTICYSECPTKSINSIKKNCNICLSYITQKKELEDWEIKKLDGRVFGCDSCQLKCPYNKKAKLSSIREFDSLEFMNDNNEDFIINMGNAEFKNSFKLTSCGWRGKNILKRNALIRKQLYLKDNMQHKKFESPYLQKYLEKLVLKNE

SEQ ID NO: 75938 - protein, 343 aa, unidentified
  source 1..343: note = Clostridium neonatale
  REGION 1..343: note = tr|A0A2A7MJM7|A0A2A7MJM7_9CLOT Epoxyqueuosine reductase OS=Clostridium neonatale OX=137838; GN = CQ394_06365 PE=4 SV=1
MDTIEQMIQKKAYELGYEKGGIIPIGLMDGYTEKFNERIEKIPKSKMFYENQQRLAKFREIYPWAKSVVVLTVAYGKYKVPEMLNGLIAKAYLFDTRVDENTKEYQNNRALEKYMQELGLKVETNQKFGVVGMRWAALQAGLGIIRRNNFLYTESGSWVHLEAWVTDREMELKETNNVVECPKSCNRCIASCPTKSLSDPYTMSPTECISFLTTFGGRDLPHEPLSKTFGNCIYGCDICQDACPMNKGKWKDEEEFSGLEELVPSLIPENILNMEEDFYRNKVQPKFFYLSADDLWKWKVDVLCYMRNNYKESYKSLIINACNNENNKVREMACSICDELSLQ

SEQ ID NO: 75939 - protein, 327 aa, Clostridium novyi
  REGION 1..327: note = tr|A0A386YM20|A0A386YM20_CLONO tRNA epoxyqueuosine(34) reductase QueG OS=Clostridium novyi; OX = 1542 GN=queG PE=4 SV=1
MNCKKKIIEYCSELGLDIVGFTKCRVFTELKEYYINRKELNLENEFEENDIDKRINPFIYMEKGKTIISIAFPYLHEQISYSKIYFSKYTLGSDYHEVVSSYLKKICEFIKILGGEASYFVDSNSLPERYIAYLSGIGFIGKNNMLITEKYGSYIFLGEIITDLELEEDYPIKKDCGECELCLKACPTGAISNDINNNSNICLSYITQKKDIDDYWLSKFKGRMFGCDTCQNVCPYNKDVINSNIQEFKPFDFMKEINSEEILNMSKKDFNSKYKLTSCGWRGKNIIQRNMLINMFYFNDINIKKVKEFSSPYVQSYYNKLLKFLKL

SEQ ID NO: 75940 - protein, 327 aa, Clostridium novyi; identical to SEQ ID NO: 75919
  REGION 1..327: note = tr|A0A072Z1U7|A0A072Z1U7_CLONO (Fe-S)-binding protein OS=Clostridium novyi B str. NCTC 9691 OX=1443122; GN = Z958_01015 PE=4 SV=1

SEQ ID NO: 75941 - protein, 235 aa, unidentified
  source 1..235: note = Clostridium oryzae
  REGION 1..235: note = tr|A0A1V4I5Q3|A0A1V4I5Q3_9CLOT Epoxyqueuosine reductase OS=Clostridium oryzae OX=1450648 GN=queG PE=4; SV = 1
MFESELINYLKNAGADIVGFGDLTMLDSNIRCNLPYGICVAVKIASEVVKELENGPTEQYYEEYKRLNKLLDKIVSLGEKFIKARGYNAIGQSTTYVTEDDNLTTPLPHKTVATRAGIGWIGKNALLITSDYGSAIRISTILTDIPVKTGQPIDESKCGNCLNCTNACPAEAIKGNLWNVNAERKDLIEPLKCRAKARAMMKKIVGIETAVCGKCIAVCPFTKAYIKRMKGQTAS

SEQ ID NO: 75942 - protein, 296 aa, unidentified
  source 1..296: note = [Clostridium] paradoxum
  REGION 1..296: note = tr|A0A150FQI1|A0A150FQI1_CLOPD Uncharacterized protein OS=[Clostridium] paradoxum JW-YL-7 = DSM 7308; OX = 1121328 GN=JWYL7_0365 PE=4 SV=1
MKHILKSFCESIGIDCIGIAEVRIYKDLEKILKERTDKGYNCGLEEKDIKKRVDPTVIIEDAKSIIVCLFPYFSGYSKDSNLSKYTHSIDYHIIIKDKLNEIGDFLKKNIKNFNYKSFVDNGPLVDRYLAYISGLGYFGVNNSIINDKYGSYVFIGYIVNNYDFESDSPLEKTCIKCGNCIKSCPGGAILGNYEIDYNRCLSYITQKKEELSDKEKELIIKNKTVFGCDICQDVCYHNKNIEHTNILDFKQNLILNLSYEEILNMSNKEFKRVYKDRSFAWRGKKILLRNLELLEK

SEQ ID NO: 75943 - protein, 329 aa, Clostridium paraputrificum
  REGION 1..329: note = tr|A0A174U942|A0A174U942_9CLOT tRNA epoxyqueuosine(34) reductase QueG OS=Clostridium paraputrificum OX=29363 GN=CP373A1_16390 PE=4 SV=1
MSLKEEVLSYCNSLGLTNIGFVKCRKFSELEEFYENRKKLNIQNEFEEEDIQKRINPNHYMEEGKTIISIAFPYLHDQEHFDNGFSLYTRGNDYHMVLKDYLDKICEFIRVKGGKAISFVDSNTLPERYIAYLAGVGFIGKNNMLITKEYGSYVFLGEIITDLEMYDDDNGNFEELMKHKECGECSICFGECPTKSINPNRKNSNICLSYITQKKDLEEWEIKALKGRTFGCDSCQLRCPYNEEIKFSHIEGFKPLEFMEKDYSDNIVNMGNGEFKSTLKNTSCGWRGKNVLKRNVLIRMKMYNGKDVSAIKTDSPYIQAYINRIRDIK

SEQ ID NO: 75944 - protein, 326 aa, Clostridium pasteurianum
  REGION 1..326: note = tr|A0A1D9N2P0|A0A1D9N2P0_CLOPA Epoxyqueuosine reductase OS=Clostridium pasteurianum OX=1501; GN = AQ984_06385 PE=4 SV=1
MDNKTHIINFCKELGISEVGFCRCENFYELERYLNKRKNEGVENEFEEKDINKRINPNYYMEEGKTIISIAFPYSFYLHKDEEMYFSLYTRGKDYHKVVSNYLEKVCEFIIKIGGKAKYFVDSNALPERYIACKSGIGFIGKNNMLINKKYGSYIFLGEIITNLSIEPDEPCKNQCGECERCIKACPTKSINKYFNNPNICLSYITQKKDIEDKWFEKFNGRLFGCDTCQLVCPFNYEVKYSEIDDFKPLEFMNNVNLYELISIDNKIFREKYKITSCGWRGKNIIQRNALINFIMKKNENKMHNLEIVSPYVREYFNRLLNFNKL

SEQ ID NO: 75945 - protein, 326 aa, Clostridium pasteurianum; identical to SEQ ID NO: 75944
  REGION 1..326: note = tr|A0A0H3J8M7|A0A0H3J8M7_CLOPA Epoxyqueuosine reductase OS=Clostridium pasteurianum DSM 525 = ATCC 6013; OX = 1262449 GN=queG PE=4 SV=1

SEQ ID NO: 75946 - protein, 330 aa, Clostridium perfringens
  REGION 1..330: note = tr|A0A127EIU1|A0A127EIU1_CLOPF (Fe-S)-binding protein OS=Clostridium perfringens OX=1502 GN=JFP838_08820; PE = 4 SV=1
MKEKILEFCKSLGLDTVGFVKCRRFSELEEMYNIRKDKGFENEFEEQDIEKRVNPNVYMEEGKTIITIAFPYLYDEDYVDNGFSVYTRGMDYHYVVSNFLKKISEYIESLGGRAISLVDSNSLPERYIAYLGNIGFIGKNNMLITKKYGSYVFLGEIITDLEIQCEEERTLEELRTHKECGACEICYKNCPTKVLNRSKMKNTNSCMSYITQKKDIEDKYLKLMKGRIFGCDSCQKECPYNKEITYTNIEDFKPLTFMQKDSFEDFHKISKKEFNETFKKTSCGWRGKNTILRNIMIKEVLINKEDISNYELNSESLKIFRNRLLNFYDV

SEQ ID NO: 75947 - protein, 330 aa, Clostridium perfringens
  REGION 1..330: note = tr|B1BX73|B1BX73_CLOPF Putative iron-sulfur cluster-binding protein OS=Clostridium perfringens E str. JGS1987 OX=451755 GN=AC3_1725 PE=4 SV=1
MKEKILEFCKSLGLDTVGFVKCRRFSELEEVYNIRKDKGFENEFEEQDIEKRVNPNVYMEDGKTIITIAFPYLYDEDYVDNGFSVYTRGMDYHYVVSNFLKKISEYIESLGGRATSLVDSNSLPERYIAYLGNIGFIGKNNMLITKKYGSYVFLGEIITDLEIQCEEERTLEELRTHKECGTCEICYKNCPTKVLNRSKMKNTNSCMSYITQKKDIEDKYLKLMKGRIFGCDSCQKECPYNKEITYTNIEDFKPLTFMQKDSFEDFHRISKKEFNETFKKTSCGWRGKNTILRNIMIKKVLINKEDISNYELNSESLKNFRNRLLNFYDV

SEQ ID NO: 75948 - protein, 338 aa, unidentified
  source 1..338: note = [Clostridium] polysaccharolyticum
  REGION 1..338: note = tr|A0A1I0AG73|A0A1I0AG73_9FIRM Epoxyqueuosine reductase OS=[Clostridium] polysaccharolyticum OX=29364; GN = SAMN04487772_105126 PE=4 SV=1
MKQKIIEFCQSLGLDTIGMIPCRRFEELQGFLMERQKKNLQNEFEESDMEKRINPMHYMENGKTILSIAFPYYYEGEDSCWQSDSNGFSIYTRRLDYHRVVRGYLDKICAFIESQGGNAIPLVDSNTLPERYIAYLAGVGFIGRNNMIITEKYGSYVFLGEIITDLELASSDKRHFEQIGDYVECGECRICYGECPSKSINAHKITPNICLSYITQKKEISEQEMSLLKGNVFGCDFCQLKCPYNLRAEQSRVKEFAQLAYMNGEMAEFAAMDNKFFKEKVSMTSCGWRGKNVIKRNALIHLADKGEDITKYKGDSAYINGYIEQLTNKGIKKKQRFQ

SEQ ID NO: 75949 - protein, 342 aa, Clostridium puniceum
  REGION 1..342: note = tr|A0A1S8TFN6|A0A1S8TFN6_9CLOT Epoxyqueuosine reductase OS=Clostridium puniceum OX=29367 GN=queG_1 PE=4; SV = 1
MTLLAEQIKSAALEMGYEKCGIIKVSYLDGYEEKLNERIDRIPETKGFYQSMYRFTRIQETHPWAKSIVICVRRYGKYNIPKHLKGMIAKYYLVDGRKDENSKDFQDSLKFEKYMQDLGLRAENERGFGLAPLRWAALKAGLGRVRKNNFFYTENGSWVYLEAWLIDKELEAIEEPKVKACSEKCGLCIKACPSASLSEPYTMSPMACVSCVTTFMGRDMINEKYREQIGNWVYGCDVCQDVCPMNKNRWEETEEFPNLQELSQHISLEKILKMDYSFLEDVMQPKFWYIDKQSVWKWKVNAINVMVNDYEEQYREHILNACNDSNLKVREMAEWAVKKLNL

SEQ ID NO: 75950 - protein, 97 aa, Clostridium puniceum
  REGION 1..97: note = tr|A0A1S8TCM8|A0A1S8TCM8_9CLOT Epoxyqueuosine reductase OS=Clostridium puniceum OX=29367 GN=queG_2 PE=4; SV = 1
MKILIMGIEIEKNIFYRINKSKCGTCNKCENTCPAKAIKGILWSANVQREKLIDPFKFIQKARKLLKERIGIEMTICGKCIDVCPVTQGYIRKSEVE

SEQ ID NO: 75951 - protein, 334 aa, Clostridium putrefaciens
  REGION 1..334: note = tr|A0A381J5M9|A0A381J5M9_9CLOT Uncharacterized Fe-S protein OS=Clostridium putrefaciens OX=99675 GN=queG PE=4; SV = 1
MKSVTELENYIRSLGLDTFGFIKAKRFEELRSFLEYRKINGLENEFEEQDIEKRINPNMLMEKGKVIISIAFPYLYNNNFNNDTGFSKYTEGLDYHIVVRSYLDKIVEFLNEKGHEAKAFVDSNVLPERYIAYKAGLGFVGKNNMIITKRYGSFVFLGEIITSMDIEINHKENKISDIEKYESCGSCDICLKQCPTKAINEKLRNSNICLSYITQKKQIEDKWFKVLGGRIFGCDSCQKTCPYNDKVKFSNLEGFRPLEFISNIQTKELIYINNKDFKETLKNTSASWRGKSLIQRNALIRFINFENNKEVDIDSIASPYVKDYAIRLLKIRKL

SEQ ID NO: 75952 - protein, 235 aa, unidentified
  source 1..235: note = Clostridium ragsdalei
  REGION 1..235: note = tr|A0A1A6AI28|A0A1A6AI28_9CLOT Epoxyqueuosine reductase OS=Clostridium ragsdalei P11 OX=1353534; GN = queG_6 PE=4 SV=1
MLEYNIQKILNNFMIDYYGVADISKYENELVKYGGSLVKGYPRAISLGIVFPSSIVDHLNDDSNNIAKLEYENCYKTINARLDNIASIISSYIIRKGYRALPISAAERVNNDYINAAFSHKLAARLAGLGWIGKSCLLITPKHGPRVRWVSILTDLPLNPTGKEMEQKCGECMACVKICPQKALYGKNYVEGEDREKRFDVKKCDSHFNEMEHNKQVPVCGMCVYICPYGRQSDK

SEQ ID NO: 75953 - protein, 325 aa, unidentified
  source 1..325: note = Clostridium ragsdalei
  REGION 1..325: note = tr|A0A1A6AS01|A0A1A6AS01_9CLOT Epoxyqueuosine reductase OS=Clostridium ragsdalei P11 OX=1353534; GN = queG_3 PE=4 SV=1
MNYKEDILSYCNKIGLDTVGFTKCRIFTELKDCFKYRKENLLENEFEEKNIENRVNPYVYMDGGKTIVSIAFPYLFEKQDEENISFSLYTRGKDYHVVARYYLQKVCNFIKGLGGKAVYFVDSNSLPERYIAFQCGIGFIGKNNMIITEKYGSYVFLGEIITDIKVEADTPLESKCGSCNLCQTSCPTGALLEDKNSNICMSYITQKKHIDNKWFSQFQGRLFGCDTCQKVCPYNSKVAFSNIQDFKPFDFMSRVDLNEIIDMDKKEFAEKYKNTSCGWRGKNIIQRNAIINMITLNKSINLEYKNIRSTYVRDYYDRLLQVLKL

SEQ ID NO: 75954 - protein, 343 aa, Clostridium roseum
  REGION 1..343: note = tr|A0A1S8LV24|A0A1S8LV24_9CLOT Epoxyqueuosine reductase OS=Clostridium roseum OX=84029 GN=queG_2 PE=4; SV = 1
MDTIEKMIQKKAYELGYEKCGIISIDLMDEYAEKFNERIEKVPKSKMFYQSQQRLIKPKEIYPWAKSVVVLTAAYGKYKVPKELEGIIAKSYLFDVRVDKNTKEYQNNRELEKYMQTLGLKVETNQKFGVVGMRWAAMKAGVGIIRRNNFLYTEAGSWVHLEAWVTDREMELKETNNVPQCPKSCNRCVSACPTKSLSAPYTMSPTECISFLTSFGGRDLTKEPLSKTFGKCVYGCDLCQDACPMNKGKWKGEEEFPGLKELTESLTPENILNMKEDFYRRKVQPKFFYLSEEELWKWKVDVLCYMRNNYKENYKELIINACNNENIKVQDMAHFICEELCLC

SEQ ID NO: 75955 - protein, 238 aa, Clostridium roseum
  REGION 1..238: note = tr|A0A1S8LPT4|A0A1S8LPT4_9CLOT Epoxyqueuosine reductase OS=Clostridium roseum OX=84029 GN=queG_1 PE=4; SV = 1
MELLDKIKELGDIHAIDFIGVAGLTKVKNDIKEISGSLIDEYPRALSIGIVLQDSIVDLLSGSDNYENALENKIHGYDVIMNRLDNFASIVGSVIQRNGYKAMPLPASERIDSTRVCASLSHKLTARLAGFGWIGKSCLLINPKYGPRVRWTSVLTDAPFEENKEILEGKCGDCTNCAKACPSKAIIGRNYVADEPREVRLDVRRCEEHLSKRKQEGKFEICGKCMYACPFGMQKITL

SEQ ID NO: 75956 - protein, 268 aa, Clostridium saccharobutylicum
  REGION 1..268: note = tr|A0A1S8MNX9|A0A1S8MNX9_CLOSA Epoxyqueuosine reductase OS=Clostridium saccharobutylicum OX=169679; GN = queG_2 PE=4 SV=1
MKEKITKMIQNFVRQYEQQNDISTKWGEPLVGFADANHPYILNLKELITPTHKLPTDVLDDASIVIAYFVPFTKELANTNGIPGDISSPQWALAYEETNAMFIKLNEYITSELRKLSYHADVSPEASTFDQKILKSNWSHRHFAKVAGLGTFGINNMLITKVGCCGRYSTIVTNLNVKPDSPLEDELCLYKKNGSCGICVKHCPSGALTLDGYDRHKCYIVLRKNAELYTEFGSSYSDESGDCPNSVGSEVCGKCVVNTPCTFFYKKS

SEQ ID NO: 75957 - protein, 343 aa, Clostridium saccharobutylicum
  REGION 1..343: note = tr|U5MQF5|U5MQF5_CLOSA Fe-S protein OS=Clostridium saccharobutylicum DSM 13864 OX=1345695 GN=CLSA_c20360 PE=4; SV = 1
MGTIEQMIQKKAYELGYEKCGIIPINLMDEYAEKFNERIEKIPKSKMFYQSQQRLANPKQIYPWAKSVVVLTVPYGKYKVPEILNGRIAKAYLFDTRVDENTKEYQNNRVLEKYMQELGLRVETNQKFGVVGMRWAALQSGAGIIRRNNFLYTESGSWVHLEAWVTDREMELKETNNVVPCPKSCNRCRESCPTKSLCAPYTMSPTECISFLTTFGGRDLPKEPLSKTFGNCIYGCEICQDVCPMNKGKWKGEEEFPGLSELSSSLTPENILNMEEDFYRDNVQPKFFYLSAEDLWKWKVNVLCYMRNNYKESYKTLIINACNNENDKVSEMACSICKELCLQ

SEQ ID NO: 75958 - protein, 343 aa, Clostridium saccharoperbutylacetonicum
  REGION 1..343: note = tr|M1MD35|M1MD35_9CLOT Uncharacterized protein; OS = Clostridium saccharoperbutylacetonicum N1-4(HMT); OX = 931276 GN=Cspa_c20530 PE=4 SV=1
MTLLADQIKNAALNFGYEKCGIIKISDIDGYKEKLEERIEKVPEAKGFYQGQYRFTQLKDTYPWAKSIVICVRKYGKYHIPEHLKGMIAKYYLVDGRKDENSKDFQDSLKYEKYMKDLGLRAETERGFGLVPLRFAAMKAGLGIVRKNNFFYTESGSTVYLEAWLIDKELENIETPKVRPCSEKCNLCMKACPSASLSKPYTMNPIACVSCITTFMGRDMPNEKYKEQIGAWVYGCDACQDVCPMNKNSWKEIEEFPNLQELSEQISLEKILKMDYSYLEEVMQAKFWYIDKASVWKWKVNAINAMVNNYEEHYRDHILEACKDSNLKVREMAEWAVNKLELQ

SEQ ID NO: 75959 - protein, 327 aa, Clostridium sartagoforme
  REGION 1..327: note = tr|A0A4S2DG22|A0A4S2DG22_9CLOT tRNA epoxyqueuosine(34) reductase QueG OS=Clostridium sartagoforme OX=84031 GN=queG PE=4 SV=1
MREKIISYCNTLGLDTLGFIKCREFTELRSFFYDRKEKGLENEFEEEDVEKRINPFIYMEEGKTIISIAFPYLHNVDYCDNGFSVYTRGTDYHKVVKSYLSKICEYIESLGGKASSFVDSNFLPERYIAYLAGVGFIGKNNLIITEKYGSYVFLGEIITDLEIDCNERNYEEIKDFKECGSCELCYKSCPSKAINPYRKNSNICVSYFTQKKDLSDNHIKLLKGRVFGCDSCQEPCPYNKDKEFSKIEEFIPFDFMNSDNTLDLANINNKGFKESYLRTSCGWRGKNVLKRNALIKANSCNVDISKIKTDSPYLNDYVNRLLNSNKI

SEQ ID NO: 75960 - protein, 328 aa, Clostridium sartagoforme
  REGION 1..328: note = tr|R9BUH4|R9BUH4_9CLOT Uncharacterized protein; OS = Clostridium sartagoforme AAU1 OX=1202534 GN=A500_17630; PE = 4 SV=1
MNKENIINYCNSIGLDTLGFIKCREFTELKEFFYKRRSLGLENEFEEKDIDKRINPFNYMSEGKTIISIAFPYLHDIDYFDNGFSVYTRGEDYHKVVKSYLGKICGYIESIGGKAIPFVDSNFLPERYIAYLAGIGFIGKNNLIITKKYGSYVFLGEIITDMEIDCDERDFKELSHFKECGECELCYKACPSKSINPYKKNSNICVSYLTQKKDLEDKHIKLLNGRVFGCDSCQNTCPYNEKINFSNINEFYPFDFMNKENSHELANINNRGFKESFLNTSCGWRGKNVLKRNALIKINNNNQDIKSIKTDSPYLKDYVDRLLNSNKI

SEQ ID NO: 75961 - protein, 324 aa, Clostridium scatologenes
  REGION 1..324: note = tr|A0A0E3GRV5|A0A0E3GRV5_CLOSL 4Fe-4S ferredoxin-type domain-containing protein OS=Clostridium scatologenes OX=1548 GN=CSCA_3856 PE=4 SV=1
MNYKSMIINYCKDIGLDTVGFTKCRVFEELKHYFEYRKSMSLINEFEEQDINKKINPFMYMKDGKTIISIAFPYLFNNDFQQQVGFSKYTQGRDYHVVVSEYLKKICSFIEKEMSGKAVYFVDSNSLPERYIAKLCGVGFIGKNNMIITEKYGSYAFLGEIITNISIEEDEPIECKCEDCDLCQKSCPTGAIRKENNSNICLSYISQKKEIDDEWFNKLKGRIFGCDTCQGVCPFNKKPSFSNIEEFKPYDFMEVINLEELANIDKRVFLNKYSKSSCGWRGKNVLQRNALINIISMKNNINIKEINSPYVKNYYNRLLYHFKL

SEQ ID NO: 75962 - protein, 225 aa, Clostridium scindens
  REGION 1..225: note = tr|B0NDK0|B0NDK0_CLOS5 4Fe-4S binding domain protein; OS = Clostridium scindens (strain ATCC 35704 / DSM 5676 / VPI 13733 / 19) OX=411468 GN=queG PE=4 SV=1
MDSKKVKELLFSLGADLCGIADLSYFSNAPKGYHPLDVMPTCKSVISFGCRFPVGTLICKSPIPYTRVRNSIVPKVDAIALDFCIEMEKSEIVCVPIPANESQWDKNTGRYRSIISLKHAAQAAGLGTIGRHSLLITPEFGSMIWLGAVLCDAGLEPDKTLEHVCDNCNRCVDICPVNALQMPELDQQKCWNHAFGDDEEIQSWRIICHKCRDICPYNLGTKNSF

SEQ ID NO: 75963 - protein, 330 aa, Clostridium septicum
  REGION 1..330: note = tr|A0A386PEN0|A0A386PEN0_CLOSE tRNA epoxyqueuosine(34) reductase QueG OS=Clostridium septicum; OX = 1504 GN=queG PE=4 SV=1
MGIKEDILEYCSSLGLDTVGFIKCRKFEELKDFYEDRKLKGLENEFEEESIENRINPNIYMKEGKTIISIAFPYLHNIDYIENGFSMYTRGLDYHKVVKEYLEKISNYINSLGGNAITFVDSNTLPERYIAYLSGIGFIGKNNMIITKKYGSYVFLGEIITDLEIQCEDIRTFSEISSFKECGNCEICYSECPTKAINRIRKNSNICVSYLTQKKDLEDKFIKLLDGRVFGCDSCQKKCPYNLEVEYSTIKDFYPLNFMNEENSDFLINMGNKEFKETFQITSCGWRGKNVLKRNAIIRKKYNGENIDGFKTDSPYLKDYIHRLFFRNKI

SEQ ID NO: 75964 - protein, 324 aa, Clostridium sp.
  REGION 1..324: note = tr|A0A352NY75|A0A352NY75_CLOSP tRNA epoxyqueuosine(34) reductase QueG OS=Clostridium sp.; OX = 1506 GN=queG PE=4 SV=1
MDYKKEILDFCRGMGLDTVGFTKCRMYTDLGKYLQFRKENLLENEFEEKDIHRRINSYRYMDGGKTIISIAFPYLFKKPIKKGKIGFSIYTWGKDYHEVIGAYLKKICYFIANLGGKAIYFVDNNFLPERYIAFQSGIGFIGENNMLITEKYGSYVFLGEVITDMEIESDMPQISKCGNCNLCQIVCPTGAIRGYRDSNKCMSYITQKKHIDDMWFAKFQGRLFGCDTCQEVCPYNENVAYSNIKGFKPFDFMEKVDLNEIVNIDKSTFMRKYKNTSCGWRGKNIIQRNSIINTLVLKKNVEIKNIKSSYVKDYYNRLLHILKL

SEQ ID NO: 75965 - protein, 332 aa, Clostridium sp.
  REGION 1..332: note = tr|A0A1T4X3G0|A0A1T4X3G0_9CLOT Epoxyqueuosine reductase OS=Clostridium sp. USBA 49 OX=1881060; GN = SAMN05428976_106125 PE=4 SV=1
MNYKSEILKFCNNLGLDTVGFCSCRIFDELKPFFKQRKQKGLENEFEEKDIDKRINPKIYMEDGKTIISIAFPYLHDFYENFKYKNDKYVYFSKYTLGRDYHKVISNYLKKICNFIESLGGKAIYFVDSNSLPERYIAYLCGIGFYGKNNMIITEKYGSYVFLGEIITDLEIEIDKPLKQKCGNCDLCLNTCPTKAINKNENCPNICLSYITQKKEIEDVWFNKLDGRMFGCDSCQDICPFNKVINFSNLKEFIPYDYMKKINLKEIINIDNKTFKEKYAITSCGWRGKNIIIRNALINLAKNNNIKYIDIDSINSPYVKNYYHRLLKFFEL

SEQ ID NO: 75966 - protein, 321 aa, Clostridium sporogenes
  REGION 1..321: note = tr|A0A1V9IKH6|A0A1V9IKH6_CLOSG Epoxyqueuosine reductase OS=Clostridium sporogenes OX=1509; GN = VT92_0209230 PE=4 SV=1
MDCKKSVKEYCRNLGLDLIGFTKCRIFHELIPELTERKNENRQNEFEGKDINKRVDPFQYMKEGKTIISIAFPYLFNLGHKHDVYFSKYTQGRDYHTVVNEYLQKICNFIQSKGYRAKYFVDSNDLPERYIAYLCGIGFIGKNNMLITEKYGSYVFLGEIITDMEIHEDEPMECKCKECNICFRACPTSSLEHKDPNICLSYITQKKNIEDDWFNKLKGRMFGCDTCQRVCPYNKNIKTSNIEGFKPFDFMENLDLEELIYVNNKEFKEKYKLTSCGWRGKSILQRNALINCITMNKDVDIQGKSIKSPYVLDYYHRLLKK

SEQ ID NO: 75967 - protein, 321 aa, Clostridium sporogenes
  REGION 1..321: note = tr|J7T1P8|J7T1P8_CLOS1 Putative iron-sulfur cluster-binding protein OS=Clostridium sporogenes (strain ATCC 15579) OX=471871 GN=CLOSPO_00751 PE=4 SV=1
MDCKESVKEYCRNLGLDLIGFTKCRIFHELIPEFTERKNENRQNEFEGKDINKRVDPFQYMREGKTIISIAFPYLFNLDYKNNIYFSKYTQGRDYHTIVNEYLKKICEFIQSKGYRAEHFVDSNDLPERYIAYLCGIGFIGKNNMLVTERYGSYVFLGEIITDMEINEDEPMECKCKDCNICLKACPTNSLENKDTNICLSYITQKKNIEDEWFDKLKGRMFGCDTCQRVCPYNKDIDTSNIEGFKPFNFMENLDLEELIYVNNKEFKEKYKLTSCGWRGKSILQRNALINCITMNKNIDIQGKNIKSPYVLDYYHRLLKK

SEQ ID NO: 75968 - protein, 325 aa, Clostridium sulfidigenes
  REGION 1..325: note = tr|A0A084JHN9|A0A084JHN9_9CLOT (Fe-S)-binding protein OS=Clostridium sulfidigenes OX=318464; GN = IO99_02180 PE=4 SV=1
MDKKQKIINYAKKLSLDTIGFTESRRFNELEEFFIDRKENNLFNEFEEEDIEKKINPKLLMENGETIISIAFPYYHGDKGEGDKFSLYTRGLDYHRVVEKYLKEICDYIESLGGEAKWFVDSNPLPERYIAAISGVGFIGKNNTLITEKYGSYVFLGEIITNLKLQGDKSKKYGCKGCNLCVEKCPTNVIIEDVKKFNSSQCVSYLTQKKHLNNEELNMVKGKIFGCDNCQKVCPHNLNVEVSPIKEFLPKEYMEKVDLLELINLDNKNFKEKYIMHSCGWRGKNLLIRNGLINYYLRYNEDRDNIEESINSPYIKEYYNRLFKK

SEQ ID NO: 75969 - protein, 333 aa, unidentified
  source 1..333: note = Clostridium taeniosporum
  REGION 1..333: note = tr|A0A1D7XM68|A0A1D7XM68_9CLOT tRNA epoxyqueuosine(34) reductase QueG OS=Clostridium taeniosporum OX=394958 GN=queG PE=4 SV=1
MGIKNQIIKTCASLGIDSIGFIKCRRFDELESFYKERKILNLQNEFEEDDVEKRINPNQYLEEGKTIISIAFPYLTSKINTNNGFSLYTKGMDYHYVIGKYLKIICEIIEYHGGKAKGFVDSNALPERYIAYLAGNGFIGKNNLLINKKYGSYIFLGEIITDLEIYDDDNGSLDDLNSFKECGECNKCYVACPTKAINANKKNCNICLSYITQKKELQDWEMEKLQGRMFGCDTCQLVCPYNIEKELSKIPEFLPFDFMNSDDNDFVINMGNTQFKETFKNTSCGWRGKNVLKRNALIRRKIYLKNDDLSKIPKFESPYLNGYINRLFQKTRI

SEQ ID NO: 75970 - protein, 330 aa, Clostridium tagluense
  REGION 1..330: note = tr|A0A401UGD2|A0A401UGD2_9CLOT (Fe-S)-binding protein OS=Clostridium tagluense OX=360422 GN=Ctaglu_02210; PE = 4 SV=1
MGIKEEIIEFCIKNGIDTIGFSECRIFHELNPYFETRKKLGLENEFEEHSVDKRINPFLYMPEGKTIITIAFPYLYSLDFNKKTQFSKYTLGRDYHVVTTEYMEKICKFIEGIGGKAMSFVDSNALPERYIACNSGIGFIGKNNTLITEKYGSYVFLGEIITDLIILPDKPIVQKCGNCERCLEACPTNAIVKGKAGINNDANVCLSYITQKKHIEDSWFEKLNGRLFGCDTCQRACPYNSGIQFSDISGFKPYEYMKNMDVKTLINMDNDLFKDKYKMTSCGWRGKNILKRNAIINAIHSERVKFITVEKDTSPYIRDYYYRLLKFFKL

SEQ ID NO: 75971 - protein, 327 aa, Clostridium tetani
  REGION 1..327: note = tr|A0A4V1LDS1|A0A4V1LDS1_CLOTA tRNA epoxyqueuosine(34) reductase QueG OS=Clostridium tetani; OX = 1513 GN=queG PE=4 SV=1
MKDKKKLILDYCKDLGLSTVGMTEVRKINELEDYFVYRKEKGYENEFEEENIEKRINLGKVCNWGKVIISIAFPYMFNFKFEDGVYFSKYTQGRDYHKVVGEYLKKICCFIESLGGKAEYFVDSNCLPERYIAKLCGIGFIGKNNMIITEKYGSYVFLGEIITDLPLPKDNEKNNKCGQCDLCLKACPTKSIKEKESNPNICLSYLTQKKDLEDMWLDKLKGRLFGCDTCQRVCPFNREVEKSPLMELKPLDFMTNVHLEELISLNNKMFKDKYATSSCGWRGKNILIRNALINEFYYNKDGTLEGKNFNSPYIKDYYSRLLKLHNL

SEQ ID NO: 75972 - protein, 327 aa, Clostridium tetani
  REGION 1..327: note = tr|Q898T9|Q898T9_CLOTE Iron-sulfur cluster-binding protein OS=Clostridium tetani (strain Massachusetts / E88); OX = 212717 GN=CTC_00352 PE=4 SV=1
MKDKKKLILDYCKDLGLDTVGMTDVRKINELEDYLVYRKEKGYENEFEEENIEKRINLGEVCSWGKVIISIAFPYMFNFKFEDGVYFSKYTQGRDYHKVVGEYLKKICCFIESLGGKAEYFVDSNCLPERYIAKLCGIGFIGKNNMLITEKYGSYVFLGEIITDFSLPKDNEKNNKCGQCDLCLKACPTKSIKEKESNPNICLSYLTQKKDLEDMWLDKLKGRLFGCDTCQRVCPFNMEVEKSPLMELKPLDFMTNLHLEELISLNNREFKDKYAVSSCGWRGKNILIRNALINEFYYNKDGTLEGKNFNSPYIKDYYSRLLKLHNL

SEQ ID NO: 75973 - protein, 326 aa, Clostridium tetanomorphum
  REGION 1..326: note = tr|A0A037Z2S7|A0A037Z2S7_CLOTT Iron-sulfur cluster-binding protein OS=Clostridium tetanomorphum DSM 665 OX=1230342 GN=CTM_18226 PE=4 SV=1
MSNKYKIIKYCNELGLDTIGITSCRKFKELEELFQLRKNKGYENEFEEKNIDKRINPKIYMEGGKAIISIAFPYMFNNEFDSKFYFSKYTMGKDYHLVISNYLKKICMFIESLGGEAKYFVDSNFLPERHIASLSGIGFIGKNNMIITKKYGSYVFLGEIITNLELEEDKPVEYGCGNCSLCLQECPTGSIKGNFNNPNICLSYITQKKDLEDVWLSKLNGRIFGCDSCQKICPYNKKVNCSSIKEFIPLPFMENADIGELINLDNKTFKEKYANTSCGWRGKNILTRNALINAFKEGEFENIVIKQFNSPYVKDYYGRLLRLHKL

SEQ ID NO: 75974 - protein, 297 aa, unidentified
  source 1..297: note = [Clostridium] thermoalcaliphilum
  REGION 1..297: note = tr|A0A1V4I8C7|A0A1V4I8C7_9FIRM Epoxyqueuosine reductase OS=[Clostridium] thermoalcaliphilum OX=29349; GN = queG PE=4 SV=1
MKNKLKEFCKSLGIEVGIAPVKVYKDLENILNERMKKGYYTGLEEKDIKKRVDPKLTMENAKSIIVCLFPYFIGHRKDSNLSKYTHSIDYHIIVNNKLSEIANFLSQNIEGFEYKTFVDNGPLVDRHLANISGLGYFGINNNIINDKYGSYVFIGYMLNNYEFEIDLPLNKTCIKCGECIKKCPGGAILGNFEIDFSRCFAYITQKKGELSDFEKTLFEKNKSIFGCDICQDVCYHNTNIKSTEIDEFRENIISNLDYEEVANMSNKEFKRAYGNRSFSWRGKNIIIRNLELVKKIR

SEQ ID NO: 75975 - protein, 325 aa, Clostridium thermobutyricum
  REGION 1..325: note = tr|N9Y351|N9Y351_9CLOT 4Fe-4S ferredoxin-type domain-containing protein OS=Clostridium thermobutyricum; OX = 29372 GN=HMPREF1092_01829 PE=4 SV=1
MDRGEILEFCKTLKLDLVGFVKMRKFIELEDLFLKRKEWKAENEFEENDIKKRIDHFTYMEDGKTIISIAFPYFFYENGEENGFSVYTKGIDYHRVVHSYLDKICKFIEEKGGKAIPLVDSNTLPERYIAYLSGIGFIGKNNMLITKRYGSYVFLGEIITDLELVEKEERNLETLLKYSECGDCEICYKECPTKAINRFRKNTNICVSYLTQKKELTDKEISLLNGRIFGCDSCQKKCIYNKEVEESKIPEFKPLNFMKVENLENIINMNNRIFKESFKNTSCGWRGKNILIRNAIIRKRKCKHEDIKDLKSESPYIKGYIDRLL

SEQ ID NO: 75976 - protein, 325 aa, Clostridium thermobutyricum
  REGION 1..325: note = tr|A0A1V4SWN7|A0A1V4SWN7_9CLOT Epoxyqueuosine reductase OS=Clostridium thermobutyricum DSM 4928; OX = 1121339 GN=queG PE=4 SV=1
MDRGEILEFCKTLKLDLVGFVKMRKFIELEDLFLKRKEWKAENEFEEKDIKKRIDPFTYMEDGKTIISIAFPYFFYDNGEENGFSVYTKGIDYHRVVHTYLDKICKFIEEKGGKAIPLVDSNTLPERYIAYLAGIGFIGKNNMLITKRYGSYVFLGEIITDLELVEKEERDLETLLKYSECGDCEICYKECPTKSINKFRKNTNICVSYLTQKKELTDKEISLLNGRIFGCDSCQKKCIYNEEVEESKIPEFKPLNFMKVENLENIINMNNGIFKESFKNTSCGWRGKNILIRNAIIRKRKCKHEDIKDLKSESPYIKGYIDRLL

SEQ ID NO: 75977 - protein, 324 aa, Clostridium thermopalmarium; identical to SEQ ID NO: 75899
  REGION 1..324: note = tr|A0A2T0AVE9|A0A2T0AVE9_9CLOT Epoxyqueuosine reductase OS=Clostridium thermopalmarium DSM 5974; OX = 1121340 GN=queG PE=4 SV=1

SEQ ID NO: 75978 - protein, 323 aa, Clostridium tyrobutyricum
  REGION 1..323: note = tr|A0A4V1DIJ7|A0A4V1DIJ7_CLOTY Epoxyqueuosine reductase OS=Clostridium tyrobutyricum OX=1519 GN=queG; PE = 4 SV=1
MNYRNELIEFCRKIGIDTVGFTECRKFCELYNSLKFRRLNSLSNEFEEKDENKRINPFVYMKEGKTIISVAFPYLFNRSTKDKIGFSLYTRGQDYHKVVFKYLNKICRFIESMGGSAVPLVDSNMLPERYIAKLCGIGFLGKNNMLITQRYGSYVFLGEIITDLALGNSEILQSQCRGCNICLKACPTGAIRGEKNSNKCMSYITQKKHIKDEWILKFRGNLFGCDICQNICPYNRKILFSNIQEFRPFEFMEDVDLSEILNMDNKIFRQKYAITSCGWRGKNIIIRNALINSFILGKNITIKNIRSPYVQDYYNRLFKLFKL

SEQ ID NO: 75979 - protein, 323 aa, Clostridium tyrobutyricum; identical to SEQ ID NO: 75978
  REGION 1..323: note = tr|W6N5H3|W6N5H3_CLOTY Iron-sulfur cluster-binding protein OS=Clostridium tyrobutyricum DIVETGP OX=1408889; GN = CTDIVETGP_1365 PE=4 SV=1

SEQ ID NO: 75980 - protein, 374 aa, unidentified
  source 1..374: note = [Clostridium] ultunense
  REGION 1..374: note = tr|M1ZAI1|M1ZAI1_9FIRM Epoxyqueuosine reductase; OS = [Clostridium] ultunense Esp OX=1288971 GN=queG PE=4 SV=1
MGLKRYIVDKSKELNIDMIGFTDCEPLNNKKDYLIARQKKNRQTEFEERDIDKRINPRLTFPQCKTIIVIGLSYNNRLNERVDYKLKGLISKSSWGIDYHIVLKSKMEDLIKEIRKITNFTYKYFVDTGPLIDRELANKSGIGYYGKNCSIINGEYGSFIFIGYILTDLDINFIPISIDSQCGDCNICIDHCPTGALEGPFKFNPKKCISYLTQTKEKIPYELRDKMEIKIYGCDTCQLVCPKNKDVKKSNCKEFLPKVTKGYMDIEELFFISNRQFKEKYGEMAGSWRGKNILKRNGIIALGNMRDRVNIKLLESLLNDPNPVIREYAAWAILKIDLECGKEVVEERIGIERDENVRSEMKNLIKYFIHKDYQ

SEQ ID NO: 75981 - protein, 328 aa, unidentified
  source 1..328: note = Clostridium ventriculi
  REGION 1..328: note = tr|A0A173ZV59|A0A173ZV59_CLOVE Epoxyqueuosine reductase OS=Clostridium ventriculi OX=1267 GN=queG PE=4; SV = 1
MDIKGQIVKYCADLGLDLIGFTPCREFSELRKFYNYRKDEGLENEFEEVDIEKRINPNHYMQEGKTIISIAFPYLHDGVYNSNGFSLYTRGLDYHRVVKSYLDKICEFIEKIGGKAMSFVDSNTLPERYIAYLSGIGFIGKNNMLITKKYGSFVFLGEIITDLDIDTRDIKQLDNTPCKECNRCYTACPTNSINDKKKNCNICMSYITQKKEINDKYLYLMKGRIFGCDTCQNSCPCNKDIAYSGINEFKPLDFMNDNICTESILSLTNSKFKETFKTTSCGWRGKNILIRNSLIKMYLIENKNIEDYSFESPYLEEYKNRLLLLNKV

SEQ ID NO: 75982 - protein, 312 aa, unidentified
  source 1..312: note = Cnuella takakiae
  REGION 1..312: note = tr|A0A1M4XVA5|A0A1M4XVA5_9BACT Epoxyqueuosine reductase OS=Cnuella takakiae OX=1302690; GN = SAMN05444008_10452 PE=4 SV=1
MVKDLAKQYGFDQCGIARAQVLDEDARRLERWLHQGLHGGMQYMENYFDLRIDPTKLVPGAKSVITFLKNYYPQQTAEHTATRVSKYAYGVDYHTVIKNALKGMMAELQTAVGQVEGRGFVDSAPVLERSWAQRSGLGWLGRNGNLITKDSGSFFFIATLIVDLELEYDDPYAKDFCGSCRKCIDACPTQAIGPDKVINGSQCISYFTIELKDALIPEEQKGRFQNWMFGCDTCQDVCPWNRFSKPHQEAQFNPIPEILNFTTRDWEALSEEAFRKIFKQSPMSRAKWKGIQRNVKFLQDEKTLILSNEKEG

SEQ ID NO: 75983 - protein, 356 aa, Cobetia crustatorum
  REGION 1..356: note = tr|A0A558HXX3|A0A558HXX3_9GAMM Epoxyqueuosine reductase OS=Cobetia crustatorum OX=553385 GN=queG PE=3; SV = 1
MAELAARIKTWGRELGFQQVGITDVDLSAHEAYLERWLANGYHGEMNFMAKHGTKRTRPEELVPGTLRVISVRLDYLPPEVETTQVLSQPTRAYVSRYALGRDYHKLMRKRLASLAKQIEGEVGKFGYRAFVDSAPVMERALAQKAGIGWFGKNAMLMNQKAGSLFFLGELYTDLPLPVDKPFEKEHCGSCNACQVACPTDAIVADRVVDARRCISYLTIELSGAIPEEFRRKMGNRIYGCDDCQLFCPFTRFTKASQEPDFSPRHDLDRAELLDLFCWGESEFLSKTEGSPIRRIGYEKWLSNIAIALGNAPWSERVEHVLRARLPYPSEALREHVRWSLKEQALKRGARLATAL

SEQ ID NO: 75984 - protein, 383 aa, Cobetia marina
  REGION 1..383: note = tr|A0A4Y4GPC5|A0A4Y4GPC5_COBMA Epoxyqueuosine reductase OS=Cobetia marina OX=28258 GN=queG PE=3 SV=1
MPLPADAAGSSPDETSGDDSRVADPQAMAELAARIKTWGRELGFQQVGITDVDLSEHEAYLERWLANGHHGEMNFMAKHGTKRTRPEELVPGTLRVISVRLDYLPPEVETTQVLSQPERAYVSRYALGRDYHKLMRKRLANLAKQIEKEVGTFGYRAFVDSAPVMERALAQKAGIGWFGKNAMLMNQQAGCLFFLGELYTDLPLPVDAPFEKEHCGSCNACKVACPTDAIVEDKVIDARRCISYLTIELDGAIPEEFRRAMGNRIYGCDDCQLFCPFTRFAKATQEADFSPRHDLDRIELIRLFCWGEQEFLDKTQGSPIRRIGYEKWLSNIAIGLGNAPWSEQVEHVLRARLPYPSEPLREHVRWALKEQAIKRGARLATAL

SEQ ID NO: 75985 - protein, 356 aa, Cobetia marina
  REGION 1..356: note = tr|A0A4U1M387|A0A4U1M387_COBMA Epoxyqueuosine reductase OS=Cobetia marina OX=28258 GN=queG PE=3 SV=1
MAELAARIKTWGRELGFQQVGITDVDLSEHEAYLERWLANGHHGEMNFMAKHGTRRTRPEELVPGTLRVISVRLDYLPPEVETTQVLSQPERAYVSRYALGRDYHKLMRKRLANLAKQIEKEVGTFGYRAFVDSAPVMERALAQKAGIGWFGKNAMLMNQQAGCLFFLGELYTDLPLPVDAPFEKEHCGSCNACKVACPTDAIVEDKVIDARRCISYLTIELDGAIPEEFRRAMGNRIYGCDDCQLFCPFTRFAKATQEADFSPRHDLDRIELIRLFCWGEQEFLDKTQGSPIRRIGYEKWLSNIAIGLGNAPWSEQVEHVLRARLPYPSEPLREHVRWALKEQAIKRGARLATAL

SEQ ID NO: 75986 - protein, 168 aa, Cobetia sp.
  REGION 1..168: note = tr|A0A348SW31|A0A348SW31_9GAMM tRNA epoxyqueuosine(34) reductase QueG (Fragment) OS=Cobetia sp. OX=1873876 GN=DCR98_15145 PE=4 SV=1
MSASSPSTDVDFNDLAARIRTWGRELGFQQVGITDVDLSDDEAHLERWLEAGFHGEMGFMAKHGTKRTRPAELEPGTIRVISVRLDYLPPEVETTKVLGQPSRAYVSRYATGRDYHKLMRKRLQRLAKTIEAEVGDFGYRAFVDSAPVMERGLARKAGIGWFGKNAML

SEQ ID NO: 75987 - protein, 356 aa, Cobetia sp.
  REGION 1..356: note = tr|A0A0P7DEI8|A0A0P7DEI8_9GAMM Epoxyqueuosine reductase OS=Cobetia sp. UCD-24C OX=1716176 GN=queG PE=3; SV = 1
MAALATRIKTWGRELGFQQVGITDVDLSAHEAYLERWLANGHHGEMNFMAKHGTKRTRPEELVPGTLRVISVRLDYLPPEVETTQVLSQPERAYVSRYALGRDYHKLMRKRLANLAKQIEKEVGKFGYRAFVDSAPVMERALAQKAGIGWFGKNAMLMNQQAGCLFFLGELYTDLPLPVDAPFEKEHCGSCNACKVACPTDAIVEDKVVDARRCISYLTIELDGAIPEEFRRPMGNRIYGCDDCQLFCPFTRFAKATQETDFSPRHDLDRIELIRLFCWGEQEFLSKTEGSPIRRIGYEKWLSNIAIGLGNAPWSEQVEHVLRARLAYPSEPLREHVRWALKEQAIKRGARLATAL

SEQ ID NO: 75988 - protein, 351 aa, Cocleimonas flava
  REGION 1..351: note = tr|A0A4R1F6K6|A0A4R1F6K6_9GAMM Epoxyqueuosine reductase OS=Cocleimonas flava OX=634765 GN=queG PE=3 SV=1
MTLNNITQIKLKQWAQQLGFQGLGVSGIDLSTQEKYLKRWLANGSHGDMEWMERHGNKRTRPEELEEGTMSVISVRMDYLPPQTVDPIMVLNHPERAYVSRYALGRDYHKIMRKKLEKLAKKINEELSDSEQMQYRVFVDSAPVMEKPIAVKAGLGWMGKHTNILSQNVGSWFFLGEIYTNLPLTESQAVDNHCGDCTACIDVCPTKAIIKPYELDARRCISYLTIEHKGVIPVEFREPMGNRIYGCDDCQLICPWNRFAVDTKESDFSTRNNLDSASLLSLFAWSEEAFLKNLEGSAIRRIGYERWQRNISIALGNAPSSEKIITALNAKYEVSSEMVREHISWALQRLK

SEQ ID NO: 75989 - protein, 343 aa, unidentified
  source 1..343: note = Cognatishimia maritima
  REGION 1..343: note = tr|A0A1M5TBG8|A0A1M5TBG8_9RHOB Epoxyqueuosine reductase OS=Cognatishimia maritima OX=870908; GN = SAMN04488044_2636 PE=4 SV=1
MDLKARLVAEAQEIGFDLCRICRPDAVPQVPDGLRGFLGKGYHGQMGWLADRVHWRENPAALWPEAQSVIMLGESYTPLHDPLAVHRMSERGAISVYAQNKDYHDLVKKRLKRLARWLIAEAGAEVEVKVFVDTAPVPEKPLGQAAGLGWQGKHTNLVSRDLGSWFFIGSVFTTLKLDTDPAEIDHCGSCRACLDACPTNAFPAPNQIDARRCISYLTIEHHGPIDEDLRPLLGNRIYGCDDCLAACPWNKFAVDAREIRYHARDDLAAPKLSELAALDDAAFRAKFAGSPIKRIGRNRFVRNVLYAMGNSGQPAFLPQIETLTHDPDDTVADAARWARRQLT

SEQ ID NO: 75990 - protein, 347 aa, unidentified
  source 1..347: note = Cognatiyoonia koreensis
  REGION 1..347: note = tr|A0A1I0RL73|A0A1I0RL73_9RHOB Epoxyqueuosine reductase OS=Cognatiyoonia koreensis OX=364200 GN=queG; PE = 3 SV=1
MSLRTELDSFARAEGFAKIGVCRPDAVSLAQSLEQFVDAGYHGQMGWMADRMHWRGDPSALWPAAKSVVMFAEPYTPTHDPLAVLGHKDKAAISVYAQGRDYHDVLKKRLKRVGRWFISQVPDAEIKVFVDTAPVMEKPLAQAAGLGWQGKHTNLLGRDLGNWFFLGAMFTTVPLDPDPPEVGHCGSCTACLDICPTNAFPAPYKLDARRCISYLTIEHKGPVADDLRGLMGNRIYGCDDCLAICPWNKFAETARDAKYAARADVKDPPLAELAVLDDAAFRERFSGSPIKRIGRDRFVRNVLYAIGNSGLPALMSVAETQLADPDPTVADAARWAVDKLRSGQTGL

SEQ ID NO: 75991 - protein, 341 aa, unidentified
  source 1..341: note = Cognatiyoonia sediminum
  REGION 1..341: note = tr|A0A1M5Q789|A0A1M5Q789_9RHOB Epoxyqueuosine reductase OS=Cognatiyoonia sediminum OX=1508389 GN=queG; PE = 3 SV=1
MKQALVAYALEAGFSKVGVCRPSAVPQIADRLAAFVDAGRHGQMGWMAERMGWRSDPTALWPEAKSVIMLAERYTPEHDPLAILDHPEKAAISVYAQGRDYHDVVKKRLKKVGRWLIEQAPGAEIKVFVDTAPVMEKPLAQAAGLGWQGKHTNLLSRDLGNWFFLGAIFTTVELEPDVAEEEHCGSCRACLDICPTDAFPAPFQLDARRCISYLTIEHKGPVDPDLRAALGNRIYGCDDCLAVCPWNKFAQEGRDAKLAAREDLLAPDLIALAQLDDAGFRQFFSGSPIKRIGRDRFVRNVTYALGNSGRPEAAPVLQELVSDPDEAVSDGARWALEQLED

SEQ ID NO: 75992 - protein, 396 aa, Cohaesibacter gelatinilyticus
  REGION 1..396: note = tr|A0A285PH62|A0A285PH62_9RHIZ Epoxyqueuosine reductase OS=Cohaesibacter gelatinilyticus OX=372072; GN = SAMN06265368_3693 PE=4 SV=1
MSTHHNPKNQIQQDDKQRQKAEKIKAFMKSEALKLGFADLRVCSVAEAKNHEDVLSRFVELGYHGSMEWMRETLERRSHPQNLWSDVQSVIILGMNYGPDHDPRSLLEHGEKANISVYARNRDYHDLIKGRLKQLASKLIARTRDWNEGVEVKVFVDTAPVMEKPLAHLAGIGWQGKHTNLVSREFGSWLFLGSIFTSLPLAPDEAEIDRCGSCDACQVACPTDAFPGPYKIDGSRCISYLTIENKDEIPIEFRKAIGNRIYGCDDCLSACPWNKFAQEASEIKLVARDDLKAPELAEFLSMDEPTFRKTFSGSPVKRIGWARFMRNCLVAAGNSNCDNLIQTVLARVKEEDPIIRQHAVWALGQLLSKEKFAHYRTLFELNETDPNVLEEWQSGR

SEQ ID NO: 75993 - protein, 395 aa, Cohaesibacter marisflavi
  REGION 1..395: note = tr|A0A1I5C1F3|A0A1I5C1F3_9RHIZ Epoxyqueuosine reductase OS=Cohaesibacter marisflavi OX=655353 GN=queG; PE = 3 SV=1
MTVPNPDKQAKLRAFIDKETQALGFAQLRVCRASDAKSREAVLRHFVEKGYHGSMDWMEETLDRRAHPTNLWDDVQSILMLGFNYGPDEDPRDLLAHPDKANISVYARHRDYHDLIKGRLKQLSAKLLSRVRDSQPDGAIKVFVDTAPVMEKPLAELAGLGWQGKHTNLVSREFGSWLFLGAIFTNLDLVPDEAEMDRCGSCVACQEACPTGAFPKPYQIDASRCISYLTIENKGPIPHTLRGAIGNRIYGCDDCLAACPWNKFAQQASEAKLKARADLKAPALVDFLALDDAAFRQHFSGSPIKRIGRNRFMRNVLIAAGNAGKGDDTEISGLIGAVTPHLGDADPLVRGAAIWALGRLMPAQEFVQMAKDRIDGETALDVNEEWHLALEGKTQ

SEQ ID NO: 75994 - protein, 391 aa, Cohaesibacter sp.
  REGION 1..391: note = tr|A0A285LYU5|A0A285LYU5_9RHIZ Epoxyqueuosine reductase OS=Cohaesibacter sp. ES.047 OX=1798205 GN=queG; PE = 3 SV=1
MTETSGPAEKQAKLRTFLEKEAKALGFSDLRICRTDNVRDHEDTLLSFTANGYHGSMEWIKETLARRSHPNKLWDGARSVIMLGFNYGPEGDPLATLHKTDCASISVYARHRDYHDVLKGRLKQLAAKLLARVRESQPDGEIKVFVDTAPVMEKMLAATAGLGWQGKHTNLVSRDIGSWFFLGAIFTSLDLAPDAPEVDHCGSCRACLDACPTKAFPEPYKIDARRCISYLTIENKGPIPHEFRSAMGNRIYGCDDCLAACPWNKFAQVASEAKLKARTDLNEPSLHDLLALDDTEFRKLFSGSPIKRIGRNRFLRNVLIATGNSNNPALGPIVRRHVSDPEPIVRGAAIWALGRLISKEAFESLASPLVPCETDPYVQEEWHRAMAEETT

SEQ ID NO: 75995 - protein, 389 aa, Cohaesibacter sp.
  REGION 1..389: note = tr|A0A2N5XTH4|A0A2N5XTH4_9RHIZ Epoxyqueuosine reductase OS=Cohaesibacter sp. H1304 OX=2067669 GN=queG; PE = 3 SV=1
MAAIKPDPQAKLRRFLEQEAEKLGFAEIRICKAGDAQSREEMLRVFVAKGYHGSMQWMEETLKRRAHPNNLWDDVRSVIMLGFNYGPDEDPRPLLQQSDKANISVYARHRDYHDLIKGRLKQLSAKLLSRVRDSHPNGEIKVFVDTAPVMEKPLAELAGLGWQGKHTNLVSREYGSWLFLGAIFTNLDLSPDAPEIDHCGSCRACLDACPTDAFPAPYRIDASRCISYLTIEHKDPIPHVFRPAMGNRIYGCDDCLAACPWNKFAQQASEAKLKARDDLLAPPLSALLQLDDAAFRLHFSGSPIKRIGRNRFLRNVLIAVGNSGDAALIVPAQAHLHDDDPVVRGAAIWALSQLLPVPEFQTLAATLSPSEQDLTVQDEWLRATQGDKA

SEQ ID NO: 75996 - protein, 395 aa, unidentified
  source 1..395: note = Cohnella kolymensis
  REGION 1..395: note = tr|A0A0C2UZX2|A0A0C2UZX2_9BACL Epoxyqueuosine reductase OS=Cohnella kolymensis OX=1590652 GN=SD71_01845; PE = 4 SV=1
MAVAVNERDTAYWRELKEEMIAAAPMLGIDKIRVTTADPFMELKDRLIRHRELGRESGFEEPDLDKRTDPALLFSEPRSIIAIAVAYPSKLKGAPVSEPGKRRGILSRSAWGQDYHDALRARLDKLARWLYDRVPDARLLSMVDTGALSDRAVAERAGIGWSGKNAAIITPEWGSWVYLGEMITNLPLPADKPVEEGCGDCTICIDACPTGALVGPGELNAQRCISYVTQTKGIVEDELMVKIGNRLYGCDTCQIVCPHNRGVDVRHHVELLPDPETAKPLLRPLLTMGNREFKEKFGESSASWRGRKPIQRNALIALGNFRDTESVPDINRMLREDPRPVLRATAAWALGRIGGEQAEQCLQSASLSEEDDEVKAAIERALLSIAEKRQQGGGQ

SEQ ID NO: 75997 - protein, 379 aa, Cohnella luojiensis
  REGION 1..379: note = tr|A0A4Y8LYZ4|A0A4Y8LYZ4_9BACL tRNA epoxyqueuosine(34) reductase QueG OS=Cohnella luojiensis; OX = 652876 GN=queG PE=4 SV=1
MRKDTAFWKQLKEEMIAAAPELGIDKLRVTTADPFLELKEQLVRHRELGHESGFEEPDLDLRTEPALIMPEARSIIAIAVAYPSKMKGAPVSEPGKRRGILSRSAWGEDYHQALRRRLTKLAEWIMERVPEAKLMSMVDTGALSDRAVAERAGIGWSGKNCSTLTPEWGSWVYLGEMITNLPLPPDQALLDGCGDCTLCIDACPTGALVGPGQLNAQKCISFVTQTKGIVEDEMMAKIGNRLYGCDTCQIVCPVNRKIDTRHHTELLPDPEVAKPLLRPLLTMGNREFREKFGSSSAAWRGRKPIQRNALIALGNFRDAESVPDVAAVLRNDPRPVLRATAAWALGRIGSPEAVEHLRDAQSSEKDDEVLSSIARALSL

SEQ ID NO: 75998 - protein, 388 aa, unidentified
  source 1..388: note = Cohnella lupini
  REGION 1..388: note = tr|A0A3D9IMY8|A0A3D9IMY8_9BACL Epoxyqueuosine reductase OS=Cohnella lupini OX=1294267 GN=DFP95_104116; PE = 4 SV=1
MSKLNMQTDNLFWIRLKDEMIAAAPSLGIDKLRITTADTFAELKERLVRHRELGHESGFEEPDLDLRTEPKLSMPEARSIIAIAVAYPSKLKNAPVSEPGKRRGILSRSAWGEDYHQALRRRLAKLTEWIHERVPEAKLMSMVDTGSLSDRAVAERAGIGWSGKNCSILTPEYGSWVYLGEMITDLPLPPDRSLVEGCGDCTLCIDACPTGALVGPGQLNAQKCISFVTQTKGIVEDEMMVKIGNRLYGCDTCQIVCPVNRKIDMRHHAELLPDPEVAKPLLRPLLKMGNREFRETFGAGSASWRGRKPIQRNALIGLGNFKDSESVPDIAEVMRDDPRPVLRATAAWALGRIGTSEAIDHLLKARETEKDDETLSAIDKALAAHAAI

SEQ ID NO: 75999 - protein, 388 aa, Cohnella phaseoli
  REGION 1..388: note = tr|A0A3D9IPC0|A0A3D9IPC0_9BACL Epoxyqueuosine reductase OS=Cohnella phaseoli OX=456490 GN=DFP98_12635; PE = 4 SV=1
MSDVVVKRDYRYWKQFKEELLKAAPGLGIDKLGVTTAEPFHELKERLLRHRERGHESGFEEPDLDLRTDPSLHMAEAKSIIAIAVAYPSKLKNAPVSEPGRRRGILSRSAWGEDYHQALRRRMANLSEWLLAREPEAKLLSMVDTGALSDRAVAERAGIGWSGKNCSVINPELGSWIYLGEIITSLPLPPDSSLPDDCGDCTLCIDACPTGALVGPGQLNAQRCISFITQTKGFVSDEMKLKIGNRLYGCDTCQIVCPVNRKIDIRHHPELLPDPEVVKPLLRPLLTMGNREFREKLGSSSAAWRGRKPIQRNALIGLGNFRDAESVPDIVAVLRDDPRPELREAAAWALGRIGTSEALDGLRGARSKEGSVEVLDAIDRALERKSDQ

SEQ ID NO: 76000 - protein, 429 aa, Cohnella sp.
  REGION 1..429: note = tr|A0A3E0R358|A0A3E0R358_9BACL Epoxyqueuosine reductase OS=Cohnella sp. OX=1883426 GN=queG PE=3 SV=1
MDNLNGVDSSPPRGAEFWQRLKQEMIEAAPGLGIDKIGVASADPFTELKERLIRHRELGRESGFEEPDLDKRTNPALLFDNPRSIIAIAVAYPSKLHAPPMSEPGLRRGILSRSAWGEDYHRVLNRRLERLADWLAERVPEARTLSMVDTGALSDRAVAERAGIGWSGKNTMILTREWGSWVYLGEMITNLPLPPDKPVEDSCGECTRCIDACPTGALVGSGELDAQKCISFLTQTKGTLSEEVMLKIGNRLYGCDTCQIVCPVNRGKDARQHAELIPDAEVAKPLLRPLLKMGNREFKEKFGSSAASWRGRKPIQRNALIGLGNFRDRESVPDIAAVLREDPRYELRATAAWALGRIGGSEAEAALREAIETDADERVKEAARRALEQASGAGRAIRGRPGKRKTPEAPEAEKTAADQKEAIGCERER

SEQ ID NO: 76001 - protein, 401 aa, Cohnella sp.
  REGION 1..401: note = tr|A0A1I0VUZ4|A0A1I0VUZ4_9BACL Epoxyqueuosine reductase OS=Cohnella sp. OV330 OX=1855288; GN = SAMN05216312_101577 PE=4 SV=1
MDNKGVAAPSRSPIYWSSLKRDMLAAAKSLGIDRIGVTSAEPFPELRERLALHRALGYESGFEEPDLDKRTQPSLSFEAPRSIVAIAVAYPSKLKNPPVSEPGARRGILSRSAWGEDYHRVLGKRLERLAEWLAERAPELRWLSMVDTGALSDRAVAERAGIGWSGKNCMIMNDELGSWMYLGEMITNLPLPPDAPLLDQCGDCTICIDACPTGALVGPGQLNAQKCISYLTQSKGLLDEEAMVKMGNRLYGCDTCQIVCPINRGIDSRHQAETLPDPEVAKPLLRPLLQMGNREFKETFGASSASWRGRKPIQRNALIGLGNFRDEASAGDVARVLREDPRFELRATAAWALGRIRGDVAQAALAEAAEADADERVRAAASRALAALAEPAPKRGGRVSD

SEQ ID NO: 76002 - protein, 318 aa, unidentified
  source 1..318: note = Coleofasciculus chthonoplastes
  REGION 1..318: note = tr|B4VK91|B4VK91_9CYAN Epoxyqueuosine reductase; OS = Coleofasciculus chthonoplastes PCC 7420 OX=118168; GN = queG PE=3 SV=1
MMTKDKGQRTKDKSNQIKQKARSLGFHHCGIAAIEGNADEEAAQHLKTWLAQGYHADMDWMQNPRRLDIHTCMPDVKSVISVALNYYTPHQRPQGNEYAKISRYAWGRDYHKVMHKKLKALTHWLQAQGEGIEARYYVDTGPVQDKVWAERAGIGWIAKNGNLITREYGSWVFLGEILTNLSLTPHTPHTQHCGTCTRCLEACPTGAIVKPFVVDANRCIAYHTIENRAEELPSSITPHLQGWVAGCDICQDVCPWNQRFAQPTDVADFEPYPGNVAPTLAELATLSDHQWHQRFPASALRRIKPQMWRRNAKANQQK

SEQ ID NO: 76003 - protein, 381 aa, Collimonas arenae
  REGION 1..381: note = tr|A0A127PUF3|A0A127PUF3_9BURK Epoxyqueuosine reductase OS=Collimonas arenae OX=279058 GN=queG PE=3 SV=1
MLATDHNLIALATTIKAWGRELGFADIRISDVDLAQQEAGFQAWLELGYHGEMDYMAAHGMKRARPAELVPGTIRAIVARMDYLPREYQGDDGQWRLREQARLGKAAATATVSLYARGRDYHKVLRSRLQQLADRIKDEIGEFGYRVFTDSAPVMEVALAQKAGLGWRGKHTLLLNREAGSFFFLGEILTDLPLPLDAPVSSHCGQCSACIDVCPTKAIVGPYRLDARRCISYLTIELKGSIPLELRPLIGNRVYGCDDCQLFCPWNKFAQPSTLGDFDVRNGLDQATLVELFGWTETQFNSRMEGSPIRRIGYQRWLRNMAVGLGNAAAADVSTQEIVAALRARIDDPSELVREHVEWALQQHGAARSDSSVLQHPQPER

SEQ ID NO: 76004 - protein, 372 aa, Collimonas arenae
  REGION 1..372: note = tr|A0A561GE18|A0A561GE18_9BURK Epoxyqueuosine reductase OS=Collimonas arenae OX=279058 GN=queG PE=3 SV=1
MAVIDQDLTALAATIKAWGRELGFADIRISDVDLAQQEAGFEAWLALGYHGDMDYMAAHGMKRARPGELVPGAIRAIAVRMDYLPRAYQDDQGSWRPREQARLAPAAAGSATVSLYARGRDYHKVLRSRLQQLADRIKGEIGEFGYRVFTDSAPVMEVALAQKAGLGWRGKHTLLLNREAGSFFFLGEILTDLPLPVDPAISSHCGQCSACIDVCPTKAIVGPYRLDARRCISYLTIELKGSIPVELRPLIGNRVYGCDDCQLFCPWNKFAQPSTLGDFDVRNGLDQATLVELFGWSEEQFNSRMEGSPIRRIGYQRWLRNMAVGLGNTAAAGAATPEIVAALQQRSDDPSELVREHVAWALQQHAIKHGVD

SEQ ID NO: 76005 - protein, 368 aa, Collimonas fungivorans
  REGION 1..368: note = tr|A0A127PGR7|A0A127PGR7_9BURK Epoxyqueuosine reductase OS=Collimonas fungivorans OX=158899 GN=queG PE=3; SV = 1
MAVIDQNLSALATTIKAWGRELGFADVRISDVDLAQQEAGFEAWLELGYHGEMDYMAAHGMKRARPAELVPGAIRAIAVRMDYLPRAYQDDQGNWRPREQARLAPAAAASATVSLYARGRDYHKVLRSRLQQLADRIKGEIGEFGYRVFTDSAPVMEVALAQKAGLGWRGKHTLLLNREAGSFFFLGEILTDLPLPVDQAISSHCGQCSACIDVCPTQAIVGPYRLDARRCISYLTIELKGSIPVELRPLIGNRVYGCDDCQLFCPWNKFAQPSALGDFDVRNGLDQATLVELFGWSEEQFNSRMEGSPIRRIGYLRWLRNIAVGLGNTAAAGAGSPEIIAALQQRSDYPSELVREHVAWALQQHGID

SEQ ID NO: 76006 - protein, 368 aa, Collimonas fungivorans
  REGION 1..368: note = tr|G0ADC9|G0ADC9_COLFT Epoxyqueuosine reductase; OS = Collimonas fungivorans (strain Ter331) OX=1005048; GN = queG PE=3 SV=1
MAVIDQNLSALATTIKAWGRELGFADVRISDVDLAQQEAGFEAWLELGYHGEMDYMAAHGMKRARPAELVPGAIRAIAVRMDYLPRAYQDDQGSWRPREQARLAPAAAGSATISLYARGRDYHKVLRSRLQQLADRIKGEIGEFGYRVFTDSAPVMEVALAQKAGLGWRGKHTLLLNREAGSFFFLGEILTDLPLPVDQAISSHCGQCSACIDVCPTQAIVGPYRLDARRCISYLTIELKGSIPVELRPLIGNRVYGCDDCQLFCPWNKFAQPSTLGDFDVRNGLDQATLVELFGWSEEQFNSRMEGSPIRRIGYQRWLRNMAVGLGNAAAAGAGSPEIIAALQQRSDYPSELVREHVAWALQQHGID

SEQ ID NO: 76007 - protein, 377 aa, Collimonas pratensis
  REGION 1..377: note = tr|A0A127Q9H4|A0A127Q9H4_9BURK Epoxyqueuosine reductase OS=Collimonas pratensis OX=279113 GN=queG PE=3; SV = 1
MAVTQQHFTGQNPPDPDLAALAVAIKAWGRELGFADIRISDVDLAEQEAGFQAWLELGYHGEMDYMAAHGMKRARPAELVPGTIRAIAVRMDYLPRGYQDAPGQWRPLEQARLAPAAAATATISLYARGRDYHKVIRSRLQQLADRIKGEIGEFGYRVFTDSAPVMEVALAQKAGLGWRGKHTLLLNREAGSFFFLGEILTDLPLPVDPPTSAHCGQCSACIDVCPTQAIVGPYRLDARRCISYLTIELKGSIPLELRPLIGNRVYGCDDCQLFCPWNKFAQPSTLGDFDVRNGLDQATLVELFGWSEEQFNSRMEGSPIRRIGHERWLRNMAVGLGNAAATGISTPEIIAALQARSADPSELVREHVAWALQQHGA

SEQ ID NO: 76008 - protein, 377 aa, Collimonas pratensis
  REGION 1..377: note = tr|A0A127R2X3|A0A127R2X3_9BURK Epoxyqueuosine reductase OS=Collimonas pratensis OX=279113 GN=queG PE=3; SV = 1
MAVTQQHFTGQNPPDLDLAALAVAIKAWGRELGFADIRISDVDLAEQEAGFQAWLELGYHGEMDYMAAHGLKRARPAELVPGTIRAIAVRMDYLPRGYRDAPGQWRPLEQARLAPAAAATATISLYARGRDYHKVIRSRLQQLADRIKGEIGEFGYRVFTDSAPVMEVALAQKAGLGWRGKHTLLLNREAGSFFFLGEILTDLPLPVDPPTSAHCGQCSACIDVCPTQAIVGPYRLDARRCISYLTIELKGSIPLELRPLIGNRVYGCDDCQLFCPWNKFAQPSTLGDFDVRNGLDQATLVELFGWSEEQFNSRMEGSPIRRIGHERWLRNMAVGLGNVAAAGISTPEIIAALQARSADPSELVREHVAWALQQHGA

SEQ ID NO: 76009 - protein, 373 aa, Collimonas sp.
  REGION 1..373: note = tr|A0A1H3DBH0|A0A1H3DBH0_9BURK Epoxyqueuosine reductase OS=Collimonas sp. OK242 OX=1798195 GN=queG PE=3; SV = 1
MVVTEQNLAALATTIKAWGRELGFADIRISDVDLAQQEAGFEAWLALGYHGEMDYMAAHGMKRARPAELVPGAIRAIAVRMDYLPRAYKDDQDSQDGQRNWRSREQARLAPAAAGTATVSLYARGRDYHKVLRSRMQQLADRIKGEIGDFGYRVFTDSAPVMEVALAQKAGLGWRGKHTLLLNREAGSFFFLGEILTDLPLPVDESVSSHCGQCSACIDVCPTKAIVGPYRLDARRCISYLTIELKGSIPVELRPLIGNRVYGCDDCQLFCPWNKFAQPSTLGDFDVRNGLDRATLVELFGWSEEQFNSRMEGSPIRRIGYQRWLRNMAVGLGNTAAAGAGTPEIVAALQQRSDDPSELVREHVAWALQQHGA

SEQ ID NO: 76010 - protein, 377 aa, Collimonas sp.
  REGION 1..377: note = tr|A0A2A9K659|A0A2A9K659_9BURK Epoxyqueuosine reductase OS=Collimonas sp. PA-H2 OX=1881062 GN=queG PE=3; SV = 1
MAVTQQHFTGKTPPPPDLAALAVAIKAWGRELGFADIRISDVDLAEQEAGFQAWLALGYHGEMDYMAAHGMKRARPVELVPGTIRAIAVRMDYLPRGYQDAPGEWRPREQARLAPAAAGTATVSLYARGRDYHKVIRSRLQQLADRIKGEIGEFGYRVFTDSAPVMEVALAQKAGLGWRGKHTLLLNREAGSFFFLGEILTDLPLPVDPPTSSHCGQCSACIDVCPTQAIVGPYRLDARRCISYLTIELKGSIPLELRPLIGNRVYGCDDCQLFCPWNKFAQPSTLGDFDVRNGLDQATLVELFGWSEEQFNSRMEGSPIRRIGYERWLRNMAVGLGNAAAAGVSTPEIIAALQSRSADPSALVREHVAWALQQHGA

SEQ ID NO: 76011 - protein, 381 aa, unidentified
  source 1..381: note = Colwellia beringensis
  REGION 1..381: note = tr|A0A222G805|A0A222G805_9GAMM Epoxyqueuosine reductase OS=Colwellia beringensis OX=1967665 GN=queG PE=3; SV = 1
MTTPAINYQYLTEKIKFWGQELGFSQVGISDVDLSEHEAALTSWLENNYHGNMDYMARHGLMRARAKELVEGTLNVISVRMDYLPTDAKFARILKNRDHAYISRYALGRDYHKLMRKRLKQLGEKIKAHCENINYRPFVDSAPILERPLAEKAGLGWVGKHSLLINKQAGSWFFLGELLVDIPLITDTKAENNCGTCVACIKICPTQAIVEPYVVDARRCISYLTIELREAIPEEFRPLIGNRIYGCDDCQLICPWNKFAKLGSEDDFKPRQNLDNIELLTLFAWDEATFLNKTEGSPIRRIGFQSWQRNIAVALGNADFSENNVSALTAKLPKAEAMVAEHIEWAIAQQTLKQQALVKDQNLRLTARLIRSVEKGMPRDA

SEQ ID NO: 76012 - protein, 381 aa, Colwellia chukchiensis
  REGION 1..381: note = tr|A0A1H7T7Y4|A0A1H7T7Y4_9GAMM Epoxyqueuosine reductase OS=Colwellia chukchiensis OX=641665 GN=queG PE=3; SV = 1
MTAPAINYQDLTEKIKLWGRELGFSQVGISDVNLVDHEPALARWLANNYHGNMDYMARHGLMRARAKELVEGTLNVISVRMDYLPTDAKFARTLKNRQHAYISRYALGRDYHKLMRKRLKQLGERIKQHCQNFNYRPFVDSAPILERPLAEKAGLGWVGKHSLLINKQAGSWFFLGELLVDIPLVVDKKVENACGSCVACIKICPTQAIVEPYVVDARRCISYLTIELREAIPEQFRPLIGNRIYGCDDCQLICPWNKFAKLGSEDDFKPRQQLDDISLLTLFAWDEASFLRKTQGSPIRRIGFQCWQRNIAVALGNADFSATIVTALLEKLPASEPMVAEHIEWALAQQRLKQQALADDKNLRLTARLIRSVEKGMPRDA

SEQ ID NO: 76013 - protein, 398 aa, Colwellia demingiae
  REGION 1..398: note = tr|A0A5C6QCC3|A0A5C6QCC3_9GAMM Epoxyqueuosine reductase OS=Colwellia demingiae OX=89401 GN=queG PE=3 SV=1
MSPINYQELTEKIKSWGKELGFSDLGISNIDLSAHESMLERWLANNYHGNMYYMARHGLMRARPAELVPGTIRVISVRLDYLPQNAKFASILKDKNKAYISRYALGRDYHKLMRKRLQQLGKKIAEHCSDFNCRPFVDSAPVMERPLAEKAGLGWAGKHTLLINKEAGSWFFLGELFVDIPLPVSSNEYSESAIKAIETQTKTNDCGTCVACIKICPTKAIVEPYTVDARRCISYFTIESPDAIPEELRPLMGNRIYGCDDCQLICPWNKYAKLSLVDDFQARNNLDDISLLELFAWSEDYFLNTLQGSPIRRIGFQSWLRNIAVALGNAPYSDIIVTALTEKLAEASELVIEHIHWALAQQGDKKMLSDKVAAEQATNHRLTLRLIRSVEKGLTRDS

SEQ ID NO: 76014 - protein, 386 aa, Colwellia hornerae
  REGION 1..386: note = tr|A0A5C6QHD2|A0A5C6QHD2_9GAMM Epoxyqueuosine reductase OS=Colwellia hornerae OX=89402 GN=queG PE=3 SV=1
MTTSPIDYQALAENIKRWGLALGFSQVGFSDIDLSSHEDALTQWLENNYHGEMDYMHKHGLMRARAQELVEGTTRVISVRMDYLPPEAKFARTLKKKDHAYISRYALGRDYHKLMRKRLKQLGDKISEYCESFNFRPFVDSAPILERPLAEKAGLGWVGKHSLLINKSAGSWFFLGELLVDIPLPTSEKTANECGSCVSCIKICPTQAIVAPYVVDARRCISYLTIELRDAIPEEFRPLIGNRIYGCDDCQLICPWNKFANISHEGDFSPRQNLDNVELLTVFSWDEATFLSKTAGSPIRRIGFNSWQRNISVAIGNAPYSAENIDALNDKLTTAEPMVAEHIHWALHQQDNKRIAAEQHSDFPIKNQRLTERLIRSVEKGLPRDA

SEQ ID NO: 76015 - protein, 400 aa, unidentified
  source 1..400: note = Colwellia marinimaniae
  REGION 1..400: note = tr|A0A1Z5I5G6|A0A1Z5I5G6_9GAMM Epoxyqueuosine reductase OS=Colwellia marinimaniae OX=1513592 GN=queG; PE = 3 SV=1
MTMSLINYQELAEKIKCWGKELGFSDLGISDIDLTAHESVLERWLANNYHGNMDYMARHGLMRARPAELVPGTIRVISVRLDYLPQNAKFASVLKDKNKAYISRYALGRDYHKLMRKRLQQLGKKIAEHCRDFNCRPFVDSAPVMERPLAEKAGLGWAGKHTLLINKEAGSWFFLGELFVDIPLPVSSNEYSAAAIKAIETQTKVNDCGSCVACIKICPTKAIVAPYTVDARRCISYFTIESPDAIPEELRPLMGNRIYGCDDCQLICPWNKYAKLSLIDDFQARNNLDDISLLELFAWTEEYFLNTLQGSPIRRIGFQSWLRNIAVALGNAPYSDEVVKALTEKCAEASELVVEHINWALAQQSNKKMLSEKTAAEQEKNHRLTLRLIRSVEKGLTRDA

SEQ ID NO: 76016 - protein, 398 aa, Colwellia psychrerythraea
  REGION 1..398: note = tr|Q48A28|Q48A28_COLP3 Epoxyqueuosine reductase; OS = Colwellia psychrerythraea (strain 34H / ATCC BAA-681); OX = 167879 GN=queG PE=3 SV=1
MSPINYQELAEKIKCWSKELGFSDLGISNIDLSAHESMLERWLANGYHGNMDYMARHGLMRARPAELVPGTIRVISVRLDYLPHNAKFASILKDKNKAYISRYALGRDYHKLMRKRLQQLGKKIVEHCSDFNCRPFVDSAPVMERPLAEKAGLGWAGKHTLLINKEAGSWFFLGELFVDIPLPISRNEYSESAIKAIETQTKTNDCGTCVACIKICPTKAIVEPYTVDARRCISYFTIESPDAIPIELRPLMGNRIYGCDDCQLICPWNKYAKLSLADDFQARNNLDDISLLELFAWSEEYFLNTLQGSPIRRIGFQSWLRNIAVALGNAPYSDVIVTALTEKRPDASDLVVEHINWALVQQSDKKMLSEKVAAEQAKNHRLTLRLIRSVEKGLPRDA

SEQ ID NO: 76017 - protein, 400 aa, Colwellia psychrerythraea
  REGION 1..400: note = tr|A0A099KPP8|A0A099KPP8_COLPS Epoxyqueuosine reductase OS=Colwellia psychrerythraea OX=28229 GN=queG; PE = 3 SV=1
MTMSSTNYQELAEKIKCWSKELGFSDIGISDIDLSAHESVLERWLANNYHGNMDYMARHGLMRARPAELVPGTIRVISVRLNYLPQNAQFSSILKDKNKAYISRYALGRDYHKLMRKRLQQLGKKIAEHCSNFNCRPFVDSAPVMERALAEKAGLGWAGKHTLLINKAAGSWFFLGELFIDIPLPVSRNEYSENAIKTVETQTKNNDCGTCVACIKICPTKAIVEPYTVDARRCISYFTIESPDAIPVELRPLMGNRIYGCDDCQLICPWNKYAKLSLVDDFQARNNLDDISLLTLFAWSEEHFLNTLQGSPIRRIGFQSWLRNIAVALGNAPYSEVIVAALTEKLAEASELVAEHINWALAQQDNKKMLSEEAAAKQAKNHRLTLRLIRSVEKGLTRDA

SEQ ID NO: 76018 - protein, 403 aa, Colwellia sp.
  REGION 1..403: note = tr|A0A2G2IB30|A0A2G2IB30_COLSX Epoxyqueuosine reductase OS=Colwellia sp. OX=56799 GN=queG PE=3 SV=1
MTNTTANNPAINYPALVEKIKCWGKELGFSQLGITDIDLSKHEQALERWLANNYHGNMDYMARHGLMRARPAELESGTIRAISVRLDYLPTQAKCAQILKSKNHAYISRYALGRDYHKLMRKRLQQLGKKITAYVESLECEGIEGEHFNFRPFVDSAPLLERPLAEKAGLGWVGKHSLLLNKEAGSWFFLGELLINIPLPVSVVATIDKSTAANDCGSCVACIKICPTKAIVEPYVVDARRCISYFTIESPDPIPLELRPLMGNRIYGCDDCQLICPWNKYAKLSLENDFQARHHLDEITLLELFSWSEDYFLEHLQGSPIRRIGFQSWQRNIAVALGNAPFDISIVVALEQKLTTASVMVAEHIHWALSQQNKRKSFDNNNTHTRLNARLIRSIEKGLPRDA

SEQ ID NO: 76019 - protein, 397 aa, Colwellia sp.
  REGION 1..397: note = tr|A0A396U5Y3|A0A396U5Y3_9GAMM Epoxyqueuosine reductase OS=Colwellia sp. RSH04 OX=2305464 GN=queG PE=3; SV = 1
MTTPTINYLELAEKIKCWGKELGFSQLGITDIDLSAHEEALQRWLANGYHGNMDYMAKHGLMRARPAELVPGTTRVICVRLDYLPQDAKFAQTLKDKSSAYISRYALGRDYHKLMRKRLQQLGKKISAHCEAFNCRPFVDSAPVLERPLAEKAGLGWVGKHTLLLNKEAGSWFFLGELFIDIPLPITDIKSEQTKEETAQKKPGCGTCVACIKICPTNAIVEPYVVDAKRCISYFTIESPDPIPVELRPLMGNRIYGCDDCQLICPWNKYAKITPEQDFQPRLQLDQASLLSLFSWSEEDFLSNLEGSPIRRIGYDSWLRNIAVALGNAPYKPEIISALMMKKEVVSELVAEHINWALTQQDAKRSIAQDEFEKQQSNHRLTNRLIRSIEKGLPRDA

SEQ ID NO: 76020 - protein, 385 aa, unidentified
  source 1..385: note = Colwelliaceae bacterium
  REGION 1..385: note = tr|A0A2D6RIU1|A0A2D6RIU1_9GAMM Epoxyqueuosine reductase OS=Colwelliaceae bacterium OX=2026726 GN=queG; PE = 3 SV=1
MSTTINYQDLSEKIKQWGKELGFAEVGITDIDLKTHEAYLQKWLDNQYHGSMDYMARHGMMRARPDELEPGTVRVISVAMHYLIPDAKFAKTLKNKKKAYISRYALGRDYHKLMRKRLQQLGQKISQHCETFKFRPFVDSAPILERPLAEKAGLGWVGKHSLLINKQAGSWFFLGELLVNIPLPTDAPKIEHCGNCVACMTICPTNAIVAPYIVDAKRCISYLTIEHQGVIPEVYRSAMGNRIYGCDDCQLICPWNKFGQITEEQDFHPRNSLDDSDLLSLFAWTETEFLARTQGSPIRRIGYQSWQRNIAIGLGNAPYDEDIIVQLSAKLLESDEVVAEHINWAIAQQKEKALDAETASKEVKSALRQNERLIRSIEKGLPRDA

SEQ ID NO: 76021 - protein, 370 aa, unidentified
  source 1..370: note = Comamonadaceae bacterium
  REGION 1..370: note = tr|A0A3C0KHL7|A0A3C0KHL7_9BURK Epoxyqueuosine reductase OS=Comamonadaceae bacterium OX=1871071 GN=queG; PE = 3 SV=1
MQSGFDGARLVRQLQDWGRELAFSQIGVAGVDLGSAETGLRAWLAAGFHGSMGYMATHGLKRARPAELVPGTVSVITARMDYLPCTAPDDWVADEWQRQQRPGEGIISVYARGRDYHKVLRNRLQKLAERLAADVGPLGHRVFTDSAPVLEAELASRSGQGWRGKHTLILNREGGSMFFLGEIYIDMALPPTPPVGHHCGACTACMVACPTRAIVAPYRLDARRCISYLTIEHDGPIPSELRPLMGNRIYGCDDCQLACPWNKFARRATLPDFDPRDGIAGATLVELFGWEEAEFLRRTEGSPIRRIGHERWLRNIAVALGNALRTDAPAAERLAWQAALQARAGHPSEVVREHVAWALAQQPAAPIVTV

SEQ ID NO: 76022 - protein, 347 aa, unidentified
  source 1..347: note = Comamonadaceae bacterium
  REGION 1..347: note = tr|A0A1E4LX43|A0A1E4LX43_9BURK Epoxyqueuosine reductase OS=Comamonadaceae bacterium SCN 68-20 OX=1660161; GN = queG PE=3 SV=1
MQEWARELGFSQIGVTGVDLSSAEPGLMQWLAQGFHGDMHYMAAHGLKRARPAELVPGTVSVITARMDYLPRTTPEGWQAVEWERLRRPGEAIVSVYARGRDYHKVLRARLQKLADRIAEAAGPFGHRVFTDSAPVLEAELARRSGQGWRGKHTLVLSREAGSMFFLGEIYVDMALAPTAPVTAHCGSCQACMDACPTQAIVAPHRVDARRCISYLTIEHAGEIPLALRPRMGNRIYGCDDCQLVCPWNKFAQPSPLPDFDARAGLTGQQLVHLFGWDEATFLRQTEGGPIRRIGHERWLRNVAVALGNALRATGDPAVRAALQARAQDASALVRGHVAWALAQEAA

SEQ ID NO: 76023 - protein, 352 aa, Comamonas aquatica
  REGION 1..352: note = tr|A0A1B2D7Y2|A0A1B2D7Y2_9BURK Epoxyqueuosine reductase OS=Comamonas aquatica OX=225991 GN=queG PE=3 SV=1
MQDWARELGFSQIGVSGVDLSSCEDGLLQWLAQGFHGQMQYMQAHGLKRARPAELVPGTVSVITARMDYLPSTTPQDWQAVEWARLQRPQEAIVSVYARGRDYHKVLRNRLQKLAERIAQEVGPLGHRAFTDSAPVMEAELARRSGQGWRGKHTLVLSRDAGSMFFLGEIYVDLALPETAPVTAHCGSCSSCMDACPTGAIVAPHRVDARRCISYLTIEHDGAIPLELRPLMANRIYGCDDCQLACPWNKFAQRSPLPDFDVRGGMVGSTLVQLFGWDEATFLRCTEGSPIRRIGHERWLRNIAVALGNALRAEPQVDARAALRQALQARATHDSALVREHVQWALAQAADE

SEQ ID NO: 76024 - protein, 352 aa, Comamonas aquatica
  REGION 1..352: note = tr|A0A014P5E0|A0A014P5E0_9BURK Epoxyqueuosine reductase OS=Comamonas aquatica DA1877 OX=1457173 GN=queG; PE = 3 SV=1
MQDWARELGFSQIGVSGVDLSSCEDGLLQWLAQGFHGQMQYMQAHGLKRARPAELVPGTVSVITARMDYLPSATPQDWQAVEWARLQRPQEAIVSVYARGRDYHKVLRNRLQKLAERIAQEVGPLGHRAFTDSAPVMEAELARRSGQGWRGKHTLVLSRDAGSMFFLGEIYVDLALPETAPVTAHCGSCSSCMDACPTGAIVAPYRVDARRCISYLTIEHDGAIPLELRPLMANRIYGCDDCQLACPWNKFAQRSPLPDFDVRGGMVGSSLVQLFGWDEATFLRCTEGSPIRRIGHERWLRNIAVALGNALRAEPPADARAALRQALQARATHDSALLREHVQWALAQAADE

SEQ ID NO: 76025 - protein, 351 aa, Comamonas kerstersii
  REGION 1..351: note = tr|A0A1V3TP06|A0A1V3TP06_9BURK Epoxyqueuosine reductase OS=Comamonas kerstersii OX=225992 GN=queG PE=3; SV = 1
MQDWARELGFSQIGVSGVDLSSCEDGLLQWLAAGFHGSMDYMAAHGLKRARPAELVPGTVSVITARMDYLPRDTLDDWQTVEWARQHRPQEAIVSVYARGRDYHKVLRSRLQKLAERIAQELGPMGHRAFTDSAPVMEAELARRSGQGWRGKHTLVLSRDAGSMFFLGEIYVDMALPETAPVTAHCGSCSSCMDACPTGAIVAPHRVDARRCISYLTIEHDGPIPLELRPLLANRIYGCDDCQLACPWNKFAQRASLPDFDVRGGMVGSTLVQLFSWDEATFLRCTEGSPIRRIGHVRWLRNIAVAMGNALTTALSADDRAAIQTALQQRASHDSEIVREHVQWALAQANQ

SEQ ID NO: 76026 - protein, 351 aa, Comamonas kerstersii
  REGION 1..351: note = tr|A0A0W7YXW6|A0A0W7YXW6_9BURK Epoxyqueuosine reductase OS=Comamonas kerstersii OX=225992 GN=queG PE=3; SV = 1
MQDWARELGFSQIGVSGVDLSSCEDGLLQWLAAGFHGSMDYMAAHGLKRARPAELVPGTVSVITARMDYLPRDTLDDWQTVEWARQHRPQEAIVSVYARGRDYHKVLRSRLQKLAERIAQELGPMGHRAFTDSAPVMEAELARRSGQGWRGKHTLVLSRDAGSMFFLGEIYVDMALPETAPVTAHCGSCSSCMDACPTGAIVAPHRVDARRCISYLTIEHDGPIPLELRPLLANRIYGCDDCQLACPWNKFAQRASLPDFDVRGGMVGSTLVQLFSWDEATFLRCTEGSPIRRIGHVRWLRNIAVAMGNALTTALSADDRAAIQTALQQRASHDSEIVREHVQWALAQASQ

SEQ ID NO: 76027 - protein, 361 aa, unidentified
  source 1..361: note = Comamonas serinivorans
  REGION 1..361: note = tr|A0A1Y0ESM0|A0A1Y0ESM0_9BURK tRNA epoxyqueuosine(34) reductase QueG OS=Comamonas serinivorans OX=1082851 GN=CCO03_05540 PE=4 SV=1
MAYMAAHGLKRARPAELVPGTVSVISVRMNYLPRAALQAADGAALAGQPTSPVAEANDLAAVPSTVAMPAATAAAGATTGWRQREWQSLQAPGDGVVSLYARGRDYHKVVRNRLQQLQRRMAEQLGPFGHRVFCDSAPVLEAELATRAGLGWRGKHSLVLSRDAGSLFFLGELFVDLALPATSAQAGHCGQCTSCITSCPTGAIVAPYRVDARRCISYLTIEHAGPIDPALRPLVGNHVYGCDDCQLACPWNKFAQASDLPDFDARPDLQAGQLVRWMQWDEAEFLRLTEGSPIRRIGHARWLRNVALVMGNAASAPLTTTQRRDVVQALARWQDHADPVVREQVAWSLARHGADAGPGDR

SEQ ID NO: 76028 - protein, 346 aa, Comamonas sp.
  REGION 1..346: note = tr|A0A2G6YYR0|A0A2G6YYR0_9BURK Epoxyqueuosine reductase OS=Comamonas sp. 26 OX=2035201 GN=queG PE=3 SV=1
MQAWARELGFSQIGVAGVDLSSAEPGLLQWLAQGFHGEMHYMQAHGLKRARPAELVPGTVSVITVRMDYLPQATADGWQAVEWDRLKNPAEGIVSIYARGRDYHKVLRNRLQKLAERIAQEIGPFGHRAFTDSAPVLEAELASRSGQGWRGKHTLVLSREAGSMFFLGEIYVDFAIDPTEPVTAHCGNCTSCIDACPTGAIIAPHKVDARRCVSYLTIEHAGSIPEDMRPLLANRIYGCDDCQLACPWNKFAKPSQLPDFDARAGLAGTQLVHFFAWDETQFLRITEGSPIRRIGHARWLRNVAVALGNAWRETGQPELQAALQTRANHPDPVVAEHVAWALAQRA

SEQ ID NO: 76029 - protein, 346 aa, Comamonas sp.
  REGION 1..346: note = tr|A0A5D3H6C7|A0A5D3H6C7_9BURK Epoxyqueuosine reductase OS=Comamonas sp. Z3 OX=2601247 GN=queG PE=3 SV=1
MQAWARELGFSQIGVAGVDLSSAEPGLLQWLAQGFHGEMHYMQAHGLKRARPAELVPGTVSVITARMDYLPRDTGDGWQTVEWDRLRRPEEGIVSLYARGRDYHKVLRNRLQKLAERIAQEMGPFGHRAFTDSAPVLEAELASRSGQGWRGKHTLVLSREAGSMFFLGEIYVDFALEPTAPVTAHCGSCSSCMDACPTGAIIAPHKVDARRCISYLTIEHAGSIPEELRPLMANRIYGCDDCQLACPWNKFAHPSVLPDFDARAGLAGTQLVHFFAWDEATFLRVTEGSPIRRIGHARWLRNVAVALGNAWRETGNPALSAALQSRAADSDPVVAEHVAWALAQRA

SEQ ID NO: 76030 - protein, 350 aa, Comamonas terrigena
  REGION 1..350: note = tr|A0A2A7V0R6|A0A2A7V0R6_COMTR Epoxyqueuosine reductase OS=Comamonas terrigena OX=32013 GN=queG PE=3 SV=1
MQDWARELGFSQIGVAGVDLSSAEPGLLQWLAAGCHGEMHYMESHGLKRARPAELVPGTLSVITARMDYLPQTTPAGWQAVEFERLQRPQEGIVSVYARGRDYHKVLRARLQKLSDRIAQEIGPFGHRVFTDSAPVLEAELAQRSGQGWRGKHTLVLSREAGSMFFLGEILVDMALEPTEPVSGHCGSCSACMQACPTGAIVAPHQVDARRCISYLTIEHDGPIPLELRPQLANRIYGCDDCQLACPWNKFAQPSRLADFDARDGLAGSSLVQLFAWDEAQFLRRTEGSPIRRIGHARWQRNIAVAMGNALRSLPAGAERDAVQSALAAQAAHPSDLLREHVQWALAQCA

SEQ ID NO: 76031 - protein, 346 aa, Comamonas testosteroni
  REGION 1..346: note = tr|A0A0L7MDX8|A0A0L7MDX8_COMTE Epoxyqueuosine reductase OS=Comamonas testosteroni OX=285 GN=queG PE=3; SV = 1
MQAWARELGFSQIGVAGVDLSSAEPGLLQWLAQGFHGEMHYMQAHGLKRARPAELVPGTVSVITARMDYLPRATEDGWQAVEWDRLKRPEEGIVSIYARGRDYHKVLRNRLQKLADRIAQEIGPFGHRAFTDSAPVLEAELASRSGQGWRGKHTLVLSREAGSMFFLGEIYVDFALEPTAAVTAHCGSCSSCIDACPTGAIIAPHKVDARRCISYLTIEHAGSIPEELRPLMANRIYGCDDCQLACPWNKFAHPSVLPDFDARAGLAGTQLVHFLAWDEATFLRLTEGSPIRRIGHARWLRNVAVALGNAWRETGRPELRAALQSRADHPDPVVAEHVAWALAQRA

SEQ ID NO: 76032 - protein, 350 aa, Comamonas testosteroni
  REGION 1..350: note = tr|A0A076PPT7|A0A076PPT7_COMTE Epoxyqueuosine reductase OS=Comamonas testosteroni TK102 OX=1392005; GN = queG PE=3 SV=1
MVPLMQAWARELGFSQIGVAGVDLSSAEPGLLQWLAQGFHGEMHYMQAHGLKRARPAELVPGTVSVITARMDYLPRDTGDGWQTVEWDRLRRPEEGIVSLYARGRDYHKVLRNRLQKLAERIAQEMGPFGHRAFTDSAPVLEAELASRSGQGWRGKHTLVLSREAGSMFFLGEIYVDFALEPTAPVTAHCGSCSSCMDACPTGAIIAPHKVDARRCISYLTIEHAGSIPEELRPLMANRIYGCDDCQLACPWNKFAHPSVLPDFDARAGLAGTQLVHFFAWDEATFLRVTEGSPIRRIGHARWLRNVAVALGNAWRETGNPALSAALQSRAADSDPVVAEHVAWALAQRA

SEQ ID NO: 76033 - protein, 346 aa, Comamonas thiooxydans
  REGION 1..346: note = tr|A0A176TYB8|A0A176TYB8_9BURK Epoxyqueuosine reductase OS=Comamonas thiooxydans OX=363952 GN=queG PE=3; SV = 1
MQAWARELGFSQIGVAGVDLSSAEPGLLQWLAQGFHGEMHYMQVHGLKRARPAELVPGTVSVITARMDYLPRETGDGWQAVEWDRLKRPEEGIVSIYARGRDYHKVLRNRLQKLAERIAQEIGPFGHRAFTDSAPVLEAELASRSGQGWRGKHTLVLSREAGSMFFLGEIYVDFALEPTVPVTAHCGSCSSCIDACPTGAIIAPHKVDARRCISYLTIEHAGSIPEELRPLMANRIYGCDDCQLACPWNKFAHPSVLPDFDARAGLAGTQLVHFLAWDEATFLRVTEGSPIRRIGHVRWLRNVAVALGNAWRETGRPELKAALQSRADHPDPVVAEHVAWALAQRA

SEQ ID NO: 76034 - protein, 346 aa, Comamonas thiooxydans
  REGION 1..346: note = tr|A0A0E3BIY6|A0A0E3BIY6_9BURK Epoxyqueuosine reductase OS=Comamonas thiooxydans OX=363952 GN=queG PE=3; SV = 1
MQAWARELGFSQIGVAGVDLSSAEPGLLQWLAQGFHGEMHYMQAHGLKRARPAELVPGTVSVITARMDYLPRETGDGWQAVEWDRLKRPEEGIVSIYARGRDYHKVLRNRLQKLAERIAQEIGPFGHRAFTDSAPVLEAELASRSGQGWRGKHTLVLSREAGSMFFLGEIYVDFALEPTVPVTAHCGSCSSCIDACPTGAIIAPHKVDARRCISYLTIEHAGSIPEELRPLMANRIYGCDDCQLACPWNKFAHPSILPDFDARAGLAGTQLVHFLAWDEATFLRVTEGSPIRRIGHVRWLRNVAVALGNAWRETGRPELRAALQSRADHPDPVVAEHVAWALAQRA

SEQ ID NO: 76035 - protein, 351 aa, unidentified
  source 1..351: note = Commensalibacter intestini
  REGION 1..351: note = tr|A0A251ZX37|A0A251ZX37_9PROT Epoxyqueuosine reductase OS=Commensalibacter intestini OX=479936 GN=queG; PE = 3 SV=1
MLLESFTNLIRDKAFELGFDQFGICKAQLPPEKAKQLNEFLDHDHHGDMKWLQDRAHQRASPDHLWPEVKSAMILGVNYGPQTDPLYNLKHFETGNISVYARHRDYHDIIKGWLKHLAQYFIKEAKPFITPTDQVKVFVDTAPIMEKPLAQQAGLGWQGKHTNLVSRQYGSWLFLGEILTTVELPPSKFSKNHCGSCTQCLQACPTNAFPAPFQLDATRCISYLTIEYSGSIPLEFRKAIGNRIYGCDDCLAVCPWNHFAQHSRHLKLQSRKELNSPLLQDFALFTDETFRQFFSGSPVKRIGHLRFIRNVLIAIGNSQQISLLPHAQHWGNHDNPIIQETAQWAIQQLTS

SEQ ID NO: 76036 - protein, 351 aa, unidentified; identical to SEQ ID NO: 76035
  source 1..351: note = Commensalibacter intestini
  REGION 1..351: note = tr|G6F180|G6F180_9PROT Epoxyqueuosine reductase; OS = Commensalibacter intestini A911 OX=1088868 GN=queG PE=3; SV = 1

SEQ ID NO: 76037 - protein, 352 aa, unidentified
  source 1..352: note = Commensalibacter sp.
  REGION 1..352: note = tr|A0A318N1J4|A0A318N1J4_9PROT tRNA epoxyqueuosine(34) reductase QueG OS=Commensalibacter sp. ESL0284 OX=2070537 GN=queG PE=4 SV=1
MLPKNFSKLIQKKAIELGFDQCGICEASLPPEKAALLKEFVSLKRHGTMQWLEDRLYYRSSPHHLWPEVKTAIVLGVNYGPRENPLENLKHPEYANISVYARNRDYHDIIKGWLKHLAQFILKETKYYSNNEQVKVFVDTAPIMEKPLAQKAGLGWQGKHTNLVSRQFGSWLFLGEILTTLHIPPLPASKSHCGSCKKCLVSCPTQAFPEPFKLDAKRCISYLTIEYAGSIPIEFRKAMHNRIYGCDDCLAVCPWNSFASQSRHIKLQARTELVSPPLAKFLQFNEEDFRSFFTGSPVKRIGHLRFIRNILIAAGNSNIENLLPLIINWKNHDNAIIKETAQWAFDQFMISV

SEQ ID NO: 76038 - protein, 351 aa, unidentified
  source 1..351: note = Commensalibacter sp.
  REGION 1..351: note = tr|W7DYQ5|W7DYQ5_9PROT Iron-sulfur cluster-binding protein OS=Commensalibacter sp. MX01 OX=1208583; GN = COMX_05290 PE=4 SV=1
MFPVSFTNLLQQKAFELGFDQFGICKAQLPQEKAQQLREFIDKERHGDMGWLKDRAYQRSSPDHLWPEVKSAIALGVNYGPDIDPLLNLQSPNIANISVYARHRDYHDMIKGWLKHLAQYIIKEAKPLLTPTDQIKVFVDTAPIMEKPLAQQAGLGWQGKHTNLVSRQFGSWLFLGEILTTLQLPETVTSKNHCGSCSQCLQACPTDAFPAPFQLDATRCISYLTIEYSGSIPLEYRKAIGNRIYGCDDCLAVCPWNHFAKNSRHIKLKARQELNHPLLQDFALFTEEEFRQFFAGSPVKRIGHLRFIRNILIAIGNSRQRSLLDSAQLWEHHDNPVIQETANWAIEQFKT

SEQ ID NO: 76039 - protein, 306 aa, unidentified
  source 1..306: note = Confluentibacter sp.
  REGION 1..306: note = tr|A0A2N3HHG1|A0A2N3HHG1_9FLAO Epoxyqueuosine reductase OS=Confluentibacter sp. 3B OX=1909700 GN=queG; PE = 3 SV=1
MNVKTKHTQFIKTEAKRLGFLSCGISKAGFLEEEAPRLEKWLNKNMHGQMQYMENHFDKRLDPTKLVEDSKSVISLLLNYYPSQEQTANSYKLSKYAYGTDYHFVIKDKLKSLLNFIQEEIGDVHGRAFVDSAPVLDKAWAAKSGLGWIGKHSNLLSQQVGSFYFIAELIVDLELEYDLPTTDHCGTCTACIDACPTQAITEPYVVNGSKCISYFTIELKEHIPTEFKGKMDDWMFGCDVCQDVCPWNRFSKPHNEPLFNPHPELLSMTKKDWEDITEDVFNKVFKDSAVKRTKFSGLKRNIEFLK

SEQ ID NO: 76040 - protein, 348 aa, unidentified
  source 1..348: note = Confluentimicrobium lipolyticum
  REGION 1..348: note = tr|A0A238KVW2|A0A238KVW2_9RHOB Epoxyqueuosine reductase OS=Confluentimicrobium lipolyticum OX=1524263; GN = queG PE=3 SV=1
MSGALKQNLTTYALEAGFAKVGICRPDAVPEIAARLDAFLADGRHGQMAWMEERKHWRGNPAALWPEARSVIMLAEPYTPAHDPLAVLEQRDHAAISVYAQNRDYHDVVKKRLKRVGRWLLEQVPGEQIKVFVDTAPVMEKPLAQAAGLGWQGKHTNLLSRDLGSWFFLGAIFTTIELEPNTAEYEHCGSCTACLDICPTKAFPAPFQLDARRCISYLTIEHHGPVAEELRPMLGNRIYGCDDCLAACPWNKFAATAQEVKYAARPDLIAPRLADLAVLDDSAFRALFSGSPIKRIGRNRFVRNVLYAIGNSNDETLRPVAQQLAEDPDETVADAARWAVGRLDRVSS

SEQ ID NO: 76041 - protein, 343 aa, unidentified
  source 1..343: note = Confluentimicrobium sp.
  REGION 1..343: note = tr|A0A2E3UGB1|A0A2E3UGB1_9RHOB Epoxyqueuosine reductase OS=Confluentimicrobium sp. OX=1931204 GN=queG; PE = 3 SV=1
MSQTLRQRLSDFALQEGFAKTGICTPDAIPQAAARLEAFVGAGRHGQMAWMEERRGWRGDPAALWPAARSVVMLAELYTPGHDPLAVLRQPDRGAISVYAQNRDYHDVVKKRLKRVGRWLLEQEPGAQIKVFVDTAPVMEKPLAQAAGLGWQGKHTNLLSRDLGSWFFLGAIFTTVELEPDAPENEHCGSCTACLDICPTAAFPAPFELDARRCISYLTIEHHGPVDPALRPLMGNRIYGCDDCLAVCPWNKFAAAAHEAKYRAREDLIAPELAELATLDDAAFRALFSGSPIKRIGRDRFVRNVLYAIGNSGDARLRDVAARLTGDPDPAVADAARWAVARL

SEQ ID NO: 76042 - protein, 343 aa, unidentified
  source 1..343: note = Confluentimicrobium sp.
  REGION 1..343: note = tr|A0A0N9NS24|A0A0N9NS24_9RHOB Epoxyqueuosine reductase OS=Confluentimicrobium sp. EMB200-NS6 OX=1609966; GN = queG PE=3 SV=1
MSQTLRQRLSDFALQEGFAKTGICTPDAIPQAAARLEAFVGAGRHGQMAWMEERRGWRGDPAALWPAARSVVMLAELYTPGHDPLAVLRQPDRGAISVYAQNRDYHDVVKKRLKRVGRWLLEQKPGAQIKVFVDTAPVMEKPLAQAAGLGWQGKHTNLLSRDLGSWFFLGAIFTTVELEPDTPENEHCGSCTACLDICPTAAFPAPFELDARRCISYLTIEHHGPVDPALRPLMGNRIYGCDDCLAVCPWNKFAAAAHEVKYRAREDLIAPKLAELATLDDAAFRALFSGSPIKRIGRDRFVRNVLYAIGNSGDARLRDVAARLTGDPDPAVADAAQWAVARL

SEQ ID NO: 76043 - protein, 358 aa, Congregibacter litoralis
  REGION 1..358: note = tr|A4A6L1|A4A6L1_9GAMM Epoxyqueuosine reductase; OS = Congregibacter litoralis KT71 OX=314285 GN=queG PE=3; SV = 1
MTENVLASDGGALVEEIRAWARDLGFAQLGISDIDLGEHEAYLQRWLAAGYQGEMQWMGDHGTKRSRPEELVPGTCRVLTLRMNYLGDGADPMTVLENPHKAYIARYTLGRDYHKLVRKRLAQLAKRIEQRLGQGHYRAFVDSAPVLERALAERAGLGWIAKNTMLINQDAGSWFFLGEIYTDLPLPVDPPQESKHCGSCQACLDICPTKAFAGPFELDARRCISYLTIEHKGSIDPELRPLMGNRIFGCDDCQLVCPWNKFARSSQEKDFQPRHGLDDSELMTLFSWDEDTWAARTEGSALRRIGYERWLRNLAIALGNAPGSPALVEALQRRASHPSELVREHVHWALSRHGALPS

SEQ ID NO: 76044 - protein, 377 aa, unidentified
  source 1..377: note = Consotaella salsifontis
  REGION 1..377: note = tr|A0A1T4QWQ8|A0A1T4QWQ8_9RHIZ Epoxyqueuosine reductase OS=Consotaella salsifontis OX=1365950 GN=queG; PE = 3 SV=1
MNDTRESLRRFLFDDARRLGFDAVGVSSAEDDGVAGSRLAAFLAEERHGTMAWMAETAERRASPKALFPQAKTVIVLGLNYGPEEDPRGLQAHPERGAISVYARNRDYHELIKGRLKELASRLLSRAGGDHDVKVFVDTAPVMEKPAASRAGLGWQGKHTNLVSREFGSWLFLGAIFTTLDLCPDTPSRDLCGSCRACLDACPTKAFPAPYQIDARRCISYLTIETKATVPAELRPAMGNRIYGCDDCLAACPWNKFAQRSREAKLQARDDLKAPALADLLALDEPGFRALFSGSPVKRIGRAKFVSNCLIAAGNSGRAELAEPCRRLMRDDAPLVRAMAVWALHRLVPAEALEQRAAALDVEEDPDVRREWNALDG

SEQ ID NO: 76045 - protein, 313 aa, unidentified
  source 1..313: note = Coprobacter fastidiosus
  REGION 1..313: note = tr|A0A354M242|A0A354M242_9BACT tRNA epoxyqueuosine(34) reductase QueG OS=Coprobacter fastidiosus OX=1099853 GN=queG PE=4 SV=1
MNGFSLKNKIFERAFALGFSACGITPVKEVDATHRLHFDKWLQKGKEAQMQYMRNYKDKRFDPRLLVENARSVLVVALNYYPSIHIPENHPQFALYSYGQDYHIVLKEKLNELFSYINTLISIEGRIFCDTAPIMERYWAQQAGIGFIGKNTQLIIPGKGSFFFLGEIISSLELPWDTPMQNRCGHCNSCIEHCPTQALIPGDFTTLDSNRCISYQTIENRSDIPFEIGSKMNNRVYGCDTCQKVCPWNRFSIPTTIPEFEPSSEFLSLDQEKLEHLTHEDYNRIFKKSAVKRVKYERLLRNINILRKNKSES

SEQ ID NO: 76046 - protein, 313 aa, unidentified
  source 1..313: note = Coprobacter fastidiosus
  REGION 1..313: note = tr|A0A495WBK4|A0A495WBK4_9BACT Epoxyqueuosine reductase OS=Coprobacter fastidiosus NSB1 OX=1349822; GN = BC742_1185 PE=4 SV=1
MNEFSLKNKIFERAFALGFSACGITPVKEVDADCRLHFDKWLQKGKEARMQYMRNYKDKRFDPRLLVENARSVLVVALNYYPSIHIPENHPQFALYSYGQDYHIVLKEKLNELFSYINTLIPIEGRIFCDTAPVMERYWAQQAGIGFIGKNTQLIIPGKGSFFFLGEIISSLELPWDTPMQNRCGHCNSCIEHCPTQALIPGDFTTLDSNRCISYQTIENRSDIPFEIGSKMNNRVYGCDTCQKVCPWNRFSIPTTIPEFEPSSEFLSLDQEKLEHLTHEDYNRIFKKSAVKRVKYEGLLRNINILRKNKSES

SEQ ID NO: 76047 - protein, 303 aa, unidentified
  source 1..303: note = Coprobacter secundus
  REGION 1..303: note = tr|A0A0B2JAX2|A0A0B2JAX2_9BACT Uncharacterized protein OS=Coprobacter secundus OX=1501392 GN=PU94_11675; PE = 4 SV=1
MIKSKAKEIGFAACGIAKAAPVNESVRRHLECWLGEGCQDGMSYMSNHFEKRCDPRLLLEGAQSVISVALNYYPKIRQPDSLPQFAFYAYGVDYHKVVKERLFLLSDFIKTLYPDSHFRCFCDTAPLLEKYWAWKAGIGFIGKNTQLIIPGRGSYFFLGEIVTTALLPFDNPLNNSCGRCRRCIDNCPTAALSQTAIPGLDARKCLSCQTIENRGEISPDIASKMHNRVYGCDTCQQVCPWNRMAKPSQIPDFVPTEELLGLTYERLSSLSREEYNRIFKYSAVKRVKYEGLMRNIRILLSKK

SEQ ID NO: 76048 - protein, 313 aa, unidentified
  source 1..313: note = Coprobacter sp.
  REGION 1..313: note = tr|A0A316SSA7|A0A316SSA7_9BACT tRNA epoxyqueuosine(34) reductase QueG OS=Coprobacter sp.; OX = 1941478 GN=queG PE=4 SV=1
MNIVSIHSDMAEAIRREALRIGFHACGFASAEHVEDNVCHGFKAWLESGYHSRMGYMGNYYDIRCDPSLLHKPVRTIISVALNYFPSERQALNVPQFAVYTYGRDYHEVVKSKLNDLSRYIEAEWSGDNRICCDTAPILERYWAMKAGIGFIGKNTQLIIPGAGSFFFLGEILTSLVLKPSPPLSGGCGHCTRCMDSCPAKALVKPRVLDANRCISYQTIENRGEIPDEIAECLGNRIYGCDTCQDVCPHNRFAKPTEVDEFRPCKDFLQLDAGRLDTLTQEEYNRIFRHSAVKRAKYQGLLRNYKAWKKHNK

SEQ ID NO: 76049 - protein, 342 aa, Coraliomargarita akajimensis
  REGION 1..342: note = tr|D5EIV4|D5EIV4_CORAD Uncharacterized protein; OS = Coraliomargarita akajimensis (strain DSM 45221 / IAM 15411 / JCM 23193 / KCTC 12865 / 04OKA010-24) OX=583355; GN = Cak a_1333 PE=4 SV=1
MTADGVQIRTHLEEAAKALGFHGFGVARLPVELHADYFREWLATGQHGSMGWMERNPERRLDPNEVLPGVRSMIVLSMNYYQPDPPRGYRIAKYALGDDYHNLMLKRVKKLCRILRDEYGGVQRPYVDTGPLLEKPIGVAAGLGWQGKSTILIEPKRGTWSFLANILTTLELPADDPVKDRCGTCTRCLDSCPTQAITAPYQLDARRCISYLTIEHDGAIPVEFREAIGDRLYGCDECLDVCPWNKWAVPTQEAKFAVRELPDLRELLSWDEATFTARMQGSPMRRLKLHRLQRNICVVLGNCGDQDDLPALEQLSDTGDALLAEHARWAIERIRIRVKSLA

SEQ ID NO: 76050 - protein, 340 aa, Coraliomargarita sp.
  REGION 1..340: note = tr|A0A2E0NE41|A0A2E0NE41_9BACT tRNA epoxyqueuosine(34) reductase QueG OS=Coraliomargarita sp.; OX = 2024828 GN=queG PE=4 SV=1
MKNRTSEIRHRIEVEAKNLGFHSFGVTSVPVNLREDYYRDWIAKGKNGSMTWMERNNDRRLHPERLIPEARSILVLAMNYYQPDPDRNYRIAKYALGDDYHNLIFKRLKKLCRILREEFGSMQRPYVDTGPILEKPIAAAAGLGWQGKSTILVEPKRGTWSFLANIVTTLELTPDKASKDRCGSCTRCVDICPTRAITAPYQLDAQRCISYLTIEHDGPIPIEFRAAIGDRLYGCDECLDVCPWNRWAVPHEEAKFAAREFPILRDMLHWSEQIFTEQMQGSPMRRLKINRFKRNICVVLGNVGDAFDLPALQLVAEGSDSLLAEHAQWAINAITLRKKD

SEQ ID NO: 76051 - protein, 340 aa, Coraliomargarita sp.
  REGION 1..340: note = tr|A0A317ZL88|A0A317ZL88_9BACT tRNA epoxyqueuosine(34) reductase QueG OS=Coraliomargarita sp. WN38 OX=2174842 GN=queG PE=4 SV=1
MAIETQKNVDRLKSLAEELGFHQFGVTAVPLKLRSEYYEKWIDEGQHGTMSWMERNNDRRLHPESLIEEARSIIVVAMNYYQPDPERGYRIAKYALGDDYHNLIFKRLKKLCRYMRDEFGSVQRPYVDTGPLLEKPIAEAAGIGWQGKSTILVEPGRGTWSFLGNIVSSLDLPASDPGKDRCGSCTRCIDICPTRAITAPYQLDARKCISYLTIEHDGPIPLEYREAIADRLFGCDECLDVCPWNKWAVPTNEAKFSPRQLPKLREMLFWDDETFRENFRGSPMRRLKLHRFRRNICVVLGNVGEADDVTALQSVAAGSDEMVKEHAEWAIGRIQSRCGS

SEQ ID NO: 76052 - protein, 382 aa, unidentified
  source 1..382: note = Corallincola sp.
  REGION 1..382: note = tr|A0A368NPB3|A0A368NPB3_9GAMM Epoxyqueuosine reductase OS=Corallincola sp. C4 OX=2282215 GN=queG PE=3; SV = 1
MSIKTSPDLIQLTEDIKRWGQELGFQQVGISDLDLRDQKQGMELWLANGYHGEMQYMTAHGDMRYHPEQLHPGALRAITVRMDYLPENAQFAANLSDPNQAYISRYALGRDYHKLIRNRLKKLAQRIAEQIDGVNARPFVDSAPILERPLAAKAGLGWIGKHSLLLDEQAGSWFFLGELLINLPLPVDTASDTAPGCGNCKACITICPTQAIVEPYVVDARRCISYLTIEHPGIIDEALRPLMGNRIYGCDDCQLICPWNRYAQLTQEGDFSPRQQLHPQKLLDLFAWDEATFLKNTEGSPIRRIGHQRWLRNIAIALGNAPYNEAIVTALTNVIQAEPSEMVGEHVGWAIQQQRSKSADYELRRQTQRLINSVERALPRDA

SEQ ID NO: 76053 - protein, 331 aa, Corallococcus coralloides
  REGION 1..331: note = tr|A0A410S0S6|A0A410S0S6_CORCK Putative iron-sulfur cluster binding protein OS=Corallococcus coralloides; OX = 184914 GN=yjeS PE=4 SV=1
MRQLAQDVGFDLIGFARAEPIPPSSLMSWLEAGYDADMDWMGSRAEERLDVSVLLPGARTVLSLANNYWRDDEPSQGSPIARYARGRDYHSTLRDRMKAFRKTINAWYPGLGTYGGVDSGPMMEKVWAARGGLGYVGKNGCLITESHGSWVLLATLILDAEVDAYPDGPVADRCGSCRRCLMACPTGALVGNRQVDARACLSYQTIENRDRDVPEAFRLKFDNLIFGCDICQQVCPLNRKPVFADDERFMPRAVASLGTLELAALTPEQYKELIPGTALARARYDGLRRNAVYALGVARQAHARPLLEKLSGDDSELVRSAARWALLQLEP

SEQ ID NO: 76054 - protein, 341 aa, Corallococcus coralloides
  REGION 1..341: note = tr|H8MT39|H8MT39_CORCM Putative iron-sulfur cluster binding protein OS=Corallococcus coralloides (strain ATCC 25202 / DSM 2259 / NBRC 100086 / M2) OX=1144275; GN = yjeSPE=4 SV=1
MYATQLPTARLRQLAQDVGFDLIGFARAEPIPPSSLMSWLEAGYDADMDWMGSRAEERLDVSVLLPGARTVLSFANNYWRDDEPSQGSPIARYARGRDYHSTLRDRMKAFRKTINAWYPGLGTYGGVDSGPMMEKVWAARGGLGYVGKNGCLITESHGSWVLLATLILDAEVDAYPDGPVADRCGSCRRCLMACPTGALVGNRQVDARACLSYQTIENRDRDVPEAFRLKFDNLIFGCDICQQVCPLNRKPVFADDERFMPRAVASLGTLELAALTPEQYKELIPGTALARARYDGLRRNAVYALGVARQAHARPLLEKLSGDDSELVRSAARWALLQLEP

SEQ ID NO: 76055 - protein, 341 aa, Corallococcus exiguus
  REGION 1..341: note = tr|A0A5C5DVB7|A0A5C5DVB7_9DELT tRNA epoxyqueuosine(34) reductase QueG OS=Corallococcus exiguus; OX = 83462 GN=queG PE=4 SV=1
MYATQLPTARLRQLAQDVGFDLIGFARAEPIPPSSLMSWLEAGYDADMDWMGSRAEERLDVSVLLPGARTVLSFANNYWRDDEPSQGSPIARYARGRDYHSTLRDRMKAFRKTINAWYPGLGTYGGVDSGPMMEKVWAARGGLGYVGKNGCLITESHGSWVLLATLILDAEVDAYPDGPVADRCGSCRRCLMACPTGALVGNRQVDARACLSYQTIENRDRDVPEAFRLKFDNLIFGCDICQQVCPLNRKPVFAEDERFVPRAVASLGTLELAGLTPEQYKELIPGTALARARYDGLRRNAVYALGVARQVHARPLLEKLSGDDSELVRSAARWALLQLEP

SEQ ID NO: 76056 - protein, 336 aa, Corallococcus sp.
  REGION 1..336: note = tr|A0A3A8GBF5|A0A3A8GBF5_9DELT tRNA epoxyqueuosine(34) reductase QueG OS=Corallococcus sp. AB011P OX=2316735 GN=queG PE=4 SV=1
MPTARLRQLAQDVGFDLIGFARAEPIPPSSLMSWLEAGYDADMDWMGSRAEERLDVSVLLPGARTVLSFANNYWRDDEPSQGSPIARYARGRDYHSTLRDRMKAFRKTINAWYPGLGTYGGVDSGPMMEKVWAARGGLGYVGKNGCLITESHGSWVLLATLILDAEVDAYPDGPVADRCGSCRRCLMACPTGALVGNRQVDARACLSYQTIENRDRDVPEAFRLKFDNLIFGCDICQQVCPLNRKPVFADDERFMPRAVASLGTLELAALTPEQYKELIPGTALARARYDGLRRNAVYALGVARQAHARPLLEKLSGDDSELVRSAARWALLQLEP

SEQ ID NO: 76057 - protein, 341 aa, Corallococcus sp.
  REGION 1..341: note = tr|A0A554GLJ6|A0A554GLJ6_9DELT tRNA epoxyqueuosine(34) reductase QueG OS=Corallococcus sp. Z5C101001 OX=2596829 GN=queG PE=4 SV=1
MFSTQLPTARLRELAQQVGFDLIGFARAEPIPPSSLLSWLEAGYDADMDWMGSRAEERLDVSVLLPGARTVLSFANNYWRDDAPSQGSPIARYARGRDYHSTLRDRMKAFRKTLNAWYPGLGSYGGVDSGPMMEKVWAARGGLGYVGKNGCLITPTHGSWVLLATLILDAEVDAYAEGPVADRCGSCRRCLMACPTGALVGHRQVDARACLSYQTIENREREVPEAFRWKFDNLIFGCDICQQVCPLNRKPVFAEDARFTPRAVASLGTLELAALTPEQYQELIPGTALARARYDGLRRNAVYALGVARQAHARPLLEKLSDDGSELVRSAARWALLQMES

SEQ ID NO: 76058 - protein, 374 aa, unidentified
  source 1..374: note = Coriobacteriia bacterium
  REGION 1..374: note = tr|A0A357ZCG0|A0A357ZCG0_9ACTN PBS lyase; OS = Coriobacteriia bacterium OX=2052159 GN=DEB24_02130 PE=4; SV = 1
MGTLQSLEERIRTYALEIGYSAAGFAPADDFDEYIDIINDAGARYDWWKNGAREPMAWARPAQKLAGTKSLIVLIYNSAQVRFPAELCEKLGRIYQARCYFAQPGNINHARLELMRGFLADLGMQSTDAPWLPQRWAAQRSGLASFGKNTFAYASGLGSFIVITTLLVDRELNYDEPCAVSTCPEDCTLCIDACPTKALGAPFELDPRRCIAFNNWMPQVSVIPREMRPLLGQRIHGCDYCQEACPRNKQVLENNEKRPKDSLLELLVKEIEFDRLLHLSAEYYEQWVRPVMYNYITNLRLFQRNAAVAIGNSHDVRYLPDLARELSSESELVRAHVAWALGEIAGEEARHLLQARLVVEEDESVRQEIVAALA

SEQ ID NO: 76059 - protein, 378 aa, unidentified
  source 1..378: note = Corticibacter populi
  REGION 1..378: note = tr|A0A3M6R106|A0A3M6R106_9BURK Epoxyqueuosine reductase OS=Corticibacter populi OX=1550736 GN=queG PE=3; SV = 1
MGQWARELGFSQIGVAGIDLSDAEAGLMAWLEKGFHGEMEYMQRHGLKRARPAELVPGTLSIVTARMDYLPPGTPTDWQGTELAQLGVPERAVVSMYARGRDYHKVLRTRLQRLAERIQAAVGPLGHRVFTDSAPVLEAELARRSGLGWRGKHTLLLSREGGSMFFLGEIFLDMALPPTEPTSSHCGGCRACIAACPTGAIVASGRVDARLCISYLTIEHPGSIPLALRPLMGNRIYGCDDCQLVCPWNKFAQPSTVADFAARPALQSPALLELLGWSEADFLQRTEGSPMRRIGYLRWQRNLAVASGNALHGGHLSAALAAQVRAMLERWRAAPHTPELVREHVDWALASQVAHGLAFTAPGSAPRSPAGAAAPPAS

SEQ ID NO: 76060 - protein, 167 aa, Corynebacterium pseudodiphtheriticum
  REGION 1..167: note = tr|A0A3S0X520|A0A3S0X520_9CORY tRNA epoxyqueuosine(34) reductase QueG (Fragment); OS = Corynebacterium pseudodiphtheriticum OX=37637 GN=queG; PE = 4 SV=1
HCGRCTACLDICPTNAFVGPYVLDARRCISYLTIELKSAIPEDLRPLIGNRVFGCDDCQIVCPWNRFARPTAEGDFKPRHNLDNAELAELFMWDEDKFLSSTEGSPLRRAGYERWLRNLAVGLGNAPSSIPVLEALKARRDYPSELVREHVEWALNQHAGRQCTSSL

SEQ ID NO: 76061 - protein, 384 aa, Cosenzaea myxofaciens
  REGION 1..384: note = tr|A0A198FRI1|A0A198FRI1_9GAMM Epoxyqueuosine reductase OS=Cosenzaea myxofaciens ATCC 19692 OX=1354337; GN = queG PE=3 SV=1
MPSLDLNALAENIKLWGTELGFQQTGICDTDLSIEEPRLQEWLDKQYHGEMAWMAKYGMMRARPHELVPGTLRVISVRMNYLPTEAAFARTLNNPEQGYISRYALGRDYHKVLKQRLKKLGEKITQYCQQYEYQGVVNFRPFVDSAPIMERPLAVKAGLGWVGKHSLVINDKSGSWFFLGELLINLPLPIDAPVEEQCGKCVACMTTCPTAAIVEPYTIDARRCISYLTIEHSGAIPEQFRPLMGNRIYGCDDCQLICPWNRFSPLTEEDDFSPRRELHTPELYTLFQWSEEKFLRTTEGSPIRRIGYLRWLRNISVALGNAPYQDKIVLALQERFGLSDVLDEHLQWAIAQQLAKRNEKEVKIQTSQQKRLVRAITKGLPRDA

SEQ ID NO: 76062 - protein, 350 aa, Coxiella sp.
  REGION 1..350: note = tr|A0A2G1ZYU3|A0A2G1ZYU3_9COXI Epoxyqueuosine reductase OS=Coxiella sp. (in: Bacteria) OX=59288 GN=queG; PE = 3 SV=1
MMNFELKDKIKSWGEALGFQDILISDPNLDSINQRFQESISKNHHADMEYLIKNSLLRTNPSKMVEDTKSIIIARMDYLPPNPKIIETLRDKNKAYIARYALGRDYHRLIRKRLKKLAQQIEAVHGPFNWRPFADSAPVFEKPLAAKAGIGWQGKNTLIINRKAGSYFFLGVLYTSLELPFDPPVVDHCGSCTACLDICPTQAFPAPYQLDSRRCISYWTIENKGSIPVEIREKMGNRVFGCDDCQLICPWNKFAKAATEQAFLPRHQLDTSTLIDLFSWDESTYMKRTEGSALRRTGYQSWLRNLAVGLGNAPPSDEKRHALLAQKTQASELVKEHIDWALNTTFVSSR

SEQ ID NO: 76063 - protein, 320 aa, Coxiella sp.
  REGION 1..320: note = tr|A0A0S7XYV9|A0A0S7XYV9_9COXI 4Fe-4S ferredoxin-type domain-containing protein OS=Coxiella sp. DG_40 OX=1703354 GN=AMJ43_03275 PE=4 SV=1
MNNEICDFNCLADDIKSWGTQLGFTLIGITDIVWAIRESPQWDLPPYPFDAKAVICCAINYLPNDKSRYISRYALGRDYHKVIRKRLRKLVRKINDKIGNFNYRCHVDSNRIPEKHLAARAGLGWQGKNSLIINRHYGSWMFLGEIVTDLPLPIDEPYANHCGKCTACMNACPTQAIVSPGQIDVKRCISYLTIEHRGSIPEDLRHLIGTHIYGCDECQLVCPWNRFAKLTIEQDFQPRHNLNYADLIELFSWSEQDFLRNTEGSAIRRIGYECWLRNIAVALGNMQKDSKIIEALKIRENHSSVLVREHVRWALQKGTL

SEQ ID NO: 76064 - protein, 314 aa, unidentified
  source 1..314: note = Coxiellaceae bacterium
  REGION 1..314: note = tr|A0A359LEY3|A0A359LEY3_9COXI tRNA epoxyqueuosine(34) reductase QueG (Fragment); OS = Coxiellaceae bacterium OX=2026727 GN=queG PE=4 SV=1
TDITQEVVHLKTWVKSGRHGNMSYFEKHSEIYECPQKLLPTTTRVICCRINYPLSQSSSHPIASFAQIQDYSSHIRQLLKIYVAKILEKIRLPQETRVFSGNAPILEKALAAKAGLGWYGKNSILINQDSGSYFFLGEIFTNMPLPLDKPVEDRCGSCFKCGDSCPTKAIITPHKLDARCCVAYLTIEHKGSIPIELRPLIGTKVFGCDICQQACPWNNCRKNQTPPNTTFVLSNHLGSDNLVDWFLWSEQEFLDKTKNTPIKRIGYERWLRNLAVALGNSEPNKEISEALQSRLNHPSALVREHVEWALASTQ

SEQ ID NO: 76065 - protein, 346 aa, unidentified
  source 1..346: note = Coxiellaceae bacterium
  REGION 1..346: note = tr|A0A357MS34|A0A357MS34_9COXI tRNA epoxyqueuosine(34) reductase QueG OS=Coxiellaceae bacterium OX=2026727 GN=queG PE=4 SV=1
MNSNYKYDFKQLALEIKQLGKELGFDQIGITDTDITQEVVHLKTWVKSGRHGNMSYFEKHSEIYECPQKLLPTTTRVICCRINYPLSQSSSHPIASFAQIQDYSSHIRQLLKIYVAKILEKIRLPQETRVFSGNAPILEKALAAKAGLGWYGKNSILINQDSGSYFFLGEIFTNMPLPLDKPVEDRCGSCFKCGDSCPTKAIITPHKLDARCCVAYLTIEHKGSIPIELRPLIGTKVFGCDICQQACPWNNCRKNQTPPNTTFVLSNHLGSDNLVDWFLWSEQEFLDKTKNTPIKRIGYERWLRNLAVALGNSEPNKEISEALQSRLNHPSALVREHVEWALASTQ

SEQ ID NO: 76066 - protein, 300 aa, unidentified
  source 1..300: note = Crassaminicella sp.
  REGION 1..300: note = tr|A0A5C0SGX3|A0A5C0SGX3_9CLOT tRNA epoxyqueuosine(34) reductase QueG OS=Crassaminicella sp. SY095 OX=2599308 GN=queG PE=4 SV=1
MNVKECLKGFCKKLNIERVGIAPIGPYKELEKILKDRIDKGYITGMEEEDIKKRINPKETMPDVASIIVCLFPYFTGYFDSNISKYTYSIDYHRIIKEKLDKIGEFLKERIENFSYKAFVDTGPLVDRYLAYLAGLGYFGINNNLINDKYGSYVFIGYILNNYKFEVDKPLNKTCKKCGECIKKCPGGAILGDFQMNPRRCLSFITQKKEELTQEERDILKKNKMVFGCDICQDVCPHNQNIEHTNMEEFRKNLIYILDEKEVLDMSNKAFKRKYGDRAFSWRGRKIILRNFEVLREIKN

SEQ ID NO: 76067 - protein, 360 aa, unidentified
  source 1..360: note = Crenobacter cavernae
  REGION 1..360: note = tr|A0A345Y388|A0A345Y388_9NEIS Epoxyqueuosine reductase OS=Crenobacter cavernae OX=2290923 GN=queG PE=3; SV = 1
MQEAIENPPNYRELAEQIKAWARELGFADARIGPATLPDGVEPRLEAWLAEGCHGEMAYMEQHGLKRARPYELVPGTLSVISVRMNYWPGAARDAEAVLGDGNAAYLSRYALGRDYHKVLRNRLQALAERVEAAIGGYGYRVFTDSAPVMEVEAAQQAGLGWRGKHTLLINREQGSLFFLGELFTDLPLPADAPTEEGHCGRCKRCLDVCPTGAIVAPYKVDARRCISYLTIELKGAIPEELRPLIGNRVYGCDDCQLVCPWNRFAIDSAEADFAVRHGLDDVSLVELFAWSEEEFKQKMAGSPIYRIGYEKWLSNLAIGLGNAPTSDAVIAALKTRLDSPSMPVSEHVRWALGRHGVVV

SEQ ID NO: 76068 - protein, 360 aa, unidentified
  source 1..360: note = Crenobacter cavernae
  REGION 1..360: note = tr|A0A4Q2JBF3|A0A4Q2JBF3_9NEIS Epoxyqueuosine reductase OS=Crenobacter cavernae OX=2290923 GN=queG PE=3; SV = 1
MQEAIENPPNYRELAAQIKAWARELGFADARIGPATLPDGVEPRLEAWLAEGCHGEMAYMEQHGLKRARPYELVPGTLSVISVRMNYWPGAAKSAEAVLGDGNAAYLSRYALGRDYHKVLRNRLQTLAERVGTAIGGYGYRVFTDSAPVMEVEAAEQAGLGWRGKHTLLINREQGSLFFLGELFTDLPLPADPPTEEGHCGRCKRCLDVCPTGAIVAPYKVDARRCISYLTIELKGAIPEELRPLIGNRVYGCDDCQLVCPWNRFAIDSAEADFAVRHGLDDVSLVELFAWSEEEFKQKMAGSPIYRIGYEKWLSNLAVGLGNAPTSDAVIAALKTRLDSPSMPVSEHVRWALGRHGVVV

SEQ ID NO: 76069 - protein, 362 aa, unidentified
  source 1..362: note = Crenobacter luteus
  REGION 1..362: note = tr|A0A165F5R7|A0A165F5R7_9NEIS Epoxyqueuosine reductase OS=Crenobacter luteus OX=1452487 GN=queG PE=3; SV = 1
MTMQESMENPANYRELAAQIKAWALELGFADARIGPATLPEGVEARLAAWLAEGRHGEMAYMAQHGMKRARPYELVPGTLSVVSVRMNYWPGGAKRAEDVLADGSAAYLSRYALGRDYHKVLRNRLQKLAERVGAAVGAYGHRVFTDSAPVMEVEAAQQAGLGWRGKHTLLLTKNQGSLFFLGELFTDLPLPADEPTDNGHCGRCTQCLSACPTGAIVAPYEVDARRCISYLTIELKGAIPEALRPLIGNRVYGCDDCQLVCPWNRFAVDTAEADFSVRHGLDDVSLVELFGWSEADFKERLAGSPIYRIGYEKWLSNLAVGLGNAPGSDAVVAALRARLDHPSPPVAETVRWALGRHGVVV

SEQ ID NO: 76070 - protein, 359 aa, unidentified
  source 1..359: note = Crenobacter sp.
  REGION 1..359: note = tr|A0A4T0UL27|A0A4T0UL27_9NEIS Epoxyqueuosine reductase OS=Crenobacter sp. GY 70310 OX=2563443 GN=queG; PE = 3 SV=1
MIECGLQNVDYPELARQIKAWALEAGFAGARISRASLPDEARAALEAWLADGCHGQMDYMARHGTLRLDPAGLVPGALSVVSLRMDYWPDARDAHAVLADGEAAYVSRYALGRDYHKVLRKRLQALASRIEGEVGAYGYRVFTDSAPLAEVSFAAQAGLGWRGKHTLLLNRDAGSLFFLGEIVTDLPLPEDAAEEGHCGRCTRCIDACPTGAIVAPYRVDARLCISYLTIELPGAIPEALRPRLGNRVYGCDDCQLSCPWNRFARLSGEGDFAVRHGLDAASLAELFAWSEADFRERTAGSPIWRIGYQRWLRNLAVGLGNAPATPAVLAALAARRNDASALVREHVEWALARHGADAR

SEQ ID NO: 76071 - protein, 315 aa, unidentified
  source 1..315: note = Crenotalea thermophila
  REGION 1..315: note = tr|A0A1I7NLA9|A0A1I7NLA9_9BACT Epoxyqueuosine reductase OS=Crenotalea thermophila OX=1393122 GN=queG; PE = 3 SV=1
MNPVAARHTALVKQLSRKLGFDYCGIARAATLDEDARRLEKWLNKGYHGTMVYMERYFDLRIDPRKLVPGAQSVITLLMNYFPARKQRADSYRISKYAYGRDYHRVIKKKLKQLLKSLQEQIGKIQGRGFVDSAPVLERAWAVRSGLGWVGKNGNLITRQQGSFLFIATLITDLELVYDDPFAKDYCGTCTRCIDACPTQAILPDKIIDASRCISYYTIELKAHIYPQEAEGKWKDWIFGCDICQDVCPWNRFSRVSQEADLEPVPEILDFSTQEWEQLTEEKFVELFGHTPLKRAGWEGLQRNIRLIKKNQTNF

SEQ ID NO: 76072 - protein, 357 aa, Crenothrix polyspora
  REGION 1..357: note = tr|A0A1R4H7F9|A0A1R4H7F9_9GAMM Epoxyqueuosine reductase OS=Crenothrix polyspora OX=360316 GN=yjeS PE=3; SV = 1
MELIDSNNNLAEQIKQWGLALGFQQVGITDTHLAEAEQHLQRWLAKDYHGEMAYMHQHGLKRSRPALLHEGTVSVICVRMDYLPEATAAMDNVLADPTAAYISRYALGRDYHKILRKRLQKLADKIQAEIGDFGYRAFVDSAPVLEKALAEKAGLGWIGKHSNLINRKAGSWFFLGEIYTDLPLTIDVPATVHCGGCVACLDICPTQAIVAPFQVDARRCVSYLTIELHGSIPVGLRPLIGNRIYGCDDCQLACPWNRFAKLTSEGDFSPRHRLNTQQLVDVFAWTEDEFLTKTEGSAIRRIGYERWLRNIAVALGNAPTSESVINALKLRLDYDSEMVQEHLQWALEQHHENPLKK

SEQ ID NO: 76073 - protein, 353 aa, Crenothrix polyspora
  REGION 1..353: note = tr|A0A1R4H1D4|A0A1R4H1D4_9GAMM Epoxyqueuosine reductase OS=Crenothrix polyspora OX=360316 GN=yjeS PE=3; SV = 1
MELTDSNNLAKQIKHWGLELGFQQVGITDTNLSDAEQHLQHWLAQDYHGELDYMHRHGLKRSRPALLHEGTISVISVRMDYLPESATAMANTLADATVAYISRYALGRDYHKILRKRLQKLADKIQAEIGNFGYRAFVDSAPVLEKALAEKAGLGWIGKHSNVINRKAGSWFFLGEIYTDLPLPTDTPATTHCGACVACLDICPTQAIVAPYQVDARRCVSYLTIELHGAIPVEFRPLIGNRIYGCDDCQLVCPWNRFAKLTHEGDFNPRHSLNTQQLLDVFAWPEDEFLSKTEGSAIRRIGYARWLRNIAVALGNAPTSNAVINALKSRLDNDSEMVREHIQWALDQHLILS

SEQ ID NO: 76074 - protein, 361 aa, Crenothrix sp.
  REGION 1..361: note = tr|A0A1Y2ZZB6|A0A1Y2ZZB6_9GAMM Epoxyqueuosine reductase OS=Crenothrix sp. D3 OX=1880899 GN=queG PE=3 SV=1
METNTAQQLATLALAIKQWGLELGFAQVGISDIDLTSAEQHLNQWLARGFHGDMDYMQRHGDKRSRPALLQEGTVRVISVRLNYLPETRQIMEQSLNDSTAAYISRYALGRDYHKMMRQRLQQLIDKIQAEVGFNSTMRAFVDSAPVLEKAIAEKAGLGWIGKHSNLINRQAGSWFFLGEIYTNLPLPTDNKATAHCGECRACLDICPTQAIVAPYQVDARRCVSYLTIELHGAIPEPLRPLIGNRIYGCDDCQIICPWNRFAKLTAENDFNPRQQLNSQQLLAVFAWSEAEFLTKTEGSAIRRIGYERWLRNIAVALGNAPTSPLIIDALQIRLNDASELVKEHILWALAQQHKPTVNNR

SEQ ID NO: 76075 - protein, 314 aa, unidentified
  source 1..314: note = Criblamydia sequanensis
  REGION 1..314: note = tr|A0A090D236|A0A090D236_9BACT Uncharacterized protein OS=Criblamydia sequanensis CRIB-18 OX=1437425; GN = CSEC_1217 PE=4 SV=1
MDVALDEIVAKAKELGFDDAKVTEPTVPEEDILAYFSWLDEGLQADLHYMENKIRVEPKNLLPGAKSAIFFASYYKQPKEDFKPGIGVIASYARGKDYHNIHRKRLKQFIFWLDTKTLNTASFKAFSDSTPILEKALAQKAGLGFMGKNTLLIHRKLGTFFLLSGILTTLDLPKSVSLPRMPRCGSCNRCIDACPTGALKPYKLDAAKCLSNILIESDGPVSETIKSKNPGYVFGCDICQDVCPHNARKKPSTHPDFSGESGFGSYLDEDTLSKIENNPELLFGTPLKRRGFKGLRENAKSLPWKLESNEGLNP

SEQ ID NO: 76076 - protein, 346 aa, unidentified
  source 1..346: note = Cribrihabitans marinus
  REGION 1..346: note = tr|A0A1H7DIA6|A0A1H7DIA6_9RHOB Epoxyqueuosine reductase OS=Cribrihabitans marinus OX=1227549 GN=queG; PE = 3 SV=1
MKDGSALKQKLVAQALEEGFVAARLCRPWDVPEVPGRLAGFVEAGYHGQMGWMAERMHWRGNPAALWPEAKSVIMLAESYAPEQDPLAILERPDRGAISVYARNRDYHDLVKKRLKRLARWLIAEAGGEVKVFVDTAPVPEKALGQAAGLGWQGKHTNLLSRDWGNWAFLGSVFSTLDLPADAPEVDHCGSCRACLDICPTDAFPAPYRLDARRCISYLTIEHKGPVDEELRGKMGNRIYGCDDCLAVCPWNKFAVAASDMRYAAREALEAPHLADLAGLDDASFRAMFSGSPIKRIGRDRFVRNVLYAIGNSGDPSLRPAARARADDADPTVVDAARWALAKLPE

SEQ ID NO: 76077 - protein, 324 aa, unidentified
  source 1..324: note = Crinalium epipsammum
  REGION 1..324: note = tr|K9W326|K9W326_9CYAN Epoxyqueuosine reductase; OS = Crinalium epipsammum PCC 9333 OX=1173022 GN=queG PE=3; SV = 1
MLVSSDEIKQKALELGFHQVGIADANATNGVEVQRLQAWMALGYHADMEWMANPKRHDIHLLMPEVKSVICVALNYYTPHQRPESREYGKISRYGWGRDYHKVLHKKLKALSNWLQEQSEGIQARYYADTAPVQDKVWAQRAGIGWIAKNGNVITREFGSWVFLGEVLTNLELTADTPHTHHCGNCTRCIEACPTNAIRAVAQDDAQGYPFVIDANRCIAYHTIENRAEELPDAIAPHLQGWIAGCDICQDVCPWNQRFAKNTDVADFQPYPANIAPRLTELAEISDAEWNQRFTASALRRIKPEMLRRNAKANLATLQTPFDD

SEQ ID NO: 76078 - protein, 309 aa, Croceibacter atlanticus
  REGION 1..309: note = tr|A3U524|A3U524_CROAH Epoxyqueuosine reductase; OS = Croceibacter atlanticus (strain ATCC BAA-628 / HTCC2559 / KCTC 12090) OX=216432 GN=queG PE=3 SV=1
MNTKAQYSAFIKNEAKRLGFMSCGISKAEFLEAEAPRLEEWLSKNRHGEMQYMENYFDKRLDPTKLVEGSKSVVSLLLNYYPSETQTKESYKISKYAYGTDYHFVIKDKLKTLLHSIQEEIGDVHGRAFVDSAPVLDKAWAAKSGLGWIGKHSNLLSKQAGSFYFIAELIIDLELDYDTPVTDHCGTCTACIDACPTQAIIEPYKVDGSKCISYLTIELKNEIPNGFSNQMDDWMFGCDVCQDVCPWNRFSKPHNEPLFNPHPELLTKSKSEWQELTKEVFAEIFKKSAVKRTKFTGLKRNINFLNSED

SEQ ID NO: 76079 - protein, 363 aa, Croceicoccus marinus
  REGION 1..363: note = tr|A0A1Z1FDP4|A0A1Z1FDP4_9SPHN Epoxyqueuosine reductase OS=Croceicoccus marinus OX=450378 GN=queG PE=3; SV = 1
MNGSSADRLERLRQALLAQARKEGFVAAGIASAGEEPRRIARLKGWLDDGRHGSMGWMEDRADQRAAPQTLWPEAQSVIALGMSYAPGHDPLALEGQGDRARISVYAQGRDYHDTVKKALKRLARWLVEEARREGIEAGVKVFVDTAPVMEKPLGEAAGIGWQGKHTNMVSRTHGSWLFLGAIYTTLPLRADDIHQDRCGSCSACLDACPTNAFPAPRQLDARRCISYLTIEHKGPIPEEFRKPMGNRIYGCDDCLAVCPWNSFAQSAAANRAFLPRAELVAPRLAELLALDDAGFRALFSGSPIKRIGRDRFVRNCLIAAGNSGDAVLIEPVAALLDDPDPVVAEAANWALAQLEQALQPAG

SEQ ID NO: 76080 - protein, 357 aa, unidentified
  source 1..357: note = Croceicoccus naphthovorans
  REGION 1..357: note = tr|A0A0G3XF01|A0A0G3XF01_9SPHN Epoxyqueuosine reductase OS=Croceicoccus naphthovorans OX=1348774 GN=queG; PE = 3 SV=1
MPESDGVVLSRLREKMLQRAKGEGFVAVGIADAATDPARADHLAEWLDAGFHATMKWMEGRADQRAAPQTLWPEARRVIALGMSYAPANDPLLLAEAADRARISVYAQGRDYHDVVKKALKRLARWLVEEAKAEGLDAGVKVFVDTAPVMEKPLGEAAGIGWQGKHSNLVSRSHGSWLFLGAIYTTLDLPVDQPHAHRCGSCRRCLDACPTDAFPREGVVDARRCISYLTIEHHGPIPHEFREAMGNRIYGCDDCLAVCPWNSFASAAAANRAFLPRAELVAPRLAELLALDDKGFRSLFSGSPIKRIGRNRFVRNCLIAAGNSGDQSLSAPVAALLSDPDPVVAEAAEWATARLTL

SEQ ID NO: 76081 - protein, 356 aa, unidentified
  source 1..356: note = Croceicoccus ponticola
  REGION 1..356: note = tr|A0A437GXS2|A0A437GXS2_9SPHN Epoxyqueuosine reductase OS=Croceicoccus ponticola OX=2217664 GN=queG; PE = 3 SV=1
MELRERLIARAAEEGFAAVGIADAGTDPARAARLTDWLKDGNHATMEWMEGRADQRAAPQTLWPDARRVIALGMNYAPAADPLALADRGELGRISVYAQGRDYHDVVKKALKRLARRLVEEARRAGLDAGVKVFVDTAPVMEKPLGEAAGIGWQGKHSNMVSRQHGSWLFLGAIYTTLDLPVDEAHVDRCGSCSKCMDACPTDAFPAPRVVDARRCISYLTIEHKGPIPHEFREAMGNRIYGCDDCLAVCPWNSFAEAAAANMAFLPRAELAAPRLTELLALDDAGFRALFSGSPIKRIGRDRFMRNCLIAAGNSANAALISVVAGLRSDRDPVVAEAADWAAARLDRIALGPVTP

SEQ ID NO: 76082 - protein, 377 aa, Croceicoccus sp.
  REGION 1..377: note = tr|A0A2D8D7V5|A0A2D8D7V5_9SPHN Epoxyqueuosine reductase OS=Croceicoccus sp. OX=1927144 GN=queG PE=3 SV=1
MRLCPQTRKIRLRHLNDASADRLERLRQALLTRAQEEGFVAAGIAGAGEDPRRIARLKGWLDEGRHGSMGWMEDRADQRGAPQTLWPEAQSVIALGMSYAPGHDPLALEGQGDRARISVYAQGRDYHDTVKKALKRLARWLVEEARREGIEAGVKVFVDTAPVMEKPLGEAAGIGWQGKHTNMVSRTHGSWLFLGAIYTTLPLRADEVHPDRCGSCSACLDACPTNAFPAPRQFDARRCISYLTIEHKGPIPEEFREAMGNRIYGCDDCLAVCPWNSFAQSAAANRAFLPRAELVAPRLAELLALDDAGFRALFSGSPIKRIGRDRFVRNCLIAAGNSGEAALIEPVGALLTDPDPVVAEAAGWALARLERALQPVG

SEQ ID NO: 76083 - protein, 310 aa, Croceitalea dokdonensis
  REGION 1..310: note = tr|A0A0P7A4K4|A0A0P7A4K4_9FLAO Epoxyqueuosine reductase OS=Croceitalea dokdonensis DOKDO 023 OX=1300341; GN = queG PE=3 SV=1
MNQKTTYAQQIKKEAKRLGFLSCGISKAQFLEEEAPRLEHWLKENRHGKMQYMERYFDKRLDPRLLVDDAKSVISVLLNYYPSETQGTETYKISKYAYGRDYHHVIKGKLRELYEFIQDAIGEVNGRAFVDSAPVLDKAWAAKSGLGWMGKHSNLLTQQVGSFYFIAELIVDLELAYDTPVTDHCGTCTACMDACPTEAIVAPYQVDGSKCISYFTIELKEELPTEFSGKFDEWMFGCDVCQDVCPWNRFSKPHSEPLFDPHPDLLSMTKKDWEEITEDVFKKVFKKSAVKRTKFSGLQRNIKFLKKADR

SEQ ID NO: 76084 - protein, 307 aa, unidentified
  source 1..307: note = Croceivirga radicis
  REGION 1..307: note = tr|A0A1V6LU98|A0A1V6LU98_9FLAO Epoxyqueuosine reductase OS=Croceivirga radicis OX=1929488 GN=queG PE=3; SV = 1
MISKATHSQMIKTEAERLGFLSCGISKAGFLEEEAPRLEKWLQANLHGQMGYMANHFDKRLDPTKLVEGAKSVISLLLNYFPEEKQRPNSYKISKYAYGKDYHYVIKNKLKQLINFIQDEIGEVDGRAFVDSAPVLDKAWAAKSGLGWIGKNSNLITQKVGSFYFIAELIVDLDLEYDLPTTDHCGTCTACIDACPTQAIIAPYVVDGSKCISYLTIELKEAIPSAFSEKMDNWMFGCDVCQDVCPWNRFSVPHDEPEFKAREELLNYSKQEWEELTQEVFQEIFRKSAVKRTKYKGLMRNITALKR

SEQ ID NO: 76085 - protein, 388 aa, unidentified
  source 1..388: note = Crocinitomicaceae bacterium
  REGION 1..388: note = tr|A0A2E2TBD2|A0A2E2TBD2_9FLAO Epoxyqueuosine reductase OS=Crocinitomicaceae bacterium OX=2026728; GN = queG PE=3 SV=1
MQRYLVKKFATVFFLTFCPKKFVLYCPLVDIPQTIPAEKYKNILRLSLNVPSKKYFTFPIVLYILIIIFALFLISYLFLLENTYKNTHAIKQKAHDLGFEEIGISKAEFLNDEAKKLEAWLNNNHQGEMAYMANHFDMRTDPRKLVPGAKSVISLSYNYYTEAEQEDPKAPKISKYAYGRDYHKVVRKKLKALLQFVQEEIGDVDGRAFVDSAPVMERVWAQKSGLGWIGKNTLLLTKRKGSYFFLAELILDLELDYDGPVKDHCGSCTKCIDACPTDAIYAPYQMDASKCISYLTIELKDKIPSQFKGKMEGWMYGCDICQEVCPINAKSKNHQEPQFNPRKELLRKDRQEWEEITEEVFTKLFEGSPVKRTKYAGLKRNIDFLKKA

SEQ ID NO: 76086 - protein, 313 aa, unidentified
  source 1..313: note = Crocinitomicaceae bacterium
  REGION 1..313: note = tr|A0A1Z8S389|A0A1Z8S389_9FLAO Epoxyqueuosine reductase OS=Crocinitomicaceae bacterium TMED45 OX=1986728; GN = queG PE=3 SV=1
MSKSKHVAAERAAWIKRRAKELGFTSVGISVAKELTEEAPRLETWLKEGMHGEMAYMEGHFDKRLDPRKLLPGTKSVVSLLFNYHNPHGQSDPEAPRIAQYAFGEDYHFVLKWKLKELLKWMRAEWGDVGGRVYVDSAPILERAWAERSGLGWIGKHSLLLNKHAGSYFYLAEMMLDLELEPDAPVTDHCGSCTRCIDACPTNAIIQPYVVDGSKCISYFTIELRGAIPEPVHGQMENWMFGCDICQEVCPWNRHASPTTEPRFSPHPRLLDMTKSDWLDLTEDVFREVFKDSAVKRTGWMGLQRNISFLGDA

SEQ ID NO: 76087 - protein, 307 aa, Crocinitomix sp.
  REGION 1..307: note = tr|A0A1J5L314|A0A1J5L314_9FLAO Epoxyqueuosine reductase OS=Crocinitomix sp. MedPE-SWsnd OX=1860084; GN = queG PE=3 SV=1
MTKAELSSFVKSHADRLGFLSCGISKVVFLEKEASHLENWLNNNYNGKMAYMANHFDKRLNPALLVDDAKSVISVLVNYFPEKDLFEDKELKLSKYAYGKDYHQVIRKNLNELIEIIKEEVGDVNARCFTDSAPVLDKAWAERAGLGWIGKNANLISTQKGSFFFIGEIIIDLELEYDEPATDHCGTCTKCIEACPTEAIIKPQVVDGSKCISYLTIELKDELIPQKFEDQMKGWMFGCDICQDICPWNRFSVPHNQESFLPHPDLSQTDFTELSKETFNLLFQKSAVKRTKFEGLKRNIKFVQNKA

SEQ ID NO: 76088 - protein, 309 aa, Crocinitomix sp.
  REGION 1..309: note = tr|A0A2W1NIM5|A0A2W1NIM5_9FLAO Epoxyqueuosine reductase OS=Crocinitomix sp. SM1701 OX=2219161 GN=queG; PE = 3 SV=1
MREDIPFSEQIKAQALDLGFMSCGISEATFLEKEAPILENWLNNNYNGKMAYMANHFDKRLDPRLLVDDAKSVISVMLNYYPEKDLFADAPLKISKYAYGQDYHSVIKEKLGRLLEFIVENSEEEINARVFTDSAPVLDKAWAERSGLGWQGKNGMLISKQKGSFFFVGEIILDKVLTYDQASTANHCGTCTKCIDACPTDAIKSANVIDGSKCISYLTIELKDEVIPNAFKDKMEGWFFGCDICQDVCPWNRFSTPANSSDFVPHPDLSNTEWTELTEDIFREIFRHSAVKRTKFKGLKRNIGFVNTI

SEQ ID NO: 76089 - protein, 309 aa, unidentified
  source 1..309: note = Crocosphaera chwakensis
  REGION 1..309: note = tr|A3IWQ0|A3IWQ0_9CHRO Epoxyqueuosine reductase; OS = Crocosphaera chwakensis CCY0110 OX=391612 GN=queG PE=3; SV = 1
MQELTKKIKQKALEIGFHKVGIARVNTDYQDHAVDHLQAWLNLGYQAEMAWMNNPKRFDIRQCMPDVQSVISVALNYYTPHQQSEDKKHGKISRYGWGRDYHKVMQKKLKALSQWLENEDNTIKTRYYVDTGPIQDKVWAQRAGIGWIAKNSNIITREYGSWVFLGEILTNLNLISDTPHTEHCGTCTRCIEACPTNAIARPFVVDANRCIAYHTIENRAEQLPKTIADNLQGWVAGCDICQEVCPWNQRFSQETDIPDFQPYSGNIAPKLEKLADLTHEKWQQQFPASALRRIKPTMWQRNARANLEE

SEQ ID NO: 76090 - protein, 325 aa, unidentified
  source 1..325: note = Crocosphaera subtropica
  REGION 1..325: note = tr|B1WR45|B1WR45_CROS5 Epoxyqueuosine reductase; OS = Crocosphaera subtropica (strain ATCC 51142 / BH68); OX = 43989 GN=queG PE=3 SV=1
MTWLLNLFPSEKGVSKMQELTEKIKQKAIEIGFHKVGIAKVDTEYQDNAVNRLQAWLRLGYQADMAWMNNPKRFDIRQCMPEVQSVISVALNYYTPHQQSEDKKHGKISRYGWGRDYHKVMQKKLKALSQWLDDQDDNMKTRYYVDTGPVQDKVWAQRAGIGWIAKNSNVITREYGSWVFLGEILTNLNLIPDPPHTEHCGTCTRCIEACPTNAIARPFVVDANRCIAYHTIENRAEKLPEAIADNLQEWVAGCDICQEVCPWNQRFAQETDIPDFQPYSGNIAPDLEQLADMTEEQWQQQFPASALRRIKPTMWQRNARANLEE

SEQ ID NO: 76091 - protein, 309 aa, unidentified
  source 1..309: note = Crocosphaera watsonii
  REGION 1..309: note = tr|G5IZ58|G5IZ58_CROWT Epoxyqueuosine reductase; OS = Crocosphaera watsonii WH 0003 OX=423471 GN=queG PE=3; SV = 1
MQELTQQIKEKALEIGFHKVGIAKVDTDYQDNAVEHLQTWLGLGYQAEMAWMNNPKRFDIRQCMPEVQSVISVALNYYTPHQHSQDKQQGKISRYGWGRDYHRVMEKKLKALSLWLANQDNNIKTRYYVDTGPIQDKVWAMRSGIGWIAKNSNVITREYGSWVFLGEIITNLHLIADTPHTEHCGTCTRCLEACPTGAIASPFVVDANLCIAYHTIENRAEHLPKDIVKNLQGWIAGCDICQEVCPWNQRFSQVSDVPDFQPYSGNIAPNLEELVNIDQEKWQEKFPASALRRIKPRMWQRNARANLET

SEQ ID NO: 76092 - protein, 309 aa, unidentified
  source 1..309: note = Crocosphaera watsonii
  REGION 1..309: note = tr|T2IJB9|T2IJB9_CROWT Epoxyqueuosine reductase; OS = Crocosphaera watsonii WH 8502 OX=423474 GN=queG PE=3; SV = 1
MQELTQQIKEKALEIGFHKVGIAKVDTDYQDNAVEHLQTWLGLGYQAEMAWMNNPKRFDIRQCMPEVQSVISVALNYYTPHQHSQDKQQGKISRYGWGRDYHRVMEKKLKALSLWLANQDNNIKTRYYVDTGPIQDKVWAMRSGIGWIAKNSNVITREYGSWVFLGEIITNLHLIADTPHTEHCGTCTRCLEACPTGAIASPFVVDANLCIAYHTIENRAEHLPKDIVKNLQGWIAGCDICQEVCPWNQRFYQVSDVPDFQPYSGNIAPNLEELVNIDQEKWQEKFPASALRRIKPRMWQRNARANLET

SEQ ID NO: 76093 - protein, 379 aa, Cronobacter condimenti
  REGION 1..379: note = tr|K8AIN0|K8AIN0_9ENTR Epoxyqueuosine reductase; OS = Cronobacter condimenti 1330 OX=1073999 GN=queG PE=3 SV=1
MSEPLDLNQLAQKIKQWGAELGFQQVGITDTDLSASEGALQAWLDKQYHGEMEWMARHGMLRARPHELLPGTLRVISVRMNYLPANAAFASTLKDPSLGYVSRYALGRDYHKLLRNRLKKLGETLQQHCASLNFRPFVDSAPLLERPLAEKAGLGWTGKHSLILSRDAGSFFFLGELLVDLPLPVDKPVEEGCGRCVACMTICPTGAIVEPYTVDARRCISYLTIELEGAIPEEFRPLMGNRIYGCDDCQLICPWNRFSQLTDETDFSPRQALHAPKLIELFAWSEAHFLKVTEGSAIRRIGHLRWLRNIAVALGNAPWDEANLTALQQRKGEQPLLDEHIDWAIAQQIDKRNACVVEVQLPQKQRLVRVIEKGLPRDA

SEQ ID NO: 76094 - protein, 379 aa, Cronobacter dublinensis
  REGION 1..379: note = tr|K8ATT9|K8ATT9_9ENTR Epoxyqueuosine reductase; OS = Cronobacter dublinensis 1210 OX=1208656 GN=queG PE=3; SV = 1
MSEPLDLNQLAQKIKQWGAELGFQQVGITDTDLSASEGALQAWLDKQYHGEMEWMARHGMLRARPHELLPGTLRVISVRMNYLPANAAFARTLKDPSLGYVSRYALGRDYHKLLRNRLKKLGETLQAHCASLNFRPFVDSAPLLERPLAEKAGLGWTGKHSLILNRDAGSFFFLGELLVDLPLPVDKPVEEGCGRCVACMTICPTGAIVEPYTVDARRCISYLTIELEGAIPEEFRPLMGNRIYGCDDCQLICPWNRFSQLTDEADFSPRQALHAPKLIELFGWSEAHFLKVTEGSAIRRIGHLRWLRNIAVALGNAPWDEANIVALRQRKGEHPLLDEHIDWAIAQQTDKRNACVVEVQLPQKQRLVRVIEKGLPRDA

SEQ ID NO: 76095 - protein, 379 aa, Cronobacter dublinensis; identical to SEQ ID NO: 76094
  REGION 1..379: note = tr|A0A0K2P6D1|A0A0K2P6D1_9ENTR Epoxyqueuosine reductase OS=Cronobacter dublinensis subsp. dublinensis LMG 23823 OX=1159554 GN=queG PE=3 SV=1

SEQ ID NO: 76096 - protein, 379 aa, Cronobacter malonaticus
  REGION 1..379: note = tr|V5TUP8|V5TUP8_9ENTR Epoxyqueuosine reductase; OS = Cronobacter malonaticus OX=413503 GN=queG PE=3 SV=1
MSEPLDLNQLAQKIKQWGAELGFQQVGITDTDLSASEGALQAWLDKQYHGEMEWMARHGMLRARPHELLPGTLRVISVRMNYLPANAAFASTLKDPSLGYVSRYALGRDYHKLLRNRLKKLGETLQQHCASLNFRPFVDSAPILERPLAEKAGLGWTGKHSLILSRDAGSFFFLGELLVDLPLPVDKPVEEGCGRCVACMTICPTGAIVEPYTVDARRCISYLTIELEGAIPEEFRPLMGNRIYGCDDCQLICPWNRFSQLTDEADFSPRKSLHAPKLIELFSWSEAHFLKVTEGSAIRRIGHLRWLRNIAVALGNAPWDEANITALRQRKGEHPLLDEHIDWAIAQQTDKRNACVVEVQLPQKQRLVRVIEKGLPRDA

SEQ ID NO: 76097 - protein, 384 aa, Cronobacter muytjensii
  REGION 1..384: note = tr|A0A2T7AYT3|A0A2T7AYT3_9ENTR Epoxyqueuosine reductase OS=Cronobacter muytjensii OX=413501 GN=queG PE=3; SV = 1
MPWSVMSEPLDLNQLAQKIKQWGAELGFQQVGITDTDLSASEGALQAWLDKQYHGEMEWMARHGMLRARPHELLPGTLRVISVRMNYLPANAAFARTLKDPSLGYVSRYALGRDYHKLLRNRLKKLGETLQAHCASLNFRPFVDSAPILERPLAEKAGLGWTGKHSLILNRDAGSFFFLGELLVDLPLPVDKPVEEGCGRCVACMTICPTGAIVEPYTVDARRCISYLTIELEGAIPEEFRPLMGNRIYGCDDCQLICPWNRFSQLTDEADFSPRQALHAPKLIELFGWSEAHFLKVTEGSAIRRIGHLRWLRNIAVALGNAPWDEANIVALRQRKGEHPLLDEHIDWAIAQQTDKRNACVVEVQLPQKQRLVRVIEKGLPRDA

SEQ ID NO: 76098 - protein, 379 aa, Cronobacter sakazakii
  REGION 1..379: note = tr|A0A384EUN6|A0A384EUN6_CROSK Epoxyqueuosine reductase OS=Cronobacter sakazakii OX=28141 GN=queG PE=3; SV = 1
MSEPLDLNQLAQKIKQWGAELGFQQVGITDTDLSASEGALQAWLDKQYHGEMEWMARHGMLRARPHELLPGTLRVISVRMNYLPARAAFASTLKDPSLGYVSRYALGRDYHKLLRNRLKKLGETLQQHCASLNFRPFVDSAPILERPLAEKAGLGWTGKHSLILSRDAGSFFFLGELLVDIPLPVDKPVEEGCGRCVACMTICPTGAIVEPYTVDARRCISYLTIELEGAIPEEFRPLMGNRIYGCDDCQLICPWNRFSQLTDEADFSPRQALHAPKLIELFSWSEAHFLKVTEGSAIRRIGHLRWLRNIAVALGNAPWDEANITALQQRKGEHPLLDEHIDWAIAQQTDKRNACVVEVQLPQKQRLVRVIEKGLPRDA

SEQ ID NO: 76099 - protein, 403 aa, Cronobacter sakazakii
  REGION 1..403: note = tr|K8CFB2|K8CFB2_CROSK Epoxyqueuosine reductase; OS = Cronobacter sakazakii 701 OX=1208663 GN=queG PE=3 SV=1
MRSQSAGQMECGILASFLFIPWSVMSEPLDLNQLAQKIKQWGAELGFQQVGITDTDLSASEGALQAWLDKQYHGEMEWMARHGMLRARPHELLPGTLRVISVRMNYLPARAAFASTLKDPSLGYVSRYALGRDYHKLLRNRLKKLGETLQQHCASLNFRPFVDSAPILERPLAEKAGLGWTGKHSLILSRDAGSFFFLGELLVDIPLPVDKPVEEGCGRCVACMTICPTGAIVEPYTVDARRCISYLTIELEGAIPEEFRPLMGNRIYGCDDCQLICPWNRFSQLTDEADFSPRQALHAPKLIELFSWSEAHFLKVTEGSAIRRIGHLRWLRNIAVALGNAPWDEANITALQQRKGEHPLLDEHIDWAIAQQTDKRNACVVEVQLPQKQRLVRVIEKGLPRDA

SEQ ID NO: 76100 - protein, 379 aa, Cronobacter sp.
  REGION 1..379: note = tr|A0A5J6X3Z5|A0A5J6X3Z5_9ENTR tRNA epoxyqueuosine(34) reductase QueG OS=Cronobacter sp. JZ38; OX = 1906275 GN=BJP61_03725 PE=4 SV=1
MSEPLDLNQLAQKIKQWGAELGFQQVGITDTDLSASEGALQAWLDKQYHGEMEWMARHGMLRARPHELLPGTLRVISVRMNYLPANAAFARTLKDPSLGYVSRYALGRDYHKLLRNRLKKLGETLQAHCASLNFRPFVDSAPILERPLAEKAGLGWTGKHSLILNRDAGSFFFLGELLVDLPLPVDKPVEEGCGRCVACMTICPTGAIVEPYTVDARRCISYLTIELEGAIPEEFRPLMGNRIYGCDDCQLICPWNRFSQLTDEADFSPRQALHASKLIELFGWSEAHFLKVTEGSAIRRIGHLRWLRNIAVALGNAPWDEANIVALRQRKGEHSLLDEHIDWAIAQQTDKRNACVVEVQLPQKQRLVRVIEKGLPRDA

SEQ ID NO: 76101 - protein, 384 aa, Cronobacter turicensis
  REGION 1..384: note = tr|A0A2T7B394|A0A2T7B394_9ENTR Epoxyqueuosine reductase OS=Cronobacter turicensis OX=413502 GN=queG PE=3; SV = 1
MPWSVMSEPLDLNQLAQKIKQWGAELGFQQVGITDTDLSASEGALQAWLDKQYHGEMEWMARHGMLRARPHELLPGTLRVISVRMNYLPANAAFASTLKDPSLGYVSRYALGRDYHKLLRNRLKKLGETLQQHCASLNFRPFVDSAPILERPLAEKAGLGWTGKHSLILSRDAGSFFFLGELLVDLPLPVDKPVEDGCGRCVACMTICPTGAIVEPYTVDARRCISYLTIELEGAIPEEFRPLMGNRIYGCDDCQLICPWNRFSQLTDEADFSPRQALHAPKLIELFSWSEAHFLKVTEGSAIRRIGHLRWLRNIAVALGNAPWDEANITALQQRKGEHPLLDEHIDWAIAQQTDKRNACVVEVQLPQKQRLVRVIEKGLPRDA

SEQ ID NO: 76102 - protein, 379 aa, Cronobacter turicensis
  REGION 1..379: note = tr|C9Y183|C9Y183_CROTZ Epoxyqueuosine reductase; OS = Cronobacter turicensis (strain DSM 18703 / LMG 23827 / z3032) OX=693216 GN=yjeS PE=3 SV=1
MSEPLDLNQLAQKIKQWGAELGFQQVGITDTDLSASEGALQAWLDKQYHGEMEWMARHGMLRARPHELLPGTLRVISVRMNYLPANAAFASTLKDPSLGYVSRYALGRDYHKLLRNRLKKLGETLQQHCASLNFRPFVDSAPILERPLAEKAGLGWTGKHSLILSRDAGSFFFLGELLVDLPLPVDKPVEDGCGRCVACMTICPTGAIVEPYTVDARRCISYLTIELEGAIPEEFRPLMGNRIYGCDDCQLICPWNRFSQLTDEADFSPRQALHAPKLIELFSWSEAHFLKVTEGSAIRRIGHLRWLRNIAVALGNAPWDEANITALQQRKGEHPLLDEHIDWAIAQQTDKRNACVVEVQLPQKQRLVRVIEKGLPRDA

SEQ ID NO: 76103 - protein, 379 aa, Cronobacter universalis
  REGION 1..379: note = tr|A0A376EYL4|A0A376EYL4_9ENTR Epoxyqueuosine reductase OS=Cronobacter universalis NCTC 9529 OX=1074000; GN = queG PE=3 SV=1
MSEPLDLNQLAQKIKQWGAELGFQQVGITDTDLSASEGALQAWLDKQYHGEMEWMARHGMLRARPHELLPGTLRVISVRMNYLPANAAFASTLKDPSLGYVSRYALGRDYHKLLRNRLKKLGETLQQHCASLNFRPFVDSAPILERPLAEKAGLGWTGKHSLILSRDAGSFFFLGELLVDLPLPVDKPVEEGCGRCVACMTICPTGAIVEPYTVDARRCISYLTIELEGAIPEEFRPLMGNRIYGCDDCQLICPWNRFSQLTDEADFSPRKALHAPKLIELFSWSEAHFLKVTEGSAIRRIGHLRWLRNIAVALGNAPWDDANITALQQRKGEHPLLDEHIDWAIAQQTDKRNACVVQVQLPQKQRLVRVIEKGLPRDA

SEQ ID NO: 76104 - protein, 308 aa, unidentified
  source 1..308: note = Cruoricaptor ignavus
  REGION 1..308: note = tr|A0A1M6GH20|A0A1M6GH20_9FLAO Epoxyqueuosine reductase OS=Cruoricaptor ignavus OX=1118202 GN=queG PE=3; SV = 1
MHAKTQYFSQIIKSTARRFGFQSCGISRAEFLEDEAPRLERWLREGMHGEMRYMENYFDKRLDPRLLVEGARSVISLSYNYFPEEILPEEGNYKIAKYAYGEDYHEVIKAILREMCEHLLEEIGDFHFRIFTDSAPVLERAWAKRGGIGWVGKNSNLITKKHGSFYFLAEIICDLELEPDPPTTDHCGNCRRCIDACPTGAIVSEKVVDGSKCISYATIELKDQIPDFFQDKMEDWMFGCDICQDVCPWNRFSQPHSQPKFYLNEKLTAMRKEDWKELTEEVYAEIFRKSPVKRAKFSGLMKNIKNLP

SEQ ID NO: 76105 - protein, 308 aa, unidentified
  source 1..308: note = Cryomorphaceae bacterium
  REGION 1..308: note = tr|A0A354S6M0|A0A354S6M0_9FLAO Epoxyqueuosine reductase OS=Cryomorphaceae bacterium OX=1898111 GN=queG; PE = 3 SV=1
MNSSGAKQVLQMAAMRLGFQACRVARADFLAEEAPSLDAWLAKGYHGSMAYMENHYEKRLDPRKLVPGAKSVISLAYNYFPEKDLADGEKPRIAKYAYGEDYHRVVKDKLFELLDSLRESLGAMEGRCFVDSAPVMERAWAQRSGLGWVGKNSLLLRKNEGSFFFLAELIVDYDFTPDTPVADHCGTCTRCLDACPTGAIISPEVVDSSRCISHMTIELHGALPESHKAAISPWVFGCDICQDVCPWNRHAKSHTEPRFTPNEWPDWTAEDWTEMTEETFGRVFGKSALTRRGLEGIRRNLGAGRLES

SEQ ID NO: 76106 - protein, 306 aa, unidentified
  source 1..306: note = Cryomorphaceae bacterium
  REGION 1..306: note = tr|A0A2A5XUY7|A0A2A5XUY7_9FLAO tRNA epoxyqueuosine(34) reductase QueG OS=Cryomorphaceae bacterium MED-G14 OX=1986260 GN=queG PE=4 SV=1
MSTINSNTLLVKSIAKDLGFISCGISKSGFLEDEADRFEKWLKNNYHGKMSYMQRNFDKRLDTTKLVEGSKSVISLLYNYYPKKKQNPNSYKISKYAYGIDYHYVIKDKLKNFISILNGKIGDVNSRVFVDSAPILERAWAKKSGLGWIGKNTNLISKKTGSFFFISEIIVDIDLVPDNEVTDHCGQCTACLDSCPTGAFYEPYKLDASKCISYLTIELKDKISEKFDAQFKDWIFGCDICQDVCPWNKFSTEHNEPLFEPIDQVINYSKKDWVEITNEVFDVIFENSPINRPKFDGFKRNIEFVK

SEQ ID NO: 76107 - protein, 329 aa, Cryptosporangium aurantiacum
  REGION 1..329: note = tr|A0A1M7RPT8|A0A1M7RPT8_9ACTN Epoxyqueuosine reductase QueG (Queuosine biosynthesis); OS = Cryptosporangium aurantiacum OX=134849; GN = SAMN05443668_13349 PE=4 SV=1
MDDQDASAPLDAAWLRELCLAAGADDVGFVALDTPGLEDERDYVLEALPSTRSLIAVCVRLARENFRSRATSNVNTEMDTAIPVLDRIGHRISVALQDRGYRTLYPSVTFPVEAHRLPSRGWAVSYKPVAVAAGLGHMGIHRCVIHPKFGSFIGLGAVLTEAVITPYSRPLDWNPCLGCNLCVSACPVGAIHNDGSFDFSACYTHTYSQFVNNFADWVEDIADSADAEDYRQRVTPGETVGKFHRQYRSGYCVSVCPAGEDVIGPFLADRKQHLHDVVRPLQHKPEYVYVTEGSTAEAYARKKFPHKPIRYVESGIAPPDGIDAAPEPT

SEQ ID NO: 76108 - protein, 404 aa, unidentified
  source 1..404: note = Cupriavidus alkaliphilus
  REGION 1..404: note = tr|A0A2W7P5U8|A0A2W7P5U8_9BURK Epoxyqueuosine reductase OS=Cupriavidus alkaliphilus OX=942866 GN=queG; PE = 3 SV=1
MIDRVAPGQADAPPTPVPDTSGHAAAGPGELAALAGSIRAWGAALGFASVRIADVDLAHAEPGLLAWLAQGYHGDMDYMANHGLRRARPAELVPGTVRAIVARMPYVPVAGAHAQAADWRRHELARLDDPATAVVSLYARGRDYHKVLRSRLQQLASRIEAEIGKFGYRVFTDSAPVMEVALASQGGLGWRGKHTLLLDRDGGSMFFLGEILVDIPLPADPPESGHCGSCHRCVDICPTRAIVAPYRLDARRCISYLTIEHKGAIPVEFRAPMGNRVYGCDDCQLACPWNKFAHVATVPDFDVRNGLDAPDMVALFQWTEAEFNQRLEGSPIRRIGHERWLRNLAVGLGNSLRTALSGSRAEDAALAARIRGALLARRETATPMVQEHIDWALAQGGPPVQRAG

SEQ ID NO: 76109 - protein, 404 aa, unidentified
  source 1..404: note = Cupriavidus alkaliphilus
  REGION 1..404: note = tr|A0A329B0R8|A0A329B0R8_9BURK Epoxyqueuosine reductase OS=Cupriavidus alkaliphilus OX=942866 GN=queG; PE = 3 SV=1
MIDRVAPGQADAPPTPVPDTSGHAAAGPGELAALAASIRAWGAALGFASVRIADVDLAHAEPGLLAWLAQGYHGDMDYMANHGLRRARPAELVPGTVRAIVARMPYVPVAGAHAQAADWRRHELARLDDPATAVVSLYARGRDYHKVLRSRLQQLATRIEAEIGKFGYRVFTDSAPVMEVALASQGGLGWRGKHTLLLDRDGGSMFFLGEILVDIPLPADPPESGHCGSCHRCLDICPTRAIVAPYRLDARRCISYLTIEHKGAIPVEFRAPMGNRIYGCDDCQLACPWNKFAHVATVPDFDVRNGLDAPDMVALFQWTEAEFNQRLEGSPIRRIGHERWLRNLAVGLGNSLRTALSGVRAEDAALAARIRAALLARRETATPMVQEHIDWALAQGGPPAQPGG

SEQ ID NO: 76110 - protein, 371 aa, Cupriavidus basilensis
  REGION 1..371: note = tr|A0A0C4Y5G7|A0A0C4Y5G7_9BURK Epoxyqueuosine reductase OS=Cupriavidus basilensis OX=68895 GN=queG PE=3; SV = 1
MHAGTDAAGLEALVGSIRAWGTELGFDALSIADVDLSRAEAGLLAWLAQGYHGDMDYMANHGLRRARPAELVPGTVRAIVARMPYLSAAGPHDWRAHELARLDDPATAVVSLYARGRDYHKVLRNRLQQLASRIEAAIGPFGYRVFTDSAPVMEVALAAQGGLGWRGKHTLLLDRDGGSMFFLGEILVDVPFPADAPEPGHCGNCRRCIDICPTQAILEPYRIDARRCISYLTIEHKGAIPEALRAPMGNRVYGCDDCQLACPWNKFAHRATLPDFDVRNGLDAPDMAELFGWTQAQFNQRLEGSPIRRIGHERWLRNLAVGLGNSLRAAVASGDTALATRIRAALGARQAEASPLVREHIDWALAQAPAN

SEQ ID NO: 76111 - protein, 386 aa, Cupriavidus basilensis
  REGION 1..386: note = tr|H1S3C8|H1S3C8_9BURK Epoxyqueuosine reductase; OS = Cupriavidus basilensis OR16 OX=1127483 GN=queG PE=3 SV=1
MAPGLAPSIAHTGTDAAGLAALVGLIRTWGTELGFDAVSIADVDLSRAEAGLLAWLAQGYHGEMDYMANHGLRRARPAELVPGTVRAIVARMPYLPAAVPNDWRAHELARLDDPATAVISHYARGRDYHKVLRNRLQQLASRIEAAIGPFGYRVFTDSAPVMEVALAAQGGLGWRGKHTLLLDRDGGSMFFLGEILVDVPFPADAPVSDHCGQCRRCIDICPTQAILEPYRIDARRCISYLTIEHKGAIPEALRAPMGNRVYGCDDCQLACPWNKFAHRATLPDFDVRNGFDAPDMAELFGWTEAEFNQRLEGSPIRRIGHERWLRNLAVGLGNSLRAAIASGDVALATRIRAALGARLADASPLVREHIEWALRQAPARAEAPLS

SEQ ID NO: 76112 - protein, 424 aa, Cupriavidus campinensis
  REGION 1..424: note = tr|A0A556USH4|A0A556USH4_9BURK Epoxyqueuosine reductase OS=Cupriavidus campinensis OX=151783 GN=queG; PE = 3 SV=1
MACTATASAAPNRAVAASSGSVRMRSSSRGIAYNSGMIDVAAPAPTEISPQAPPDLAALAQSMRAWGAALGFDAIRIADVDLRHAEAGLLAWLQAGYHGDMDYMANHGTRRARPAELVPGTVRAIVARMPYLPAGGADKGPDDWRGHELARLDDPSTAVLSLYARGRDYHKVLRNRLQQLAARIEQAIGPFGYRVFTDSAPVMEVALASQGGLGWRGKHTLLLDRDGGSMFFLGEILVDLPLPADAPETPHCGNCRRCIDICPTAAILEPYRLDARRCISYLTIEHKGPIPEEFRAPMGNRVYGCDDCQLACPWNKFAHRATLPDFDVRNGFDAPDMVDLFDWTEAEFNQRLEGSPIRRIGHERWLRNLAVGLGNSLRAASGTDPALAGRIRAALRGRQDTATPLVREHIDWALAQDPSPTSAS

SEQ ID NO: 76113 - protein, 401 aa, Cupriavidus gilardii
  REGION 1..401: note = tr|A0A5A8EXM3|A0A5A8EXM3_9BURK Epoxyqueuosine reductase OS=Cupriavidus gilardii OX=82541 GN=queG PE=3; SV = 1
MIDRAAQAPDAVLSGTPAAQHATGADPHALVAQIRAWGAALGFDDVRVADVDLSHAEAGLLAWLAQGCHGDMDYMANHGLKRARPAELVPGTVRAIVARMPYLPASTHDEDDRNDGNDGDRDDWREREFARLAQVEAGGTAATISLYARGRDYHKVLRTRLQQLAGRIEAAIGPFGYRVFTDSAPVMEVALAGQAGLGWRGKHTLLLDRDGGSMFFLGEILVDLPLPIDPPASAHCGQCRRCIDICPTQAIVGPYRLDARRCISYLTIEHKGAIPEPLRAPMGNRVYGCDDCQLACPWNKFAHRATLPDFAVRNGFDAPDMVALFGWSEEEFNRRLEGSPIRRIGHERWLRNLAVGLGNALRGAGEPAQAERIRAALLARAGHPSELVREHVAWALAQRPQ

SEQ ID NO: 76114 - protein, 402 aa, Cupriavidus gilardii
  REGION 1..402: note = tr|A0A562BMG5|A0A562BMG5_9BURK Epoxyqueuosine reductase OS=Cupriavidus gilardii J11 OX=936133 GN=queG; PE = 3 SV=1
MIDRAAPASSLPPRHGADHEATDSAASTASPQLADVAARIRAWGAELGFDDIRIADVDLGHAESGLLAWLAQGYHGDMDYMANHGVKRARPAELVPGTVRAIVARMPYLPASTGPDWREREFARLAAVGEGAAAISLYARGRDYHKVLRSRLQQLASRIGQAIGPFGYRVFTDSAPVMEVALASQGGLGWRGKHTLLLDRDGGSMFFLGEILVDLPLPVDPAVDPHCGQCRRCIDVCPTQAILEPYRLDARRCISYLTIEHKGAIPEALRAPMGNRVYGCDDCQLVCPWNKFAHRATLPDFDVRNGLDAADMVALFGWSETEFNQRLEGSPIRRIGHERWLRNLAVGLGNALRETSDPARARAIREALHARLGHDSGLVREHVQWALAQEPARRAGPDAQAS

SEQ ID NO: 76115 - protein, 394 aa, Cupriavidus metallidurans
  REGION 1..394: note = tr|A0A482IH53|A0A482IH53_9BURK Epoxyqueuosine reductase OS=Cupriavidus metallidurans OX=119219 GN=queG; PE = 3 SV=1
MIDRAVPASSPAKDPVPVPSTLSPQAARDSLASLVAQIRAWGGELGFDAIRIADVDLRHAEAGLLAWLQAGYHGDMDYMANHGTKRARPAELVPGTVRAIVARMPYLPMQRDDGWRRHELARLDDPSTAVISLYARGRDYHKVLRNRLQQLAARIETAIGAFGYRVFTDSAPVMEVALASQGGLGWRGKHTLLLDRDGGSMFFLGEILVDIPLPADSAEAPHCGNCRRCIDICPTQAIVEPYLVDARRCISYLTIEHKGAIPEDLRAPMGNRVYGCDDCQLTCPWNKFAHRATLPDFDVRNGFDAPDMATLFGWSEAEFNQRLEGSPIRRIGHERWLRNLAVGLGNSLRAAAVNDPALADRIRASLRARLDAATPLVREHIEWALAQDRAPERG

SEQ ID NO: 76116 - protein, 377 aa, Cupriavidus metallidurans
  REGION 1..377: note = tr|Q1LR16|Q1LR16_CUPMC Epoxyqueuosine reductase; OS = Cupriavidus metallidurans (strain ATCC 43123 / DSM 2839 / NBRC 102507 / CH34) OX=266264 GN=queG PE=3 SV=1
MPSTSSPQAARDSLASLVAQIRAWGGELGFDAIRIADVDLRHAEAGLLAWLQAGYHGDMDYMANHGTKRARPAELVPGTVRAIVARMPYLPMQRDDGWRRHELARLDDPSTAVISLYARGRDYHKVLRNRLQQLAARIETAIGAFGYRVFTDSAPVMEVALASQGGLGWRGKHTLLLDRDGGSMFFLGEILVDIPLPADSAEAPHCGNCRRCIDICPTQAIVEPYLVDARRCISYLTIEHKGAIPEDLRAPMGNRVYGCDDCQLTCPWNKFAHRATLPDFDVRNGFDAPDMATLFDWSEAEFNQRLEGSPIRRIGHERWLRNLAVGLGNSLRAAAVNDPALAERIRASLRARLDAATPLVREHIEWALAQDRAPERG

SEQ ID NO: 76117 - protein, 404 aa, unidentified
  source 1..404: note = Cupriavidus nantongensis
  REGION 1..404: note = tr|A0A142JFY3|A0A142JFY3_9BURK Epoxyqueuosine reductase OS=Cupriavidus nantongensis OX=1796606 GN=queG; PE = 3 SV=1
MIDRVAPGQADAPPIPVPDTSGHAAAGPGELAALAASIRAWGAALGFASVRIADVDLAHAEPGLLAWLAQGYHGDMDYMANHGLRRARPAELVPGTVRAIVARMPYVPAAGAHAQAADWRRHELARLDDPATAVVSLYARGRDYHKVLRSRLQQLASRIEAEIGRFGYRVFTDSAPVMEVALASQGGLGWRGKHTLLLDRDGGSMFFLGEILVDIPLPADPPESGHCGSCHRCLDICPTRAIVAPYRLDARRCISYLTIEHKGAIPVEFRAPMGNRVYGCDDCQLACPWNKFAHVATVPDFDVRNGLDAPDMVALFQWTEAEFNQRLEGSPIRRIGHERWLRNLAVGLGNSLRAALSGTRAEDAALAARIRAALLARRETATPMVQEHIDWALAQGGPPVQRAG

SEQ ID NO: 76118 - protein, 406 aa, Cupriavidus necator
  REGION 1..406: note = tr|A0A1U9UK58|A0A1U9UK58_CUPNE Epoxyqueuosine reductase OS=Cupriavidus necator OX=106590 GN=queG PE=3; SV = 1
MIDRVASGQADAPPAPVSVSDTTGHLAAGPGELAALAASIRAWGAELGFASVRIADVDLSHAEPGLMAWLARGYHGDMDYMANHGLRRARPAELVPGTVRAIVARMPYIPAAGAQADAADWRRHELARLDDPATAVVSLYARGRDYHKVLRSRLQQLASRIEAEIGKFGYRVFTDSAPVMEVALASQGGLGWRGKHTLLLDRDGGSMFFLGEILVDIPLPADPPESGHCGNCHRCIDICPTRAIIAPYRLDARRCISYLTIEHKGPIPVEFRTPMGNRVYGCDDCQLACPWNKFAHVASVPDFDVRNGLDAPDMVALFQWTEAEFNQRLEGSPIRRIGHERWLRNLAVGLGNSLRAALSGTRAQDAALAARIRTALLARRETASPLVREHIDWALAQGGPPPERVS

SEQ ID NO: 76119 - protein, 439 aa, Cupriavidus necator
  REGION 1..439: note = tr|G0EWR4|G0EWR4_CUPNN Epoxyqueuosine reductase; OS = Cupriavidus necator (strain ATCC 43291 / DSM 13513 / N-1) OX=1042878 GN=queG PE=3 SV=1
MACTVAASAAPRRAVAASSGSVRVRSSSKGIAYNSGMIDRVAPGQADAPPTPVSGTPGHLAAGPGELAALAASIRTWGAELGFASVRIADVDLSHAEPGLMAWLAQGYHGDMDYMANHGLRRARPAELVPGTVRAIVARMPYIPAAGAQAGATDWRRHELARLDDPATAVVSLYARGRDYHKVLRSRLQQLASRIEAEIGKFGYRVFTDSAPVMEVALASQGGLGWRGKHTLLLDRDGGSMFFLGEILVDIPLPADAPESGHCGNCHRCLDICPTRAILAPYRLDARRCISYLTIEHKGPIPVEFRAPMGNRVYGCDDCQLACPWNKFAHVAMVPDFDVRNGLDAPDMVALFQWTEAEFNQRLEGSPIRRIGHERWLRNLAVGLGNSLRAARSGTRAEDAALAARIRAALLERRESATPLVREHIDWALAQDGPPPGAS

SEQ ID NO: 76120 - protein, 411 aa, Cupriavidus oxalaticus
  REGION 1..411: note = tr|A0A375GE44|A0A375GE44_9BURK Epoxyqueuosine reductase OS=Cupriavidus oxalaticus OX=96344 GN=yjeS PE=3; SV = 1
MIDPAVKPPASAPGAHSVPANAPGQSGHAGHAGQADPEELAALAESIRAWGAALGFASVRIADVDLGHAEPGLLAWLEQGCHGDMDYMANHGLRRARPAELVPGTVRAIVARMPYVPATETPPGAPDWRRRELARLGDPATAVVSLYARGRDYHKVLRSRLQQLASRIEAEIGKFGYRVFTDSAPVMEVALASQGGLGWRGKHTLLLDRDGGSMFFLGEILVDIPLPADAPETDHCGNCHRCLDICPTRAIVAPYRLDARRCISYLTIEHKGPIPVEFRAPMGNRVYGCDDCQLACPWNKFAHVASVPDFDVRNGLDAPDIMALFQWTEDEFNQRLEGSPIRRIGHERWLRNLAVGLGNSLRAALSGTRAEDAALAARVRAALQARRDSASPLVQEHIDWALAQGEPARTS

SEQ ID NO: 76121 - protein, 444 aa, Cupriavidus oxalaticus
  REGION 1..444: note = tr|A0A4P7L966|A0A4P7L966_9BURK Epoxyqueuosine reductase OS=Cupriavidus oxalaticus OX=96344 GN=queG PE=3; SV = 1
MACTVAASAAPRRAVAASSGSVRVRSSSKGIAYNSGMIDPAVKPPASAPGAHSVPANAPGQSGQAGHANPEELAALAESIRAWGAALGFASVRIADVDLGHAEPGLLAWLEQGYHGDMDYMANHGLRRARPAELVPGTVRAIVARMPYVPASETPPGAPDWRRRELARLGDPATAVVSLYARGRDYHKVLRSRLQQLASRIEAEIGKFGYRVFTDSAPVMEVALASQGGLGWRGKHTLLLDRDGGSMFFLGEILVDIPLPADAPETDHCGNCHRCLDICPTRAIVAPYRLDARRCISYLTIEHKGPIPVEFRAPMGNRVYGCDDCQLACPWNKFAHVASVPDFDVRNGLDTPDMVALFQWTEDEFNQRLEGSPIRRIGHERWLRNLAVGLGNSLRAALSGTRAEDAALAARIREALQARRDSASPLVQEHIDWALAQGEPARTS

SEQ ID NO: 76122 - protein, 399 aa, Cupriavidus pauculus
  REGION 1..399: note = tr|A0A3G8GWV0|A0A3G8GWV0_9BURK Epoxyqueuosine reductase OS=Cupriavidus pauculus OX=82633 GN=queG PE=3; SV = 1
MIDRAVPAPTPPSRGNPPAQDAVPTPAATAPVIGQAALDSLAVALRGWGRELGFDEIRVADVDLRHAEAGLLAWLQAGCHGDMDYMANHGTRRARPHELVPGTVRAIVARMPYLPADGPADWRRHELARLDDPATAVVSLYARGRDYHKVLRNRLQQLAARIETEIGRFGYRVFTDSAPVMEVALASQGGLGWRGKHTLLLDREGGSMFFLGEILVDIPLPADPAEAPHCGSCRRCIDICPTGAILEPYRLDARRCISYLTIEHKGPIPEPLRAPMGNRVYGCDDCQLACPWNKFAHRATLPDFDVRNGFDAPDMVDLFGWTEAEFNQRLEGSPIRRIGHERWLRNLAVGLGNSLRRAAADDPALAARIRAALRACQDTATPLVREHVDWALAQDPAAD

SEQ ID NO: 76123 - protein, 397 aa, Cupriavidus pauculus
  REGION 1..397: note = tr|A0A2N5CJM3|A0A2N5CJM3_9BURK Epoxyqueuosine reductase OS=Cupriavidus pauculus OX=82633 GN=queG PE=3; SV = 1
MIDRAVPAPTPAQTAHPAEDSAPARPDPASVTTDVDLASLAASLRSWGRALGFDEIRIADVDLRHAEAGLLAWLQAGYHGDMDYMANHGAKRARPHELVPGTVRAIVARMPYLPAQGPGDWRRHELARLDDPSTAVISLYARGRDYHKVLRNRLQQLAARIETAIGPFGYRVFTDSAPVMEVALASQGGLGWRGKHTLLLDRDGGSMFFLGEILIDIPLPADPTEAPHCGNCRRCIDICPTGAILEPFRLDARRCISYLTIEHKGAIPEPLRAPMGNRVYGCDDCQLACPWNKFAHRATLPDFDVRNGFDAPDMADLFGWTEAEFNQRLEGSPIRRIGHERWLRNLAVGLGNSLRVASTSDPALAQRIRTALLARRDTATPLVREHIDWALAQDTAG

SEQ ID NO: 76124 - protein, 393 aa, Cupriavidus pinatubonensis
  REGION 1..393: note = tr|Q475G9|Q475G9_CUPPJ Epoxyqueuosine reductase; OS = Cupriavidus pinatubonensis (strain JMP 134 / LMG 1197); OX = 264198 GN=queG PE=3 SV=1
MTERASEAPGAPVPLPAAAADAAGTDGLEALVQSIRDWGTELGFASVRIADVDLGHAEPGLMAWLAQGYHGDMDYMANHGPRRARPAELVPGTVRAIVARMPYLPAPATPDWRRHELARLDDPSTAVLSLYARGRDYHKVLRNRLQQLASRIEGAIGPFGYRVFTDSAPVMEVALASQGGLGWRGKHTLLLDRDGGSMFFLGEILVDIPLPADPPEASHCGNCHRCIDICPTRAILAPYKLDARRCISYLTIEHKGPIPEQFRAPMGNRVYGCDDCQLACPWNKFAHRATLPDFDVRNGFDAADMVDLFLWTEAEFNLRLEGSPIRRIGHERWLRNLAVGLGNSLRAAASGQRPQDRELAERIRTALESRLADATPLVREHLDWALAQGRAVS

SEQ ID NO: 76125 - protein, 368 aa, unidentified
  source 1..368: note = Cupriavidus plantarum
  REGION 1..368: note = tr|A0A316F4E4|A0A316F4E4_9BURK Epoxyqueuosine reductase OS=Cupriavidus plantarum OX=942865 GN=queG PE=3; SV = 1
MRALVASIRAWGAELGFDAVRIADVDLSHAEAGLLAWIDAGHHGDMDYMANHGARRARPAELVPGTVRAIVARMPYLPAQGPENWRAHEFSRLDDPSTAVISVYARGRDYHKVLRSRLQQLASRIEQALGAFGYRVFTDSAPVMEVALATQGGLGWRGKHTLLLDREGGSMFFLGEILVDIPLPADPPETPHCGQCTRCIDICPTQAILAPYRMDARRCISYLTIEHKGAIPEALRAPMGNRVYGCDDCQLACPWNKFAHRATLPDFDVRNGFDAPDMVALFLWTEAEFNQRLEGSPIRRIGHERWLRNLAVGLGNSLRAASAAQGDAALAALAARIRGALHARQQDASALVREHVDWALAQDAAPVS

SEQ ID NO: 76126 - protein, 400 aa, Cupriavidus sp.
  REGION 1..400: note = tr|A0A2E9RZC2|A0A2E9RZC2_9BURK Epoxyqueuosine reductase OS=Cupriavidus sp. OX=1873897 GN=queG PE=3 SV=1
MIDRAAPAPSPLCSASATSPQSTAQAPDASWQAGEEDMARLTASIRAWGCELGFDAIRIADVDLRHAEAGLLAWLQAGYHGDMDYMANHGTKRARPGELVPGTVRAIVARMPYLPAQGPQDWRRHELARLEDPATAAISLYARGRDYHKVLRNRLQQLAARIEAEIGTFGYRVFTDSAPVMEVALASQGGLGWRGKHTLLLDRDGGSMFFLGEILVDIPLPADAPEATHCGNCRRCIDICPTGAILEPYRLDARRCISYLTIEHKGAIPEPLRVPMGNRVYGCDDCQLVCPWNKFAHRATLPDFDVRNGLDSPDMVELFGWSEAEFNQRLEGSPIRRIGHERWLRNLAVGLGNSLRAASHDNAALAARIRAALLARRNDATPLVREHIDWALAQESAAVS

SEQ ID NO: 76127 - protein, 400 aa, Cupriavidus sp.
  REGION 1..400: note = tr|A0A1G6LY30|A0A1G6LY30_9BURK Epoxyqueuosine reductase OS=Cupriavidus sp. YR651 OX=1855315 GN=queG PE=3; SV = 1
MIDRAVPASLPSKDLPPAPLATASGTSGISGGSPAADDLALLVQSIRDWGAELGFDAIRIADVDLSHAEAGLLAWLQAGYHGDMDYMANHGTRRARPAELVPGTVRAIVARMPYLPAQGPDDWRRHELARLEDPATAVISLYARGRDYHKVLRNRLQQLAGRIETAIGAFGYRVFTDSAPVMEVALASQGGLGWRGKHTLLLDREGGSMFFLGEILVDIPLPADPAEDPHCGSCRRCIDICPTGAILAPYRLDARRCISYLTIEHKGPIPVEFRAPMGNRVYGCDDCQLACPWNKFAHRAALPDFDVRNGFDAPDMVELFLWTEEAFNQRLEGSPIRRIGHERWLRNLAIGLGNSLRTASATDAALADRIRSALLARRDDATPLVREHIDWALAQDAAAS

SEQ ID NO: 76128 - protein, 408 aa, Cupriavidus taiwanensis
  REGION 1..408: note = tr|A0A375GW95|A0A375GW95_9BURK Epoxyqueuosine reductase OS=Cupriavidus taiwanensis OX=164546 GN=yjeS; PE = 3 SV=1
MIDRVAPGPADAPPTPVPVPDPSGHAAAGPGELAALAASIRAWGAALGFASVRIADVDLAHAEPGLLAWLAQGYHGDMDYMANHGLRRARPAELVPGTVRAIVARMPYVPVAGAHAAAADWRRHELARLDDPATAVVSLYARGRDYHKVLRSRLQQLASRIEAEIGKFGYRVFTDSAPVMEVALASQGGLGWRGKHTLLLDRDGGSMFFLGEILVDIPLPADPPEAGHCGSCHRCLDICPTRAIVAPYRLDARRCISYLTIEHKGAIPVEFRAPMGNRVYGCDDCQLACPWNKFAHVATVPDFDVRNGLDAPDMVALFAWTEAEFNQRLEGSPIRRIGHERWLRNLAVGLGNSLRAALSGTRAEDAALAARIRAALLARRETATPMVQEHIDWALAQGGPPAQRAGAD

SEQ ID NO: 76129 - protein, 404 aa, Cupriavidus taiwanensis
  REGION 1..404: note = tr|B3R0W1|B3R0W1_CUPTR Epoxyqueuosine reductase; OS = Cupriavidus taiwanensis (strain DSM 17343 / BCRC 17206 / CIP 107171 / LMG 19424 / R1) OX=977880 GN=queG PE=3 SV=1
MIDRVAPGQADAPPTPVPDTSGHAAAGPGELAALAASIRAWGAALGFASVRIADVDLAHAEPGLLAWLAQGCHGDMDYMANHGLRRARPAELVPGTVRAIVARMPYVPAAGAHAQAADWRRHELARLDDPATAVVSLYARGRDYHKVLRSRLQQLASRIEAEIGKFGYRVFTDSAPVMEVALASQGGLGWRGKHTLLLDRDGGSMFFLGEILVDIPLPADPPESGHCGSCHRCLDICPTRAIVAPYRLDARRCISYLTIEHKGAIPVEFRAPMGNRVYGCDDCQLACPWNKFAHVATVPDFDVRNGLDAPDMVALFQWTEAEFNQRLEGSPIRRIGHERWLRNLAVGLGNSLRAARSGTRAEDAALAARIRAALLARREAATPLVHEHIDWALAQGGPPAQQAG

SEQ ID NO: 76130 - protein, 379 aa, unidentified
  source 1..379: note = [Curtobacterium] plantarum
  REGION 1..379: note = tr|A0A3M7UE21|A0A3M7UE21_9GAMM Epoxyqueuosine reductase OS=[Curtobacterium] plantarum OX=221276 GN=queG; PE = 3 SV=1
MSYPLDLHQFAQQIKQWGLDLGFQQVGITDTDLSAEEPRLQAWLDKQYHGEMEWMARHGMMRARPHELLPGTLRVISVRMNYLPAKAAFASTLKNPQLGYVSRYALGRDYHKVLRNRLKKLGEMIQQHCGELNFRPFVDSAPLLERPLAAKAGLGWTGKHSLILNREAGSWFFLGELLIDIPLPIDTPQQEQCGRCVACMTICPTSAIVEPYVVDARRCISYLTIELEGAIPEEFRPLMGNRIYGCDDCQLICPWNRYGQLSDESDFSPRAALHAPELIDLFQWDEAKFLRITEGSAIRRIGHLRWLRNIAVALGNAPWSPEIVQVLEQRLGESDLLDEHILWAITQQQQKREQLVVEVQPAQQKRLVRAVEKGLPRDA

SEQ ID NO: 76131 - protein, 431 aa, unidentified
  source 1..431: note = Curvibacter putative
  REGION 1..431: note = tr|C9YGD6|C9YGD6_9BURK Epoxyqueuosine reductase; OS = Curvibacter putative symbiont of Hydra magnipapillata; OX = 667019 GN=yjeS PE=3 SV=1
MAHQRSFAGPQIAMQRDEGMGQFGLCRPVRSESGGGGFICPHQHRGGGSAFYNGVVTINSTQIKAQFDGDHVVALMQGWARELGFSQIGVAGVDLSSAEAGLLAWLSHGFHGEMGYMAHHGLKRARPAELVPGTVSVITTRMDYLPMGTNDGWADVELARLQRPQEGIVSLYARGRDYHKVLRNRLQKLADQLSAHMGPLGYRVFTDSAPVLEAELAARSGQGWRGKHTLLLNREAGSMFFLGEIYVDVALPATAPTEAHCGSCNACITACPTQAIIAPHRLDARRCISYLTIEHDGPIPLELRPLIGNRIYGCDDCQLVCPWNKFARRSSLPDFDAREGLAGEALATLLDWTEDTFLKRTEGSPIRRIGHVRWLRNVAVAMGNALRSERLGDIERLTLVRSLQRRIHHPDPLVQEHVQWAMQAFQPVSPD

SEQ ID NO: 76132 - protein, 376 aa, Curvibacter sp.
  REGION 1..376: note = tr|A0A433BD74|A0A433BD74_9BURK Epoxyqueuosine reductase OS=Curvibacter sp. OX=1888168 GN=queG PE=3 SV=1
MQINGHQFVSRIQGWALELGFSQIGVAGIDLASAEPGLEAWLAEGFHGSMNYMAAHGLKRARPAELVPGTVSVLTARMDYLPASTSPDWTEHELARLQRPGEAVVSLYARGRDYHKVLRSRLQKLAERMAAELGPLGYRVFTDSAPVLEAELAARSGQGWRGKHTLVLNREGGSMFFLGEIYLDIALPPSEPVTAHCGQCSACLQACPTQAIVAAHRVDARRCVSYLTIEHDGPIDPALRPLMGNRIYGCDDCQLVCPWNKFAQRSPLPDFDERAGLSGQTLAQMLGWSESEFLRRTEGSPIRRIGHWRWVRNLAVAAGNALKAGLSGDEAAVLCQALVAHQPGADPVLAEHLAWALSAAPPGPMAGSPCPAGSTG

SEQ ID NO: 76133 - protein, 351 aa, Curvibacter sp.
  REGION 1..351: note = tr|A0A2D0IC33|A0A2D0IC33_9BURK Epoxyqueuosine reductase OS=Curvibacter sp. PD_MW3 OX=2027918 GN=queG; PE = 3 SV=1
MRGWARELGFSQIGVSGVDLSAAEEGLQAWLARGFHGEMAYMAAHGLRRARPAELVPGTVSVITARMDYLPSGTADDWQSVEFDRLQRPQEGVVSIYARGRDYHKVLRARLQKLSDRMAEHIGPFGHRVFTDSAPVLEAELAARSGQGWRGKHTLVLSREAGSMFFLGEIYVDVALPASEPVSGHCGSCNACIEVCPTQAIVAPFRLDARRCISYLTIEHAGPIPLELRPLLGNRIYGCDDCQLICPWNKFAQRSPLPDFDAREGLSGSSLVALFAWSEPEFLQRTEGSPIRRIGHIRWLRNIAVALGNALRTTTDPAIVEALRQRASDPSELVREHVAWALAQQTQARQA

SEQ ID NO: 76134 - protein, 320 aa, unidentified
  source 1..320: note = Cuspidothrix issatschenkoi
  REGION 1..320: note = tr|A0A2S6CVW1|A0A2S6CVW1_9CYAN Epoxyqueuosine reductase OS=Cuspidothrix issatschenkoi CHARLIE-1; OX = 2052836 GN=queG PE=3 SV=1
MNECTSISSTIVKEKAKEVGFHLVGVTTVKDLEPRETENLSNWLKQGYHADMEWMKNPKREDISLVMPEVRSLISVALNYYTPHVHQKGDEYGKISRYAWGRDYHRIMHKKLKELASWLESLDADIKARYYADTGPVQDKIWAQKTGIGWIAKNGNVITKKYGSWVFLGEILTNLELESDRPATQHCGTCTRCLQACPTSAITEPFVVDANRCIAYHTIENRAKELPPDITPHLQGWVAGCDICQDVCPWNQRFSQVTDVSDFQPYPGNLAPKLVELAQISNEEWDKRFTASALRRIKPEMLRRNARANLDQKYGIEASY

SEQ ID NO: 76135 - protein, 318 aa, unidentified
  source 1..318: note = Cyanobacteria bacterium
  REGION 1..318: note = tr|A0A3M2G573|A0A3M2G573_9CYAN Epoxyqueuosine reductase OS=Cyanobacteria bacterium J007 OX=2420339; GN = queG PE=3 SV=1
MVSTSSSPPPDRDRVKQQALDLGFHKVGIATVEPPPTDAARQLQTWCDRGYGAEMDWMANPKRQDIRQVMPEARSLICVALNYYTPTPHSDRPDRAKISRYGWGRDYHRVMHKKLKALATWLQAQGDGIQARYYADTGPIQDKVWAQRAGIGWIAKNSNVITREYGSWVFLGEVLTNLTLESDRPHTQHCGSCTRCIDACPTGAIVEPFVVDANRCIAYHTIENRSPDLPDNIKPHLEGWVAGCDICQDVCPWNQRFATETDVSEFRPYPENLAPTFAKLAELSDTEWDRRFRASALRRIKPQMWRRNARANLENVRE

SEQ ID NO: 76136 - protein, 322 aa, unidentified
  source 1..322: note = Cyanobacteria bacterium
  REGION 1..322: note = tr|A0A352ABW1|A0A352ABW1_9CYAN Epoxyqueuosine reductase OS=Cyanobacteria bacterium UBA9273 OX=2055791; GN = queG PE=3 SV=1
MKIAVTSSEVKQKAQSLGFHKVGLAPVNSDLDSSTRQHLKTWLALGYQADMTWMENPKRLDIRACMPEVQSIICVALNYYTPHQHPEGKDYAKISRYGWGRDYHKVMHQKLKALANWLSEQGEGIQARYYADTGPVQDKVLAQRAGIGWIAKNGNVITREYGSWVFLGEVLTNLALTPDAPHTEHCGSCTRCLDACPTGAITKPFVVDANRCIAYHTIENRNPELPSSLVPYLNGWVAGCDICQDVCPWNQRFAQPTNVPEFEPYPGNLAPKLTELATLSDGEWDRCFRASALRRIKPEMLRRNARANQLASESKSSSIDTL

SEQ ID NO: 76137 - protein, 312 aa, unidentified
  source 1..312: note = Cyanobacterium aponinum
  REGION 1..312: note = tr|K9Z7Q0|K9Z7Q0_CYAAP Epoxyqueuosine reductase; OS = Cyanobacterium aponinum (strain PCC 10605) OX=755178; GN = queG PE=3 SV=1
MEKLSEQIKEKALEIGFHRVGIVDVNENRDKQQENQKRLQKWLDNGYHAQMEWMDNPRRKDITLCWQEVKSIICLALNYYTPHQHSDNPEIGKISRYGWGRDYHRIITKKLKTLARWLTEKDPSAKVRYYVDTGPIQDKFWAQQAGIGWIAKNANVITREYGSWVFLGEILTNLPLEADQPHTNHCGTCTRCLSACPTNAITEPFVVDANRCIAYHTIENRNPQLPDEIAKNLNGWVAGCDICQDVCPWNQRFAQETDITDFHPYPENLHPKLADLANMTEQEWDKRFQGSALRRIKPQMWQRNAKTQMKKI

SEQ ID NO: 76138 - protein, 312 aa, unidentified
  source 1..312: note = Cyanobacterium aponinum
  REGION 1..312: note = tr|A0A2G3PFE8|A0A2G3PFE8_9CHRO Epoxyqueuosine reductase OS=Cyanobacterium aponinum IPPAS B-1201; OX = 2047986 GN=queG PE=3 SV=1
MEKLSEQIKEKALEIGFHRVGIVDVNENRDKQQENQKRLQKWLDNGYHAQMEWMDNPRRKDITLCWQEVKSIICLALNYYTPHQHSDNPEIGKISRYGWGRDYHRIITKKLKTLARWLTEKDPSAKVRYYVDTGPIQDKFWAQQAGIGWIAKNANVITKEYGSWVFLGEILTNLPLEADQPHINHCGTCTRCLSACPTNAITEPFVVDANRCIAYHTIENRNPQLPDEIAKNLNGWVAGCDICQDVCPWNQRFAQETDITDFHPYPENLHPKLADLANMTEQEWDKRFQGSALRRIKPQMWQRNAKTQMKKI

SEQ ID NO: 76139 - protein, 294 aa, unidentified
  source 1..294: note = Unknown
  REGION 1..294: note = tr|A0A0R2U4J7|A0A0R2U4J7_9CYAN Epoxyqueuosine reductase (Fragment) OS=cyanobacterium BACL30 MAG-120619-bin27 OX=1655601 GN=ABR96_06155 PE=3 SV=1
FDPVGLAAVPAGERLSLRTAALERWLAAGYQADMAWMADPRRRAVEQLLPGVRSLLAVGLNYYVEAERAPGALKVARYGWGRDYHRVIDGRLRQLGRWLEQQVPEVGWRACVDSAPLMDKAWAEQAGLGWIGKNGNLINRERGSWLLLGHLLTTLELPADAAATPLCGSCSRCLPACPTGAISEPFVVDSRRCLAFHTIENRDPELPQAISSKLEGWVAGCDICQDVCPWNQQPLRSSEDADLQPRPWLLNLQAEEALGWSDADWDTKLRASALRRLKPWMWRRNLRASRSDTA

SEQ ID NO: 76140 - protein, 326 aa, Epithemia turgida
  REGION 1..326: note = tr|A0A077JFB4|A0A077JFB4_9CYAN Epoxyqueuosine reductase OS=cyanobacterium endosymbiont of Epithemia turgida isolate EtSB Lake Yunoko OX=1228987 GN=queG PE=3; SV = 1
MLNGSFCLEKKQKLVMNIEKWTETIKQKILDLGFHKVGIVNVNSQFNDTATTHLKRWLALGYHADMAWMSNPKRLNIRDCMPEVKSVICVALNYYTPHQRPEGKKYGKVSRYGWGRDYHNVMHKKLKAFSQYLKEQEDSIKTRYYADTGAIQDKVWAQRAGIGWISKNSNLITREYGSWVFLGEVLTNLTLIPDTPHTQHCGTCTRCLEACPTGAIVQPFVVDANRCIAYHTIENRQATLPKAITSNLKGWIAGCDICQDVCPWNQRFGQETNIVDFQPYSQNIAPKLTEIANISLKAWDNHFRSSALRRLKWERLRRNARAILDT

SEQ ID NO: 76141 - protein, 311 aa, Rhopalodia gibberula
  REGION 1..311: note = tr|A0A2Z5SXF4|A0A2Z5SXF4_9CYAN Epoxyqueuosine reductase OS=cyanobacterium endosymbiont of Rhopalodia gibberula OX=1763363 GN=queG PE=3 SV=1
MNTEEWTETIKQKILELGFHKVGIANVDSQFNDTATNYLKRWLALGYHADMAWMDNPKRLNIRDYMPQVKSIICVALNYYTSHQRPDGKEYGKISRYGWGRDYHNVMHKKLKAFSQQLKGQEGSIKIHYCADTGTIQDKVWAQRAGIGWIAKNSNLITREYGSWVFLGEVLTNLTLIPDTPYTQHCGTCTRCLEACPTGAIVQPFVIDANRCIAYHTIENRQATLPEEIASNLKGWVAGCDICQDVCPWNQRFAQETNIVDFEPYTQNIAPKLTELANISPKDWDNHFRASALRRIKWERLRRNARASLGK

SEQ ID NO: 76142 - protein, 315 aa, unidentified
  source 1..315: note = Cyanobacterium sp.
  REGION 1..315: note = tr|A0A2K8WKP7|A0A2K8WKP7_9CHRO Epoxyqueuosine reductase OS=Cyanobacterium sp. HL-69 OX=2054282 GN=queG; PE = 3 SV=1
MMKLTAQEVKQKAKEIGFHEVGIASVEEVGDYHQRAVNNLQKWLDKGYQADMKWMGNPKRQNINECMEGVQSVISVALNYYTPHERSGNPEDAKISRYGWGRDYHRIIQKRLKVFAQWFNDMGIEARYYVDTGPIQDKVWAQKAGIGWIAKNGNVITRNYGSWVFFGEVLVNIPLDVDKPHTNHCGTCTRCISACPTDAITEPFVVDANRCIAYHTIENRAESLPSAIAPNLNNWVAGCDICQDVCPWNQRFAQPTDIEDFNPYPENLNPKLTELAQLSDEEWDKRFTASALRRIKPAMWRRNAQAQINNLIPNT

SEQ ID NO: 76143 - protein, 310 aa, unidentified
  source 1..310: note = Cyanobacterium sp.
  REGION 1..310: note = tr|A0A1E5QYB8|A0A1E5QYB8_9CHRO Epoxyqueuosine reductase OS=Cyanobacterium sp. IPPAS B-1200 OX=1562720; GN = queG PE=3 SV=1
MKLTAEEVKQKAKDIGFHEVGIASVEEVGDYHQRAVNNLQKWLDKGYQAEMKWMGNPKRQNIKECMEGVESVISVALNYYTPHERSGNPEDAKISRYGWGRDYHRIIQKRLKVFAQWFNDMGIEARYYVDTGPIQDKVWAQKAGIGWIAKNGNVITRNYGSWVFLGEILVNIPLDVDKPHTNHCGTCTRCISACPTDAITEPFVVDANRCIAYHTIENRAENLPSAIAPNLNNWVAGCDICQDVCPWNQRFAQPTDVEDFNPYPENLNPKLTELAQLSDEEWDKRFTASALRRIKPAMWRRNAQAQIEMT

SEQ ID NO: 76144 - protein, 311 aa, unidentified
  source 1..311: note = Cyanobacterium stanieri
  REGION 1..311: note = tr|K9YQ25|K9YQ25_CYASC Epoxyqueuosine reductase; OS = Cyanobacterium stanieri (strain ATCC 29140 / PCC 7202); OX = 292563 GN=queG PE=3 SV=1
MGLTAREVKEKAREIGFHAVGIASVEEMDDYRQKAVNHLQRWLDKGYQADMEWMANPRRQDITQCMEGVKSVISVALNYYTPHERSGNAEDAKISRYGWGRDYHRIIQKRLKIFTQWLKERDEDLEARYYVDTGPIQDKVWAQKAGLGWIAKNGNLITRNYGSWVFLGEILVNIPLEVDKPHTSHCGTCSRCISACPTEAITEPFVVDANRCIAYHTIENRAENLPSAIALNLNGWVAGCDICQDVCPWNQRFAQPTDIEDFNPYPENLNPKLKELAQLSEEEWDKRFTASALRRIKPPMWRRNAQAQLNK

SEQ ID NO: 76145 - protein, 313 aa, Ornithocercus magnificus
  REGION 1..313: note = tr|A0A4Y3G6T4|A0A4Y3G6T4_9CYAN Epoxyqueuosine reductase OS=cyanobiont of Ornithocercus magnificus; OX = 2496102 GN=queG PE=3 SV=1
MANQDSIGRLSAELKRQARNQGFEPVGIACLPGGPQLQLRTAALQRWLAAGHQADMSWMAKASRTQAGLLLDGAKSLLAVGLNYYVRQERKPGCLAVARYGWGRDYHRVVSRRLRRLGHWLEEQCPGSRWRVCVDTAPLLDKAWAEEAGLGWIGKHSNLIQAQRGSWMVIGHLLTTEKLQADRPSTPLCGRCHDCIDACPTKAIREPFVVDARRCIAYHTIENRSQQLPSMITATLGPWVAGCDICQDVCPWNHGPIPSSEDPDVQPRPWLLSLEREKAMVWSNASWDKRLQGSALRRIKPWMWRRNITSAQP

SEQ ID NO: 76146 - protein, 323 aa, unidentified
  source 1..323: note = Cyanobium gracile
  REGION 1..323: note = tr|K9PA57|K9PA57_CYAGP Epoxyqueuosine reductase; OS = Cyanobium gracile (strain ATCC 27147 / PCC 6307); OX = 292564 GN=queG PE=3 SV=1
MSTPSSLSALAAGLRARAEGLGFAPVGLAAVPGGSRLPLRTAALERWLAAGHQAGMGWMNDPRRRRIEALLPGVRSILAVGWNYHVARERAPGSLQVARYGWGRDYHRVIDGRLRQLGRWLEQAAPGTTWRACVDSAPLLDKAWAEEAGLGWIGKNGNLIHRRRGSWMLLGHLLTSLDLPPDRPAEPLCGACTACIDACPTGALDEPFVVDARRCIAYHTIENRDEALPAAIAGKLEGWVAGCDICQEVCPWNRRPLPVATDADVQPRPWLLDLRGTEALGWSDADWDERLRASALRRIRPALWRRNIRAALAGGWGQRGTAP

SEQ ID NO: 76147 - protein, 310 aa, unidentified
  source 1..310: note = Cyanobium sp.
  REGION 1..310: note = tr|A0A2W7A644|A0A2W7A644_9CYAN Epoxyqueuosine reductase OS=Cyanobium sp. OX=2164130 GN=queG PE=3 SV=1
MTLARELKREAAALGFEPVGLAAVPAGERIELRTAALQRWLAAGHQASMDWMADPRRQRIESLLPGVRSLLAVGLNYHVAMQRVPGSLAVARYGWGRDYHRLIDGRLRQLGRWLEGQVPGVRWRACVDSAPLLDKAWAEQAGLGWIGKNGNLIHRRHGSWFLIGHLLTSLELPADSPAEPLCGSCNRCLDACPTGAIPEPFVVDARRCIAFHTIENRDPVLPAAISAAMGPWVAGCDICQDVCPWNHQPLVSSTDADLQPRPWLLNLKAEEAINWSDSDWDQRLRASTLRRIKPWMWRRNLLASAGRTGA

SEQ ID NO: 76148 - protein, 321 aa, unidentified
  source 1..321: note = Cyanobium sp.
  REGION 1..321: note = tr|A0A2E8TF17|A0A2E8TF17_9CYAN Epoxyqueuosine reductase OS=Cyanobium sp. RS427 OX=2024873 GN=queG PE=3; SV = 1
MSELPINSDQPLGQALKQRAQTEGFSPVGIARLPGSTRLQLRTAALERWLEAGHQADMGWMAAPRRKDPTTLLDGARSLLAVGLNYYVDVQATPGSLRVARYGWGRDYHRVVDQRLRRVGRWLSDQRPDCRWRACVDSTPLLDKAWAEEAGLGWIGKHSNLITSHQGSWLVIGHLLTDLDLEPDEPARSLCGRCRACMDACPTDAITEPFVVDSRRCIAYHTIENRDAELPDQIASALGPWVAGCDICQEVCPWNHKQLPSSADPELQPRPWLLNLDREKLDSWDDATWNTNLQGSALRRIKPWMWRRNAAAAQPDPPSTL

SEQ ID NO: 76149 - protein, 315 aa, unidentified
  source 1..315: note = Cyanobium usitatum
  REGION 1..315: note = tr|A0A2P7MU10|A0A2P7MU10_9CYAN Epoxyqueuosine reductase OS=Cyanobium usitatum str. Tous OX=2116684; GN = queG PE=3 SV=1
MTLHAHHDLALRLKQQAQQLGFDPVGLAAVPAGERLELRTAALERWLAAGYQADMAWMADPRRRAVEQLLPGVRSLLAVGLNYYVEADRAPGALKVARYGWGRDYHRVIDGRLRQLGRWLEQQVPGVGWRACVDSAPLMDKAWAEQAGLGWIGKNGNLINRERGSWLLLGHLLTTLELPADAAATTLCGSCSRCLPACPTGAITEPFVVDSRRCLAFHTIENRDPELPQAITSKLEGWVAGCDICQDVCPWNQQPLQSSEDADLQPRPWLLNLQAEEALGWSDADWDTKLRASALRRLKPWMWRRNLRASRSGTA

SEQ ID NO: 76150 - protein, 319 aa, unidentified
  source 1..319: note = Cyanosarcina cf.
  REGION 1..319: note = tr|A0A2T1F8A8|A0A2T1F8A8_9CHRO Epoxyqueuosine reductase OS=Cyanosarcina cf. burmensis CCALA 770; OX = 2107697 GN=queG PE=3 SV=1
MTNLTSDQIKQKALELGFHKVGIAAVEAVGTAERQRLQAWLQLGYQADMAWMANPKREDIRLVMPEVRSLICVALNYYTPHQHSTDPTNAKISRYGWGRDYHKVLHKKLKALSQWLRSQAADIQTRFYADTGPIQDKAWAQQAGIGWIAKNGNVITREYGSWVFLGEVLTDLVLTPDRPHTQHCGNCTRCIEACPTQAITQPFVVDANRCIAYHTIENRAEKLPEAIASRLDGWVAGCDICQDVCPWNQRFARTTDINEFHPYAHNLAPKLTELATIEDGEWDRRFTGSALRRVKPEMLRRNARANLESSATIVYSDSL

SEQ ID NO: 76151 - protein, 312 aa, unidentified
  source 1..312: note = Cyanothece sp.
  REGION 1..312: note = tr|B8HQK9|B8HQK9_CYAP4 Epoxyqueuosine reductase; OS = Cyanothece sp. (strain PCC 7425 / ATCC 29141) OX=395961; GN = queG PE=3 SV=1
MVTKISSEGVKQQALRLGFHKVGIARADTAGIGQAVAHLQSWLNKGQQAGMEWMQAPQRQDIRQVMPEVQSVISVGLNYYTPHGHSTVTQRAKISRYAWGRDYHKVMQRRLKALANWLTEQGEGILVRYYADTGPVQDKAWAEQAGLGWVGKHSNLISRDYGSWLFLGEVLTNLPLDPDRPHSQHCGTCTRCLEACPTGAITQPFVVDANRCIAYHTIENRAETLPAEIVPHLQGWVAGCDICQDVCPWNQRFAQVTDVEEFQPYPWNLAPSVSELANLSDEEWDRRFRASALRRIKPAMLRRNAKAIASKS

SEQ ID NO: 76152 - protein, 312 aa, unidentified
  source 1..312: note = Cyanothece sp.
  REGION 1..312: note = tr|A0A3B8XYA3|A0A3B8XYA3_9CYAN Epoxyqueuosine reductase OS=Cyanothece sp. UBA12306 OX=2055757 GN=queG; PE = 3 SV=1
MINRQEWTHIIKQKALDLGFHKIGIANVDSTFNDQAVTRLKNWLALGYHSDMAWMANPKRFDIRNCLPEVKSVICVALNYYTPHQHPPGKEYGKISRYGWGRDYHKVINKKLKALSQWLQNQGNSIQTRYYVDTGPIQDKVWAQRAGIGWIAKNSNVITREYGSWVFLGEILTNLTLIPDQPHTQHCGTCTRCLDACPTGAIPQPFVVDANRCIAYHTIENPAEILPEAIASNLQGWVAGCDICQEVCPWNQRFAQETDIADFQPYPQNLAPELKELAQMSLEEWDQRFRSSALRRIKLRRWQRNANANLEK

SEQ ID NO: 76153 - protein, 265 aa, unidentified
  source 1..265: note = Cyclobacteriaceae bacterium
  REGION 1..265: note = tr|A0A5C7Z424|A0A5C7Z424_9BACT tRNA epoxyqueuosine(34) reductase QueG (Fragment); OS = Cyclobacteriaceae bacterium OX=2099675 GN=queG PE=4 SV=1
MNPSVLIKKIATELGFSYCGIARADFLEEEAPRLEAWLKSGYQGKMGYLENHFDKRLDPTLLVPGAKSVISLIYNYYPEKDLAKENADSYKIAKYAYGEDYHQVIKEKLKHFLERVKETIGAVEGRAFVDSAPVHERAWAKKAGLGWIGKNSLLLNKSMGSFFFLAELIVDLELEYDGPIKDYCGTCTACMDACPTDAIPQPYVVDGSKCISYFTIELKDEIPLEAKGKFENWIFGCDICQDVCPWNSFSKPHTEPRFAPANELG

SEQ ID NO: 76154 - protein, 310 aa, unidentified
  source 1..310: note = Cyclobacteriaceae bacterium
  REGION 1..310: note = tr|A0A3N4H667|A0A3N4H667_9BACT Epoxyqueuosine reductase OS=Cyclobacteriaceae bacterium YHN15 OX=2487897; GN = queG PE=3 SV=1
MNNPLKYAQIIKIQAKNLGFDFCGIAKAEFLEEEAPKLDNWLNKNYQGQMTYMSNHFDKRLDPTKLVDGAKTVVSLIYNYYPQKTLPENPEDYKLAKYAYGQDYHFVIRDKLRMLLKLLQEQIGDFGGRAFVDSAPIMERQWAKKSGLGWLGKNSLLLNRQMGSFFFLAELIIDLEVEPDTPLLKDYCGTCTKCIDACPTEAIVQSGVVDGSKCISYFTIELKDQIPSEFKGKFENWVFGCDICQDVCPWNRFSKPHLEPAFNPHPDLENMNKRDWEEITEETFNRIFKKSAVKRAKYTGFLRNIIFQGK

SEQ ID NO: 76155 - protein, 307 aa, Cyclobacterium amurskyense
  REGION 1..307: note = tr|A0A0H4PEF0|A0A0H4PEF0_9BACT Epoxyqueuosine reductase OS=Cyclobacterium amurskyense OX=320787 GN=queG; PE = 3 SV=1
MNILAKHTQIVKNTASKLGFDYCGIAEATFLEEDAPKLEEWLNNNYHGKMAYMANHFDKRLDPRKLVEGAKSVVSLMYNYYPQQKLPESAEDLKIAKYAYGEDYHFVIKDKLKVFLECLKEEIGEVNGRVFVDSAPVMERQWAQKSGLGWKGKNSLLLNKTSGSFFFLAELIIDLPLAYDNPITKDYCGTCTRCIDACPTDAILQDNVIDGSKCISYLTIELKDAIPEDFKGKMKNWVFGCDICQDVCPWNRFSKPHQEEAFLPHADLEKIAWEEMTKETFNKVFKRSALKRTKWEGFQRNISFVKN

SEQ ID NO: 76156 - protein, 310 aa, unidentified
  source 1..310: note = Cyclobacterium halophilum
  REGION 1..310: note = tr|A0A1H6XRD8|A0A1H6XRD8_9BACT Epoxyqueuosine reductase OS=Cyclobacterium halophilum OX=1416801 GN=queG; PE = 3 SV=1
MQNREKNSQLIKDAARKLGFDFCGIAKAEFLEAEAPKLESWLNNNYHGKMAYMANHFDKRLDPRKLVDDAQSVISLIYNYYPPNRLPEGREDLKIAKYAYGKDYHFVIKDKLKDLLSLLREEIGEINGRVFVDSAPVMERQWAQKAGLGWTGKNSLLLNQHKGSFFFLAELIIDLPLHYDTPVTKDYCGTCTRCIDACPTDAILQPNLLDASKCISYLTIELKEEIPSEFKGKMENWAFGCDICQDVCPWNRFSKPHQEPEFLPHPELKSLDWEEMTKETFDRVFKKSALKRSKWEGLQRTIKFIRSSLS

SEQ ID NO: 76157 - protein, 308 aa, Cyclobacterium lianum
  REGION 1..308: note = tr|A0A1M7KIQ8|A0A1M7KIQ8_9BACT Epoxyqueuosine reductase OS=Cyclobacterium lianum OX=388280 GN=queG PE=3; SV = 1
MSQLEKNTLLVKKTAQHLGFDYCGIAKAEFLEEEAPKLEAWLARNYNGKMAYMANHFDKRLDPTRLVDNARSVVSLVFNYYPPKKLPEGKNDIKIAKYAYGKDYHFVIREKLNHFLEILKEEIGEINGRAFVDSAPVMERQWAQRAGLGWTGKNSLLLNKNMGSFFFLAELIIDLPLHHDNPVERDYCGTCTRCIDACPTDAIVEANLVDASRCISYLTIELKEEIPAEFKGKMENWAFGCDICQDVCPWNRFSRPHREPEFLPHTEVESLDWQEMTKDTFDRVFRKSAVKRSKWTGMMRNIQFIRKK

SEQ ID NO: 76158 - protein, 310 aa, Cyclobacterium marinum
  REGION 1..310: note = tr|A0A5D9B5P7|A0A5D9B5P7_9BACT Epoxyqueuosine reductase OS=Cyclobacterium marinum OX=104 GN=queG PE=3; SV = 1
MSTIEKHTQIVKKTASKLGFDYCGIAEATFLEEEAPKLENWLNKNYHGKMAYMANHFDKRLDPRKLVEGAKSVVSLMFNYYPQQNLDESRNALKIAKYAYGEDYHFVIKDKLKEFLKCLKEEIGEVHGRVFVDSAPVMERQWAVKAGLGWKGKNSLLLNKSSGSFFFLAELIIDLPLIYDNPSDKDYCGTCTRCVDACPTDAILQDNLIDGSKCISYLTIELKEAIPDDFKGKMENWVFGCDICQDVCPWNRFSKPHKEEAFLPHADLEKSAWEEMTKETFNKVFKRSALKRTKWEGFQKNIHFVKNESS

SEQ ID NO: 76159 - protein, 310 aa, Cyclobacterium marinum
  REGION 1..310: note = sp|G0J2F8|QUEG_CYCMS Epoxyqueuosine reductase; OS = Cyclobacterium marinum (strain ATCC 25205 / DSM 745); OX = 880070 GN=queG PE=3 SV=1
MSTIEKHTQIVKKTASKLGFDYCGIAEATFLEEEAPKLENWLNKNYHGKMAYMANHFDKRLDPRKLVEGAKSVVSLMFNYYPQQNLDESRNALKIAKYAYGEDYHFVIKDKLKEFLKCLKEEIGEVHGRVFVDSAPVMERQWAVKAGLGWKGKNSLLLNKSSGSFFFLAELIIDLPLIYDNPSDKDYCGTCTRCVDACPTDAILQDNLIDGSKCISYLTIELKEAIPDDFKGKMENWVFGCDICQDVCPWNRFSKPHKEEAFLPHADLEKSAWEEMTKETFNKVFKRSALKRTKWEGFQRNIHFVKNEAS

SEQ ID NO: 76160 - protein, 307 aa, unidentified
  source 1..307: note = Cyclobacterium qasimii
  REGION 1..307: note = tr|A0A512CG31|A0A512CG31_9BACT Epoxyqueuosine reductase OS=Cyclobacterium qasimii OX=1350429 GN=queG; PE = 3 SV=1
MKTLAEHTQIVKSTASRLGFDYCGIAEATFLEEDAPKLERWLNNNYHGKMAYMANHFDKRLDPRKLVEGAKSVISLMYNYYPQQEQLKDEDALKIAKYAYGEDYHFVIKDKLKEFLECLKEEIGEVDGRVFVDSAPVMERQWAQKSGLGWKGKNSLLLNKTSGSFFFLAELIIDLPLVYDSPTTKDYCGTCTRCIDACPTDAILQDNVIDGSKCISYLTIELKDAIPEDFKGKMKNWVFGCDICQDVCPWNRFSKPHKEEAFLPNADLEKSAWEEMTKETFNKVFKRSALKRTKWEGFQRNISFVKK

SEQ ID NO: 76161 - protein, 307 aa, unidentified; identical to SEQ ID NO: 76160
  source 1..307: note = Cyclobacterium qasimii
  REGION 1..307: note = tr|S7WGN9|S7WGN9_9BACT Epoxyqueuosine reductase; OS = Cyclobacterium qasimii M12-11B OX=641524 GN=queG PE=3; SV = 1

SEQ ID NO: 76162 - protein, 360 aa, Cycloclasticus sp.
  REGION 1..360: note = tr|A0A2G2QQ67|A0A2G2QQ67_9GAMM Epoxyqueuosine reductase OS=Cycloclasticus sp. OX=2024830 GN=queG PE=3; SV = 1
MNANSTDFHDLAQEIKTLGQSLGFQQVGISDTELSEAEKQLADWLDAGFHGEMNYMHKHGTKRTRPNELHPGTVRVISCRMDYLPESMSITNELMADPARAYISRYALGRDYHKVIRKKLQQLATLIEELIGPFGYRAFVDSAPVMEKSIAEKAGLGWIGKHSNLINKEAGSWFFLGELYVDLPLPVDQPIKDHCGHCTDCIDICPTQAIVAPYVVDSRRCISYLTIELQGAIPEHLRPLMGNHIYGCDDCQQVCPWNRFANLTVEKDFMTRHQLDTASLLDVFSWSEEDFLRNTEGSAIRRIGYVSWIRNIAVALGNASYDPDILVALNKRENHPNPIINEHVRWAIEQHVAALHEVTT

SEQ ID NO: 76163 - protein, 353 aa, Cycloclasticus sp.
  REGION 1..353: note = tr|A0A1X1QKS4|A0A1X1QKS4_9GAMM Epoxyqueuosine reductase OS=Cycloclasticus sp. symbiont of Poecilosclerida sp. N OX=1840472 GN=queG PE=3 SV=1
MSKNSTDFQQLARDIKTLGESLGFQQVGITDTDLSEAEQQLSKWLGAGLHGEMGYMQKHGSKRTRPNELHAGTVRVISCRMDYLPEPMQRTNELMEDPVRAYISRYALGRDYHKVIRKKLQKLADLIEQKIGPFGYRAFVDSAPVMEKALAEKAGLGWIGKHSNVLNKQAGSWFFLGELYTSLALPIDDPAEEHCGDCTDCIDICPTQAIIAPYTVDARRCISYLTIELRGSIPIEFRPLMGNRIYGCDDCQQVCPWNRFASLTDEGDFKPRQNLDTIDLFNVFQWTEKTFLTKTEGSAIRRIGYESWIRNIAIALGNAPKNRLILSLLESRQNDSNPVIREHILWAIDQQAA

SEQ ID NO: 76164 - protein, 360 aa, unidentified
  source 1..360: note = Cycloclasticus zancles
  REGION 1..360: note = tr|S5T6U1|S5T6U1_9GAMM Epoxyqueuosine reductase; OS = Cycloclasticus zancles 78-ME OX=1198232 GN=queG PE=3; SV = 1
MNENNIDLQQLAKEIKSLGQSLGFQQVGITDTELSDAEKQLNHWLEAGFHGDMDYMHKHGTKRTRPSKLHEGTIRVISCRMDYLPEHMERTKDLMKDPVRAYISRYSLGRDYHKLIRKRLQKLATLIEQKIGPFGYRVFVDSAPVMEKAIAEKAGLGWIGKHSNVLNKEAGSWFFLGELYIDLPLPIDTAAEKHCGRCTDCIDICPTQAIVAPYTVDARRCISYLTIELKGSIPEEFRAPMGNRIYGCDDCQQVCPWNRFASLTNEEDFLARQHLDTTSLIDIFRWDEHTFFKNTEGSAIRRIGYVSWIRNIAVALGNAPHDKEIIKTLSEKQHDDNPIIQEHVQWAITQQKQKKPLSNC

SEQ ID NO: 76165 - protein, 323 aa, Cylindrospermopsis raciborskii
  REGION 1..323: note = tr|A0A1X4G585|A0A1X4G585_9CYAN Epoxyqueuosine reductase OS=Cylindrospermopsis raciborskii CENA303; OX = 1170769 GN=queG PE=3 SV=1
MSYLTSLSTHTIKEKAYKLGFHKVGVAVVLGESKEKERLRKWISLGYHADMDWMTNPKREDIKLVMPEVRSLVCVAINYYTPHPRPQGVEYGKISRYGWGRDYHRILHKKLKQLATWLESQGEGIKARYYADTGPIQDKVWAEKAGIGWIGKNGNVITREYGSWVFLGEVLTNLELEGDTPATQHCGTCNRCIEACPTEAIAQPFVVDANKCIAYHTIENRGETLPINIERNLQGWVAGCDICQDVCPWNQRFSQITDVVDFHPYPGNLAPKLVELSEITDEQWNEKFSASALRRIKPGMLRKNARANLTTLKLNNDSKSNHL

SEQ ID NO: 76166 - protein, 324 aa, Cylindrospermopsis raciborskii
  REGION 1..324: note = tr|A0A3F3KF70|A0A3F3KF70_9CYAN Epoxyqueuosine reductase OS=Cylindrospermopsis raciborskii S05 OX=2014879; GN = queG PE=3 SV=1
MSSLTSLSTHTIKEKAYKLGFHKVGVAVVLGVESKEKERLRKWISLGYHADMDWMTNPKREDIKLLMPEVRSLICVAINYYTPHSHPMGEEYGKISRYGWGRDYHRILHKKLKQLATWLESQGEGIKARYYADTGPIQDKVWAEKAGIGWIAKNGNVITREYGSWVFLGEVLTNLELEGDTPATQHCGTCNRCIEACPTQAITQPFVVDANKCIAYHTIENRGETLPINIERNLQGWVAGCDICQDVCPWNQRFSQVTDVVDFHPYPGNLAPNLVELSGITDEQWSEKFPASALRRIKPKMLRRNARANLTTLKLNNDSKSNHL

SEQ ID NO: 76167 - protein, 324 aa, Cylindrospermopsis sp.
  REGION 1..324: note = tr|A0A0R0M9J9|A0A0R0M9J9_9CYAN Epoxyqueuosine reductase OS=Cylindrospermopsis sp. CR12 OX=1747196; GN = queG PE=3 SV=1
MSSLTSLSTHTIKEKAYKLGFHKVGVAVVLGVESKEKERLRKWISLGYHADMDWMTNPKREDIKLLMPEVRSLVCVAINYYTPHSRPLGGEYGKISRYGWGRDYHRILHKKLKQLATWLESQGEGIKARYYADTGPIQDKVWAEKAGIGWIAKNGNVITREYGSWVFLGEVLTNLELEGDTPATQHCGTCNRCIEACPTQAITQPFVVDANKCIAYHTIENRGETLPINIERNLQGWVAGCDICQDVCPWNQRFSQVTDVVDFHPYPGNLAPKLLELSEITDEQWNEKFTASALRRIKPKMLRRNARANLTTLKLNNDSKSNHL

SEQ ID NO: 76168 - protein, 325 aa, Cylindrospermum sp.
  REGION 1..325: note = tr|A0A1Z4QC71|A0A1Z4QC71_9NOST Epoxyqueuosine reductase OS=Cylindrospermum sp. NIES-4074 OX=2005457; GN = queG PE=3 SV=1
MTQCALTSSSVVKEKAKELGFHQVGIAAVDDGVNATAVQRLQAWLALGYHAEMEWMAAPKRQDIHLVMPEVRSLVCVALNYYTPDQRPESEEYGKISRYGWGRDYHKIMHKQLKQLATWLESLGEGVQARYYADTGPVQDKVWAQKAGIGWIAKNGNVITREYGSWVFLGEVLTNLELESDRPSTEHCGTCTRCMQACPTGAITEPFVVDANRCIAYHTIENRSEQLPETVTPHLQGWVAGCDICQDVCPWNQRFAQVTDVTDFQPYPGNLAPKLIELAEISDQEWDQQFPASALRRIKPEMLRRNARANLDASRLKNDPESNNI

SEQ ID NO: 76169 - protein, 324 aa, Cylindrospermum stagnale
  REGION 1..324: note = tr|K9X0K7|K9X0K7_9NOST Epoxyqueuosine reductase; OS = Cylindrospermum stagnale PCC 7417 OX=56107 GN=queG PE=3; SV = 1
MNQCALTSSSVIKEKAKELGFHKVGIAAVDGVDATERQRLQAWIALGYHADMEWMTSPKRQDIRLVMPEARSLVCVALNYYTDDQRPEGEEYAKVSRYGWGRDYHRVVHKKLKQLATWLESLDQSIQARYYADTGPVQDKVWAQKAGIGWIAKNGNVITREYGSWVFLGEVLTNVELESDRPSTEHCGTCTRCIQACPTGAITEPFVVDANRCIAYHTIENRAEKLPQTVAPHLQGWVAGCDICQDVCPWNQRFSQVTDVTDFQPYPGNVAPKLIELAEISDQEWDIKFTASALRRIKPEMLRRNASANLDASRRKNDPKSDNF

SEQ ID NO: 76170 - protein, 339 aa, Cystobacter ferrugineus
  REGION 1..339: note = tr|A0A1L9BCW1|A0A1L9BCW1_9DELT tRNA epoxyqueuosine(34) reductase QueG OS=Cystobacter ferrugineus OX=83449 GN=BON30_13625 PE=4 SV=1
MPPLSTQHLRQLSTQVGFDLVGFARAEPIPGDFLLEWLAAGCDADMDWLGTRTAERLDVSLLLPGARTVIAFATNYYREDPRTEDSPIARYARGRDYHSTLRDSLKSFRRRLKEAYPEVHDYGSVDSGPMMEKVWAARAGLGYVGKNGCFITEPLGSWVLLAVLVLDAEVDAYAEGPTADRCGSCHLCIMSCPTGALLGQGRVDARACLSYQTIENRHAEVPESFRVEMDNLVFGCDICQDVCPLNRRPVTTSNKRFAPRAVAELGVMELAALTPEQYDQLIPGTALGRAKYDGLRRNAVYALGAAKRVEARPLIERLREDPSEAVRHAAEWALLHLNP

SEQ ID NO: 76171 - protein, 365 aa, Cystobacter fuscus
  REGION 1..365: note = tr|A0A250JFY2|A0A250JFY2_9DELT Epoxyqueuosine reductase OS=Cystobacter fuscus OX=43 GN=CYFUS_008288 PE=4; SV = 1
MDPGEVHDLAPRVISEGARRLGYVEAVPPLSTEHLRQLSTQVGFDLAGFARAEPIPGDFLLEWLAAGRDADMDWLGERTAERLDVSLLLPGARTVIAFATNYYREEPRTEDSPIARYARGRDYHSTLRDSLKSFRRRLKEAYPEVRDYGSVDSGPMMEKVWASRAGLGYVGKNGCFITEPLGSWVVLAVLVLDAEVDAYADGPTADRCGSCHLCIMSCPTGALLGQGRVDARACLSYQTIENRHAEVPESFRVEMDNLVFGCDICQDVCPLNRRPVSTSNKRFVPRAVAELGVMELAALTPEQYDQLIPGTALGRAKYDGLRRNAVYALGAARRMEARPLIERLREDPSEAVRHAAEWALLHLGS

SEQ ID NO: 76172 - protein, 345 aa, Cystobacter fuscus
  REGION 1..345: note = tr|S9PPS3|S9PPS3_9DELT Epoxyqueuosine (OQ) reductase QueG OS=Cystobacter fuscus DSM 2262 OX=1242864; GN = D187_000456 PE=4 SV=1
MGYVEAVPPLSTKHLRQLSTQAGFDLVGFARAEPIPGDFFLEWLAAGCDADMDWLGERTAERLDVSLLLPGARTVIAFATNYYREEPRTEDSPIARYARGRDYHSTLRDSLKSFRRRLKEAYPEVRDYGGVDSGPMMEKVWAARAGLGYVGKNGCFITEPLGSWVVLAVLILDAEVDTYADGPTVDRCGSCHLCIMSCPTGALLGQGRVDARACLSFQTIENRHGEVPESFRVEMDNLIFGCDICQDVCPLNRRPVVTPNERFAPRAVAELGVMELAALTPEQYSQLIPGTALARAKYDGLRRNAVYALGAAKRLEARPLLERLREDPSEVVRHAAAWALLHLHP

SEQ ID NO: 76173 - protein, 314 aa, Cytophaga hutchinsonii
  REGION 1..314: note = tr|Q11Y54|Q11Y54_CYTH3 Epoxyqueuosine reductase; OS = Cytophaga hutchinsonii (strain ATCC 33406 / NCIMB 9469); OX = 269798 GN=yjeS PE=3 SV=1
MASLQIAHNTRIVKEAARIAGFDYCGISAARFLEEEAPRLESWLNRNQHGTMSWMENYFDKRLDPRKLVDGAKSVVSVLLNYTPAPEDEILSTGETKISRYAYGKDYHYVLKDKFKQMLQHITEQIGEVNGRAFVDSAPVMDKAWAKQGGLGWVGKHSNIITKDSGSYFFIGELIIDLELDADGPIKDYCGTCTRCIDACPTNAITEPYQVDGSKCISYLTIELKEQIPSEFKEQMQGWAFGCDICQEVCPWNRFAQPINKNEFSPSEELKKYFEMPLKEITKEVFNILFKDSTIKRTKIEGLSRNLTFIKKET

SEQ ID NO: 76174 - protein, 322 aa, Cytophaga sp.
  REGION 1..322: note = tr|A0A4R4KLT2|A0A4R4KLT2_9BACT Epoxyqueuosine reductase OS=Cytophaga sp. DMA-K-7a OX=2070510 GN=queG; PE = 3 SV=1
MTQTDKIAQERAILIKEKAAALGFDFCGISNAQFLEAEAPRLEKWLNKNQHGQMAWMANHFDKRLDPRKLMEGAQSVVSVLLNYYPEQRLSEDSEAYKLSKYAYGTDYHFVLKDKLKSLLTFIHTEIGEVQGRAFVDSAPVMDKVWAARSGLGWIGKHSNLLNRQMGSFFFIGELILDLELAADGPMTDYCGTCTRCIDACPTDAIVEPYVVDGSKCISYFTIELKEAIPKEVQGKFENWIFGCDICQDVCPWNRFSQPHTTPEFALSPALAAFTNKDWEEITEDVFKEIFRRSPVKRTKLEGLKRNLRFVQGNSGIETEND

SEQ ID NO: 76175 - protein, 316 aa, Cytophaga xylanolytica
  REGION 1..316: note = tr|A0A2W7NEH4|A0A2W7NEH4_9BACT Epoxyqueuosine reductase OS=Cytophaga xylanolytica OX=990 GN=queG PE=3; SV = 1
MTSTPNLTDAIHRQQIRAKALDLGFDDIGFATAQRLNDDEPRLQKWLLNGANAEMAYMANHFEKRVDPRLLVDGACTIVSLLSSYKPAVESNNPDNFKIARYAWGHDYHEVIREKLNELFNYIRDHHYPDLQGRAFVDSAPVLERAWAARAGLGWMGKNTCLIHPKLGSYVFISELIINMPLTGNSSLVNNHCGSCSRCIDACPTQAITPGFVDARKCISYWTIEHKGEIDPSITQNLNNWIFGCDICQEVCPWNRKTPPSKEPSFSPQPQLLQMNKSDWEELSEDSFRIIFKKSAVKRTKYIGLMRNIRANTNQK

SEQ ID NO: 76176 - protein, 310 aa, unidentified
  source 1..310: note = Cytophagaceae bacterium
  REGION 1..310: note = tr|A0A2E2SJD4|A0A2E2SJD4_9BACT Epoxyqueuosine reductase OS=Cytophagaceae bacterium OX=2026729 GN=queG; PE = 3 SV=1
MNSKDKYTQIIKNEAKRLGFMSCGIARAQFLEEEAPRLENWLNQDMHGEMGYMANHFDKRLDPTVLVPGAKSVVSLLLNYYPGEKQRPDTYKISKYAYGRDYHMVIKEKLKELMHHINLQIGEVHGRVFVDSAPVMDKAWAAKAGLGWIGKNSNLLTRQVGSFYFIAELIIDLELAYDTPVTDHCGTCTACIDACPTQAIVEPYKVDGSKCISYFTIELKDAIPDYAQGKMDEWMFGCDVCQDVCPWNRFSRPHSEPLFEPHPELLSNSRHEWEELTKEVFNEIFRKSAVKRTKYEGLRRNIQFLKDQEG

SEQ ID NO: 76177 - protein, 310 aa, unidentified
  source 1..310: note = Cytophagaceae bacterium
  REGION 1..310: note = tr|A0A401U727|A0A401U727_9BACT Epoxyqueuosine reductase OS=Cytophagaceae bacterium Ys OX=2482724 GN=queG; PE = 3 SV=1
MSPQTAHTALIKSAAANLGFSFCGIAKAEFLEDEAPRLEEWLQRGYQGKMSYLENYFDKRLDPRLLVPGAKSIITLGYNYYPSADLSQTSNLKIAKYAYGEDYHFVIKDKLKTLLEELRLSIGEIDGRAFVDSAPVMERAWAQRAGTGWIGKNSLLLNKQMGSFFFLAELIIDLELDYDSPIKDYCGTCTACMDACPTEAIPEPYVVDGSKCISYFTIELKDAIPEEVKGKFDNWIFGCDICQDVCPWNRFSKAHSEKKFEPSDELKNLSKSDWKEITEEVFQLVFRRSAVKRTKLEGLQRNIEFVKTSK

SEQ ID NO: 76178 - protein, 314 aa, unidentified
  source 1..314: note = Cytophagales bacterium
  REGION 1..314: note = tr|A0A355BMP1|A0A355BMP1_9BACT Epoxyqueuosine reductase OS=Cytophagales bacterium OX=2053541 GN=queG; PE = 3 SV=1
MNIRPAQRAQLMKEIAREEGFDFCGIAKAVFLEDEAHRLDTWLKRGYQGTMSYLENYTDKRLDPRLLVPGAQSVVSLLYNYYPAESLHADDGEFKVARYAYGEDYHHVIKDKLFIVLQRLKERIGDIQGRVFVDSAPVMERAWAARSGLGWIGKNSLLLNRSMGSYFFLAEIIIDLEMEADGPIKDYCGSCTACQDACPTDAIVEPYVVDGSRCISYYTIELREQIPQVAQGKMNNWIFGCDICQEVCPWNRFSKPHQEPRFQPSNDLVDLDRKRWLEMTEDTFDRVFANSAIQRTKYEGLKRNIEFVTREVTK

SEQ ID NO: 76179 - protein, 312 aa, unidentified
  source 1..312: note = Cytophagales bacterium
  REGION 1..312: note = tr|A0A286IGH1|A0A286IGH1_9BACT Epoxyqueuosine reductase OS=Cytophagales bacterium TFI 002 OX=1945892; GN = queG PE=3 SV=1
MPQNPTNLIKTKAKELGFDFCGVSKAEFLEEEAPRLEQWLNQNYHGKMAYMANHFDKRLDPCKLVDGAKSVISVMLNYYPSKRLPEGEEDLKISKYAYGIDYHLVLKDKLKELFAYINEEIGEVGGRIFVDSAPVMDKAWAKKSGLGWVGKHSNLLNREMGSFFFLGEIICDLELEPDGPIKDYCGTCTACIDACPTDAITEYVVDGSKCISYYTIELKDAIPQDAKGKMKNWVFGCDICQDVCPWNRFSKPHSTPEFDLKPELAAFTNKDWEEITEEAFKEVFRKSPLKRTKLDGLKRNVSFVLNQSNYES

SEQ ID NO: 76180 - protein, 305 aa, unidentified
  source 1..305: note = Cytophagia bacterium
  REGION 1..305: note = tr|A0A2E0GYE2|A0A2E0GYE2_9BACT Epoxyqueuosine reductase OS=Cytophagia bacterium OX=2026730 GN=queG PE=3; SV = 1
MIQKNTEFIKTEAKKLGFSGCGISKARFLSEEAKNFEKWLSNGYQGSMSYLEKNIDKRLNPTILVPGSKSVISLAFNYFPPKKLIDNNNFIISKYAYGKDYHKVLKKKLKKLFFLMREKIGNIEGRVFVDSAPIHERAWAKLSGLGWVGKNSLLINKNQGSFFFLAEIICDLELEYDEPVLNRCGNCSRCIDACPTDAITKAQVINAKKCISYLTIENKDNIPEELNDSMNNSIFGCDICQDVCPWNKNSKPHEEIEFLPKKNLRKLRKKDWVELTEETFDRIFEGSAIKRTKYKGLKRNIRAVS

SEQ ID NO: 76181 - protein, 305 aa, unidentified
  source 1..305: note = Cytophagia bacterium
  REGION 1..305: note = tr|A0A2E9WJY7|A0A2E9WJY7_9BACT Epoxyqueuosine reductase OS=Cytophagia bacterium OX=2026730 GN=queG PE=3; SV = 1
MKKRNSKIIKKLAKKIGFSSCGISKARFLKEEEKNFEDWLKQGKQGKMGYLERNFDKRLNPKKLVPGAKSVISLTFNYFPPKKISNNNSFIISKYAYGKDYHYIIKEKLNALFSKIKEKIGNVEGRVFVDSAPIHERAWAKISGLGWIGKNSLLINKNMGSYFFLAEIVCDLDLEYDSIVSDHCGTCSKCIDACPTNAITEAQVIDSNRCISYLTIENKGDIPKELSQSFNDYIFGCDICQDVCPWNRFSKPHSEKELMPKEKLKKMSKKDWKELTKETFDIIFKDSAIKRCKFDGLKRNILSVS

SEQ ID NO: 76182 - protein, 310 aa, unidentified
  source 1..310: note = Dactylococcopsis salina
  REGION 1..310: note = tr|K9YWG9|K9YWG9_DACSA Epoxyqueuosine reductase; OS = Dactylococcopsis salina PCC 8305 OX=13035 GN=queG PE=3; SV = 1
MVLTSQEIKTKAKRLGFHLVGVAAAENDEQILAQKRLQNWLASGYNADMEWMNNPKRFALQKCLPNVKSVIAVALNYYTPEQQSEDPEKGKISRYAWGRDYHKVMTKKLKALACWLEEQEETIQARFYCDTGPVQDKFWAQQAGLGWIAKNGNLITREYGSWVFLGEVLTTLELTPDTPHTEHCGTCTRCLEACPTDAFPQPFVVNAKRCIAYQTIENRAAELPKEINLNNWVAGCDICQEVCPWNQRFAKETDCDDFQPRPENIAPNLIELAQLRDESWDQKTRGSALRRIKPAMWRRNARANLEKDRD

SEQ ID NO: 76183 - protein, 356 aa, unidentified
  source 1..356: note = Dankookia rubra
  REGION 1..356: note = tr|A0A4R5Q9E3|A0A4R5Q9E3_9PROT Epoxyqueuosine reductase OS=Dankookia rubra OX=1442381 GN=queG PE=3 SV=1
MPETPTPAAFPPGETARAAIRAEARRLGFDAVGFTEALLPDAVRARLDGFLAAGMHGSMGWLAERAAQRAQPRGLWPEAVSVVSLGLSYAPGEDPLAILARRDRGAISVYAQGRDYHDVVKSRLKALGRWMAQRFGAELKVFVDTAPVAEKPLAQQAGLGWQGKHSNLVSRRHGSWLFLGEVYTTLALSPDPPERDHCGSCRNCLAACPTNAFPAPYRLDARRCISYLTIEHRGPIPEEFRAPMGNRIYGCDDCLAVCPWNKFARAHSEPGFAPRAALAAPKLAELAALDDAGFRALFSGSPVKRIGRDRFVRNVMIAAGNSADPALRPVAQALTEDPDPVVAEAARWAALRLEEA

SEQ ID NO: 76184 - protein, 354 aa, unidentified
  source 1..354: note = Dechloromonas aromatica
  REGION 1..354: note = tr|Q47BK0|Q47BK0_DECAR Epoxyqueuosine reductase; OS = Dechloromonas aromatica (strain RCB) OX=159087 GN=queG; PE = 3 SV=1
MHDQNSTVDYAALKEKIREAGKELGFAAIGVARAEPGPAVEKMQEWLAAGCHGEMDYMARHAELRAQPQLLHPGTITVISAAIDYLPHTKTADHAGQAAISRYAQGRDYHKLIRSRLQKLADAIAAITGAFGYRVFSDSAPVMEVEYARQAGLGWRGKHTLLLSKQGSWRFLGDIYTDLPLPPDTPIEEHCGTCSACIAACPTGAIVAPYKVDARRCISYLTIELDGPIPEQYRPLIGNRIYGCDDCQLCCPWNRFAQIGDPEFAPRHGLDAATLIELFAWTEHQFNDRLAGNPIRRIGHERWLRNIAVALGNGPANTAAVEALARHADHPSQLIREHVAWALHKLGTQPRQAR

SEQ ID NO: 76185 - protein, 350 aa, Dechloromonas denitrificans
  REGION 1..350: note = tr|A0A133XMY7|A0A133XMY7_9RHOO Epoxyqueuosine reductase OS=Dechloromonas denitrificans OX=281362 GN=queG; PE = 3 SV=1
MHDQDSTVDYAALKEKIREAGQELGFAAVGVARAEPGPAVEHLRAWLAAGCHGEMDYMARHAELRAHPPQLHPGTITVISAAVDYLPHAKIADQPEQAAISRYAQGRDYHKVIRSRLQKLADAIAALIGPFGYRVFSDSAPVMEVEFARQAGLGWRGKHTLLLSKQGSWRFLGEIYTDLPLVPDAPIEEHCGTCSACLSACPTQAIVAPYQVDARRCISYLTIELDGPIPEEFRPLIGNRIYGCDDCQLCCPWNRFAQLGDPEFSPRHGLDAAQLIDLFAWTETEFNDRLAGNPIRRIGHARWLRNIAVAMGNGSPAVDAANALKSRAEHPDPLVREHVAWALQQLQAKS

SEQ ID NO: 76186 - protein, 349 aa, Dechloromonas sp.
  REGION 1..349: note = tr|A0A5C7ZH50|A0A5C7ZH50_9RHOO Epoxyqueuosine reductase OS=Dechloromonas sp. OX=1917218 GN=queG PE=3 SV=1
MHDQDSSVDYVALKAAIRDAGNVLGFSALGVARADPGPAVEHLRAWLAEGMHGTMDYMARHAELRAQPATLQPGTLTVISVALDYLPHTTVVSDPARAAVSRYAQGRDYHKVVRSRLQKLADAIAGIAGPFGYRVFSDSAPVMEVEFARQAGLGWRGKHTLLLSQQGSWRFLGEIYTDLPLPPDTPVAEHCGTCSACIDACPTGAIVAPYRVDARRCISYLTIELDGTIPEAFRPLLGNRIYGCDDCQLCCPWNRFARIGDPEFTPRQRLDSATLIELFAWTEAQFNDRLAGNPIRRIGHERWLRNIAIALGNGPATVDAEKALKSRADHPSAIIREHVAWALARHSAR

SEQ ID NO: 76187 - protein, 348 aa, Dechloromonas sp.
  REGION 1..348: note = tr|A0A3B7A988|A0A3B7A988_9RHOO Epoxyqueuosine reductase OS=Dechloromonas sp. HYN0024 OX=2231055 GN=queG; PE = 3 SV=1
MHDQDSMVDYAALKEKIRAAGQKFGFAAVGVARAKPGHAAEKMREWLAAGCHGEMDYMARHADLRADPQQLHPGTITVISAAIDYLPHLGTTDEPGQAAISRYAQGRDYHKLIRSRLQKLADAISELTGPFGYRVFSDSAPVMEVEFARQAGLGWRGKHTLLLSKQGSWRFLGDIYTDLPLPPDEPIDEHCGSCTACLDACPTRAIVAPYKVDARRCISYLTIELAGPIPEEFRPLIGNRIYGCDDCQLCCPWNRFAQLGDPEFSPRHGLDTASLINLFAWTAPEFDYRLAGNPIRRIGHERWLRNIAVALGNGPASTEARNALTAKLDNPSPLVREHVAWALTRLAP

SEQ ID NO: 76188 - protein, 353 aa, unidentified
  source 1..353: note = Defluviimonas alba
  REGION 1..353: note = tr|A0A159Z7S6|A0A159Z7S6_9RHOB 4Fe-4S ferredoxin, iron-sulfur cluster binding protein OS=Defluviimonas alba; OX = 1335048 GN=AKL17_4283 PE=4 SV=1
MPISTSEPPGAALKARLQAQALAEGFAKMGVCAPDAVPEAAGRLAAFVAAGRHGQMGWMAERMGWRGDPAALWPEARSVVMLAEVYTPGHDPLAVLERPECGAVSVYAQGRDYHDLVKRRLKRVGRWLLDQTVDGEAIKVFVDTAPVMEKPLAQAAGLGWQGKHTNLLGRDLGSWFFLGAIFTTVDLPKDAAEPERCGSCTACLDICPTRAFPAPFQLDARRCISYLTIEHRGPVDPELRALMGNRIYGCDDCLAVCPWNKFAQDATETGYASREAEPPLLADLAMLDDAGFRARFAGSPIKRIGRDRMVRNVLYAIGNSGDAGLRPVAAQLTGDADAAVADAARWAVARLGA

SEQ ID NO: 76189 - protein, 352 aa, unidentified
  source 1..352: note = Defluviimonas aquaemixtae
  REGION 1..352: note = tr|A0A2R8BJR7|A0A2R8BJR7_9RHOB Epoxyqueuosine reductase OS=Defluviimonas aquaemixtae OX=1542388 GN=queG; PE = 4 SV=1
MDLLALKARIADRATAEGFSAVGFCGPDAIPEAAGRLEAFVAAGRHGQMGWLAERMGWRGNPVALWPEAKTVIMLAEVYTPAGDPLAMLEARGRAAVSCYAQGRDYHDLVKKRLKRVGRWLIDEASKGSVPAEIKVFVDTAPVMEKPLAQAAGIGWQGKHTNLLSRDLGNWFFLGAIFTTLDLPKDMAESDHCGSCRACLDICPTRAFPAPYELDARRCISYLTIEHRGPVDEEFRALLGNRIFGCDDCLAVCPWNKFAARARETGYAARVGAPPLAELAGLDDAGFRARFSGSPVKRIGRDRFVRNVLYAIGNSGDPALAETARSLTGDPDAAVADAARWALGRLADSRQG

SEQ ID NO: 76190 - protein, 350 aa, unidentified
  source 1..350: note = Defluviimonas denitrificans
  REGION 1..350: note = tr|A0A2S8S8N4|A0A2S8S8N4_9RHOB Epoxyqueuosine reductase OS=Defluviimonas denitrificans OX=404881 GN=queG; PE = 3 SV=1
MDAAGLKHRLVAKAVEEGFAAARICRPDAIPEAAGRLATFVDQGRHGQMGWMAERMGWRGDPAALWPEARSVVMLAEVYTPEGDPLAVLDRPDRAAVSCYAQGRDYHDLVKKRLKRVGRWLIEAAEKGSVPAEIKVFVDTAPVMEKPLAQAAGLGWQGKHTNLVSRELGSWFFLGAIFTTLDLPVDGAEVDHCGSCRACLDICPTGAFPAPYQLDARRCISYLTIEHKGPVDEALRGALGNRIYGCDDCLAVCPWNKFAVAAREAGYAARVGAPPLAELATLDDAAFRARFSGSPVKRIGRDRFVRNVLYAIGNSGEEALSPLVESLLADADPAVADAAQWALRRLKSAR

SEQ ID NO: 76191 - protein, 344 aa, unidentified
  source 1..344: note = Defluviimonas sp.
  REGION 1..344: note = tr|A0A059INY1|A0A059INY1_9RHOB Epoxyqueuosine reductase OS=Defluviimonas sp. 20V17 OX=1417296 GN=queG; PE = 3 SV=1
MFADLKNRLKARAIDEGFVAMGVCRPDAIPQAPARLEAFVGAGMHGQMGWMAERMGWRGDPAALWPEARSVVMLAESYTPEGDPLAVLEARDRGAVSVYAQGRDYHDLVKKRLKRLGRWLIEAGGGEIKVFVDTAPVMEKPLAQAAGLGWQGKHTNLLSRDFGNWVFLGAIFTTLDLPADPPETEHCGSCRACLEICPTRAFPAPFVLDARRCISYLTIEHKGPVDPELRPLMGNRIYGCDDCLAVCPWNKFAAVARETRYAGKVGAPPLAELAGLDEAAFRARFSGSPIKRIGRDRFLRNVLYAIGNSGDRSLAGAARAQIGDPCETVAEAARWAVTRLAAGG

SEQ ID NO: 76192 - protein, 342 aa, Dehalobacter sp.
  REGION 1..342: note = tr|A0A4R4CW92|A0A4R4CW92_9FIRM Fe-S oxidoreductase; OS = Dehalobacter sp. 12DCB1 OX=2070364 GN=C1I38_11200 PE=4; SV = 1
MHVENLIQDKAYEFGYEKCGIVRIQDLEGYDKCLRERIDKVPVSKMFYRSQSRLTDLQERYPWAKSVIVAVSHFGHYKAPGELKGHIAKHYLFDGRVNTESKEFKRSVAMEQFLQDLGLKTASNRNFGIVGLRWAAMKAGLGIIRKNNFFYTESGSWVELEAWITDRDMELVESTNLPICPEGCSNCIKACPTCSLSSPYTMNPLSCVSFLTTFGGRDLANDPLGKSFGTWIYGCDACQDACPMNSGKWTEKDEFPGVLEISLCLTPENIMKMEEEFYKHNIQPKFFYLSPDELWKWKVNVLNFMRNNYQESYKQYILEACNNENEKIRDIAQTIYKDVFNR

SEQ ID NO: 76193 - protein, 342 aa, Dehalobacter sp.
  REGION 1..342: note = tr|T0JCB7|T0JCB7_9FIRM Epoxyqueuosine (OQ) reductase QueG OS=Dehalobacter sp. UNSWDHB OX=1339256 GN=UNSWDHB_587; PE = 4 SV=1
MRVENLIQDKAYEFGYEKCGIVRIQDLEGYDKCLRERIDKVPASKMFYRSQSRLTDLQGRYPWAKSVIVAVSHFGHYKAPEQLKGHIAKHYLFDGRVNTESKEFKRSVAMEQFLQDLGLKTASNRNFGIVGLRWAAMKAGLGIIRKNNFFYTESGSWVGLEAWITDRDMELVESTNLPICPEGCSNCIKACPTCSLSSPYTMNPLSCVSFLTTFGGRDLANDPLGKSIGTWIYGCDACQDACPMNSGKWTEKDEFPGVLEISLCLTPENIMKMEEEFYKHNIQPKFFYLSPDELWKWKVNVLNFMRNNYQESYKQYILEACNNENEKIRDIAQMICKDIFNR

SEQ ID NO: 76194 - protein, 460 aa, unidentified
  source 1..460: note = Dehalococcoides mccartyi
  REGION 1..460: note = tr|A0A2J1E0C1|A0A2J1E0C1_9CHLR Reductive dehalogenase OS=Dehalococcoides mccartyi OX=61435; GN = CVH13_00156 PE=4 SV=1
MVDPQKWDLNRRDFIKKTGLASVAATAVVAVNTTGIIADEFVKPGIKAMDPLGNASIKRELPENFYKKIEHRPGYIGTTQIVSSGERMDAREHGFAQIVRRSSTGDWSGEPGDWGPVLLAAVKEKNKHLAEISDIERLDYTWSSTLQVAMDRWHINLAPGKFEPAPISATKVEMSPAEATAKIKKMARWLGAEQVGICEVTEDMKPFFYSIGRKHGNYSGPVANYEEDEGREIPWPYPYKYCIVLADKCDTDTLSALEGPLVEASARVSCSICDFLPHYLESIIRALGYDAKANPFSDTDIIEAPFAVKAGLGELGRSGLLVSPWGAQLRLLEVFTNMPLVPDMPIDFGLQEFCKVCKKCAENCPSQAISMDDEPSEVITTVKSIRWLQDEKKCLARRLAYGCAKCQSVCPWSKPDTLMHEIGRMIGQNPALASFLVKVDDFFYNRFPEGHSAADYAPWR

SEQ ID NO: 76195 - protein, 308 aa, unidentified
  source 1..308: note = Dehalococcoides mccartyi
  REGION 1..308: note = tr|A0A076IEL5|A0A076IEL5_9CHLR FeS-binding protein; OS = Dehalococcoides mccartyi CG1 OX=1432059 GN=X792_07630; PE = 4 SV=1
MSDISGRAVAGLTENGFKAGTVSCKHLPELEENIENLKRQGLVDTLLAKTYLQFKYDSDSAMPDTRTVFIIAIPQPLTRTRFTWKGHIYNADIPPTYIGSKDDAAVSNILTSIIQAEGFKSVRTNLPVKILAVRSGLAEYGRNNLAYIHGFGSYHRLIAFVSDCPCTQDNWNEPKEMKACSKCFKCTRNCPSGCISDERFLLKAENCLTWHNEREDTLAGWIDPDWHNALIGCMRCQTVCPLNTRQSARVIPGPEFTEEETNLIRQKLPANQIPADLYQKLSTIAMDDSYPVFARNLELLVNPKNIIR

SEQ ID NO: 76196 - protein, 308 aa, unidentified
  source 1..308: note = Dehalococcoides sp.
  REGION 1..308: note = tr|A0A0C6ER71|A0A0C6ER71_9CHLR Uncharacterized protein OS=Dehalococcoides sp. UCH007 OX=1522671; GN = UCH007_13990 PE=4 SV=1
MSDISGRAVAELTENGFKASTVSCKHLPELEENIENLKRQGLVDTLLAKTYLQFKYDFDSAMPNTRTVFIIAIPQPLTRARFTWKGHIYNADIPPTYIGSKDDAAVSNILTSIIQAEGFKSVRANLPVKILAAHSGLAEYGRNNLAYIHGFGSYHRLIAFVSDCPCTQDNWNEPKEMKACSKCFKCTRNCPSGCISDERFLLKAENCLTWHNEREDTLAGWIDPDWHNALIGCMRCQTVCPLNIRQSARVIPGPEFTEEETNLIRQKLPANQIPADLYQKLSTIAMDDSYPVFARNLELLVNPKNIIR

SEQ ID NO: 76197 - protein, 455 aa, unidentified
  source 1..455: note = Dehalococcoides sp.
  REGION 1..455: note = tr|A0A0C6EH59|A0A0C6EH59_9CHLR RdhA protein; OS = Dehalococcoides sp. UCH007 OX=1522671 GN=rdhA PE=4 SV=1
MDGKINRRDFVKGAGIASAATVATIMATASTVSAEELVNPSIKAMDEMGSASLTRDLPESFYKRIENKDGYIGTTRVIAPTQRLDAREHGFSQIVRRGSTGDWSGEPGDWGPVLFAAVQEKKKHAAEITPLEAADYTWSNAFQIAMDRWHITLEPGRYQQAPIAATKVELSPEEMTARIKKICRWFGCEQVGICEVTEDMKPFFYSVGRTKGTYTTGHANYVDEGREIPWPYPYKYCIVMADKCDTDTLSAMTGPLVEASAKIACSQSDFAPHYLESIIRSLGHDAKANIFSDTDIMDTPFAVKAGLGELGRSGLVISPWGAQMRIMEVFTNLPLVPDKPIDFGLQEFCKVCKKCADNCPASAISMDDEPSEVDTVVKSIRWFQDGKKCLSQRLAYGCSKCQSVCPWSKPDTLIHEIGRMVGQNPAFAPFLVKLDDFFYNRYPEGHATGEWAPWR

SEQ ID NO: 76198 - protein, 201 aa, unidentified
  source 1..201: note = Dehalococcoidia bacterium
  REGION 1..201: note = tr|A0A523X8C6|A0A523X8C6_9CHLR Epoxyqueuosine reductase (Fragment) OS=Dehalococcoidia bacterium; OX = 2026734 GN=E3J42_03285 PE=4 SV=1
MTGEILEQAMELFDSAGVVTTEAGIVLILGLGSTMETNLDEAVIEHGRLVLQGWLKHAKPRVTALIDLIRERGFEAEAVGWWGYPMAAEVMHLKRLAVIAGLGMQGKNTLIIHHKFGPWLRLAAIRTNAPLIPTGPGIYVRRENPLCQSCQACIKACPVEGLLQPYRLLDPARCRLNISPDIDWEKVVWCDMGCVTKCPVG

SEQ ID NO: 76199 - protein, 380 aa, unidentified
  source 1..380: note = Dehalococcoidia bacterium
  REGION 1..380: note = tr|A0A0S8CKP6|A0A0S8CKP6_9CHLR PBS lyase; OS = Dehalococcoidia bacterium SG8_51_3 OX=1703394; GN = AMJ70_02105 PE=4 SV=1
MSLTEDIKDFALDLGYSRVGITTADPFPGYIAELKARQDMYAFYINHSTTPLQGAEPRSVMPSARSIVMVVYDAFKESFPEKLVGKIGRIYQARCYRPPSHRINGARYRLMREFLENNGCQVDRKIRVPERLVACRAGTVTYGKSGFAFADGIGSFVVISAFVIDTELEYDAPTYEVKCPPKCTLCIDACPTGSLYEPMKIDPRRCIGFNHWNTQEEGDRYVEAVGSYIPPEIREKMGTWIHGCDICQEVCPRNQKRLKAKLPQNEFLARVSKDFELTKLLNLSDEFFTKRVQPLMYNYIHKKKYFQRNAAIAIGNTGDSSYIPDLAQAMQDPEGMVRGYAAWALGKIGGSQARKILETSLLRETDEFAKAEIQVALDIN

SEQ ID NO: 76200 - protein, 311 aa, unidentified
  source 1..311: note = Dehalogenimonas alkenigignens
  REGION 1..311: note = tr|A0A0W0GJ65|A0A0W0GJ65_9CHLR Uncharacterized protein OS=Dehalogenimonas alkenigignens OX=1217799; GN = DEALK_14080 PE=4 SV=1
MNETAVYEHLTTELKSINCMHGFLEIRRVPELKRELESRLHKGQLDTAFFVKNLERLEVSAPTRFAEVNSLIIIAAPLPLTRLIFEYQGRGRPVQIPPFYVFKDKLAAIRKALGRSLGAAGYQIADARVPLKLAAIRSGLARYGRNNLAYIQGMGSFHRLVAFYTDLPAPADAWFRLSEMEECTSCGFCLGNCHTDCLNPDAGNRFLARAEKCLTLYNEEPGELPSWITPWLHNSLIGCMRCQSSCPLNRTFIRNVPISDTFNEPEAMAILATPVFGDLPGALQEKLVKYDLQDYYDLVPRNLKFLLEWEL

SEQ ID NO: 76201 - protein, 309 aa, unidentified
  source 1..309: note = Dehalogenimonas alkenigignens
  REGION 1..309: note = tr|A0A0W0GJ57|A0A0W0GJ57_9CHLR 4Fe-4S double cluster binding domain OS=Dehalogenimonas alkenigignens OX=1217799; GN = DEALK_14090 PE=4 SV=1
MISTLAEKVTDELELSGYRAANASIDRLATIEQEFRSIANRDEWRKSPHLSQHIFDFTLPQEYQAKSILVVAAPVAPVNIGFVFGGEYFSFDAPPLSEDYEQDAANIFSEIKKIISPQGYRLSESNLPTKILASHCGLISNGVNNIGYIDGMGSYFRLSAYFSDIEPGNEKWLNNHSVNPKCAGCSRCIDTCPTKCIERSSFQVNRCLSLLSKEPTDFPVWINSKWHNALIGCRICQKVCPLNQEVSFKASIGADFDETETAAILSGEPLENLCSKTREKLRYFTLEPLYPVVSRNLRLLFKKHGLTVN

SEQ ID NO: 76202 - protein, 306 aa, unidentified
  source 1..306: note = Dehalogenimonas formicexedens
  REGION 1..306: note = tr|A0A1P8F6R9|A0A1P8F6R9_9CHLR Epoxyqueuosine reductase OS=Dehalogenimonas formicexedens OX=1839801; GN = queG PE=4 SV=1
MTPSTEVINNLAEAGYRACIAPIERLADLEAEYKMITARDVWRRSPHLSQHRFDFAPPIDFPARSIIVIAAPVTPVRLGFIYRGIHHSFEAPPLSGDYDRVVARIIKIITDAIGTHGYRLADSNLPTKVLASHTGLLQNGINNMGYIEGMGSFFRLTSFFSDLPAVDDTWGEQHRVAPSCRECGLCIEACPTQCISQEVYDVSRCLSLLSKEPSDFPDWVKKRWHNSLIGCRVCQQVCPMNHDVINSAANVAEFSEAETLAILSGVDLDKLNQSTRDKLRYFHLAPFYSILPRNLRLLLEKSGEPA

SEQ ID NO: 76203 - protein, 312 aa, Dehalogenimonas lykanthroporepellens
  REGION 1..312: note = tr|D8K0K3|D8K0K3_DEHLB 4Fe-4S ferredoxin iron-sulfur binding domain protein OS=Dehalogenimonas lykanthroporepellens (strain ATCC BAA-1523 / JCM 15061 / BL-DC-9) OX=5 52811 GN=Dehly_0829 PE=4 SV=1
MSIKDAVSVQLMENLRKVGYRACIVDSVHLAEVEKEYRAHTETQAWRSSPHLQGHTFDFQPPSWAAGNGTIIIVAAPVAPVRLEFTTGNRKIPVDAPPLSTDYLQDLVIFGSIIDSVLLPAGYRQTTADLPTKLIASHGGLLENGYNNMGFIAGMGSFFRLAAFYSDLPGEPEQWYPHEVSERCPDCGVCLAYCPTGCLKVGEYDVSRCLSLLSKEPFDFPDWVDKRWHNAVVGCRVCQLNCPQNHDIVNGSAVTESFDRTETEDILAGVPYDKLRIETRSKLERFHLSAYYGILPRNLRLLLTGEARETIG

SEQ ID NO: 76204 - protein, 318 aa, Dehalogenimonas sp.
  REGION 1..318: note = tr|A0A2P5P9J1|A0A2P5P9J1_9CHLR Uncharacterized protein OS=Dehalogenimonas sp. GP OX=1536648; GN = JP09_003625 PE=4 SV=1
MGGAVDQRINIRMALATEVIQNLAQAGYRACIAPIERLAELEAEYNAITSRDVWRRSPHLSQHRFDFTRPTDFSVKSIIVVAAPVTPVRLGFKYRGTHHSFEAPPLSGDYDQDVARMKKVITDTIGPLGLHVADSNLPTKVLASHTGLLQNGINNMGYIPGMGSFFRLTSFFSDLQPSDNTWNEQHLVAPVCRECGLCMDACPTGCISQEVYDVGRCLSLLSKEPSDFPDWVKKRWHNSLIGCRVCQQICPMNRSVLDEAANGIEFSEAETEAILSGVPFDTLDQATRDKLRYFHLAAFYSILPRNLRLLLEKSGEPV

SEQ ID NO: 76205 - protein, 309 aa, Dehalogenimonas sp.
  REGION 1..309: note = tr|A0A0F7GE86|A0A0F7GE86_9CHLR Uncharacterized protein OS=Dehalogenimonas sp. WBC-2 OX=943347; GN = DGWBC_0868 PE=4 SV=1
MTVYEKLANELSTIGCRYGILDVKRVTELKEELWNRFIEGQFDESFFDRNLKRLDGDPPKNMPEARSIIIIAAPLPFIQLSFSYRGKIYFAGIPPYYTFSNNLTRIRKALGRSLGADGHRIIDARIPYKLAAVRCGLAVYGQNNLTYVDGMGSFHRLVAFYSTLTAPEDLWIPSQLMDACADCGFCRGNCPTGCLVPMSEGGRFIARSEKCITLYNEEPGTFPEWLGLHLHNAIIGCMRCQSSCPVDRPLLRDIKVSEVFNEQETMAIIEATPFDDLSPELKEKLTKYNLDTYYNVIPRNLRAILEGQT

SEQ ID NO: 76206 - protein, 373 aa, unidentified
  source 1..373: note = Deinococcus actinosclerus
  REGION 1..373: note = tr|A0A2Z3YW86|A0A2Z3YW86_9DEIO tRNA epoxyqueuosine(34) reductase QueG OS=Deinococcus actinosclerus OX=1768108 GN=queG PE=4 SV=1
MSASPHDRLHDLALSLGADAVGWAPAQVPRAAVDEYAGWLAAGRHAGMSYLERQLPVRADPSQRLAGVQSVLVLGVSHAFAPPPVPEGGVRVGRVARYAWTPDYHDQLQPVLSQLEAEAARLGVSARGYVDHGPVMERLFASGAFLGWRGKSGMLVSTSLGAFVTLAVLLTDLPHPGEAQAHPDRCGRCLRCVTACPTAAIGPDRAIDARRCVSYLTIEHRGPVPPELRAGMGEWLFGCDVCSEVCPWTLKAGPLARFLRPDPELAHPDLTRFFGVSEREFERQWAGTAFLRPRRKGMARNALTVLGNTRAPQGWPLLLLGAQDPAWEVREAAAWALAQWGESRHLERLLDDHHEAVRATAAWGLGVTAPAGP

SEQ ID NO: 76207 - protein, 373 aa, unidentified
  source 1..373: note = Deinococcus actinosclerus
  REGION 1..373: note = tr|A0A0U4CYE0|A0A0U4CYE0_9DEIO Epoxyqueuosine reductase OS=Deinococcus actinosclerus OX=1768108; GN = AUC44_06155 PE=4 SV=1
MSASPHDRLHDLALSLGADAVGWAPAQVPRAAVDEYAGWLAAGRHAGMSYLERQLPVRADPSQRLSGVQSVLVLGVSHAFAPPPVPEGGVRVGRVARYAWTPDYHDQLQPVLSQLEAEAARLGVRARGYVDHGPVMERLFASGAFLGWRGKSGMLVSTSLGAFVTLAVLLTDLPHPGAAQAHPDRCGRCTRCVAACPTAAIGPDRAIDARRCVSYLTIEHRGPIPPELRPGMGEWLFGCDVCSEVCPWTLKAGPLARFLRPDPELAHPDLTRFFGVSEREFERQWAGTAFLRPRRKGMARNALTVLGNTRAPQGWPLLLMGAQDPAWEVREAAAWALAQWGETGHLAPLLDDPHEAVRTTAGWGLGVTASAGP

SEQ ID NO: 76208 - protein, 367 aa, Deinococcus aerius
  REGION 1..367: note = tr|A0A2I9DSS7|A0A2I9DSS7_9DEIO Electron transport protein yjeS OS=Deinococcus aerius OX=200253; GN = DAERI_050086 PE=4 SV=1
MNAADLLSDLAVSLGADAVGWAPARVPASAVAEYAGWLSAGRHAGMGYLERQLPARSDPASRLEGVGSVLVLGVSHAFADPGVPTGGVRVGRVARYAWTPDYHDQLQPVLSRLEAEAARLGVRSRGYVDHGPVMERLFAAGASLGWRGKSGMTVSTRLGAFVTLAVLLTDLSFEGVEESHPDRCGRCFRCVAACPTGAIGNDRAIDARRCVSYLTIEHRGPVPHELRPGMGDWLFGCDVCSEVCPWTAKAGPLARLLRPDPDLAHPDLSAFFGVGERQFERRFAGTAFLRPRRKGMARNALTVLGNTRAQEGWPLLLAGAQDPAWEVREAAAWALGQWGESRHLRPLLDDEHGTVREAAALALSHAS

SEQ ID NO: 76209 - protein, 368 aa, Deinococcus cellulosilyticus
  REGION 1..368: note = tr|A0A511MWX9|A0A511MWX9_9DEIO Epoxyqueuosine reductase OS=Deinococcus cellulosilyticus NBRC 106333 = KACC 11606 OX=1223518 GN=DC3_07170 PE=4 SV=1
MNRQDLLLEKALELGFDVAGWAVATTPPEATTRYQQWLEKGFHAGMDYLERQLVRRNDLTTTLSGARSVLVLGISHAFPDLEVPAGGVRVGRVARYAWTPDYHGQIEPLLRDLEETATQLGVRSRGCVDYAPIMERELSSRAFLGWQGKSGMMISQKLGAFVTLAVLLTDLEMEEQGRHVDRCGRCQACVNACPTSAIQEGRVIDSRRCISYLTIEHRGPIPQEFRSGMGSWLFGCDHCLEVCPWSIKAGAVSRNLIPNPELAHPDLSVFFEGSNRDFDRRFAHTAFSRPRRKGMARNALMVLGNLRDPLHLALVLKGAQDEAWEVRASAAWALGQFEEKQSLSAIENLLQDPQEEVRQEASRQLAKI

SEQ ID NO: 76210 - protein, 380 aa, Deinococcus deserti
  REGION 1..380: note = tr|C1CWQ4|C1CWQ4_DEIDV Putative Fe-S protein putative epoxyqueuosine reductase OS=Deinococcus deserti (strain VCD115 / DSM 17065 / LMG 22923) OX=546414; GN = Deide_1649 0 PE=4 SV=2
MNAHELLPDLAIALGADAVGWAPAQVPAAAAQEYAGWLDAGRHAGMSYLERQLPARMDPTSRLPGAASVLVLGVSHAFEEPAAPAGGIRVGRVARYAWTPDYHDQLQPVLTRLEAEAAKLGVRAKGYVDHGPVMERLFASEAFLGWRGKSGMNISTRLGAFVTLAVVLTDLPFEAEAQAHPDRCGRCTRCVLACPTAAIGPDRAIDARRCVSYLTIEHRGPLPPEHRTGVGDWLFGCDVCSEVCPWSAKAGPLAKLLQPHADLAHPDLSAFFGVSERSFERQFAGTAFLRPRRKGMARNALTVLGNTRDPRGWPLLLLAREDPAWEVREAAAWALGQWDETAHASVLLADPHEAVRVSAQRALGETDPGPGQLQHPAVHL

SEQ ID NO: 76211 - protein, 373 aa, Deinococcus ficus
  REGION 1..373: note = tr|A0A221SVA4|A0A221SVA4_9DEIO Epoxyqueuosine reductase OS=Deinococcus ficus OX=317577 GN=DFI_05850 PE=4; SV = 1
MSAHDLLSALALDLGADTVGWAPAAVPAGSVQEYAAWLGAGRHAGMGYLERQLPARAEPQSRLEGAASVLVLGVSHGFAPLPVPAGGVRLGRVARYAWTPDYHHQLQPVLERLEREAAALGVRAKGYVDHGPVMERLFANGAFLGWRGKSGMTVSTDLGAFVTLAVLLTDLPGAAPGEVHPDRCGRCTRCVTACPTAAIGDDRAIDARRCVSYLTIEHRGPVPLDLRAGMGGWLFGCDVCSEVCPWSVRAAGREGGLGRFLRPDPELAHPDLSAFFHVSEREFERRFRGTAFLRPRRKGMARNALTVIGNTRDPRGRPLLDAGLADPAWEVRDAAAWALARWEEWGPLETLRRDPDERVAALAGALLDGRAGH

SEQ ID NO: 76212 - protein, 397 aa, Deinococcus geothermalis
  REGION 1..397: note = tr|Q1IWW2|Q1IWW2_DEIGD 4Fe-4S ferredoxin-type domain-containing protein OS=Deinococcus geothermalis (strain DSM 11300) OX=319795 GN=Dgeo_1978 PE=4 SV=1
MPAAAFPLFPVRHSSRARDSILSGVNAAELLSDLAVSLGADAVGWAPAVVPASAVAEYAAWLKAGRHAGMEYLERQLSARSDPASRLEGVASVLVLGVSHAFADLGVPAGGVRVGRVARYAWTPDYHDQLQPVLNRLEEEAARLGVRARGYVDHGPVMERLFAAGAFLGWRGKSGMTISTRLGAFMTLAVLLTDLPFAGAAKAHPDRCGRCFRCLAACPTNAIGPDRAIDARRCISYLTIEHRGPVPPELRTEVGDWLFGCDVCSEVCPWTGKAGALARLLKPDPELAHPDLGAFFGVSERAFERRFVGTAFLRPRRKGMARNALTVLGNTRAPQGWPLLLAGAADPAWEVREAAAWALGQWGEPGPLRALLNDPHAAVRAVAAHALREASSPLNPV

SEQ ID NO: 76213 - protein, 376 aa, Deinococcus gobiensis
  REGION 1..376: note = tr|H8GVH5|H8GVH5_DEIGI 4Fe-4S ferredoxin-type domain-containing protein OS=Deinococcus gobiensis (strain DSM 21396 / JCM 16679 / CGMCC 1.7299 / I-0) OX=745776; GN = DGo _CA0425 PE=4 SV=1
MPAAETLADLAVSLGADAVGWAPARVPAGAVAEYAGWLGAGWHAGMDYLERQLPDRADPARKLEGAASVLVLGVSHAFAPPPVPAGGIRLGRVARYAQTPDYHDQLQPVLSRIEQEAAGLGVRARGYVDHGPVMERLFASGGLLGWRGRSGMLVSTRLGAFVTLAVVLTDLPFGGTDTPHPDRCGRCFRCGVACPTGAIGPERTIDARRCVSYLTVEHRGPVPHDLRPGIGDWLLGCDVCSEVCPWSQKAGPLAGLLRPDPELAHPDLTRFFGVSERKFARDFAGTPHLRPRRKGMARNALTVVGNLRDPAGWPLLDLGAQDPAWEVREAAAWALWRWDEPRRLRALLDDPDERVRAAALSLTSPTPDLGATLQDA

SEQ ID NO: 76214 - protein, 397 aa, Deinococcus grandis
  REGION 1..397: note = tr|A0A100HKT3|A0A100HKT3_9DEIO Electron transport protein yjeS OS=Deinococcus grandis OX=57498; GN = DEIGR_101286 PE=4 SV=1
MNGPHPDSGAASPLSGAGGAAYCAAMSASPHDRLHDLALSLGADAVGWAPAQVPRAAVDEYAGWLAAGRHAGMGYLERQLPVRADPSQRLEGVQSVLVLGVSHAFAPPPVPEGGVRVGRVARYAWTPDYHDQLQPVLSRLEAEAARLGVRARGYVDHGPVMERLFASGAFLGWRGKSGMLISTRLGAFVTLAVLLTDLPHPSGAEAHPDRCGRCTRCVIACPTAAIGPDRAIDARRCVSYLTIEHRGPVPPELRPGMGEWLFGCDVCSEVCPWTLKAGPLAQLLKPDPELAHPDLTRFFGVSEREFERQWTGTAFLRPRRKGMARNALTVLGNTRAPQGWPLLLAGAQDPAWEVREAAAWALGQWGETGRLAPLLDDPHEAVREAAGHALGTTPTRP

SEQ ID NO: 76215 - protein, 384 aa, Deinococcus hopiensis
  REGION 1..384: note = tr|A0A1W1V9C9|A0A1W1V9C9_9DEIO Epoxyqueuosine reductase OS=Deinococcus hopiensis KR-140 OX=695939; GN = SAMN00790413_00587 PE=4 SV=1
MLPGLPFHFLERGILGHVSAAELLSDLAVSLGADAVGWAAAQVPASAVAEYAGWLGAGRHAGMDYLERQLQARSDPGSRLAGAGSVLVLGVSHAFAQPPVPHGGIRVGRVARYAWTPDYHSQLQPLLTRLEEEAARLGVRARGYVDHGPVMERLFASGAFLGWRGKSGMTVSTRLGAFVTLAVLLTDLPFAGTLEVHPDRCGRCFRCVTACPTNAIGPDRAIDARRCISYLSIEHRGPVPHELRAAMGEWLFGCDVCSEVCPWSAKAGPLARLLKPDPELAHPDLSAFFGVGERQFERRFAGTAFLRPRRKGMARNALTVLGNTRAPQGWPLLLAGVEDSAWEVREAAAWALGQWGEAGPLTGLLSDPHEVVRGAAQAALTWAS

SEQ ID NO: 76216 - protein, 368 aa, Deinococcus indicus
  REGION 1..368: note = tr|A0A246BGA3|A0A246BGA3_9DEIO tRNA epoxyqueuosine(34) reductase QueG OS=Deinococcus indicus; OX = 223556 GN=CBQ26_17760 PE=4 SV=1
MSASPHDRLSDLALSLGADAVGWAPAQVPLAAVDEYAGWLDAGRHAGMTYLERQLPVRADPSQRLPGVGSVLVLGVSHAFAPPVVPNGGVRVGRVARYAWTPDYHEQLQPVLSRLEQEAAALGVRARGYVDHGPVMERLFASGAGLGWRGRSGMTINTGLGAFVTLAVVLTDLPAPDGGVAHPDRCGRCLRCVTACPTGAIGPDRAIDARRCVSYLTIEHRGPVPPDLRAGVGDWLFGCDVCSEVCPWTVKAGPLARLLKPDPELAHPDLGRFFGISEREFERQWAGTAFLRPRRKGMARNALTVLGNTRAPQGWPLLLLGAQDPAWEVREAAAWALGQWNEPGHVRALLDDPHAAVREGAALALERV

SEQ ID NO: 76217 - protein, 378 aa, unidentified
  source 1..378: note = Deinococcus irradiatisoli
  REGION 1..378: note = tr|A0A2Z3JFH9|A0A2Z3JFH9_9DEIO tRNA epoxyqueuosine(34) reductase QueG OS=Deinococcus irradiatisoli OX=2202254 GN=queG PE=4 SV=1
MLALPSSTNAAETLRDLAFELGFDVAGWASGQVPREAWQGYGEWLGSGRQAGMTYLETGAWRRADLSTSLLAAPQVGRVLALGISHAFEELVPPPGGLRAGRVARYAWTPDYHAQIEPRLSRLVREAAALGVRARGYVDHGPVMERDLAGRAFLGWHAKSGMLVSTELGAFVTLAVLLTDLPDEGDGPAHPDRCGRCTRCVSACPTGAIDADRAIDAGKCVSYLTIEHRGPVPWERRPGIGEWLLGCDVCCAVCPWSLKAGALAQALQPDPELAYPDLLGFFGLSEREFERRYGHTAHARPRRKGMARNAVTVAGNLREERLRPVLDLAAADPAWEVREAATYALTCWQDVAGLEKLRFDPHEQVRAGAQRGLNELLG

SEQ ID NO: 76218 - protein, 362 aa, unidentified
  source 1..362: note = Deinococcus koreensis
  REGION 1..362: note = tr|A0A2K3V0K6|A0A2K3V0K6_9DEIO tRNA epoxyqueuosine(34) reductase QueG OS=Deinococcus koreensis; OX = 2054903 GN=queG PE=4 SV=1
MSAAETLADLAQHLGADAVGWAPAQVPQGAVDEYAGWLAAGRHAGMGYLERQLPARADPSSRLEGVGSVLVLGVSHAFTEPPKPAGGVRVGRVARYAWTPDYHDQLQPVLSRLEQEAAALGVRARGYVDHGPVMERLFAAGGFLGWRGKSGMLVSTRLGAFVTLAVLLTDLPLQGPPQDHPDRCGRCFRCVAACPTNAIGDDRAIDARRCISYLTIEHRGPLPLELRPGVGDWLFGCDVCSEVCPWSEHAGPLATLLRPEPELAFPDLGRFFGVSERGFERAFAGSAFLRPRRKGMARNALTVLGNTRAPQGWPLLLAGAADPTWEVREAAAWALTQWDEPRHLRPLQSDPHEAVRAAAGHL

SEQ ID NO: 76219 - protein, 371 aa, Deinococcus maricopensis
  REGION 1..371: note = tr|E8UAD1|E8UAD1_DEIML 4Fe-4S ferredoxin-type domain-containing protein OS=Deinococcus maricopensis (strain DSM 21211 / LMG 22137 / NRRL B-23946 / LB-34); OX = 709986 G N=Deima_2382 PE=4 SV=1
MNPYSTLADLALDLGFDAVGWASAQVPREAWVRYADWLSAGRHADMTYLERQAWRRTDLGTSLPDVSSVLVLGVSHAFPELPVPAGGVRVGRVARYAWTPDYHDQLTPRLERLEVEAARLGVRTRGYVDHGPIMERDLGGRAFLGWQGKSGMLVSTQLGAFLTLAVLLTDLPFEGRDARHPDRCGRCTRCVTACPTGAIGPDRMIDARRCVSYLTIEHRGVVPRALRAGVGEWLFGCDGCLEVCPWSGKAGAVARALVPDAELAHPDLSAFFGGSERAFERRFAGSAFLRARRKGMARNALTVLGNTLVPEGRPLARQGAADPAWEVRASSAWTLARYAERRAVEALTRDPHEAVRAAAQLELESWGSVPS

SEQ ID NO: 76220 - protein, 386 aa, Deinococcus marmoris
  REGION 1..386: note = tr|A0A1U7P488|A0A1U7P488_9DEIO Epoxyqueuosine (OQ) reductase QueG OS=Deinococcus marmoris OX=249408; GN = BOO71_0001135 PE=4 SV=1
MTAPAELLADLAQSLGADAVGWAAATVPASAVDEYARWLDAGRHAGMAYLERQLPARADPSSRLEGVGSVLVLGVSHAFEEPPIPPGGIRVGRVARYAWTPDYHDQLQPLLTRLETEAAALGIRARGYVDHGPVMERLFASGAFLGWRGKSGMTISTQLGAFVTLAVLLTDLPFEGTDTAHPDRCGKCFRCVAACPTNAIGNDRTIDARRCISYLTIEHRGPVPHEFRADMGDWLFGCDVCSEVCPWSRKAGPLAELLRPQPELAHPDLSAFFGVGEREFNRRFAGTAFLRPRRKGMARNALTVLGNTRAPEGWPLLLAGTTDPAPEVREAAAWALGQWGEMDHVRALLHDPDEGVRAGAARILATPQLSSLHGPGSTILGQMSDT

SEQ ID NO: 76221 - protein, 367 aa, unidentified
  source 1..367: note = Deinococcus metallilatus
  REGION 1..367: note = tr|A0A4Q0W9T0|A0A4Q0W9T0_9DEIO tRNA epoxyqueuosine(34) reductase QueG OS=Deinococcus metallilatus OX=1211322 GN=queG PE=4 SV=1
MNRAELLSDLAVSLGADAVGWAPANVPASAVTEYAAWLAAGRHAGMGYLERQLPARSDPASRLEGTASVLVLGVSHAFADPGVPTGGVRVGRVARYAWTPDYHDQLQPVLTRLEEEAARLGVRARGYVDHGPVMERLFAAEAFLGWRGKSGMNISTRLGAFVTLAVLLTDLPFVGPQEAHPDRCGRCFRCVAACPTNAIGPDRAIDARRCISYLTIEHRGPVSPELRAGMGDWLFGCDICSEVCPWTQKAGPLARLLQPDPELAHPDLGAFFGVSERQFERRFAGTAFLRPRRKGMARNALTVLGNTRDPGGWPLLLAGVQDPAWEVREAAAWALGQWGEAGHVRALLDDPQETVRETAARALGVAS

SEQ ID NO: 76222 - protein, 366 aa, Deinococcus peraridilitoris
  REGION 1..366: note = tr|K9ZXF1|K9ZXF1_DEIPD Uncharacterized Fe-S protein; OS = Deinococcus peraridilitoris (strain DSM 19664 / LMG 22246 / CIP 109416 / KR-200) OX=937777 GN=Deipe_0278; PE = 4SV=1
MSTPDILAALALDLGFDAVGWSAAHVPDTSVEEYARWLKHGHHAGMDYLERQLPRRADLSSSLEGSLSVLVLGISHAFEQLPPPPGGVRLGRVARYAWTPDYHEQLAPLLSRLETETAKLGGRARAYVDHGPVMERLLGASAFLGWRAKSGMLVSTSLGAFMTLAVVLTDLPLQVETQAHPDRCGRCTRCISACPTQAILPGRALDARRCVSYLTIEHRGPVPWELRSGVGDWLFGCDGCTEVCPWSMRAGSVARALRPQAELAHPDLTPFFMLSGRQFDQAYQGTPFARPRRKGMARNACYVIGNTRDPQGFSLLERAVHDPAWEVREAAAWALGQFGETKLLHRLMSDPHPQVSDAARRLYVPC

SEQ ID NO: 76223 - protein, 367 aa, unidentified
  source 1..367: note = Deinococcus phoenicis
  REGION 1..367: note = tr|A0A016QPB9|A0A016QPB9_9DEIO 4Fe-4S ferredoxin-type domain-containing protein OS=Deinococcus phoenicis OX=1476583 GN=DEIPH_ctg032orf0096 PE=4 SV=1
MNRADLLSDLALSLGADAVGWAPAHVPASAVAEYAAWLGAGRHAGMGYLERQLPARSDPASRLEGAASVLVLGVSHAFADPGVPAGGVRVGQVARYAWTPDYHDQLQPVLTRLEQEAARLGVRARGYVDHGPVMERLFASGAFLGWRGKSGMNISTRLGAFVTLAVLLTDLPFEGPQEAHPDRCGRCFRCLAACPTNAIGPDRAIDARRCISYLTIEHRGPVPPELRAGTGDWLFGCDVCSEVCPWSQKAGPLAQLLRPDPELAHPDLSAFFGVGERQFERRFAGTAFLRPRRKGMARNALTVLGNTRTPEGWPLLLAGVQDPAWEVREAAAWALGQWGEVGHLRPLLDDPHEAVRKAAARSLGIAS

SEQ ID NO: 76224 - protein, 370 aa, Deinococcus proteolyticus
  REGION 1..370: note = tr|F0RNX4|F0RNX4_DEIPM 4Fe-4S ferredoxin-type domain-containing protein OS=Deinococcus proteolyticus (strain ATCC 35074 / DSM 20540 / JCM 6276 / NBRC 101906 / NCIMB13154 / VKM Ac-1939 / CCM 2703 / MRP) OX=693977
MNADAAAETLCALALELGADAVGWADAEVPAAAVDEYAGWLVEGRHARMDYLERQLPRRADLGTSLPGAGRVLVLGISHAYDPPAPPPGGIRLGRVARYAWTPDYHDQLQPVLDRLGREAATLGVRAKGYVDHGPVMERLLGARSFLGWRSKSGMLVSTELGAFFTLAVLLTDLPPAGPSTAHPDRCGRCFRCGQSCPTGAIGPDRKIDARRCLSYLTIEHRGPLPWEHRAALGEWLFGCDICCGVCPWSVKAGTLARLFQPRRELAHPDLSRFFGVSERQFTREWAGSALLRPRRKGMARNALNVLGNLRDPQGWPLLLAGAEDPAWEVREAAAWALAQWNEWAEVERLRSDPEPQVRASAERLLSERA

SEQ ID NO: 76225 - protein, 378 aa, unidentified
  source 1..378: note = Deinococcus puniceus
  REGION 1..378: note = tr|A0A172TAY4|A0A172TAY4_9DEIO (Fe-S)-binding protein OS=Deinococcus puniceus OX=1182568 GN=SU48_11010; PE = 4 SV=1
MLSAAPTSAAETLADLASALGADAVGWAAARVPASAVAEYAGWLGAGKHAGMGYLERQLPARADPASRLEGVGSVLVLGVSHAFAPPPVPSDGVRLGRVARYAWTPDYHDQLQPLLTRLEQEAARLGVRARGYVDHGPIMERLFAAGAFLGWRGKSGMTVSTRLGAFVTLAVLLTDLPWETEAAAHPDRCGRCTRCISACPTAAIGDDRTIDARRCVSYLTIEHRGALPHEWRAGVGDWLLGCDVCSEVCPWSAKAGPLARLLEPQARLAFPDLTRFFGVSERQFEREWAGTALLRPRRKGMARNALTVLGNLPADHEGREQARPLLLAGTQDPVWEVREAAAWALGRWGEADLLSPLLADPHEAVRDTAAQALAGVL

SEQ ID NO: 76226 - protein, 367 aa, Deinococcus radiodurans
  REGION 1..367: note = tr|A0A5C1MMP9|A0A5C1MMP9_DEIRD tRNA epoxyqueuosine(34) reductase QueG OS=Deinococcus radiodurans OX=1299 GN=queG PE=4 SV=1
MTAAESLAALALDLGADVVGWAPAQIPAAAVEEYAGWLEAGRHAGMSYLERQLPARADPGSRLEGAASVLMLGVSHAMIPPERPAGGVRVGRVARYAWTPDYHEQLQPVLTRLEQEAASQGVRARGYVDHGPVMERLLAARAFPGWRGKSGMLLSTELGAFTTLAAVLTDLPYQGDGASHPDRCGRCTRCVAACPTAAIGPDRAIDARRCISYLTIEHRGPLPPELRPGVGDWLFGCDVCSAVCPWSVKTGPLARLFQPLPELSYPDLTRFFGVSERHFEREWAGTAFLRPRRKGMARNALTVLGNTRAPEGWPLLLAGTEDPAWEVREAAAWALAQWGERAELDKLEHDPDERVQAAARALAEAGA

SEQ ID NO: 76227 - protein, 368 aa, Deinococcus radiophilus
  REGION 1..368: note = tr|A0A431W5R3|A0A431W5R3_9DEIO tRNA epoxyqueuosine(34) reductase QueG OS=Deinococcus radiophilus OX=32062 GN=queG PE=4 SV=1
MSDAAQTLADLALELGADAVAWADADIPSSAVEEYAVWLRAGRHARMDYLERQLPRRADLGTSLPGAGRVLVLGISHAYPAPPQPAGGIRLGRVARYAWTTDYHDQLQPVLERLEGEAAALGVRAKGYVDHGPVMERLLGAQAALGWRSKSGMLVSTELGAFFTLAVLLTDLEPQGEDTGHPDRCGRCFRCGLSCPTGAIGPDRKIDANRCLSYLTIEHRGPLPWEHRTALGDWLFGCDICCRVCPWSEKAGPLARLFQPHAEFVYPDLSRFFGVSERRFTREWAGSALLRPRRKGMARNALNVLGNLRDPHGWPLLGAGAEDPAWEVREAAAWALAQWGEWAEVERLRGDDHESVRASVERLLTEKG

SEQ ID NO: 76228 - protein, 370 aa, Deinococcus radiopugnans
  REGION 1..370: note = tr|A0A5C4Y4X5|A0A5C4Y4X5_9DEIO tRNA epoxyqueuosine(34) reductase QueG OS=Deinococcus radiopugnans ATCC 19172 OX=585398 GN=queG PE=4 SV=1
MTAPAELLADLAQGLGADAVGWAAAQVPASAVDEYARWLDAGRHAGMSYLERQLPVRADPSSRLEGVGSVLVLGVSHAFEEPPAPAGGVRVGRVARYAWTPDYHDQLQPLLTRLEAEAAALGVRARGYVDHGPVMERLFASGAFLGWRGKSGMLVSTRLGAFVTLAVLLTDLPFEGTGEAHPDRCGRCFRCVAACPTNAIGSDRAIDARRCISYLTIEHRGPIPAEFRADMGEWLFGCDVCSEVCPWSQKAGPLARLLRPQHELAHPDLSTFFGIGEREFNRRFAGTAFLRPRRKGMARNALNVLGNTRAPQGWPLLLAGAADPAPEVREAAAWALAQWGEADRVRALLADPDEQVRGSAARLLAAPTVV

SEQ ID NO: 76229 - protein, 368 aa, Deinococcus reticulitermitis
  REGION 1..368: note = tr|A0A1H6VLM9|A0A1H6VLM9_9DEIO Epoxyqueuosine reductase OS=Deinococcus reticulitermitis OX=856736; GN = SAMN04488058_103105 PE=4 SV=1
MKAREALTARALSLGADAVGWAPARIPVDAVTEYAAWLAAGRHAGMEYLERQLPVRADPAQRLPGAASVLVLAVSHAFVPPPRPAGGVRVGRVARYAWTPDYHEQLAPVLTRLEEEAAQVGVRARGYVDHGPVMERLLAGGAGIGWRGKSGMLLNTSLGAFTTLAVLLTDLPFEQEGPLHPDRCGRCTRCVSACPTAAIGPDHAIDARRCISYLTIEHRGPVPEGLRPGIGEWLFGCDVCSEVCPWSVRAGPLARLFSAQPEFAWPDLTRFFGVSERQFEREWAGSAFLRPRRKGMARNALTVLGNTRAPQGWPLLLAGAEDPAWEVREAAAWAFARWGETAHLRALEHDSDERVGAAALRFSSSVPL

SEQ ID NO: 76230 - protein, 372 aa, unidentified
  source 1..372: note = Deinococcus soli
  REGION 1..372: note = tr|A0A0F7JJG7|A0A0F7JJG7_9DEIO (Fe-S)-binding protein OS=Deinococcus soli Cha et al. 2016 OX=1309411; GN = SY84_03270 PE=4 SV=1
MSISPHDRLHDLALSLGADAVGWAPAQVPRAAVDEYARWLEAGRHAGMSYLERQLPVRADPTQRLSGVQSVLVLGVSHAFALPPVPEGGVRVGRVARYAWTPDYHDQLQPVLSQLEAEAARLGVRARGYVDHGPVMERLFASGAFLGWRGKSGMLVSTQLGAFVTLAVLLTDLPHPGDQAAHPDRCGRCLRCVTACPTAAIGPDRAIDARRCVSYLTIEHRGPVPPELRAGMGEWLFGCDVCSEVCPWTLKAGPLAQLLKPDPELAHPDLTRFFGVSEREFERQWAGTAFLRPRRKGMARNALTVLGNMRAPQGWPLLLMGAQDPAWEVREAAAWALGQWGETGKVRPLLDDPHEAVRATAEHALGTTSTRP

SEQ ID NO: 76231 - protein, 386 aa, Deinococcus sp.
  REGION 1..386: note = tr|A0A5J6YU45|A0A5J6YU45_9DEIO tRNA epoxyqueuosine(34) reductase QueG OS=Deinococcus sp. AJ005; OX = 2652443 GN=queG PE=4 SV=1
MSAPTELLADLAQSLGADGVGWAAATVPSSAVDEYARWLDDGRHAGMAYLERQLPARADPSSRLEGVGSVLVLGISHAFEDPPKPTDGIRVGRVARYAWTPDYHDQLQPLLTRLETEAAALGIRARGYVDHGPVMERLFASGAFLGWRGKSGMTISTRLGAFITLAVLLTNLPFEGSQAAHPDRCGKCFRCVAACPTNAIGNDRAIDARRCISYLTIEHRGPVPHGFRADMGEWLFGCDVCSEVCPWSQKAGPLAELLRPQPELAHPDLSAFFGIGEREFNRRFAGTAFLRPRRKGMARNALTVLGNTRAPEGWPLLLAGMTDPAPEVREAAAWALGQWGEMDSVRTLVNDPDETVKAGAAQVLATPQLSSLHRPGSTILGQMSDT

SEQ ID NO: 76232 - protein, 368 aa, Deinococcus sp.
  REGION 1..368: note = tr|A0A2G7H0M0|A0A2G7H0M0_9DEIO tRNA epoxyqueuosine(34) reductase QueG OS=Deinococcus sp. UR1; OX = 1704277 GN=queG PE=4 SV=1
MSASPHDRLSDLALSLGADAVGWAPAQVPRAAVDEYAGWLDAGRHAGMTYLERQLPVRADPGQRLPGVGSVLVLGVSHAFGPPTVPEGGVRVGRVARYAWTPDYHDQLQPVLTCLEQEAAALGVQARGYVDHGPVMERLFASGAGLGWRGKSGMTINTGLGAFVTLAVVLTDLPAPDSGAAHPDRCGRCRRCVTACPTGAIGPDRAIDARRCVSYLTIEHRGPVPPDLRAGVGDWLFGCDVCSEVCPWTVKAGPLARLLKPDPQLAHPDLSRFFGVSEREFERQWAGTAFLRPRRKGMARNALTVLGNTRAPQGWPLLLLGAQDPAWEVREAAAWALGQWNEPGHVRALLDDPHAAVREGAARALERP

SEQ ID NO: 76233 - protein, 370 aa, unidentified
  source 1..370: note = Deinococcus swuensis
  REGION 1..370: note = tr|A0A0A7KGN7|A0A0A7KGN7_9DEIO (Fe-S)-binding protein OS=Deinococcus swuensis OX=1182571 GN=QR90_09670; PE = 4 SV=1
MTAPAELLADLAQGLGADAVGWAAAQVPASAVDEYARWLDAGRHAGMSYLERQLPVRADPSSRLEGVGSVLVLGVSHAFEKPPAPAGGVRVGRVARYAWTPDYHDQLQPLLTRLEAEAAALGVRARGYVDHGPVMERLFASGAFLGWRGKSGMLVSTRLGAFVTLAVLLTDLPFEGTGEAHPDRCGRCFRCVAACPTNAIGSDRAIDARRCISYLTIEHRGPIPAEFRADMGEWLFGCDVCSEVCPWSQKAGPLARLLRPQPELAHPDLGAFFGIGEREFNRRFAGTAFLRPRRKGMARNALNVLGNTRAPQGWPLLLAGAADPAPEVREAAAWALAQWGEADRVRALLADPDELVRGSAARLLAAPTVV

SEQ ID NO: 76234 - protein, 368 aa, Deinococcus wulumuqiensis
  REGION 1..368: note = tr|A0A345IFU6|A0A345IFU6_9DEIO tRNA epoxyqueuosine(34) reductase QueG OS=Deinococcus wulumuqiensis OX=980427 GN=queG PE=4 SV=1
MNAAESLAALALDLGADVVGWAPAQIPAAAVQEYAGWLAAGRHAGMTYLERQLPARADPGSRLDGAASVLMLGVSHAMTLPQRPAGGVRVGRVARYAWTPDYHEQLQPLLTRLEQEAASQGVRARGYVDHGPVMERLLAAQAFPGWRGKSGMLLSTELGAFTTLAAVLTDLPYLGDGAPHPDRCGRCVRCVGACPTAAIGPDRAIDARRCVSYLTIEHRGPLPVELRPGVGDWLFGCDICSAVCPWSVRAGPLARLFGPRPELAHPDLSRFFGVSERHFEREWAGTAFLRPRRKGMARNALTVLGNGRAPEGWPLLLAGAGDPAWEVREAAAWALSRWEEWAELARLERDPDERVQAAARAFAELGTG

SEQ ID NO: 76235 - protein, 366 aa, Deinococcus yavapaiensis
  REGION 1..366: note = tr|A0A318SCA2|A0A318SCA2_9DEIO Epoxyqueuosine reductase OS=Deinococcus yavapaiensis KR-236 OX=694435; GN = DES52_10127 PE=4 SV=1
MDAALHLQEFALSLGFDVAGWTTADVPRSAVDEYASWLRASRHAGMEYLERQLPRRADLSSTLPNAAGVLALGISHAFEDVTAPPGGVRLGNVARYAWTPDYHEQLQPLLSALEAEAARLGITARGTVDHAPVMERLLAGRAFLGWRGKSGMLVSTSLGAFTTLAVLLTDLPTPSVDEAHPDRCGRCARCVLACPTAAIGSDRAIDARRCVSYLTIEHRGPIPHALREGVGSWLFGCDGCLEVCPWSRKAGPLAQTLRPDPNLAHPDLTPFFTLTSRQFDKLYAGTAFSRPRRKGMARNACVVIGNTRAEQGRPLLDLAVRDPAWEVREAAAWALARFEAWRELALLEHDEHEIVRRTARHRAASF

SEQ ID NO: 76236 - protein, 188 aa, unidentified
  source 1..188: note = Unknown
  REGION 1..188: note = tr|A0A3M2EWV3|A0A3M2EWV3_9DEIN tRNA epoxyqueuosine(34) reductase QueG (Fragment); OS = Deinococcus-Thermus bacterium OX=1913990 GN=D6684_08135; PE = 4 SV=1
PYPDRCGACARCLGGCPTGALLGDGTLDARRCISYWTIEHRGTIPLELWSGLGDWLFGCDVCQEVCPWNRKARAFWAGFSPEADLAYPNLLDFFELSSRAFERRYAGTAFLRPGRTRMARNALVVLSNLAYPELLPLALKAAQDVNPVVRATAAQALARLGERALLERFFQDPDPKVAGVARGLREAL

SEQ ID NO: 76237 - protein, 181 aa, unidentified
  source 1..181: note = Unknown
  REGION 1..181: note = tr|A0A3M2EUH8|A0A3M2EUH8_9DEIN Epoxyqueuosine reductase (Fragment) OS=Deinococcus-Thermus bacterium; OX = 1913990 GN=D6684_11390 PE=4 SV=1
MWPLPLRGSSRALKIPAVDPVAVLTQAAQERGFLTAWAGLELPEVAQARYRAWLAQGHQAGMGYLLEQAPTRLEPARRFGWAKSVLVLAAPHAYPPPPRPAGGLRLGRVARYAWVRDYHLLLRPHLEALQALAHRLGLEARAYVDTGPLSERGYAVKGGLGWVGRSAMLLRMGEGSHLTLA

SEQ ID NO: 76238 - protein, 351 aa, Delftia acidovorans
  REGION 1..351: note = tr|A0A286IVW8|A0A286IVW8_DELAC Epoxyqueuosine reductase OS=Delftia acidovorans OX=80866 GN=queG PE=3 SV=1
MQGWARELGFSQIGVAGVDLSSAEPGLMQWLAQGFHGEMDYMQAHGLRRARPAELVPGTVSVITARMDYLPRDTPADAPGAWQAVEWARLQRPDEGIVSVYARGRDYHKVLRNRLQKLAERIAQEVGPFGHRAFTDSAPVLEAELARRSGQGWRGKHTLVLNREAGSMFFLGEIYVDLALEPTEPVTAHCGSCAACITACPTGAIVAPHRVDARRCISYLTIEHAGAIPEELRPLMANRIYGCDDCQLACPWNKFAQPSRLPDFDAREALSGGQLVHFFAWDEPTFLRLTEGSPIRRIGHARWLRNVAVALGNAWRETGNAALQQALASRAEHPDALVREHVAWALSQRSD

SEQ ID NO: 76239 - protein, 324 aa, Delftia acidovorans
  REGION 1..324: note = tr|S2WIB6|S2WIB6_DELAC 4Fe-4S ferredoxin-type domain-containing protein OS=Delftia acidovorans CCUG 274B; OX = 883101 GN=HMPREF9701_02919 PE=4 SV=1
MQWLAQGFHGEMDYMQAHGLRRARPAELVPGTVSVITARMDYLPRDTPADAPGAWQAMEWERLQRPAEGIVSVYARGRDYHKVLRNRLQKLAERIAQEVGPFGHRAFTDSAPVLEAELARRSGQGWRGKHTLVLNREAGSMFFLGEIYVDLALEPTAPVTAHCGSCAACITACPTGAIVAPHRVDARRCISYLTIEHAGAIPEELRPLMANRIYGCDDCQLACPWNKFAQPSRLPDFDAREILAGGQLVHFFAWDEATFLRLTEGSPIRRIGHARWLRNVAVALGNAWRETGDTALRQALASRAEHPDAMVREHVAWALSQRSD

SEQ ID NO: 76240 - protein, 324 aa, Delftia lacustris; identical to SEQ ID NO: 76239
  REGION 1..324: note = tr|A0A1H3GGF2|A0A1H3GGF2_9BURK Epoxyqueuosine reductase OS=Delftia lacustris OX=558537; GN = SAMN05421547_102171 PE=4 SV=1

SEQ ID NO: 76241 - protein, 351 aa, Delftia sp.
  REGION 1..351: note = tr|F6AL74|F6AL74_DELSC Epoxyqueuosine reductase; OS = Delftia sp. (strain Cs1-4) OX=742013 GN=queG PE=3 SV=1
MQGWARELGFSQIGVAGVDLSSAEPGLMQWLAQGFHGEMDYMQAHGLRRARPAELVPGTVSVITARMDYLPRDTPADAPGAWQAVEWARLQRPDEGIVSVYARGRDYHKVLRNRLQKLAERIAQEVGPFGHRAFTDSAPVLEAELARRSGQGWRGKHTLVLNREAGSMFFLGEIYVDLALEPTAPVTAHCGSCAACITACPTGAIVAPHRVDARRCISYLTIEHAGAIPEELRPLMANRIYGCDDCQLACPWNKFAQPSRLPDFDAREALSGGQLVHFFAWDEPTFLRLTEGSPIRRIGHARWLRNVAVALGNAWRETGNAALQQALASRAEHPDALVREHVAWALSQRSD

SEQ ID NO: 76242 - protein, 324 aa, Delftia sp.
  REGION 1..324: note = tr|A0A031IQW2|A0A031IQW2_9BURK Epoxyqueuosine reductase OS=Delftia sp. RIT313 OX=1468410 GN=queG PE=4; SV = 1
MQWLAQGFHGEMDYMQAHGLRRARPAELVPGTVSVITARMDYLPRDTPADAPGVWQAVEWARLQRPDEGIVSVYARGRDYHKVLRNRLQKLAERIAQEVGPFGHRAFTDSAPVLEAELARRSGQGWRGKHTLVLNREAGSMFFLGEIYVDLALEPTAPVTAHCGSCAACITACPTGAIVAPHRVDARRCISYLTIEHAGAIPEELRPLMANRIYGCDDCQLACPWNKFAQPSRLPDFDAREALSGGQLVHFFAWDEPTFLRLTEGSPIRRIGHARWLRNVAVALGNAWRETGNAALQQALASRAEHPDALVREHVAWALSQRSD

SEQ ID NO: 76243 - protein, 324 aa, Delftia tsuruhatensis
  REGION 1..324: note = tr|A0A1I0W1P2|A0A1I0W1P2_9BURK Epoxyqueuosine reductase OS=Delftia tsuruhatensis OX=180282; GN = SAMN05444579_101173 PE=4 SV=1
MQWLAQGFHGEMDYMQAHGLRRARPAELVPGTVSVITARMDYLPRDTPADAPGAWQAMEWERLQRPAEGIVSVYARGRDYHKVLRNRLQKLAERIAQEVGPFGHRAFTDSAPVLEAELARRSGQGWRGKHTLVLNREAGSMFFLGEIYVDLALAPTAPVTAHCGSCAACITACPTGAIVAPHRVDARRCISYLTIEHAGAIPEELRPLMANRIYGCDDCQLACPWNKFAQPSRLPDFDAREILAGGQLVHFFAWDEATFLRLTEGSPIRRIGHARWLRNVAVALGNAWRETGDTALRQALASRAEHPDAMVREHVAWALSQRSD

SEQ ID NO: 76244 - protein, 351 aa, Delftia tsuruhatensis
  REGION 1..351: note = tr|A0A1D8J967|A0A1D8J967_9BURK Epoxyqueuosine reductase OS=Delftia tsuruhatensis OX=180282 GN=queG PE=3; SV = 1
MQGWARELGFSQIGVAGVDLSSAEPGLMQWLAQGFHGEMDYMQAHGLRRARPAELVPGTVSVITARMDYLPRDTPADAPGAWQAMEWERLQRPAEGIVSVYARGRDYHKVLRNRLQKLAERIAQEVGPFGHRAFTDSAPVLEAELARRSGQGWRGKHTLVLNREAGSMFFLGEIYVDLALEPTAPVTAHCGSCAACITACPTGAIVAPHRVDARRCISYLTIEHAGAIPEELRPLMANRIYGCDDCQLACPWNKFAQPSRLPDFDAREILAGGQLVHFFAWDEATFLRLTEGSPIRRIGHARWLRNVAVALGNAWRETGDTALRQALASRAEHPDAMVREHVAWALSQRSD

SEQ ID NO: 76245 - protein, 294 aa, unidentified
  source 1..294: note = Unknown
  REGION 1..294: note = tr|A0A1V4M0V3|A0A1V4M0V3_9DELT Uncharacterized protein OS=delta proteobacterium ML8_F1 OX=1775671; GN = AVO33_03710 PE=4 SV=1
MRPHEIIADKALSLGFHQVGFSRVAVFENLREIFEARDFLEMEIKDSQKRIDPWSHFPGGGTFVVLGMSYPLYGIPPLHGDRVRVSASLVPDYHLVLREKLEELLDFVITELGGEGRTFVDVEGLDDRQVAFRSGLGFYGKNTQIISPYLGSNFNIGYLVLSLELDYQSPVITGDCRDCTRCVEACPTGALPGDYTLTAQKCLSYLTQKKDLSPQEASWLNRCVYGCDICQRVCPYNSISSQSIEHVFTREDFEALSQRQYKKKYGHRDFSFRGVKIIRRNIDLALGNSGSETE

SEQ ID NO: 76246 - protein, 294 aa, unidentified
  source 1..294: note = Unknown
  REGION 1..294: note = tr|D8F6T0|D8F6T0_9DELT Putative iron-sulfur cluster-binding protein OS=delta proteobacterium NaphS2; OX = 88274 GN=NPH_5844 PE=4 SV=1
MNIARQAKDSGFIASGVSPSGKPLFFDAFCKWIDAAKFGQMAWLQKHRSLREDPGKLLRECRTIISLAYPYPSAKPCTPDGYTMARYSAPQKNDYHIRLRKKAEHLATKIKASYPGAKTRVCIDSAPILERSFALRSGMGFLGKNNMFIVPGHGSYLFLAEVLTTALLPPSQDTSTIGDLCGDCTRCVDACPTGALESPRYLNASKCLSYLTIEHEGDLDKKTGKKMGRCFLGCDICQEVCPFNRSEKPDEISLPGIKEFLKMEEREFKTLFGQTALARPGLRRIQRNIKAILH

SEQ ID NO: 76247 - protein, 399 aa, unidentified
  source 1..399: note = Deltaproteobacteria bacterium
  REGION 1..399: note = tr|A0A2E8GLM8|A0A2E8GLM8_9DELT Epoxyqueuosine reductase OS=Deltaproteobacteria bacterium OX=2026735; GN = queG PE=3 SV=1
MPVLSAKPETPEIWIRQKAEELGFGLVGFAKVAPSRTIGIYQDWLRQGYAGAMEYLERHAELKEDPRHLLPEAQTLIALGMHYQTDDPDPVQSNNPALGRVSRYAWGDDYHQVLRAKLRELSDGIQQKFRVGDGQHRPCVDTGPLLERELAHHAGLGWFGKHSNLIHWPQGSWFFLAELLVDFPLTPDAPFTRVDCGSCTRCIEACPTDAIVADRTVDARRCISYLTIELKGAIPQELRTRMGNWIFGCDICQEVCPWNRNAPRTSEPAFQPRSGFQHPELLEWMGMNQEEFRRRFRKSPLKRTQRRGLLRNIAVALGNWGSPKAIPALGKGLRDTEPLVRQHAAWALGRIAAPESQRLLQHSLVAETDEAVRREIRGSLNPHESTNRLDSASDFSDNY

SEQ ID NO: 76248 - protein, 352 aa, unidentified
  source 1..352: note = Deltaproteobacteria bacterium
  REGION 1..352: note = tr|A0A1Z8TE67|A0A1Z8TE67_9DELT tRNA epoxyqueuosine(34) reductase QueG OS=Deltaproteobacteria bacterium TMED58 OX=1986674 GN=CBC18_04065 PE=4 SV=1
MKKELDLTNQIKNIILSNGFDSVGVSEAHKLDDEFFLANWIQKDFHGSMKYMEDVEKRSDVRKIDSNFKSVISCTLNYNTLDKEKSSMLAEKKGKGWISRYAIGDDYHKIIEKKLKKIGFLIKKLYSETVNVRAYVDTGPLLERAYASRSGLGWIGKNSCLINRGQGSWIFLSNILLDQKLKFDDVTTKDFCGTCTLCIDSCPTNAIVDNKIIDSRKCISYLTIENRNYIEDALASKIKNNIYGCDICQEVCPWNRKSIIDLENGINPKNLLIEPDIINLISIVEEDWETLKIKSPLKRVKKDGLIRNILIVMGNSLNKKYLSILQKYLESKNLIHSMTARDSIKRIKSHIS

SEQ ID NO: 76249 - protein, 275 aa, Dendrosporobacter quercicolus
  REGION 1..275: note = tr|A0A1G9S254|A0A1G9S254_9FIRM Epoxyqueuosine reductase QueG (Queuosine biosynthesis); OS = Dendrosporobacter quercicolus OX=146817; GN = SAMN04488502_103182 PE=4 SV=1
MAITKQQISKYARTLGANLIGFAPASRWDEYDEVEADYRPAAIWPETNTVIVLGVPVLLPVIETTPSINYVELYDTTNTLLDQIAYRLAVYLTEKGYGSIFMPRDAYGDIQVLVDKPVAAFSHVFAGKYAGLGTIGYSHVLLNRQYGPRVRYVSVFTRLKIAPDNVLETDLCTKCRVCQRLCPTQAFTTRDDRIIALMDKHACARHHAQLRQEHRYPCGICVKVCPVGEDRQVFNSNDIGLYLQEKESIRKNPDDPRYKRWVHMRRHGSNGERLF

SEQ ID NO: 76250 - protein, 357 aa, Denitratisoma sp.
  REGION 1..357: note = tr|A0A518U837|A0A518U837_9PROT Epoxyqueuosine reductase OS=Denitratisoma sp. DHT3 OX=1981880 GN=queG; PE = 3 SV=1
MHDWNSLIEEIGTWARELGFAAIGVSSADLGTAEAGLSAWLDAGCHGEMDYMASHGLKRARPAELLPGTRSVITARMDYLPAAADAAANLADGRRAYVSRYALGRDYHKLLRNRLQKLADRIADRVGPFGYRAFTDSAPVLEVELAIRSGLGWRGKHTLLLNREAGSHFFLGEIFTDLPLPPTAPPAGTTAAAHCGTCRACIDACPTGAIVAPYRLDARRCISYLTIELKGAIPIELRPLIGNRIYGCDDCQLYCPWNRFAPLTHEQDFAVRHGLDQATLVELFAWSEAEFNERLAGSPIRRIGHERWLRNIAVALGNAPPDAVLQAALRTRADDPSPLVREHVAWALARQASTEPA

SEQ ID NO: 76251 - protein, 368 aa, unidentified
  source 1..368: note = Denitromonas halophilus
  REGION 1..368: note = tr|A0A557R2R7|A0A557R2R7_9RHOO Epoxyqueuosine reductase OS=Denitromonas halophilus OX=1629404 GN=queG; PE = 3 SV=1
MNKMDHQEVSGAVGEAFDVDALAARIRAWGLGFGFGEVGITGTELPGAEAGLQAWLAAGFHGEMDYMAKHGLRRCRPAELVPGTLRVITARLDYWPESADADAALNDPERAYISRYALGRDYHKVLRLRLKKLAERIAEEVPHGFRVFTDSAPVTEVALATESGIGWRGKHTLLISREAGSFFFLGEIFTDLPLPVDPPVSDHCGDCTACITVCPTQAIVAPYKLDARRCISYLTIELHGAIPAEFRPLIGNRVYGCDDCQLVCPWNRFAQRTAEADFAVRNGLDAASLVELFAWTADDFESRMPGSPIYRIGHERWLRNLAVGLGNAPSMPAVLGALQARAEDPSELVREHVAWALAQHADRSPPSA

SEQ ID NO: 76252 - protein, 368 aa, unidentified
  source 1..368: note = Denitromonas halophilus
  REGION 1..368: note = tr|A0A557R3U9|A0A557R3U9_9RHOO Epoxyqueuosine reductase OS=Denitromonas halophilus OX=1629404 GN=queG; PE = 3 SV=1
MDKFDHQEVSGAVGEAFDVDALAARIRAWGLGFGFGEVGITGTDLPGAEVGLQAWLAAGFHGEMDYMAKHGLRRCRPAELVPGTLRVITARLDYWPESADADAALNDPERAYISRYALGRDYHKVLRLRLKKLAERIAEEVPHGFRVFTDSAPVTEVALATESGIGWRGKHTLLISREAGSFFFLGEIFTDLPLPVDPPVSDHCGDCTACITVCPTQAIVAPYKLDARRCISYLTIELHGAIPVEFRPLIGNRVYGCDDCQLVCPWNRFAQRTAEADFAVRHGLDTASLVELFAWTAEDFESRMPGSPIYRIGHERWLRNLAVGLGNAPGTPAVLAALQARADDSSELVREHVAWALAQHADRAAASA

SEQ ID NO: 76253 - protein, 396 aa, Desemzia incerta
  REGION 1..396: note = tr|A0A1I5YHK8|A0A1I5YHK8_9LACT Epoxyqueuosine reductase OS=Desemzia incerta OX=82801; GN = SAMN04488506_2017 PE=4 SV=1
MATTKRLGFDMVNGTVLKERIIEESKRIGIDKIGFTTAEPFDGLEEKLRTQQSKGYHSGFEHKVIEERVYPELIFRRPRSIIAIALAYPTKMAEPPEREKGVRRGEFARASWGQDYHDVLRDRMDRLIAFIREAAGEEAEFKPMVDTGELVDVAVAQRAGLGFIGRNGLLITKEFGSYVYLGEIITNLDFEPDEPVPFGCGECMRCVTACPTGALLGDGRINAKECLSYQTQTKGMMEEKYRRKMGHVIYGCDICQIVCPYNKGKDFHFHPEMEPDPEKVLPKLKPLLTISNKDFKQQFGSMAGSWRGKKPLQRNAIIALGNKRDRTALPDLLRCIEEDIRPVIRGTAAWSISKIVTRRDEMVLEFLREALEKETDEEAYHEITLAIEAIENKKGF

SEQ ID NO: 76254 - protein, 318 aa, unidentified
  source 1..318: note = Desertifilum sp.
  REGION 1..318: note = tr|A0A1E5QPX6|A0A1E5QPX6_9CYAN Epoxyqueuosine reductase OS=Desertifilum sp. IPPAS B-1220 OX=1781255; GN = queG PE=3 SV=1
MNLNADRVKQKALELGFHLVGIASVDNELVKEAVERLQSWLALGYQADMAWMANPRRQDVREVMPNVQSVVCVALNYYTPYQRPPGAKYAKISRYGWGRDYHKVMHKKLKAFSLWLEAQGLQTRYYADTGPVQDKVWAQAAGLGWIAKNGNAITRQYGSWVFLGEVLVDRYLTPDRPHTQHCGTCTRCLEACPTGAIAQPFVVDANRCIAYHTIENREADLPEAIAPHLEGWVAGCDICQEVCPWNQRFAQPTDVADFTPYPHNLAPTLAELANLSEEEWDRRFVASALRRIKPQMWRRNARANLEASLEVASAHPNP

SEQ ID NO: 76255 - protein, 387 aa, Desmospora activa
  REGION 1..387: note = tr|A0A2T4Z7S5|A0A2T4Z7S5_9BACL Epoxyqueuosine reductase OS=Desmospora activa DSM 45169 OX=1121389; GN = C8J48_0511 PE=4 SV=1
MVTPEQIKQSLIQETERLGIDKIGFASADPFLELKERLIQHRKSGFESGFEEPDLDKRTDPRLSLPNARTIIAIALAYPTRMDDPPANRPGAYRGFFCRASWGEDYHHVLRRKLEGLERHLRELVPDVTTEIMVDTGALSDRAVAERAGIGFIGKNTSLITTQFGSWVYLGEMLVDIALPPDQPVTEGCGDCTVCIDACPTGALVGPGQLNSQACLAYQTQTKGFLADEYRDLLGGYLYGYETCQAVCPFNRGKNFTHQEAFRPDPEKVKPLLKPLLTISNRQFQQRFGTMAGSWRGKKPIQRNAIIALGRFRDKSAVPDLIKLLQDDPRPVIRGTAAWALGRIGGSEAEKALMEAEQREQDSEVQKEIKRALKNRITHEKQENEQG

SEQ ID NO: 76256 - protein, 419 aa, Desmospora sp.
  REGION 1..419: note = tr|F5SL20|F5SL20_9BACL Iron-sulfur cluster binding protein OS=Desmospora sp. 8437 OX=997346; GN = HMPREF9374_3802 PE=4 SV=1
MTIMIRCRDGAVIEWPCYHRGNEWITEGGGGMDPEQIKEELKREAKRLHIDKIGFASAEPFTELKERLIQHRKAGYESGFEEPDLEKRTDPRKSLPEARSIIAIALAYPTRMENPPESRAGALRGGFCRASWGEDYHRVLKNKLEGLKAKLSELVPGAAAKVMVDTGALSDRAVAERAGIGWSGKNTSIITQEFGSWVYLGEMITDVQLPPDEPITQACGDCTACLDACPTGALTEPGRLNSQACLAYLTQTKGYLPEEYRSKLGGSLYGYETCQLVCPYNRGKNFTHHREFTPEPDQVKPLLKPLLQMSNREFRERFGSMAGSWRGKKPIQRNAIIALGRYRDRTAVPDLIHLLETDIRPVIRGTAAWALGRIGGAEAETALRQSKDREQDEEVLQEIASALQACHSEEKAEHRYREA

SEQ ID NO: 76257 - protein, 351 aa, Desulfacinum hydrothermale
  REGION 1..351: note = tr|A0A1W1XPP6|A0A1W1XPP6_9DELT Epoxyqueuosine reductase QueG (Queuosine biosynthesis) OS=Desulfacinum hydrothermale DSM 13146 OX=1121390 GN=SAMN02746041_02475; PE = 4 S V=1
MAELSRIVREFAEIEGACAAGIVTPRTLSGGPPSTDLSYVLPQARSAVVFAVPMDPAPIDGYLRKEDRLSLERAYVRANTVASGIALHLANFLAQKGYPSAAVAANNVFRPASSQSGNGCPADSYYPDIAHRYLAVRSGVGHMGFSGNVITKDHGAAVILGTVVTEADLAPTEPLAPEESYCDRCGLCRAACASGFMDFRNTTRVVLGGVEIAYSGRRHYGRCDLVCSGYTGLHPSGKWSTWSPGRFPVPDRDEDLPAAYERMQKAHASWPASEGGRYFFFMDEKLRFSCGHCMLICHPSREERKRRYQLLRHSGVVVQMADGTRKAVTPHEARTILDAMHPERRILYEDV

SEQ ID NO: 76258 - protein, 353 aa, Desulfacinum infernum
  REGION 1..353: note = tr|A0A1M4VMP9|A0A1M4VMP9_9DELT Epoxyqueuosine reductase QueG (Queuosine biosynthesis) OS=Desulfacinum infernum DSM 9756 OX=1121391 GN=SAMN02745206_00706 PE=4; SV = 1
MTKLSRIVREFAEIEGACATGIVSTETLAGGPPSTDLSYVLPGARSAVVFAVPMDPAPIEPYLKKQDRLSLERAYVRANTLASGIALHLANYLTQKGYPSVPVAANNVFRPVPSGKEETCLADTYSYYPDIAHRYLAVRSGVGHMGFSGNLIIPDHGATVILASVATAADLVPTPPLPPEENYCDRCGLCLAACASGFMDFKRNTTVVLGGVEISYSKRRHYGRCDLVCSGYTGLHPSGRWSTWSPGRFPVPDRDEDLPAAYDRVQEAHGKWPASEGGRYFFFMDEKLRFSCAHCMLVCAPTKEERKRRYQLLRDSGVVVQTADGSRKAVSPEEARTILDAMPPERRALYEPV

SEQ ID NO: 76259 - protein, 226 aa, unidentified
  source 1..226: note = Desulfallas geothermicus
  REGION 1..226: note = tr|A0A1I6EL67|A0A1I6EL67_9FIRM Epoxyqueuosine reductase QueG (Queuosine biosynthesis) OS=Desulfallas geothermicus DSM 3669 OX=1121426 GN=SAMN05660706_1591 PE=4; SV = 1
MTGMTEKLKKYAHDLGITAIGTAPVERYHLAPPGHRPGDFLPAAKSVVTFAYKLNDGPLNNLPVTRNQYMVEFEAVNQFLLQTAHKIARFLESGGYESVAFGPEAAIGDYPRLKGDLSHKHSAVLCGLGSFGINNLLLTPDHQARVRLASVVTTAPLDYDEPLIISVCHQCLKCVRECPSGALDDWEKSYSPQTGWTINKEKCAHYMFVTSAGKRCGLCVKACAQK

SEQ ID NO: 76260 - protein, 374 aa, Desulfarculus sp.
  REGION 1..374: note = tr|A0A3A6P4K7|A0A3A6P4K7_9DELT Epoxyqueuosine reductase OS=Desulfarculus sp. OX=2093367 GN=C4525_06235; PE = 4 SV=1
MGLKQLIREKALELGFEGIGFTGVEPLDLYIKEFRSRPEMYQWVTTPQFDLLRGAEVTQRYPWARSLLVLIRNYHRRRFPRQLIGVIGRCYQVDERKEKGSEHQRLMDFFAFLKDQGLKFRWDGEIPARMAAARAGVVTYGKNCFVYARGAMRGASWLESIPLVLDAELAPDEPSIELGCPDWCKNACVAACPTGALYAPKKMRPQRCIAYNTYFAPGLTPAELREPMGTWVYGCDRCQEVCPRNQPWLNQPLPDNPPLMARAEDFALERLLAMDTEYYLANIWPLCFYISRRQVAQWQMNAARALGNRGDREAAPLLARALADSPDYTVRAMAAWALGRLGGERAGKFLEAARPREDGMVRQEIEDALARARA

SEQ ID NO: 76261 - protein, 373 aa, Desulfatibacillum aliphaticivorans
  REGION 1..373: note = tr|B8F9F5|B8F9F5_DESAL Heat repeat-containing PBS lyase OS=Desulfatibacillum aliphaticivorans OX=218208; GN = Dalk_1198 PE=4 SV=1
MITKQDVMQAAYDNGFVDVGITTMEPFDNSKDYLEAHQEEYGWAEKMGLSLLQGTDPANIMPEGKSIIVLLEGYFQKSFPPSMERHFGRCYLDDDRVTKDGLALRIKAFRNFLREGGINSKVPFNLPHRAAATRAGLGTLGKNCLFYSRKAEAQSSFSFPIAVVVDREFEADEPTMRFGCPDWCRNACIAACPTKALKGNGRLDPRKCISFLSYYGRGITPLEIREAMGLFVYGCDRCQNVCPRNAPWLAKDLPVNQKAAAKAGDFELPKLLHMDKEYFETKIWPHMFYMGYKHIWRWKMNVARVMGNTLDPIYVDDLIKAFGEHDDERVLGMIAWALGRIGGEKAKQALEGFASKAQEPVLGEINHALEMID

SEQ ID NO: 76262 - protein, 241 aa, Desulfatibacillum alkenivorans
  REGION 1..241: note = tr|A0A1M6U0A3|A0A1M6U0A3_9DELT Epoxyqueuosine reductase QueG (Queuosine biosynthesis); OS = Desulfatibacillum alkenivorans DSM 16219 OX=1121393; GN = SAMN02745216_03775 PE =4 SV=1
MPDDYTLQIKAKAAQLGADLAGIADLAPFKDEKTYPASLLAPFTRALSMAVQIPSMVFETIHKKPSDLYNHVYKTANMMLDQIALKAAGSLEQDGYRSLPIPASQIIDVKDYRGALSHKAIARMAGLGWQGKSLLLVTPKFGPRVRLVTVLTNAPLEPDGPVANRCGKCTNCKDACPAGAIKGVQIKDRYADRNQALDFQKCVDKTAEFARMDNIGARICGFCIKACPFGRKNPKNLPWLQ

SEQ ID NO: 76263 - protein, 373 aa, Desulfatibacillum alkenivorans
  REGION 1..373: note = tr|A0A1M6PNR7|A0A1M6PNR7_9DELT Epoxyqueuosine reductase OS=Desulfatibacillum alkenivorans DSM 16219; OX = 1121393 GN=SAMN02745216_02858 PE=4 SV=1
MITKQDVMQAAYDNGFVDVGITTMEPFDNSKEYLEAHQEEYGWAEKMGLSLLKGTDPASVMPEGKSIIVLLEGYFQKAFPPSMERHFGRCYLDDDRVTKDGLALRIKAFRSFLRDAGINSKVPFNLPHRGAATRAGLGTLGKNCLFYSRKAEARSSFNFPIAVVVDQEFEADEPTMRFGCPDWCRNACIAACPTKALKGNGRLDPRKCISFLSYYGRGITPMEIREAMGLFVYGCDRCQNVCPRNAPWLAKDLPVNPKVVAKAGDFELPKLLHMDKEYFETKIWPHMFYMGYEHIWRWKMNVARVMGNTLDPMYVDDLVTAFGEHDDERVLGMIAWALGRIGGEKAKQALEGFAPKAQEPVLGEIRHALDMFD

SEQ ID NO: 76264 - protein, 376 aa, unidentified
  source 1..376: note = Desulfatitalea sp.
  REGION 1..376: note = tr|A0A0F2QVV4|A0A0F2QVV4_9DELT PBS lyase; OS = Desulfatitalea sp. BRH_c12 OX=1629708 GN=VR64_14895; PE = 4 SV=1
MLSKEDVIRQAQSLGFEDIGFTSAEPFDSHREVLAARQQEYGWVEEKGIALLQGTDPRNALPQAQSIIVLMSVYLRNAYPKYLEGHFGRCYLDDDRITKNGLAVKVKALRAFLQDNGIASKVPFNLPHRMAAARAGLGTFGKNGLFYSRKAARQSSWVLPITVVVDQPFEPDAPTIRMGCPDWCRNACIAACPTRALKGNAAVDPRRCISYLTYYGEGLTPRELREPMGLYVYGCDRCQNVCPRNAAWLAEQLPPNPAVDAMQADFQLEQLLGMDKAYFKNRIWPRMFYMPPEQMWRWQMNAARAMGNTRDEKYIQPLAQACQGNGDERVRAMAAWALGRIRTIKARTVLETLKASAPGLVAAEIAVAALDMPEGP

SEQ ID NO: 76265 - protein, 409 aa, Desulfitibacter sp.
  REGION 1..409: note = tr|A0A101V6J6|A0A101V6J6_9FIRM Reductive dehalogenase OS=Desulfitibacter sp. BRH_c19 OX=1734395; GN = APF76_10245 PE=4 SV=1
MNIHQLNTTTAQLYNVDETYRRYNQKYNLNIRGYWDKESKNLELQIVNTMSDYVKKNTPGYSPFDYGFFMGSLNYLKQIGFNANLCDQNANSWNYDIKSIKEAKEKVTDERETTVALKKAAKMYGASAMGIARLDRRWIYSHWFDEKTKQEYPIRFTDESKEYADISQPTLLPDGVRVIPATMKYVIVLLFEMDYESLKYAPTLLACASTVNTYAKASLTTMSLAGMIKALGYEAIPSLNCTGLNVPLAIDAGLGQLGRNGKLISPRYGSISRIAKIITDIPLLPDKPIDFGVTEFCEACRKCARECPSNAISSGTREMGPVDDTGNTGYLRWPVDHKKCHSYFCGSGTNCNVCISVCSYNRGYKWTNSMLSTFNKKNGLVDSILDGLDDEIYGEELFKKGKNVFWKEE

SEQ ID NO: 76266 - protein, 376 aa, Desulfitibacter sp.
  REGION 1..376: note = tr|A0A117S4Z7|A0A117S4Z7_9FIRM Uncharacterized protein OS=Desulfitibacter sp. BRH_c19 OX=1734395; GN = APF76_13230 PE=4 SV=1
MNLSEKLIKFCKDMGFDLVGIVEPDFLKDRLDVLTERRRKGYNSRFENPDLNLRTSPQLVLPNVKSILVLGLGYYSDVESSPEPLKAQVARYTRGMDYHLVMKQKMNKVIEYLKSEEESFEYKALVDSSPLLERFLAEKIGLGWIGQNSCFYTKATGSWIFLGEILLTIELGITEVSSVETGCKNCKVCIKACPTGAIEGMYTLNPHKCLAYVTQAKEIVPKKLRPLIGSNLMGCDICQEVCPNNKGVSPNGHKYLEPLDFLDISLKDILTLTNSKFKQLFSRAAFGWCGKKVLQRNALIVLGNQKQSDAIHLIEPFLNHEDYKMRVHAAWALGQIGNQQSKTLLEKSMHIENHLEVVHEIKDALDKTREKTPHYT

SEQ ID NO: 76267 - protein, 253 aa, Desulfitobacterium chlororespirans
  REGION 1..253: note = tr|A0A1M7SKP9|A0A1M7SKP9_9FIRM Epoxyqueuosine reductase QueG (Queuosine biosynthesis); OS = Desulfitobacterium chlororespirans DSM 11544 OX=1121395; GN = SAMN02745215_0100 6 PE=4 SV=1
MKEKIKKFILDLGVDDVGFAKVEDYHSPKSYPIASFLPEARTIISLVFQELDTCESPSVTIAMNGRLDMNSFQRSCSYQINRFLKREFRAKVVDMPYSYPMELHKDRPAIADFSQRHAAVAAGMGTFGRHNLVIHPRFGTRIGLTALITNLEIEPNEKIEQDLCRHCDLCVRNCPAGALDEAGKTSVGKCIRNSQPYGLGANIAFWQEFSGSSPEEQKNMFMEERYGRLQQAGSMGMQYYCFNCMKFCPVGVR

SEQ ID NO: 76268 - protein, 364 aa, Desulfitobacterium chlororespirans
  REGION 1..364: note = tr|A0A1M7U057|A0A1M7U057_9FIRM Epoxyqueuosine reductase OS=Desulfitobacterium chlororespirans DSM 11544; OX = 1121395 GN=SAMN02745215_02838 PE=4 SV=1
MDQKEGILWKERLRHLALESGFVAVGFTHAEPVAGLYEFLAERSAQGYHTSFEEQELRKRVDPKAIWPACETVVVLAYPLVYSAPPQKGEGVLARSAVGEDYHSQVKRALHQLVSSFGEAGWRGEAPQIQVDTGPLNERALATRAGLGWLGKNQQLIISGKGSFVALGLMLLDKALPPDEPLAGQCGKCTRCIRACPAQILGTRHFQANECLSYLTQSKEPLTERQRTALGKRIFGCDTCQEVCPHNGLRCDEEGKRSILNKIKGDRQGELRKAGQERQEPDISGEKALRRGVDLWDTLNLTKSQFNQQWRGTAAGWRGKGILQRNAYLALKNLRDPRLPSWEEERTGQDIPKLIQPYYSKADK

SEQ ID NO: 76269 - protein, 403 aa, Desulfitobacterium dehalogenans
  REGION 1..403: note = tr|I4AEH2|I4AEH2_DESDJ Reductive dehalogenase; OS = Desulfitobacterium dehalogenans (strain ATCC 51507 / DSM 9161 / JW/IU-DC1) OX=756499 GN=Desde_4096 PE=4 SV=1
MRIQRLNTSAAELHEIDQNYSRYNQKHNIFIRLFWDEEIKRLEHARQKNAEQYSKDNKPGYSKFDKAFLAGTMNFMREKIVQNIHICDQEFNAWNGEKGTKEEGMDIFTLTKAIKKAAKMYGACAVGIAPLDRRWVYSHWYDLQTRQSYPIQFSDEAPEYNRIQEPTLLENKVRVIPASMKTAIVMLFEMDPGCLKYSPTLLPYANGRFVYSEMCLTTNSLAGLIRELGYNAIPSVNCTALNIPLAIDAGLGQIGRNGKLINPYLGTRIRIAKVITDLPLDCDQPIDFGVNEFCEACRKCARKCPAGAIPSDSKVCSGMDELSNDGYLRWAIDHKKCFCYWSECGTNCNICITVCSYNRGYKWTKSILNSSKESSTLVDNLLDSLDDCGPDVFDPEASFWLNS

SEQ ID NO: 76270 - protein, 350 aa, Desulfitobacterium dehalogenans
  REGION 1..350: note = tr|I4A8L5|I4A8L5_DESDJ Uncharacterized Fe-S protein; OS = Desulfitobacterium dehalogenans (strain ATCC 51507 / DSM 9161 / JW/IU-DC1) OX=756499 GN=Desde_1909 PE=4 SV=1
MEEKEGALWKERIRHLALESGFAAVGFTHAEPIEGLYGFLEERSAQGYHTSFEEKELRKRVDPKAIWPACETVVVLAYPLAYSSPPQRGEGVLARSAVGEDYHSQVRRALCRLADSLGEAGWRGENPQTQVDTGPLNERALAARAGLGWIGKNQQLIVPGVGSFVALGLMLLDRALPPDEPLDGQCGNCTRCIAVCPAQILGAMHFRANQCLSYLTQSKEPLTEQQRAALGNRIFGCDTCQEACPHNRLRLAGEEEPIDLDKVKGDSQAELRKEGRRGVDLWETLNLTKSQFNQQWRGTAAGWRGKGILQRNAYIALKNLQDPRLQSWVEERAEQDIPKLVQPYFDRADK

SEQ ID NO: 76271 - protein, 316 aa, unidentified
  source 1..316: note = Desulfitobacterium dichloroeliminans
  REGION 1..316: note = tr|L0F7C6|L0F7C6_DESDL Uncharacterized Fe-S protein; OS = Desulfitobacterium dichloroeliminans (strain LMG P-21439 / DCA1) OX=871963 GN=Desdi_1584 PE=4 SV=1
MELTEGYNWKQCIRELAHQSGFSAVGFTSGDPLEGLKEYLEERSELGYQISFEDKDLQKRVDPKALWPVCETVVALAYPLPLSAKPREGEGVLARSAVGEDYHRLVRKGLDSLVISITAAGWQGQRPLTQVDTGPVNERAFAKRAGLGWVGKNQQLIVPGVGSFVALALLFLDQALPPDNPIQSQCGECTRCVQACPAQILGQVHFQANQCISYLTQSKECLTEPQQNYLGNRIFGCDTCQEACPYNRNRLDKEDELEKEGEGLEGTRGVDLWETLNLTKSQFIRKWKNSAAGWRGKGILQRNAQLVLQNLNMIKR

SEQ ID NO: 76272 - protein, 388 aa, Desulfitobacterium hafniense
  REGION 1..388: note = tr|A0A0W1JFF8|A0A0W1JFF8_DESHA Epoxyqueuosine reductase OS=Desulfitobacterium hafniense OX=49338; GN = AT727_08495 PE=4 SV=1
MRTLNSWIQSPLFISVQKKGGISVDQKEGMLWKERLRHLALESGFAAVGFTHAEPVAGLYEFLAERSAQGYHTSFEEKELRKRVDPKAVWPACETVVVLAYPLVYSAPPQKGEGVLARSAVGEDYHSQVKRALHQLVNSLGEAGWRGEIPQIQVDTGPLNERALATRAGLGWLGKNQQLIIPGKGSFVALGLMLLDKALPPDEPLAGQCGNCTRCIRACPAQILGTRHFQANECLSYLTQSKEPLTERQRTALGKRIFGCDTCQEVCPHNGLRCDEEGKCSILNEIKGDRQGELRKAVLEGKEPDISGEKALPRGVDLWDTLNLTKSQFNQQWRGTAAGWRGKGILQRNAYLALKNLQDPRLPSWEEERAGQDIPKLIQPYYSKADKE

SEQ ID NO: 76273 - protein, 388 aa, Desulfitobacterium hafniense; identical to SEQ ID NO: 76272
  REGION 1..388: note = tr|G9XS31|G9XS31_DESHA Putative iron-sulfur cluster-binding protein OS=Desulfitobacterium hafniense DP7 OX=537010 GN=HMPREF0322_03779 PE=4 SV=1

SEQ ID NO: 76274 - protein, 203 aa, Desulfitobacterium metallireducens
  REGION 1..203: note = tr|W0ED25|W0ED25_9FIRM 4Fe-4S ferredoxin; OS = Desulfitobacterium metallireducens DSM 15288 OX=871968; GN = DESME_08450 PE=4 SV=1
MNDGSTDLQSYITQTALENGALLVGYTKVRRTQPVIILAFPFSNSWILNHPFYITRRFGEELWHEHKVHEKLTTLLQKEGYRYKVKSSLSVFGDIRPLAIAAGIGQWGKNGLVVNKTYGSKLLFSALFSDAPFEAIDQTHPFEISSELNPLSSSSDSCVNCDRCLKACPGKAFKNGIFNPRRCFLKSIRGCSECIQSCTGEAQ

SEQ ID NO: 76275 - protein, 359 aa, Desulfitobacterium metallireducens
  REGION 1..359: note = tr|W0E6Z1|W0E6Z1_9FIRM (Fe-S)-binding protein; OS = Desulfitobacterium metallireducens DSM 15288 OX=871968; GN = DESME_05275 PE=4 SV=1
MELQEQLSWKARFREVAESLGFIKVGFTGAQPLLDLTQYLKGTEKEGCFTPFVEADITLRTDPQAVWAACKTVVVLAYPLPLTSKSQPNEGVLARSSVGEDYHHVLHSRLDKLLQKLREINWPSEQIQLQVDTGPLNERGFALRSGLGWAGRNQQLIVPGVGSFVALALVFLDQELPPDEPMDNLCGTCQKCIQSCPAQVLGKEHFVATQCLSFLTQSKERLSDGQAKSLGQRLFGCDTCQEACPHNQGFLRREEEAQNKVQRQSYNRTEGVSYSDEATCLRRGADLYEVLNLTKAQFNERFRWTAAGWRGKGILQRNAYRIMENLQDERRIAWLNENKDNQTLPLVLRQELMGKNKDR

SEQ ID NO: 76276 - protein, 365 aa, Desulfitobacterium sp.
  REGION 1..365: note = tr|A0A562HEN5|A0A562HEN5_9FIRM Epoxyqueuosine reductase OS=Desulfitobacterium sp. LBE OX=884086; GN = DesLBE_0984 PE=4 SV=1
MDQKEGMLWKERLRHLALESGFAAVGFTHAEPVAGLYEFLAERSAQGYHTSFEEKELRKRVDPKAIWPACETVVVLAYPLVYSAPPQKGEGVLARSAVGEDYHSQVKRALHQLVNSLGEAGWRGEIPQIQVDTGPLNERALATRAGLGWLGKNQQLIIPGKGSFVALGLMLLDKALPPDEPLAGQCGNCTRCIRACPAQILGTRHFQANECLSYLTQSKEPLTERQRTALGKRIFGCDTCQEVCPHNGLRCDEEGKCSILNESKGDRQGELRKAVLEGKEPDGSGEKAFRRGVDLWDTLNLTKSQFNQQWRGTAAGWRGKGILQRNAYLALKNLQDPRLPSWEEERAGQDIPKLIQPYYSKADKE

SEQ ID NO: 76277 - protein, 347 aa, Desulfobacter sp.
  REGION 1..347: note = tr|A0A2D6EUJ6|A0A2D6EUJ6_9DELT 4Fe-4S ferredoxin; OS = Desulfobacter sp. OX=2294 GN=CL941_09135 PE=4 SV=1
MEKLTGRVKDLARGYGAGTIGITTTQMLEGGPPSADLSYVLPNARSAVSFAIPLDQNHIAPWFNKKDHHAHFQNNIHINVMASGISLELANYLKHKGFPSVPLSANTAYRTDTKNGIYDEKPPISHRYLAVCSGVGFFGLSGNVLTKTNGAAIILGSVVTEADLIPTEPIPVEDNYCDDCRLCKAACASGFIDGEEKVTIKMGGVEFSYSKKHHHSRCDYVCGGFTGLHKSGKWSTWSPGRFPIPDNDDEFFPALLNSVGPYLKRTRPGISFFNALMPGDKVQLTCGNCQLICHPDKDVRKKRFKLLIESGVIVQNPSGSLEAVTPEEAIKRLVSMHPEKRALYEEI

SEQ ID NO: 76278 - protein, 307 aa, unidentified
  source 1..307: note = Desulfobacteraceae bacterium
  REGION 1..307: note = tr|A0A523XTC0|A0A523XTC0_9DELT Uncharacterized protein OS=Desulfobacteraceae bacterium OX=2049433; GN = E3J46_13675 PE=4 SV=1
MISTAEKLLRDFENRGWKGQIVPVKHLTDLREAILGTHERGLFDEEFYQEWLTQFSFEHPEALPSAQSIIVIAVPVPLHQTIFHWQGKRWLLSIPPTYVNYTATTECVRTTVAALLEQEGYGVVKTKLPLKTLAVRSGLAEWGRNNICFVPGMGSFLQLVGCFSDLPCVEDPWREPRLMERCDSCVACMRKCPTGAITRERVLLHAERCLTFHNERDVEIPFPPWIDSAWHNSLIGCMNCQLICPENKAVKTWIEEIGEFSAEETALLMERIPFDQLPAEMLAKLRNLGINDVQALPRNLAAILNRE

SEQ ID NO: 76279 - protein, 371 aa, unidentified
  source 1..371: note = Desulfobacteraceae bacterium
  REGION 1..371: note = tr|A0A1J5E3Z9|A0A1J5E3Z9_9DELT PBS lyase; OS = Desulfobacteraceae bacterium CG2_30_51_40 OX=1805128; GN = AUK25_02370 PE=4 SV=1
MVTKDDIIQKAHDLGFEDVGFTSADPFDSQRKILAERHREYAWTKAGGLDLDAGTDPKNILPEARSIIVLMEVYFRKAFPRRMEPFFGRCYLDDDRMTKDGLAIRIKAFRSYLMENGIASKVPFNIPHRLAAGRAGMGTFGKNCLFYSNKVARKSSWVLPVAFVVDAEFEPGVPTLEVGCPDWCRNACLTACPTGALQGPRKIDPRRCISFLTYFGRGLTPLELREPMGLWIYGCDRCQNVCPRNAPWLSAALEPNEKAAEKAPYFDPVKLLHMDRKYFEERIWPHMFYMSSEDIWRWKMNVARAMGNSTDEGYVPELILAFGEDGDERVRGMIAWALGRIGGRAARKALEGFRASSAGVVMEEVERALSV

SEQ ID NO: 76280 - protein, 371 aa, unidentified
  source 1..371: note = Desulfobacterales bacterium
  REGION 1..371: note = tr|A0A2G9ZX01|A0A2G9ZX01_9DELT PBS lyase; OS = Desulfobacterales bacterium CG23_combo_of_CG06-09_8_20_14_all_51_8 OX=1973983; GN = COX19_16010 PE=4 SV=1
MVSKQEIIEKSKEFGFEDVGFTTADPFETHRKFLAEHQAEYGWAEAVGLELMKGTDPTAIMADAQTVIVLMEVYFRKAYPRTMEGHFGRCYLDDDRVTKDGLSQRIKAFRGFLRDHGIDSKVPFNLPHRVAAARAGMGTFGKNCLFYSSKVARQSSWVLPIAVVINQKLEPGVPTLKMGCPDWCRNACIAACPTRALKGNGAIDLRKCISFLTYFGTGLTPKDLRAPMGTYVYGCDRCQNVCPRHAGWLAADLSINEKVAAKAGDFELPKLLHMDKAYFESKIWPHMFYMGADDIWRWKMNVARAMGNTQDTEYAKDLARAFSENTDDRVRAMCAWALGRIGGETARSALGGFLAESSGDVREEVADALGG

SEQ ID NO: 76281 - protein, 353 aa, unidentified
  source 1..353: note = Desulfobacterales bacterium
  REGION 1..353: note = tr|A0A1F9NY94|A0A1F9NY94_9DELT PBS lyase; OS = Desulfobacterales bacterium RIFOXYA12_FULL_46_15; OX = 1797914 GN=A2277_06365 PE=4 SV=1
MVLKEDIIRAAEEAGFEDIGFTTAEPFEEHAKLLASMKEEYAWAEGAGLDLYNGIDPKTILPGAKTIIVLMETYFRKAFPRTMEGRFGRCYLDDDRVTKDGLYLRIRQFRDFLRNHGIDSRVPFNLPHRVAAARAGMGGFGKNCLFYSNRVARGGSWTLPIAVVIDREFTPGEPSIGINCPDWCKNACIAACPTRALKGNGRIDPRKCISYLTYFGEGLTPLELREPMGMYVYGCDRCQNVCPRNQPWLAADLLPNERAAAKAPDFDLPLLLHMDKNYFNTRIRPHMFYMSDRDLWRWKMNVARAMGNSLDPAYIPDLVRAFRENSDDRVKAMAAWAMGHIGESHGDPAFYLF

SEQ ID NO: 76282 - protein, 373 aa, Desulfobacterium autotrophicum
  REGION 1..373: note = tr|C0Q9H0|C0Q9H0_DESAH Leucine-rich ARM-like family protein OS=Desulfobacterium autotrophicum (strain ATCC 43914 / DSM 3382 / HRM2) OX=177437 GN=HRM2_14250 PE=4 SV=1
MISKEDIVIKSKEFGFEDVGFTTAEPFETHRKFLADRQEEYGWAEAVGLDLIKGTDPRAIMADAQTVIVLMEVYFRKAYPRHMEGHFGRCYLDDDRVTKDGLSQRIKAFRSFLRDNGIDSKVPFNLPHRVAAARAGMGTFGKNCLFYSNTVARQGSWVLPIAVVINHTFEPGKPTVEMGCPDWCKNACIAACPTRALKGNGTIDPRKCISYLTYFGQGLTPKELREPMGLYVYGCDRCQNVCPRNAAWLANDLLPNEKVEAKASAFELSALLHMDKPYFESKIWPHMFYMSSDDLWRWRMNVARAMGNTRDSMYTDDLIRAFRENKDDRVRAMSAWALGRIGCKKDKAALEDFLTDSSGQVHGEVQDALEQCN

SEQ ID NO: 76283 - protein, 294 aa, Desulfobacterium sp.
  REGION 1..294: note = tr|A0A1W9U7W3|A0A1W9U7W3_9DELT tRNA epoxyqueuosine(34) reductase QueG OS=Desulfobacterium sp. 4572_20 OX=1971621 GN=B6I32_01220 PE=4 SV=1
MNQVFVHKAKELGFIAVGFSQPTTPPYYDFFCQWLKEFEIGDMHYLKRNMDIRRDPSLLLKGLKSVISLAYPYPASKPSTPDGYTASRYSTPQEADYHLRLKKLGKQLCTFIAEIFPESKSRVCVDSAPILERSFAAMSGVGFIGKNNMLIVPGYGSYSFLVEILTTAQFSFSPYNGIENMCGSCTKCIDMCPTGALKAPFYIDVSKCLSYLTIEAKDAVDKKTAKKMGNTFFGCDVCQEVCPFNKKESGVVALPSTKEILAMTEIDFNKIFGKTAFERAGKEKLSKNLQAILA

SEQ ID NO: 76284 - protein, 133 aa, Desulfobacterium sp.
  REGION 1..133: note = tr|A0A1W9U4L3|A0A1W9U4L3_9DELT tRNA epoxyqueuosine(34) reductase QueG (Fragment); OS = Desulfobacterium sp. 4572_20 OX=1971621 GN=B6I32_04225; PE = 4 SV=1
QTIPESDFCGSCTRCIEACPTGAILDNRTIDSERCISYQTIENKGDISPDIEVRLTGRVFGCDICQDVCPWNRKALNHLEHGFNPDPELMEMSREDWQNLDREKFSLLFNQSPVQRTGYRKLKSNLDSLQKNP

SEQ ID NO: 76285 - protein, 262 aa, Desulfobacterium vacuolatum
  REGION 1..262: note = tr|A0A1W2DKP3|A0A1W2DKP3_9DELT Epoxyqueuosine reductase QueG (Queuosine biosynthesis); OS = Desulfobacterium vacuolatum DSM 3385 OX=1121400; GN = SAMN02746065_11863 PE=4 S V=1
MKKEAIHHIEKFVKNHQAKPEITTHWGVPIVGFASADEPLFSQLPSVASPTHAVPRDFLPNAKTVIAYFIPFKKEMTRTNLKKRNSSKEWGLAYIETNEMIRQLSESLKEWFKIQGHEGHTIPATHNWDEKKLISDWSHRHIAYMAGIGNFGLNNMLITEQGCCGRVGSFITSAKIAPDTRYQEETCLYKYDGTCKKCVKECVNEALFVTSFDRFKCYEMLLENVENSRAIGYADVCGKCLVGTPCSHMNPVANKRKTLPRE

SEQ ID NO: 76286 - protein, 321 aa, unidentified
  source 1..321: note = Desulfobulbaceae bacterium
  REGION 1..321: note = tr|A0A1E7JDF2|A0A1E7JDF2_9DELT Uncharacterized protein OS=Desulfobulbaceae bacterium C00003063 OX=1869307; GN = BA873_10935 PE=4 SV=1
MMGPKEELYSEKIRNLAYSTGIDVLGFAEASEFTDYALKHSRRRDPKLTLPEAKTIIVAGIYIGELTLPDWANPWYGRTSRLYLSEFFLDIVKPLEPIVNFLKQKGYQAIVCDSSTEEGSILPLKLAAIRAGLGWQGKHSLLISKKYGTFLALGGVITNADLDYNTKEESNRCHKCDKCQKACPLAALDQPYALNREKCLSNILQVDHLPTEALPVMENRIGDCEICQQACPWNKKHLNNPLLTNKTESFQERIGAWKNFFYLPNLAKLTEKEYRKILGHLNTDIPFKLFHRNVLVGLERAKKMERKSEKNLSAPSGLGSM

SEQ ID NO: 76287 - protein, 321 aa, unidentified; identical to SEQ ID NO: 76286
  source 1..321: note = Desulfobulbaceae bacterium
  REGION 1..321: note = tr|A0A1E7GHD0|A0A1E7GHD0_9DELT Uncharacterized protein OS=Desulfobulbaceae bacterium S5133MH15 OX=1869306; GN = BA866_12960 PE=4 SV=1

SEQ ID NO: 76288 - protein, 349 aa, unidentified
  source 1..349: note = Desulfococcus oleovorans
  REGION 1..349: note = tr|A8ZSS4|A8ZSS4_DESOH 4Fe-4S ferredoxin iron-sulfur binding domain protein OS=Desulfococcus oleovorans (strain DSM 6200 / Hxd3) OX=96561 GN=Dole_0177 PE=4 SV=1
MKFEEPIREFLAERGALRVGFCTRETLAGGPPSADLTYVLPSARSAVTFALPLDRDIMRQCLAKKSQFAFEQHNIDVNLKAGRIAKELALWLEEKGYKSVRIHANNVYRKDEPNWQLAMRPDVSHRYLAVRSGVGSFGWSGNVGIKGYGSAIILGSVVTELALEPTPPLPPEEGFCDRCKLCVASCPSGMFHDSRETSVTLGGQTFSYSERISYLPCQLVCGGFTGLSKNKKWSTWSPGRYVIPDPADENSQMETLVRAVGNYTKWPRRSDGDGGFENNAFGGLNIRLTCGNCQMVCRGDREETKENYRLLTTSGCVIQREDGTIEVLGAEDAAREFERMPPEHTTLYR

SEQ ID NO: 76289 - protein, 375 aa, unidentified
  source 1..375: note = Desulfococcus oleovorans
  REGION 1..375: note = tr|A8ZWL8|A8ZWL8_DESOH PBS lyase HEAT domain protein repeat-containing protein OS=Desulfococcus oleovorans (strain DSM 6200 / Hxd3) OX=96561 GN=Dole_2545 PE=4 SV=1
MMLQQEEIIKKARELGFADIGFTTADPFEEHRRMLLERQEEYGWAEQVGLDLLKGTDPDAILPGAKSIIVLIENYFSHAYPRSMEGIFGRCYLDDDRVTKDGLVPRIKAFRAFLREDGINTKVPFNLPHRVAAARAGLGDFGRNCLFYAHNAVRGGSWTLPIAVVVDREFTPGTPTLGIGCPDWCKNVCIAACPTGALKGSGRIDPRKCISFLSYFGDGITPLKMREPMGMFVYGCDRCQNVCPRNQPWLAQALPVNERAAAKAENFDLRALLHMDTAYFESSVWPHMFYMSSADIWRWKMNVARAMGNSRDQGFVPDLARAFEENEDPRVKGMAAWALGHIGGDQAKTALEKFSETTLAGPVAEEVRLAMDACA

SEQ ID NO: 76290 - protein, 297 aa, Desulfococcus sp.
  REGION 1..297: note = tr|A0A1W9Q6Z8|A0A1W9Q6Z8_9DELT tRNA epoxyqueuosine(34) reductase QueG OS=Desulfococcus sp. 4484_242 OX=1968523 GN=B5M55_02645 PE=4 SV=1
MDLIRKANDLGFIAVGFSRPGRPSFFDHLRVWISEGKHAGMAWIERHLNLRENPAMLLEGCRTVISLAYPYSSCKPYTPEGLCAARYSEPQKQDYHHRLRKRTKILAKALQEHFPGTRSRICVDSAPIMERSLAWQSGIGFIGKNTQLIIPGHGSYVFLAEILTTAVIHFPEPRPMENRCGSCTRCLDACPTGAIEGPFQLNAGKCLSYRTIEQKEAVDRKTGKKMGDCFFGCDVCQEVCPFNQKHETGEIILPSANDILNMDEKSFRETYGKSAFARAGLAKIQSNIQAMDNERQV

SEQ ID NO: 76291 - protein, 249 aa, unidentified
  source 1..249: note = Desulfofundulus thermosubterraneus
  REGION 1..249: note = tr|A0A1M6HWT3|A0A1M6HWT3_9FIRM Epoxyqueuosine reductase QueG (Queuosine biosynthesis) OS=Desulfofundulus thermosubterraneus DSM 16057 OX=1121432; GN = SAMN02745219_0214 0 PE=4 SV=1
MAMERALKHAFTSFEIRKYLLELGATLVGFGDVSEGLAGELRHLPVAISLAIRHPSPGRNLIHTTRGPIYSNRYQQIDLKLEQLQKRLVSLLKSHGFKCLAIPPDSHRHDTRFVARLYPLFPHKTAATCAGLGWIGKNGLLVNETYGPRLSWATVLTNAPLEVSATPYVSGRCGKCRRCVETCPAGAIADREWVRDEGLVPHIDVEACRRQLEQNRQQVGEDICGLCILACPRGQANLQEARDLRWVLR

SEQ ID NO: 76292 - protein, 315 aa, Desulfoluna spongiiphila
  REGION 1..315: note = tr|A0A1G5ASB4|A0A1G5ASB4_9DELT Epoxyqueuosine reductase OS=Desulfoluna spongiiphila OX=419481; GN = SAMN05216233_101418 PE=4 SV=1
MKTHQFITTRALLHNEKAKVIPVRRLHCLQDEIHRFQDAEDLNDFQQWIVDELYTFDVPDVGFPVESILLIAVPHPFCAHVEFSHRGRTYKSFSFVMPDFKRTEEALRKALSGLNHHLAEAGDIPLKRLAVQSGLAAYGRNNICYIDGMGSNFSLMAYFTDMPCEEDPWTDVTMSSSCTDCNACLNNCPTRAIRKERFLIDNEKCLSFLNESGAPFPEWLPETVHHCVYDCMKCQIVCPMNRKQVDYVTGPVQFTESETDHLLSGTPFEDFPMALQNKATYLGLHQWPEGIPRNLKTLFDISDRKGDPTETPSPR

SEQ ID NO: 76293 - protein, 315 aa, Desulfoluna spongiiphila
  REGION 1..315: note = tr|A0A5E7XDX3|A0A5E7XDX3_9DELT 4fe-4s double cluster binding domain OS=Desulfoluna spongiiphila OX=419481 PE=4; SV = 1
MKTHQFITTRALLHNEKAKVIPVRRLHCLQDEIHRFKDAEDLNDFQQWIVDELYTFDVPDVGFPVESILLIAVPHPFCAHVEFSHRGRTYKSFSFVMPDFKHTEEALRKALSGLNHHLAEAGDIPLKRLAVQSGLAAYGRNNICYIDGMGSNFSLMAYFTDMPCEEDPWTDVTMASSCTDCNACLNNCPTKAIRKERFLIDNEKCLSFLNESGAPFPEWLPETVHHCVYDCMKCQIVCPMNRKQVDYVTGPVQFTESETDHLLSGTPFEDFPMALQNKATYLGLHQWPEGIPRNLKTLFDISDRKGDPTETPSPR

SEQ ID NO: 76294 - protein, 395 aa, Desulfopila aestuarii
  REGION 1..395: note = tr|A0A1M7YE19|A0A1M7YE19_9DELT Epoxyqueuosine reductase QueG (Queuosine biosynthesis) OS=Desulfopila aestuarii DSM 18488 OX=1121416 GN=SAMN02745220_03656 PE=4; SV = 1
MESAETRLKSLAKSLGADLVGVTTRDLLANGPPSADPRYLLPSANSVISFALSLDRDLVQNFISKKDWRSHCDNRKNIAQTLYAIGDNLAEQLRTEGYEAVNVDLNNNYRPEKAAADVTEMTDFHPDFSHRYAAIAAGVGRLGWSGNLLTKKYGALVELGSVLTSAILTPDSPVPDEENPCDRCKMCSLVCPVEMIHPRESFQVAIAGVTETISRKRPNTCCWIGCTGYEGLAASGTWSNWSPYRLGRKLPEDKKELDALCTSLQKLDPQMQADDNSWSDYRQAVFDPDWFYYTVCGFCRSVCSPCREERLANRKLIVNSGTAVLRLDGSHDVTDEETIEMRTPFGVNVVVPRAELSEKQSKKRKWPGQFPLDREVIEYLRQYVNSADTKGRTTE

SEQ ID NO: 76295 - protein, 362 aa, unidentified
  source 1..362: note = Desulfosporosinus acididurans
  REGION 1..362: note = tr|A0A0J1FUH3|A0A0J1FUH3_9FIRM Epoxyqueuosine reductase OS=Desulfosporosinus acididurans OX=476652; GN = queG PE=4 SV=1
MSLEEWQDWKKKLRKWALDLGFIAVGFTTAQPIKGLNGLLQDRLEQGVSTPFESQIIQQRVDPKAVWQDCRGVVALGYELPLTVAPEKGEGILARSAIGEDYHRVINQKLKELAEIMAENHWPGAIRWQVDTGPLVERAFAVRAGLGWIGRNQQLIIPGYGSFVGLALLLLNHELPSDEMILDKCGSCRKCIQACPAQILGKEIFAAKRCYSYLTQSKEVLTPGERIGLGNRIFGCDTCQEACPHNQQRLQEETRMVSAAGKKRGVDLVDTLNLTKGEFRERFLHTAAGWRGKGILQRNAFLALRNLQDPRLKSWLVDKERALPPILTPYLEEVMEDDVQRENLRSTNRPIRCNASSSCSRE

SEQ ID NO: 76296 - protein, 350 aa, Desulfosporosinus acidiphilus
  REGION 1..350: note = tr|I4D4L9|I4D4L9_DESAJ Uncharacterized Fe-S protein; OS = Desulfosporosinus acidiphilus (strain DSM 22704 / JCM 16185 / SJ4) OX=646529 GN=Desaci_1755 PE=4 SV=1
MSVNEWQDWKRKLREWAFDLGFAAVGFTTAEPVEGLDSLLEVRLDQGVSTPFESREIRERVDPRVVWPDCQGVVALAYPHPSTAVPNQGEGILARSAIGEDYHRVIQKKLHELSERMTGSHWPGALRWQVDTGPLVERAFAVRAGIGWIGRNQQLIIPGYGSFAGLALLLLDHELPSDELVQNHCGSCRKCIEACPAQILGKDIFAAKNCYSYITQSKEVLTPAERIGLGNRIFGCDTCQEVCPHNQKRVREELRELSIPGKKRGADLLGILNLTKGEFRERFLHTAAGWRGKGVLQRNAFLALRNMQDPRLNSWLAQREKSLPPILTPYLEEAVGEQEHKGSVKGTIIT

SEQ ID NO: 76297 - protein, 335 aa, unidentified
  source 1..335: note = Desulfosporosinus fructosivorans
  REGION 1..335: note = tr|A0A4Z0R6Y9|A0A4Z0R6Y9_9FIRM tRNA epoxyqueuosine(34) reductase QueG OS=Desulfosporosinus fructosivorans OX=2018669 GN=queG PE=4 SV=1
MNFLDQMQWKTKIKRWGQELGFVSIGFTTAEPINSLVPLLEARIDQGVSTPFESKEIKSRIDPKEGWHCCQTVVALAYPFPYASIPQEGKGVIARSAVGEDYHHFMEQKINHLVEIMANNDWPGTIRLQVDTGPLIERAFALRAGIGWIGRNQNLIIPGYGSFVALALLLLDQAIEPDHPSMLDQCGTCLRCVQACPAQILGKDPFAAKHCVSYLTQSKEVLTPEECERLGLRVFGCDTCQEVCPHNQTRIEEELAFSSDAKLQRGVDLMVTLNLTKGEFQRHFKATAAGWRGKGVLQRNAFLALRNLQDGRSREWLNERENDQTVPPIITPYRR

SEQ ID NO: 76298 - protein, 375 aa, Desulfosporosinus hippei
  REGION 1..375: note = tr|A0A1G8LV68|A0A1G8LV68_9FIRM Epoxyqueuosine reductase OS=Desulfosporosinus hippei DSM 8344 OX=1121419; GN = SAMN05443529_1558 PE=4 SV=1
MSLTTQIKEFALDIGYSKVGIIPAESFPEYIADLTNRQEMYSFYIKGAYRPLLGAEPRSLMPKAKSIITTVYDYSQKKFPKELTDKIGRVYQARCYNAPPERINGARPQLMKNFLRQLGCEVGEKISLPERLVAAKAGIVNYGRNNFAYAEGIGSFIYLTSFVVDKELDYDSPSFVVGCPEGCSACMKACPTQAIYEPLKLNPRRCIAFNTFITQDRMVGSYIEPEIRDKMGTKIHGCDICQEVCPRNQARLKEKLLEDEFLVKVAQDFSLAKILNMTDNLYLSRIQPLMYNYIKEKKYFQRNAAIALGNLGDPAFIPDLSVAMHDPEELVRGYVAWALGKIGGQLAKGILMEGNGRETSEFAKREIREALSRIE

SEQ ID NO: 76299 - protein, 347 aa, Desulfosporosinus hippei
  REGION 1..347: note = tr|A0A1G8JD27|A0A1G8JD27_9FIRM Epoxyqueuosine reductase OS=Desulfosporosinus hippei DSM 8344 OX=1121419; GN = SAMN05443529_13233 PE=4 SV=1
MDLHEQLHWKKMIVEWARKLGFVSVGFTTAEPIEDLAAILQARVDQDWATPFESKEIQQRVAPKAVWPDCQTVVALAYPLPFTVSPQEGEGVISRSAVGEDYHRVVLRKVQELIDTMVNNNWLGLCRFQVDTGPLVERAFATRAGIGWIGRNQQLIIPGVGSFVTLALLLLDQELRPDDPLVLQLCGNCQKCATSCPAQIIGREPFPANKCVSYLTQSKELLTSEEISSLGLQIFGCDVCQEVCPHNQKWLEEEQTSLTAADSSSAARPALRRGVDLVETLNLTKGEFGQRFKITAAGWRGKGVLQRNAYLALRKVEETSAKQWINVHTIARAIPPRILPYVEREQE

SEQ ID NO: 76300 - protein, 384 aa, Desulfosporosinus lacus
  REGION 1..384: note = tr|A0A1M5XLU7|A0A1M5XLU7_9FIRM Epoxyqueuosine reductase OS=Desulfosporosinus lacus DSM 15449 OX=1121420; GN = SAMN02746098_02090 PE=4 SV=1
MSLTTQIKEFALDIGYSKVGIIPAESFPEYIADLTDRHEMYSFYIKGPSRPLVAAEPRSLMPTAKSIITTVYDYAQKSFPKELTDKIGRVYQARCYNAPDERINGARPQLMREFLRKLGCEVGDKINLPERLVAAKAGIVNYGRNNFAYAEGIGSFIYLTSFVVDIELDYDSPTVEVGCPEGCSACMKACPTQAIYEPLKLNPRRCIAFNTFITQDRMVGSHIEPEIREKMGTKVHGCDICQEVCPRNQTRLKEKLLDDEFLVKVAQDFSLSQMLNMTDEFYSTRIQPLMYNYIKERKYFQRNAAIALGNLGDPAFVPNLAVAMNDPEDLVRGYAAWALGKIGSRSAKQILKDNLSKETTESVIEEIRNALFRSEIRGELIDFS

SEQ ID NO: 76301 - protein, 254 aa, Desulfosporosinus lacus
  REGION 1..254: note = tr|A0A1M5Z778|A0A1M5Z778_9FIRM Epoxyqueuosine reductase QueG (Queuosine biosynthesis); OS = Desulfosporosinus lacus DSM 15449 OX=1121420; GN = SAMN02746098_03051 PE=4 SV=1
MGVKCLCDQGLEKMKGSDTVTINALMIKRKAIELGADLVGIADLTRVEGLPTVPQGLLETYTHAVVIAVAISPDIFEQIVNEPTPLYLHHYLAANILLDDINLRLQREIIGNGFRALAIPASQVVDKVNWMGHISHKAMAKAAGLGWQGKSLLLVTPGYGPRVRLATLLTDAPFEPDPILTNRCGKCKNCQEACPASAIKGGSWEDHPQTREEALHFSRCVEKVNEDFAKRPEIGKPICGVCIKVCPWGKPKGK

SEQ ID NO: 76302 - protein, 375 aa, Desulfosporosinus meridiei
  REGION 1..375: note = tr|J7IQL3|J7IQL3_DESMD Putative Fe-S protein; OS = Desulfosporosinus meridiei (strain ATCC BAA-275 / DSM 13257 / NCIMB 13706 / S10) OX=768704 GN=Desmer_0414 PE=4; SV = 1
MSLTTQIKEFALDIGYSKVGIIPAESFPEYIADLTNRQEMYSFYIKGAYRPLLGAEPRSLMPKAKSIITTVYDYSQKNFPKELTEKVGRVYQARCYNAPPERINGARPQLMKNFLRQLGCEVGEKISLPERLVAAKAGIVNYGRNNFAYAEGIGSFIYLTSFVVDKELDYDSPSFVVGCPEGCSACMKACPTQAIYEPLKLNPRRCIAFNTFITQDRMAGSYIEPEIRDKMGTKIHGCDICQEVCPRNQARLKEKLLEDEFLVKVAQDFSLAKILNMTDNLYLSRIQPLMYNYIKEKKYFQRNAAIALGNLGDPAFIPDLSVAMHDPEELVRGYAAWALGKIGGQLAKGILTEGNRRETSEFAKREIRDALLRIE

SEQ ID NO: 76303 - protein, 347 aa, Desulfosporosinus meridiei
  REGION 1..347: note = tr|J7J0D2|J7J0D2_DESMD Uncharacterized Fe-S protein; OS = Desulfosporosinus meridiei (strain ATCC BAA-275 / DSM 13257 / NCIMB 13706 / S10) OX=768704 GN=Desmer_2873; PE = 4SV=1
MDLDEQIHWKKMIGGWARELGFVAVGFTAAEPIEDLATILQARIDQGWATPFESKEIQQRIDPQAVWPDCQTVVALAYPLPFTVSPQEGEGLISRSAVGEDYHRVVLRKVQELIDTMVNNNWLGLCRFQVDTGPLVERAFATRAGIGWIGRNQQLIIPGVGSFVTLALLLLDQELRSDDPFVFQQCGNCQKCVISCPAQIIGREPFPANKCVSYLTQSKELLTSEEISSLGLQIFGCDVCQEVCPHNQKWLEEEQTSLTVADSSSAARPSFRRGVDLVETLNLTKSEFGQRFKITAAGWRGKGVLQRNAYLALSKVKETSAKQWINVQTIANAIPPRILPYVEREQE

SEQ ID NO: 76304 - protein, 346 aa, Desulfosporosinus orientis
  REGION 1..346: note = tr|G7WIP1|G7WIP1_DESOD Uncharacterized Fe-S protein; OS = Desulfosporosinus orientis (strain ATCC 19365 / DSM 765 / NCIMB 8382 / VKM B-1628) OX=768706 GN=Desor_3637 PE= 4; SV = 1
METLEDVMDLHEQIKWKEDIKRWAREGGFAASGFTTADPVESLRSVLKTRIDQGIGTPFESQDIKERIDPRALWQECSTVIALAYPFPLSLPPEKGEGILARSAAGDDYHHVVTRKIRQLMDLMIQHDWPGSLRFQVDTGPLIERAFAVRAGIGWIGRNQHLIIPGYGSFVALALLLLDQEIPGDEPLSPGQCGACQRCIRACPARILGREPFNSKRCVSYLTQSKEVLTLEERQRLGLRIFGCDTCQEVCPHNQQWLQEERKSPLRRGVNLKEILNLSKGEFLKEFKHTAAGWRGKGVLQRNAYIALQNAQDSESVQILFDYQKNKTIPPSILPYVTWQEHDQEL

SEQ ID NO: 76305 - protein, 342 aa, Desulfosporosinus orientis
  REGION 1..342: note = tr|G7WAZ8|G7WAZ8_DESOD Putative Fe-S protein; OS = Desulfosporosinus orientis (strain ATCC 19365 / DSM 765 / NCIMB 8382 / VKM B-1628) OX=768706 GN=Desor_1868 PE=4; SV = 1
MEGMGIAQVIRDKAYDLGYAGCGIISLERLHGYAEKLEERVRKVPESAGFYATQRRLIDPRKQFPWAKSVVVVAERYGTYKIPRELKGRIGRPYLFDGRVDAHSKEFKAGLQMESLMHSLGLKFASERKFGLVGLRWAALQAGIGRIRRNNFFYTKYGSWVTLYAWLTDQDMECTEAADLPECPTSCDRCIKACPTGSLSAPYTMSPMACVSFLTTFGGRNLPEEPLRSKFGNCIYGCDICQEVCPMNKGKWEESEEFPGLSQLAPFLTPEKIMEMDDEFYKDFVQPKFFYLKPDELWKWKVDTLCFMHNQYQEAYEPYILEACHSPHEKIREMAKSICQER

SEQ ID NO: 76306 - protein, 339 aa, Desulfosporosinus sp.
  REGION 1..339: note = tr|A0A356PEL6|A0A356PEL6_9FIRM tRNA epoxyqueuosine(34) reductase QueG OS=Desulfosporosinus sp.; OX = 157907 GN=queG PE=4 SV=1
MDSAEQMWWKTNIKKWCKELRFISIGFTTAQPIECLASQLQARMDQGLATPFESRDVKRRIDPKAGWHGCETVVALAYPLPYSSFPQEGEGVMARSAVGEDYHHFMNLQIDRLVEIMASNDWPGTSRRQVDTGPLVERAFALRAGIGWIGRNQHLIIPGYGSFVALALLLLDRELEPDHPHIPNQCGTCQRCVQACPAQILGKDMFASKHCVSYLTQSKEVLTPEERQRLGLRLFGCDTCQEACPHNEQRLEQEQTNLSPTSLGRGVDLLETLNLTKGEFQRRFKATAAGWRGKGVLQRNAFLALRNLHDERCEIWLAEREKDQSVPPIITPYIENLVR

SEQ ID NO: 76307 - protein, 343 aa, Desulfosporosinus sp.
  REGION 1..343: note = tr|A0A4Z0QQ20|A0A4Z0QQ20_9FIRM tRNA epoxyqueuosine(34) reductase QueG OS=Desulfosporosinus sp. Sb-LF OX=2560027 GN=queG PE=4 SV=1
MKPNEQISWKTNIKRWGSELGFASVGFTTAESIEDLAPLLETRFEKEVATPFEIKEIRQRIDPRVVWEYCKTVVAVAYPLPLTTPPLEGEGIIARSAVGEDYHQVLQNKIKQLINIMVVNGWTGSFHSQVDTGPLIERAFAFRAGIGWIGQNQQLIIPGYGSFVTLALLLLDREIKPDYPMINQCGSCQRCVEACPAQIIGKEPFAAKHCISYLTQSKEVLTQKERRGLGLRVFGCDTCQEVCPHNQKRLAEEQQATSSSAPSSLRRGVDLRETLNLTKGEFHQRFKGTAAGWRGKGILQRNAFLALRNGLDRGDKVWLAEHEKNKIVPPIIALYLEGLENSK

SEQ ID NO: 76308 - protein, 376 aa, Desulfosporosinus youngiae
  REGION 1..376: note = tr|H5XVX3|H5XVX3_9FIRM Uncharacterized Fe-S protein; OS = Desulfosporosinus youngiae DSM 17734 OX=768710; GN = DesyoDRAFT_3403 PE=4 SV=1
MLYYLGKNQTSVERRFSKSGNLKMDIVEQTQWKMNIKRWARELGFVSVGFTAAEPIDSLASLLQTRIDQGLMTPFESKVIEQRIDPQAVWQDCRTVAALAFPLPLTVPPQEGEGVMARSAVGEDYHRVIVRKINQLIDRMVNHGWPGFPRFQVDTGPLVERAFALRAGIGWIGRNQHLIIPGYGSFAALALLLLDQEIRQDDPLIPGQCGTCQKCVQACPARIIGQEPFAAKKCVSYLTQSKEVLTSEERHRLGLRIFGCDTCQEVCPHNQKRLEEEALAEDPGLCPPAASTAPAPFCRGVNLYEILNLSKGEFIKRYKATAAGWRGKGVLQRNAFLALRNAQDARSEQWLAEREKDKSVPPVILPYIQDGSGRCE

SEQ ID NO: 76309 - protein, 374 aa, Desulfotignum phosphitoxidans
  REGION 1..374: note = tr|S0G866|S0G866_9DELT 4Fe-4S ferredoxin, iron-sulpur binding domain-containing, electron transport protein OS=Desulfotignum phosphitoxidans DSM 13687; OX = 1286635 GN= Dpo_1c06570 PE=4 SV=1
MTGLTKEDIIAKACELGFEDVGFTTADPFDTHLDFLKDRQDEYGWAEATGLKLMEGTDPKTVMARAQTIIVLMEVYFKKRFPRQMEGHFGRCYLDDDRVTKDGLSRRIKAFRSFLLDSGIDSKVPYHLPHRVAAARAGMGTFGKNCLFYSNKVARQGSWVLPIAVVVDRAFDPDMPSVEMGCPDWCRNACITACPTQALKGNGTIDPRKCISFLTYFGQGLTPRELREPMGIYVYGCDRCQNVCPRNAPWLAADLPVNERVAAREKDFRLSSLLNMDESCFTSRIWPHMFYMGPDRLWLWQMNVARAMGNTRDTGYTKDLIRCFKENRDDRVRAMCAWALGRIGGQPSRAALEGFLPGGTAILEEEIRYALGLV

SEQ ID NO: 76310 - protein, 226 aa, unidentified
  source 1..226: note = [Desulfotomaculum] guttoideum
  REGION 1..226: note = tr|A0A1I0J667|A0A1I0J667_9FIRM Epoxyqueuosine reductase QueG (Queuosine biosynthesis); OS = [Desulfotomaculum] guttoideum OX=58134; GN = SAMN05443270_2765 PE=4 SV=1
MKTEINSSIVKKYGMDAGANVVGIAASKDFGLAPNGFKPTDVLTECLSVIVLGTTFSPEVLNDIAEYTTSRNAMLTAMTNMAKEVAKRIKADGGKTKVISAAGGKWVEGDGRKEQFGYISLKHAAEIAGLGVIGKNYLLTNPQYGNLLWLSAVLTDAEIMPDEKAQSTMCDNCNKCVEACPAGALDDLASFGKKGCSKFFTIEDRKFKVKCFLCRTICPYRFGNSE

SEQ ID NO: 76311 - protein, 372 aa, Desulfotomaculum sp.
  REGION 1..372: note = tr|A0A358QXB0|A0A358QXB0_9FIRM Epoxyqueuosine reductase OS=Desulfotomaculum sp. OX=41211 GN=DEF36_13105; PE = 4 SV=1
MLSKSEIIARARDLGFEDVGFTGPEPFDSQREILLSRSEEYAWAHEKGLDLIGGTDPKNIYPSCQSIIVLVEAYFRQAFPPSMEGKFGRCYLDDDRVTRDGLSRRIKDFRTFLKEDGIDSKAPFNLPHRLAAARAGLGTFGRNCLIYSSRAARRSSFILPVAVLVSRSFEPDQPTMAGGCPAWCKNTCLVACPTGALKGSRKIDPRRCISYLTYYGEGITPLEMREPMGMWIYGCDRCQNVCPRNAAWMAQDLPVNPRAAVKSADFDLKRLLHMDKEYFEKKIWPHMFYMSSSDIWRWKMNVSRVMGNSLDPAYIPDLIKAFNESTDDRVRGMAAWALGRIGGEDAKKALADFLTISQGQVREEVREALRQI

SEQ ID NO: 76312 - protein, 269 aa, Desulfotomaculum sp.
  REGION 1..269: note = tr|A0A373D4K3|A0A373D4K3_9FIRM Epoxyqueuosine reductase OS=Desulfotomaculum sp. OF05-3 OX=2305243; GN = DXA87_12835 PE=4 SV=1
MKGRVAKYYLTDGRRHTDSEGYKTSVAFEKYLADCGLQVATDRDFGITALRWAGMKAGIGIIRKNNFFYTEKGSYQYLEAFLIDEPLQYIVENQIRPCAEKCNLCMRSCPTESLEAPYMMCRNTCVSCLTTWDGWDLRTEPLQNKFEKWIYGCDACQDAWPHNRKAWKDTEEFPELEAWSSHFTDTEIVLAEYSWLRSVVQPKLWYIPQGKEWRYKTNALNAMLNNYDPKYLPVIKKVCQDEYCEVRDMAEWVLEEIERKDIGESENGQ

SEQ ID NO: 76313 - protein, 378 aa, Desulfovibrio carbinoliphilus
  REGION 1..378: note = tr|G7QCM5|G7QCM5_9DELT PBS lyase HEAT domain protein repeat-containing protein OS=Desulfovibrio carbinoliphilus subsp. oakridgensis OX=694327 GN=DFW101_0164 PE=4 SV= 1
MSLTENIKEYALDIGYAAVGFTAADAFADYRAELSARNDQYDFLMKRPAGPFAGAEPRTLMPGARSIVVVAYDFGCTAFPESLVGVIGRIYQARCYTPPPNRLHGARRELLASFLRQNGCAVGQGFMVPLRPAATRAGVATVGRNTFAYAARAGSFICLEAFVVDAELACDAPTERVNCPPNCRACIDACPTGALYEPLHMNPRRCITFNTCFARDGLGPGVSDSIPHDIREAMSTRVHGCDACQEACPRNRARLEAKLPEDPFLERHAREFSLNRMVNMDEAYFETTAQLLLYNYIREKKYHQRNAAIALGNLGDRAAVPDLRQALGDPEAVVREHAAWALGKIGGTEAKRALEGARGTEPVALVAAAIEEALARSA

SEQ ID NO: 76314 - protein, 378 aa, Desulfovibrio sp.
  REGION 1..378: note = tr|A0A1Q8QAV1|A0A1Q8QAV1_9DELT Epoxyqueuosine (OQ) reductase QueG OS=Desulfovibrio sp. DV OX=1844708; GN = DVDV_4210 PE=4 SV=1
MPLTDDIKNYALDIGYTAVGITTADPFDAYAADLTARGEAYAFYRNSPRRPLDGAAPRSLMPTARSILILAYDYARLAFPAALCGVIGRIYQARAYSPPPQRIHGARRQLLEAYLIERGLTIGQNITVPFRMAAARAGITTYGNNTFAYARGGSSFLSLDAMVVDAELAPDAPSLAVRCRKGCTACQDACPTGAILGPLRLDPRRCITFQNCFARDGFAPGVTGTIPLEFRQAMGQRVHGCDACQEACPRNRPRLTAALPSDPFLERFAAGFRLTDLLAMDEAYFATTAQQLMYNYIRERKYFQRNAAIALGNRGDDAAIPALGTALGDPEGLVRGHAAWALGRLGGGAARRALEAARTGEADPMVRTEIDRALAGAA

SEQ ID NO: 76315 - protein, 378 aa, Desulfovibrio sp.
  REGION 1..378: note = tr|I2Q2X7|I2Q2X7_9DELT Putative Fe-S protein; OS = Desulfovibrio sp. U5L OX=596152 GN=DesU5LDRAFT_2477; PE = 4 SV=1
MSLTENIKEYALDIGYAAVGITSADAFAGYRAELSARSDQYDFLKKRPAGPFAGAEPRTLMPGARSVVVLAYDYGRTAFPESLVGVIGRIYQARCYTPPPNRLHGARRELLASFLRQNGCAVGQGFMVPLRPAATRAGVATVGRNTFAYAARAGSFICLEAFVVDAELACDAPTERVKCPPNCRACIDACPTGALYEPLHMNPRRCITFNTCFAKDGFGPGVSDSIPKDIREVMGTRVHGCDACQEACPRNKARLAGKLPEDPFLERHAREFSLKRMVTMDEEYFETTAQLLMFNYIREKKYHQRNAAVALGNLGDRAAVPDLRQALGDPEAVVREHAAWALGKIGGREARRALEGARGTEPVALVSAAIEEALARSA

SEQ ID NO: 76316 - protein, 405 aa, unidentified
  source 1..405: note = Desulfuribacillus alkaliarsenatis
  REGION 1..405: note = tr|A0A1E5G4I6|A0A1E5G4I6_9BACL Reductive dehalogenase OS=Desulfuribacillus alkaliarsenatis; OX = 766136 GN=BHF68_13140 PE=4 SV=1
MNNNQNTAAKIHEVGEEYQRFNQKNHVIMQTLWNEELKDIDAERNKILKEHVQSGKQGYNRFDYAFHHGAMNFIDKIGFGINVPDQSANSWDNFVCSIPYEGAFEDPVETTKVVKKAAMMYGADAVGITKLDRRWVYSEWYDPEKKESFPIRFSDENSAYHQITKPVLMADGTRVLPKAMDTVIVLMFEMNYDRLRYAPTLLAYGETSKVYTDMCKVSMNVAGFINALGFNALPSINCTALNVPLAIDAGLGQIGRHGKVISPTLGSRTRVAKIITDMPLLPDEPIDFGVTEFCDTCKKCARECPSNAISNGKRAKEAVDETGNSHYLRWIIDHKRCYKYWAECGTNCNICLYVCPYNRGYRWTRNVLDLTDDRNTNSNNMIDSLEDIYSLDGLSARSHKYWKKE

SEQ ID NO: 76317 - protein, 345 aa, unidentified
  source 1..345: note = Desulfuribacillus alkaliarsenatis
  REGION 1..345: note = tr|A0A1E5G0M6|A0A1E5G0M6_9BACL tRNA epoxyqueuosine(34) reductase QueG OS=Desulfuribacillus alkaliarsenatis OX=766136 GN=BHF68_07345 PE=4 SV=1
MKTNERITEFSREIGIDAIGFTKAERQSDLLNTLVEHSSQGFQSGWEETDIEKRVNPKLSLKDAKTIIVIALNYHNIESKMYETKRSDNRGRISKAAWGIDYHQVLNKKLEQLSQYIIKNIDADAKSLAFVDTGPMVDRELAVRAGIGFYGMNCNIIHPELGSFIFIGSLLTTVDIEPSNPTDTKCFACNKCIEHCPTGAIIKPYKINSKKCLAYLTLTKGEHGHGYQTALNDHIYGCDICQDVCPHNKDIPLTKHQEFVEQDEVKYPNLIELLTISNKDFKAKYGHSSGAWRGKKPWQRNAMLLIGKRKLHEAIPALKHVITRDPREDMRLLAEDTLKNIKNIK

SEQ ID NO: 76318 - protein, 350 aa, unidentified
  source 1..350: note = Desulfuribacillus stibiiarsenatis
  REGION 1..350: note = tr|A0A1E5L9E7|A0A1E5L9E7_9BACL tRNA epoxyqueuosine(34) reductase QueG OS=Desulfuribacillus stibiiarsenatis OX=1390249 GN=BHU72_10205 PE=4 SV=1
MGSDSRRKIVDFSREIEIDAIGFASVAEFAHIRDYLAEHRSLNHHTGWEEADIEKRIHPSTHLPHAKTIIVIAISYHAPETNEQWTNQEKLTRGRLAKIAWGQDYHKVVLNKLHQLESFIHSSIDGTASNLAFVDTGPLVDREVAIRAGIGFYGYNCNIIHPHLGSYIVIGSLLTTLQLPTDTQLQAECMTCNKCVNACPTGALYEPYRLNSQRCLAYLTLTKGEMGDDYQENLDNHIYGCDICQSVCPHNKRAPHHNHQEFNELDEIKYPDLIELLHISNQTFRHKYGHSSGAWRGKKPWQRNALLLIGKRKITAAIPALQEMIEKDPRTDMRELARNILNQFSMKSVD

SEQ ID NO: 76319 - protein, 383 aa, Desulfuromonas sp.
  REGION 1..383: note = tr|A0A2N6F3I5|A0A2N6F3I5_9DELT 4Fe-4S ferredoxin-type domain-containing protein; OS = Desulfuromonas sp. OX=892 GN=C0622_12300 PE=4 SV=1
MSVCGASSFKKGERIKGKGARLKTQRCYFYLYPLAFFLLPFMVMNPDNFSGWLAETAKHIGAHSAACLRLDNPLMRDQCAEQQQRTSAWLDAGLHGAMDYLARLQPDRYSPWTRFSFARSVIILTFANRWSDPAATHPFPAPPADALLGYVSSYVRTADYHTTGRGMLDELARRLGHDIHCAATVDTGPVDERLLAIAGGLGIQGGNNLLRLPDLGTRVFIGCLFVELELPEVIAETQFPFACDDCRACARNCPTGALTYGEQFDARQCISYLTIEKPGLLTHAEGESIGAWLFGCDNCTAVCPPAVADLRIPVDLEWLLTASSGDIARIIKGTAMAYAGVTRLRRNAVAILKNQNSPRALALLDRVARTTGSELIREQIAAW

SEQ ID NO: 76320 - protein, 329 aa, Desulfuromonas sp.
  REGION 1..329: note = tr|A0A0Q1AGZ2|A0A0Q1AGZ2_9DELT 4Fe-4S ferredoxin-type domain-containing protein; OS = Desulfuromonas sp. SDB OX=1735325 GN=APR63_13080 PE=4; SV = 1
MNSSESLLIQLARRFHLDKIGFTSDLIIDKPIPPDDDQNFSWVVDRRFHNPRLSVPWAKSMVVGIISYYQDIKNTYNPLHGNVAMYTRGDYYHLLRKKLTYIAREFKKSTGCRISKTYVNGPFNEKEYARRAGLGYIASNSLLISDQLGSFTVIGLFLTDARLENSEIIDKSCRLCGQCELHCPTGALNSGVIDRNKCIQELSQRDLIIPDEIKLHWGNRFYGCDQCQLCCPLNQNLTPQNHKPLRGVVGEKVDVYELIKLDPLQIKQKFKGNQMGAGWVSPFALIRNAVLVLSHQKVKLTGSDLDKLKGYFNPGINDALTWNQLETSG

SEQ ID NO: 76321 - protein, 342 aa, Desulfuromusa kysingii
  REGION 1..342: note = tr|A0A1H4C497|A0A1H4C497_9DELT Epoxyqueuosine reductase OS=Desulfuromusa kysingii OX=37625; GN = SAMN05660420_02421 PE=4 SV=1
MNPNNFREWLTQAGREIGAHSVACLRMDNPRLRRTIADNNIQVSAWLQNEMHGEMEYLERMFPEKSNPWNTYPFAKSVIVLSFNNLWGDPAAKHPFPEPAKDALLGYISAYAREDDYHFIGQAMLSKLTSMLGENIRAAATVDTAAVYERLFATVAGLGVVGGNSLLRVSGSGNTRVFIGCLFVDIELPEVIHEAQMPFACATCHACVKNCPTGAIQVDQPIDARKCISYLTIEKRGPLSQAEGRSIGRWLFGCDGCTLACPPRPKTDMRIPIDLEWLLQSSAAEIRRTIKGNATAYAGVTQLRRNAVVILKNMETRRAQEVLRWTRENSGSELIRQQIDLW

SEQ ID NO: 76322 - protein, 187 aa, Dethiobacter alkaliphilus
  REGION 1..187: note = tr|C0GIB4|C0GIB4_9FIRM 4Fe-4S ferredoxin iron-sulfur binding domain protein OS=Dethiobacter alkaliphilus AHT 1; OX = 555088 GN=DealDRAFT_2223 PE=4 SV=1
MQLQLAHYIRQTALRKGAVLVGFTKIRKVEPVILLAFPFSDTWFLRQPAKITKQLASTLKVSRHVQGVIAGILRSQGYLAQHKSILSLYGDFRPLAVAAGLGEWGRNGIITNRKHGSALLFAATFTNAPLPSAKSPAMASRHCSHCGECIRACPADAFTPFGFSATRCLAYSLKGCAQCLLVCSGKM

SEQ ID NO: 76323 - protein, 290 aa, Dethiosulfatibacter aminovorans
  REGION 1..290: note = tr|A0A1M6ELB7|A0A1M6ELB7_9FIRM Epoxyqueuosine reductase QueG (Queuosine biosynthesis); OS = Dethiosulfatibacter aminovorans DSM 17477 OX=1121476; GN = SAMN02745751_01235 P E=4 SV=1
MTIKDIENIFEKTSPYMYRILRTADILKWQEENSENEHIGVLDFSELEGFEGVLIAALEYNPQEPELPEGCMSISPYYYFSNRYYMKLSNDLRPAEDRGEIRILRNSPLKVLANISGLGYYGKNSIIHNGEFGSSMFLYGVGINVEENESIEWNGINNVFSDCGSCRRCIEACPTGALDESGLLNRGKCIRNYMLEGTQVPEEIGKKMGKRLLGCDVCRNVCPKNNRLSARERMPDYDREIFLIRNYLDNREKGLKRFINPLSEWIGRNYARTKRVLYQCEIIDGNDKDV

SEQ ID NO: 76324 - protein, 354 aa, Dethiosulfatibacter aminovorans
  REGION 1..354: note = tr|A0A1M6FBX4|A0A1M6FBX4_9FIRM Epoxyqueuosine reductase QueG (Queuosine biosynthesis); OS = Dethiosulfatibacter aminovorans DSM 17477 OX=1121476; GN = SAMN02745751_01428 P E=4 SV=1
MGRIDERDIMFARMNYEQGTAHYENYYTRNEDKKETDDDLRDKIVKNSKKTAYYNEIYSPLVDSNFRFLSDMRHLAEGPVSENRIELDRGSFSTTLKELALEFGASSCGIVRMKDYHFYTNRGRHAENYGEEIDVEKHKYGIVFTIEMDKDNVNRAPKIPSAVESTLGYAKGAMIGMMLSYYIRELGYFARNHMDGNYLVVAPAVAEDAVLGEVGRIGLLITRELGPRVRLGVVTTDLELVEDEKVDYGIRQFCRICGKCAVTCPGKAIPKDDWKPYHGIDMWKSNQESCFGIWTSLGTDCGVCMSTCPLSQDMDMEDRIKIGATHESRVEVLKKYNEKYGIRYFIKENPKWIK

SEQ ID NO: 76325 - protein, 377 aa, Devosia chinhatensis
  REGION 1..377: note = tr|A0A0F5FIC1|A0A0F5FIC1_9RHIZ Epoxyqueuosine reductase OS=Devosia chinhatensis OX=429727 GN=queG PE=3; SV = 1
MSVPLLDPQKLIAELRSRAQALGFDAFGIARADARPDLPDKLAHALAEGWHADMDWMAETETRRADPRRLWDEARSVILLGVNYGPDTDPMTLLSQPDIGIISAYARNRDYHDIIKGRLKEVAGLLAQRAGADVKVFVDTAPLMEKPLAEAAGLGWQGKHSVLVSRDFGSWLFLGAILTSLDLPADKPGTQSCGSCTRCLDICPTNAFPAPFRLDARKCLAYYSVEHKGAIPRQFRRPMGNRVYGCDDCLAVCPWNKFASISREAKLRSRPEFERPALAELVQLDDAGFRALFSGSPVKRIGQARFLRNVLICIGNSGDAGHVPAVLDRLDDASPLVRGAAIWALRRLDPERADGLRQAHLAREGDETVRAEWDGTV

SEQ ID NO: 76326 - protein, 377 aa, unidentified
  source 1..377: note = Devosia elaeis
  REGION 1..377: note = tr|A0A178I2F1|A0A178I2F1_9RHIZ Epoxyqueuosine reductase OS=Devosia elaeis OX=1770058 GN=queG PE=3 SV=1
MENAAPDRTALLAELKARASALGFDAFGVARADSRPDLPEKLAHALAAGWHADMDWMAETEERRGDPRRLWAEARSVILLGINYGPETDPMALLAERDAGIISAYARNRDYHDIIKGRLKELAGLLARRAGAEVKVFVDTAPLMEKPLAEAAGLGWQGKHTVLVSRDFGSWLFLGAILTSADLPPDRPHAESCGTCTRCLDICPTKAFPAPFQLDARKCLAYYSVEHKGQIPQEFRVPMGNRIYGCDDCLAVCPWNKFASASREARLRSRPELERPALADLVQLDDAAFRSLFAGSPVKRIGHARFIRNVLIGIGNSANPDYIPLVRRRLGDPSPLVRGAAIWALRRLDPEGADALRQESLARENEAAVRAEWDGRV

SEQ ID NO: 76327 - protein, 379 aa, unidentified
  source 1..379: note = Devosia enhydra
  REGION 1..379: note = tr|A0A1K2I2U5|A0A1K2I2U5_9RHIZ Epoxyqueuosine reductase OS=Devosia enhydra OX=665118 GN=queG PE=3 SV=1
MQTSISEVPAKGLVSELRARALALGFEAFGIAAADARPDLPEKLAQALAAGWHGGMDWMEETAERRGSPRALWGEARSIIMLGLNYGPDSDPMALLAHKERGVISAYARNRDYHDIIKGRLKEIAGLLARRSGANVKVFVDTAPLMEKPLAEAAGLGWQGKHTVLVSRQFGSWLFLGAILTDAELPADAPHAESCGSCQRCLDICPTKAFPAPFQLDARRCLAYLNIEHKGPIPREFRAPMGNRVYGCDDCLAVCPWNKFARATAEAGLAAREALEAPSLADLLELDDAGFRALFAGSPIKRIGHARFLRNVLIAAGNSGEMGLVDAVAARLTDAAPLIRGAAIWALGRLDPLRLRAAAGLSDDPDAQVRDEWHEEMAA

SEQ ID NO: 76328 - protein, 380 aa, unidentified
  source 1..380: note = Devosia epidermidihirudinis
  REGION 1..380: note = tr|A0A0F5QAA1|A0A0F5QAA1_9RHIZ Epoxyqueuosine reductase OS=Devosia epidermidihirudinis OX=1293439; GN = queG PE=3 SV=1
MTMAAATPSPDKLVAELRARALALGFGSFGITPADARPDLPEKLATAIDAGWHGDMDWMAETAERRGSPNALWPQARSIILLGYNYGPTSDPLAILGEKSLGSISVYARNRDYHEIIKGKLKELAGLLARRSGAEVKVFVDTAPLMEKPLAEAAGLGWQGKHTVLVSREFGSWLFLGAIMTSAELPEDKPHAESCGKCTRCLDICPTKAFPAPFQLDARRCLAYLSVEHKGQIPLEFRTPMGNRIYGCDDCLAVCPWNKFASVSREAKLRAREDLERPTLADLARLDDDGFRTLFAGSPVKRIGHARFLRNVLIGIGNSGDDSLKPLVEAQLEAQDPLVRGVAIWALRRLDPARADSLALAYSARESDSSVKSEWTVDIS

SEQ ID NO: 76329 - protein, 378 aa, Devosia geojensis
  REGION 1..378: note = tr|A0A0F5FDR0|A0A0F5FDR0_9RHIZ Epoxyqueuosine reductase OS=Devosia geojensis OX=443610 GN=queG PE=3 SV=1
MSQSLLAELEARARALGFDAFGVARADARPDLPGKLAAALAAGWHGDMEWMEETAERRASPEGLWREARSVILLGLNYGPKDDPLALLEEKSLGTISVYARNRDYHDVIKGKLKDLAGLLARRSGEEVKVFVDTAPLMEKPLAEAAGLGWQGKHTVLVSRQFGSWLFLGAILTSAELPVSEPHEESCGSCRRCLDICPTDAFPAPFQLDARRCLAYLNIEHKGPIPLEFRAPMGNRIYGCDDCLAICPWNKFASVTREAKLAAREDLERPALADLVRLDDAGFRALFSGSPIKRIGHARFLRNVLIAIGNSGDLDLSPLAEERLADPDPLVRGAAVWAVRRLAPERSRELALAYLPEEGDTSVRQEWTQDLHIVSGFG

SEQ ID NO: 76330 - protein, 383 aa, Devosia insulae
  REGION 1..383: note = tr|A0A1E5XVK5|A0A1E5XVK5_9RHIZ Epoxyqueuosine reductase OS=Devosia insulae DS-56 OX=1116389 GN=queG PE=3; SV = 1
MKAARDQIALLAELRHRAKALGFEAFGVARADARPDLPEKLDTALARDWHGEMAWMAETAERRGAPEALWPEVRSVIVVGMNYGPDSDPMADLEHRSLGNISVYARNRDYHDIIKGKLKELAGLLNRRTGAEVKVFVDTAPVMEKPLGEAAGIGWQGKHTVLVSREFGSWLFLGAIFTSAELPADEPHAESCGNCRRCLDVCPTNAFPAPFQLDARRCLSYLNIEHPGPIPLEFRVPMGNRIYGCDDCLAVCPWNKFASETHEMKLRARDELKSPALSDLVQLDDAGFRSLFAGSPIKRIGHARFLRNVLIAVGNSGDETLIPLAEARLADPEPLIRGAAVWAVRRLVAKARADALALAFLPDEGDISVQAEWSAAVQPARAN

SEQ ID NO: 76331 - protein, 387 aa, Devosia limi
  REGION 1..387: note = tr|A0A0F5L449|A0A0F5L449_9RHIZ Epoxyqueuosine reductase OS=Devosia limi DSM 17137 OX=1121477 GN=queG; PE = 3 SV=1
MDFRLRGNDPVKTVTPSADKLVAELRTRARALGFDSFGIAPASARPDLPAKLQAALDAGWHGDMEWMAETAERRASPTALWDEVRSIILLGYNYGPETDPLAILGERDLGSISVYARNRDYHEIIKGKLKELAGLLSRRSGEGVKVFVDTAPVMEKPLAEAAGLGWQGKHTILVSREFGSWLFLGAIFTSAELPPDQPHAESCGSCTRCLDICPTQAFPAPFQLDSRRCLAYLSVEHKGPIPLEFRVPMGNRIYGCDDCLAVCPWNKFAKVSREAKLRARADLERPTLAQLARLDDEGFRTLFAGSPVKRIGHGRFLRNVLIAIGNSGNVELAGLAEDRLDADDPLVRGAAIWALRRLTPERAQRLSLAYLAKEGDSSVRSEWTADL

SEQ ID NO: 76332 - protein, 375 aa, unidentified
  source 1..375: note = Devosia lucknowensis
  REGION 1..375: note = tr|A0A1Y6GAM8|A0A1Y6GAM8_9RHIZ Epoxyqueuosine reductase OS=Devosia lucknowensis OX=1096929 GN=queG PE=3; SV = 1
MAQTQADPIVSELKARALALGFDAFGITRADARPDLPEKLATALAEGWHADMDWMAETEERRGDPLKLWGEARTAILLGVNYGPADNPMTLLDEPRVGIISAYARNRDYHDIIKGRLKELAGLLARRAGADVKVFVDTAPLMEKPLAEAAGLGWQGKHSVLVSRDFGSWLFLGAILTSADLPVDIPHQESCGSCTRCLDICPTNAFPAPFQLDARKCLAYYSVEHKGQIPRQFRRPMANRIYGCDDCLAVCPWNKFASVSREAKLRSRPELERPSLSDLVRLDDAGFRALFSGSPVKRIGHARFIRNVLIGIGNSGDLTLVPAVLDRLDSADPLIRGSAVWALRRLDPDRAEAMRLDRQARESDRTVQDEWMGEV

SEQ ID NO: 76333 - protein, 401 aa, Devosia psychrophila
  REGION 1..401: note = tr|A0A1I1NZ09|A0A1I1NZ09_9RHIZ Epoxyqueuosine reductase OS=Devosia psychrophila OX=728005 GN=queG PE=3; SV = 1
MRISIFEDVLQLPHILICRVEVPVASSGIANTDKLVAELRTRATALGFDSFGIAPADARPDLPEKLNAALAAGWHGDMAWMEETAERRGSPNGMWPEARSVILLGINYGPESDPLAILGERSLGTISVYARNRDYHEIIKGKLKDMASLLARRSGAEVKVFVDTAPLMEKPLAEAAGLGWQGKHSVLVSREFGSWLFLGAILTSAELPADSPHQESCGTCTRCLDICPTNAFPAPFRLDARRCLAYLTVEHKGPIPLEFRAPMGNRIYGCDDCLAVCPWNKFASISREAKLRARPEFERPQLADLVQLDDDAFRSLFAGSPIKRIGQARFLRNVLIAIGNSRDDTLIPLVEARLGSEDALVRGAAVWALRKLAPERAEHLRLAYAAKESDSSVLLEWTGDI

SEQ ID NO: 76334 - protein, 375 aa, Devosia sp.
  REGION 1..375: note = tr|A0A087LJG5|A0A087LJG5_9RHIZ Epoxyqueuosine reductase OS=Devosia sp. 17-2-E-8 OX=1535287 GN=queG PE=3; SV = 1
MADLVTEIRERALALGFDAFGIAPAEARPDLGDKLAAALAAGWHGDMDWMAETAERRASPKALWPEARSIIMLGINYGPDSDPMAMLARKSTGNISVYARNRDYHDIIKGRLKEVAGLLSRRTGAEVKVFVDTAPVMEKPLAQEAGLGWQGKHTVLVSRQFGSWLFLGAIFTSAELPVSEPMAESCGSCRRCLDICPTNAFPAPFQLDARRCLAYLNIEHKGPIPAEFRKAMGNRIYGCDDCLAVCPWNKFASETREAKLFAREDLREPPLSELLALDDAGFRALFAGSPIKRIGHGRFLRNVLIAAGNSGDAALLPAVEARLGDGDPLVRGAAVWALAQLADGERMRRGAEAHAGGERDTDVKAEWAAVLPEVV

SEQ ID NO: 76335 - protein, 374 aa, Devosia sp.
  REGION 1..374: note = tr|A0A1H8ZCH2|A0A1H8ZCH2_9RHIZ Epoxyqueuosine reductase OS=Devosia sp. YR412 OX=1881030 GN=queG PE=3 SV=1
MTLSPDKLVAELKARSTALGFDSFGIAPADARPDLPDKLNAALAAGWHGDMDWMAETAERRGSPQGMWPEAKSVILLGINYGPESDPLAILGERSLGSISVYARNRDYHEIIKGKLKELAGLLARRSGEAVKVFVDTAPLMEKPLAEAAGLGWQGKHSVLVSRDFGSWLFLGAILTSAELPGDSPHEESCGSCTRCLDVCPTNAFPAPFRLDARRCLAYLTVEHKGPIPLEFRVPMGNRIYGCDDCLAVCPWNKFASISREAKLRARPEFERPQLADLVQLDDEAFRTLFAGSPIKRIGQGRFLRNVLIAIGNSGNSDFIPLVEARLDAEDALVRGAAIWALRKLDPERATQLSLAYLPRESDSSVMLEWTGDI

SEQ ID NO: 76336 - protein, 296 aa, Dialister invisus
  REGION 1..296: note = tr|R5SJ65|R5SJ65_9FIRM Iron-sulfur cluster-binding protein OS=Dialister invisus CAG:218 OX=1263072; GN = BN540_01413 PE=4 SV=1
MNSSAKNLLLEKARSLLLDAVGCMSCPIAPQLSEKLEKAGPVPFAPAEIEKRLAPEEILADTKSIAVILFPYRYPEEKNANIALYARAKDYHHVVRAYLAKIIGYMEEQYPDEKFHAITDTSPMADRWLAYQAGLGFFGRNHCLIHPKYGSYFTIGAILTTLALPPDTPLAMNCGSCTRCFAACPGKALSHERFNPWRCKSYLTQKKEVLNEEEKNILRKTPLIFGCDECQKCCPFNENAACSPLPETGADRIPRLERETLEQISNRRFTKEYGEYAFSWRGRPVLLRNMDIIEKK

SEQ ID NO: 76337 - protein, 296 aa, Dialister invisus
  REGION 1..296: note = tr|C9LMW6|C9LMW6_9FIRM Putative iron-sulfur cluster-binding protein OS=Dialister invisus DSM 15470; OX = 592028 GN=GCWU000321_00878 PE=4 SV=1
MNSSAKNLLLEKARSLLLDAVGCMSCPIAPQLSEKLEKAGPVPFAPAEIEKRLAPEEILADTKSIAVILFPYRYPEEKNANIALYARAKDYHHVVRAYLAKIIGYMEEQYPNEKFHAITDTSPMADRWLAYQAGLGFFGRNHCLIHPKYGSYFTIGAILTTLALPPDTPLAMNCGSCTRCFAACPGKALSHERFNPWRCKSYLTQKKEVLNEEEKNILRKTPLIFGCDECQKCCPFNENAAYSPLPETGADRIPRLERETLEQISNRRFTKEYGEYAFSWRGRPVLLRNMDIIDKK

SEQ ID NO: 76338 - protein, 303 aa, Dialister sp.
  REGION 1..303: note = tr|A0A3B9DVD5|A0A3B9DVD5_9FIRM Epoxyqueuosine reductase OS=Dialister sp. OX=1955814 GN=DCG08_04255 PE=4; SV = 1
MTPKSHLSQIAASLHLDACGACSASLDSTLKEQLQNAGPIPFAPSSLAERLDPSALLRDARSFFVILFPYRPAREEEGNIALYARPMDYHKVIHRYLQKIIETARPSYPGEQFLPLVDTSPMVDRWLAYAAGLGFFGRNHCLIHPAYGSFVTIGSILTTLSLTPDEPLTLHCGSCRECLIRCPGRAIGEKRLDPFRCKSYLTQKKEELSPAEMQILQRTPYIFGCDECQRFCPFNQKALPSPLPEIHEHRISALTQEEMDSYSNRAFDKAFRSYAFAWRGKKVLLRNWNIVNEKGKEDINSSR

SEQ ID NO: 76339 - protein, 297 aa, Dialister sp.
  REGION 1..297: note = tr|R7CSC1|R7CSC1_9FIRM Putative iron-sulfur cluster-binding protein OS=Dialister sp. CAG:357; OX = 1262869 GN=BN625_00285 PE=4 SV=1
MNAKELLVKTAASLQLDACGAASVNFSEKLSERLTEAGTIPFAPADIKERIDTEALLPGSRSFFVILFPYRPSHKEEGNIALYARGLDYHKMIQSYLDRIIGVMRNAYPEARFRGLADTSPMVDRWLAYAAGLGFFGKNHCIINPKYGSFFTIGSILTTLELSPDSPLDLSCGECRECFYHCPGHVIREDSFDVWHCKSYLTQKKEALTEEEEKIIARTPLIFGCDECQLCCPFNKNAAVSPLPEIRENRFPFLTREKLESYSNRSFDKEMREYAFAWRGRKVLLRNLDLTEKDSGK

SEQ ID NO: 76340 - protein, 294 aa, Dialister succinatiphilus
  REGION 1..294: note = tr|H1CY35|H1CY35_9FIRM Putative iron-sulfur cluster-binding protein OS=Dialister succinatiphilus YIT 11850 OX=742743 GN=HMPREF9453_00273 PE=4 SV=1
MDPKTLFLETARSLRLTACGACSIDFSKDLSQALSKAGPVPFAPAEAEKRLSPESLLPGARSFFVILFPYKTEEREMGNIALYARSEDYHRVNHRYMDRIIEVAAKAFPQARFKALTDTSPMVDRWLAYAAGLGFFGRNHCLIHPVYGSYVTIGAILTTLPLSPDTPLTLSCGDCRLCERACPGKIIGKEPFNPWHCKSYLTQKKEDLTEEEQDIIRKTPLIFGCDGCQNCCPYNRKAPPSPLPEIRENRIPFLTKEMMESMSNRAFDKTYKNYAFAWRGKKVLLRNWHIVHEK

SEQ ID NO: 76341 - protein, 361 aa, Diaphorobacter nitroreducens
  REGION 1..361: note = tr|A0A3N1ZLB0|A0A3N1ZLB0_9BURK Epoxyqueuosine reductase OS=Diaphorobacter nitroreducens OX=164759; GN = queG PE=3 SV=1
MVCSSQLVPQIQGWARELGFSQIKVAGVDLSSAEPGLMQWLAQGFHGEMHYMAAHGLKRARPAELVPGTVSVITARMDYLPRATALEAAEGWQAIELGRLARPTEAVVSVYARGRDYHKVLRARLQKLSDRVAEAVGPFGHRVFTDSAPVLEAELARRSGQGWRGKHTLVLSREAGSMFFLGEIYVDMPLEPTEPVTHHCGSCQACIDVCPTQAIIAPYRLDARRCISYLTIEHAGPIPLELRPLMGNRIYGCDDCQLICPWNKFAQTSSLPDFDVRAGLVGQQLVHLFTWDEETFLRMTEGGPIRRIGHERWLRNIAVALGNALRATRDSVVRAALAARADDPSPLVREHVAWALAQENE

SEQ ID NO: 76342 - protein, 360 aa, unidentified
  source 1..360: note = Diaphorobacter polyhydroxybutyrativorans
  REGION 1..360: note = tr|A0A2Z2LN34|A0A2Z2LN34_9BURK Epoxyqueuosine reductase OS=Diaphorobacter polyhydroxybutyrativorans; OX = 1546149 GN=queG PE=3 SV=1
MVCSSQLVPQIQGWARELGFSQIKVAGVDLSSAEPGLMQWLAQGFHGEMHYMAAHGLKRARPAELVPGTVSVITARMDYLPRATALEAAEGWQALELGRLARPTEAVVSVYARGRDYHKVLRARLQKLSDRVAEAVGPFGHRVFTDSAPVLEAELARRSGQGWRGKHTLVLSREAGSMFFLGEIYVDMPLEPTEPVTHHCGSCQACIDVCPTQAIIAPYRLDARRCISYLTIEHAGPIPLELRPLMGNRIYGCDDCQLICPWNKFAQTSSLPDFDVRAGLVGQQLVHLFTWDEETFLRMTEGGPIRRIGHERWLRNIAVALGNALRTTRDPVVRAALAARADDPSPLVREHVAWALAQEN

SEQ ID NO: 76343 - protein, 360 aa, Diaphorobacter sp.
  REGION 1..360: note = tr|A0A4Y8YYJ9|A0A4Y8YYJ9_9BURK Epoxyqueuosine reductase OS=Diaphorobacter sp. DS2 OX=1302548 GN=queG; PE = 3 SV=1
MVCSSQLVPQIQGWARELGFSQIKVAGVDLSSAEPGLMQWLAQGFHGEMHYMAAHGLKRARPAELVPGTVSVITARMDYLPRAMALDAPEGWQAIELGRLARPTEAVVSVYARGRDYHKVLRARLQKLSDRVAEAVGPFGHRVFTDSAPVLEAELARRSGQGWRGKHTLVLSREAGSMFFLGEIYVDMPLEPTEPVTHHCGSCQACIDVCPTQAIIAPYRLDARRCISYLTIEHAGPIPLELRPLMGNRIYGCDDCQLICPWNKFAQTSSLPDFDVRAGLVGQQLVHLFTWDEETFLRMTEGGPIRRIGHERWLRNIAVALGNALRATRDPVVRAALAARANDPSPLVREHVAWALAQEN

SEQ ID NO: 76344 - protein, 350 aa, Diaphorobacter sp.
  REGION 1..350: note = tr|A0A2S4KJ41|A0A2S4KJ41_9BURK Epoxyqueuosine reductase OS=Diaphorobacter sp. LR2014-1 OX=1933219; GN = queG PE=3 SV=1
MQGWARELGFSQIKVAGVDLSSAEPGLMQWLAQGFHGEMHYMAAHGLKRARPAELVPGTVSVITARMDYLPRAMALEASEGWQAIELGRLARPTEAVVSVYARGRDYHKVLRARLQKLSDRVAEAVGPFGHRVFTDSAPVLEAELARRSGQGWRGKHTLVLSREAGSMFFLGEIYVDMPLEPTEPVTHHCGSCQACIDVCPTQAIIAPYRLDARRCISYLTIEHAGHIPLELRPLMGNRIYGCDDCQLICPWNKFAQTSSLPDFDVRAGLVGQQLVHLFTWDEETFLRMTEGGPIRRIGHERWLRNIAVALGNALRATRDPVVRAALAARADDPSPLVREHVAWALAQEN

SEQ ID NO: 76345 - protein, 386 aa, Dichotomicrobium thermohalophilum
  REGION 1..386: note = tr|A0A397QDK2|A0A397QDK2_9RHIZ Epoxyqueuosine reductase OS=Dichotomicrobium thermohalophilum OX=933063; GN = queG PE=3 SV=1
MVTLAKNRPAEQGALRAQLERRAREAGFDAVGITSADAIPQAAPRLREFLAKGRHGTMSWMAETADRRQAPRALWPEARSVIMLGMNYGPDHDPLAVLEERSRGALSVYAQGRDYHDVIKGRLKQLAGWLHGATGHEVKVFVDTAPVMEKPLAEAAGIGWQGKHTNLVSRDLGSWLFLGAIFTTAELPADAPETDHCGSCRACLDICPTDAFPAPYQLDARRCISYLTIEHKGHIPAEFRAAMGNRIYGCDDCLAVCPWNKFAQEASEAKLRARDNARSPALSELLALNDAAFRARFSGSPIKRVGRDRFVRNVLIAAGNSGDQSLRPQVIGLLDDTSPLVRAMAVWALSRLSAANGDWTDWERLKAAYLPSETDAQVRAEWEAGA

SEQ ID NO: 76346 - protein, 379 aa, unidentified
  source 1..379: note = Dickeya aquatica
  REGION 1..379: note = tr|A0A375AF69|A0A375AF69_9GAMM Epoxyqueuosine reductase OS=Dickeya aquatica OX=1401087 GN=queG PE=3 SV=1
MTYPFDLDALAQHIKQWGLALGFQHVGICDTDLSHEEPRLQAWLDKQYHGEMEWMARHGMMRARPHELLPGTLRVISVRMNYLPAKAAFASTLKNPQLGYVSRYALGRDYHKLLRQRLKKLGEQIAEYCGELQFRPFVDSAPIMERPLAAKAGLGWVGKHSLILNREAGSWFFLGELLVDIPLPVDQPVEEQCGKCVACITTCPTGAIVEPYTIDARRCISYLTIELEGAIPEALRPLMGNRIYGCDDCQLICPWNRFSQLTDEPDFSPRAALHAPELLTLFGWDEAHFLRITEGSAIRRIGHLRWLRNIAVALGNAPYDAQIVLALQARLGENALLDEHIHWAIAQQQARRAQHAIDVQLPQKKRLVRAVEKGLPRDA

SEQ ID NO: 76347 - protein, 379 aa, Dickeya chrysanthemi
  REGION 1..379: note = tr|C6CIY9|C6CIY9_DICC1 Epoxyqueuosine reductase; OS = Dickeya chrysanthemi (strain Ech1591) OX=561229 GN=queG; PE = 3 SV=1
MAYPYDLNELALLIKQWGLELGFQHVGICDTDLSHEEPRLQAWLDKQYHGEMEWMARHGMMRARAHELLPGTLRVISVRMNYLPAKAAFASTLKNPHLGYVSRYALGRDYHKLLRQRLKKLGDRIQAHCGELQFRPFVDSAPIMERPLAAKAGLGWVGKHSLVLNREAGSWFFLGELLIDLPLPVDQPVEEQCGKCVACMTTCPTGAIVEPYTIDARRCISYLTIELEGAIPEGLRPLMGNRIYGCDDCQLICPWNRFSQLTDEPDFSPRAALHAPELLELFSWDEARFLRVTEGSAIRRIGHERWLRNIAVALGNAPYEDKIVLALQNRLGESVLLDEHIQWAIRQQRARREQHTVDVQLPQKKRLIRAVEKGLPRDA

SEQ ID NO: 76348 - protein, 379 aa, Dickeya dadantii
  REGION 1..379: note = tr|E0SH78|E0SH78_DICD3 Epoxyqueuosine reductase; OS = Dickeya dadantii (strain 3937) OX=198628 GN=yjeS PE=3; SV = 1
MTYPYDLNELAQLIKQWGLELGFQQVGICDTDLSHEEPRLQAWLDKQYHGEMEWMARHGMMRARPHELLPGTLRVISVRMNYLPAKAAFASTLKSPNLGYVSRYALGRDYHKLLRQRLKKLGDRIQTHCGELQFRPFVDSAPIMERPLAAKAGLGWVGKHSLVLNREAGSWFFLGELLIDLPLPVDQPVEEQCGKCVACMTTCPTGAIVEPYTVDARRCISYLTIELEGAIPEPLRPLMGNRIYGCDDCQLICPWNRFSQLTDEADFSPRAALHAPELLTLFSWDETRFLRVTEGSAIRRIGHERWLRNIAVALGNAPYEDRIILALRGRLGESALLDEHIHWAIDQQLTRRGQQSVDVQPPQKKRLIRAIEKGLPRDA

SEQ ID NO: 76349 - protein, 389 aa, Dickeya dianthicola
  REGION 1..389: note = tr|A0A3A4CGD0|A0A3A4CGD0_9GAMM Epoxyqueuosine reductase OS=Dickeya dianthicola OX=204039 GN=queG PE=3; SV = 1
MTYPYDLNELAPLIKQWGLELGFQQVGICDTDLSHEEPRLQAWLDKQYHGEMEWMARHGMMRARPHELLPGTLRVISVRMNYLPAKAAFATTLKNPHLGYVSRYTLGRDYHKLLRQRLKKLGDRIQAHCGELQFRPFVDSAPIMERPLAAKAGLGWVGKHSLVLNREAGSWFFLGELLIDLPLPVDPPVEEQCGKCVACMTTCPTGAIVEPYTVDARRCISYLTIELEGAIPEPLRPLMGNRIYGCDDCQLICPWNRFSQLTDEPDFNPRADLHAPELLALFNWDETRFLRVTEGSAIRRIGHERWLRNIAVALGNAPYEDRIIPALQGRLGESTLLDEHIHWAIDQQLIRRGQQFIDVQPIDVQPIDIQPPQKKRLIRAIEKGLPRDA

SEQ ID NO: 76350 - protein, 384 aa, unidentified
  source 1..384: note = Dickeya fangzhongdai
  REGION 1..384: note = tr|A0A2K8QR91|A0A2K8QR91_9GAMM Epoxyqueuosine reductase OS=Dickeya fangzhongdai OX=1778540 GN=queG PE=3; SV = 1
MTYPYDLNELAQLIKQWGLELGFQQVGICDTDLSHEEPRLQAWLDKQYHGEMEWMARHGMMRARPHELLPGTLRVISVRMNYLPAKAAFASTLKNPHLGYVSRYALGRDYHKLLRQRLKKLGDRIQEHCGELQFRPFVDSAPIMERPLAAKAGLGWVGKHSLVLNREAGSWFFLGELLIDLPLPVDQPVEEQCGKCVACMTTCPTGAIVEPYTIDARRCISYLTIELEGAIPEPLRPLMGNRIYGCDDCQLICPWNRFSQLTDEPDFSPRAALHTPELLALFSWDETRFLRVTEGSAIRRIGHERWLRNIAVALGNAPYEDKIILALQSRLGESALLDEHIHWAIDQQLTRRSQQSIDVQPIDVQPPQKKRLIRAIEKGLPRDA

SEQ ID NO: 76351 - protein, 379 aa, Dickeya paradisiaca
  REGION 1..379: note = tr|C6C8W9|C6C8W9_DICP7 Epoxyqueuosine reductase; OS = Dickeya paradisiaca (strain Ech703) OX=579405 GN=queG; PE = 3 SV=1
MTYPYDLNELAQLIKQWGQELGFQQVGICDTDLSHEEPRLQAWLDKQYHGEMAWMARHGMMRARPHELLPGTLRVISVRMNYLPAKAAFASTLKNPLLGYVSRYALGRDYHKLLRQRLKKLGDRIQTHCGELQFRPFVDSAPIMERPLAAKAGLGWVGKHSLVMNRNAGSWFFLGELLIDLPLPTDAPVEEGCGKCVACMTTCPTGAIVAPYTIDARRCVSYLTIELEGAIPIELRPLMGNRIYGCDDCQLICPWNRFSSLTDEPDFSPRAALHTPELLELFQWNEVRFLQVTEGSAIRRIGHLRWLRNIAVALGNAPYEDHIVLALQARLGEHPLLDEHIDWALSQQWEKRSQQTIDVQPAQKKRLIRAIEKGLPRDA

SEQ ID NO: 76352 - protein, 379 aa, unidentified
  source 1..379: note = Dickeya solani
  REGION 1..379: note = tr|A0A2K8VYE9|A0A2K8VYE9_9GAMM Epoxyqueuosine reductase OS=Dickeya solani RNS 08.23.3.1.A OX=1240086; GN = queG PE=3 SV=1
MTYPYDLNELAQLIKQWGLELGFQQVGICDTDLSHEEPRLQAWLDKQYHGEMEWMVRHGMMRARPHELLPGTLRVISVRMNYLPAKAAFASTLKSPYLGYVSRYALGRDYHKLLRRRLKKLGDRIQAHCGELQFRPFVDSAPIMERPLAAKAGLGWVGKHSLVLNREAGSWFFLGELLIDLPLPVDQPVEEQCGKCVACMTTCPTGAIVEPYTIDARRCISYLTIELEGPIPETLRPLMGNRIYGCDDCQLICPWNRFSQLTDEPDFSPRAALHAPELLALFSWDETRFLRVTEGSAIRRIGHERWLRNIAVALGNAPYEDRIILALQGRLGESTLLDEHIHWAIDQQLTRRGQQSIDVQPPQKKRLIRAIEKGLPRDA

SEQ ID NO: 76353 - protein, 384 aa, Dickeya sp.
  REGION 1..384: note = tr|A0A454UKR6|A0A454UKR6_9GAMM Epoxyqueuosine reductase OS=Dickeya sp. FVG10-MFV-A16 OX=2487135 GN=queG; PE = 3 SV=1
MTYPYDLNELAQLIKQWGLELGFQQVGVCDTDLSHEEPRLQAWLDKQYHGEMEWMARHGMMRARPHELLPGTLRVISVRMNYLPAKAAFASTLKNPHLGYVSRYALGRDYHKLLRQRLKKLGDRIQAHCGELQFRPFVDSAPIMERPLAAKAGIGWVGKHSLILNREAGSWFFLGELLIDLPLPVDQPLAEQCGKCVACMTTCPTGAIVEPYTVDARRCISYLTIELEGAIPEPLRPLMGNRIYGCDDCQLICPWNRFSQLTDEPDFSPRVALHAPELLALFGWDESRFLRITEGSAIRRIGHERWLRNIAVALGNAPYEDRIVLALQGRLGESTLLDEHIYWAIDQQLTRRSQQSINVQTIDVQPPQKKRLIRAIEKGLPRDA

SEQ ID NO: 76354 - protein, 379 aa, Dickeya sp.
  REGION 1..379: note = tr|A0A5B8I044|A0A5B8I044_9GAMM Epoxyqueuosine reductase OS=Dickeya sp. NCPPB 569 OX=568768 GN=queG PE=3; SV = 1
MTYPDDLHKLAQLIKQWGLELGFQQVGICDTDLSHEEPRLQAWLDQQYHGEMEWMARHGMMRARPHELLPGTLRVISVRMNYLPPKAAFASTLKNPHLGYVSRYALGRDYHKLLRQRLKKLGDRIQEHCGELQFRPFVDSAPIMERPLAAKAGLGWVGKHSLVLNREAGSWFFLGELLIDLPLPVDQPVEEQCGKCVACMTTCPTGAIVEPYTVDARRCISYLTIELEGPIPESLRPLMGNRIYGCDDCQLICPWNRFSQLTDEPDFSPRAALHAPELLELFSWDEARFLRVTEGSAIRRIGHERWLRNIAVALGNAPYEDRIVLALQTRLGESALLDEHIHWAISQQLVRREQYAVDIQLPQKKRLIRAVEKGLPRDA

SEQ ID NO: 76355 - protein, 379 aa, Dickeya zeae
  REGION 1..379: note = tr|A0A2K9QIV3|A0A2K9QIV3_9GAMM Epoxyqueuosine reductase OS=Dickeya zeae OX=204042 GN=queG PE=3 SV=1
MTYPYDLNELAQRIKLWGQELGFQHVGICDTDLSDEEPRLQAWLDKQYHGEMEWMARHGMMRARPHELLPGTLRVISVRMNYLPAKAAFASTLKNPQLGYVSRYALGRDYHKLLRQRLKKLGDQIQAHCGELQFRPFVDSAPIMERPLAAKAGLGWVGKHSLILNREAGSWFFLGELLIDLPLPVDQPVEEQCGKCVACMTTCPTGAIVEPYTVDARRCISYLTIELEGAIPEALRPLMGNRIYGCDDCQLICPWNRFSQLTDEPDFSPRAALHAPELLELFGWDEARFLRVTEGSAIRRIGHERWLRNIAVALGNAPYEDSIVLALQNRLGESALLDEHIHWAINQQLIRREQHALDVQMPQKRRLVRAIEKGLPRDA

SEQ ID NO: 76356 - protein, 379 aa, Dickeya zeae
  REGION 1..379: note = tr|A0A0A8FHA3|A0A0A8FHA3_9GAMM Epoxyqueuosine reductase OS=Dickeya zeae EC1 OX=1427366 GN=queG PE=3 SV=1
MTYPYDLDELAQRIKLWGQELGFQHVGICDTDLSDEEPQLQAWLDKQYHGEMEWMARHGMMRARPHELLPGTLRVISVRMNYLPAKAAFASTLKNPHLGYVSRYALGRDYHKLLRQRLKKLGDQIQAHCGELQFRPFVDSAPIMERPLAAKAGLGWVGKHSLILNREAGSWFFLGELLIDLPLPVDQPIEEQCGKCVACMTTCPTGAIVEPYTVDARRCISYLTIELEGAIPEDLRPLMGNRIYGCDDCQLICPWNRFSQLTDEPDFSPRAALHAPELLELFGWDEARFLRVTEGSAIRRIGHERWLRNIAVALGNAPYEDNIVLALQNRLGESALLDEHIHWAINQQLIRREQHALDVQMPQKRRLVRAIEKGLPRDA

SEQ ID NO: 76357 - protein, 417 aa, unidentified
  source 1..417: note = Dictyobacter alpinus
  REGION 1..417: note = tr|A0A402B311|A0A402B311_9CHLR Epoxyqueuosine reductase OS=Dictyobacter alpinus OX=2014873 GN=queG PE=4; SV = 1
MTTLDTQTIKEYAYSLGFDSARITSAAPFPETKQIIQERIGRGLMDGLPWFTAERAEISCHPDALLPEAQSIITLALCYLTEQPEEPDTAVPHGRISRYSWGDDYHDLIKPKLQQFAAWLKDYAKDIGNAEVETRLFVDTGRMVDRAVAQRAGLGWYGKNTNILTKGWGSWVFLAEIVTNLPLTPDAELKANCGSCEICLHACPTGALPNPYELDSTKCISFLTIELRGSIPLEMRPLMGNLIFGCDICQEVCPVNKVAEKRLGLRDAQGKPVIALNTIKKREVTTVSSGQRAEKAFQPQPEFHMRPQVGSTPELIPLLALTEEDFRERFRHSPIKRTKRRGFLRNVCVALGNSKDSKAIPALTNALHDNEALIRSHAAWALGSIGGTDAVTALQAALVNENDEEVQKEIRCALAMR

SEQ ID NO: 76358 - protein, 415 aa, unidentified
  source 1..415: note = Dictyobacter aurantiacus
  REGION 1..415: note = tr|A0A401ZB91|A0A401ZB91_9CHLR Epoxyqueuosine reductase OS=Dictyobacter aurantiacus OX=1936993 GN=queG; PE = 4 SV=1
MLNAQTIKEYAYSLGFDAARITSAAAFPETKQIIQERIGRGLMDGLPWFTAERAEISCHPDALLPEAQSIITLALCYLTEQPEAPDKREPHGSISRYAWGDDYHDIIKPKLQQFASWLKDYARDQGGNEVETRLFVDTGRMVDRAVAQRAGLGWYGKNTNILTKGWGSWVFLAEIVTNLPLASDEPLKASCGSCEICLHACPTGALPNPYELDSRKCISFLTIELRGSIPVEMRPLMGNLIFGCDICQEVCPVNKVAEKRLGLRDMQGKPIIPLRTIQKHSTEPAMDRDPARKAFQPRSEFQARPTVGSTPELIPLLSLTEEEFRERFRRSPIKRTKRRGFLRNVCVALGNSKDPQAIPALTKALHDDEALVRGHAAWALGSIGGSTARQALYDARQTEQDPEVLKEIRYALSIA

SEQ ID NO: 76359 - protein, 413 aa, unidentified
  source 1..413: note = Dictyobacter kobayashii
  REGION 1..413: note = tr|A0A402AFQ2|A0A402AFQ2_9CHLR Epoxyqueuosine reductase OS=Dictyobacter kobayashii OX=2014872 GN=queG; PE = 4 SV=1
MLNTQTIKEYAYSLGFDAARITSAAAFPEAKQVIQERIGRGLMDGLPWFTSERAEISCHPDALLPEAQSIITLALCYLTEQPVEADETKPHGRISRYAWGDDYHDIIKPRLQQFANWLKDYARDEWDQDIETRLFVDTGRMVDRAVAQRAGLGWYGKNTNILTKGWGSWVFLAEIVTNLPLQPDEALKANCGSCEICLHACPTGALPNPYELDSPKCISFLTIELRGSIPLEMRPLMGNLIFGCDICQEVCPVNKVAEKRLGLRDIHGKPIVPLQSIQKRTEQVADSNANKVFRPQIEFQAHPAVGSTPELIPLLSLTEEEFRERFRRSPIKRTKRRGLLRNVCVALGNSKDPQAIPALEKALHDEEALIRGHAAWALGSIGGSSAVQALQEALTTEEDVEVQKEIKYALTMA

SEQ ID NO: 76360 - protein, 415 aa, unidentified
  source 1..415: note = Dictyobacter sp.
  REGION 1..415: note = tr|A0A5A5TLC7|A0A5A5TLC7_9CHLR Epoxyqueuosine reductase OS=Dictyobacter sp. Uno17 OX=2014874 GN=queG; PE = 4 SV=1
MMLDVEKIKEFAYSLGFTTARITSAAAFPEAKQVIQERIARGLLDGLPWFTAERAEVSCQPDALLPEARSIITLAMCYLTEQPEEPDDTTPHGRISRYAWGDDYHDIIKPKLKQFATWLSEYAGSSQEGEFEARLFVDTGRMVDRAVAQRAGLGWYGKNTNILTKGWGSWVFLAEIVTNLALLVDEPLQTNCGSCEICLHACPTGALPNPYELDSTRCISFLTIELRGSIPVELRPLMGNLIFGCDICQEVCPVNKLAEKRLGLRQADGTPIVPLQSIKKREVSAQQQIISLPRFQPQTEFLMRPTIGSNPDLIELLSITEEDFRERFRRSPIKRTKRRGLLRNVCVALGNSNDRRAIPALIKALHDEEMLIRGHAAWALGRLGGPEARMALQEALQVEADTEVQQEIRYALAMF

SEQ ID NO: 76361 - protein, 414 aa, unidentified
  source 1..414: note = Dictyobacter sp.
  REGION 1..414: note = tr|A0A5J4KL37|A0A5J4KL37_9CHLR Epoxyqueuosine reductase OS=Dictyobacter sp. W12 OX=2607529 GN=queG PE=4; SV = 1
MLDTQTIKEYAYSLGFDIARITSAAAFPEAKQVIQERIGRGLLDGLPWFTAERAEISCHPDALLPEAQSIITLALCYLTEQPEEPTSQVPHGNISRYAWGDDYHDIIKPKLQQFAEWLKDYAKTTGTEEVETRLFVDTGRMVDRAVAQRAGLGWFGKNTNILTKGWGSWVFLAEIVTNLPLEPDNALKANCGSCEICLHACPTGALPNAYELDSTRCISFLTIELRGSIPLELRPLMGNLIFGCDICQEVCPVNKVAEKRLGLRDAQGKPVIALDMIKKREPITVSDTKPVKIFQPQPEFRTRPAVGSTPELIPLLALTEEEFRERFRRSPIKRTKRRGFLRNVCVALGNSKDPQAIPALVNALHDSEALIRGHAAWALGNIGGTTVVTALQAALVTEEDEEVQKEIRYALTIG

SEQ ID NO: 76362 - protein, 321 aa, unidentified
  source 1..321: note = Dinghuibacter silviterrae
  REGION 1..321: note = tr|A0A4R8DRE6|A0A4R8DRE6_9BACT Epoxyqueuosine reductase OS=Dinghuibacter silviterrae OX=1539049 GN=queG; PE = 3 SV=1
MDTARHTRLIKSFASALGFDYCGIARAVRLDDDAFRLERWLTAGMHGKMGYMENYFDLRIDPTRLVPGAKSVITLLLNYFPSESQAPGAPGIAKYAFGRDYHEVIREKLRVFQHRIREEIGEVAGRGFVDSAPVLERSWAVRSGLGWIGKNGNLLHPGAGSFFFIATLIVDLPLDYDDPFAKDFCGTCTRCIDACPTEAILPDKVVDGSRCISYFTIELKDLLIPGDMEGRFQDWMFGCDTCQDVCPWNRFSKPTLEEGFRALPEVLNFTTADWEVLTEEAFREIFRESPLKRSKFKGIQRNLAFISLPSANPPTENPPTR

SEQ ID NO: 76363 - protein, 344 aa, Dinoroseobacter shibae
  REGION 1..344: note = tr|A8LMW5|A8LMW5_DINSH Epoxyqueuosine reductase; OS = Dinoroseobacter shibae (strain DSM 16493 / NCIMB 14021 / DFL 12) OX=398580 GN=queG PE=3 SV=1
MNEGLASNLKAEAARLGFVGAGICAPDAIPEAAGRLAAFVEAGRHGQMGWMAERMHWRGDPASLWPEARSVVMLAESYAPDSDPLADLAARDRGLISVYARHRDYHDVLKKKLKALGRWLLAEAGGEIKVFVDTAPVMEKPLAQAAGLGWQGKHTNLLGRGFGNWVFLGALFTTVDLPKDAAEVDHCGSCRACLDICPTDAFPAPYQLDARRCISYLTIEHKGPVDEALRPGLGNRIYGCDDCLAVCPWNKFAAEAREAKYHARDDLTLPALAELAALDDAGFRARFSGSPIKRIGRDRFVRNVCYAIGNSATPALRPAVQALCDDPDPAVADAARWAVARLGG

SEQ ID NO: 76364 - protein, 343 aa, Dinoroseobacter sp.
  REGION 1..343: note = tr|A0A2D8TJ57|A0A2D8TJ57_9RHOB tRNA epoxyqueuosine(34) reductase QueG OS=Dinoroseobacter sp.; OX = 2003366 GN=queG PE=4 SV=1
  VARIANT 37: note = Xaa can be any naturally occurring amino acid
  VARIANT 54: note = Xaa can be any naturally occurring amino acid
  VARIANT 59: note = Xaa can be any naturally occurring amino acid
  VARIANT 63: note = Xaa can be any naturally occurring amino acid
  VARIANT 98: note = Xaa can be any naturally occurring amino acid
  VARIANT 133: note = Xaa can be any naturally occurring amino acid
  VARIANT 183: note = Xaa can be any naturally occurring amino acid
  VARIANT 193: note = Xaa can be any naturally occurring amino acid
  VARIANT 196: note = Xaa can be any naturally occurring amino acid
  VARIANT 213: note = Xaa can be any naturally occurring amino acid
  VARIANT 310: note = Xaa can be any naturally occurring amino acid
  VARIANT 316: note = Xaa can be any naturally occurring amino acid
MTDLKTQLEAKALEEGFAKMRVCRPDAIPQAAARLAXYVAKGRHGQMGWIEARXGWRGXPTAXWPEARSVVMLAEPYTPEIDPLEPLKARDCGTISVXAQNRDYHDALKKRLKRVGRWLLEQAPGEEIKVFVXTAPVMEKPLGQASGLGWQGKHTNLLARDLGNWFFLGSIFTTLELPADPAXSDHCGNCTAXLDXCPTDAFPAPYQLDARRXISYLTIEHHGPVDEELRPLMGNRIFGCDDCLAICPWNKFAVEAREMRYSGRPELQGPKLAELARLDDAAFRTMFSGNPVKRIGRNRFIRNVLYAIGXSGDSGXLDTAQGLLDDPDDTVKDAARWAVERLR

SEQ ID NO: 76365 - protein, 352 aa, Dokdonella fugitiva
  REGION 1..352: note = tr|A0A4R2IGP4|A0A4R2IGP4_9GAMM Epoxyqueuosine reductase OS=Dokdonella fugitiva OX=328517 GN=queG PE=3; SV = 1
MTDYAALASDIRRWGEELGFQKIGITGIDLTPDEAHLLDWLDAGHHGEMDYMARHGARRSRPAELQPGTVRVISARLDYAPPGLREAWNVIGDGERGYVSRYALGRDYHKVLRGRLQKLADRIAGVTGPFGHRVFTDSAPVLEKALARNAGLGWIGKHTLLLDRDAGSWFFLGEIYTDLPLPTDAPASAYCGTCSRCIDVCPTQAIVAPYRLDARRCISYLTIELRGAIPEDLRPLIGNRIFGCDDCQLVCPWNKFAQVTTVADFAPRSGLDSARLVDLFAWSEAEFLARTEGMAIRRTGYEGWSRNIAVALGNAPTRDDVVRALRSRADDPSALVREHVAWALARHASAHG

SEQ ID NO: 76366 - protein, 360 aa, unidentified
  source 1..360: note = Dokdonella immobilis
  REGION 1..360: note = tr|A0A1I4WKW7|A0A1I4WKW7_9GAMM Epoxyqueuosine reductase OS=Dokdonella immobilis OX=578942 GN=queG PE=3; SV = 1
MSAVDFYNLLPELHEWAAALGFQQLGVAGVELGEDETHLLNWLRQGRHGEMDYMASHGSKRSRPQELVPGTLRVISVRMDYLPSQARPGFDVLADPQRAYVARYALGRDYHKLMRTRLQKLANRIGERVGPFGYRAFVDSAPVLERALARDAGLGWIGKHSCLINRDAGSWFFLGELYTDLPLPLDTPASAHCGTCRRCLDICPTQAIVAPYEVDARRCIAYLTIELRGPIPLELRRAMGNRVFGCDDCQLVCPWNKFATPSPEADFRPRHGLDDAALIGLFEWDEAEFLQRTEGSPIRRTGHVGWLRNIAVALGNAPYSAATVNALERRQQHPAEIVREHVAWALAEQADKRAAASRPG

SEQ ID NO: 76367 - protein, 374 aa, Dokdonella koreensis
  REGION 1..374: note = tr|A0A167H369|A0A167H369_9GAMM Epoxyqueuosine reductase OS=Dokdonella koreensis DS-123 OX=1300342; GN = queG PE=3 SV=1
MPAAACRNTIDFAALAAEIRQWAAELGFRDIGIAGTELGEDETHLLNWLAAGRHGEMDYMANHGVKRSRPAELQPGTLRVISVRMDYLPAGARDGWDVLGDPDAAYVARYALGRDYHKLMRNRLQKLADRIAARTGPFGYRAFVDSAPVLERALARDAGIGWIGKHTCLIDSRGGSWFFLGELFTDLPLPLGAAATAHCGTCTRCIEICPTRAILAPYQLDARRCIAYLTIESRGPIPVELRPLIGNRIFGCDDCQLVCPWNKFATPTTEPDFAPRHRLDDSRLVDLFAWTEAEFLQRTEGSPIRRTGYPGWLRNIAVALGNAPYAEPTMQALAARQDDPSELVREHVAWALAEQRRKQAAHASVSAGPAPGAG

SEQ ID NO: 76368 - protein, 374 aa, Dokdonella sp.
  REGION 1..374: note = tr|A0A5C7ZNP0|A0A5C7ZNP0_9GAMM Epoxyqueuosine reductase OS=Dokdonella sp. OX=2291710 GN=queG PE=3 SV=1
MLPARSVANDPGSMPGIDPTSLKARLGIWAAELGFQQLGVAGIELSEDEAYLLNWLEAGRHGSMEYMQRHGSKRSRPAELVAGTVRVISVRMDYQPAQARDSWDVLADADSGFIARYALGRDYHKLMRNRLQKLAERLASEVGPFGYRAFVDSAPVLERALARNAGLGWIGKHTCLINRQAGSWFLLGELYTDLELPLDPPASNHCGSCRRCIDVCPTQAIIGPYQVDARRCISYLTIELRESIPVELRRPMGNRIFGCDDCQLVCPWNKFAQPTRESDFMPRHGLDGRGLIELFAWTEAQFQQQTEGSPIRRAGYEGWLRNIAVALGNAPYRPETVDALRRRLDDPSAMVREHVAWALTEQEAKRDRAGQAGS

SEQ ID NO: 76369 - protein, 309 aa, Dokdonia donghaensis
  REGION 1..309: note = tr|A0A0A2H0D4|A0A0A2H0D4_9FLAO Epoxyqueuosine reductase OS=Dokdonia donghaensis DSW-1 OX=1300343 GN=queG; PE = 3 SV=1
MENRSKHTAFIKAEAQRLGFMSCGISKAGFLEEEAPRLESWLNKNMHGEMQYMENYFDKRLDPTKLVEGSKSVISLLLNYYPHELQNEESYKISKYAYGRDYHFVIKDKLKEFMHVIQEQIGEVNGRAFVDSAPILDKAWAAKSGLGWIGKHSNLLSKKAGSFYFIAELVVDLDLEYDTPVTDHCGSCTACIDACPTQAIVEPYKVDGSKCISYFTIELKNEIPEYAKSQLDDWMFGCDVCQDVCPWNRFSKAHSESLFNPNPKLLTYDKKQWEEITQEVFSEIFRKSAVKRTKFSGLKRNIDALKKQP

SEQ ID NO: 76370 - protein, 308 aa, unidentified
  source 1..308: note = Dokdonia pacifica
  REGION 1..308: note = tr|A0A238VR78|A0A238VR78_9FLAO Epoxyqueuosine reductase OS=Dokdonia pacifica OX=1627892 GN=queG PE=3 SV=1
MIENRAKYTALIKAEAKRLGFMSCGISKAGFLEEEAPRLEQWLANNMHGEMQYMENHFDKRLDPTKLVEGSKSVISLLLNYYPSEIQKADSYKISKYAYGTDYHFVIKDKLKELLHYIQAEIGEVGGRAFVDSAPVLDKAWAVKSGLGWMGKHSNVLSKKTGSFYFIAELIIDLDLEYDTPVTDHCGNCTACIDACPTQAIVEPYKVDGSKCISYFTIELKEAIPTSVKGSFDDWMFGCDVCQDVCPWNRFSTSHKEPLFNPHPKLLEYTKKDWEEITQEVFSEVFKKSAVKRTKYTGLLRNIQFLKE

SEQ ID NO: 76371 - protein, 309 aa, Dokdonia sp.
  REGION 1..309: note = tr|F4AVT9|F4AVT9_DOKS4 Epoxyqueuosine reductase; OS = Dokdonia sp. (strain 4H-3-7-5) OX=983548 GN=queG PE=3; SV = 1
MIENQVKHTAFIKAEATRLGFMSCGISKAGFLEEEAPRLESWLKQNMNGEMQYMENYFDMRLDPTKLVEGSKSVISLLLNYYPHEVQNEDSYKISKYAYGRDYHFVIKDKLKEFLHNIQEEIGDVHGRAFVDSAPVLDKAWAKKSGLGWIGKHSNLLSKKAGSFYFIAELVIDLDLEYDTPVTDHCGSCTACIDACPTGAIVEPYKVDGSKCISYFTIELKNQIPDYAKPHLDDWMFGCDVCQDVCPWNRFSKAHSEPLFDPHPELLSNSKKQWEEITQEVFSEIFRKSAVKRTKFSGLQRNIDALKRS

SEQ ID NO: 76372 - protein, 307 aa, Dokdonia sp.
  REGION 1..307: note = tr|A0A3M0G2S1|A0A3M0G2S1_9FLAO Epoxyqueuosine reductase OS=Dokdonia sp. SH27 OX=2479847 GN=queG PE=3 SV=1
MENKSKHTALIKAEAQRLGFMSCGISKAGFLEEEAPRLEKWLSENRNGEMHYMENYFDKRLDPTKLVEDSKSVISLLLNYYPNELQRDDTYKISKYAYGRDYHFVIKDKLKEFLHTLETEIGQVYGRAFVDSAPVLDKAWAVKSGLGWMGKHSNVLSKKTGSFYFIAELIVDLDLEYDLPVTDHCGSCTACIDACPTQAIYEPYKVDGSKCISYYTIELKNAIPEAARGLMDDWAFGCDVCQDVCPWNRFSKSHSEPLFNPHPQLLEMSKGDWEEITQEVFSEIFQKSAVKRTKYSGLRRNISFLKG

SEQ ID NO: 76373 - protein, 324 aa, unidentified
  source 1..324: note = Dolichospermum compactum
  REGION 1..324: note = tr|A0A1Z4V757|A0A1Z4V757_9CYAN Epoxyqueuosine reductase OS=Dolichospermum compactum NIES-806 OX=1973481; GN = queG PE=3 SV=1
MNEYISINSTEVKAKAKELGFQEVGIAAAGDLETTETEKLHAWLKMGYHADMEWMKNPKREDISLVMPEVRSLISVALNYYTPHQRPSGEEYGKISRYAWGRDYHKVMHKKLKELATWLESLGENVKTRYYADTGPVQDKVWAQKAGIGWIAKNGNVITRKYGSWVFLAEILTNLELESDRPSTQHCGTCTRCLQACPTGAITAPFIVDANRCIAYHTIENRAEELPANITPHLQGWIAGCDICQDICPWNQRFAQTTNVNDFQPYPGNLAPKLVELAQISNEEWDRRFTASALRRIKPEMLRRNARANLDKSRHNNDPESNNF

SEQ ID NO: 76374 - protein, 324 aa, unidentified
  source 1..324: note = Dolichospermum planctonicum
  REGION 1..324: note = tr|A0A480AB66|A0A480AB66_9CYAN Epoxyqueuosine reductase OS=Dolichospermum planctonicum OX=136072 GN=queG; PE = 3 SV=1
MNECTSINSIVVKAKAKELGFHEVGIAAVADLEATEIQKLRDWLKMGYHADMEWMKNPRRENISLVMPEVITLVSVALNYYTPDARPQEDEYGKISRYGWGRDYHRVMHKKLKELASWLESLGTDIKARYYADTGPIQDKLWAQKAGIGWIAKNGNVITRKYGSWVFLGEVLTNLELEKDQPSTQHCGTCTRCLQACPTGAITEPFVVDANRCIAYHTIENRDQELPADIKPHLQGWVAGCDICQDVCPWNQRFAQITDVTDFQPYPKNLHPKLVELAQISDEEWDKRFTASALRRIKPEMLRRNARANLDVSKHNNDPESNNF

SEQ ID NO: 76375 - protein, 324 aa, unidentified
  source 1..324: note = Dolichospermum sp.
  REGION 1..324: note = tr|A0A5C0DYN0|A0A5C0DYN0_9CYAN Epoxyqueuosine reductase OS=Dolichospermum sp. UHCC 0315A OX=1914871; GN = queG PE=3 SV=1
MNEYTSISSAVVKAKAKELGFHEVGIAAVGNLERTETEKLQAWLKMGYHADMEWMKNPKREDISLVMPEVRSLISVALNYYTPQERPQGDEYGKISRYAWGRDYHRVIHKKLKELAIWLESLGENVKARYYADTGPVQDKVWAQKAGIGWIAKNGNVITRKYGSWVFLAEILTNLALESDRPSTQHCGTCTRCLQACPTGAITEPFVVDANRCIAYHTIENRAEELPANITPHLQGWVAGCDICQDVCPWNQRFAQATDVTDFQPYPGNLAPKLVELAQISNEEWDKRFTASALRRIKPEMLRRNARANLDKSRHNNDPESNNF

SEQ ID NO: 76376 - protein, 391 aa, Dolosicoccus paucivorans
  REGION 1..391: note = tr|A0A2N6SMQ4|A0A2N6SMQ4_9LACT tRNA epoxyqueuosine(34) reductase QueG OS=Dolosicoccus paucivorans OX=84521 GN=queG PE=4 SV=1
MPTLKERIIEEAHRIGIDKIGFASAEPFDHLEASLKEQKEKGYTSGFEHPVIEERIYPEKIFAKPKSIISIALAYPSQLKNPLPQERGNRRGMFARASWGIDYHDILRERMNRLIDFIKQETQTAEFKPMVDTGELIDVAVAQRAGLGFIGRNGLLITKEFGSWVYLGEIITDLEFEYDEPVPFGCGDCYRCVTACPTDALLGDGRMNAKRCLSYQTQTKGYMPVEFRRKMTSIIYGCDICQLSCPYNKGIDWHLHEEMEPDPELVQPALKELLTLSNREFRDTFGKMAGSWRGKKPLQRNAIIALANFNDQSAIPLLIEIMEKDPREMIRGTAAWAISQIQKRYNEALNECVYEQLQKETDLETIEEMTKALEELKNKRPPRQKRNEVSR

SEQ ID NO: 76377 - protein, 378 aa, unidentified
  source 1..378: note = Domibacillus aminovorans
  REGION 1..378: note = tr|A0A177L210|A0A177L210_9BACI Epoxyqueuosine reductase OS=Domibacillus aminovorans OX=29332; GN = AWH48_15230 PE=4 SV=1
MYRQLKKELINYSKEIGIDKIGFAAADPFLELKQKLINQQELGYASGFEEKDIEKRVNPALLIDQPRSIIAIALAYPSKLENAPKGKKGERRGLFCRASWGEDYHSILRRKLAMLESFLLERLPDVQFRSMVDTGELSDRAVAARAGIGWSAKNCAIITPEFGSYVYLGEMLTNVPFEPDTPMESQCGSCTKCIDACPTSALVQGGQLNSQRCIAYLTQTKDSLPEQFRKHLGNRLYGCDTCQTVCPENKGKHVLIHEEMTPKLEQVKPLLEPILSISNKEFKERFGQMSGSWRGKKPIQRNAIIALAHFKEESSLGALIHVLETDPRPVLRGTAAYAIGQIGGTEAERALKEALSREKDEEVLFEMEKALQKLRSML

SEQ ID NO: 76378 - protein, 378 aa, unidentified
  source 1..378: note = Domibacillus aminovorans
  REGION 1..378: note = tr|A0A177LC00|A0A177LC00_9BACI Epoxyqueuosine reductase OS=Domibacillus aminovorans OX=29332 GN=queG; PE = 3 SV=1
MYRQLKKELINYSKEIGIDKIGFAAADPFLELKQKLINQQELGYASGFEEKDIEKRVNPALLIDQPRSIIAIALAYPSRLENAPKGKKGERRGLFCRASWGEDYHSILRRKLAMLESFLLERLPDVQFRSMVDTGELSDRAVAERAGIGWSAKNCAIITPEFGSYVYLGEMLTNVPFEPDTPMENQCGSCTKCIDACPTSALVQGGQLNSQRCIAYLTQTKDSLPEQFRKHLGNRLYGCDTCQTVCPENKGKHVLIHEEMTPKLEQVKPLLEPILSISNKEFKERFGQMSGSWRGKKPIQRNAIIALAHFKEESSLGALIHVLEEDPRPVLRGTAAYAIGQIGGVEAERALKEALSREKDEEVLFEMEKALQKLRSML

SEQ ID NO: 76379 - protein, 378 aa, unidentified
  source 1..378: note = Domibacillus antri
  REGION 1..378: note = tr|A0A1Q8Q8M7|A0A1Q8Q8M7_9BACI Epoxyqueuosine reductase OS=Domibacillus antri OX=1714264 GN=queG PE=3; SV = 1
MYRQLKQELIDYSKEIGIDKIGFAAADPFLELKEKLIQHQELGYASGFEEKDIEKRVNPALLLDQPRSIIAIALAYPSKLEKAPKGKKGERRGLFCRASWGEDYHSVLRRKLAMLEAFLQEKLPDVRFKSMVDTGELSDRAVAERAGIGWSAKNCAIITPEFGSYVYLGEMITNVPFEPDTPIENQCGSCTKCIDACPTSALVQGGQLNAQRCIAYLTQTKDFLPEEFRKHLGNRLYGCDTCQTVCPENKGKHVLKHAEMTPEPEQVKPLLEPLLSISNKEFKQRFGSMSGSWRGKKPIQRNAIIALAHFKEESSLPSLVQVLNDDPRPVLRGTAAYAIGQIGGAEAKQALNLALSQEKEEDVLFEIERAIQTVHSML

SEQ ID NO: 76380 - protein, 378 aa, unidentified
  source 1..378: note = Domibacillus enclensis
  REGION 1..378: note = tr|A0A1N7B536|A0A1N7B536_9BACI Epoxyqueuosine reductase OS=Domibacillus enclensis OX=1017273 GN=queG; PE = 3 SV=1
MYRQLKQELIDYSKQINIDKIGFAAADPFLELKQKLQLQQELGYASGFEEKDIEKRTDPALLLDQPRSIIAIALAYPSKLEDAPKGKKGERRGLFCRASWGEDYHTVLRKKLHLLEQFLQEKLPDVQFKSMVDTGELSDRAVAERAGIGWSAKNCAIITPEFGSYVYLGEMLTNVPFEPDTPMESQCGKCTKCIDACPTNALVQGGQLNSQRCIAYLTQTKDFLPEAFRKHLGNRLYGCDTCQTVCPENKGKHTLRHEEMKPDNEQVKPLLEPLLSMSNKEFKERFGRMSGSWRGKKPIQRNALIALAHFKEESSLPILAEVLHGDPRPVIRGTAAYAIGQIGGASAKELLQKAKQEEKEEAVLDEVKKAIQSLQSVL

SEQ ID NO: 76381 - protein, 378 aa, unidentified
  source 1..378: note = Domibacillus epiphyticus
  REGION 1..378: note = tr|A0A1V2A845|A0A1V2A845_9BACI tRNA epoxyqueuosine(34) reductase QueG OS=Domibacillus epiphyticus OX=1714355 GN=BTO28_09335 PE=4 SV=1
MYRQLKQELIDYSKEIGIDKIGFAAADPFLELKQKLVQQQELGYASGFEEKDIEKRVNPALLIDQPRSIIAIALAYPSKLEGAPTGKKGERRGLFCRASWGEDYHAILRKKLALMEEFLQKKLSDVQCKSMVDTGELSDRAVAERAGIGWSAKNCAIITPEFGSYVYLGEMLTNVPFEPDTPMESQCGSCRKCIDACPTSALVQGGQLNSQRCIAYLTQTKDFLPEQFRKHLGNRLYGCDTCQTVCPENKGKHVLIHDEMTPDPEQVKPLLEPLLSISNKEFKERFGSMSGSWRGKKPIQRNAIIALAHFKEESSLPALMHVLFEDPRPVMRGTAAYAIGKIGGMEAEHALKRALIHEKESDVLAEIEKAIQTFHSVL

SEQ ID NO: 76382 - protein, 378 aa, unidentified
  source 1..378: note = Domibacillus iocasae
  REGION 1..378: note = tr|A0A1E7DLS3|A0A1E7DLS3_9BACI Epoxyqueuosine reductase OS=Domibacillus iocasae OX=1714016 GN=queG PE=3; SV = 1
MYRQLKQELIDYSKDIGIDKIGFAAADPFLELKQRLIQQQELGYASGFEEKDINKRTNPALLLDQPRSIIAIALAYPSKLDGAPKGKKGERRGLFCRASWGEDYHIILRKKLHLLEQFLQEKLPDVQFKSMVDTGELSDRAVAERAGIGWSAKNCAIITPEFGSYVYLGEMLTNVPFEPDRPMESQCGTCTKCIDACPTSALVQGGQLNSQRCIAYLTQTKDVLPEPFRKHLGNRLYGCDTCQTVCPENKGKHTLRHEEMIPENEQVKPLLEPLLSMSNKEFKERFGRMSGSWRGKKPIQRNAIIALAHFKEVSSLPALANALHEDPRPVIRETAAYAIGQIGGREAEAQLHEALLREKEEAVIEELKKALQSIRSVL

SEQ ID NO: 76383 - protein, 378 aa, unidentified
  source 1..378: note = Domibacillus mangrovi
  REGION 1..378: note = tr|A0A1Q5P0V7|A0A1Q5P0V7_9BACI Epoxyqueuosine reductase OS=Domibacillus mangrovi OX=1714354 GN=queG PE=3; SV = 1
MYQQLKTDLINYSKEIGIDKIGFAAADPFLELKQKLINQQELGYASGFEEKDIEKRVNPALLIDQPRSIIAIALAYPSKLENAPKGKKGERRGLFCRASWGEDYHSILRRKLAMLESFLLERLPDVQLRSMVDTGELSDRAVAERAGIGWSAKNCAIITPEFGSYVYLGEMLTNVPFEPDVPMESQCGSCTKCIDACPTSALIQGGQLNSQRCIAYLTQTKGILPEQFRKHLGNRLYGCDTCQTVCPENKGKHVLIHEEMIPEPEQVKPLLEPILSISNKEFKERFGEMSGSWRGKKPIQRNAIIALAHFKEESSIRALVHVLEEDPRPVLRGTAAYAIGQIGGAEAERALKQALSREKEEEVLFEMEKALQTLRSVL

SEQ ID NO: 76384 - protein, 346 aa, Donghicola sp.
  REGION 1..346: note = tr|A0A1B7YXI0|A0A1B7YXI0_9RHOB Epoxyqueuosine reductase OS=Donghicola sp. JL3646 OX=1836468 GN=queG PE=3; SV = 1
MQTLISKDQLKAYAIDAGFSAMGVCRPDAVPEIADRLHVFVDEGRHGQMAWMAERMNWRGNPTALWPEAKSVIMLAEAYTPSHDPMAVVGQADKAAISVYAQNRDYHDVVKKRLKAVGRWLLSLCPGEQIKVFVDTAPVMEKPLGQAAGLGWQGKHTNLLGRELGSWFFLGAIFTTIEFEPDAAEQSHCGSCTACLRSCPTEAFPAPYQLDARRCISYLTIEHSGPVDLDLREKLGNRIYGCDDCLAACPWNKFAVEAREVKYAAREDLIAPDLAELVLLDDAEFRAKFSGSPIKRIGRNRFVRNVLYAIGNTENAAYIPSVTPLCSDPDATVSDAAKWAMDRISR

SEQ ID NO: 76385 - protein, 361 aa, Donghicola sp.
  REGION 1..361: note = tr|A0A1M4N2Z1|A0A1M4N2Z1_9RHOB Epoxyqueuosine reductase OS=Donghicola sp. KarMa OX=1779855 GN=queG PE=3; SV = 1
MATRGPAPAPPGYLGKKEMTDALKARLVAQARAEGFSEVRVCRPWDVPEVPARLEAFVAQGFHGQMGWMEERMSWRGDPAALWPEARSVIVLGESYTPEDNPMDVVGLPDRGAISVYARGKDYHDLVKKRLKRLARWLIAEGGGEVKVFVDTAPVPEKPLGQAAGLGWQGKHTNLVSRQMGNWFFIGSVFTTLDLPVDEPEVDHCGRCDRCLRACPTDAFVAPYQMDARRCISYLTIEHKGPVDEALRGRLGNRIYGCDDCLAACPWNKFAVAASDMRYAAREGTVAPELRELAALDDAAFRERFSGSPIKRIGRDRFVRNVLYAIGNSGDASLKEVATALFTDPDEGVADAARWAALQLG

SEQ ID NO: 76386 - protein, 344 aa, unidentified
  source 1..344: note = Donghicola tyrosinivorans
  REGION 1..344: note = tr|A0A2T0WYJ1|A0A2T0WYJ1_9RHOB Epoxyqueuosine reductase OS=Donghicola tyrosinivorans OX=1652492 GN=queG; PE = 3 SV=1
MNGAALKEALVAAALAEGFSSVRVCRPWDVPEVPARLEAFVSAGYHGQMGWMEERMSWRGDPSALWPEARSVIVLGESYTPEEDPMDVVGLPDRAAISVYARGKDYHDLVKKRLKRLARWLISEAGGEVKVFVDTAPVPEKALGQAAGLGWQGKHTNLVSREMGNWFFIGSVFSTLELPVDGPEVDHCGSCSRCLQACPTEAFVAPYQMDARRCISYLTIEHKGPVPLELRERLGNRIYGCDDCLAACPWNKFAVEAREMRYAAREGTIAPPLAELAALDDAAFRERFSGSPIKRIGRGRFVRNVLYAIGNSGDPSLGKVATALVEDPDEDVADAARWASLRLG

SEQ ID NO: 76387 - protein, 381 aa, Dongia mobilis
  REGION 1..381: note = tr|A0A4R6WXN9|A0A4R6WXN9_9PROT Epoxyqueuosine reductase OS=Dongia mobilis OX=578943 GN=queG PE=3 SV=1
MPVPGQAAGSSRDPAAIRAALRAQALAEGFDAVGFAPAALADATRENLAQFLKEGRHGGMGWLAEKADRRGDPRVLWPDARSIMVLGLNYGPDEDPLSVLAQKDRAGISVYARHRDYHDVVKKKLKRLGRWVAETYATEIKVFVDTAPVMEKPLAQAGGIGWQGKHTNLVSRELGSWLFLGEIYLALDLPSDAPEIDHCGSCRACLDACPTGAFPAPYQLDARRCISYLTIEHAGPIPRDFRRAMGNRIYGCDDCLAVCPWNKFAAIASEAQLAARDDLRAPALADLVALDDAGFRALFSGSPIKRIGRDRFIRNVLIAIANSGEPALLPAVERLLGDASPIVRGAAIWALRQLAPARWSAMAQAAIPFEHDSSARSEWLA

SEQ ID NO: 76388 - protein, 228 aa, Dorea longicatena
  REGION 1..228: note = tr|A0A174HP03|A0A174HP03_9FIRM Epoxyqueuosine reductase OS=Dorea longicatena OX=88431 GN=queG PE=4 SV=1
MNPTKEFRDYMISQGAALVGIGDLTAVPSSDYPVGIAVAIPLPKHVIKDLQLAPTREYYKLYTTLNDKLNAIVTAGEKYLTGRGYQAYAQTTDRITVDSDNRSPLPHKTVATRAGLGWIGKNCLLVTPQYGSAVRISSLLTDAPLTCDAPVTRSQCGACHACVRYCPAHALKNTLWRSGMPREDIVSVSACYKKQREIMRKSTGIDTDLCGKCFAVCTYTKQYLKQKQ

SEQ ID NO: 76389 - protein, 230 aa, Dorea longicatena
  REGION 1..230: note = tr|A0A174NYF6|A0A174NYF6_9FIRM Epoxyqueuosine reductase OS=Dorea longicatena OX=88431 GN=queG PE=4 SV=1
MNPTKEFRDYLISQGAALVGIGDLTAVPSSDYPVGIAVAIPLPKHVIKGLQLAPTREYYELYNSLSDKLNTIVTAGAKYLTDKGYHAYARTTDQKMTDSDNCIPLSHQTIATRAGLGWIGKNNRLVTPQYGSAVRLSSLLTDAPLTCDTPVTHSQCGACHACVRSCPAHALKNTLWRPGISCENIIAISTCHKKCREIMQKSTGIDADLCGKCFAVCTYTRQYLKQCRDV

SEQ ID NO: 76390 - protein, 307 aa, unidentified
  source 1..307: note = Draconibacterium orientale
  REGION 1..307: note = tr|X5DFV9|X5DFV9_9BACT Epoxyqueuosine reductase; OS = Draconibacterium orientale OX=1168034 GN=queG PE=3 SV=1
MQQQLKQKIQSLGFLNHAILPVSFLEEEEPRLKTWLENNMHGEMGYMNRNIDKRLNPSLLVENAKTIIVVLLNYFPESTQEDPTAPVLSKYAYGTDYHFVMKDKLKDLLQFIQEEIAPCSGRPFVDSAPVLERSWAKKAGLGWVGKNSNLISPEHGSFFFIGELLIDIELPYDDPKLVRDHCGRCTKCIDACPTKAIVAERVVDARRCISYQTIEVRGEMDAGLKGQFENRVFGCDICQDVCPWNLKSEPHNEAGLKPHPKLLTLQKQDWETMERPLFNELFKNSAVKRTGYKGLLRNLKFLKDPGS

SEQ ID NO: 76391 - protein, 308 aa, unidentified
  source 1..308: note = Draconibacterium sediminis
  REGION 1..308: note = tr|A0A0D8JDI0|A0A0D8JDI0_9BACT Epoxyqueuosine reductase OS=Draconibacterium sediminis OX=1544798 GN=queG; PE = 3 SV=1
MLQQLKQKIQSLGFLDHAILPVSFLEEEETRLKTWLENDMHGEMGYMNRNIDKRLNPSLLVENAKTIIVVLLNYFPETTQDDPAAPVLSKYAYGTDYHFVMKDKLKELLQFIQEEIAPCSGRPFVDSAPVLERAWARKAGLGWVGKNSNLISPEHGSFFFIGELIIDTELPYDDPKLVRDHCGRCTKCIDSCPTKAIVAERVVDARKCISYQTIEVRGEMDSNLKGQFENRVFGCDICQDVCPWNLKSEPHNEAGLKPHPKLLTLQKQDWENMERPLFNELFKNSAVKRTGYKGLQRNLRFLGNDEEI

SEQ ID NO: 76392 - protein, 316 aa, unidentified
  source 1..316: note = Draconibacterium sp.
  REGION 1..316: note = tr|A0A2G6R9N9|A0A2G6R9N9_9BACT Epoxyqueuosine reductase OS=Draconibacterium sp. OX=1965318 GN=queG PE=3; SV = 1
MQKAENTGQIIKNKARELGFCDCAILPVDVLTDEKSAYFNWLESGMQGEMSYMERNIDKRFDPALLFENAKTIIVALYNYFPGSRQDDEKAPIISKYAYGIDYHYVLKEKLGQLLTFIQTEIIECVGRPFADSAPVLERAWAKKAGLGWIGKNSNLINLKQGSFIFICELLLDVELPYDEPKEVTDHCGNCTRCIDACPTKAIVADRVVDARKCISYQTIEKRGELDKELLGKFENRVFGCDICQDVCPWNLKAKPTQEPGFNPGKELMSLTRQQWMNMDKDQFNRLFKKSAVKRAGYKGLKRNIEFISTWRVPSD

SEQ ID NO: 76393 - protein, 362 aa, unidentified
  source 1..362: note = Duganella phyllosphaerae
  REGION 1..362: note = tr|A0A1E7X613|A0A1E7X613_9BURK Epoxyqueuosine reductase OS=Duganella phyllosphaerae OX=762836 GN=queG; PE = 3 SV=1
MSLSESNLAELAQRIKHWGVALGFAEIRITDIDLSHAEAGLQAWLDAGMHGEMDYMATHGMLRARPAELVPGTVRVISARMNYLPRDTENDWREREARRLADPGAAVISVYARGRDYHKVLRARLQQLADKVKAEIGDFGYRVFTDSAPLMELPLAEKAGLGWRGKHTLLLSRTAGSMFFMGEFLVDLPLPVDAPTSGHCGQCQACIVTCPTQAILGPGRLDARRCISYLTIELKNAIPLELRPLIGNRVYGCDDCQTACPWNKFAERAVLPDFDQRHGLGDASMIELFGWSAEEFNRKMEGSPIRRIGHERWLRNLAVGLGNAAAAGAKGDAAIVAALEARRDDPSPLVREHVQWALACHA

SEQ ID NO: 76394 - protein, 369 aa, unidentified
  source 1..369: note = Duganella sacchari
  REGION 1..369: note = tr|A0A1M7R8E2|A0A1M7R8E2_9BURK Epoxyqueuosine reductase OS=Duganella sacchari OX=551987 GN=queG PE=3 SV=1
MSLSETNLAELALSIKRWGVALGFAEIRITDVDLSHAEAGLQAWLDAGMHGEMDYMASHGMLRARPAELVPGTVRVVSARMNYLPRDTQTSGEHDWRAREAARLADPDAAVISVYARGRDYHKVLRARLQQLADKVKAEIGEFGYRVFTDSAPVMELPLAEKAGLGWRGKHTLLLSRTAGSMFFMGEFLVDLPLPIDEPTGAHCGQCSSCIMACPTQAILGPGRLDARRCISYLTIELKNAIPLEMRPLIGNRVYGCDDCQTACPWNKFAQPAVLPDFDERHGLGQASMVELFAWTDEEFNRKMEGSPIRRIGHERWLRNIAVGLGNAAAAGAKGDAAIVAALAARREHPSELVREHVEWALAQHRSAA

SEQ ID NO: 76395 - protein, 366 aa, Duganella sp.
  REGION 1..366: note = tr|A0A3E1RSD8|A0A3E1RSD8_9BURK Epoxyqueuosine reductase OS=Duganella sp. BJB475 OX=2233914 GN=queG PE=3; SV = 1
MSLPVTNLAELALSIKRWGVELGFAEIRITDIDLSHAEAGLQAWLDAGMHGEMDYMATHGMMRARPAELVPGTIRVISARMNYLPRDTETGGDNDWREREARRLADPGAAVISVYARGRDYHKVLRARLQQLADKVKAEIGDFGYRVFTDSAPVMELPLAEKAGLGWRGKHTLLLSRTAGSMFFMGEFLVDLPLPVDEPTGRHCGQCSACIDICPTQAILGPGKLDARRCVSYLTIELKSAIPLEMRPLIGNRVYGCDDCQTACPWNKFAQRAVLPDFDERHGLGSASMVELFAWSEEEFNRKMEGSPIRRIGHERWLRNIAVGLGNAAAAGAKGDAAVVAALMARREHPSELVREHVEWALACHA

SEQ ID NO: 76396 - protein, 380 aa, Duganella sp.
  REGION 1..380: note = tr|A0A0Q8QHI8|A0A0Q8QHI8_9BURK Epoxyqueuosine reductase OS=Duganella sp. Root198D2 OX=1736489 GN=queG; PE = 3 SV=1
MVWISPHCKAVSLSQANLDELASRIKAWGLELGFAEVRIADIDLSAAEAGLQAWLDAGMHGDMDYMASHGMKRARPAELVPGTVRVITARMNYLPGAADEGWRERETARLADPAQAVISVYARGRDYHKVLRARLQQLADKVSAAVGEFGYRVFTDSAPVMELPLAEKSGLGWRGKHTLLINRSAGSMFFMGEILVDLPLPVDEPTGAHCGQCTACIDICPTQAILGPGKLDARRCISYLTIEHKGAIPEELRPLLGNRVYGCDDCQTVCPWNKFAQRATLPDFDERHALGSAGMIELFAWTEEEFNRRMEGSPIRRIGHERWLRNLAVGLGNAARMGAKGDPAILAALQARCAHPSELVREHVKWAVLQHQQAGTEACS

SEQ ID NO: 76397 - protein, 334 aa, unidentified
  source 1..334: note = Duncaniella muris
  REGION 1..334: note = tr|A0A2V1ILI4|A0A2V1ILI4_9BACT tRNA epoxyqueuosine(34) reductase QueG OS=Duncaniella muris; OX = 2094150 GN=queG PE=4 SV=1
MTKAEIKELLAGAGVFRSAVAQVCQVDEASADDYRAWISEGKHGEMAYLEKYDDLRSDPRRLLDGARSVISCAFNYHWGNGGATADSSGGDLDGSRVMRPLLWAEYALGDDYHDVVRKRLSEVAEKISSATGAECRVCVDTAPLRERYWAVKTGLGFIGLNNQLILPGAGSRFFLGEILTTLPLEPDEPAAPGSCEGCGRCLKSCPGKALSAGADGRVTLDARRCLSYLTIEYRGELPEDVRLGRHVYGCDECQRVCPHNRVSPLSEIVEFRPREAVVALSAERIAEMTQEEFSAIFRRSAIKRTKLSGLQRNALRIIEEETRRRSREDDGQEG

SEQ ID NO: 76398 - protein, 334 aa, unidentified
  source 1..334: note = Duncaniella sp.
  REGION 1..334: note = tr|A0A4V1D275|A0A4V1D275_9BACT tRNA epoxyqueuosine(34) reductase QueG OS=Duncaniella sp. C9; OX = 2530392 GN=queG PE=4 SV=1
MTKAEIKELLAGAGVFRSAVAQVCQVDEASADDYRAWISEGKHGEMAYLEKYDDLRSDPRRLLDGARSVISCAFNYHWGNGGATADSSGGDLDGSGVMRPLLWAEYALGDDYHDEVRKRLSEVAEKISSATGAECRVCVDTAPLRERYWAVKAGLGFIGLNNQLILPGAGSRFFLGEILTTLPLEPDEPAAPGSCEGCGCCLKACPGKALSAGADGRVTLDARRCLSYLTIEYRGELPEDVRLGRHVYGCDECQRVCPHNRVSPLSEIVEFRPREAVVALSAERIAEMTQEEFSAIFRRSAIKRTKLSGLQRNALRIIEEETRRRSREDDGQEE

SEQ ID NO: 76399 - protein, 300 aa, unidentified
  source 1..300: note = Duncaniella sp.
  REGION 1..300: note = tr|A0A4Z0V8B4|A0A4Z0V8B4_9BACT tRNA epoxyqueuosine(34) reductase QueG OS=Duncaniella sp. TLL-A3 OX=2530391 GN=queG PE=4 SV=1
MDSEDIKRLVTGTGAVAVGIAATAPVGLDAESLYLQWIAAGKHGGMSYLEKYQDVRRDPRLLLEGAESIIVAAFNYYNRDNGKLRWARYALGRDYHEEIRERLDAVATAITITSGAQCRVTVDTAPLRERYWAERAGVGFIGINNQLIVPGAGSWCVLGSIITTLPLDADTPSGRSCDGCMRCVRACPGRALDGKGGMDACKCLSYLTIEHRGEYDATPDRIYGCDVCQEVCPHNATAIPTEIGGFSPRAEILGLGCKDILEMEQSEFSRIFTHSAIKRTKLAGLQRNARMLNQGETQPE

SEQ ID NO: 76400 - protein, 315 aa, Dyadobacter fermentans
  REGION 1..315: note = tr|C6W6W4|C6W6W4_DYAFD Epoxyqueuosine reductase; OS = Dyadobacter fermentans (strain ATCC 700827 / DSM 18053 / NS114) OX=471854 GN=queG PE=3 SV=1
MTTADIVAQERSLFIKAKALEHGFDFCGISKAGFLENEAPRLEKWLSLNHHGAMGYMANHFDKRLDPTKLVEGAKSVISVLLNYYPEERLPEGDDDLKLSKYAYGTDYHYILKEKLAALLASIQEEVGEVNGRIFVDSAPVMDKVWAAKSGLGWVGKHSNLLNREMGSFFFIGEIICDLDLAPDSATGDYCGTCTKCIDACPTDAITGPFVVDGSKCISYFTIELKDAIPEEVQGKFSNWIFGCDICQDVCPWNRFARPHTTPEFNLPKQLSGFSNGNWQEITEEVFREIFRKSPVKRAKYAGLKRNIEFVISGE

SEQ ID NO: 76401 - protein, 313 aa, unidentified
  source 1..313: note = Dyadobacter jejuensis
  REGION 1..313: note = tr|A0A316B3J8|A0A316B3J8_9BACT Epoxyqueuosine reductase OS=Dyadobacter jejuensis OX=1082580 GN=queG PE=3; SV = 1
MTHPDIVRQERSRIVKQKAQEIGFDFCGISKAEFLEQEAPRLEQWLDRAAHGQMHYMANHFDKRLDPRKLVDGARSVISVLLNYYPEHVRSEGPEDLKISKYAYGVDYHYVLKEKMAQLVEAIEVEIGEVQGRVFVDSAPVMDKAWAAKSGLGWIGKNANLINRSMGSFFFIGEIICDLELEPDGAIRDYCGNCTRCLDACPTDAISEPYVVDGNKCISYYTIELKEAIPEDAKGKFENWIFGCDVCQDVCPWNRFSSPHQTPGFTPSIAFMELTDADFIEITSEVFSKVFKNSPIKRTKFSGLKRNIGFVRD

SEQ ID NO: 76402 - protein, 315 aa, unidentified
  source 1..315: note = Dyadobacter jiangsuensis
  REGION 1..315: note = tr|A0A2P8G3Q1|A0A2P8G3Q1_9BACT Epoxyqueuosine reductase OS=Dyadobacter jiangsuensis OX=1591085 GN=queG; PE = 3 SV=1
MTAADIVRQERSRFIKAKALENGFDFCGISKAEFLESEAPRLEKWLSLNHHGAMAYMANHFDKRLDPTKLVEGAKSVISVLLNYYPEERLPEGDDDLKLSKYAYGTDYHYVLKEKLGALLTAIQDEVGEVNGRIFVDSAPVMDKVWAAKSGLGWIGKHSNLLNREMGSFFFIGEIICDLDLAPDSATGDYCGTCTKCIDACPTDAITGPFVVDGSKCISYYTIELKDAIPEDVRGKFSNWIFGCDVCQDVCPWNRFARPHTTPQFNLPQELAGFSNGDWQEITEEVFREIFRRSPVKRAKYAGLKRNIEFVISDG

SEQ ID NO: 76403 - protein, 315 aa, Dyadobacter koreensis
  REGION 1..315: note = tr|A0A1H6TDF9|A0A1H6TDF9_9BACT Epoxyqueuosine reductase OS=Dyadobacter koreensis OX=408657 GN=queG PE=3; SV = 1
MTTEDLVRAERSQFIKSKAAEIGFDFCGISKAEFLEEEAPRLENWLNRNNHGAMSYMANHFDKRLDPRKLVEGAECVISVLLNYYPSERLPEGADDLKLSKYAYGKDYHFVLKEKLQLLLEAIQEEIGEVNGRIFVDSAPVMDKVWAAKSGLGWVGRHSNLLNRDMGSFFFIGEIICDLKLAYDGAIKDYCGTCTRCIDACPTDAITEPYVVDGSKCISYYTIELKDAIPEDVKGKFNNWIFGCDICQDVCPWNRFSQPTKIPEFSLSQELGAFKKNDWEEITEEIFRELFRRSPLKRTKYDGLKRNIDFLKPLQ

SEQ ID NO: 76404 - protein, 315 aa, Dyadobacter psychrophilus
  REGION 1..315: note = tr|A0A1T5C701|A0A1T5C701_9BACT Epoxyqueuosine reductase OS=Dyadobacter psychrophilus OX=651661 GN=queG; PE = 3 SV=1
MTTEDLVRQQRSQFIKARALENGFDFCGISKADFLEAEAPRLENWLNKNHHGAMGYMANHFDKRLDPRKLVDGAKSVISVLLNYYPEEKLPEGPDDLKLSKYAYGTDYHYVLKEKLGALLQAIQEEIGEVSGRIFVDSAPVMDKVWAAKSGLGWVGKHSNLLNRDMGSFFFIGEIICDLDLAYDGAVQDYCGTCTRCLDACPTDAITEPFVVDGSKCISYYTIELKEAIPQEAQGKFDNWIFGCDICQDVCPWNRFSKPHTTKEFTLPESLAGFTNNDWQEITEEVFRELFRRSPIKRTKFDGLKRNIEFVRSSK

SEQ ID NO: 76405 - protein, 315 aa, Dyadobacter soli
  REGION 1..315: note = tr|A0A1G7HA50|A0A1G7HA50_9BACT Epoxyqueuosine reductase OS=Dyadobacter soli OX=659014 GN=queG PE=3 SV=1
MTASDIVRQERSRFIKAKALECGFDFCGISKAEFLESEAPRLEKWLSLNHHGAMAYMANHFDKRLDPTKLVEGAKSVISVLLNYYPEERLPEGEDDLKLSKYAYGTDYHYILKEKLGALLTAIQEEVGEVNGRIFVDSAPVMDKVWAAKSGLGWIGKHSNLLNREMGSFFFIGEIICDLDLAPDSATGDYCGTCTKCIDACPTDAITGPFVVDGSKCISYYTIELKDAIPEDVKGKFNNWIFGCDVCQDVCPWNRFARPHTTEQFNLPKGLAGFSNGDWREITEEIFREIFRRSPVKRAKYAGLKRNIEFVITDE

SEQ ID NO: 76406 - protein, 315 aa, Dyadobacter sp.
  REGION 1..315: note = tr|A0A1Q3PFA8|A0A1Q3PFA8_9BACT Epoxyqueuosine reductase OS=Dyadobacter sp. 50-39 OX=1895756 GN=queG PE=3; SV = 1
MTAADIVRQERSRFIKAKAIESGFDFCGISKAEFLESEAPRLEKWLSLNHHGAMAYMANHFDKRLDPTKLVEGVKSVISVLLNYYPEERLPEGDSDLKLSKYAYGTDYHYILKEKLGTLLTAIQQEIGEVNGRIFVDSAPVMDKVWAAKSGLGWVGKHSNLLNREMGSFFFIGEIICDLELAPDSATGDYCGTCTKCIDACPTDAITGPFVVDGSKCISYYTIELKDAIPEEVRGKFDNWIFGCDICQDVCPWNRFARPHTSPEFNLPAELKGFSNGDWREITEEVFREIFRRSPVKRAKYAGLKRNIEFVTTVE

SEQ ID NO: 76407 - protein, 315 aa, Dyadobacter sp.
  REGION 1..315: note = tr|A0A5B0FGC9|A0A5B0FGC9_9BACT Epoxyqueuosine reductase OS=Dyadobacter sp. UC 10 OX=2605428 GN=queG PE=3; SV = 1
MTTADLVCQERSQFVKMKAREAGFDFCGISKAEFLKDEAPRLENWLKKGSNGAMGYMANHFDKRLDPTKLVEGAKSVISVLLNYYPEKRLPEGEEDLKISKYAYGTDYHIVLKEKLAALMLGISEEVGEVNGRVFTDSAPVMDKVWAAKSGLGWVGKHSNLLNRETGSFFFIGEIICDLELAPDGPVQDYCGTCTRCIDACPTDAITEPFVVDGSKCISYYTIELKDAIPEDVRGKFDNWIFGCDICQDVCPWNRFSRPHATPEFNLSETLSAFSKSDWQEITEEVFREIFKRSPVKRAKFDGLKRNIDFVISSK

SEQ ID NO: 76408 - protein, 356 aa, Dyella japonica
  REGION 1..356: note = tr|A0A075K9N7|A0A075K9N7_9GAMM Epoxyqueuosine reductase OS=Dyella japonica A8 OX=1217721 GN=queG PE=3; SV = 1
MSSVSTSPADYATLALDIKRWARELGFADCGIAGTDLGEDELHLKRWLDDGHHGEMDYMARHGDKRSRPAELEPGTLRVISVRMDYIPPGTRNAWNVLHDAEAGYVARYALGRDYHKVMRNRLQKLAERIHGAIGDFGYRAFVDSAPVLEKALARNAGLGWIGKHTVLIHRSAGSYFFLGELYTNLPLPIDAPASAHCGSCRRCIDICPTQAIVAPYKLDARRCISYLTIELRGSIPEELREPMGNRIFGCDDCQLICPWNKFAQDATEPDFAPRHRLDGAKLVELFGWSEQEFLQRTEGMAIRRTGYEGWLRNIAVALGNAPHSDEVRQALQARADHPSAIVREHVAWALARQSA

SEQ ID NO: 76409 - protein, 356 aa, Dyella japonica
  REGION 1..356: note = tr|A0A0G9H7G2|A0A0G9H7G2_9GAMM Epoxyqueuosine reductase OS=Dyella japonica DSM 16301 OX=1440762 GN=queG; PE = 3 SV=1
MSSVAAPPADYAALALDIKRWALELGFADCGIAGTELGEDEVHLKRWLDDGHHGEMDYMARHGDKRSRPAELEPGTLRVVSVRMDYIPPGTRNAWNVLHDADAGYVARYALGRDYHKLMRNRLQKLAERIHGAIGDFGYRAFVDSAPVLEKALARNAGLGWIGKHTVLINRSAGSYFFLGELYTNLPLPVDAPASAHCGSCRRCIDICPTQAIVAPYKLDARRCISYLTIELRGSIPEELREPIGNRIFGCDDCQLICPWNKFAQDATEPDFAPRHRLDGAKLVELFGWSEQEFLQRTEGMAIRRTGYEGWLRNIAVALGNAPHSDEVRKALLARSDHPSEIVREHVAWALAKHPA

SEQ ID NO: 76410 - protein, 356 aa, unidentified
  source 1..356: note = Dyella jiangningensis
  REGION 1..356: note = tr|A0A328P4R9|A0A328P4R9_9GAMM Epoxyqueuosine reductase OS=Dyella jiangningensis OX=1379159 GN=queG PE=3; SV = 1
MTAAPTTSTDYAALARDIKRWARELGFADVGIAGTDLGDDELHLKRWLDAGHHGEMDYMARHGDKRSRPGELEPGTVRVITVRMDYVPPGTRNAWNVLEDAEAGYVARYALGRDYHKLMRHRLQKLATRIHDAIGDFGYRAFVDSAPVLEKALARNAGLGWIGKHTVLINRRAGSYFFLGELYTDLPLPIDEPASAHCGSCRRCIDICPTQAIIAPYKLDARRCISYLTIELRGSIPEELRAPMGNRIFGCDDCQLICPWNKFAQDATEPDFAPRHQLDGAKLVELFAWSEQAFLQRTEGMAIRRTGYEGWLRNIAVALGNAPTSPDVLASLQSRANDASPIVREHVAWALARHNG

SEQ ID NO: 76411 - protein, 356 aa, unidentified
  source 1..356: note = Dyella jiangningensis
  REGION 1..356: note = tr|A0A023NPD6|A0A023NPD6_9GAMM Epoxyqueuosine reductase OS=Dyella jiangningensis OX=1379159 GN=queG PE=3; SV = 1
MPASPTTSTDYAALARDIKRWARELGFADAGIAGTDLGDDELHLKRWLDAGYHGEMDYMARHGDKRSRPGELEPGTVRVITVRMDYVPPGTRNAWNVLEDAEAGYVARYALGRDYHKLMRNRLQKLATRIHDAIGDFGYRAFVDSAPVLEKALARNAGLGWIGKHTVLINRRAGSYFFLGELYTDLPLPIDEPASAHCGTCRRCIDICPTQAIIAPYKLDARRCISYLTIELRGSIPEELRAPMGNRIFGCDDCQLVCPWNKFAQDATEPDFAPRHQLDGAKLVELFAWSEQEFLQRTEGMAIRRTGYEGWLRNIAVALGNAPTSPDVMESLQSRANDASPIVREHVAWALARHIG

SEQ ID NO: 76412 - protein, 360 aa, Dyella marensis
  REGION 1..360: note = tr|A0A1I2CKB1|A0A1I2CKB1_9GAMM Epoxyqueuosine reductase OS=Dyella marensis OX=500610 GN=queG PE=3 SV=1
MTVMSSSSALAHDYAALAADIKRWARELGFADAGIAGIELGEDEQHLQRWLDDGHHGEMDYMARHGTKRSRPAELEPGTLRVISVRMDYIPPGTRNAWAVLEDADAGYVARYALGRDYHKLMRNRLQKLAERIHAQVGDFGYRAYVDSAPVLEKALGRNAGLGWIGKHTVLINRSAGSYFFLGELYTDLPLPVDEAATAHCGTCRRCIDICPTQAIVAPYRLDARRCISYLTIELKGSIPEALRAPMGNRIFGCDDCQLICPWNKFARDAAEPDFAPRHSLDGARLVELFAWSEEEFLRRTEGMAIRRTGYEGWLRNIAVALGNAPDSSEVIDALRSRAAHPSEVVREHVAWALARHQAT

SEQ ID NO: 76413 - protein, 357 aa, Dyella soli
  REGION 1..357: note = tr|A0A4R0YVL0|A0A4R0YVL0_9GAMM Epoxyqueuosine reductase OS=Dyella soli OX=522319 GN=queG PE=3 SV=1
MTAAPPAHDYAALARDIKRWARELGFADAGIAGTDLGEDEGHLKRWLDDGLHGEMDYMARHGTKRSRPAELEPGTARVISVRMDYVPPGTRNAWDVLDHPEEGYVARYALGRDYHKLMRNRLQKLAERIHAQVGDFGYRAYVDSAPVLEKALARNAGMGWIGKHTVLINRRAGSYFFLGELYTDLPLPIDEPASAHCGTCRKCIDICPTQAIVAPYRLDARRCISYLTIELKGSIPEDLRAPMGNRIFGCDDCQLICPWNKFAQDAQEPDFAPRHSLDGARLVELFAWSEEEFLRRTEGMAIRRTGYEGWLRNIAVALGNAPSGDAIIAALQARADSPSDVVSEHVAWALRRHGAAA

SEQ ID NO: 76414 - protein, 356 aa, Dyella soli
  REGION 1..356: note = tr|A0A4R0YUR4|A0A4R0YUR4_9GAMM Epoxyqueuosine reductase OS=Dyella soli OX=522319 GN=queG PE=3 SV=1
MPTAAHHATDYAALAADIRRWARELGFADAGIAGTDLTQDELHLKRWLDDGHHGEMEYMARHGDKRSRPAELEPGTLRVISVRMDYIPPGTRNAWNVLEDAEAGYVARYALGRDYHKLMRNRLQKLAERIHGAIGDFGYRAFVDSAPVLEKALARNAGLGWIGKHTVLINRHAGSYFFLGELYTDLPLPIDEPASAHCGSCRRCIDICPTQAIVGPYQLDARRCISYLTIELRGSIPEELRAPMGNRIFGCDDCQLICPWNKFAQDASEPDFAPRHSLDGARLVELFGWSEQEFLQRTEGMAIRRTGYEGWLRNIAVALGNAPPSDDVRQALLARADHPSAIVREHVAWALARHPS

SEQ ID NO: 76415 - protein, 356 aa, Dyella sp.
  REGION 1..356: note = tr|A0A1G7YTS3|A0A1G7YTS3_9GAMM Epoxyqueuosine reductase OS=Dyella sp. 333MFSha OX=1798240 GN=queG PE=3; SV = 1
MPATTDTDYAALATDIKRWARELGFADVGIAGTDLGHDEAYLERWLADGHHGEMDYMARHGTRRSRPAELEPGTLRVVSVRMDYIPPGTANAWDVIHDGEKAYVARYALGRDYHKVMRNRLQKLAAKIGERIGDFGYRAYVDSAPVLEKALARNAGLGWIGKHTVLINKRAGSYFFLGELYTDLPLPVDEPASAHCGSCRRCIDICPTQAIVAPYRLDARKCISYLTIELKGSIPEELRAPIGNRVFGCDDCQLICPWNKFAQEATEPDFAPRHSLDGPRLIDLFAWSEQEFLSRTEGMAIRRTGYEGWLRNLAVGLGNAPTTDEVVAALRARTGDPSPVVREHVAWALGRHASAT

SEQ ID NO: 76416 - protein, 356 aa, Dyella sp.
  REGION 1..356: note = tr|A0A3M0FB93|A0A3M0FB93_9GAMM Epoxyqueuosine reductase OS=Dyella sp. YR388 OX=2135665 GN=queG PE=3 SV=1
MSSVAAPPADYAALALDIKRWAQELGFADCGIAGTELGEDEVHLKRWLDDGHHGEMDYMARHGDKRSRPAELEPGTLRVVSVRMDYIPPGTRNAWNVLGDAEAGYVARYALGRDYHKLMRNRLQKLAERIHGAIGDFGYRAFVDSAPVLEKALARNAGLGWIGKHTVLINRSAGSYFFLGELYTNLPLPVDAPASAHCGSCRRCIDICPTQAIVAPYKLDARRCISYLTIELRGSIPEELREPIGNRIFGCDDCQLICPWNKFAQDATEPDFAPRHRLDGAKLVELFGWSEQEFLQRTEGMAIRRTGYEGWLRNIAVALGNAPPSDEVRHALLARSDHPSEIVREHVAWALAKHPA

SEQ ID NO: 76417 - protein, 357 aa, Dyella thiooxydans
  REGION 1..357: note = tr|A0A160MZD2|A0A160MZD2_9GAMM Epoxyqueuosine reductase OS=Dyella thiooxydans OX=445710 GN=queG PE=3 SV=1
MQSPAPAIDYALLARSIKRWARDLGFADVGISGVDLAQDETHLQRWLADGHHGEMDYMARHGAKRSRPDELEPGTQRVISVRMDYAPPDIDRAWSVIEDGELGYISRYTLGRDYHKLLRQRLQRLADRIRAEIGDFGYRAYVDSAPVLEKALARNAGLGWIGKHTVLIHRRAGSYFFLGELYTDLPLPVDTPASEHCGSCRRCLDVCPTQAIVAPYRLDARRCISYLTIELKGSIPEELRAPMGNRIFGCDDCQLVCPWNKFAQATTEPDFAPRHQLDGSKLVELFAWTEEEFLQRTEGMAIRRTGYEGWLRNIAVALGNAPRSDAVRAALLARADHPSDLVREHVAWALTRQDEMR

SEQ ID NO: 76418 - protein, 310 aa, unidentified
  source 1..310: note = Dysgonamonadaceae bacterium
  REGION 1..310: note = tr|A0A2N4S6F8|A0A2N4S6F8_9BACT tRNA epoxyqueuosine(34) reductase QueG OS=Dysgonamonadaceae bacterium OX=2065189 GN=queG PE=4 SV=1
MNFSDEIKQQALAIGFDACGICRAQDSEQGTYYRQWLSAGYQAGMDYLERNVDKRIDPRLLVPGAKSIVSVALNYFPSKFLPDDVPQFAYYAYGRDYHEVVRNKLALLFDFIRQYYPEVNGRFFCDSAPVLERYWAAKAGIGFIGKNTLLIIPGKGSYFFLGELILDLELEYDTPIPQNCGSCRRCIDACPTKAIEQPYVLNAGKCISYQTIENKGDIDAAIQPLLSNNVYGCDICQKVCPWNRFAKPNQTPDFLPSEEFLSLDLAKLQAMDEDSYRHIFCRSAVKRAKFSGLKRNVEAISKTRDNSLLL

SEQ ID NO: 76419 - protein, 274 aa, unidentified
  source 1..274: note = Dysgonomonas alginatilytica
  REGION 1..274: note = tr|A0A2V3PI17|A0A2V3PI17_9BACT Epoxyqueuosine reductase QueG OS=Dysgonomonas alginatilytica OX=1605892; GN = CLV62_1405 PE=4 SV=1
MEKKQTNANLKKQIVRKVKQSGIDVIGFATVDRWEQFGETPQSYFPQSIFPFSKTVIVLGLQIMIPILDTTPSIVYSELYNTTNRLLDDVSYQLSALLNRKGHRAVFFPRDAYGDISVLVKKPEAAFSHVLAAKYAGLGTIGYNHTLLTKEFGPRVRLVSILTDAEIEPDNMLEKELCIKCELCKKCCPTSAFTTTDNLIADMDKYKCAAYHKTLKDDYHYPCGVCIKVCPIGKDRKLYGMTTKKYLNEKEALEKNPQNEQYSSWVHLRSFGSK

SEQ ID NO: 76420 - protein, 220 aa, unidentified
  source 1..220: note = Dysgonomonas alginatilytica
  REGION 1..220: note = tr|A0A2V3PKN5|A0A2V3PKN5_9BACT Epoxyqueuosine reductase QueG OS=Dysgonomonas alginatilytica OX=1605892; GN = CLV62_14016 PE=4 SV=1
MDKKTVKELAKSLGADLVGVAATDRFVDSPAGHSPVDKFPVCKSVIVLGCTFPQETLKLDTVSYTTVRNRMVEKLDSLAEQLATELKKRKIRTKAIKSASGRFVDGGFYGTISLKHAGELAGLGIIGRNYLLCNEKYGNLLWLGAVLTDLELESDSLLNYNFCGNCSLCIDTCPSSAIDGKGNIDQNACRRTCYIVTKGVLDLKCWRCREVCPHKFGFKQ

SEQ ID NO: 76421 - protein, 312 aa, Dysgonomonas capnocytophagoides
  REGION 1..312: note = tr|A0A4Y8L6M0|A0A4Y8L6M0_9BACT Epoxyqueuosine reductase OS=Dysgonomonas capnocytophagoides OX=45254; GN = queG PE=3 SV=1
MSAEISYSDKIKEHALSLGFDACGVCRAEPVENEEKVRLERWIADGYQADMDYLARNTEKRIDPTKLVEGARSIISLALNYYPQERQAEDAPQFAFYAYGKDYHEVMKEKLNQLFDFIKTLVPDVQGRVFSDTAPVMERYWAVKAGLGFIGKNTLLIIPKKGSYFFLGEIMIDRELDYDSPLSLSCGKCTRCLDACPTNALEKPHLLNANKCISYQTIENKGEIAESIKPLLNNRMYGCDICQLVCPWNRYARPHRTEEFNPKAEFLSLDYDSMANMQVEDYQRIFKGSAVKRAKYSGLMRNIKALANNKKL

SEQ ID NO: 76422 - protein, 307 aa, Dysgonomonas gadei
  REGION 1..307: note = tr|F5J0Y2|F5J0Y2_9BACT Uncharacterized protein; OS = Dysgonomonas gadei ATCC BAA-286 OX=742766; GN = HMPREF9455_02999 PE=4 SV=1
MITSAQIKEYALTLGFDACGICRAEEVDLENQEGYKNWIDNSFYAGMDYMARNEDKRCNPALLVEDARSIVCVALNYYPGTKSPEENPQFAYYAYGKDYHDVVKAKLQQLFDFIKSLNPSAEGRSFVDTAPVLERYWAAKAGLGFIGKNSLLIIPKRGSYFFLGELILNLDLEYDKPLSLSCGNCTRCLDACPTKAIVAPRVVDANKCISYQTIENKGEIDETIVPNLNNRFYGCDICQQVCPWNRYSRPHKTEEFNPSQAFLDLSLERLDNLNVEEYQIIFKGSAVKRAKYSGLKRNLEALKRSKK

SEQ ID NO: 76423 - protein, 312 aa, unidentified
  source 1..312: note = Dysgonomonas macrotermitis
  REGION 1..312: note = tr|A0A1M5CB79|A0A1M5CB79_9BACT Epoxyqueuosine reductase OS=Dysgonomonas macrotermitis OX=1346286 GN=queG; PE = 3 SV=1
MNKAAYSTEIKEYALSLGFDACGICRAEPIGDTDKSHLDKWIEDGYQADMDYLAHNTDKRINPTLLVDGAKSIISVALNYYPHERQSEAAPQFAYYAYGKDYHDVMKDKLGKLFSFIKSLLPDTQGRIFCDTAPVMERYWAAKAGLGFIGKNTLLIIPKKGSYFFLGEVILDQELEYDKPLDLSCGKCTRCLEACPTGAIEKPHLLNARKCISYQTIENKGEIDDTIKPLLNNRMYGCDICQQVCPWNRYSKPHRTEEFTPHPEFLAMDYKSLQEMEVGDYQRIFKGSAVKRAKYNGLIRNIKALTENRDQI

SEQ ID NO: 76424 - protein, 311 aa, Dysgonomonas mossii
  REGION 1..311: note = tr|A0A4Y9IQ71|A0A4Y9IQ71_9BACT Epoxyqueuosine reductase OS=Dysgonomonas mossii OX=163665 GN=queG PE=3; SV = 1
MLANKDISLQIKDYAYSLGFDACGICKAEPIEVEEQQHFKDWLSHSYHADMDYMARNTEKRCNPTLLVEGSCSVISVALNYYPETKQPQENPQFAYYAYGKDYHDVVKSKLQMLLDYIKSLEPAAEGRAFVDTAPILERYWAAKAGLGFIGKNSLLIIPKKGSYFFLGELIINLELTYDTPLNLSCGNCTRCLDACPTSAIVKPRVVNASKCISYQTIENRGEIDEQVIPKMNNRFYGCDICQQVCPWNRYSRPHQTAEFNPSQSFLDLSFDRLDNLSVEDYQKIFKGSAVKRAKFTGLKRNLEALRQNLK

SEQ ID NO: 76425 - protein, 311 aa, Dysgonomonas mossii
  REGION 1..311: note = tr|F8WY27|F8WY27_9BACT Epoxyqueuosine reductase; OS = Dysgonomonas mossii DSM 22836 OX=742767 GN=queG PE=3; SV = 1
MLATQDISRQIKDYAYSLGFDACGICKAEPIEVEEQQHFKDWISDSYHADMDYMARNTEKRCDPTLLVEGSRSVISVALNYYPETKQPQENPQFAYYAYGKDYHDVVKSKLQTLLDYIKSLEPTTEGRAFVDTAPILERYWAAKAGLGFIGKNSLLIIPKKGSYFFLGELIINLELTYDTPLDLSCGNCTRCLDACPTAAIVKPRVVNASKCISYQTIENRGEIDEQVIPKMNNRFYGCDICQQVCPWNRYSQPHQTEEFNPSQAFLDLSFDRLDKLSVEDYQKIFKGSAVKRAKFTGLKRNLEALRQNMK

SEQ ID NO: 76426 - protein, 308 aa, Dysgonomonas sp.
  REGION 1..308: note = tr|A0A3D3TIK4|A0A3D3TIK4_9BACT tRNA epoxyqueuosine(34) reductase QueG OS=Dysgonomonas sp.; OX = 1891233 GN=queG PE=4 SV=1
MSLSEQIKQYAFSVGFDAVGICRMEEVDSLTGSHLRGWLKKGYQADMDYLSRNVDKRLNPGLLVEGAKSVICIALNYYPAEKQPETVPQFAYYAYGKDYHEVVKNKLYRLYDFIQSICPQAEGRVFVDTAPVLERYWAAKAGIGFIGKNTMLIMPGKGSFYFLGEIIVNIELEYDKPLSVSCGKCERCQTACPTGAFDTAYCLNSHKCISYQTIENKGDIYKNIIPYMGNNFYGCDICQKVCPFNRFAAPNKVEEFSPSDEFLSLDQNAVGNMTEEDYRRIFKGSAVKRAKFSGLMRNLKALNSKRID

SEQ ID NO: 76427 - protein, 311 aa, Dysgonomonas sp.
  REGION 1..311: note = tr|A0A1M3L4A5|A0A1M3L4A5_9BACT Epoxyqueuosine reductase OS=Dysgonomonas sp. 37-18 OX=1895907 GN=queG; PE = 3 SV=1
MLANEDISRKIKDYAYSLGFDACGICKAEPIEVEEQQHFKDWINHSYHADMDYMARNTEKRCNPTLLVEGSRSVISVALNYYPEAKQPQENPQFAYYAYGKDYHDVVKNKLQMLLDYIKSLEPTTEGRAFVDTAPILERYWAAKAGLGFIGKNSLLIIPKKGSYFFLGELIINLELTYDTPLNLSCGNCTRCLDACPTSAIVKPGVVNASKCISYQTIENRGEIDEHVIPKMNNRFYGCDICQQVCPWNRYSRPHRTAEFNPSQSFLDLSFDRLDNLSVEDYQKIFKGSAVKRAKFTGLKRNLEALRQNLK

SEQ ID NO: 76428 - protein, 325 aa, Echinicola sp.
  REGION 1..325: note = tr|A0A514CEQ8|A0A514CEQ8_9BACT Epoxyqueuosine reductase OS=Echinicola sp. LN3S3 OX=2591634 GN=queG PE=3; SV = 1
MSAMIQEDKHAAIIKRLARELGFDFCGIAKAGFLEEEAPRLEAWLNNHYHGKMAYMANHFDKRLDPTKLVEGATIVVSLIYNYFPEKKLPEGEKDYKIAKYAYGKDYHFVIKDKLKEYLYRLKEEVGDVEGRAFVDSAPVMERQWAEKAGLGWRGKNSLLLNRNMGSFFFIAELIIDLKATPDDPVTKDYCGSCTRCMDACPTDAIVQPGVVDGSSCISYFTIELKDELPSSMKDKFANWMFGCDICQDVCPWNRFSRPHQEPEFLPHPEMEEMSKRDWEEITQETFSKVFQKSAVKRTKLTGLRRNVRFLKESNKEITNGQVED

SEQ ID NO: 76429 - protein, 313 aa, unidentified
  source 1..313: note = Echinicola strongylocentroti
  REGION 1..313: note = tr|A0A2Z4IJ32|A0A2Z4IJ32_9BACT Epoxyqueuosine reductase OS=Echinicola strongylocentroti OX=1795355; GN = queG PE=3 SV=1
MMQEDNNAATIKQLAQELGFEFCGIAEAGFLEEEAPRLEAWLNRNYHGEMAYMANHFDKRLDPTKLVDGAKTVVSLVYNYYPEKKLPEGDKELKIAKYAYGKDYHFVIKDKLKSFLNRLKEEIGDVGGRAFVDSAPVMERQWAQKSGLGWQGKNSLLLNRKMGSFFFLAELIIDLKATPDNPVTKDYCGSCTRCIDACPTDAIVQPGVVDGSRCISYFTIELKEELPTSMKGKFENWMFGCDICQDVCPWNRFSQPHQEPEFLPHPELEEMTRRDWEEITQETFSKVFQKSAVKRTKLKGLQRNIRFLNDDNT

SEQ ID NO: 76430 - protein, 319 aa, Echinicola vietnamensis
  REGION 1..319: note = tr|L0FUX8|L0FUX8_ECHVK Epoxyqueuosine reductase; OS = Echinicola vietnamensis (strain DSM 17526 / LMG 23754 / KMM 6221) OX=926556 GN=queG PE=3 SV=1
MSAMIQKDKHAAIIKRLASALGFTYCGIAKAGFLEEEAPRLEAWLNSKYHGEMAYMANHFDKRLDPTKLVEGAKTVVSLIYNYYPEKKLPEGADDYKIAKYAYGKDYHFVIKDKLKEFLYRLREAVGDVEGRAFVDSAPVMERQWAEKAGLGWRGKNSLLLNRDMGSFFFLAELIIDLEATADDPVTKDYCGTCTRCMDACPTDAIVQPGVVDGSRCISYFTIELKDELPASMKGKFANWMFGCDICQDVCPWNRFSTPHQEPQFQPNPEIAEMTKRDWEEITQETFSKVFQKSAVKRTKLSGLKRNIRFLDDAEGNKE

SEQ ID NO: 76431 - protein, 376 aa, Ectothiorhodosinus mongolicus
  REGION 1..376: note = tr|A0A1R3W3I1|A0A1R3W3I1_9GAMM Epoxyqueuosine reductase OS=Ectothiorhodosinus mongolicus OX=233100; GN = queG PE=3 SV=1
MQHAHNTQDMQALAEQIRQWGRELGFDAVGFCDTDLSAHEQHLLNWLDQGRHGDMQYMARHGTKRSRPEELIPGTLRIISLRMQYFPTAAREPWSVIEDSELAFVSRYALGRDYHKLMRQRLQQLADRIEAVVGPFGYRAFVDSGPVLEKALAEKAGLGWIGKHTNLLSREWGSWFFLGELFTDLPLPLDPAGTEHCGTCNACIEICPTQAIVAPFELDARRCISYLTIENRGSIPEALRPMMGNRIYGCDDCQLVCPWNRRAKLGVEPSFQARHGLDDVALIDLFAWDEATFLKRTEGSAIRRIGHECWLRNIAVALGNAPSTPAVIAALRSRQDHPSELVREHVAWALARHEASADAHSGASSGPDSGTAQASG

SEQ ID NO: 76432 - protein, 354 aa, Ectothiorhodospira haloalkaliphila
  REGION 1..354: note = tr|W8KS74|W8KS74_9GAMM Epoxyqueuosine reductase; OS = Ectothiorhodospira haloalkaliphila OX=421628 GN=queG; PE = 3 SV=1
MPLPPHISPQSLANQIRNWGQALGFDAVGISDTALGEHETHLINWLERGRHGTMDYMQRHGTLRSRPAELVPGTLRIISVRMQYLPARARDAWEVLEQPEAAFITRYALGRDYHKLMRRRLQTLATRIEEAIGPFGYRAFVDSAPVLEKALAEKAGLGWIGKHTNLLSREAGSWFFLGELYTDLPLPVDPPGSEHCGRCRACMDACPTGAIVAPFELDARLCISYLTIEHSGSIPEPLRPLLGNRIYGCDDCQLVCPWNRRAALGVEPDFEARHGLDDVSLVDLFAWDEATFLKRTEGSAIRRIGHERWLRNLAVALGNAGPSGEVVAALEARAGHPSELVREHVAWGLERQAK

SEQ ID NO: 76433 - protein, 374 aa, Ectothiorhodospira magna
  REGION 1..374: note = tr|A0A1H9F4Z5|A0A1H9F4Z5_9GAMM Epoxyqueuosine reductase OS=Ectothiorhodospira magna OX=867345 GN=queG; PE = 3 SV=1
MFRGRRHKNRAACAAPADLPARVGEGSRGFLLSQRIKTWALELGFDRAGICDTDLTTHEAHLLRWLDQGRHGEMDYMARHGTRRSRPEALVPGTLRIISVRMAYWPPQTRDAGSVLHDSESAFITRYALGRDYHKVMRKRLQTLAERIESVTGPFGYRAFVDSAPVLEKALAEKAGLGWIGKHTNLLSRHHGSWYFLGELYTDLPLPLDTPERSHCGRCRACLDACPTGAIVAPYELDARRCISYLTIEHPGSIPEPLRPLMGNRIYGCDDCQRVCPWNRRAKVAVEPDFRARHGLDDVSLVTLFHWDEPTFLRLTEGSVIRRIGHERWLRNLAVGLGNARPSPTIREALMKQLEHPSTWVREHVRWALDRQGQ

SEQ ID NO: 76434 - protein, 354 aa, Ectothiorhodospira marina
  REGION 1..354: note = tr|A0A1H7PSS1|A0A1H7PSS1_9GAMM Epoxyqueuosine reductase OS=Ectothiorhodospira marina OX=1396821 GN=queG; PE = 3 SV=1
MPIPPHLSPQTLADQVKTWGQALGFDAVGITDTDLSAHEAHLLNWLAQGRHGTMNYMERHGTLRARPPELVPGTLRIISVRMPYLPAGARDAWEVLEQSEAAFITRYALGRDYHKLMRRRLQSLATRMEEAIGPFGYRAFVDSAPVLEKALAEKAGLGWIGKHTNLLSREAGSWFFLGELYTDLPLPVDPPGAEHCGRCRACMDVCPTGAIVAPFELDARLCISYLTIEHPGPIPEPLRPLMGNRIYGCDDCQLVCPWNRRAALGAEPDFEARHGLDDVSLVELFAWDEATFLKRTEGSAIRRIGHERWLRNLAVALGNAGPSREVTAALEARAGHPSELVREHVRWALERLAK

SEQ ID NO: 76435 - protein, 354 aa, Ectothiorhodospira mobilis
  REGION 1..354: note = tr|A0A1I4QSJ0|A0A1I4QSJ0_ECTMO Epoxyqueuosine reductase OS=Ectothiorhodospira mobilis OX=195064 GN=queG; PE = 3 SV=1
MDTPDPALQQLAHDIKAWGAELGFDQVGITDTDLAEDEAHLLRWLQAGRHGDMDYMARHGSKRSRPGELVPGTRRIISVRMQYLPPRARDARAVMHDPGAAFLSRYALGRDYHKVLRKRLQTLATRMEAAIGPFGYRAFVDSAPVLEKALAQKAGLGWIGKHTNLLSRRWGSWYFLGELYTDLPLPVDPPGSAHCGSCRACLDACPTGAIVAPWELDARRCISYLTIEHPGPIPEDLRPLMGNRIYGCDDCQLVCPWNRRAAHTRERDFCVRHGLDDPEAIALFAWDEATFLERTAGTVIRRLGHERWLRNLAVALGNAPTGPEVIRALEARRHHPSPLVREHVHWALWRHGAG

SEQ ID NO: 76436 - protein, 354 aa, Ectothiorhodospira sp.
  REGION 1..354: note = tr|A0A161HFK2|A0A161HFK2_9GAMM Epoxyqueuosine reductase OS=Ectothiorhodospira sp. BSL-9 OX=1442136; GN = queG PE=3 SV=1
MPLPPHISPQSLATQIRNWGRAMGFDAVGISDTDLGEHETHLINWLEQGRHGTMEYMERHGTLRSRPEELVPGTLRIISVRMQYLPARARDAWEVLERPEAAFITRYALGRDYHKLMRRRLQTLASHIEETIGPFGYRAFVDSAPVLEKALAEKAGLGWIGKHTNLLSREAGSWFFLGELYTDLPLPVDPPGSEHCGRCRACMDVCPTGAIVAPFELDARLCISYLTIEHAGSIPEPLRPLLGNRIYGCDDCQLVCPWNRRAALGVEPDFEARHGLDDVSLVDLFAWDEATFLKRTEGSAIRRIGHERWLRNLAVALGNAAPSGEVVTALEARAGHPSERVREHVRWALERQTK

SEQ ID NO: 76437 - protein, 351 aa, Ectothiorhodospira sp.
  REGION 1..351: note = tr|H1FZX2|H1FZX2_9GAMM Epoxyqueuosine reductase; OS = Ectothiorhodospira sp. PHS-1 OX=519989 GN=queG PE=3 SV=1
MTTTDLLALTQRIKTWALELGFDRAGICDTDLAVHEAHLLRWLDQGRHGEMDYMARHGTRRSRPEALVPGTLRIISVRMAYWPPRTRDAGSVLDDPEAAFISRYALGRDYHKVIRKRLQTLAERIESVTGPFGYRAFVDSAPVLEKALAEKAGLGWIGKHTNLLSRHHGSWYFLGELYTDLPLPLDEPERSHCGRCRACLDVCPTAAIVAPYELDARRCISYLTIEHPGNIPEPLRPLMGNRIYGCDDCQLVCPWNRRAGVAVEPDFRARHGLDDIDLVTLFDWDEPTFLRLTEGSVIRRIGHERWLRNLAVGLGNARPSPTVREALTRRLEHPSACVREHVRWALDRHGQ

SEQ ID NO: 76438 - protein, 361 aa, unidentified
  source 1..361: note = Ectothiorhodospiraceae bacterium
  REGION 1..361: note = tr|A0A2A4WV30|A0A2A4WV30_9GAMM Epoxyqueuosine reductase OS=Ectothiorhodospiraceae bacterium OX=2026737; GN = queG PE=3 SV=1
  VARIANT 170: note = Xaa can be any naturally occurring amino acid
MTNIAKKTPNWANLAADILQWGQELGFQKLGISDTHLDEAEAHLLNWLREGKHGRMDYMARHGTKRSRPDELEPGTVSVISARLDYLPPQSADPDAILADPDKAYISRYALGRDYHKVLRHRMQKLATRIEQAIGPFGYRVFTDSAPVLEKALAEKAGLGWIGKHSNLLXEQTGSWFFLGEIYTDLPLPTSLPANTKTTNHCGTCTACIDACPTRAIIAPYKVDARLCISYLTIELREAIPVELRPLIGNRIYGCDDCQLVCPWNRFAQPTPETDFLPRHALDDISLLELFAWSEAQFLKRTEGSPIRRIGHECWMRNIAVALGNAPRSEAVITALKNQQQHASPLVREHVIWALEQQSNK

SEQ ID NO: 76439 - protein, 361 aa, unidentified
  source 1..361: note = Ectothiorhodospiraceae bacterium
  REGION 1..361: note = tr|A0A2A4Y4B6|A0A2A4Y4B6_9GAMM Epoxyqueuosine reductase OS=Ectothiorhodospiraceae bacterium OX=2026737; GN = queG PE=3 SV=1
MTNIAKKTPNWANLAADILQWGQELGFQKLGISDTHLDEAEAHLLNWLREGKHGRMDYMARHGTKRSRPDELEPGTVSVISARLDYLPPQSADPDAILADPDKAYISRYALGRDYHKVLRHRMQKLATRIEQAIGPFGYRVFTDSAPVLEKALAEKAGLGWIGKHSNLLAEQTGSWFFLGEIYTDLPLPTSLPANTKTTNHCGTCTACIDACPTRAIIAPYKVDARLCISYLTIELREAIPVELRPLIGNRIYGCDDCQLVCPWNRFAQPTPETDFLPRHALDDISLLELFAWSEAQFLKRTEGSPIRRIGHECWMRNIAVALGNAPRSEAVITALKNQQQHASPLVREHVIWALEQQSNK

SEQ ID NO: 76440 - protein, 384 aa, unidentified
  source 1..384: note = Edaphobacillus lindanitolerans
  REGION 1..384: note = tr|A0A1U7PQ20|A0A1U7PQ20_9BACI Epoxyqueuosine reductase OS=Edaphobacillus lindanitolerans OX=550447; GN = SAMN05428946_2502 PE=4 SV=1
METAQLQREIREFAVSAGIDKIGFTTADPFLEMKNRLRRQQESGFQSGFEKGTPDERTDPSMLMDRPESIIAIAVAYPSKMDNPPKGKKGGRRGMFCRASWGQDYHDVLREKLALLESFILERCPGARLKSMVDTGELVDRAVAERAGIGWSGKNCSIITPEFGSYVYLGEMITNIPFAPDEPIEDGCGDCTLCLDICPTGALIEGGRLNAQRCIAFLTQTKGSLPEEFRTEIGNRVYGCDTCQTICPKNKGRHNRFHAAFEPEPELAKPLLTPLLSLSNREFKERFGHMSGSWRGKNPIQRNAIYALGHFREEAAVPELVRILREDARPYMRGAAAYALGKIASDEAITALGHAETAETDAEALEEIRAAIRNIEDMQKEVPK

SEQ ID NO: 76441 - protein, 373 aa, Edaphobacter aggregans
  REGION 1..373: note = tr|A0A428MNT9|A0A428MNT9_9BACT Epoxyqueuosine reductase OS=Edaphobacter aggregans OX=570835; GN = EDE15_4114 PE=4 SV=1
MSGEWTPEGEAWMRELAMEVGFDAAGVAPIIGTSDGERLDAVRFEAWVEGGRAGEMEYLKRRDERGVLLRSGVQVAMPWARSVIVCALNYNSAAPLSIDGAEDGTGWIARYAWSGKDSESGLLPTDYHNELLGRLRSVEDALRQRYDCETRCYVDTGPLVERSVAAKAGVGWIGKNICLLNQELGSWLLLGVIVTSLRVGEGTNFEVAADRCGSCTRCIDACPTGALVAPREMDATRCIAYLTIEKKGAIPEDLREGMGRQVFGCDICQDVCPWNRRAPVAVKEGMLARPELVNPELEWLAGMDAAEFKRWFKGSPIERTRKKRLHRNVAIAMGNSRDERFLSQLEVWSTCEDPVLAESAVWAIGQILHRDGA

SEQ ID NO: 76442 - protein, 386 aa, unidentified
  source 1..386: note = Edaphobacter dinghuensis
  REGION 1..386: note = tr|A0A495BQI8|A0A495BQI8_9BACT Epoxyqueuosine reductase OS=Edaphobacter dinghuensis OX=1560005; GN = C8E94_0784 PE=4 SV=1
MGECVTGLWATGFRDWVKARAVEAGFDTAGVAPVYGAQSEMGRVDAERFEDWVDAGRAGEMEYLKRRNEQGILLRSGVEVAMPWARSVVVCAVNYNGDGPLSVEPAKKDAGWIARYAWSGRTVGDHLMPSDYHDEMLGRLRGVEAALQERYACETKCYVDTGPLVERAAAAKAGVGWIGKNTCVLNQRLGSWLLLGVIVTSLEVREGEELQVAADRCGSCTRCIDACPTNALVGPREMDASRCIAYLTIEKKGAITEELREGMGRQVFGCDICQDVCPWNRKAPVAGKEGMLTRREMVNPALEWLAGMDAAEFRRWFKGSPVERTRRKRLHRNVAIAMGNSGEARFVPQLEIWSAGEDEVLAESAGWALGRIRVLAEERKEKAGLC

SEQ ID NO: 76443 - protein, 376 aa, Edaphobacter modestus
  REGION 1..376: note = tr|A0A4Q7YQT0|A0A4Q7YQT0_9BACT Epoxyqueuosine reductase OS=Edaphobacter modestus OX=388466 GN=BDD14_1442; PE = 4 SV=1
MSVAWTPELAAWIEKQALETGFDAAGVAPVPEAGSAVAERDAGRFSSWVEAGRAGEMEYLKRRGEDGILVRSAVRAAMPWARSVIVCALNYNAAAPPSIAPAPTGAGWIARYAWSGRTLDNGETVPTDYHEELLGRLHKLEALLKERIPAETRCYVDTGPLVERSMAAHSGLGWIGKNTCVIHQQLGSWLLLGVIVTSISVAPHAVPELATDRCGTCTRCIDACPTEALVAPREMDASRCIAYLTIEKKGEIPEALRAGVGRQVFGCDICQDVCPWNRRAPIAVKQGMEARPELVNPALQWLASLDAAGFRKSFKGSPLERTRRKRLHRNVAIAMGNSHDKSFLSQLEAWTLSEDEVLAEGARWAIRQITESALHD

SEQ ID NO: 76444 - protein, 379 aa, unidentified
  source 1..379: note = Edwardsiella anguillarum
  REGION 1..379: note = tr|A0A076LJ26|A0A076LJ26_9GAMM Epoxyqueuosine reductase OS=Edwardsiella anguillarum ET080813 OX=667120; GN = queG PE=3 SV=1
MTHPLDLHQLAQHIKQWGLSLGFQQVGIGDTDLRAEEAPLQAWLDSGYHGDMAWMARHGMMRARPAELLPGTLRVISVRMNYLPPSAAFASTLKDPTLGYISRYALGRDYHKVLRARLKKLGEMIQAYCGELHFRPFVDSAPLLERPLAAKAGLGWTGKHSLLLNPQAGSWFFLGELLIDLPLPVDTPQAAQCGRCVACITTCPTDAIVAPYKVDARRCISYLTIELEGAIPEALRPLLGNRIYGCDDCQMICPWNRLAPLSEEADFLPRAALHAPSLTALFAWDETTFLRMTEGSPIRRIGYQRWLRNLSVALGNAPYDAHIVALLQQRLGISALLDDHIHWALAQQLQKRAAQAVEVVSSQQRRLIRAVEKGLPRDA

SEQ ID NO: 76445 - protein, 380 aa, Edwardsiella hoshinae
  REGION 1..380: note = tr|A0A376DLV1|A0A376DLV1_9GAMM Epoxyqueuosine reductase OS=Edwardsiella hoshinae OX=93378 GN=queG PE=3; SV = 1
MTHPLDLHQLAQHIKQWGLSLGFQQVGIADTDLRVEEDRLQAWLDQGYHGEMAWMARHGMMRARPAELLPGTLRVISVRMNYLPPNAAFASTLNDPTRGYISRYALGRDYHKVLRGRLKQLGAMIQAHCGGALGFRPFVDSAPLLERPLAAKAGLGWNGKHSLLINPQAGSWFFLGELLVDLPLPVDTPQEAQCGRCVACMTTCPTGAIVAPYTVDARRCISYLTIEAEGAIPEALRPLLGNRIYGCDDCQMICPWNRLAPLSTEADFQPRAALHAATLTTLFAWDEATFLRMTEGSAIRRIGYQRWLRNLSVALGNAPYAAEIVELLTGRLGISPLIDEHIHWALAQQLAKRNALTVEVISNQQRRLIRAVEKGLPRDA

SEQ ID NO: 76446 - protein, 379 aa, Edwardsiella ictaluri
  REGION 1..379: note = tr|C5BDM5|C5BDM5_EDWI9 Epoxyqueuosine reductase; OS = Edwardsiella ictaluri (strain 93-146) OX=634503 GN=queG; PE = 3 SV=1
MTHPLDLHQLAQHIKQWGLSLGFQQVGIGDTDLRAEEAPLQAWLDSGYHGDMAWMARHGMMRARPAELLPGTLRVISVRMNYLPPSAAFASTLKDPTLGYISRYALGRDYHKVLRARLKKLGEMIQAYCGELRFRPFVDSAPLLERPLAAKAGLGWTGKHSLLLNPQAGSWFFLGELLIDLPLPVDTPQTAQCGRCVACITTCPTDAIVAPYKVDARRCISYLTIELEGAIPEALRPLLGNRIYGCDDCQMICPWNRLAPLSEEADFLPRAALHAPPLTILFAWDETTFLRMTEGSPIRRIGYQRWLRNLSVALGNAPYDAHIVTLLQQRLGVSALLDEHIHWALAQQLQKRAAQAVEVVSSQQRRLIRAVEKGLPRDA

SEQ ID NO: 76447 - protein, 379 aa, unidentified; identical to SEQ ID NO: 76444
  source 1..379: note = Edwardsiella piscicida
  REGION 1..379: note = tr|A0A034SZS5|A0A034SZS5_9GAMM Epoxyqueuosine reductase OS=Edwardsiella piscicida OX=1263550 GN=queG; PE = 3 SV=1

SEQ ID NO: 76448 - protein, 379 aa, unidentified
  source 1..379: note = Edwardsiella piscicida
  REGION 1..379: note = tr|A0A411H1E9|A0A411H1E9_9GAMM Epoxyqueuosine reductase OS=Edwardsiella piscicida OX=1263550 GN=queG; PE = 3 SV=1
MTHPLDLHQLAQHIKQWGLSLGFQQVGISDTDLRAEEAPLQAWLDSGYHGEMEWMARHGMMRARPDELLPGTLRVISVRMNYLPPSAAFASTLKDPTLGYISRYALGRDYHKVLRARLKKLGEMIQAYCGELHFRPFVDSAPLLERPLAAKAGLGWTGKHSLLLNPQAGSWFFLGELLIDLPLPVDTPQTAQCGRCVACITTCPTDAIVAPYKVDARRCISYLTIELEGPIPEALRPLLGNRIYGCDDCQMICPWNRLAPLSEEADFLPRAALHAPALTTLFAWDESTFLRMTEGSPIRRIGYQRWLRNLSVALGNAPYDAHIVTLLQQRLGISALLDEHIHWALAQQRQKRAAQAVEVISSQQRRLIRAVDKGLPRDA

SEQ ID NO: 76449 - protein, 380 aa, Edwardsiella tarda
  REGION 1..380: note = tr|A0A2A7U637|A0A2A7U637_EDWTA Epoxyqueuosine reductase OS=Edwardsiella tarda OX=636 GN=queG PE=3 SV=1
MTHPLDLHQLAQHIKQWGLSLGFQQVGIADTDLRLEEARLQAWLDQGYHGEMAWMARHGMMRARPAELLPGTLRVISVRMNYLPPHAAFASTLNDPMRGYISRYALGRDYHKVLRGRLKRLGEMIQAHCGGTLGFRPFVDSAPLLERPLAAKAGLGWSGKHSLLINPQAGSWFFLGELLVDLPLPIDTAQEAQCGRCVACMTTCPTGAIVAPYTVDARRCISYLTIEAEGAIPEDLRPLLGNRIYGCDDCQMICPWNRQAPLSEEADFRPRTALHAPALTTLFTWDEATFLRMTEGSPIRRIGYQRWLRNLSVALGNAPYTAEIVELLTRRLGISALIDEHIHWALAQQLAKRDAHNVEVISNQQRRLIRAVEKGLPRDA

SEQ ID NO: 76450 - protein, 380 aa, Edwardsiella tarda; identical to SEQ ID NO: 76449
  REGION 1..380: note = tr|D4F0L3|D4F0L3_EDWTA Epoxyqueuosine reductase; OS = Edwardsiella tarda ATCC 23685 OX=500638 GN=queG PE=3; SV = 1

SEQ ID NO: 76451 - protein, 390 aa, unidentified
  source 1..390: note = Effusibacillus lacus
  REGION 1..390: note = tr|A0A292YPS4|A0A292YPS4_9BACL tRNA epoxyqueuosine(34) reductase QueG OS=Effusibacillus lacus; OX = 1348429 GN=EFBL_3639 PE=4 SV=1
MPATTIQTAQWELTRQDMEEIREKLGIDMIGTTTAEPFHDVVETLKMYREKGYESGFEHPVIEERIDPEALVPGARSIVAIAMAYHTEQHAELKRPKGIRGALSKYAWGLDYHHVLRDKLNALAAEIGQRIGRPIAYNTSVDTGPMVDRSVANRAGLGWFGKHCSIITEKHGSWVFLGQLVTDVAIEPSPPAPTSLCGDCDLCIRACPTGALVDPYTTDSSKCLSYITQMKGFVPEEFRTRFGTRIWGCDTCQIVCPSNKGVEAGTHEGFLPDQDLSYPDLLELLKMSNREFKRIFGKTAAAWRGLTVMKRNAIIALGNIKDKRATPILIELLKDERPEIRGTAAWALGKIGGEEARRSVEKALSSETDRQVRHEMRWVNGDHVSGGNIL

SEQ ID NO: 76452 - protein, 368 aa, unidentified
  source 1..368: note = Effusibacillus lacus
  REGION 1..368: note = tr|A0A292YS28|A0A292YS28_9BACL Epoxyqueuosine reductase OS=Effusibacillus lacus OX=1348429 GN=EFBL_2951; PE = 4 SV=1
MEPAALSLQQAAEERGFTVGWAPVDLPPSVLNRYHQWIVNGRQAGMGQLARNVEVRLAPRTRLAWARSVLVLAASHAFPDPGKPRGGMRIGRVGRVFWIREQDYIQRRVQPHLEELKEICHHLGGRCRDYVEQGPLSFRSYGELAGLGWIGRNGMLIHPQRGSFFTLAVLLTSFDVEAAPEHPFRCGHCINCISQCPTGALLEDGVVDANRCVSYWTTQHLDLIPVEVWEGMGRWVAGCDECQDVCPWTPKERKFWEGYEPDPELAYPDLSDFLTLSTQHFLNKYAQSAFERVGRPRMARNALIVLANTRDSSYLPLVRQGCVDPSPLVRATTARALVRIGGRKEVERLLSDPEPLVCEEARQALEYE

SEQ ID NO: 76453 - protein, 216 aa, unidentified
  source 1..216: note = Eggerthellaceae bacterium
  REGION 1..216: note = tr|A0A3C1DBN7|A0A3C1DBN7_9ACTN PBS lyase (Fragment); OS = Eggerthellaceae bacterium OX=1972561 GN=DCP91_05655; PE = 4 SV=1
QLVDRAIAARAGLVTYGRNNFAYADELGSFIVFVTIPVDAELECEVHEPRRGCPEGCRKCIDACPTHAMDDDGALDPTRCVLYSNFRPGERKDPAVTALIGQRVHGCDACQVACPRNAHVLAAPKAPDPYLDWLAGSFSLEDMLFCDEGYYEACIRPVMFNYIRDVDIFRQNAAIAMGNSGDARHLPALRRAVAEGSEQVRRFAQIAIEQIGQRMA

SEQ ID NO: 76454 - protein, 364 aa, unidentified
  source 1..364: note = Eilatimonas milleporae
  REGION 1..364: note = tr|A0A3M0BXW2|A0A3M0BXW2_9PROT Epoxyqueuosine reductase OS=Eilatimonas milleporae OX=911205 GN=queG PE=3; SV = 1
MSHAAAPEQTHMPQAVHIRHKALALGFDDVGITRPDAISHAAEGLDAFLADGHHGSMEWMEARADQRANPTVLWPDARSVIVVAMNYGPDTDPRTLLTEKDHAVISVYARGKDYHDVLKKRLKALGRWMAAEFGCALKVFVDTAPVMEKPLAAAAGLGWQGKHTNLVSRSYGSWLFLGVIYTDMPLTGDTPHADRCGACRACLDSCPTKAFPAPYRLDARRCISYLTIEHKGPIPLEFRKAMGNRIYGCDDCLAACPWNKFARTANEAAFHARVELDAPRLDSLMMLDDAGFRQVFSGSPIKRIGRNRFVRNVLIAVGNSGDTSFLPKLEPLLTDDDPVVRETAVWARDQLLQTWSEAQNNESA

SEQ ID NO: 76455 - protein, 282 aa, unidentified
  source 1..282: note = Eisenbergiella tayi
  REGION 1..282: note = tr|A0A1E3ABT0|A0A1E3ABT0_9FIRM Epoxyqueuosine reductase OS=Eisenbergiella tayi OX=1432052 GN=queG PE=4; SV = 1
MEITKKEIKERLYELGADLCGIAGVDRFGEAPEGYHPLDVLPSCQSVIVFACRFPAGTLACKTGVPYTVVRNILSDKMDKMAVQFCADMEKFHVLAVPLRTNGSEMDEKTGRWRSIVSAKHAAQAAGLGTIGRNTLLLTPEYGSMVWLSVILTELALEADELKADICNNCNLCVEICPVNALESPEMNQNACWDYAFGEVKGDWRISCHRCRDICPFLLGTENKAMNRENRSNCETDGKRIPVPSIYNAAEKICSLFPQISSLSSNLVNPYFSYNPFSPLTR

SEQ ID NO: 76456 - protein, 246 aa, unidentified
  source 1..246: note = Eisenbergiella tayi
  REGION 1..246: note = tr|A0A1E3AVG8|A0A1E3AVG8_9FIRM Epoxyqueuosine reductase OS=Eisenbergiella tayi OX=1432052 GN=queG PE=4; SV = 1
MEITKKEIKERLYELGADLCGIAGVDRFGEAPEGYHPLDVLPSCQSVIVFACRFPAGTLACKTGVPYTVVRNILSDKMDKMAVQFCAEMEKFHVLAVPLRTNGSEMDEKTGRWRSIVSAKHAAQAAGLGTIGRNTLLLTLEYGSMVWLSVILTELALEADELKADICNNCNLCVEICPVNALESPEMNQNACWDYAFGEVKGDWRISCHRCRDICPFLLGTENKAMNRENRSNCETDGKRIPVPSI

SEQ ID NO: 76457 - protein, 304 aa, Ekhidna lutea
  REGION 1..304: note = tr|A0A239IXS6|A0A239IXS6_9BACT Epoxyqueuosine reductase OS=Ekhidna lutea OX=447679 GN=queG PE=3 SV=1
MNRKNLIKKLSSDLGFSFCGISKAEFLKEEAPKLEEWLNRGYQGKMGYLENHFDKRLDPTKLVPGAKSVVSLVYNYYPETNYSTKTPKFAKYAYGQDYHFIIKDKLKTFMSQIQEEIGEVNGRVFVDSAPVHERAWAAKSGIGWIGKNSLLLNREMGSFFFLAELIIDLELEPDGPMKDYCGTCTACQDACPTDAIPEPYVVDGSRCISYLTIELKDEIPNEFKSKMEGWAFGCDICQDVCPWNRFSKPHSEPAFKPQGWEELSKQDWQEMTKEVFQKVFKKSAVKRTKFEGLKRNLKFIQIGD

SEQ ID NO: 76458 - protein, 349 aa, Elioraea sp.
  REGION 1..349: note = tr|A0A541C5I8|A0A541C5I8_9PROT Epoxyqueuosine reductase OS=Elioraea sp. Yellowstone OX=2592070 GN=queG; PE = 3 SV=1
MAAADAKALIRAEAARLGFDAVGFTRASLPTEMRARLDAFLAAGRHGTMRWLAERAAQRAHPQALWPEAVSVIALGLSYAPARDPMETLARREVGTISVYARGRDYHDVVKGRLKQLGQFLHARFGADLKVFVDTAPVMEKPLAAQAGIGWQGKHTNLVSRRHGSWLFLGEIYTTLDLPPDPPHPDRCGSCRRCLDICPTDAFPAPYQLDATRCISYLTIEHDGPIPEGLRAAIGNRIYGCDDCLAVCPWNRFATAAREAKLHAREELNAPRLADLARLDDAAFRALFAGSPIKRSGRGRFVRNVLIAIGNSGDPALRPIAQDLAQDPDPVVAEAARWAAMRLAPETVP

SEQ ID NO: 76459 - protein, 311 aa, Elizabethkingia anophelis
  REGION 1..311: note = tr|X5K6F5|X5K6F5_9FLAO Epoxyqueuosine reductase; OS = Elizabethkingia anophelis OX=1117645 GN=queG PE=3 SV=1
MNLAEKNTAIIKQKAKDFGFLACGISKAEFLEEEARSLENWLTRNLNGEMRYMENYFDKRLDPRLLVEGSKSVISFSYNYFPRKVLNTDDNFKISKYAYGKDYHEVIKEILGEFVAELQQEIGEFGFRVFVDSAPVLERAWAKKSGIGWVGKNANLITKGEGSFYFLAEIICELELVPDTPVTDHCGKCRKCIEACPTDAILDNQIIDGSKCISYATIELKEEIPEHFHGKMQNWMFGCDICQDVCPWNRFSKPHQQPLFDPNESLQNFSKKEWKELTQEIFSEIFRKSPVKRTKYAGLKRNIDFLSDKNP

SEQ ID NO: 76460 - protein, 311 aa, Elizabethkingia anophelis
  REGION 1..311: note = tr|A0A290N8C8|A0A290N8C8_9FLAO Epoxyqueuosine reductase OS=Elizabethkingia anophelis R26 OX=1246994; GN = queG PE=3 SV=1
MNLAEKNTAIIKQKAKDFGFLACGISKAEFLEEEARSLENWLTRNLNGEMRYMENYFDKRLDPRLLVEGSKSVISFSYNYFPRKVLNTDDNFKISKYAYGKDYHEVIKEILGEFVAELQEEIGEFGFRVFVDSAPVLERAWAKKSGIGWVGKNANLITKGEGSFYFLAEIICELELVPDTPVTDHCGKCRKCIEACPTDAILDNQIIDGSKCISYATIELKEEIPEHFHGKMQNWMFGCDICQDVCPWNRFSKPHQQPLFDPNESLQNFSKKEWKELTQEIFSEIFRKSPVKRTKYAGLKRNIDFLSDKNP

SEQ ID NO: 76461 - protein, 311 aa, unidentified
  source 1..311: note = Elizabethkingia bruuniana
  REGION 1..311: note = tr|A0A5E8D067|A0A5E8D067_9FLAO Epoxyqueuosine reductase OS=Elizabethkingia bruuniana OX=1756149 GN=queG; PE = 3 SV=1
MNLAEKNTAIIKQKAKDFGFLACGISQAEFLEDEARSLENWLTRNLNGEMRYMENYFDKRLDPRLLVEGSKSVISFSYNYFPRKVLNTDDSFKISKYAYGKDYHEVIKEILGEFVAELQEEIGEFGFRVFVDSAPVLERAWAKKSGIGWVGKNANLITKGEGSFYFLAEIICELELVPDTPVTDHCGKCRKCIEACPTDAILDNQIIDGSKCISYATIELKDEIPEHFHGKMQNWMFGCDICQDVCPWNRFSKPHQQPLFDPNESLQNFSKKEWKELTQEIFSEIFRKSPVKRTKYAGLKRNIDFLSDKNP

SEQ ID NO: 76462 - protein, 311 aa, Elizabethkingia meningoseptica
  REGION 1..311: note = tr|A0A1V3U2T2|A0A1V3U2T2_ELIME Epoxyqueuosine reductase OS=Elizabethkingia meningoseptica OX=238 GN=queG; PE = 3 SV=1
MNLAEKNTALIKQKAEAFGFLACGISKAEFLENEARSLENWLTQNLHGEMRYMENYFDKRLDPRLLVEGSKSVISFAYNYFPRKVLNRNDNFKISKYAYGKDYHEVIKEILAEFVAELQDEIGEFGFRVFVDSAPVLERAWAKKSGIGWVGKNANLITKGEGSFYFLAEIICELELVEDAPVTDHCGKCRKCIEACPTGAILDNQIIDGSKCISYATIELKDDIPAHFHGKMQNWMFGCDVCQDVCPWNRFSKPHQQPLFDPNDSLQNFSRKEWKELTQEVFSEIFRKSPVKRAKYAGLKRNIDFLSDENP

SEQ ID NO: 76463 - protein, 311 aa, Elizabethkingia meningoseptica; identical to SEQ ID NO: 76459
  REGION 1..311: note = tr|A0A376EKE4|A0A376EKE4_ELIME Epoxyqueuosine reductase OS=Elizabethkingia meningoseptica OX=238 GN=queG; PE = 3 SV=1

SEQ ID NO: 76464 - protein, 311 aa, Elizabethkingia miricola
  REGION 1..311: note = tr|A0A0W8ETV3|A0A0W8ETV3_ELIMR Epoxyqueuosine reductase OS=Elizabethkingia miricola OX=172045 GN=queG; PE = 3 SV=1
MNLAEKNTAIIKQKAKDFGFLACGISKAEFLEEEARSLENWLTRNLNGEMRYMENYFDKRLDPRLLVEGSKSVISFSYNYFPRKVLNTDDNFKISKYAYGKDYHEVIKEILGEFVAELQEEIGEFGFRVFVDSAPVLERAWAKKSGIGWVGKNANLITKGEGSFYFLAEIICELELVPDAPVTDHCGKCRKCIEACPTDAILDNQIIDGSKCISYATIELKEEIPEHFHGKMQNWMFGCDICQDVCPWNRFSKPHQQPLFDPNESLQNFSKKEWKELTQEIFSEIFRKSPVKRTKYAGLKRNIDFLSDKNP

SEQ ID NO: 76465 - protein, 311 aa, Elizabethkingia miricola
  REGION 1..311: note = tr|A0A0D5BM80|A0A0D5BM80_ELIMR Epoxyqueuosine reductase OS=Elizabethkingia miricola OX=172045 GN=queG; PE = 3 SV=1
MNLAEKNTAIIKQKAKDFGFLACGISKAEFLEDEARSLENWLTRNLNGEMRYMENYFDKRLDPRLLVEGSKSVISFSYNYFPRKVLNTDDGFKISKYAYGKDYHEVIKEILGEFVAELQEEIGEFGFRVFVDSAPVLERAWAKKSGIGWVGKNANLITKGEGSFYFLAEIICELELVPDNPVTDHCGKCRKCIEACPTDAILDNQIIDGSKCISYATIELKEEIPEHFHGKMQNWMFGCDICQDVCPWNRFSKPHQQPLFDPNESLQNFSKKEWKELTQEIFSEIFRKSPVKRTKYAGLKRNIDFLSDKNP

SEQ ID NO: 76466 - protein, 311 aa, unidentified
  source 1..311: note = Elizabethkingia occulta
  REGION 1..311: note = tr|A0A1T3MYS1|A0A1T3MYS1_9FLAO Epoxyqueuosine reductase OS=Elizabethkingia occulta OX=1867263 GN=queG; PE = 3 SV=1
MNLAEKNTAIIKQKAKDFGFLACGISKAEFLEDEARSLENWLTRNLNGEMRYMENYFDKRLDPRLLVEGSKSVISFSYNYFPRKVLNTDDNFKISKYAYGKDYHEVIKEILGEFVAELQEEIGEFGFRVFVDSAPVLERAWAKKSGIGWVGKNANLITKGEGSFYFLAEIICELELVPDIQVTDHCGKCRKCIEACPTDAILDNQIIDGSKCISYATIELKEDIPEHFHGKMQNWMFGCDICQDVCPWNRFSKPHQQPLFDPNESLQNFSKKEWKELTQEVFSEIFRKSPVKRTKYAGLKRNIDFLSDKNP

SEQ ID NO: 76467 - protein, 311 aa, Elizabethkingia sp.
  REGION 1..311: note = tr|A0A4P8E461|A0A4P8E461_9FLAO Epoxyqueuosine reductase OS=Elizabethkingia sp. 2-6 OX=2575699 GN=queG; PE = 3 SV=1
MNLAEKNTAIIKQKAKDFGFLACGISKAEFLEEEARSLENWLTRNLNGEMRYMENYFDKRLDPRLLVEGSKSVISFSYNYFPRKVLNTDDNFKISKYAYGKDYHEVIKEILGEFVAELQEEIGEFGFRVFVDSAPVLERAWAKKSGIGWVGKNANLITKGEGSFYFLAEIICELELVSDAPVTDHCGKCRKCIEACPTDAILDNQIIDGSKCISYATIELKEEIPEHFHGKMQNWMFGCDICQDVCPWNRFSKPHQQPLFDPNESLQNFSKKEWKELTQEIFSEIFRKSPVKRTKYAGLKRNIDFLSDKNP

SEQ ID NO: 76468 - protein, 311 aa, Elizabethkingia sp.
  REGION 1..311: note = tr|A0A2T5RU24|A0A2T5RU24_9FLAO Epoxyqueuosine reductase OS=Elizabethkingia sp. YR191 OX=2135666 GN=queG; PE = 3 SV=1
MNLAEKNTAIIKQKAKDFGFLACGVSKAEFLEDEARFLENWLTRNLNGEMRYMENYFDKRLDPRLLVEGSKSVISFSYNYFPRKVLNTDDSFKISKYAYGKDYHEVIKEILGDFVAELQEEVGEFGFRVFVDSAPVLERAWAKKSGIGWVGKNANLITKGEGSFYFLAEIICELELVPDTPVTDHCGKCRKCIEACPTDAILDNQIIDGSKCISYATIELKEEIPEHFHGKMQNWMFGCDICQDVCPWNRFSKPHQQPLFDPNESLQNFSKKEWKELTQEIFSEIFRKSPVKRTKYAGLKRNIDFLSDKNP

SEQ ID NO: 76469 - protein, 311 aa, unidentified
  source 1..311: note = Elizabethkingia ursingii
  REGION 1..311: note = tr|A0A1T3FEG2|A0A1T3FEG2_9FLAO Epoxyqueuosine reductase OS=Elizabethkingia ursingii OX=1756150 GN=queG; PE = 3 SV=1
MNLAEKNTAIIKQKAKDFGFLACGISKAEFLEDEARSLENWLTRNLNGEMRYMENYFDKRLDPRLLVEGSKSVISFSYNYFPRKLLDTDDGFKISKYAYGKDYHEVIKEILGEFVAELQEEIGEFGFRVFVDSAPVLERAWAKKSGIGWVGKNANLITKGEGSFYFLAEIICELELVSDTTVTDHCGKCRKCIEACPTDAILDNQIIDGSKCISYATIELKEEIPEHFHGKMQNWMFGCDICQDVCPWNRFSKPHQQPLFDPNESLQNFSKKEWKELTQEIFSEIFRKSPVKRTKYAGLKRNIDFLSDKNP

SEQ ID NO: 76470 - protein, 388 aa, unidentified
  source 1..388: note = Elstera cyanobacteriorum
  REGION 1..388: note = tr|A0A255XRU7|A0A255XRU7_9PROT Epoxyqueuosine reductase OS=Elstera cyanobacteriorum OX=2022747 GN=queG; PE = 3 SV=1
MPSSPPSPSPSDHLRARLRAEALALGFDAVGFAPASVPQRAAEGLRMFLAEGRHGDMGWMEAHADRRADPQTLWPDARSILVVGQNYAPAHDPMGLLDQPDRGAISAYARNKDYHDLMKARLRTLAGVAVAEAAKLGLPQEVKLFVDTAPVLEKPLAVQAGLGWQGKHTNMVSRRFGSWLFLGELFLAADLAPETAEPDHCGRCSRCLTVCPTAAFPAPYQLDARRCIAYLTIEHKGVIPAEFRPLIGNRVYGCDDCLAVCPWNKFASATREAAFFPRIELTAPRLADLAELDDADFRALFAGSPIKRIGRARFIRNVLIALGNSGEPRFAPVVEARLSDDSPLVRGMAVWALGRLAPERLAALDGPEEDEGVRAEWALARQNQPVII

SEQ ID NO: 76471 - protein, 282 aa, unidentified
  source 1..282: note = Elusimicrobia bacterium
  REGION 1..282: note = tr|A0A539EKG6|A0A539EKG6_9BACT Uncharacterized protein OS=Elusimicrobia bacterium OX=2030800; GN = FD126_1801 PE=4 SV=1
MHGVMGYMARAPQDRPFITRWFPAARSVVVCAFSYHDGSKAPSPDASSGRLARYSLPPDYHPELKARMKALLAWYKERVPGGRGKVFVDTSPVLERLYARYAGVGWVGKNAMLLSRDIGSFFLIAGVALDAELELGEPVPEHCGTCTRCLDACPTDAFPAPRVLDASRCIAYFTVEQSRGPIPEAFRQGHGDWLFGCDVCQDVCPWNKFAVRARVFSPALPPTLDLGELAALSPEAFEEKYRGTPLHRTGWTALVLERYAAHPDPVLAEQASWSLSLLDSPG

SEQ ID NO: 76472 - protein, 341 aa, unidentified
  source 1..341: note = Elusimicrobia bacterium
  REGION 1..341: note = tr|A0A1F9YFU5|A0A1F9YFU5_9BACT tRNA epoxyqueuosine(34) reductase QueG OS=Elusimicrobia bacterium RIFOXYD12_FULL_66_9 OX=1797972 GN=A2506_10760; PE = 4 SV=1
MSPAELAAALKKRALEDGADLAGIAAAGPSPGSAAYDEWVSKGMNATMDYLARNMSSRHDIRAWFPPARSVLMCGFSYGQSSTPARTTAGSGRLARYAVREDYHPLLKAKMSSLLDWLRTIVPDVHGLPFCDTSPLLERSYALSAGLGWQGKSAMMIAPRLGTYFLIAGLALDLELPQDTASRDHCGSCRLCLDACPTDAFAGPRVLDAAKCVAYLTIENRGPVPEALRPGVGDRVFGCDICQEVCPWNRFEKPGRLLPEPREPLDIPLEELAALDAAAFRSRFRDLPVSRAKRRGLLRNVLLSMGNSGLARLRPLLEGFAADPDDMIAEVARWSLARLPG

SEQ ID NO: 76473 - protein, 371 aa, unidentified
  source 1..371: note = Emcibacter congregatus
  REGION 1..371: note = tr|A0A2G4YRH6|A0A2G4YRH6_9PROT Epoxyqueuosine reductase OS=Emcibacter congregatus OX=2043170 GN=queG; PE = 3 SV=1
MTDPAAAKTHIIDTAKAAGFDVVRITGPDGLDPNAAHFFEFLDLERHGEMAWMRDKADRRSDPRTLWPDVKSIILLAMNYSPAQNPLDTLAHKDRGNISVYARGKDYHDVVKKKLKQVARDLHRQFDAEVKVFVDTAPVMEKPLAAKSGLGWQGKHTNLVSREFGSWLFLGSIFTTLDLPADPPGRDSCGSCRACLDICPTKAFPAPNQLDARRCISYLTIEYKGHIAEEFRKPMGNRIYGCDDCLAVCPWNKYAKKLVEPAYLPRLELAFPALSDLVELDDAGFRQVFSGSPIKRIGRTWFIRNVLIAIGNSADRTLIPKVEQQLTDPSPHIRAMAVWALRQLCDQDQWRAHRERSINQETDPDVRLEWH

SEQ ID NO: 76474 - protein, 369 aa, unidentified
  source 1..369: note = Emcibacter nanhaiensis
  REGION 1..369: note = tr|A0A501PCP0|A0A501PCP0_9PROT Epoxyqueuosine reductase OS=Emcibacter nanhaiensis OX=1505037 GN=queG; PE = 3 SV=1
MEQPESHISRLARDAGFDTVAITTPDGMARAAGHFDQFLKAGRHGVMAWMADKADRRKSPLTLWPDVRSIIMLGMNYGPAHDPLERLDRRETGNISVYAKGHDYHDIIKKKLKQVARQIHRTYDAEVKVFVDTAPVLEKPLAAKAGLGWQGKHTNLVSRSHGSWLFLGSIFTTLDLKADNPEKDHCGSCRNCLDSCPTGAFPAPYQLDARRCISYLTIEYKGHIPAEFREAMGNRIYGCDDCLAVCPWNKFARRARENRLFPRPELEAPDLADLVELEDQDFREIFSGSPIKRIGRDYFIRNVLIAIGNSGNSACLPQIERKLAEQNAVIRSAAVWALRRLAEEETFAALRQQYMDREEDGIVREEWQK

SEQ ID NO: 76475 - protein, 315 aa, Empedobacter brevis
  REGION 1..315: note = tr|A0A511NFF9|A0A511NFF9_9FLAO Epoxyqueuosine reductase OS=Empedobacter brevis NBRC 14943 = ATCC 43319; OX = 1218108 GN=queG PE=3 SV=1
MHLPTEEHIKIKWSQRIKDKAEALGFISCGIAKANFLEDEAPHLESWLHNNYQGEMHYMENHFDMRLDPRLLVEGAKSVISLAYNYYQNLNRNPNSYKVAMYAQGEDYHFVVKEKVRELLDFIQDEIGEVNGRAFADSAPILEHAWARKAGIGWVGKNSLTLSKQKGSFFFLSELIVDLDLAYDSPIETDHCGKCTRCIDACPTEAILPNKTVNGSQCISYFTIELKEQIPAEMKGKFDDWIFGCDVCQEVCPWNRFSLPTQENRFTGHRKINEFSKKDWEEITEDVFREVFRKSPVKRTKYDGLKRNIDFIKSL

SEQ ID NO: 76476 - protein, 315 aa, unidentified
  source 1..315: note = Empedobacter falsenii
  REGION 1..315: note = tr|A0A376GKE0|A0A376GKE0_9FLAO Epoxyqueuosine reductase OS=Empedobacter falsenii OX=343874 GN=queG PE=3; SV = 1
MLLQTEEHIKIKWSQCIKEKAEALGFISCGIAKADFLEEEAPHLEAWLKNDFHGEMQYMENHFDMRLDPRILVEGAKSVISLAYNYYQNLDRNPNSYKVAMYAQGEDYHFVVKEKVRELLDFIQEEIGEVSGRAFTDSAPILEHAWAKKAGIGWVGKNSLTLSKQKGSFFFLSELIIDLDLAYDSPIETDHCGKCTRCIDACPTEAILPNKTVNGSQCISYFTIELKDQIPTEMKGKFDDWIFGCDVCQEVCPWNRFSLPMKETRFVGHDKINQFSKKDWEEITEVVFREIFKKSPVKRTKFDGLKRNIDFVKSL

SEQ ID NO: 76477 - protein, 313 aa, unidentified
  source 1..313: note = Empedobacter falsenii
  REGION 1..313: note = tr|A0A3R8US53|A0A3R8US53_9FLAO Epoxyqueuosine reductase OS=Empedobacter falsenii OX=343874 GN=queG PE=3; SV = 1
MLLQTEEHIKIKWSQRIKEKAEALGFISCGIAKADFLEEEAPHLEAWLKNDFHGEMQYMENHFDMRLDPRILVEGAKSVISLAYNYYQNLDRNPNSYKVAMYAQGEDYHFVVKEKVRELLDFIQEEIGEVNGRAFTDSAPILEHAWARKAGIGWVGKNSLTLSKQKGSFFFLSELIIDLDLAYDSPIETDHCGKCTRCIDACPTEAILPNKTVNGSQCISYFTIELKDQIPTEMKGKFDDWIFGCDVCQEVCPWNRFSLQTKETRFVGNEKINQFSKKDWEEITEDVFRKIFNKSPVKRTKFDGLKRNIDFVK
